United States Patent Application Publication US 2026/0103690 A1 - sequence listing, part 53

SEQ ID NO: 255106 - protein, 348 aa, unidentified
MKKITITGIDIAKNVFQLHAVGSDGTVVLRRQLRRGQVLGFFAKLDPCLIGLEACATSHYWAREFQKLGHDVRLIPPIYVKPYVKRQKNDAADAEAICEAVQRPTMRFVAVKSAEQQGVLMLHRARELLVGQRTALINALRGHFAEFGIVVAQGPQHVGALVQRVMEEQDASLPHPMRTAFASVVAALLNLGGEIGRLDKAILASHRRDQTSVNLATIPGIGPLIASCLSASVPDARRFACGREFAAYLGLVPKQNSTGGKPRLGRISKMGNRHLRTLLVVGAHAALYRMKSGKTQSRLADWARVLLAKKPFKLVAVALANKMARTAWAIMAKKTSYNPGFGRPLEAA

SEQ ID NO: 255107 - protein, 325 aa, unidentified
MVKNYIGIDVGSRKLDLSILQNGQPVSTILPNTLSAINAWASQLNATDHCVFEATGVYSRNLEYVLSESNLVFSKVNPSKIKGFMSASGKLQKSDKQDAHRIRQYGELFNPDQSLALKAAELERKRLAQAMMALEKQKHWLENQIHVLEHEPIAIPILIQGYQQLIQAIEEQQGAIKTRLNQFATPEEEHAKELMQTIPGIGKGTANALALSTQCFEHFDNDKQVVKFLGLAPVEAHSGTSVKRRLGINRTAVPQVRAILYMAATAAIRYNPRSKELFDRLRASGKPPKVAKVAVMHQLVRWAFAVVKSGKEYDPKLDKSSQKNN

SEQ ID NO: 255108 - protein, 355 aa, unidentified
MTDVKYIGMDVHQASISIAVLDGGGALLMQSTMRTQACTLREFLRGLEGTLYVTFEEGTWSAWLYDLLSPHVTQAIACDPRHNAWLKSGNKSDKIDARRLAELLRAGMLKPVYHGQRNAHRLKELSRSYLTLVHDSPRVMNRIKAIYRSQGIRCAGQRVYSLRYRVNWLEQLREPGLRQRAALLYQQLDGVQTLRKQARRALLAASRKHPAHRLLLSVPGLGLIRVALLLALMQTPHRFRSKRQLWAYAGLALVPRTSADYRLVHGSLERSRKPIAIRGLNQNHNHDLKEIFKSAALRACRLPGPWRDSFTQRVEQGMKPELARLTMARKLAALTLVLWKKGEPYNPEKLIMQAA

SEQ ID NO: 255109 - protein, 389 aa, unidentified
MKIYVGIDIAKLNHFAAAISSDGEIIIEPFKFTNDADGFQLLVSKLESFDKNSIIIGLESTAHYGDNLVRYLVAEFYQVCVLNPIKTCQMRKNNVRKTKTDKVDTFVIAKTLMMQDNLRFVSFFDLDMMDLKALGRFRQKTIKQRTRLKIQLTTYVDQVFPEIQYFFKSGLHQHAVYALLKEAPSPKEIASMHMTHLANLLKVNSHGHFTKEQAKELRILAQKSVGANDSAISIQITQTIQQIELLDSQLEKIEAEMTDIMKFNDSVIMTIPGIGYINGGMILGEIGDIHRFSNPNKLLAFAGLDPSVYQSGNFQAKTTRMSKRGSRVLRYALVNAAWNVVRNNATFKAYYDAKRAEGRSHYNALGHCAGKLVRVIWKMLTDEVEFNLE

SEQ ID NO: 255110 - protein, 347 aa, unidentified
MRFYNNQHNYYCGIDLHARLLYVCILDSLGNKVLHKKIDADPDALLELITPYQDNIVIGVECMHCWYWVSDLCLDYAFDFVLGHALYMKAIHGGKTKNDRIDSYKIASLLRGGNFPIAYVYPKAMRATRDLLRRRTKIMRHGADLKAHVANTFSQYNQQSHNVQLRYPCAREQVRNQFDEPSINRSIDMDLNVIAFYTKELASVEHFIEKSAKQHSAQDYNLIQTVPGIGRILALTILYEIGNIERFPSVQNFASYSRLVKCKAESAGKQKGTNGNKIGNAHLKWAFSEAAVLYLRSNEPAKKYIQRLQKRMSKAKALSALAHKLGRCVYFMLRDKTVFDEKRFLPQ

SEQ ID NO: 255111 - protein, 355 aa, unidentified
MDEQRVVVGGVDTHKDMHFAAVVDDQDHVIGNQCFPSTRHGYKQMLAWLRSFGELARIGVECTGTYGAGLLRYLQKAGVTVLEVTAPDKHDRRKRGKDDTIDAENAAHAALAQVRTVTPKTRDGMVESLRVLKACRKTAIAARRVALQLIQNNIISAPDELRESLRTLTRMQLIRMLAAWRPDLSDYRNLTSAYRIALKSLGRRYLELHDEIADLDAMIAALVDELAPELIAQNSIGYESASQLLLTAGDNSERLQSESSFAALCGVSPVPASSGKVSRHRLNRGGDRAANSALHIIAIGRLRTDARTKAYVTKRLNEGHSKLEAIRCLKRYIAREVFYIIQRRQREINATKIAT

SEQ ID NO: 255112 - protein, 347 aa, unidentified
MKFYTTFHKYYCGIDLHARILYVCILDERGNKVVHQKIKADKTELLKLISPYREDIVIGVECMHCWYWVSDLCAEQDIDFVLGHTLYMKAIHGGKAKNDKIDSYKIASLLRGGNFPLAYNYPTNMRSTRDLLRRRTRLVQHGAQLKAHIVNTNSQYNYPPLELHMKNKCVRQEFQTRFDDQAVQRNVNFDLAILDAYAEELKKLEYYLESKAKKHQPNYYAQLRTIPGIGLILAMTILYEIGDINRFESVQKFASYCRLVKCKAESAGKTYGTSGNKIGNGHLKWAFSEAAVLYLRGNDKARRDLNKLQKRMSKAKALSVLAHKLGRCVYFMLKNKTVFDDERFLKS

SEQ ID NO: 255113 - protein, 343 aa, unidentified
MQVSTIGLDLAKQVFQVHGINTDGTIVLRRRLRRSEVLKFFSMLPGCLIGIEACATAHHWARELSRLGHQVKLIPPSYVKAYVKRGKTDAADAEAICEAVSRPSMRFVPLKSVEQQSALVLHRSRDLLVRQRTMLVNAVRGHFAEFGIVAPQGVGRVGELAALLIEDDATTLPPLARQALRALLAQLHALDQQIASLEAAVIASHRDNEASRRLASIPGVGPITASAIVASVADAHQFKSARHFAAWLGLTPRSHSSGGKERLGGISKQGHPYLRRLLVTGATSVIRYARKKAPGEGGWVKALLARRPARLVSVALANKMARIVWALLVRGTTYQAPGVPTAA

SEQ ID NO: 255114 - protein, 353 aa, unidentified
MKVVYPICCGVDVHKTFLVATIITAQGITPHYSKKRFSTFNNSILQFKQWLIDNDCFDVCMESTGKYWIPIFNLLEDTIHVTIANPKWVKAVKGNKDDTKDSKWIGDLFRLGLVPGSYIPKKPIRILREYTRYRSKLVACKSSEKNRFQNAFTVCNVALDAVVSDMFGKSASSITDYLISTDSFDPKYCSSLLQRSLKKKADTVVESIEGYQMTKEQKERIVMVRSHLEFIHQSIATLDEKLEKMVAPYESAITLLCTIPGIGRTSAITIISEIGTDMSQFANSKRLCCWAGLTPGNNESAGKKKSVRITRAGVYLKPALVQVAHAAVKSNIAPYYRVKYERISKRRGKKRAT

SEQ ID NO: 255115 - protein, 430 aa, unidentified
MKSNTQNAKIEAITEKTLVLGIDVGSETHYARAFDYRGIEYSKKPFKFSNTEAGFVTFKEWILDLKERHEKDKVVPGMEPTGHYWFNLGKFLQDNEMKPVLVNPHHVKKSKELDDNNPTKNDRKDPKVIAGLVREGRYMIPYLPDGVYADLRTASNIRFQLQAELTRIQNRISRWFNIYFPEYKTVYGKPDAKSGMLILKAAPLPEDILTLGIDGVNQIWRDAKLRAVGKARAKTLIEAAEHSVGSKEGAVAARMEIRMLLEDYESRNTRLQEVMVLIEELVKGIPMAEKLLEIKGVGIRTVSGFLAEVGDISRFNNPKELQKLAGLALVENSSGKHKGETTISRRGRKRLRYLLFEVAMSLVSKNQEFRELHNYYTTRRLNPLKKMQSLMAIAAKLIRVFYAMLTKGVDYDPKKMVSDIKRPAVYLQAA

SEQ ID NO: 255116 - protein, 335 aa, unidentified
MEETSICVLDKNGNIIREGAVATEPDDIAAFLNEFKDTLKRAGLEAGALTPWLCQELLAAGIPAICIETRHAKAAMAAQNVKTDRNDARGIAHMMRTGWFKAVHVKSTDAQKLRVLIGNRRCLLDKRLDIDSRIRGTIKAFGLKVGKTSVGTFEARVRSLIEDDAQLSACLEPMLQARAALLEQFKILDKAIADIVRADDVCRRLMTIPGVGPLTALAFRTGIDNPARFVKSASVGAALGLTPRKYASGQIDYDGRITKCGDALLRTHLYEAAKVLLSRVTKWSSIKAWGLKIARRSSMKNACVAVARKLALVMHRIWVDGTEFEWGNEPKTAAA

SEQ ID NO: 255117 - protein, 324 aa, unidentified
MIDGILGIDVCKNTLDVSISSYAKVRTKSFTNSPDGWRHLLDWLIAQKIQRVHACLESTGRYSLGIACALYEADHVVSIINPAQIRDFVRTKLGRNKTDGVDASHIREYCELFKPSPWAPPSEAHRRLGELQTIRSGIIAGLTEWKNRRNSGIVDAEAQALADATISHFTSQLGAVDKAIALTIDNDCDLRSKRDLLLSISGVGETLAGVVLAELPGPDVLRSSAEVVAYAGLNPRRHQSGTCIDRATRISKIGNAVLRAALYMPALSAMRYNSAIVALVTRLKSRGRLKPKQIVVAAMRKLLVLCFGVLKTGRPFDAAIAMGG

SEQ ID NO: 255118 - protein, 320 aa, unidentified
MSPTPKQEVHVGIDVSKRTLDVCLLPQGESFVLTNDQEGVDQLLSHLEGVGPELVVLEATGRFERLAATSIASAGIAVAVVNPRQARDFAKAIGQLAKTDKIDAFVLARLARAVEPSPSVLPDAEARLLQAILARRRQLLSMLTAENNRLQMACEGALAKRIRAHMKWLEKEISRTDSDLEEAIEASASFKENESLLSSVPGVGPVLARTLLAELPELGKLTHKRLCALVGVAPFNRDSGQRRGKQEVWGGRASVRGALYMGALVATRHNPTIKGFYKRLVAAGKPKKVALVACMRKLLSILNALMRDRAVWKCPHTLTP

SEQ ID NO: 255119 - protein, 414 aa, unidentified
MEIVHGRCAGMDVSKRDAKVCVRVAGRGRRKTVETVRTWASTTNAILRLREHLITEQVTLVVMEATGDYWKPFYYLLEDAGFEVMLVNARQVKNLPGRKSDVSDATWLAQLGAHGLVRGCFVPPAPIRELRDLTRARTMLTRERGREIQRLEKVLEDAGIKLSSVASDITGVSGRLMLQALVEGQRDPALLAELARRRLRAKIPALTEALTGRFSEHHAFLTSMYLEVIDQRTRQIEELNARIEVAMEPYQSFCGLIGTIPGIGPRCMEVIVAETGADMSIFSTAAHLASWAGTCPGSNESAGRVKSTATRPGNAYLKGALGAAALSVSHTHGTYLSAKYKRIAARRGPKKALVAVEHAILTAIWTMAHTGALYDDPGADYFTRRDPERLKQHALSQLQRLGYDVTLNAAAATA

SEQ ID NO: 255120 - protein, 387 aa, unidentified
MYYVGIDIAKLNHFASVLSVDGEVLVKPFKFTNDNDGFCKLLSALASYERDSLIIGLESTAHYADNLVEFLVSKRYQVCVINPIQTSTMRKNNIRKTKTDKVDTLVIARTLITQPHRFFSQEDIDLMHLKNLGRFRQKNIKERTRLKIQLTAYVDRVFPELQYFFKSGLHQKAVYALLKEAPTPELIASMHLTHLAHLLEVSSHGHFNKEQAKELRILAQKSVGSSDRALSLQVTQSVEQIELLDRQIKDVESQMTEIMLGLDSVIMTIPGIGYVNGGMILGEIGDIHRFRKPCQLLAFAGLDPSVYQSGNFNASHTRMSKRGSRVLRYALINAAHNVVMNNQTFKAYYSAKMAEGRTHYNALGHCAGKLVRVIFKMLTDDVAFNLE

SEQ ID NO: 255121 - protein, 323 aa, unidentified
MQGKVSFQEDAMPVVYAGVDVSKEWLDVHLHPLGESRRFSNDKTGIRQLKRLLARHQPKSIVMEATGKFHRPAHRSLWLDGFAVAVVDPLRARMFARACGYLAKTDRLDARFLALLAESLRPPADTPPSPHIEALQELVNARSAAKCDITALQNRSKTATTALLRGELNRLVRRLEQHVERLDKEIERRVGEDPQLYRKAEILTSIPGIGRVTALALMAGMDELGSCSGKQAAMLAGLAPIANDSGARTGRRSIRAGRPAPRRALYMAALSACRYNPALARFADTLKAAGKPAKVILVAVMRKLLVLANCLLSHDRLWTPNPP

SEQ ID NO: 255122 - protein, 356 aa, unidentified
MSQITTVGVDLAKEVIVVCAGDAQGRSVYFKQFSFAGFAEWAAKLAPCAFGMEACSSAHHWARFLSEHGHMAKLMAAEFVAPFRKSQGAKNDRNDAQAILTAVRQPDMRFVTVKSVDQQAMLAWHRARAGFGEERKALLNRTRGLLAEFGVWLGRSSAVLIRHLPQLAQDERLPTRFRPILANALSHLRNIEQCIADCDAEIHNHVRHSEQAQRIQALTGIGPQTASALIATVSNPRDFKNGRQMAAWSGLVPRQNSSGGKQRLGVITKRGDSYLRGLLTQGARSTLQVALKREPLKRSRLEQWIIDLHGRVGYHKTLVAIANKHVRIIWAILANGESYDPNAWRRHAPTRNAVSA

SEQ ID NO: 255123 - protein, 364 aa, unidentified
MNKCHSNTELSSHEGTRCQFNGGTGAIKLGIDVHQDFYVVVVQEGGANPKPPQRFRKQAFLHWAAKLKGQAREVYAVYEACGFGFTLQRQLSALWIQCHVVCPQKLDEQNRRVKTDGLDAKALCLKLDRFVEGNRCALALVRVPTEEEEQLRAIHRQREQLVKARKQLEAQGRSLMVNHGIEPVKSWWKQGNFAALQVPTWMKGLLQNSQPILLGLQEKIAALTIQLQSAAAPRQPRGLGLMTSVIIDREIGDWRRFSNRRQIASYTGLCPGEYSSGQTRLQSCVTKHGNPRLRAALVELAWRLVRFQPNYKPIVKWRATLAKGALATGAARKKAIVAVARQLAIDLWRIKTGRLRPEELGLIN

SEQ ID NO: 255124 - protein, 400 aa, unidentified
MIAVGIDVSKYKSTVAIISNTGEILLPPKVYTHTYSALLSLVSLLKKQKDDIRIVMEATGHYHSPILKLLLEHHFFVSVVNPYIIKKYNDNNLRKVKTDKQDAIRLAFYALEKSYCLNAYVPVGEKYADLKFLYQQYTQRIHIIQKEKINLCHLLEESMPGLYDMLSTSVRNPSKNLLYSFVKRFKSFNRIKRMGKERFLNSYFKMAAEIGSRRRKNYALDIYEMAKDCIATGSTEPYSTMAQEECLRSLILAEEAANRLCEQMNSIANTLPEYPLVRSMYGVGDKIAPQLIALIGDIRKFKSGKALNAYAGNDAPPYQSGQFESKNRHISKRGSTELRKVCFEIMCCIKVHKSPEDPIYKFMQKKETEGKAKKVAIMAGINKFLRIYYARVSEVYQKAL

SEQ ID NO: 255125 - protein, 342 aa, unidentified
MTIVAGFDVHRAQITFDALDTDTGELRRGRIDSTPAAVERWIGRLSGDEVHVALEACTGWLFVARALQRAGAVAHLAEPVETRALRGRKRRAKTDREDARWLRQLLGEGRLPESWIPPEHVREWRSRARLRKALLDERTRWLQRIRATLFHHGVDGAPERLRTGDGREFLAQLELPADARERIEIALEMVDSLERQLRPLEAELRKLARRQAGCRALMGLYGMGELTSLVTLTELGDVQRLSASRKAVRMAGIDIGVHRSDRRTRVGRLNRQGSPQLRWALYEAAQSACRPSSPDRKDYLALKARGLSHTRASLTLARKLARRSFHVLSPLGPDALEPITTA

SEQ ID NO: 255126 - protein, 365 aa, unidentified
MGMLAERVDHVIGVDTHRDSHSAAIVVARTGQVLIDRTIAADAFGYKRLLRFARMHATGRRVWAIESSGSYGSGLATFLLAHDEWVVEVDRPARPARRNGAKSDELDAVRAAHEALGREHLAQPRRRGDREAIRVLLVTRRGAMRARTKAINHLKALIVTAREELRHQLRNIPTDELVHRCARLRTLPSHSDEHRATVIALRHTARRVLMLEAEANDLETELERLVKRAVPMLLDEIGVGPISAAQLYCSWSHPGRLRNDGAFAMLGGSAPIPASSGQTVRYRLNRGGDRQLNCALHTIVLTRLKHDPATRAYAARRAAEGKTPREIKRCLKRYVARHLFRVLEAAGPSSHTARPQRARTLGICS

SEQ ID NO: 255127 - protein, 334 aa, unidentified
MENIALIGIDLGKNSFHIHCQDRRGKAVYRKKFTRPKLIEFLATCPATTIAMEACGGSHFMARKLEELGHSPKLISPQFVRPFVKSNKNDFVDAEAICEAASRPSMRFVQPRTESQQAMRALHRVRESLVQDKVKTTNQMHAFLLEFGISVPRGAAVISRLSTILEDNSLPLYLSQLLLKLQQHYHYLVEQIKDLESQLKRKLDEDEVGQRLLSIPCVGTLTASTISTEIGDGKQYASSRDFAAATGLVPRQYSTGGRTTLLGISKRGNKKIRTLLVQCARVFIQKLEHESGKLADWVRDLLCRKSNFVVTCALANKLARIAWALTARQQTYVA

SEQ ID NO: 255128 - protein, 449 aa, unidentified
MSRPQVIDDQEHERVHERVAAIDVAKDTGMVCTRTPHPARPGARRATVWTVKARMGPVRALGRQLRKDGIEIVTLESTSDYWRIWFFVLEACGLAVQLVHAAQAKNLPGRPKTDKLDAMWLARLTELGLLRASFVPPKAIRDLRDYTRARTRLVQERTRCWQRLEKLLEAALVKVSSVASKLTTVSAQDMIKAMIAGERDPDKLAALARTRMKAKHDDLIQALDGMFDDHHGELAKLLLDQIAFLDARIAQLGARAAELTAAMPAAWGVDSDGTTGPGAGTGPDAPVLPAVARLAEIPGLSENLARAIIAETGLDMTRFPTAAHLVSWAGLCPSARQSGPRSRPGKKGQGDTWLRSSLGQAAVGASRTATFLGERYSRIVRRRGKAKAQVAVARSILVIIWHLLKNPEARFTDLGYGYYQARTDTDRKLRNHIRQIQALGFEVTLTKAA

SEQ ID NO: 255129 - protein, 453 aa, unidentified
MVQRKQKISIKASKSREALTITHPNAAGVDIGSSSHYVSVPPDRDDEPVREFPSFTADLNALADWLDACGVDTVAMESTGVYWIPLFELLESRGFKVFLVNARHVKNVSGRKSDVLDCQWLQQLMTYGLLRGAFRPSDEVCVLRALWRQRGILLRGQGTHVQRMQKALTQMNIQLANVISDVVGETGQKILRAIVAGERDGQVLAAMKNVRIRASADEIAKSLQGNWRAEHLFALKQALDMFDFIGTQLAECDREIEGQLQTLQVHDGEPAKGKKRGRTRNAPKFDLRTQLFRMCGVDLTRIDGIDVTTALAVISETGADMSRFPTAGHFASWLGLCPGTRITGGKVMSGKTKRVANRAAQALRLAAAALRSSQSALGAYFRRMCGRMDKPKAVTAAAHKLARLIYTMLTKGEEYTDQGQDYYEERYRERVLRQLAQRAEKMGMKLVTNEQPV

SEQ ID NO: 255130 - protein, 424 aa, unidentified
MASHEFAAFVGIDWGDQKHAVCLRTEGVEVEHELSQKADEIDAWATELRTRFGGRPVAVCLEQSRGPLIYALLKYEFLVLFPLNPLQATRYREALYPSGSKDDPLDARLLCLFVETHHGQLRAWQPDDEATRLLRLLAEDRRRFVDQRTAHKNQLRQRLKEFFPLALELLRSGDLEDEWFLQLLIKFPSHAELRRAPPRTLERMLPKHHRLPDDESLDPRVAQIRAAVPLVTDGAVVKAARLQVMELARLLLRLNTTIAEYDHELSAELARHPEAELFRSFPGAGAALLPRLAAAFGTDRERYADAQDLQQLSGIAPVQIRSGKSCSVRRRRACPKFLRQTFHEYADHSRKRSLWAKAYYRMLRGRGLRHNAAVRALAFKWLRILFRCWQTRTPYDEHRHLKQLRLKQSPLLQYLDLPDPVEQT

SEQ ID NO: 255131 - protein, 230 aa, unidentified
MVYIGIDISKSSFVAAYPSAKGYRTQTFPNTAAGVRKFIATLLVTEYHCVMEATGNYGFLLLYLLHQSGIAVSLVNPKQIKHFSRMMMPVTKTDEKDAYMIAMYGEKMNPPIYKMPSQATIRILTTEGFTYFDNAKQLSRFIGICPTYQQSRTSVNIREHINRNDDERLRSLLYIAFWTALRYNSRECYIRLKANEKPFKVALIAVTNKLVRPVLTITTINSIYRWICPG

SEQ ID NO: 255132 - protein, 444 aa, unidentified
MAGSGMILIREVADAPVIMGISKPAGLKSPCGEVKIVNPLFVGIDVSSKTNVAYLMKPDGNKHSSFSVQNNLGGAKLLSEKIVSALHSMQLNDVVIGLEATSIYGDSLVYALREDGSLGRFQRKIHVLNPKQVRKFKESYPDLPKNDWVDAFVIADHLRFGRIAKEVYMDDYRYQALKTLTRARFDIIQNLTREKQRFANYLFLKCSGIAQDKDIQNTSATTIALMEHFETVDDLANADLDELTVFISETGRGRFVNPDATAKAVQAAARGSYRLPKTVNDTVNQAMSVSIASMRALKEQVKVLDKAIEQQFEIIPNTLTSIPGIGKVYSAGIIAEIGDIHRFNSQASVAKFAGLVWHKNQSGDFEAEHSQMIKSGNRYLRYYLLEAANSVRRCDSEFRRYYDLKFKEVNKYQHKRALALTARKLVRLVFRLLKDNRLYIPPVG

SEQ ID NO: 255133 - protein, 343 aa, unidentified
MDHFAGLDVSVKETSVCIVDEMGKIIREVKVASEPEALLAVLGSPAYHLKRIGLEAGPLSQWLYSTLAEAGLPVICVETRHMRAVLKAQINKTDRNDARGMAQMMRVGLYRPVHVKTLRSQKLRMLLTHRKLLQSKAIAIDNDLRGTLRNFGLKVGMVGAARFEARIRELIENVSDLAVLIEPLLVVRRALREQLGILHRRLLAVVRDDDVCRRLMTVPGVGPVVALTYRATVDVPARFRKSKSVGAVFGLTCAKYQSGEIDRSGAISRCGDEMMRTMLYEAAQSMLFHSTRWSWLKAWAMKIARHRGMKKAVVALARRLAVIMHRIWVDGTEFRWTREAVPA

SEQ ID NO: 255134 - protein, 421 aa, unidentified
MKIVYPICCGIDVHKSFLVATIVSVTKLRTLTYKKERFSTFNKDLFRLKNWLIENNCYDVCMESTGKYWVPVLNVLEPELRVVIVNPKWVKAIKGNKDDVKDSKWIGELFCFGLVRSSFIPSKDIRILREYTRYRYKLVNMRSSEKNRFQNGFTVCNIALDSVVSDMFGKSASEITNYLLTDENPNAELCTTMLHRSLKKKAVAVVEAIEGFQLTEEQKFRMRQVLHHKEYLDLAIDLLDTKLESLTEPYATAIKLLCTIPGMDSDSATTIISEIGTDMSQFDSSKRLCSWAGLTPGNNQSAGKKKSVKITRAGVYIKPMLVQVAHAAVKCKAQPYYKIKYENILRRRGKKRAIIAIARMILTAIYHMLQTGEVFNPSDLKQIDIPEKLKAKKKQREIHNAIKLLKQQGVLAEDFATSTCV

SEQ ID NO: 255135 - protein, 348 aa, unidentified
MFVGIDVHKDTHTAVGISPYGEKLFEITVGNYNPDFKKLEEKVEEMKGVLSPYIGLEDVRGYGERLAEYLHERYPVYHVPSILVDKLRQNATHPEKSDSLDASGVAKVMMNSIDSLLAYTISQESRKAKQLKEISIDREDLILERTRLKNQVHTLLYRIYNTEYEQKFKDPFSLKALRFWRNAKPKCDPFLLKTMKRKVKRILNIHVEVVDIEKDMKSLLDAGGYTIQTASGCGMVLASTIIGEIGDINRFTSPGALSKYAGCSPRERSSGKKTRHVKTRSGNRRLNCAFHRMALAQISRMGNDMARAYFKRKISEGKSKSQALVCLRRQMVNIIWMMLKHKTIYRNA

SEQ ID NO: 255136 - protein, 391 aa, unidentified
MPMYFVGIDISKYKHDCCIISAADQQIISKFTITNDKDGFEQLLTALNSLSNPEDIKIVFESTAHYALNLELFLENANHSFMEINPVLIKDFKKSQTLRRTKTDSIDCELIARWLMTVEYKPHSKGFYHAYSLKSLTRLRDRLVRQRSFYLVKITNVLDHTFPEFKPFFNERLSKTALYLLENYGSAEKMARMNSASYDKLRCISRGKFSIQQFLRLKELAANTVGVNNSIFDLELNTLLTLYKSLSDEINTLETEIIKLIEEVHPHYMSIPGIGPISSAVIYAEYGDISNFSNPGQMLAFAGIEPGINDSGTESHGGRMVKHGSSQLRYVLLNACLPLIRFDLTFATYYEKKRAEGKKHRVAITHVAKKLIRVIYALERQDVDFNAQKLR

SEQ ID NO: 255137 - protein, 325 aa, unidentified
MIKTMQANNVVVYAGVDVAKATLQLHLQGQQSEFSNTPKGLLQLCAQLQKVPKVHVVCEATGGYEHAMVKVLHQGQVPVSVTNPARVRAAAQAQGQRAKTDRIDAQGLTDYGQRYQPEPTPPTSATQDQLVALTQWLKQLIQGRALAKTQAEHHEEPFVRRQHAKLLAHLQCQIQAVEKQIEALLAQDAALQQRVDCLDAIQGVGPRTAWMVLAHMPELGRLNRQEVAALAGLAPWTRESGAMKGRRCIGGGRPEVRLALYMAALSAARCNPVLRALYKHLRAKGKLPKVALTAVMRRLLTYMNHCLKALLSQPAGSVTTELKSA

SEQ ID NO: 255138 - protein, 340 aa, unidentified
MSWTVAIGVDTHKHSHTAYALDQLGRPLGTLTIRTTRDGYRELLAWAGSLGEPAFALEGTGCYGAGLARLLAAAGWLVFEVERPQRQQRRRGKSDALDAELAARRLVAGERLALLRGQGPRETLRLLLLERRSASSARSSAINQLHGLLVTAAEPLRQRLADLHADSLVDACLRLRPRSHDAHAAIARRLAGRAKQLADELALIDRQLTTLISELAPELLDEYGVGPFCAAQLLVSTGDPRRLRSEAAFARLAGTSPLPASSGQTQRHRLNRGGDRQLNYALHLIALQRVRFHAETRAYHQRLQDQGKSKREALRIIKRALARRLYRLLAANPNLHHATT

SEQ ID NO: 255139 - protein, 408 aa, unidentified
MERYHLGVDWADKFHQIWVSDGQGQKITEKKVGETVEELAEFGRWLDESRAKGSELWAAIEKPQGRIVDFLLDHGVVVYPVNPKAVDRARDRFRMSSSKSDSFDAYVLAEFLRTDHGHLRPLEPSSQQAQELKMLSRDEHRLVRQKTRLLNQIRVTLKEYYPRPLEVFSDLESKTALDFLKQYPTPQALSELSRRKWNRFAKREHYLGEDRCQEFWEKLCQPQLTVPQHVIRVKAQLLLVLLVQLEALSEAIGTYKEKIKSFFASMPAAELVKTLPGAKTGTIVATLWAEIGDAKSRWESFRHLQAEAGMVPVTKASGKSRVVHFRFSCNKLMRHAAYWLAFVSLNRSEWANHYYRDQRARGHNHHQALRALGAKWLKIIFVMWRDHKPYDENYHLANITRQKMRQAA

SEQ ID NO: 255140 - protein, 359 aa, unidentified
MNDISQATIVRVGVDLSKKYFQVHAITQLGEVILAKAYSRDRFFSWCSELPSGCMVAMESCGGAHHVARRLRAMGLDARLIAGSFVTPYRMAGKSGKNDANDAAAICEAAGRPQMRFVPTKTCEQQGQLAVHRLREGYKEERTACLNRIRGLLTEFGLVFPQSPEALRGAIQEVLEDASNELPTVARLALDRANSHYTELDKEIAWCDERICAHVKSDERAKKAAQLLGIGPLTASALVSSVGDFAQFHSARQFGAWLGLAPSQNSTGGKAKLGGITKRGDTYLRTLLIQGAKSAVMSAGKRSDRISKWLLQLKERIGWQKTVVALANKNARILWSVLTRGTTFDPDHVPTYPGAVSVA

SEQ ID NO: 255141 - protein, 343 aa, unidentified
MQAITTVGLDIAKSVFQVHGVDAAGQVVIRRQLKRRYVLMFFQKVPACLVGIEACASAHHWSRELQALGHTVRLMPPAYVKPYVKRHKNDATDAEAICEAVGRPTMRFVATKTPEQQSCLTLHRTRHLFIRQQTAVIDALRAHLAEFGIVAPVGRNGVEQLLGVAADSTDKRLPEVARACVAALGAQLRMLKAQILQFDRMIMLWHRSNEASRRLDDIPGVGPALATALVASIADPKVFRSGRDFSAWIGLVPKQKSSGGKDRLGSISKRGDRYLRSLFTTGALAVIRYAKIHGTRHRPWLTALLARRPTKVAAIALANKIARMAWAMMARGERYKEPAALAA

SEQ ID NO: 255142 - protein, 431 aa, unidentified
MEKIRENAAGIDIGAQKVFVAVEGQEVKSFYTFTEDFEKLCEYLLKYLIRTVAMEATGVYWNILYEMLEETGIDVWLVDGRQTKQVPGRKTDVKDCQWIQQLHSYGLLKRCFVAEADIKELRIYQRLREDHIRSASMHINHMQKALTEMNIRLKEVLSQVHGASGLAIIKAILNGERDKDTLLKLCHQSIIKTKKEEMLKALNGRYTKSGLFALRQAFDSYSFYQQQIKQCDQMLQETLKRISGGKEQKVKNRRKPIRHNKPDIENLGGMMMKIFNGKDATTLSGITDYSWMQLLSETGTDLSRWPTEKHYTSWLGLAPCKDTSGKMKRRKRKMGRPKAGQIFRQIAHSLLNSKRIALGAFGRRLNARKGPYIAIKAVARKLAETYWRIMVKGMEYVELGVKKYEEQILQQKQRSLQRLAKELKVQIIYNE

SEQ ID NO: 255143 - protein, 355 aa, unidentified
MKLNTMVLQDYDVFLGIDVDKKSFAVTATNKYNVIGRQKMASAPANLEHYIQNHYAGQKVLCAYEAGPTGYSLYDHLRSKNYACFVISPGNLLKMSNERVKNNRLDSQKIADQLRAGQLRSIRVPEGSYRELRHFVNIRENYVEKRRQSRQRIQSLLLFENLHKQMKDPDKNWCRSYFEDLKHLECNPSVRLRMDTLISDHDYACSQLLMVYKQMRQFIADRPEIRDYMSYLCTIPGIGFITAVTVLGRIGDPALLNNPREIGCFAGLTPREWSTGDRQQMGRISHFGDGVLRSLLVEASWVAIRKDKELEMFYHRLSRNNHPRGSAQKAIVAVARKLTMRIFRVLKDHRPYSVH

SEQ ID NO: 255144 - protein, 341 aa, unidentified
MSESALIGIDLGKHNFHLLGQDKSGREVFRKKLSRAQMMRFFGNLPSCVVVTEACAGSHFIARQLAAMGHTTKLISPQFVRPFVKGNKNDFIDAEAICEAASRPSMRFVTPKTESQQTLSVLHRMRESLVHDRTKTANQMHGFLLEFGISLPKGSAIMKRLAAVLAEHELPVRLTVLLQRLHDHFVYLDEQIKELDKELACQLADDDLGSRLLSMPCVGPITASLLAVEIGDGKQYRCGRDFAASVGLVPRQYSTGGKNNLLGISKRGDKHIRRLLVQCARAYLLHLERQTDRLAQWVRSMLTRRHSNAVACALANKLARTAWAIAAHHTEFKRQEAVRVA

SEQ ID NO: 255145 - protein, 385 aa, unidentified
MKGEKFKPTDYDVFAGLDVDKRSISVTFTNHQGFIRSLRMPYSVEHLVNHVRKHFADQKVAFAYEAGPTGYGLYDGLVAKAYPCLIASPSMIPKAPGQRVKTNRLDSRGLSENLRGGQLKSIHVPSALYRELRHLTQLRDTFVSEMVGMKQRIKSLLLFEGIEFPPAPAGRQWSFMVKDKLRKLECSKTVRFKLDQLLDSLEFSEKQVLKATREIRRFCRNDAELSQCIGYLMTIPGIGWIVASQLVARIGDWRELKNIRQLGGFLGLVPTEDSTGDRTDRGSITHTGDGWLRSKLIQASWSAIRQDGELRDFFRSVCRTHARPLASRVAIVAVARKLSVRISVVLMKQRPYEVRQKVQSAPLTQEETSPQGTTRREPEPGEKNS

SEQ ID NO: 255146 - protein, 291 aa, unidentified
MDLSLAGQPPCRHANNAALIKVLKKLPVPVQVICEPSGGYERDLLQALWAGGLAVSLVHAARVRAFARAQGLLAKTDPIDALVLREFGELLQPGTLAAPSPQRERLAALVQRREQLVNLLSTEVQRLAQTHDVVVRKLGCHLLKTLERQVEQLAEMIAAQIAADATLKAQSERLQQVKSIGPVTASTLLAELPELGTLSRNESGALAGVAPYNRDSGLHCGRRTIRGGRVRVRRVLYMAADVAARFNPIHKAFYERLLLAGKPKKLALTAVMRKLVVLLNHLLKNPHFKLA

SEQ ID NO: 255147 - protein, 410 aa, unidentified
MEVLYPHCAGLDVHKQTVVACARHMVNGTVTREVRTFRTTTKDLLALSEWLAGQGCTHVAMEATGVYWKPVWHILSDGDFTLVLANAGHVKNVPGRKTDVNDATWLADLMAHGLIRGSFVPDIQTQELRGLLRTRKQFVRERSSHVQRLQKTLEDANIKLDGVISDIVGLSGRRMIEALIAGESDPEALAALAHRQIKASPAALREALRGRVTNHHRFLLQLHVQHIDALDAALNAIDREVDIHVESFREAVLLLTTIPGVSDLSAQVIRAEIGGDMSRFPTVGHLISWAGLCPRNDESAGKRRSNRMRKCAPWLKTTLIQCAWAAPRKNGSYLQAQFHRLRARRGAKKAIGALAASILTAAYHMLKDGTLYHDLGPDHFDRRAKTVQTRRLLTRLQRLGYAVQITPLAA

SEQ ID NO: 255148 - protein, 367 aa, unidentified
MKKISSAAAQKIEKVEGQKLTIGLDVGDRSSWYCVLDEAGDVLLEQKVATTPKAMKEVFGGMPHSRIALETGMHSPWVSRLLSEVGHEVIVAHARTVRLIGESRRKDDRFDARTLARLARIDPDLLGPVQHRSRKAQVDLMVIRARAGLVRARTALINTARGLTKSYGERLRGCSPRKMNRELAEGLSPELQSALQPLLDEIESLSERIREYNERVQQIAEESYPEVARLEQVKGVGTLIALTYVLTLEDPRRFRKSRDVGCYLGLRPGRRNSGQSEPQLHVSKEGDPYLRTMMGQSAQHVLGPFGADSDLRRWGLRLAERGGKNAKKRAVVAVARKLAILLHRLWVSGEIYEPLRNSSQAMLSAAA

SEQ ID NO: 255149 - protein, 345 aa, unidentified
MEHYVGLDVSLKLTSICIVDRTGKVEREGVVASDPEAIATFIKLHAPHVVRIGLETGATSTWLWTELNKIGFPVICIDARHAKAVLKMQINKSDRNDAAGIARIMQCGWYKEVCVKDLDSHATKALLVSRALLVKIKRDIENQIRGLLKNLGLVIGRAKMNMFAARAAQLADDRCELLAAVDPLLKAREAVEQQIVDLDRKVLRLARNNAQVRRFMTAPGIGPVTALCFLATIDDPARFKSRSVAACAGLTTRRYASGEIDWTGRISKCGDKMLRSYLYEAANVLLTRVAKWSALKAWGIRLAKRSGLRKAKVAVARKLAVILHRMWIDGSEFKWSSKDAADQPA

SEQ ID NO: 255150 - protein, 347 aa, unidentified
MRFYTGQHRYYCGIDLHARTMYVCILDHETGKILVHRNLRCEPDVFLRAIAPYRDDLLVGVECIFCWYWLADLCSQQNIPFVLGHALYMKAIHGGKAKNDKIDAHKISVLLRAGAFPTAYVYPRGMRATRDLLRRRLYFVRRRSELFTHIRTTFHQLNLPAPAGKFHHPRNRVGVAESIPDPVVRASVEADLVLATHLDEVIRSIEGTIRDQAKVDDPDTIALLKTIPGVGRILSLTLLYEIHDIARFPRVQDFLSYARLVKSQKSSAGKITGTSGAKIGNAHLKWAYSEAAVLFLQKNPPGQKLLNRIRSKHGKGKALSILAARLGRASYSMLRHSPAFDMDRFMN

SEQ ID NO: 255151 - protein, 326 aa, unidentified
MEHELHYIGIDTAKEKLDVDVLRPDGRHRTKKFANTTKGHDELVSWLKGHKIDHAHICIEATGTYMEPVAECLYDAGYIVSVINPALGKAFAQSEGLRNKTDTVDARMLAEFCRQKRPAAWEAPHPLERALRALVVRHQVLTDMHTQELNRTETAREVQRPSIDAHLLWLEAELKRLEKQIKDLTDDDPDMKHRRKLLESIPGIGEKTSAVLLAYIGLKDRFAHARQFAAFAGLTPRRYESGSSVRGASRMSKAGHVSLRRALYMPAMVATSKTEWGRAFRDRLAANGKKGKVILGAMMRKLAQVAYGVLKSGVPFDASRHNPVAA

SEQ ID NO: 255152 - protein, 421 aa, unidentified
MARTVEIVYPVCCGMDVHKNFLVACIAVTDERSHTEHHIRRFSTFAGDLRRLSEWLASFNCRDVCMESCGKYWIPVFNTLEQAGCNVCLTHPKYVKAIKGKKTDKKDAKWISELFKCDLVRSSFIPPPDIRQLRDLCRYYVKLTGFVSSEKNRAQNCLTTCNFKLDDVFSDVFGKSATRVLDALLEYGNCDFELNGLVHGKCKSSPDKIRAALGGELNPVQAEKLFLIRRHMNDLDTLKASLENLIYNLAAKYQPQINLLMTVPGISTQLTSIRILAEIGADMSVFETAKQLTSWAGLTPQNQESAGKKKTTRIGRAGAYLKPLLVQIALNCGKSDKCPELKNKYLSLKKRRGGKKAVIAIARKLLTAIWHILSKNEAYNAELYQKADRPPAAREFTTAQAVAFLRNKGFVILDEETGEIA

SEQ ID NO: 255153 - protein, 342 aa, unidentified
MDHFAGLDVSVKETSVCILDDAGKIVKEVKVASEPHALLKVLENPTYRFKRIGLEAGPLSQWLFSALAEAELPVICVETRHMQAVLKAQINKTDRNDARGIAQMMRVGMYRPVHVKTLRSQKLRMLLTHRKLLQSKAIAIENDLRGTLRNFGLKVGMVGTARFEARIQELVEHFPDLGVLVEPLLIVRRALREQIVLLHRRLLAIVREDEVCRRLMTTPGVGPVVALTYRATVDLPARFRKSKSVGAVFGLTCSRYQSGEIDWSGRISRCGDEMMRVMLYEAAQSMLRSKKWSWLKAWAMQIARRRGIKKAIVALARRLAVILHRIWIDGTEFRWTRETAAA

SEQ ID NO: 255154 - protein, 367 aa, unidentified
MKKISTAAAKQSKNFSQQKLTIGLDLGDRNSWYCVVDEAGQIQLEQRVRTTAKALQEVFGTMPRSRIALEIGTHSPWISRMLSDLGHEVIVANARKVRLIGESRKKDDRLDAQTLARLARIDPELLYPVKHRSAQAQADLTVIRARAGLVRARTGLVNSARGLAKSYGERLRGCNVRNMNPEKAEGLSPELQAALEPLLDAIESLSERIVEYNERIENLAQQDYPQVALLKQVKGVGTLIALTYLLTLEDPHRFQKSRDVGCYLGLQPGRRNSGRSEPQLHISKEGDPYLRTLLVQGAQHILGPFGIDCDLRRWGLRLAERGGKSGKKRAIVATARKLAVLLHHLWVSGEAYEPLHNSSRTTVAAAA

SEQ ID NO: 255155 - protein, 409 aa, unidentified
MSVEHEQSAGRVTAGIDWASEDHAVAIVDDAGVAVDRFQVAHTAPELRRLVSRLRRAGVVEVAIERPDGPVVDALLDARLTVFVIAPKQIKNQRGRYGSAGNKDDRFDAYVLADVLRTDRARLHPLTRDSDATVSLRMSVRARKDLVAARVAMANQLRAHLQITLPGAIGLFRDIDSDITLAFLRRFPSQDKVDWLSQIRLGNWLASVGYNHQANLARLWAHLHDAPHGTTGAQAAPRAQVTLALVAALSAIRDQIHALDTQIEQQLAAHPDAAIFTSLPRSGTVRAARLLAEIGDARGRFPTPEALTCLAGAAPSTRQSGKVKIVAFRWAVDKQLRGAVTDFAGDSHHANPWAADLYQRARARGHDHPHAVRILARAWLHVIWRCWQDGVPYDPDKHHALQRVLNQAA

SEQ ID NO: 255156 - protein, 416 aa, unidentified
MKTTTDYAALVALDWGDTTHSFAWQKTDDAKRHGGSLPATPEALHEWLGQLREACGGRRVALAIEAGRNGLLHALFEHEWLTVYPIHPATSARFRLAFAPSGAKDDGPDAEVLLELLRQHREKLTAFLPDTPATRELAALVEQRRGAVDQRTGFGNQLIALLKHVFPQALTLIGDDAVAPLAIAFLRRFPSLEAAQKAGAARLRDFYRRHNVRSSERIEERVARVRQARAFTRDEAILRPAALELTRLLDVIELMTRHILAYDQEIARVFAAHPKAAIFAALPGAGAVLAPRLLTLLGERTERYPDAASLQKYAGVAPVRERSQGRLWVHWRWAAPKFLRQSLVEWAGQTVPRCAWAKDYYLRQKAAGKGHHAILRALAFKWVRILWRCWKDNVPYDDARYLAALAKRRSAPLTAA

SEQ ID NO: 255157 - protein, 424 aa, unidentified
MKNSTAKKLKQIGEGNLMVGIDPHKHKHALLIMNQDAMVQKRIKISNTRAGFKEGIQRVFEEVVKSGSKGAIFAIEAGSHHWRNFAYYLNENKIPFYLVSPLTLKRRREGEDLNRRKNDYRDAEMAAELLRTGKYLESRLLYGGYAELRTAYTNYQRLVEDKTAQINLLKSRLDNLFPEFTQVFKDPCGITAIEVLTRFMIPREIVKMKLDDFIKMIKSGFSGRSLQTSKLRALYVVAVDSIGVNEGAKAISQEIGMIIERIQLMTNQIQTVKKSLIEIVDSLPESCYMLSIQGLGYLTVAGILAGVGPFSNYSNGKQMIKMAGTNPTQKESAGKNSRHTPISKQGRSGLRWCLWPAVVSLLRHNNDFKVWAKARQERAANAHPLHRREVIGASINRLLRLVFALVKKQSLYQMPQPDVALMAG

SEQ ID NO: 255158 - protein, 390 aa, unidentified
MLVIDETSRQVSSCRVTHTVEGLRQLQAFLLSICGPARKEEMACIIETTHGLLIAARLPAGFPVYPVNPKTVDRHRRASGAKTDQIDAYLLAKHGRAEWADLRRLEPDSSIVAELKALTRDQESLIQSQTRLVNQLTACLKAYYPVALTLFSKLHQRSTWLFLQTYPPPEVAMAASAQQITLVLKKAKHPQAEQVAAKIYHKLHQPHLRADAITTRTKARLMQVGIKQLLPLLEEIATYDEEIERLFLMHEDNEVFSSLPRAGKRLAPRLLAEIGDDRTRYAKTASLQALAGTSPVPYESGNYSKPHRRYACSKPLRNALQQFARPRTQTEAWAQDYYRRKRQEGKSHSEAVRALANLWVRIIFAMWNKKEKYQTRTFEEAQRLHAKRTA

SEQ ID NO: 255159 - protein, 338 aa, unidentified
MTLYGGIDLHSNNAMISIIDAQDHLVFEKRLANNLASIQSHLDPYRSRLDGLVVESTYNWYWLVDGLAERGYDVHLANTAAIQQYSGIKYTDDASDARYLAQLLRLGILPEGYIYPPEQRSIRDLFRRRLLLVRQRTMQHHSLQSLIARHSGIRLSAQQVKQLKSGDLKAYFRYPASLETARLLHRQMAQLSQAIDQIEKRVGAQCQASADYDLITSIPGVGAILGKSILLETGPIGRFPAVGNYVSYARCTPTARISNGKQKGQGNRKNGNRYLAMAFVEAAHYAAIWDPTIKRFYQRRQRRVHTMVAKKTVANKLARACYHMLKRQERFDVKRAFS

SEQ ID NO: 255160 - protein, 358 aa, unidentified
MAEHQAETHVIGGVDTHKDLHVAAVVDHRDRVLGTESFPTTRHGYRLMLAWMNSFGNLQRVGIECSGSYGAGLLRYMQTAGVEILEVTAPDKLDRRRRGKNDDFDAESAAHAAFARRHTVTPRSRDGMVESLRVLRVCRRTAVQARRIALQMIQMTIVCAPDKIRDHLRSMTRMQLIRTLAAWRPDLTAYRQVEEAYRISLKSLARRYLELHDEIADLDDMIEAIVTELAPELLAQTAIGLNSAAQLLLTAGDNSDRLRSEASFAALCGVSPVPASSGKTVRHRLNRGGDRAANSAIHIIAIGRLRMDARTQDYVARRIAAGKSKLEAIRCLKRYIAREVFAIIMRRHKEINQSQIAA

SEQ ID NO: 255161 - protein, 321 aa, unidentified
MQGKAETKPATALYAGIDVSKARLDAQLHGMGERLQVANEAGGHARLVERLETHGVVKVMMEPTSHYHREIHRRLHEAGIGVVLINPLRARLFAQAHGKLAKTDAIDAAMLARMAAQTELKPVAPPSAQQQELQELTSARRAALAERTALNNRLGATTVAFLKGELTKRLRSIAGHIDRLQARIDALIKADPEMSRKARILRSIPGIGPVTTQALLAQLAELGQLTAKQAAALTGLAPYARDSGTIQGKRHIHGGRADLRSALYMAALTASRKNPDLELFYQNLIARGKAAKLALAAVARKLVILANTLVSQNRSWELKPA

SEQ ID NO: 255162 - protein, 333 aa, unidentified
MPRYVGLDVSQKTTAICVVDEQGRRLWRGVCATDPGAISARVLKHAGVDAKVGVETGSMTPWLVHGLRNAGLNVECLDARRVKAALQMRLNKTDENDAEGLAQIMRTGWYRPVHVKSLDAHRARALLGARAQLVGMTTRLSNMIRGVLKTFGLLPGAGRGLRFDQKVEALLDGAPEIALIVRPLLVTWRQLREQIAVFDKAVQQQVRGDPICRLLMTVPGIGALSSLMYVSTVEEPGRFSRSRAVGAHLGLTPRRYQSGETDRNGHISRCGDGLARTLMYEAAIVIRHRVKRSLHLKDWAEAIERRSGPGKARVALARSIVRATICLPTRRSV

SEQ ID NO: 255163 - protein, 346 aa, unidentified
MSESYEGRQFVGIDLHRRRSVLVRMTETGERLETVRISNDPEYLRQVMARAGESPEVVLEATYGWYWAADCLAELGASVHLAHPLGVKMFSLRRVKNDERDAGDLADLLRMGRLPEAWIAPPATRELRGWVRHRAKLVGLRSNLKCQVHAILAAAGVQVPMSDLFGAAGQQLLATVGLAAESRARIDSLLRLITALDFEVELFAKLVAGRLRTHPGYLAIQAIPGVGPVLAAVFVAEIGDITRFHRPAQLASWAGLTPKHHESDTTVHRGRITKQGSRLVRWAAVEAVQRVGAHTGLGQVREQVGARRGRNIGVVAAARELTELVFYGLRDGHIRRLPAPPHTPAA

SEQ ID NO: 255164 - protein, 408 aa, unidentified
MQVLYTRCAGLDVHKDTIVACVRCVSAPMHQEVRSFGATTTELLALADWLAEHGCTHVAMEATGVYWKPVWHVLEDEFELVLANAAHIKNVPGRKTDVNDAMWIADLLAHGLIRSSFVPPQAIQQLRDLTRTRKQLVREVSQHSLRIQKVLEDANLKLGSVLSDVLGKSGRAMLDAIVAGQTDPEQLAALAQGTARHKTAELREALRGRISEHHRTMLKLHLQVVDALQRTLAELDTAVGKALAPIRQRARLLTTMPGVSDLTASVLVAEIGVDMTRFPSAGHLISWAGLCPRSDESAGKRRSTRVRKSGTWIKTTLVTAAWAAVRVKTSYLRAQFLRIKARRGAKKAILAVAASMLTAAFHMLRDGTEYNDLGSEHFDRQDKSKTIRRLLKRLQDLGCDVPTSAHST

SEQ ID NO: 255165 - protein, 379 aa, unidentified
MYRILKIGMDVHTTNYTLCALESKFGQSDAVLANITVSPELRNVVDFIKRIKQKMDPYGRDEIDVECGYEAGCLGYSLYHALTGCKVKCTILAPTTMSVEKGPRIKTDKRDARNIADCLSTGKYSAVHIPTEQDNAIKEYIRMRDDHVIALKKIKQQMNALCIRSGFIYDGNKWTEKHLRWLCGLNLPELVRETLNEYLVTYSEQTAKIERYDKRIAELASQSEYQENVRRLECFLGIKTNTAMSLIVETGDFTRFAKGNLYASYLGLTPGEHTSSENGGKLGITKAGNKHLRTMLIEAAGTICKGTVGYKSKNLRARQDGNMPEVIAYADKANMRLRGKYYRLIRHGKKRNIAVTAVARELACFVWGMMTDNILKTAV

SEQ ID NO: 255166 - protein, 453 aa, unidentified
MARRNRSIDLKSAKSRTALTITHPNAAGIDIGSAAHYVAVPPDRDDEPVREFASFTADLNALADWLDGCGVDTVAMESTGVYWIPLFELLESRGFTVLLVNARHVKNVSGRKSDVLDCQWLQQLMTYGLLSGAFRPTEQVCVLRALWRQRGMLLRSQGRHVQHLQKALTQMNIQLTNVLADIVGESGQKILRAIVAGERDGQVLGAMKNVRVRASVEEIAKSLRGNWRAEHLFALKQALGAFDFVGTQLAECDTEIEQQLLRLKVHHGDPAKGKKRGRARHAPKFDLRTQLFQMCGVDLTRIDGVDVTTALAVVSEVGADMAKFPTVKHFTSWLGLCPGTKITGGKVMSGKTKRVVNRAAQALRLAAAALRSSKSALGAYFRRLCSRMDKPKAVTAAAHKLARLIYTMLTKGEEYTDQGQDYYEQRYRERVLRALSQRAAKLGLKMVPIEQPA

SEQ ID NO: 255167 - protein, 401 aa, unidentified
MKEFNPERHRIETASALEVVTSAGHQEHHAAYVGLDVHKEAIAVAVAEPGRAEPVYRGEIANKPKSIEKLIGKLSAAYDGALLQFCYEAGPCGYVLYRQILACGHDCQVVAPSRIPRTPGERIKTDRRDALKLARLLRAGDLTAVWVPDRDQEMMRDLSRARDDMKGQERKARQQLNAFVLRHGHHWPRGKSRWTPAHYNWLESLRFERPWQHVVLHEYIDAVKAASARVAQLNDHLMRALPEWSLAPVVDSLIALRGIDKLAATVLLAELGDISRFDSPRELMAFLGLVPSEHTSGPRRRQGGITLTGNGHARRMLVESAWSYRFPARQTMHLKRKAVNASESAKKIAWKAQVRLCGRYRTLTRAGKNTKVVCVAIARELAGFIWDIVRQQMARPAPQAA

SEQ ID NO: 255168 - protein, 368 aa, unidentified
MKQVTTFVGVDAHKKDLFIAMLVGDHTIPVTWQVANEPNAVRRLVRKLEREAPGPVRMCYEAGPCGYALQRQVTTPRVSCQVIAPALIPRKPGERIKTNRRDARKLVELLRAGLLTEVRPPTPEEEAVRDLCRARDDAREDLQRCRHRLGKLLLRRGLHYSGRNWTRAHRQWIDSLDWTQPAERVVVDDYLLAVDQVEARLLELDARLAEIAETDPYRERVGWLRCFRGIDTLTAILILAELHDFRRFQSPRALMAYVGLVPGEDSSGEKHRRGRITRTGNALVRRLLVEMAWHYQHRPSIGVALTRRRKGQPGRVIAIADKAQQRLCRRFRRLAEQHKPAPKVAVAIARELAGFLWAALQPAPTPAG

SEQ ID NO: 255169 - protein, 346 aa, unidentified
MNLAGDADLIIGVDTHLDTHTAALCNARGRALSRLQVPATAAGYAQLLTWARLAARDSRVVWAVEGTRHYGLGLARYLASQGQQVIEIDNTRHVGRRRAGKSDAIDAVRAARELLARPHSAQMRADGDREALRLLMVDRDNAVASAKTARTVLASVLVTAPAELRERLRRLPRARRAQECAALACPVNADRQTTVLHQTLIRLGQRVATLASIAAELEAQIAAIVEDMAPGLVAAEPGTGALSAAQILLSWSHAGRIRNEAAFAMLSGTAPVPVSSGRTDRHRLNRLGDRQLNRALHQIAVTRMRCHPQTLAYIERRRAEGKTDREIRRCIKRYLARHFYRTLSQA

SEQ ID NO: 255170 - protein, 340 aa, unidentified
MGEITTIGLDLAKQVFQVHGIDADGTTVLRKQLRRSQVLSFFSRLAPCLVGMEACATAHYWARELAALGHEVRLMPAQYVKAYIKRNKNDAADAEAICEAVVRPTMRFVPAKTAEQQAALLLHRGRERLVRQRTGLVNALRGHLAEFGVIAPQGLRNVGKLIAVVRDPSDARLPDLARQVLEVLAAQIEQLEGAVAAVEKQLMAWHKSNPVSQRLATIPGIGPIIASAIAASVAEPGGFRSGREFAAWLGLVPRQNSTGGKHRLGGISKRGNQYLRRLLINGASANLLRSKATKADPWVIGLRRRRPSLVVAVALANKTARIAWGVMQRNENYQRMAAAA

SEQ ID NO: 255171 - protein, 383 aa, unidentified
MNRILKIGMDVHKKSFSLCIIEPSLDSEEHVLLQHVVPADYKEVIKVINRLKEKLGSQNTYDIQCGYEAGCWGVSLYHQLNDAGVKCIIIAPTTMLTQQGVRVKTDARDALVIAKCLAYGTYSPVYVPTDKDNAVKEFLRMRDAQKRTLKKRKQQIITFCTRLGYVYEGRNWTMPHWKWLKSLVFSDPLLRETLDEYMASLEELIAKIERLDVRIEELAADPEYAMKVKQLICFLGIKTHTALSLIVETGDFKRFSKGSTYASYLGLAPGEHSSGEHIQRTGISKAGNAHLRRLLVESGQSICRGKPGAKSKALKARQAGNKSEVIAYADKGNYRLRRKYYRLISHGKSRNVAVAAVARELACFVWGMMTENIGMRESDLKRA

SEQ ID NO: 255172 - protein, 367 aa, unidentified
MKKNSISGKQSPKRKQNRMQSPITIGMDLGDKTSRYCVLNENGEVELAAAVATTRKAMMETFKGLPKCRIAIEVGTHSPWVSRLLSELGQEVIVANARQVKVIGSSSRKTDKVDAEMLARLARADLQLLRPIRHRSEKAQADLMTIRIRAALVEARTALINSLRGIAKGMGERVPACAADYLGLDQLEALPEKLKETLKPLMEEVETLTAKIKACEAKIEQIARKDYPETILLQQVSGVGTLIALTFVLTVDDKDRFQRSREVGCYVGLRPKRSESGESAPQLGITKEGDRYLRTLLVQGSHYILSRKGPDTDLKRWGLKLAASGGPRAKKRAIVAVARKLAILLHRLWTTGEVYEPLRNAQLLKVA

SEQ ID NO: 255173 - protein, 329 aa, unidentified
MDISIKEIVCTTIDEHGNIVRKDKFENSFDNLDKYLSNFSHRDSFVMESTGFYEPIYDFMESRGFNVKLANPLKIKLIAESRMKNDDVDSEILAKLLKNNWIPESYVPPKEIREIRRIVRTRMQIKRTMTTYKNRIKIEMKRLHIDYKGDTFTIDGKAFLRSLKSEGIDSYLRVLNAMEEEVRNIDKDLMKYQDIEEVKLLQTIPGIGLFSALMIYSEIGDIRRFTSSSKLLSYAGTIPSVRQSSDIIKYGRITRQGSKNLRWIITECLHIHLRFDPSSSVSIFYRRISMGKKRKGKALIAASNKLLKIIYWVLKERRPYVSSSTDQPR

SEQ ID NO: 255174 - protein, 349 aa, unidentified
MRNLAVQSPIHKLASGEPPVRGPNEPETIMAMTAHRVILGADVSKDWLDISCHGDHGATRIDNARQAIDAFLKSYPDAAIAVEVTNTYHELLVDRAIKRGLEVYLVSGYQLKYYARSIKQRMRTDPIDAELLARFLHREIDDLKPYVPKSPAFRQLWQLIKRRTLLVRHNDQLRQSGVGARSLKRQFQSLIRSNQHVIDLIEKRMHALVNALGWREEVARVKTMPGVGPLTAIALVFAYRSGDFIHSDPFVAFMGLDVKTKDSGKFKGKRKLTKQGDGEYRRLLHCAAMAAARTNSYFIERYQALQARGLSTTAAYVVIARKLVRIAFVLMNKQVNFDSNRLKGACNAT

SEQ ID NO: 255175 - protein, 428 aa, unidentified
MSNQEIIRRKQFCQIVKEVRSSNEYLVVGIDVAKDKHHAFMGTATGKSLFRKLIFENNIEGFSRLLKTADEIKSQNDLSKIVYGLEPTGNYHKPLARHLIRCDCNVVLVTGQAVKNNRHLLNGRWDKNDMKDAANIADLASRGRCLYYDCPSSSIIEIRSLLSLRRRLKREEHGLRMRIRNNLLAQYFPEFDMFYSACESESLSIIRYFLDPDTISAMEFGEFFHLVTRTRRGTAQTLRLRKIHGLAIESVGCPMGPAGEYEADLLVEKLNQVREQIKKTADLIKDFCLEFYEYSYLLTIPGFGPYISARVLASIGDPFRFENRKQLIKMAGYDLCANRSGKTSDKAIPVISKKGNGELRYALYQAAKVASARVDLFRTYFTKLLRGRERERGIKTKMCVKLAAKMLVIAWTLMKKREPFNPAYLNIE

SEQ ID NO: 255176 - protein, 459 aa, unidentified
MGHARARKVPAQLVEDEEYQLRHERVAGIDVAKAKADVCTRLPPARDGGRRASRLEEVPATAAEIVALAARLLADRVELVVMEATSDYWRIWFYLLEAAGLNVQLANPAHARQLAGRPKTDRLDAQWIARLAEMGLLRPSFVPPPEIRALRDLTRTRLQLARDRTREWQRLEKLLEGALVKLSSAVHSLARTKTARDILEAIAGGQRDPRALAALAHGGVKGGRAAIERALDGMMPGDQHLMLIRIHLDHVTFLDRAVAAVEDEIEAALDAIPAAWGIGADGGTGPGAGSGPDAAVLPAAERLAEIPGVSPRLAMAIIAETGLDMTRFPTAAHLVSWAGLAPVARQSGPRNRKPGKGQGDAYLKGYCTQAANGAAKTETFLGERLRRLSRRLGGNRAKCAVARSVLVIIWHLLASPEARFADLGPDWHARHGDRDRKIQAHLRQLRALGLDVTLTPAAA

SEQ ID NO: 255177 - protein, 325 aa, unidentified
MNEAILGIDVSKKDLSIALLLHTSYKKYKVSNNIKGFIGLTKWLQAQGIEQVKACMEATGSYGEKLADYLYEQGHQVHIVNPACIKAFARSKLSRHKTDEVDAHLIAEYASKNELRAYKPKEPMLKELRSLYRCLQNLKEQHTQVGNFLETKDCLPKSVEKVYQNLIKHIEKQINVVNVAIDQVVSSKESLNQDCRNLQSIPGIGKITAIAILAEIPELSSLESARQLAAYAGLTPSHRTSGTSVKGRSCLSKIGSSSLRKALYFPAIAAKNHNPLLQPFVQKLEKKGKHTMVIIGAIMRKLLHICFGVLKYKTVFNPEILKINP

SEQ ID NO: 255178 - protein, 411 aa, unidentified
MDTLYARCAGIDVHKTNVVVCVRCGDRPGKVFEEVRTFATMTRDLLALADWLASHGVTHVAMESTGVYWKPVFNILEGGVQVILVNAEHIKQVPGRKTDVKDCQWIAQLLQHGLLKASFVPPAPIRELRDLTRQRTQLIQERSAAANRIQKVLEDANIKLASVATDVLGVSGWDMLEALIAGETDPAKLADLARKRLREKIPALQLALQGRVTDHHRFLLRMHLDHIRHLEELISRLSVRIEEALAPFAQAQEQLQTIPGISQRVAETVLAEIGPHMEQFPSAGHLASWAGMCSGNNQSAGKRRSGRIVKGNRWLKRILVQAAWAASHTKGTYLAAQYRRLAKRRGRKRALVAVGHTLLVIIYHLLKQGTTYAELGPDFLDRLEPERLTRQLVKRLEALGHKVTLEPGQAA

SEQ ID NO: 255179 - protein, 387 aa, unidentified
MPASGPRPDLVAVQVNLAAIFVSLELSRSTWLITSLVPGGGDKMSKHSVRSGDIAELMTHLAKLRDKAQARAEVSFSIIAIQEAGLDGFWVHRVLERAGIESHVVDAASILTSRRRRRAKTDRIDGEALLRTLLAYKRGEPRVCAMVRVPSPEEEDRRRLCRERRTLVAERVAHVNRIKGLLFAQGIADYEPLHGNRRQRLEALRTGDGRPLPLYLKAQIGRELDRLELLLEQLKAVEAERNAMLEPANDAAPVAVQALAGLRGIGPEFTAVLWSECLFRSFRNRRQVAAYAGLAPTPWQSGSVQHEQGVSKSGNPRLRSTMIQLAWLWLRHQPTSELSLWFRERVKRNGGRGKKTAIVALARKLLVALWKFSSSGVVIEGAMMKTA

SEQ ID NO: 255180 - protein, 345 aa, unidentified
MNNTRVIAIDLAKTIFQVCLFDRHGKVLWNRSMRRPALLKFLARQEPALVAMEACGGSHYWARKAQSFDHQVKIIPPKQVAAYRQGHKTDGKDALAIGIAAGQAELKTVGVKSIEQQSLQCDKRVQEHLSDQLTATNNLLRALVAEFGVVIPKGVAALKRELPLILEDAENGLPLSMRESLYLAWQQWQHLAGLLAQSERILMQRVRMLEPCQRLTKLSGVAGKNAIGLYVRIGAGDQFKNGREAAACTGLTPKQSSSGGKVKIGSIGKFKGDQRLRSSLIVGAWSVVNALQKRPAANATELWLQQLIKRRGRGRAAVALANKNVRIAWAMLRYNRSYETQSIAL

SEQ ID NO: 255181 - protein, 422 aa, unidentified
MHEERRWFVGIDWASQEHVVTLCDAQGNKIGEREFAHGGTGLSDMIAWLLKASGGEAGEIHVAIETPHGPIVEALLERGFNVYSINPKQLDRFRDRFTVSGAKDDSLDAYVLADSLRTDMHLFRKLIVSEPLIVELREWSRIDEELKAECVRLANRLRDQLWRYYPQMLELADDLSADWIFDLWEVAPTPEKTARVREATVARILKKHRIRRFDAAHVISELRKPALRVAQGTTEAATAHIRLVIAQLRLLNRQLADAGLQLDRLCKKLAEPIARDEGENVPGQRQEHRDVTILDSLPGVGRTVLVTMLAEAPDALQRRDYHALRNLCGSAPVTRRSGKSCLVIRRRACNRRLMNAAFYWAQTATQRDPTSRAKYAALRARGHGHARALRSVVDRLLYVACAMLENRTLFDPSFGEKKATAA

SEQ ID NO: 255182 - protein, 356 aa, unidentified
MKKATTIRRRVTIGLDVSDRYSRVCVLDARGQVEREDRVRTTPEAVGAWFSCYANARVVLEVGPHSPWLSRLLAAQGHEVVVANPRRVRLIAEAERKSDRIDAETLARLGRMDPKLLHPIEHRGEAAQQHLALLRVREGLVRSRTRLIQCARGLAKSFGVQLPSSSAPSFAKRVRERGLEGLFPGLGALLEQCGALTASIRQLDREVERLGRERYPETRLLRQVPSVGPITSLAYVLTVEDASRFAKSRSVGAYLGLTPRQRDSGDAQPELAITKRGDEFLRRLLIEAAHYTLGPFGPDSELRRFGLRLLGQGGKRAKKRAVVAVARKLAVLLHRLWVTGEVYHPLAPAGEEKQAA

SEQ ID NO: 255183 - protein, 387 aa, unidentified
MTVRTVSNLPAAMHVETARCFFAIELSKQSWVIGFITPLSAKISRRILSGGDWKGLLELIEEVRARVSRETGRAVDVISCYEAGYDGFWLHRLLEAHGIRNYIVDPASLQVDRRMRRAKTDMIDTERLLRSLMAYLRGEPKVWSVVRVPSIAEEDARRLHRERDRLVSERVQHVNRIKGLCALHGIYDYQPLRPQAMARLEQLRTAEGISLPPRLKSEIKRELRRLELVVEMIATLEAERDAIVEDDASTHVNAKKIQHLHKLKAIGPEFATVLVGEIFHRDFNNRRQLASYVGYAPSPFQSGNVAHDQGISKAGNRKGRTTGIELAWLWLRYQPDSDLSIWFRTRVGITKGRIRRIAIVALARKLLVALWRYLETGLVPHGAVLKG

SEQ ID NO: 255184 - protein, 449 aa, unidentified
MRSKPKHRPVPEEIPDADHELAMERVCAVDVAKASGVVCVRTPRERRRVSKVWDVEATTGAVSDLADQLMELGVEKVTVESTSDYWRIWFYLLEAAGLDVQLVNARDVKNVPGRPKTDKLDAVWLAKLTEKGLLRPSFVPPAPIRQLRDYTRLRVDLTRERSRYWQRLEKLLEDALIKLSSVASTLNTLSARDMIEALIAGQRDPRRLADLARGRMQTKRSALIKALDGRFDDHHAELARMLLDQIDTLSAQIATLTARIDHLLEQDDPDDAGGGSVTAQAVAAPTRPSAVERLAEIPGIGQTGAQIILAEIGLDMTQFPTAAHLVSWAKLCPRTVQSGPIRRGGKTGKGNPYLKGALGEAAAAAAKTNTFLGERYRRIVKRRGKLKALVAVARSILVIVWHLLTDPFARFCDLGPDYHNSLINTERRMRNHVSQLTAMGYHVTLELAA

SEQ ID NO: 255185 - protein, 436 aa, unidentified
MHEPEFAAYIAIDWADDRHCWQMWIPASQRSEKGWLDHTPQAIDRWAVGLQQRFAPAELAVCLEQSRGPLVYQLAKYAHLVLYPVLPATLARYRQAFSPAGAKGDPSDTALLLEILRQHRDHLRRLDPDTPETRLLALLTEQRRQLVDERTRHSNRLTACLKLYYPQPLDWIDDIDSPLGCDLLQRWPTLQQLQRVCPDTLRRFFAQHNCRSAARIEQRIQAIVEATVAVHDAALLQAGATATRSLVALLQTLNDRIAVLDQSIAELTPKHPEAYLFADLPGAGPVLLPRLIVAFGTQRHRFSSAAELAAYSGIAPVCRQSGHTKSVVFRRACPTFLRQTFQEFAACSKAKSTWARAFYQLQTDRGKKHHAAIRALAFKWIRILFRCWKDRTPYDEARYLRCLAQRNSPLPGAATAAECTDNEPDTLSDDDSKPAE

SEQ ID NO: 255186 - protein, 412 aa, unidentified
MDVLVERVAGLDVGKEIVVVCVRTPGQGGRRVSETRTYRTMSRSLEAMADWLVESGVTLAGMESTATYWKPVFYALEDRMGTWLLNAAHLKAVPGRKSDVKDAEWIAQLLEHGLVAPSFVPAPEIRRLRNLTRYRVQLMGDRTRDAVRLERLLEDASIKLSAVASSVTTLSAREMLAQLVAGNTDAVAMADLAHGKMRRKLPDLAEALTGHFDDHHALLVGAMLHRLEHVETALAELDVMIAAAMTPWAHQLELLQTIPGVGLKTAQVIIAETGGDMAQFPTAAHLAAWAGVAPAMHESAGKRRPAGSRKGNKWLASMLVEAASSVSRSKSTYLAAQYAQIASRRGRKRAALAVAHSMLVSAYYMLTRDEPYREVGNDWFDQRHADAHTRRLVAQLKRLGHTVVLDPADSPA

SEQ ID NO: 255187 - protein, 284 aa, unidentified
MKVFYLGVDVSKKKLDLCLRSNGKDILYDVIPNDLSSIKSWLTRTFEKFFLSEDSLVVCAEHTGQYTYPLVCATKSIGVYLCLEDAAKIKYCHGIPRGKNDKIDACRIAMYAERYNDCLQPYTASELIIQKLKNLSTERSMLVADRAKYQSQLKDQVDYMEHSIYIAKCNRVEGIINTFTDYIAQIDLEIKELINQAPVIAHQMDLLMSVDGVGERVALKMIMETDAFTSFTDPRKFCCHAGVVPFVYVSGSSQRSKNRVSNRADKSIKHLLHMAALSVSQVEK

SEQ ID NO: 255188 - protein, 400 aa, unidentified
MLSIGIDVSKGKSTVCGMKPGGEIVYAPFEVQHTREGMSELVSLLRSSGEEVRAVLESTGSYHCPVVAALLENGIFVSVVNSLRMKRFCSQSIRKVKTDRIDAMQIALYGLAYWQELQPTRLPEDTYRELQRLARQYYQMTSMLIKAKVDFNALCDQVLPGMQELMSDHAGRHKLSDFVLRYHHTTHILEMGETRFRKDYCKWAEKKGYRNCERMAVLIFATAQNGIPVLPNAPSTQIVITEAIRVLHTVEASRDAILTQMQALAKTLPEYSLVREMPCIGDTLAPRLIAEIGDVRRFHSKRALIAYAGIDAPPYQSGKFCANNRHISKRGNRYLRKTGYEVMQSYVMHKPANDPIFTFIEKKRSEGKCGKLAMVAGLNKFLRVYYGKVTELYRSLSAIE

SEQ ID NO: 255189 - protein, 331 aa, unidentified
MFPVGIDVSKNTLDLCMLYDGIKGRIKTRNIQNNRHSVENILRWLRLQHCSPEDVHVVMEATGVYHERLATELHDAGFRVSLANPHRSREFARGMGIMTKTDKVDAYMLACYAFLKKPHRWEPPAPEIRYLGALLRRRDVLLGDALREENRLEKYLSTDTPADIISSCRRMAQLLREEVSNIERQIKAHIKASPALRRDYTLLTSIKSVGPQLGMHMLIVLRSHNFVSAEQAAAFLGVVPIEKRSGTSVRRRPRMSKIGPPQLRAKLYMSALCGKIYNKRMRNIYDEMCLRGKPKMVAIGALMRKLVHWCYGVLKTGTVFNDEDLKPVLST

SEQ ID NO: 255190 - protein, 348 aa, unidentified
MVVLGIDAHKRNHTAVAVDEAGRKLGERTTGTTTADHLQLLCWAEQFGDARSWAVEDCRHLSRRLERDLLGAGEQIVRVPPKMMAEQRRIARTRGKSDPIDAAAVARAALREPDLPVATHDETSRELKLLVDRRDDLVKHRTATVNRLLWRVHEIEPGWAPKARSLDLAKHQQILADRLAGLPGIVAELARAELADVVELTGRINQLERRISGLVEKAAPTLLAMPGVGALTAAKIVGEAAGVTRFKSEAAFARHAGIAPIPVWSGNTKGRVRLTRSGNRQLNAAIHRIAVTQIRLDGLGKTYYEKKKAEGMSTPEALRCLKRRLARIVFNHLTTDHAASATCIATAA

SEQ ID NO: 255191 - protein, 408 aa, unidentified
MNAVGIDVSKGKSMVAALRPMGEVALLPQEFLHTGVGLEQMAYAILALGEDTRVVMEATGRYHEPVAAALHEYGIYVCVLNPLYIKQSGGGSIRKVKTDKADAMKIAKYGLDNWVDLREYTPMDTVRQQLKLCSRQYNLYMKTVVSLQNNLISLADKTFPGVNELFSSPERADGHQKWVDFVMTFWHCDCICRVSEKAFIERYQKWCKRKGYHFSEEKALDIYAGSCGHFTTLPKNDNTKLLITTAAQQLLAGKTTLAALRAEMTRLASQLLEYETVRAMYGVGETTAAQLMAEIGDVRRFPRRSSIVGFAGVDPAVDQSGKHETQSTSTTKRGSPHLRKTLYQIVCTYLRKAPTDEPVYQFLDKKRSEGKPYFVYMTAAQNKFLRIYYARVKECLEAFDAQQDTAQS

SEQ ID NO: 255192 - protein, 338 aa, unidentified
MSEPALIGIDLGKHTFHLHGQDKSGREVFRKKCSRAQMMQFFASSQSCVVAMEACAGSHCVARQLAAIGHTPKLISPQFVKPFVKGNKNDFVDAEAICEAASRPSMRFVTPKTESQQTLSVLHRMRESLVRDRTRTANQMHGFLLEFGVSLPRGLAIMKRLAVVLAEHELPVRLTVLLQRLHNHLIYLDEQIKAMDKELACQVADDDLGSRLLSIPCVGPITASLLAVEMGDGKQYRCSRDFAASVGLVPKQYSTGGKANLLGISKRGDKHLRQLLVQCSRVYMQRLDHQKGALADWVRSLLSRRHSNVVACALANKLARIAWAIAAHHTQYEAGPGA

SEQ ID NO: 255193 - protein, 371 aa, unidentified
MTVKFIGLDVHKDTIAVAVADGDGAREVRFHGTMANTPEAIRRLVARLSGPGVVLRFCYEAGACGYGVYRQLRRLGVDCMVVAPSMTPRRPGDRVKTDRRDAMTLARLLRAGELTAVWVPDEEHEAIRDVVRARRQAKDDLVSTKLALRSFLLRHERRFPGRSAWNKTYWRWLGEQAFASPHQQLVFGEHLRRIEEAQARCDRLDAALAEAVAGWRLAPLVEALQALRGIALVVAATLVAEIGDLGRFETPKQLMSWLGLVPSEQSSGARVRRGAITKTGNGQARTMLVEASWCYRLPAREEQRYRARVQGLPEEIRSIAWRAQVRLCGRFRRLAAAGKPLPKVTTAIARELAGFVWDIARRVRPAVAAQA

SEQ ID NO: 255194 - protein, 422 aa, unidentified
MRAVGLDVHLDFCEVAVVEDGEVRSAGRIETKPEQIELFAGSLGPDDRVALEVTGNAWEIARILEAHVAQVLVVSPSDTGIRQARAKTDRLDARTLARLLAAGSLDAVWRPDRQTWVMRRRLSRRSQLVWARSRAKNEIHAVMMRQLVGRPPFSDLFGVKGRAWLAELELASEERETVDSAMRQIEFLDSEIAEVERLIATDALESTEIRRLMGVPGVNVIVAASFLAAIGDIHRFENPRKLVGYLGLDPRVRQSGPGPATHGHISKQGSVRARHALVEACWSAVRQPGPLHAFYERIRARRGHSVAIVAAARKLACLCWALLTREEDYAYAQPSLTKKKLRRLEITAGAKRYTPQASGIYASNTAVRQAERELARQAEVAYARTVRDWHAAQANKVGASATPGRASNKPSKGKAARQTTSP

SEQ ID NO: 255195 - protein, 352 aa, unidentified
MKHYIGCDAHKKYSVFAGISEAGEVIEAQRVEHDRKVFRRFLETLPKASRIAVEATGNWYWLIDEMGEAGHIPSLVHAARAKLMMGQINKTDKLDARGLAILARNGTLPEVWIPPVEVRDQRELPRMRMALVSIRTKLKNRIHATLAKYAITIDQTSDIFGVKGRQLLEQAIVALPTETRQSVKVQLELLDQVEQSIAQTEKRILEVIKGDHTMQLLRSLPGVGPILAIVIALEVGTVSRYASGEKLTSYAGKCPRVNSSGGKTYYGRVRPDVNRYLKWAYTEAANIIVLQQDRLGDCHVVRLYQRVRQDHGHAKAVTAVGRHLAEATYGMLRNNEPYREPREKPVVKSQKG

SEQ ID NO: 255196 - protein, 409 aa, unidentified
MQVIHVRCAGLDVDKRTVVSCVMISLPDGGVEKHTRTFGTMTPEILALSDWLKGYGVTHAAMESTGVYWRPIYQLLEGQFTLLVANAQHIHRMPGRKTDVKDAEWLADLLRHGLIAPSFLPAQPQRELRELTRHRSNVAARRAQCINEVHRTIEGTNIKLSSVATDITGKSATDMLRHLLSGQYDADFLAELARGVLRKKIPQLRQALQGVVRPHQQLILSQLMADIEALEQQVKALDAEIGRRLEKEQELIERLDEIPGVNSKVAQVIVAELGTDMKRFGSASRAAAWSGMCPANRQSGGRHYRARSRFGNKHLKSALTEAGRAAGRSIDTYLGAQFRRITARRGSKRAALAVGHSILTISYHMMERATRFEDLGADYFDRRNPQAVKNRLVQRLEKLGYKVSLEQTS

SEQ ID NO: 255197 - protein, 424 aa, unidentified
MKDTAARKRKQVPEGYLVVGVDPHKKRHAAVAITQDFTTQAKFKVDNTREGLETMLGRARAEMVKSCCRGVIFAIETGGHYWRNIAYYLDERGIPFRFINQYTLKRRREGKDLNRRKNDYRDSEVAAQLLCTGEFVESVIPQGVYAELRTSHNAYQRLVKERTRITNLVKGLLDGLFPEFTRVFKDPGGLTALTVLSTCPIPGVIAGMTEDEFVATIEARHKGRRLMRKKLRTLHYSARGSIGIQAGARSVSFEIGFLVDKLELIRQQIRIVERILVKLVDETEEGKYLLSIRGLHYIAVAGLLAELGCFKLYRSSKQMIKMAGSNPTESESAGKKRSKTPMSKQGRPLLRYCAWTAVIPMLRFNEDFRAWAKQRRERPAHANPLNGREIVGAALNRLLRLAFAMVKNQAYYQDTRPALIPVAV

SEQ ID NO: 255198 - protein, 348 aa, unidentified
MLIIGCDYHPGFQQIAFVDTDTGEAAERRLTHREEAEQFYRALQARRVRIGMEASGHSRWFERLLNELQFELWIGDAAEIRTKRVRKQKTDREDARLLLKLLREDRFPRIWVPDAENRDLRQLLWHRHRLVQMRTRIMNQLHVVALNEGVRRKKALWRPAGRSELESLVLAPWALRRRRDLLDLFDQLIPKIHDLTRALEEEVEKRPIARRLMTHPGVGVLTALAFELVIGTPERFHCGKQIASYVGLVPSEESSGDRRRLGHISKQGNALLRFLLVEAAQVTVRSQPPWRSKFFHLAMRRGRKIAKVAMARKLAVHLYWMWRQGLDYGQFERLGSHAGEPGNRHGVQ

SEQ ID NO: 255199 - protein, 346 aa, unidentified
MISALMSKTEREEAPMTMVVGFDVHRSQITYDSLDTETGEVMTGRIAPATRQALRKWLSRFEEKKMKVALEATTGWRFCVEEIRAQGHEAYLAEVAETRALRGRKRRAKTDRADARWLRTLLVREQLPGAWIPPTEIQELRIRVRLRQALVEERSAWLHRISAAIFHQGLRGREEAAALELSPRACELVRVALEMVRSLDRQLEPLEAELRSYANAQPACQALQGNFGIGPVIAVAIHAEVGDARRFSSSRKLVRLAGLDITVNESADKRKPGHISRQGAPLLRWALYEAAQAATRHTSPDRHDYRKLKARLGHNRASIEIARRILRRCHHTLVALGDEQLAPTVD

SEQ ID NO: 255200 - protein, 338 aa, unidentified
MNNGLKLLGIDIGKNSFHLIGHDAGGHQVLRKCFNRNRLLQFAAQIEPCTIAMESCGGSHWLARKLASLGHRVKLIAPQHVKPYVTGNKNDFIDAEAICEAASRPRTHYVAAKTVEQQVLSVQHRLRESLVCHRTEAINRVHGFLLEFGIVLPATKAAIAKVPELIDNSRSDLPLQLKRIMEHLLEDIRRLDAEIKACDVQIKQQLAQDDAGTRLMTIPGIGPITASALVADLGDASNFKTSRDLSAFLGLVPRQFSTGGRPVLLGISKRGDRRMRTLLVQGSRALMIRIDRREDALGQWVRNLLARKHPNKVACALANKLARIVWAVLRRGGTYNAS

SEQ ID NO: 255201 - protein, 347 aa, unidentified
MDQIIRIGMDTSKHFFQLHGVDAAERPVLRRKLRRNDVVAFFAKLPPTVIGMEACGASHFWARELRKQGHEVKLMAPQHVKAYVKRNKNDGRDAEALCEAMSRPTMQFVAVKSEEQQAALMLLGLRAQLIGRRTQLSNAIRSYAAEFGLTTARGLDKIEPLLSRIAQDETVPALARELFALQGKNYAQLQGELKTIDAKLLAWHRADACSRRLAQIPGVGPIGATALVMKAPDPRAFASGRDFAAWLGLTPKDHSTAGKTRLGKITRAGDEALRSILVAGATAVIQQTRRGRGRSSSSWLIALLARKPPKLAAVALANKTARIAWKLMVSGDRYNGARMPATSANAA

SEQ ID NO: 255202 - protein, 360 aa, unidentified
MLQWNLSRITTFTETDLSIPYWIGVDVHKRSYHVALHRSDGEHLTWVTSAEPQTFANQLLSLPVTIRAVAYESGPTGFGLARTLNQVGIPVIVAAPSRVPRAVRPGAKSDRLDCIKLAEHAARGMLKCIAIPDEDDEALRALLRRRHQLTKSLRRAKQRIKSFLLLFGIPEPTGLDHWSIRSKESLAELQLGPVHQSTLASMIRQMKYVEEEQKIVIAQVKSYITESGLGDQVDFLTSIPGVGPITALTFQLEIFNPGRFNRAEELTGYLGLAPMVHHSGEKTPSGRLQAVGQKCLRSLLVEAAWIWKTRDEGARLLYNRLLAKSGIPQKAICAVARRLAIILWRIAVEKRPYYPIQQPI

SEQ ID NO: 255203 - protein, 450 aa, unidentified
MAQGSGLTRGDRNRNRKLEALREAVARDRAVLAVDLGEDKQVAVVMDHECRVLARKVVKAKAHQLAGLLDWGADRAVKAGFAGLTVACEPAGHRWKALMGLADGAGHGFCCVQSLAVHRAREGDDYTLGKTDHRDAYLIGKLAVRLECYLPERADEAWARLRHLGARRFALVADVTSCMQQAGDLLGCAWPAPLGAAARPLESVTWLAGMAVITGRCCGQPRRLRKLGYDRFLAAVRRELPRWGGKYVRHSIVRGLWDALADAGGVAAQRPGALERVHLLLGDWRELRTRLAGTEERMVAVRGKLGLAELVASIDGVSALSGAVILAEAGDLQRFTSGRAVVKHAGLNPSERTSATINGQTRISRRGRPGLRAAAWRAVWGALRHNPVLQAKHAHLTGRHANRLADGQARTACAAALLRWLWAVVITGQAWDARIAAGQIPARPVTTAAA

SEQ ID NO: 255204 - protein, 364 aa, unidentified
MSTITVGVDLAKNLFSVCEVDVGGRVLRRQDLRREAFAVWLAQVPAGTVVAMEACSGAHHWARRCLEYGLQPRLMAAQFVTPFRKSRTLKNDRNDAEAIATAARQGNMRFVPVKSVDQQARLSWHRVREGYKGESLALANRLRGLLAEFGIVVAPSDRALRVALADLDQMALPSELKELLHDLSGHWAQVRERIIACDTRIEAHAKADERCVRLRAIIGIGPITADAVVASVGSAKEFKNGRQLAAWLGLVPTQHSSGGHTRRGTISCRGDAYLRMLLIQGGRSRLQRAKAVSVERATPEQIWIQQLACRMPFGKLLAAIANKHARQLWAMLAHEETYDPDAWLKHPMVQRPAGKHAVMVAAMA

SEQ ID NO: 255205 - protein, 422 aa, unidentified
MLEEDPQVEEIVARVAALDIGKAEVVCCVRIPHEDKPGRRLQEVETYSTMTRRLLAMSDHLRCLGISRVVMEATSDYWKPVFYLLEAQGLDPWLVNAKDVKHLPGRPKTDKLDAVWLCKVAERQMIRPSFVPPPQIRRLRDVTRYRIDLVGVRTAEKQRVEKLLEDAQIKLSVVASDIFGVSGREMMAALVAGQTNPKVLARLARGRMRVKIGALEEAFTGHFTDHHAFLLGAMLARIDALDADIAALEAKIEEMVAPFAQAVDKLDEIPGIGVIGAQVILAEIGVDMSRFPTAAHLASWARFAPGVKQSAGRKKGNGTTGHGNRYLARVLGEAAVAASKTDTFLGERYRRIAKRRGKKRAIVAVGRSILVIVWHLLSDPEARFHDLGADFYDNRTGPERKKRNHIRQLEALGYKVILEPVA

SEQ ID NO: 255206 - protein, 341 aa, unidentified
MNVKTIGIDLAKNVFQIHGVDEHGKRLFNKQLRRAQMASFFANIPPCLIGMEACTSAHFWANKLISMGHNVKLMAPQFVKPYVKTNKHDAADAEAICEAVTRPNMRFVPVKTAEQQAVLALHRSRQSFIKQRTAQANQIRGLLAEFGIVVPRGIQQLQRRLPELVEDADNPLPVLFRTQLSLLQHHMAYLFDVIATLDKQIEQCYRQNALCQRIGKIPGIGPVTASALIATIGKANNFENGRQLAAWLGLVPRQHSSGGKQVLLGISKRGDTYLRTLLIHGARAVLQSAKHKQDAVSSWANQLMARRNNNIASVALANKNARTVWALLAKEREYCAPIISA

SEQ ID NO: 255207 - protein, 326 aa, unidentified
MATQKQTQEVAFEEVVERGCGLDVHKKEIVATVSGTGIESETRTFQSTTRSLTELKEWLLALGVTHVAMESTGVYWKPVMNILEPGGFTIMVVNARHIKYVPGHKTDKKDSAWICKLLRAGLLKGSFVPGRNQRDLRDLTRYRRKLVQQQSAEHNRMIRIFEDANLKLSSVFSNIRGKMCTRVIDAVIAGETDPQKLAALCTHRRLKATKEEIALAVEGCFSEHHKFMIRAIRTSITNIEAEIDHLDREIERRMQPFDAQIRQLCDIPGMDVTSVNELLAEIGVDMEVFPTAEHLTSWAGLAPGNNESAGKKKAHTPTTATKPQKR

SEQ ID NO: 255208 - protein, 355 aa, unidentified
MDSIKYIGLDVHQSTISAAVLDREGKLVQQAILATHASAILDFFHGLRGELHVTCEEGTHSAWLYDLLGRRVARLVVCNPRKNALLKAGNKSDQIDARKLAELLRAGLLSPVYHGQNSTQTVKQLVRSYSALTEDTTRTMGRLKALYRSQAIGCAGKKPYGRRHRADYLEQLREGGLRRRAERLYAQLDSLQQLRREARRELILECRQHADAKILRQVPLLGPIRVALLIGRVQTPHRFRSKRQFWAYCGLALETRSSADYQMVNGQLQRRNKPVFIRGLNLNHNHDLKNLFKSAATSAAAHPGPLREFYENLLGKGMKPELARLTLARKIAAITLHVWKRGEPFDPNYVKPQAA

SEQ ID NO: 255209 - protein, 322 aa, unidentified
MAMLSFGGIDVSKDRLDITVLPDEQCSSVSNDAAGWAELIEQLRGSSITAIGVEASGGYERGVVRALLAAGMSVRQINPFKLRQFAKASGILAKNDRLDARMIASFVAIMPTRPAQRQTPMIEQLAAMLTVRRQLSDHKVATENASRLLEDAMLQRLSRRRVARLTADIDLLDQRLVEIVTADPALAHRFWLLTSMPGVGAVLACTLIALLPELGQMSRKQVAALVGLAPYDFDSGKLKGRRCIWGGRARVRHVLYMAALSASNWNPALKAFHDRLEATGKKPKVVIVAVMRKMITTLNAMLRDGTAWVDRYSGRRSASTAR

SEQ ID NO: 255210 - protein, 412 aa, unidentified
MNAVGIDVSKGKSMVAALRPMGEIVLSPKEYLHTEVGLEQMAYAIIALGEDTRVIVEATGRYHEVVAASLHEYGVYVSVLNPLFIKQSGGGSIRKVKTDKADAMKIAKYGLDNCIDLRQYTPMEAIRQQLKLCSRQYNLYMKTIVALQNNLISLSDKTFPGVNELFSSPERADGSVKWIDFFTTFWHCDCICRVSEKAFTERYRKWCKRKGYHFSKNKAFDLYTGSCGHLPTLPKNDNTKLLITTAAQELSTARAVLAVMRDEMLRLSKQLPEYDTVLAMYGVGEITAAQLMAEIGDVRRFLHRSSLVAFAGVDPAVNQSGKQSAQSNPSTKRGSPHLRKTLYQIVSTYLKKSPVDEPVYQFIDKKRSEGKPYYVYMTAGANKFLRIYYARVKECLAASDAAFSDYTPANPT

SEQ ID NO: 255211 - protein, 394 aa, unidentified
MNASNLAAKMLCLKSISLEVINFIRVIEQTLNTERLMQHKVKELNFGGQNIYVGLDTHRNQTTVTVLGENLHHKTFSQPTAADILARYLKKNFPGANYYAAYEAGFSGFWLQETLQSQGINCIVVNAADVPTKGKERNQKNDNVDSRKIAYALRKGDLDAIYVPSKECQRDRGLLRARQRIVSNQTRCRNRIKALLNFFGIVYPEKFSKSGTHWSRRFMDWLKSVDLGGSGNDTLAIYLEEAEFLRALLAKTMKKINHLSNQERYAKNVKLLISVPGVGRLIAMILLTELERIDRFKTRDSLCNYVGLIPDVYSSDQTVHVGDITQRGNKSLKKFLIESSWIAARTDPALVMKYNQLCSRMNGNKAIIRIARMLLSRIRYILMHEQEYQMAVVA

SEQ ID NO: 255212 - protein, 428 aa, unidentified
MNQDADNWRQRTAFVGFDWAGDHHDVVLVDQHGRIVEDFRFDDTAEGWQRLIKTLSKHPDPAVAIETSGGMTVQRLLEAGYAVYPVNPKAAKRYRERKSPSGTKTDHLDAWSLADALRLDGHTWRQLKADDPLTVELRLLCRDEVTLIEQRTALICQLRAALHEYYPVALEAFDEWTLRSAWAFVEAFPTPEALAKAGKRRWEKFLHTHKLYRPETYQKRLDMFARAETFCGNRATTNAKSMLAVALAGQLRVLQSHLDKFREQIEKLFAQHPDHDLFGSLPGAGEKLAPRLLAELGDDRDRFDSPQALQCYAGTAPVSFESGQIKRVRFRRACQKALRHSVHLWANLSRATCPWAEAYYRKKRDEGQTHACALRCLGQRWLKILWKMWQTHRPYDAELHQRNQVKHGSWVIALTTATLEQRTTAETG

SEQ ID NO: 255213 - protein, 379 aa, unidentified
MNDYSKYVGMDVHKETVVVAIAKAGRGDAMQYGEIDNTAEAIHKLAKKMSANGERVLFCYEAGPCGYGIYWQLKEMGHDCMVVAPSLIPKKAGDRIKTDGRDALTLARLSRAGELTAVWVPDKEQEAVRDLTRAREDMKVMEQHARQRLGAFLLRHDKRYPGKSAWTQAHFRWMEGLRFEHPSQQIVFQEYVDMVKYAQARLEALQQQMVAALETWSMREVVIALMALRGIKLVAAMTILAELGDLSRFESAPQVMKYLGLVPSEHSTGQKKKRGGITKSGNGHVRRVLVEASWSYRFPARKTAALQRYAEKTSEEVQEIAWKAQKRLCMRYRHLLLKGKLKVEVCTAVARELTGFIWAIACEVMKKRGIKMIAKAKAA

SEQ ID NO: 255214 - protein, 354 aa, unidentified
MFFAGIDAHTRYVVVVIINRMGERVAGPTRVTVRHPERLLEVLAAYRPLDAIMETSSSWPWLHEVLTGAGIHFVLAHARRLRAIAEANYKRDDIDAELLARMRLAGLIPEVYPTPFAQREWATLLRHRTTLVTQRTALVNRIHAQLHMRGLHLERGRLLTRAGRQWVRTEAWPQLGLEQRALVRSHLRVIAGLRPLIRALDRHIAQVAGTIPQAQLLRTITGIGPQRALVICAEALPIGRFRTPGHLASYAGLVPTSKQSGERAVRHGAIPAGANRWLRGALVRAVVTHVQHAPNSWLTRYYLAQKARLGWPTARVAAARKLARAIHAMLRTNTCWKNDPVEGELERAHAALTA

SEQ ID NO: 255215 - protein, 343 aa, unidentified
MQVVTTVGLDIAKAVFQVHGVDAAGQVVIRRQLKRRYVLAFFEKLPACLVGIEACASSHHWSRELKTLGHTVRLMPPAYVKPYVKRQKNDTADAEAICEAVTRANMRFVATKTPVQQSCLTLHRPRHLFIRQQTAVINVIRAHLAEFGIVAPVGRKGIETLLDVVANPTDKRVPVIARACLAALGAQLRRLKEQILEFDRMIMAWHRSNEASKRLDAIPGVGPVLATALVASIADPKAFRSGRNFSAWIGLVPKQHSSGGKDRLGNISKQGDRYLRSLFMAGALAVIRYAKIHGTTHRPWLTALLARRPTKVAAIALANKMARMVWAMMTRGERYKDPIALAA

SEQ ID NO: 255216 - protein, 417 aa, unidentified
MAMKIVRFNCCGMDVHKNLVVATIGITDSKTNITEYFQRSFSTLNSDLYRLKDWLKSHHCSDVCMESTGKYWIPIFNILEDEINVRLTHPKYVKAIKGKKSDKKDSKWICDLFKHDLIKFSFIPPREIRELREIARYRYKLVCMRSSERNRYQNCMTVSNIGLASVISDPFGKTASNIMKEVMKSNVIDDDKILKLVHRNCKNKDKILDSLHGYRIESDQRFKMEKSLDHMEYLDQLIDSCEVELIKRAYPLRRSFQHITQIKGISALSAILIISEIGIDMSQFESDKQLVSWAGLSPANNESAGKKKSVRISKAGQYLKPLLVQCALSAIKDKASYFGRKYSNIKKRRGHKKAIIAIARMMLVSIYHMILTGEEFQPTDYESLMNPKSNTDQSLTVEKALNFLKRSGIDISSILVN

SEQ ID NO: 255217 - protein, 472 aa, unidentified
MYEEERIRHARYCQLRREIRGSGEYLIVGIDIAKDKHHAFFGTATGKVLLKRLVFHNTKEGIMKLMGQVEALQIRHNLSEVVFGFEPTGNYHKPLGDHLVKNGHLVVLVSPAAAKKNREIMDGRWDKNDTRDAANIADLISQGKCLFYEYPPQGIRDLRDFLSLRRRFKKEEHRLRMRIRNNLVTKHFPEFDRFFSESEAESLSIVKWCLDPQKIHALDFEKFFVMVTSKRRSLEQERRLRAIHCTARDSIGCTIGEAGGFESGTLVNQVKEVRAVIKDIESRMEEISRGFAEYEFLLSIPGFGPYISSVVLASIGNPWRFQNSSQVIRLAGYDLNASRSGKTSDKAVPEISKKGNAELRYALYQAALIGSTRNRDIMDYFTRKLKGRSREKGIGTKMRVKLAVKLLVIAWTLMKKKEPFNPEYLKDSCLVKQSGVSHILEEKRAVAMVRSRASVSSSRRDRRPLIANRSAG

SEQ ID NO: 255218 - protein, 331 aa, unidentified
MKSPIAIAAVAALGIDIAKLKFDVCLIKPNGKAKHKIFANTRHGFEQLIAWLDSHQVSDLHACLEATGTYGEPLALFLFEAGRLVSLVNPAAVRAFANAGLSRTKTDKADAELIARFCLAQQPKAWQPPAPEVRQLQALVRRLESLVEMRVAEENRLSSGVSAAAVRQSLEEHIAYLIEQIKQTEALIRQHINHHPDLKEQSDLLDSIPGIGETTAALLLAEIVNIKQYTSARQVAAYAGLVPRERRSGTSVRGRVCLSKIGNARLRKALYFPAITALRCSSFFKAWADGLRERGKCKMSVIGAAMRKLIHLAYGVLKTGKPFDPNWAKTA

SEQ ID NO: 255219 - protein, 350 aa, unidentified
MDSVKYIGMDVHKEAISIAVLNSSGKLAMECTIETKASTILDFLKGLRGSLHVTLEEGTWAAWLYDLIKPHVTELVVCNPRRNALLKEGSKSDRIDARKLAELLRSNMVRAVYHGEHGVRALRELARSYLTISTDLIRVMTRVKAIYRSWGIPCRGKQVYAERHRAEWLGKIQEAGVRRRAEFYYQQFDTLRALRQEVRRELLAEAQKHDAWKLLREIPFIGPIRAALLIALIQTPHRFRTKRQLWTYSGFGIETHSSAEQRFVQGELQRAKRAASIRGLNRNHNHELKNVFKSAATVAASKAGPFKEFYDALRAKGIRPEMARKMAAITLLVWKKGVRFDAQHLKPQTA

SEQ ID NO: 255220 - protein, 400 aa, unidentified
MAVAVGVDVAKEFHWAVLVHAETGRVLASRKVDNDPTAIQALIDEIRAAEAEHGPATAAVDVLGGIAGLLQVMLLDAGVRLVHVPGLAVNRARRATRGGEHKSDPRDAKVIADQIRWRADELRTIEPATEADSEVRLLVGRRRELVVEQTRRIGRLRDLLASIHPGLERVIEPTHKIDAALLARYVTPAEIRRAGRRRISEYLRTTGRHNTTVIDALVDKALTAASAQHVTVPGETVAADIVRDLARETLTCRDKLADLDKRIHEVLERHPDAALIQSLPGMRATLTAEFLAVAGGITRFPTGDQLASAAGLAPVLQQSGKMHYLRRATSGDKTLKRIFYQSAFCALQRDPASRTFYDRKRAEGKRHHQALIALARRRINVLHAILRTRQPYRLDHALAA

SEQ ID NO: 255221 - protein, 408 aa, unidentified
MGAGDEGVAPSLLPKTNRWSVPMQRNDLSRSLVAFEQDSTLVAVVELSLNKWLVKGLVPGVSKQPLRKLDADAEALLALINRWRKEGIKGGGTIKRMVVAFEAGRDGFWLARWLQERGIECYVIHPNSIPVSREHRRPKSDRLDTELLMRAVLGWLRGERKHCQMVAIPTLAEEDARRPTREHETLGKERTRIVCRMKAILARHGVCGFNPKRKYAAERLEKLCCQEGGSLPPNTLAELRREMAFLRLVADQIKEIEKTREQRLRRAPQQGTHPMVLLLARITGIGIETADMLVHEVLSRNLRDDRAVGRYAGMTGSPDESGSKRREKGLARAGNAHVRRGMIQLAWRWLRFQKDSALAMWFEKRTVSARGDIRKTMIVALARKLLIALWRLVTTGEVPAGAKLRAAA

SEQ ID NO: 255222 - protein, 312 aa, unidentified
MEKLSYGGIDVSKDRLDVVVLPEGWFFSVSNDTAGWAELVARLRPLAVSAIGLEPSGGYERGIIRALLAAGLSVRRINPNKLRQFARARGVLAKNDRLDARLIAEYVAIMPTRVVQRDDAVERLAEIVTMRRQLCDEHVAVENQAAHLEDAMLRRLSKRRLTRLEADIRLLDRRLAEMVATNAAFARLYDLLTSMPGVGAVLAFTLIALLPELGKMSRKQIAALVGLAPYDFDSGKLRGHRSIFGGRMPVRNVLYMAALSASRYNPALKAFSNRLAGADKKSKVIIVAVMRKMITTLNAMLRDNAAWQLKPT

SEQ ID NO: 255223 - protein, 340 aa, unidentified
MHATTYGLDVAKRVFQMYWVDGDTGEIVNRRFGRDDLIQFLSRRPPGRVALEACGSAHWWARKIKALGHEVVLLHAKFIRPFVQTNKTDAADARAIWTAVQQPGMRTVAAKTEEQQTMLSLHRIRSLLVKFRTMQVNQLRGLLYEFGASFRAGRVGGLAEVRARMVELEEALPGAMMCCLQDQLRRIDGLQTEIDQIEHRIAAWQKQDAACSAIAAVPGIGKLTATALVATMGDAATFKSGREFAAFLGLVPRQSGTGGKVRLGSISKRGDPYLRTLLIHGARSVLYHTKMPTAWASAIKERRPANVAAVAIASKMARTAWAILARGQAYQRDHISVRPA

SEQ ID NO: 255224 - protein, 401 aa, unidentified
MQEPLQHNSIDVFVGVDVGKGQHHAVALDRSGKRLYNKALPNDEAKLRALINELKAYGQLLFVVDQPATIGALPIAVARDEGVLVAYLPGLAMRRIADLHAGEAKTDARDAAIIAEAARSMPHTLRSLRLADEPLAELTMLCGFDDDLAAQVTQTSNRIRGLLTQIHPALERVLGPRLDHPAVLDLLERYPSPAALAETSEKTLANRLTKLAPRMGKRLAAEIVQALGEQTVVVPGTQAATVVMPRLAKQLAALLQQRDEVASEVERLVHAHPLYSVLTSMPGVGVRTAARLLTEVAHKAFASAAHLAAYAGLAPVTRRSGSSIRGEHPSRRGNKVLKRTLFLSAFAALRDPISRAYYSRKIQQGKRHNQALIALARRRCDVMFAMLRDGTFYQPQTAPNA

SEQ ID NO: 255225 - protein, 388 aa, unidentified
MGQPLWAGVDAGKSDHYCVVIDADGKRLLSRRVANDEAALLELINAITALADGGELTWAIDLNAGGAALLIALLIGAEQRLLYISGRTVYHASGGYRGEGKTDAKDAAVIADQARMRRDLQPLRPEDDIAVELRILTSRRTDLVTDRTRAINRLRAQLLEYFPALERAFDYSASKAALILLTGYQTPDGLRHAGAARLAAWLRKRKARNADAVAAAAIEAAKSQHTVVPGQQLAAAMVARLAEEVMTLNTEIGDTDAMIEERFRRHRHAEIILSMPGFGVILGAEFLAATGGDIAAFGNTDRLAAVAGLAPVPRDSGRIPPLQQTAAARLLPGISHRHPHRHRITDLLRPQTRSRETPHPSRAGTCPPPPQRHVGDAARPQALPTHRT

SEQ ID NO: 255226 - protein, 357 aa, unidentified
MRERRDYILRNEKVFVGLEDSKKTWCLCARSGGVIVHEASMPAQYEVLRNYFENKFPECQIHVMYEAGFRGFELHDQLVADGWECVVTPPHTVTEEKVQRKKNDRSDCRRLAKNLENEDYRKCFVPDKELRQDRQVSRTYGQVHADIKRVRNRIRRMLEFHGLDNGLLAGRWSGAAYPRLRQHLAEVEMSDSLRLSFEVMFRELENLRELKKELLLQLRKLARSDRYKRSVELLKSAPGIGMLTAIRLALEWGDVSRFGRKEDFASFLGMVPSDYSSGERERHGHITKQGNRMVRGWLVESSWVAIRHDPVLLEKFRRVLRNCGSKKKAIVAVARKLALRLRRALLSGEPYAVGVLE

SEQ ID NO: 255227 - protein, 356 aa, unidentified
MSSDVKYIGLDVHKEAISIAVLNGAGKLVMESILETKAVTLLQFLQGLRGELHVTLEEGTWAAWLYDVLQPQVHEIVVCNPRRNALLKEGSKSDKVDARKLAELLRAGLLRPVYHGEHGLRTLRELARSYQTISKDLRRVMNRLKAIYRGWGISCGGTQVYAPRYREEWLNKIRQAGVRRRAELFYQHLDGLQVLRRQVRGEFLAESRKHKAVKVLRQIPCIGPIRAALLLALMQTPHRFRSKRQLWTYSGLGVETHDSAQHRYVDGQLQRSKKPQQVRGLNQDHNHEMKEIFKSTATSATRGAGPFHDFYAGLLAKGMKPEMARLTLARKIAAITLTIWKKGGRFDAEHLKPQAA

SEQ ID NO: 255228 - protein, 366 aa, unidentified
MASLPSGPETVYVGMDTSMREIVCGVLRPGREVPAVDRIPNDEESVRRLIGKLGDRRLLSVCYEAGPSGYGLHRLITSMGVACEVIAPSLVPKGASDRVKTDRRDAVRLALALRAGMLTAVRVPSPDEEAVRDLVRARGDLLDDRKRMQQRLNALLLRHGRVWGGGKKWTFAHRTWVDRQQFGEPALQDVLDAYRGALEARESELRAVEARLSAWAERDPLAPAVAKLGAYRGIAELTALTLAAEVVDWRRFPSARAFMGFTGLIPSEYSSGTRTRRGSITKAGPEGVRTALVESAWSYRYRPAIGALLRRRQAGADPATLARSWKAQQRLHATWKKMTGHGKPPGVVTTAVARELAGFVWAEMTS

SEQ ID NO: 255229 - protein, 326 aa, unidentified
MHTHFLGIDIAKSKFDCALIRPDGKVRNKVLPNNALGFAQLLTWLDAHGVPSSELAQLHVCMEATGIYWEALAEFLCDQAIVVSVINPAQIKSYGASRLMRSKTDKIDANLIAHFAKERRPQAWTAAAPHERVLRSLVLRLEALQNMLTQESNRLQVANRAVQPQIQNHIDWLNAEIKALAKLIKDHIDKQPDLRQKRDLLDSIPGIGERTLAIMLAYFGSAEQFDNARKAVAFVGLDPRQHESGSSVKGKPRMSKVGHAFVRKALYMPAMTALYKTEWGKRFRERLANAGKPPKLIIGAMMRKLVQVAVGVLKSNKPFNSALHCA

SEQ ID NO: 255230 - protein, 386 aa, unidentified
MPQLNDLSRSLVILEQDATLIAVIEMGQSNWLVAGIVPGVERSPLKKLAVDESALLKLLNRWREEAEKAGHRIERIAIAFEAGRDGFWLARWLRARGIEAHVIHASSVAVSREHRRAKTDRLDTELLKRAFLGWLRGERDHCKMVAIPTLAQEDAKRPNRERESLVGEQSRIVNRMKAALARLGIRGFNPKLKKAVERLDGLRTPEGEPIPPNTLAELKHDMERRRLVRSQIRDIEGTRLERLEQAPGDGPHVMVRLLARVIGVGVETADMLVQEVLSRNLRDRRAVARYGGLTRSPDESGKKRREKGLARSGNARVRRGMIQPAWRFLMFQKDSALAHWFYARTKNAPQTRKTMIVALARKLLIALWRLVREGAIPEGVVLRPAL

SEQ ID NO: 255231 - protein, 343 aa, unidentified
MTEVTTIGVDLAKTVFQIHGVDASSVIVIRKQLRRRQVLAFFKKQPPCLVGMEACATAHHWAREIAALGHEVKLMPPHYVRPYVKRNKNDAADAEAICEAVTRPTMRFVAVKSAEQQSVLMLHRTRELLVRQRTMLVNAIRAHMAEFGVVARTGLPQVKELLAVIADKEDERIPPLARTCLEGLARQLLSLEREIIGAERHIHAWHRTNDGSRRLETTPGIGPITASALASSITDPHVFRSGREMAAWIGLVPRQNSTGGKERMGRVSKQGDQYLRWLLVAGAMTVIRHAKRRGTTDPWLADIIADKPTKVAAVALANKNARIAWALLRQGGTYQKPVTGSVA

SEQ ID NO: 255232 - protein, 353 aa, unidentified
MPAIKPPIVPLKYVVGIDIAKDSFVACLGYLEVGQQLHFGKEATFDNTASGFADLLQWVAKHQAADSPRWFVVEATGVYYEELAYFLADNQQLLSVLLPNKVKHFARSTEQKSKTDQLDARLLCRLGLERALPAWQPPTPALRQLRGLARERQVLTRQGAQLKTRAHAYAHSYQPDSRTLARLAAQQQFVVQQLKALDQDLADLLTAEPELARKLAHLTSIPGIGLTTAIVVVAETSGFVLVENERQLTSYAGLDVVQRQSGLSTPATRISRRGNVRLRTALYLPAVSSLRYNPQQMAFYARLRARQPSGKPGVIAVMRKLLVRCYSLWKNDCPYDPHYHPAHVAEKEVAPTT

SEQ ID NO: 255233 - protein, 342 aa, unidentified
MSKVTVYVGLDYHKDSIQVCIMDQSGQVLANRSCANDAKALVLLVAFFGDHVRGAIEACTGAAELADELVARHGWDLDLAHPGYVNRMKQSPDKSDYSDARMLADLVRVGYLPRVWLAPHDVRQLRTLVRYRQQLVNQRRATKLRVTALLREARLVEPQGLRRWGSPWLAWLATTAGLGSEARFVVDCHRAELRRLDEQIRGVQLRLATVTAEDPVVSRLVAMRGVGMVTAWALRAEIGRFDRFRTGKQLARYCGLSPRNASSGQRQADAGLIKAGSELLRATLIEAAHRLIRFDTRWGELAAAMRAAGKPACVVAAAVANRWVRWLFHQVEGGAITLKTAG

SEQ ID NO: 255234 - protein, 306 aa, unidentified
MVNVGVDVGKWFLDICLYEKDLHWQVENTQAGIKKLLGRLARYQVERLVMEATGRYQHLLAEKAFEKDLPVCVVKPLSVRRYAQAIGKTAKTDRIDAQVIAEYGAIIQPPVTLKKSKNLLLIKDLLSRRRQLVAMRTRELNRIKIMGKALETSCRRIIRVLDQEVSRIEKKLEAHIEKEAQWSHRKALLKTAPGIGDTMVYTLLADLPEIGSMTNKQAAALVGVAPMNRDSGKIRGKRRIKGGRYSVRNTLYMATLSATLCNPIIKEFYQRLVAQGKHKKVALTACMRKFIVMLNAMVRDDCEWQY

SEQ ID NO: 255235 - protein, 400 aa, unidentified
MRAVFGIDVSKASSEVAILVNGEKVHGYTMSNDAIGFARLLGDLRTVHKPEIIFEATGVYSRRLQTFLEDNGYAYTRLNPLEAKKQLDSLRVRKTDQIDAEKLAQSQFVLNRKPTYVQEEVYQNLRTLSRFYQNLTEDIVRAKNRLHKVLQVTFPELETILSTPSGQQYWNLVIDFPCKDFVLELSKDELSESIRQSTSKRISDQRVAYLVEKLTALANQSYCAVKKTSPIMEEVRYYAKELLRLSEHRQTVLDQMVELAQPLPEYDILLSIPGIAETTATSIIGELGDIRRFQSTNQINAFIGIDLRHYESGNFLAKEHITKRGNPYARKILFKCIHNIASASRTNPCHIADFYEKRKRQSQTTSTKPHTIASIHRLIRTMYYLITHNKLYDYTSTQNR

SEQ ID NO: 255236 - protein, 338 aa, unidentified
MLHSGIDLHKRTIVFSTVTSEGQPVRDASVPATRAAVRAYFAALPGPHRAVVESTATWYWLADLLRSEGVDLRLGHSKYIKAISYAKVKTDAVDAATLAQLLRSALIPEAHMISPEWREARDLLRARLRLVAQQVRCKNTLDGLLAQYNVAAPAALPSLVQLRTTLLTEQLALLGAQAKRLGAALNPRLIPTPDVQRLVWVPGIGRIVAFTIVLEVDGIGRFPSARDFLSYCRLVPGAGNSGGKTRHKRTKDGNRYLKLAFSHAAVRAIQYFPEIRAFYRATARRKPPALARALVAKELARIVYYMLSKQEAFNGTFKGTPLSRTKTPKWPRLASPPV

SEQ ID NO: 255237 - protein, 402 aa, unidentified
MAYDFVIGVDVGKYFHHACVLDFQGRQVLSERINQHEGSLRKLFGKFLADDASVLVIVDQPNNIGRLTVAVAQDMGADVRYLPGLAMRQLSRIHVGNSKTDVRDAYVIAHAGLKLPDALRSVDRVEEVFIQLKVLNGIDEDLARAYTRLINQMRSALVGTYPAFEHVLRGQVIHRKWILHLLAKYGGPTKIRRVGRARLAAFARSHRARNPEPVIDAMLAAIHGQTVSIAGAEYAELGVAMSAKDALAKLEHRKEIEAQVLKLIQDIPHTEILLSMPGIGPRSAAQILMTVGDMSDFPDAAHLASYAGLSPRTNQSGTSIMSNSPNRAGNKKLKNALWQSSFASIRFHERSRQFYERKRKEGKRHNAAVVALARRRLNVLFAMMRSGELYRDISTVQEVTAA

SEQ ID NO: 255238 - protein, 403 aa, unidentified
MFYLGIDVSKKSCRYLLLNPEGQKVKRFSLDNTLETFQNLRKRLEDLSIPKEDLLIGLEASGGFWENLYSFLKENGFHVVLLNPYHTSKFREALAKKAKTDDIDALVIAQLLRTGEYVQSQVAEELIQSLRELTKLRYELMTERKNYKRQVFSLLSIIFPELEKTALKNPFSIASMAILQKFPTAKDLAQAKAKQIEKIVRSIQGNNFNIEEIGKLIQTAQASIYSGRAKEARATSLRILLRHVETLSSSIEELEAQMKQILSPQEPQDSFPGENLLTIPGVGDKTLAAVLSYLGADGSSFSSSTKAVGYVGYFPKIYQSGQTQRDNTICKRGPKLLRWALYIAAVASLKHNSEMRTLYHRKLSQGKTEKQALICVGKKLFQIMMAMLKSGEPYSPAKVFVSC

SEQ ID NO: 255239 - protein, 475 aa, unidentified
MNIKGTKKKNQVVTANIFEQQELLKKAEVIKENLTASTWRELETNGKFDKNKKLSFISDDMLILGCDVGSETHYVRAIDTRGRELSKSAYSFNNDYEGFQSAKEWAVKIAAEHDKSQIVLGLEPTGHYWFCLATWMIANGISVVQVNPYAVKQTKEVEDNSQLKDDRKDPKLIANLVKDGNFGMPYLPEKIYAELRRLSMFRDQLNEDRIRTINRMHREMKIYFPEYKDALGKVDGAFSLELLKEAPFPEELTALGEEGIRQIWHAAKLRGRGYSRAREILQYAKASVGIKDGSIASKAAVKWFVQKIMELDVELAVIENQINQKCQEIPHTGNVLEISGIGENTLSGILAEMGDISRFDDVKEIQKLSGLGLVACSSGKHKGETKISHRGRKRLRYWLFQAAKSAVAHAEEFKELHMYYTTRADNPLKKMQSLIVIACKLLRIIYTILNTGTFYDPKKMLMDIRRPENKEAIVA

SEQ ID NO: 255240 - protein, 352 aa, unidentified
MDHIGIDVHKRDSQIYILAEGGEVIERRIRTEPERFDAVLGTRPRARIVLEASTDSEWVARCLEALGHDVIVADPNFAPMYATRTRKVKTDRRDARALAEACLLGAYRPAHRLSDPQRHVRGRLVVRDALVRTRTRYISIIRALLRQHGYRVPSGCADHFVHRVQGLPLPGRLRSVVAPLLALMRPLNAQLTYSDATIEHLAVQDPRVPRLRSVPSIGPVTAAAFLAAIDDVQRFPHAHQLEAYLGVVPGERSSGDTQRRGAITKAGHSRTRWLLIQAAVSILRRRPPQAEELRTWALGIAARRGKQVAVVALARRLAGILYALLRDGSVFEPQRVRSPRRPAGEAAALVGM

SEQ ID NO: 255241 - protein, 362 aa, unidentified
MRIIGCDLHARQQTLAMLDTATGEVVNVTLTHEGSNVREFYSTLPRPVCVGIEATGSMQWFVNLMEELGIECRVGHPATIRAAEPRKQKHDRRDAELILKLLVENRFPAIWMPSKELQDLRSLLRHRHQWVRMRTRIQNALQSIALANGLRRGPALWSHDGQNRIASLPLAPHTAYRRSELQAMYEKFEAEIEKLNQQVEQQACQRPGARLLMTHPGVGPVTALATEVFLGDPARFADSKALASYAGMIPREYSSGGRQRLGGLSKQGNPLLRFLWGEAGAHAARKDPELQRFYRRKLVQKGLGKASVAVARKLGIRLWIMLRDQIEYHEFCRRGQKQQKSSDACAGMPETPYGAKSHRPVD

SEQ ID NO: 255242 - protein, 410 aa, unidentified
MPHTIAGIDVHKRVLMVVVADMATPDAERHGERRRLGTTTSELQSLAAWLQQRQVQEVVMESTAQYWKPVWLALEPDFELHLAQAQSNRAPGGRKSDYRDAERLLRRYVADELFLSFVPAPEQRLWRTLTRNKRQLVRDRVRLQNQIEALLEEGRIKLSSVISELLGDSGRRILQALAAGQSDPQRLAALGDRRLHASRDTLADALDGTLAPAQRAVLQLALERLELLDRQIAQLDQLTAAQLRPYQDAITRLSGVPGLGLNAAQQIVAEVGPAAQDFPTSQQLCSWVGVSPGSQESAEQNRSGRCPKGNRYLRRILCQAAQAAVKKNGSFLQSLFRRLLTRLGYPKAIWAIAHRLCQIIWKILHQGTQFIAYGQLGTPQQQQRRARRLLTQLRQLGYSAQLIPTQPATT

SEQ ID NO: 255243 - protein, 335 aa, unidentified
MTTRFYIGVDVSKATLDWAVTDGKTIILQTQTVNSEVGIKLALKVIKALPDFIISESVCCLEHTGVYCTHLLSSLYKIHLPLWLESSLQIKKAGGLQRGKNDAINAVRIAEYAFRFRDKIRLWQPPRPVLQKLASLSGLRQRLLLVRQQLQQPINEQQRFIDPVLQRQLIKSCQASLNAINTDLKNADKQIQELIQADDYLRELFDLVTSVPGVGNATATEVLIATEEFKTISDAKKLACHAGVAPFEYRSGSSIRGKTRVNEHARKRLKSLFHLGAMSAICVKGELQDYYQRKVGEGKNKMLVLNSVRNKLIHRVCSVVHRGQKYDKNYTPTLA

SEQ ID NO: 255244 - protein, 410 aa, unidentified
MNGRQVRRSEEGVFGGVDWSWERHAVCIVDVTGNVIERFEAEHQAAGLAGMVRRFRRAGVERVAIERGDGPVVDALLTGGLQVVVISSRQVKALRLRYGTAGNKDDRFDAYVLADVLRSDGHRLASLTPDSPETVGLRALVRARKDLVKHRIALANQLRANLLAAFPGAVGLFAELDSQISLTFLTRFPSAERAAWLSEKRLTAWLAAVGYSGRQTPEQVMAHLRAAPAGLTGPAGAACATVTEQLVATLSDLRVRIDALDEAIAETLALHHDAAVFTSLPRAGINRAALLLAEIGDCRARFPDDAALAAAAGVAPSTRASGKKHHVAFRHSCDKKLREALIDFAADSRQASPWAAAIYQRARDRGARHPHAVRILARAWCRVIWRCWADGTAYDPARHGGLQQLLTAEG

SEQ ID NO: 255245 - protein, 388 aa, unidentified
MNRIIKIGIDVHSTNYTLCAMEPTIGSEDRVFGEVQIAPDYKEVICFIESLKLKLGFYNDYSIECGYEAGCLGYTLYHQLTGAGIKCVILAPTTMLSQQGQRIKTDKRDAHLIAQCLCYGGYHPVYIPTGEDDAVKEYLRMRDDHKLALKKLKQQINAFVLRHGHQYDGTKWTIKHVVWLKKVELDPMYRETLDEYMASYEEQEAKIERYDKRIEEIAAEARYQENAKKLGCFLGIRTHTALSLIVETGDFKRFAKGNTYAAFLGLAPGEHSSSKSVNRLGITKAGNTHLRRLLIEAAKGICKGAVGHKSRELRSRQIGQSAEVIAYADKANTRMRSKYYKMIRHGKKKNVAVAAVARELACFIWGMMTGNISINSGAGTSVPAVSQG

SEQ ID NO: 255246 - protein, 356 aa, unidentified
MESIFVGVDLHKTQFTICILINEEVIDQGQKYPMNDKGYHEFASYMKDLSEIRGQPVSIAIESTANARFFRDLMVKEGFRVTVVNTLRFKVVNLSTKKTDKNDARTLAEFLSKGMLPESYLCSAKSEGLRRVLKSRALMVQNSVALKNQVHAVLLAYGKITKTAQFQSKASRKRLLDSLPPEIKDVVGVIFGTLDTVEQQKKDLERRLKEITSDDENVRLLMTIPGIGVVNACTICAYIDDIGRFQSFKQFSAYCGLVPWVQASNETYKIGRITKHGPPELRTAIIESVIAMVRMEEKTGKYVLMEQYKQMKAEKSSGKAIVATARKLSRIIYVMLTTKTSFNPKMLINRLEKSED

SEQ ID NO: 255247 - protein, 340 aa, unidentified
MAIIRIGVDLAKNVFAMHGVDEAGRVALTRTVRRAQLLEVLAAVPPCIVAMEACSGAHHWARQLVALGHTARVIAPKFVAPYRMSGKQGKNDANDAAAICEAAGRPNMRFVPMKTAEQQALLTVHRVRQGLVEERTATINRLRGLLSEFGVVLPLKAATVRRRAATHLEALPVLAQRALGDLLAHLTYLDGRIGEYDTQLKLAARDDEQARRLMNLRGVGPVGASAIVATVGSAHEFRNGRQFAAWLGIVPRQYSSGGKARLGRITKAGDAYLRTLLIMGARAVLAAAAGRTDRISRWALAVQARRGYMRAVVAIAAKNARLAWAMLRRGEAFRLREVTA

SEQ ID NO: 255248 - protein, 344 aa, unidentified
MIYYAGLDVSLRTVNICVVDEAGERVAETKLASDVQDIIAYLDDLGIELESIGLESGTLTQYLTFGLQSAGFEVVCMEARQVKAALSAMRNKTDKHDARGIAQLLRSGWYSRVHIKSMESHRIRMLLTSRKAVLTKCIDLENEIRGLFKIFGIKLPPKLGHGAYDEAVRGVIEADETLSQALLPVLDARLMLYQTFRILDNRTRHLAHDDLICRRLMSAPGVGFITALTFKAGVDDPSRFKHSRTVAAHFGLTPRRLQSGEIDIEGHISRCGDADVRSTLYTAANAMLTRSSKWSSLKAWGMQLAKTRGHRRAVIAVARKLAVILHRMWIDDTQFRWGTESVRS

SEQ ID NO: 255249 - protein, 324 aa, unidentified
MNLPRLGIDLAKVKFNACLLHLTGKLKHKVFPNNAAGFAQLQEWLEKQQAPLVHACLEATGTYGEALSHYLHQQGHTVSVMNPAAIKAFAASRLSRTKTDRVDAELIARFCLAHQPPPWTPPAPEVRELQALVRRLESLIEMRVAEENRLSSGLTVVAVRTSVEEMIAYLKEQITRTEKLIRQHIDKHPGLKQQHELLDSIPGIAATTAALLLAEVPDLKRYRNARQLAAFAGLVPRERQSGSSVRGRVRLSKIGNARLRKALYFPAITALRCSPFFQEWAEGLRQRGKSKMSVIGAVMRKLIHIAYGVLKSGRPFDPKLAKSA

SEQ ID NO: 255250 - protein, 343 aa, unidentified
MEQYVGLDVSQEQTSVCVVDGGGKVIWEGKCTSTPEAIAATLRTRAPEAVRIGLESGPLSAWHWHELRKLDLPVVCLDARHAKAALALQLNKSDRNDARGLAQIVRTGWYREVAVKSVDNHLVRSLLTTRAQLVRMRVDLANQIRGVLKPFGLIAGKGGGRPFAERVRALVAGGPLQEVAGALLAAWQAIGEQIAVLGRRLVAVARQDEAVRRLMTAPGVGVLVALAYVSVVDAPERFAKSSSVGAYIGLTPRRYQSGEADYTGHISRCGDKLLRTYLYEAAGIILHRVPRWSALKAWGTRLAKRIGTRKATIAVARKLSVILHRMLRDGSEFRWSAKEVHAA

SEQ ID NO: 255251 - protein, 309 aa, unidentified
MKEELVYIGVDIAKAHLDAAMGNEKCRFANDALGHRQLVNWVKQMPASVQVICEPSGGYERALVRALARARIKVSLVQANRVRQFARAAGILAKTDCIDAEVLCEFGKVMQPQTVTAATLEPEHLRELESQRRHLTHLLVMEQNRAARVSDASVVRLNRSLINQIKKQIEKLDLLIKEHIEQSPGLSAKAQKLISIKGVGLRTAALLLAQMPELGQLNRREVAALVGVTLFNRDSGKMRGKRAIYGGRRFVRHGLYMAALVAARHNPILRNFYLRLRAAGKPAKLALTATMRKLLIVLNSALKPDLRYA

SEQ ID NO: 255252 - protein, 343 aa, unidentified
MSISMIGLDTAKSVFQIHGVNEAGKVELKRKVRRSDLITFFEKQERCTVVMEACGAAHHWARILTGLGHTVKLLAPEAVKPFVKKGKKNDAADAAAICEAASRPDVKFVPVKTVEQQGILALHTVRSLLVKQQTMLANAIRGLASEFGHVVPKGLNNLEPLVDLVDADEDMPKQARQAIAELHERFGELAKGIQSCEAEIVKHARNDVTARRLATIPGIGPITASLIAATVVDISLFNTARQFAAWLGLVPRQSSTAGKARLSRITKAGNKEIRKLLVLGATSMVGRAEGWHSALGAWLRDILQRRPVRLVTVALANKMARIAWAVMTRNEVYRPQGGVAVKA

SEQ ID NO: 255253 - protein, 366 aa, unidentified
MREQDEGNRITIGLDLGDRRHRFCALDGKGQVVEEGTLSNKRESLSELSRRYRRALVVMEVGCHSPWISRHLEGAGCEVVVSNPRKTRAIYQHERKSDRRDALMLARIARMEPALLYPVQHGSAQAQQDLLRIKLRDSLVRARVGVINSLRFTLKSLGYAIANPSTERFHKVIQEQVPESVGSVIAPSVQALKELSLRIKLLDREIITLARSKYPETTWLEQIPGVGPITALYFVLKIQDPGRFERVRDVGAFIGLCPRRDQSGENDPQLRISKRGDAYLRRLLVSAAQYILGPFGPPSALRQYGLALASGGTPRAKKRAIVAVARKLAVLLLTLWKNKSLYQAFPLSRDGEKMRTSDLERLRCIA

SEQ ID NO: 255254 - protein, 358 aa, unidentified
MTICIGIDVHKKKCVATLKRDSQIVEQTSFYNNGHGIKEFIEHIKLYGESAIAVCESTGNYWIRLHDILEDNGIDTVLANPIKTKIIAQAKLKDDKIDSNVLADLLRADLVYRSFVPDKEHRELRQIVRTRVDLVATKTSIKNKVHAILAKYDYSCPTNDIFSQKAIEWLKTEELSWIDRMAVDAYLETMFGIEKKIKIFTAKIASISKEDERVRLLMTIPGIDYITALTIVSEIVDIRRFSTPWKLVGYAGLAPSKRESGTTHRIGDSRRITRQGSRWIRFTIVESATTAIRYDNRISKFYRRIALRRGPQKAKVAAAKEMLVIIWHMLTKNQPYRTMNNDLVQSKYKRMEKESVLA

SEQ ID NO: 255255 - protein, 460 aa, unidentified
MKVRVGIDIACRAAHQAACADETGRIVWSGHRFHTRAEELEVLWARLPGDATEVMIVMEPTRNAWVPLAAWFRRRGATVVMVPSEQSADLRAYYAKHAKSDRLDAELLARLPLLHPDGLHPETANGPGDPLKRAVKLRSGLVRRRSACMQRLDALLEILGPDWVAALGSDMTQTTFKFLAAWANPHQVKRLGRARLARWFQRQTRKAWGERRADAVVSAAEATLALWSPTNLDYEALAADIAVEASLALELARQIAGIDERIFDLYCDADPDQILLSVPGVGKILAAQIRGRLGDPHRFTSLAAARAFSGLIPRQNSSGLTETTGGPTKQGDACLREALFLAADHARKTDPTLAARYQRLMCDTGRHHTSALYTIATVLLTRIVACLRTSTPYQLRDTDGSPITPEQGRAIIAERYQIPPEIRAARRAVSNARSHQRGWDERTKQGVAERSTMPPVPPAA

SEQ ID NO: 255256 - protein, 318 aa, unidentified
MTESVKVNVGIDVSKDFLDVHVGNVSLRRVPNRSSGLSVLKRILSRYSVSLVLCESTGGYENLAVTYFQSLGYDVCVINPRQARDFARSMGRLAKTDRIDAQILCRLADVIDVSPERARFVKPLTDERRQRLVSMVRRRRQLCGLMTAERNRRAKTDDYGSESISTVLDFLTDEVARIDRDIAAHVGSCFSDISSLLQTFTGIGPVTASTLLGELPELGKLNRRQITALVGVAPFNRDSGYMRGRRRISGGRSGVRNVLFMAALSAVRFNPVLKAFFARLVAAGKPKKVALVACMRRMVCILNAMLRDGSRFEAVMGN

SEQ ID NO: 255257 - protein, 391 aa, unidentified
MILVGIDVAKDKHDCFIMNSDGEILAKAFSFPNNKEGFNFLYEKICAVSNASDKIKVGLEATGHYSYNLLGFLLDKGLPTFVINPLHTNLYRKSLSLRKTKTDKVDSRTIAMMLLSEISLKPYSDTSYHNEELKSLSRYRFTKVQERAKLKTSVSRLVQILFPELEKLVPTLHMASVYRLLEDYPSSSHIASAHLTKLTNMLQEASKGRYGKEKAIEIRDTARNSIGSVMPAKSLELKHTIKLIRELTLEITEIDSEIQKMMDEIASPITTIPGIGCNMGAMIISEIGDFSRFASPDKILAYSGFSPSIYQSGKLDNCYAHMEKRGSRYLRYALFNAAQKACIWDKTFAEYLSKKRAEGKHYFVALSHVVKKLVRVIFHLERTGQPYLMAA

SEQ ID NO: 255258 - protein, 345 aa, unidentified
MKTLQTIGVDLAKNVIRVSVVSNSNKELMNKDFSRAKFASFLANQKCSLVACASAHYWARHAKSFGHQIKILPALAVAPYRQGHKTDKNDALAVAECAVRPNIKIAPMKTIEQQGMQSIQRSRAFIVQERTALSNHIRGLLMEFGIVIRQGFCALHENVPLILEGGENELPDMYRPTLQLLYQRLCQLREDLNFLDDQIKGLVRQNASCNELTEIEGVGPISAVLLFATLGSGDAFKSGREFSAYLGLTPKQYSSGGKTTMVGLSKKVANKRLRAVLIQGARAYIHRIKEPKTPKDKWLLGLIARAGYGKASVALANKNVRTAWALLTKGGEYNRFQGEQVMGPV

SEQ ID NO: 255259 - protein, 353 aa, unidentified
MEHGAIDLHKKESQVRILTESGEVIDQRIRTTRDRVTARFWGRPHARILIEASTESEWVAQHLETLGHEVIVADPNYGLMYGHRSRRVKTDRRDVAALAEACRHGIYRCAHRRSPRQRMVQWHLNVRRELLDARTRLISVVRAITRSHGYRIAGGATDTFLTRLAALDLPASVSESLVPVRSVMERLNQELADADQRFETLVAEDPIVKRLTTCPSVGPITATAFVAALDNVHRFAGRRGAAQVTSYLGLVPREYSSGEQHQRGRVMRSAHPYVRVLLVQAAWRICRSSDARAAGLRTWAQAIARRRGKNIAIVALARRLTRILYAMWRDEIDYQPDRIRSARRDTVAAKPAA

SEQ ID NO: 255260 - protein, 400 aa, unidentified
MRVVFGIDVSKASSEVAILVNGEKVHGYTMSNDAIGFSRLLGDLKTVHKPEIIFEATGVYSRRLQAFLDEHGYAYTRLNPLEAKKQPDSLRVRKTDQIDAEKLAQSQFVLNRKTTYVQKEVYQNLRDLSRFYQNLTEDIVRAKNRLHKVLQVTFPELENILSTPTGEQYWNLVITFPCKDFVLELSNDELSKSIRLSTSKRISDKRVAYLAEKLIALANQSYCAVKKTSSILEEVRYYAKELLRLSEQRQAVLDEMVELAQPLPEYNILLSIPGIAETTATSIIGELGDIRRFQSANQINAFIGIDLRHYESGNFLAKEHITKRGNPYARKILFKCIHNIASASHTNPCHIADFYKKRKRQSQTTSTKPHTIASIHRLIRTMYYLIMHNKLYDYASTQNR

SEQ ID NO: 255261 - protein, 341 aa, unidentified
MSVIKAVGIDLAKLVFSIHAIDEHDKCKFRKTVKRNNLLAEIAKLPPCIIGMEACSGAHYWAREFTKLGHDVRIMASKFVIPYRQNEKNDANDAEAICEAATRPKTRFVSIKSEEQQAVLCLHRIRQGAIKDRTARINRLRGLLAEFGIIMPKGRYPAQKAIYEILEDAQNNLPFLARELLNDLWLNIKTLNEEILKYDRKLYALAKQMKDAKRLMSIPGIGEITATAVVATVNDAKHFNSSRSFAAWIGLVPRQYSTGGKAHLGRISKRGEKHIRTSLIHGARAVIANCKNKTDRTSMWVKDLVERRGFKRATVALAAKNARLIWALLHSEKEYQADYVK

SEQ ID NO: 255262 - protein, 402 aa, unidentified
MAYDFVIGMDVGKYFHHACVLDPQDRQVLSKRINQHEGSLRKLFGTYLADNASVLVIVDQPNNIGRLTVAVAQDMGADVRYLPGLAMRQLSRIHVGNSKTDVRDAYVIAHAGLNLPDSLRSVDRVEKVFIQLKVLNGIDEDLARAYTRLINQMRSALVGTYPAFEHVLRGQMIHRKWILHLLAKYGGPTKIRRIGRTRLAAFARGHRARNPEPVIDAMLAAIHSQTVSIAGAEYAELGVAMSAKDALAKLEHRKEIEAQVLKLIQDIPQTEILLSMPGIGPRSAAQILMTVGDMSDFPDAAHLASYAGLSPRTNQSGTSIMSNSPNRAGNKKLKNALWQSSFASIRFHERSRQFYERKRKEGKRHNAAVVALARRRLNVLFAMMRSGELYRDISTVQEAAAA

SEQ ID NO: 255263 - protein, 338 aa, unidentified
MKKYSGIDLHSNNNVVLVSDEADRVLYRRRLPNELGKVLEALEPYRAELAGVVVESTYNWYWLVDGLQAAGYKVHLANPAAMKRYDGLKHSGDDTDAAHLAHLLRLGILPTGYIYPPAERVLRDLGRRRLQLVRHRTMHVLAVENVQARETGARMTGDRVKRLDAQKVQALGLAEDVTVGMQANVAVIRTLNEEIAKLEKHLLERLEPRPEYALLRTAPGVGDILGPIILLETGSIERFAAVGNYASYARCVDSARLSNGKKKGEGNVRNGNKYLAWAFIEAANMAKRWCPEARRFHDRKKLKTNAIVATKALAHKLARACYHMLRTGEPFDMKRCFG

SEQ ID NO: 255264 - protein, 343 aa, unidentified
MQAVTTIGLDIAKSVFQVHGVDAAGQVLIRRQLKRRAVLAFFQKLPVCLVGIEACASSHYWSRELQALGHSVRLMPPAYVKPYVKRQKNDMADAEAICEAVARANMRFVPTKTPEQQSCLMLHRTRHLFIRQQTAVINSIRAHLAEFGIVAPVGRKGVTELLHIVADPSDKRVPEVARACLAALGNQLLSLKQQIVEFDRMIMVWHRSNETSKRLHYIPGVGPMLATALVASVADPRTFRSGRNFSAWIGLVPKQHSSGGKDRLGSISKQGDRYLRSLFVAGALAVIRYAKIHGTKHRPWLTALLARRPTKVAAIALANKLARMAWAMMAKGERYRQPVALAA

SEQ ID NO: 255265 - protein, 314 aa, unidentified
MNNEERFAGVDVSKAYLDLGVSPEGGVERFSNDEAGVTALIQRLLTLQPALVVLEATGGLETLLAASGRVAGLPLAVVNARQVRDFAKATGRLAKTDKLDALVLAHFAKAVRPEVRAGRTEAEQALVELVARRRQLVEMRAQERTRLAMAGSRQKQGLKEHIAWLDEHIARLDGDLKNRLRESDIWKTRVDLLQSAPGVGPVTMLTLLSYLPELGKLNRREIAARVGLAPFNRDSGFQRGRRRIWGGRAEVRSVLYMATLAATRGDNPIATFHRRLVEKGKPAKVALTAAMRKLLTSLNAMLKQNKPWSCPQIA

SEQ ID NO: 255266 - protein, 350 aa, unidentified
MQGTGRWIGLDLSKETYEMRYFDQKGKVAGSGGLTTKVGRAKLYAKLKSEDIVAMEANSLAFVMEREMRTIGCTVIILNASQLSVIYASTKKTDKEDAVKLARLIKIYEKEDLPTVDVPTDKEWYRRKLIKEYKTLKADRTREINRLHALFVQCGITTIKRSNVQTDVNRQEVLPQLFDYEARQAKRVCARLTVLDAQIEELDQLIKKECKEDEDIQRLQTIPGVGDKTALAFAAYVGDGKRFNNGDQVSNYLGIVPRVDCSGTINKYGHITKKGNGVVRSLLYQAAWAIVRSKHGGALKAKYFYMTEHGKGKKISITAIARKMAKLLYVVMKNKQMVYQEMPAPSLRAG

SEQ ID NO: 255267 - protein, 305 aa, unidentified
MDSSPPLTVSQCTREFKRDKEESEMNRNVVGLDIAKQVFHLFMMLDGKAIKRKLKRPELLAFIAQLPPSLIALEACGGSHHWARSFQQLGHDVELLNARYVKAFVVGNKNDFNDAEAIFTAVQQPRKRTVVIKNMEQQDLTMVHGIRQGKVEERTALINQIRGHLAERGMVLPKSANQVRKQLPSILEDAENQLSTLSRALFAEQYQALVAMDDAIKALDRQIDALCRQNALSKRLIAIPGVGPLTATLAAADVGDGKGYESSRDYAASLGVVPRQHSSGDRQVLLGIYPKGTRANAAIDACAPC

SEQ ID NO: 255268 - protein, 344 aa, unidentified
MSGVIIIGLDIAKHVFHAHGADERGRALFTKRISRGKLLDFFAAQPSCTVALEACGGAHHWARQLTQLGHEVRLIPPAYVKPFVKRQKNDAIDAEAICEAAQRPNMRFVAVKSEQQQAAGLVFRTRDLLVRQRTQLINAIRGHLTEFGWIAPKGPSHVAMLAGLIEEEEMASSLPEAARAMLRLMLDLLADLDGKIADLDKEIARRAREDEVSRRLMTVPGIGPISATAIAALAPPAETFAKGRDFAAWLGLTPLQRSTGGKHKLGSTSKMGERTLRRLLIIGSSAVVLQASKRGAPKGSWLEQMLARKPRMLVTVALANKTARIIWALLVKKENYRAPVAAKA

SEQ ID NO: 255269 - protein, 426 aa, unidentified
MKNINEFAATVGWDWADKKHDLWLRPADGSKSEHLQVAQTAEALHEWVAKIRERFQGQPVAVGLETSRGPVISALLVYDFIVLFPVNPKASKNYRAAFSVSGAKDDRSDAQLLEEYVRLHREKLRALEPDTVETRTLAGLVETRRSLVDERTRLVEQLHSMLKTYYPLAEELLGEQMTKPMAADLLARWPDLESLQKAEASTLRSFFFKHNSRSSEIIEERLQAIAKAKALTTDTAIILPARLRVLGLTAMLKPLHRIIAQLDEQIEKTMDAHPDAEIFRSLPGAGPCLAPRLLVAFGTNRERFESATEVAQFYGIAPVVRQSGNMRTVHARHRCPKFGRQSFHENAGCALREEAWASCFHHQYKKKHDERHHQANRSLAFKLIRIYYACWKARQPYDSQRYARALQKNGSPLHKLLESSQTKASQ

SEQ ID NO: 255270 - protein, 426 aa, unidentified
MLAFDLAADKQVCALCGQDSAVIARRTITAKAWQLSDAVAWGLPRAAAAGFASVVVACEPTGHRWRVLDQIAAQAGVRLVCVQPLLVGRAREAEDFTRNKNDDSDAVIIARLVTELRCYLPERAEPIWARLRHPGARRVGLVLAAGAAGAQIRDLLECAWPAVLGAAVEPLESASWRAAMTVVLDRVADSGDLSFIRRSGWSRFAAAVRRELPRHGTPRWHSPIVRAVFTAATDPAQAGLGVAEQRAGALERVRFALEDLAHARAELVVVEGRMVAVLDTLGLTELVTSIRGLSAVGAAAILAETGDLTRFTSARALVKHAGLCPRNNASGGYQGKAAISGRGRARLRMAAWRAIFPALHHNPVLAARYTHLTGRPDRQLTDAQARVAVAGSLLRQLHAVITTGTPWNPAIAAGTHHPEREAASAA

SEQ ID NO: 255271 - protein, 311 aa, unidentified
MTMPQDVIGVDIAKDWIDIFTLSSGRARRIPSTRAALGRFAVQAQGTRVVFEASGGYERPLAEALAAANVTYARVNPRQAREFARASGRLAKTDRVDARVLAEMGRALAPRPTAPVEPDRARLADLMARRDDLCAMIRAEANRLKQARDAWVKRDIASLVKLLQRRVERLETEIAVHVAAHDRLSRQSIRLQSMPGIGPILAASLTARLPELGRLDRRAIASLAGLAPHARDSGTFRGKRRIWGGRAEVRRTLYLAGFIASRYDPKLKAFRSRLEAKGKPPKLAIVATARKLLTIINAMTRDRLDYKTDAA

SEQ ID NO: 255272 - protein, 420 aa, unidentified
MDVVLERCAGIDIGKDEVVACVRTPVAGGRGRHKDTRSFRSFVGDLEAMADWFTAAGVTEVAMEATGSYWKPVWDVLEERAFELKLVNAHHLRILPGRKSDVLDAEWIAELLEHGLLRGSFVPPRVIRELRDLTRYRKRLVQTHTQESQRIQKTLEDAGIKLDSVASHVMGVSGRAMLRALIAGERDPEALAELAKGKLRKKIPELRRALQGRFGDHHALLIGMSLDHIDHLEATMARLDDQIDTLFATNTNEAGIPFGQARDHLDTIPGVAKRAAEAIIAEIGVDMARFPNAGHLASWAGMAPGNNITGGKRGSGRTTNGDVWLGEILNQCAWSAARTRDTYLSAQFWRLARRIGKKKAAVAVGHSILVICWHLITNDTDYHDLGGDYFTRRNDPDRHRDRLIEQLHHLGYRVTLDRVA

SEQ ID NO: 255273 - protein, 341 aa, unidentified
MDKELYFGVDVSKKTLDLAYYDGETIDWKNAHIKVSNDDAGFKKIGSWIAKVGKNFDTFLFCMEYTGLYNQNFRLWLESKEYIYGMVEPRKMHRFEPDLDDDQRSLDRIKTDELDAFRIAIYCEQNHKKILRNPSKLPSPVYFKLKRLLAERKQNTKQSTLYKQQLHDICAYDTDLSVERKKLLLKSMKENQKAIDREIDSYINEDASISKNYDLLTSIPGIGRIIALETIVLTENFTAISNPRKYACYIGIAPFKKESGTSVRKRTTVSKKGFSEAKADLSIAVLSAIRNNPSIRDYWIRKRKEKCGGIVLNAVKFKLVLRMFAVIKRGTPYVETDAYKN

SEQ ID NO: 255274 - protein, 354 aa, unidentified
MKYYTSTTEFNCGIDLHARQMYVCVMDRQGKKLVHTNVKDNDFSFFLKLVEPYKHDLTVCCECMFGWYWLADACQGAGLTFVLAHALYLRAISGGKNKNDRIDSEKLTHLLRSNLIPPAYVYPAEKRPLRALLRQRIYYVWHRAELLARIHSHQLAHNRIPAKQTRRNRDPWKEQLLKAEEHPLRQLALKNDLAMIQHYDDQIQAMEQELMRLTKERQSRDYALLQTVAGIGRSLGLTILYEIGDIARFPTVKDFLSYCRLVKGTVASAGKIKGLRGAKLGNPYLRWAFGEAAVIAKRDHHIIGPLSQRLETKMGGNKFKANTVVAIKLARAVYFMLKNKTVFDPERLVAALAK

SEQ ID NO: 255275 - protein, 349 aa, unidentified
MVILGADLHKRWHTVVAVDGRGRKLAEITVAATPEGHLELRRWAARFDERQWALEDCRHLSRRLEADLVRAGEPVVRVPPKLMAGVRRSVREPGKSDPIDALAVARAALANPDLPVAALDGPERELRLPAGHREDLVAERTRDTRRLRWLLLDLGVPEPPSRSLDRVRTQDALAAALAPAQGTTGRIARTLLERIRAASADIRRLEAEIGGLAAALAPSLLALSGCGPLTAAKLVAESAGIRRFHSAAAFARHNGTAPVPVWSGNSPRHRLSRGGNRQLNVALHRIAITQMRIDERGRAYIDHRRAAGDTKTEAIRALRRRLSDEVFRRLSADETHRANAASALTAVAA

SEQ ID NO: 255276 - protein, 343 aa, unidentified
MEHYAGLDVSLDETSICIVNAEGRIIRETKVATDPDAIVAVLTAPGIKCRRVGLEAGPLSQWLFSGLAEAGLPVICIETRHAKAVLKAQTNKNDRNDARGIAQMMRVNLYRPVHVKTLQSQQRRMLLTSRKLLQVKCQDIENDLRGTLRNFGLRVGPVSERNFDGRVRELVTDFPMVAAIAGPMLAARTALLEQFTILDKMLIDVARADPVCRLLITAPGVGPVVSLSFRTGIDVPARFAKSRAVGPHFGMTPRQYQSGQTDWSGRITKCGDEMVRTALYEAAQVILCRMSRWCTLKAWGMKIAKHRGMGKAIIAVARRLGVILHRMWVDGTEFRWGKEPVAI

SEQ ID NO: 255277 - protein, 420 aa, unidentified
MPDHDFAAFIGLDWGDQQHAVCLTAGGQRVATNLAQQADDIDAWANDLRTRFRGRPIAVCLEQSRGALLYALLKYEFLVLFPINPKQLASYRDAFVPCGPKDDPTDAELLCQFVEQHHTRLRAWRPDDQSTRTLRLLSEDRRRWVDERTALKNRLRQRLKEYFPLALELASHDLDTDWFLQLLKRYPSYSELRRANPRTLARLFPKRSRVPDDTGEDSRLTRVRSSLPLVADQAVILTHRLEVLSIVRMILQLNETVEEYDREIARHMAQHCDAALFQSFPAGGPVMAPRLAAAFGTDRERFSSAAEMQQLSGIAPVLKRSGKSCSVIRRLACPKFLHQTFHEYADHSRKKSAWARAYYHMLKARGMGHHCALRSLAFKWQRIMYRCWQTRTPYDEARHLRQLRLRNSPLLAYLPQTDHA

SEQ ID NO: 255278 - protein, 364 aa, unidentified
MQSFEGPYDAFVGFDVGKLAHRACCVLAGGSVAFNVGVANDAAAIDRVVAEAAARGRALAVVDQRRNIGTTVVRRARAAGIEVAYLPGIAANRASSLFPGDAKTDERDAEVIARTAMGVPQALRPVPEEGALEGARRLEAQRCDLLRDRTHCVNRLRALLLESNPAFERELDCEAAWALSLMSRVGGPWQMLDAGRRRYAALTRDAPRGAADRLWATLSLATRPTDPQVRAEATLVRMLASRIAEDTALVAELAALVEAEVGGDETYRCLLTVPGVGPRTAAQLVLSVDISDFEDHDHLASYCGLVPRNRQSGTSLNSVSSSRQGNKQLKTCSYSAARAWRAAQATTGSTTSAAATGACPTRPR

SEQ ID NO: 255279 - protein, 452 aa, unidentified
MVRQSRRKGSSPTITHILQPNAAGIDVGATEIYIAVAPDRDSQPVRRFRTFTADLQAAAEWLKQCHVESVAMESTGVYWIPIFQILEASGFEVFLVNARHVKNVPGRKSDVADCQWLQYLHSVGLLRASFRPEQAVCAVRSVLRHRESLIQIASIHVQHMQKALDQMNLQLHHVISDITGVTGITIIEAMLKGERDPAVLSKMRDQRIKASRETIAAALVGDYRREHLFTLRQSLEAYRQCQELIAACDHEIAQQLATFDAKVDVVQAPLAKPKDHPKPRRNEMKFDLRSRLYRIYGVDLTEVPGINALTAHVLFAEIGPDFSKFASASAFASWLGLCPDNRISGGKILSVQTRRVKNRAAMALRMAAQSLHRSQSYLGSYYRRMRAKLGAPKAITAAAHKLARVIYHLLTTRQSYRESVFAHCETLHQRRLETRLLRQARELGFELVKSTT

SEQ ID NO: 255280 - protein, 395 aa, unidentified
MQTLFVGIDVSKDSFSVAGLDAQGGTAFSLTAGMNRAGFSELFKAISSHSVTLSDVVVAMESSGCYHLNLFSFLSSKGLRTLVINPLVVANFSRLSLRKTKTDRKDAFTIAKFILSHRDSVEQFSILPAHQDLKDLAREREYTLKMISSMKNEIKRLLQSTFPELEHLGNVFSDTMLQFLSVFPSARLITIAEPQAISHAFEQRDKRKRISVPPETIRRAARDSIAAVSPAKEMILPGKIATLLHLEERLAQLTKMLVKLCETTMQEDLKILTSIDGINNITAAPFLAEMGDWRGFRSYKQLIAFAGIDPSIHQSGTIQGVSRLSKRGNRHLRRLIWLMTFCAIRMEGPFKTYFIRRKTEGLPFKKALFATAHKLVRVIFSMLNNRTCFAAHQNA

SEQ ID NO: 255281 - protein, 358 aa, unidentified
MQRNKISFKGQKIFIGIDVHAKNWEVAIAPEVGIAKRHSQKPSAKELFDFLKKNYPDGEYMAVYESGFSGFSTYYALKEAGIDCMVIHAADVPTTQYEEVMKTDRVDAVKLARSLKAGMLKGNYIPEKQYIDDRSVVRIRKTIQKQLSGYKSRVKHLLHCHGVELPERFSKKQTHWSRAFITWLKTDVRLMSDTRASLDLLIKQVEVLRGTLLEATRQLRKMSQTERYKHRHDLLRTIPGIGLIVTMCILTEVCDIKRFHNENEFAAYLGLIPTSHSSGEKTVHGEKTFRGNKQLGPMIIEAAWITIGRDAGLGAQYFQYKQRMEPQEAIVRIARKLSNIIFSVLKNEKEYVPYQKGN

SEQ ID NO: 255282 - protein, 437 aa, unidentified
MKKDIRKRIAEFHRLRQEVVGSRRHLIVAVDVAKRSHLATMMDGRKRVLLRKLRFSNDLDGFAKLEEAAGEIRRRENMDKIVLGMEPTGGYWKPLAWHFARLRGEGAWEVATVRPAATAGNRKTLDSCPDKTDWRDAHNVGDLISQGKFHRFRQLPAEGAEQARLLRMYYLAREQSSRRKVRIRQVYGEIFPELELWLKKKLYSLRWRRVLSEHPTAGELLGLGSRLGKRLRRWGRRAGFEPEGGRALELARRTVGVAEEEEGARLELVWLWRELELAERKAAEALKRLTAHMEPREDYRLLQSIPGVGPVLAAGLLAEIGDVGRFGNYKELISFAGLDVIGRQSGGWSSQRRVVSKNGRKLLRTVAYQAALSASRLEGEFKDCYQRALARQDERKRVKRKAIVKVADKVLRVAWGVLKGGQAYRADHRSEAVAKAA

SEQ ID NO: 255283 - protein, 344 aa, unidentified
MERTTVAVDLAKTVFQIAVSHRPGKTSQTRRVRRSQLPAFFAQFPSCVVVMEACGSASFWGRKFEAMGHEVRLLPPSQVKPYVRRNKTDSADAKALLEAHRNEAIRPVPIKSIGQQTLAALHRFRAGWMAERTARINGLRGVLRELGVVIPVGAPRVVPAVMVLVEDAESEVPDGLRHTLWEVCREIRDLERRIKDVEKQLEALGKQFPAYARLRTIPGVGLLTATALLAFVGDGRRFTTGRHLASYLGLTPTENSSGLMRHLGGISKRGDRYLRMLLVHGARSVLFASRRRENPERLRVWAMEVEKRSGFNKAAVALANKLARIIWAVWRQDEAIYVPQAKAA

SEQ ID NO: 255284 - protein, 333 aa, unidentified
MAQPAQPALLALDIGARQHAYAFRSARQSDHGTLRNDPETLRAFFSARLRQGPLRVLVEATGIYYLDVALIAAGLGAQVMVVNPKAAHNFAKALQRRNKTDALDAAMLLEYLQRMPFVAWSPPRQALLELRHYGRHLAQLTADATAARNRLHALGSTQASPRALREDLRRAIAGLERRIGRLRQQAVALIRAEPELRVAFDALTSMIGVAQTSAVALLSELAVLPRHLSSRACVCQAGLDVRLHQSGSSVHKAPRISRHGNKYLRRALFHPALTAGQHDPHARAFRQRLLDRGKKKMQANVAIMRKMLTAPWALIRHPDVYDGSKLYRCCENA

SEQ ID NO: 255285 - protein, 429 aa, unidentified
MNSTQNKKIEQVKETTMIVGIDVGSEKHYFRAFNWRGIELTRKPVAFSNSMEGFNSFYNTIVELMQKSELEEALVGIEPTGHYWFDLGQFMGEKSIKFVMVNPHHVHKTKELDDNSPSKNDRKDPRVIAGLVRDGRYFYSYMPTGVYAELRNASNRRFVLVEEQTRAKNRLQKWIAVYFPEYKGIYTHIDAKGGLLVLKQAPTPEEIVKLGEEGIIKIWKDAKLRRNGNKKALKILNAAMRSIGLKAGLTEARMEMQDLIEDYELQTKRLERVNDLIKELCQQIRYADKLLEIKGIGITTVAGFIAEVGDITRFDSTKELQKLAGLELVADSSGKHNGKTKISKRGRKRLRYLLFEAAISVVGKNEEFKEIHRYYTTREKNPLKKMQSLIAVACKLIRVFHVILTKGVSYDASKMLEGIRHPGEQLKAA

SEQ ID NO: 255286 - protein, 308 aa, unidentified
MGCIGAGIDVSKDTLDVKVDKHGPQLHTSNDSAGWQQVIAWLTPFAPQQVVLEATGGYELQALKALYAAGLPMVRVNPRQARDFARSTGQLAKTDRLDACVLAHMASVLKLNRYQPPNEETQFLHACHRRRQQVVQMLAAEKQRRRLTEQPAMRLMLERNIQRLEADRDELDMHISEQLKGSVQAKVASAIKGVGPVVLSTLVCDMPELGHLNRKAIAKLYGVAPLAKDSGRSHGRRITWGGRANPRAMIYMAALSAVRYDPVLKTFYEGLVGRGKPKKLALVAAMRKLITILNARMREAFQVSAQVT

SEQ ID NO: 255287 - protein, 424 aa, unidentified
MNLTQNDRLKQVTSETLIVGVDVGSQTHFCRAFDWRGLELSRRVFKFSNTGMGFLTFLRWTEELMNKTEMKTVIVGCEPTGCYWLTFQKFLQDHDIQLVTVNPFAVNRSKELDDNSPEKSDLKDPKTIALLVKDGRYSTSYLPSGVYAEIREASVCRDQLMKQHVRLSNQIQGWLQKFFPEYFECYAAWDSTSGLMLLKEAPLPQDILRIGAGGINQIWRDAKVRGAGIKRAQTLIEAAQNSVGLEGGEAARLEIWILINDYILKAEQLRRLDEYLEEKVKEVPNVEKLLAIKGVGMSTVIGFIAEVGDIGRFTDPKQIQKLAGLEIVKKSSGKKKGQPRISKRGRRKLRRTMYESARALMNWNPAFQDVFLYYRNRQKNPLGGMQAKIAVACKAIRVFYVVLQTGCDFDEEKFRKDIVRPEAA

SEQ ID NO: 255288 - protein, 448 aa, unidentified
MSKIKTKAGKVKRISQLTVINPKVAGVDVSDSEMMVAFPINSEQVEVRPFGTFTRDLEDISKCLTEFGITSVAMESTGVYWVPLFLLLKDQGFEVLLVNAKHVKNVTGRKDDESDAEWIQKLHSCGLLRGSFQPDNLIHTLRSLVRHRANLVRTSSTYLNRVQKALELMNIKLQTIISDIDGKTGRLIIEAILAGERNPEVLADMRDRGIKASREDIIKSLEGHWTTEHLFELDQCWDLYCYHGQKIAKCDSEIEKQLIAILASENDGVIPDIPSVKRKKSGKKKISFNLTADLKEISGVDVTEVCGISELSALTILSEVGTDLSRWKTEHHFTSWLGLAPNTKISGGQVLSSKIAKKKHYAGQAFRVAANSLYKSKSPLGDFYRRIRANAGAPKAVVATARKLAIIYYKMIQNKKAFNPTALIDFQKKHNEKKISKLKKIIAKLEAA

SEQ ID NO: 255289 - protein, 409 aa, unidentified
MLWGGGEEIVSIVADVNRWSPPSMQTPNDLSKSLTVLKQDSTLIAVIEMSLSSWLVAGVVPGVQRQPLKKLAVDESALLKLLHRWREEAEKAGHKIERIAVAFEAGRDGFWLARWLRTRGIEAHVIHASSVAISREHRRAKTDRLDTELLKRAFLGWLRGERDHCKMVAIPTMEDEDAKRPNRERESLVAEQTRIVNRMKAALSRLGIRGFNPKMKKAGERLEHLRTPEDEPIPPNTLAELRRDMERRRLVSEQIRQIENARLEHIEHAPNHGPHAMVRLLARVIGVGIETADMLVQEVLSRNMRDRRAIARYAGLTGSPDESGTRRREKGLARSGNVRVRRGMIQLAWRFLMFQKDSALAQWFRARTENARGTRKTMIVALARKLLIALWRLVREGVVPDGIVLRPAQ

SEQ ID NO: 255290 - protein, 456 aa, unidentified
MYRELDSFRQALRKELEGTLPPLAGVEPDKLLETYLDQLTLYVGADVADATLTVLALNASDEVLGSLVDQPNTPAGFKKIGDWLESLREQYHLRIIAVACETTGVFYWAWWDALGQQPHVARVLFNPRTTEHMAEVLSKRVRDDLVDALLLAEQLRLGSTPEVILPTDQDLLTARMCSRAVRDLARQINRLKNQLRALLRGLNPALSQTFPGAQLHHPAVYALLKQYLFPDDIVAASVDTIEKLLAEHSRSAFGHDHAQRLIDTCRTCLIRPLGRAAVHLRVKQLIDEITLTALHKKTMLKTGYLLIKDRPEAQLLRASTGAGPSNTLALVSELGGSERFTDGAHMASFLGLTTSKHASGTSVLHFKHITKQGSPNARYAAVNMAGHLKRYVPKYQAMYKRIKAHKPPRKGHFVALVAIARDFVTNVLYDMWANQRPFFLNVEDYRKYRQDHPKEP

SEQ ID NO: 255291 - protein, 332 aa, unidentified
MKDFTTIAIDTAKNTFYVVGFDEAGKIVGRRKFTRSGLKSWIVKQQILMIYMEACGGSHEWGRLFSQWGHEVKLIAPQFVIPFRQGEKNDWNDAIAIGIAGHQPTMRFVGIKTQEQQSVQALHRVRSRVQRDRVSLSNQLRGFLYEFGFIAPKSISSLKNKAYELLDEKELPVLMTDLVRDLLSELLTLEKRLKKYDLKIQQMVRSDPMASRLMEMPGIGPITASALVSDIADARVFRNGRQLSAYLGLVPRQFSTGGKQRLGGITKRGDRYLRQLLIHGARSVIRCLGDKQDRTSRWLRQLIERRGVNKATVALANKQARWVWAKMVAAQA

SEQ ID NO: 255292 - protein, 337 aa, unidentified
MIAVGVDTHKEEHVAAAVDALGQLLGEIVVAASEAGYRELAAWLARLGEGVLVGIEGAGSYGAGLCEHLLGLGVRVVEVERPRRRDRRAGKSDRVDALLAAKKVLAGEGLSTPRAGGARAALQALLVAYRSCVSERTRLLNQLQAVHVTAPLTLRERIGRGNGERLVRRLLTMRAGAGASVAEATVLAVLRDLARRARSLDEQARRYEREIATLVRSLDATLLEETGVGPISAGKLLACDPARFKSEAAFARSNGTAPQQASSGKTIRHRLSRGGDRQVNNALHTIALSRSIHHAETRAYLARRVSEGKTKREAMRSLKRHLSRRLYKRLIEVPLTS

SEQ ID NO: 255293 - protein, 422 aa, unidentified
MKKVTEFTKKVKGQVKNPILTKASWIVGIDIGKKKIFCALMKKDQTVLCRFNAKASIDGYKKMLDRVKEKTKGRGKVVYAMEPTGHYWMVLGQFFEDHNRQYVLIHPLAVARSREVVRLSRGKTDLLDANLIGVLACRGIATRTQIPGDYWATLRFMAREFMDREKDIVREKLRINSFVETTLPDFFKVFPHPLCLAGRACLRTLADFKEAIKGDFPSFEKKVRKHYTGKRLWVSRVRAIYGTLRQNEPMGLRAGRYAMFCRIINSLERLEVAEKQQETTKQSLLSFYDKSEYKQYLNSIQGTTSTTNALILGFMGNPSSYDNPKTLVKMAGCDPVPNESGKYHGRTPISHRGRSLLRKAADRTSFSIEKRNIVFRNFFHHLMTRQKNKLTKRQARIACINKYFRIIWVLCNHRVKFNPSLA

SEQ ID NO: 255294 - protein, 478 aa, unidentified
MIKSVGIDLAGVGEHKVRCLDEEAQLCDGFGFETNPEGLAKLEERVFCDGSNPVIIFEPTGLAWFVVAVYLRARHPDCRLVRTQARNVVALRKYLRRSSKSDKIDALTLAKMPFVDIERLNDVYLPPAKINAILRLARQRQRLEGDIAGRKKRILSIIDGYLPGVRQPFSNLWSPQGREFLRTQLNPLAVVRAGEKALNRFLTQARVRGKKEANESHWVYRACQNIATIYEMSRSSGAVDDDFFADLQDEIARELRLMEAEEAESDTIAQRIEILYRELHPSDNLRTIPGVGELTAPVFLAVVGDPARFQSQSAFANYNGVVPDSRQSSDTEAKGLRMTKAGPSIMRWALYQASQIGRRYDPQLASIYYREMVHNGKNHKQAMGAVMSHIGARILAVLQENKPYELRDIQGKPITWDEARKLVLTNYQVPEDIKQARRRRRTVGNSAKSQRRRREMVADRVHEAAKAPQPVVTTASPG

SEQ ID NO: 255295 - protein, 347 aa, unidentified
MRFYNNKHNYYCGIDLHARLLYVCILDSLGNKVLHKKIDADPDALLELITPYQDNIVIGVECMHCWYWVSDLCLDYAFDFVLGHALYMKAIHGGKTKNDRIDSYKIASLLRGGNFPIAYVYPKAMRATRDLLRRRTKIMRHGADLKAHVANTFSQYNQQSHNVQLRYPCAREQVRNQFDEPSINRSIDMDLNVIAFYTKELASVEHFIEKTAKQHSAQDYYLIQTVPGIGRILALTILYEIGNIERFPSVQNFASYSRLVKCKAESAGKQKGTNGNKIGNAYLKWAFSEAAVLYLRGNEPAKKYIQRLQKRMSKAKALSALAHKLGRCVYFMLRDKTVFDEKRFLPQ

SEQ ID NO: 255296 - protein, 345 aa, unidentified
MKIVGCDLHTRYQQVAMLDEETGELTECRLEHESGEARRFYARLEGEVRVGIEATGHTRWFERMLAELGQELWIGDAGQIRASMVRKQKTDARDAAHLLELLLSGRFPRLWWPSMAERDLRQLVWHRQKVVWMRTAVANQLHALAMGEGVCRKKKLFTKKGRIELDGLSLDRWASRRRQELLRLLDQLQASLTEFDQAVAEAAEQNPAAVLLMTHPGVGPVTSLAFVLTLGPVERFARSKQVVSYLGLNPREHSSGGRQRLGSISKQGNPMMRSLLVEAGHTAARWDDELRQDYQRLKLRRGSGVAKVAIARKLAVRMYWMLRSQANYTQLVRMQGSPRATLVKK

SEQ ID NO: 255297 - protein, 413 aa, unidentified
MAEETFAWFVGVDWGSEKHQVCILDQQGTIVGERHFLHGGAGLAELGDWLLSVAGTVTAVAVGIEVPHGPVVDSLIDRGFVVHAINPKQLDRLRDRFSVAGAKDDRRDSYVLADSVRTDRRLFRRLHVADPRLVELRAWSRLAEELTEERVRLGNRVHHELWRYYPQMTKLTDDIAASWFLELWTIAPTPAKARQLRKTTVGQLLKQHRIRRIDAETVIRTLLEPAIKVAGGVAEAASVHLRSLIARLHVVNRELREAERQLDKICAEIGATEAASGDGLQRQDVMILRSMPGIGRINLAALLSEGSGPLSRRDYPALRTLCGAAPVTRRSGKSQIVIMRYAAHVRLRNTVYHWARVASQHDPTSKSRYAALRQRGHSHGRALRGVADRLLGLACVLLQRQTPFDPQYGHPAT

SEQ ID NO: 255298 - protein, 349 aa, unidentified
MDYRVYCGVDFHARQQTICSLTTEDGVMSTHELKHQNKAELKAFYSQFSGPVLVGLEASGYSPWFEQLLESLGHEVWLGDATEIRRRARRRQKNDRRDAELILDLLIHNEFPRIHRPTATSREILRMLRYRHKLIKMRTIIKNSLQALSIQSGLSLRARLFTQAGLEQVRATAMSPVMQYQRDQWLQSLEPLNQRILEAANWLQQQAAGDERIERLRTHPGIGLLTGLGLVHTLAPVGRFSNQRKVAAYVGFDPKERSSGEKKRYSGISKAGSRVLRFLLVEAAQTACKGDPELKRFYLRLLHRHGKPKAKVAVARKLLIRSYILLRDGIDYAEFNRRAVAARLAREVT

SEQ ID NO: 255299 - protein, 339 aa, unidentified
MKYTPVGVDIAKHVIQIHFINEHTGEVVDKQLRRQDFLTFFGNREPCLIGMEACGGSQHWARELTKLGHKVRLLQARFVKAFVMGNKNDVMDARAIWMAVQQPGKEIAVKTEEQQSVLVLHRTRMQLVKFRTAQINALHGTLLEFGETIHKGRAAMEREFPEALERMKERLPPYLIMVLENQYNRLNELDSLIEDIEKQLTSVARQNETCKRLLDIPGVGPLIATAAVATMGEASAFKSGREFAAYVGLVPKQTGSGGKVRLLGISKRGDTYLRTLFIHGARAVALVAKEPGPWITELKKRRPASVAIVSMANKLARTVWAITAHDRKYDRNHVSIRPY

SEQ ID NO: 255300 - protein, 309 aa, unidentified
MSALFVEVGVDVAKADLQGATSTQNVVYANTPAGHRLLIAWLRSLGSVRVVLEATGGYERALVEALHAAAIPVSVVNPRQVRDFARAQGRLAKTDKIDARVLVDYAAALRPKPTPALTPQQKCLTERVRARSQLIASRGIVQNQLEHLVDPLARRCLVEMVRAFDTRIARLEKAIAELIAHDPALSAKRQKLVQVQGVGLTTAALLLAELPELGTLFKTEAAALAGLAPRNCDSGQFRGQRHIRGGRHAVRTGLWMPTLVAVQHNPILKALYLRLRANGKPAKVALTACARKLLIYLNSLLKNPQLSSC

SEQ ID NO: 255301 - protein, 343 aa, unidentified
MELTIRWRYIVGIDISKHTLDLYLLDRKTGFTSERQVANEQAGFGELDRWLADHGADRTQAVLVSEHTGRYGEQLLRWTTDNGWPHAVENTTALDKVGHDHHRKGDAYDADQLADYGRRFADRLRLTEAPKPAVGQIKRLQAERRKMVDRRAALKAKLGEAGTHDADMHRITEMWEQQIALLGEHIDELEQRVHDQISSDPALASYYQLLRTAPGMGKVLTPFWVGMFAGQLQLDPRKISSRFGFTPHSYGSGTSVHSPDRSTGHGQAEMRRLMHQAARSVATHHPHYRAYYNNKLAEKDSKLLVINNIINKLIRLYCAMWNRRAEYDPDYIQKNKHKWKKSA

SEQ ID NO: 255302 - protein, 323 aa, unidentified
MLPILGIDIAKAKYDVALQCLDGKVRHKAFRNLPDGHAQLLVWVARHAAGPVHACLEATGPYGEAVALALADAGHTVSVVNPLAVAAFAASELRRAKTDRTDADGILRYGAAQRPAAWAPMAPEVRTLQALVRRVVTVDQMRVQELNRLEAYPAQDVVRQSIEAVLAQLAAELDHLRALIRDHIDRHPGLRSQRDLLTSIPGIGETTAATLLAELFGPLPCQSVKQTVAAAGLAPRVRQSGSSVRGRGSLSPVGTRRLRKALYFPALSAIRFNPVIAAMAARLSARGKCKMVIVTAAMRRLVHLAFGVLKTQRPFDPSIALSD

SEQ ID NO: 255303 - protein, 461 aa, unidentified
MSLPQSWTGTPAGTPNCRSQSWEARRAESVHTGVHVSPHLKEGSEGGMRIIYQRVAGLDVHKKVVVVAIIVQKADGSWHLERRSFRTMTADLLELSDWLMSHEITHVAMESTAEYWKPIFNILEPNFEVILVNAQHLSKVPGRKTDQSDAEWIAELMQHGLLKASFIPPVGQRELRELTRFRSTFVRERATLINRVQKVLESANIKLASVATNVMGVSGRAMLEALIKGQNSPEQMAEMAKGRLREKREELVKALEGRVKPHHRFVLAELLCQIDSLDETIARFDQEIEVYCRPFEQAVVLLDTIPGVARATAEAIVAEIGTDMSRFPSADHLAAWAGVAPGNNESAGKRRSGRTREGNKPLGSALNQAAHAAAHTRNTYLSAQYHRLAARRGSKKAIVALMHSILVMAYHMIQRNQPYHELGGNYFDQRRPEVTVDRLIKRIEKLGYTVTFQQFPTSAVV

SEQ ID NO: 255304 - protein, 369 aa, unidentified
MVENTLFVGLDVHKKTISVATVDGSARAEVRFYGTIENTPDAIRLLCKKLSKDGRRVHACYEAGPCGYNVQRHLTRLGHRCDVVAPSRIPRKAGDKVKTDRRDAMTLAQTLRAGQLTEVWVPDQAHEAMRDLVRLRSQAMRDLRKTRQHLLSFLLRHERISPFGHWTKMHRRWLGELKFAHPAQHLALEEMLHRIERAEELCERLKQAIGELVPQWSLAPVVQALQALRGISLITAAVLVAEIGSFERFDNPRQLMAYLGLNPSEHSSGATVRRGAITKTGNALARTSLVEAAWTYRFPARITQIIRDRLKALPEPIRAVAWKAQVRLSARYRALIARGKSAPIAIVAVARELVGFIWAIARMVEPKFT

SEQ ID NO: 255305 - protein, 311 aa, unidentified
MSEFIGIDVSKARLGVSAHGGRSFAVENTEADIGRLCEQLKALAPELVVMEASGGYERLCVAALAAAGLPVALVNPRQVREFARATGVLAKTDRLDARVLAHFAAVVRPPVRPLPDAQHQVLEELLARRRQMVAALVAEKNRLGLARTRLVKRTVREVVSTYERLLELIDRELDELIKASPLWREKEDLLRSFKGIGPVSARTLLAELPELGLLNRKQIAALVGVAPIARESGSWRGRRSIWGGRGQVRAILYMATVTAMRANAQIRVFYLRLRQAGKPAKVALVACMRKLLTILNAMVRTQTRWQPPSAA

SEQ ID NO: 255306 - protein, 412 aa, unidentified
MRRVIGIDTHRTFGEVVIWEDGRLRHVGRVDMTRTALEGFGKKLLATDEVVIEATGNCMAVSRVLTPFVKRVVIANPLQVKAIAHAHVKTDKVDAGTLASLYAAGYLPEIWTPDAATERRRRLVARRYQVVRHRTRIKNEVHSILYAHLIPRCPHADLFGRLGRTWLTSQPLPDDERAAIERHLRELDRLGDDLRVLDQEIAQSALDDAAIKRLITITGVNLAVAAGLVAAIGDIGRFSSPQKLVSYFGLNPRVHQSGLGAAHHGRISKVGRSHARAMLVEAAWATAKAPGPLHAFFVRIRARRGHQIAAVAVARKLAVLCWHMLTKQTDYHWARPALIANKRRAMELQAGRPQKKGNKRGSTYAYNVKALRDQEMRLAQQAEQSYENLVAHWQPRPAKKQARGRLKPAGLE

SEQ ID NO: 255307 - protein, 358 aa, unidentified
MSRDIKYIGMDVHKEAVVIAVLNSTGKLVMESIVETKASSILQFIHGLRGELHVTWEEGTWAAWLYDLLQPHVQQVLVCDPRRNALLKEGNKSDKVDARKLADLLRTGMLRPVYHGEHGLRTLRELARSYQTISKDLNRVMNRIKALYRGWSIPCAGTQVYAPRYRQEWLHKIEHAGVRRRAELLYQQLDGLQRLRRTLRPELLAESRKHKAAKLLRQIPCIGPIRAARLLALMQTPHRFRSKRQLWTYSGLGIETRDSAQYRFVCGQLQRSKKPQQLRGLNRNHNHEMKEIFKGAATRASCGVGPLREFYVALLDKGMKPEMARLTLARKIAAITLTLWKKEEGFDAELLKTQAASA

SEQ ID NO: 255308 - protein, 440 aa, unidentified
MGNSALPEMVLAFDFSLDRLDVALRGPTPEWLWGPRAYANNWAGYQQLKQDLLEELQRARPVQLTAVGESTGPYWWHAFYQLSHDAELAPFDPQLALLNPAHVKNYRKALSEQDKTDPDDARLIDHYYRAVGIKQPYQFADRYLRLRTFSRAYARVIHTLAAEKAYFLSVLYLWGSEYQRRAVQPFGDLFGATSQFILNEYADIQALTDIPLDELTALLVQRSHNTFRAPQDNARKLHQVAQDSYPVPDALREALYQVLQLTLTHIRLLTDNQQAYRRLLATELAALPEAQRALDFKGLGPVLVAGCLAEIQDTTRFTTGVKFDRRTQRDRPRTYRDGQAAVAKLAGLWWPKQDSGRVQGLQPRLARERNPYLRFWLVQSAYTLQRYQPEYQSFYQKKYREAHDHPHRRALILTARKATRLIFALLHKGRVACLEEGILT

SEQ ID NO: 255309 - protein, 427 aa, unidentified
MAHTTIIGIDVSKNFADACAISAQGEVMLETKIFYDTVGLQHFLKQLDQLAGEQRHCAVAVMESTAHYHRILETYLRRSGIDVVVINPLQSGSMKNLEIRKIKNDRTDAKRIAQLYLFKMLRGNAVDSILVGALKDLTRQRSDIISERVKFSNKLTALLDQGFPGFRKVFSSLRTKSALAVLARFPGPEEICGANRIDIAKTIAFAAGRNTESAYAVKKANHLLDIAEQAMQLQVKRGSFKTLITLFAEMLIQIQRAADQIERQIFETAQCDRTFWSQVELLTSIPGIGQYAAVVILAEIGDFSRFKKAKQLVAFAGIDPAVKQSGTSAYKHNKISKRGSPYLRKILDTCTHVAAHKGRNQQPANPILAAYYEEKRSVKPANVAQCACIHKMLGYIFSVLRNQKPFELRSPEEHLALMRSKTADIAA

SEQ ID NO: 255310 - protein, 371 aa, unidentified
MQHCSTGLFVGLDVHKESIAVAYAPAIAGSEVIALGNIGTRQCDIDKLMRQLQGKSTALQVVYEAGPCGFWLYRYLSKRGIACQIVAPSLIPKRAGDRVKTDRRDAVQLARLLRAGELTAIHVPDVEDEALRDLSRAREDALRDLKSAKHRLKAFLLRQDIRYEGRASWNAAHLRWLAEVVCPTPAQQIVFQEYLRAINEQHERLARLEQELREQVKHWRLAPVVAAVQALRGVQFTTAVTLIAELGDLTRFDHPRQLMNYLGLTPSEYSSGARRQQGGITKAGNTHARRALIEGAWAYRFPAKVSRHLQLRLEALPAAIQNISWKAQVRLCKRFRSLSARGKHVNEVVVAIAREMAAFLWAIARSVPLAP

SEQ ID NO: 255311 - protein, 396 aa, unidentified
MTTIGIDIGGRTHVVARCRDGVARADREILRVSESRAGFAALDTWLERQPEPVTLVTMESSGHYWMPLAAHLRRRAVPVAVVNPLAAKYFARSRLGRTKSDPADARSLAEMAMRDTPPARDPLAGAELRQAARFAMTLVTEQAKACQRLIRLVELGFPELGELFDDPTCRTAREVLRIAPTARAATRRRTATLANANAGPGHRRLGQARAERLQAAAADSIAVPELAAEVAFEVGLLLDQYDLLEGQIEAADRHVAELLDGELARRLRTIPGVGPSIVATLIAEVGDIGRFSDFDQLLAYAGVHPAERSSGRKGSNPETAWHMSKAGNSHLRAAAYRMAVVGVQHNPVIAAHYARKRAAGKSKMNALGHCMRKALSLVWGVWRNGQDFDADWGVEA

SEQ ID NO: 255312 - protein, 375 aa, unidentified
MTANPASRYVVYIAIELSASTWLVALQRPRLKKVRLRHLEAGDTQGLLALISEERSLAAVEAGVEAELVSCFEAGRDGFWLHRFLMAHGVKNHVVEPTSILVTRAARRAKTDRLDAQGLLRVLAAAFTGDHDACRIVSVPTVAEEDAKRPHREREHLVQERIRIENRIAALLATQGIPKRPSLRSWDADLDAMRSGDGRPIPPLLKGELSRLRRRLSMTLELIREVEVEREQAADRQEDAGGQMAKALSKLRGIGDNFAAVLAREVFYRSFGNRREIASYLGLAPMPFQSGGIDRDRRINRAGNGRARKTLIQLAWLWLRYQPDSGLTKWFRDRVGSLQGRTRRIAIVAMARKLLIAVWRFATTGVIPEGATVAA

SEQ ID NO: 255313 - protein, 346 aa, unidentified
MRFYQQQHRFYCGVDLHARSVHVCIVDHEGQTRVHKNIDATPDRFLPLVRPYREGLVVAAECMFAWYWLADLCAAEGIAFVLGHALYMKAIHGGKAKNDKIDSQKIALLLKGGMLPIAYTYPKEMRATRDLLRRRTKLVRTRAEALAHIQNTVSQYNLPPLAKKLTFAANRAGVAERFADESVRRMIESDLALIGHADEQLQSLELYLVRHAKIDDPQAYHLLQTIPGVGKILALILLYEMHDAGRFGDQRHFVSYCRLVRPTHESAGKKSAGKGHKIGNAQLRWAFGEAACLMLRELPAVEPYVARLEKQHGKAKAISILAARLARTAWLMLKRKEAFDATKFLK

SEQ ID NO: 255314 - protein, 409 aa, unidentified
MITTLFVGIDVSKKSNSVRVLDSDGDTLCRFTAPNNLDGAGKVADKLKSILLNTDFSKVLIGMESTSVYADHLAAFLRNNDFLKKWECKVFIFNARQISKFKEAYADLPKTDDIDAFIIADYLRFGRLPRNVHQDEKYIALRNLTRARFQAAQSLSCEKNRFLETLFCKFSALDSSDVFSNTFGATSLGVITEFLSVDDIIYMPIEELAAFVNEKGKSHFADPTQIARDLQAAAKSSYRLSKTVNDSVNQLLAIHLVGIRAIQSQIKDLDKAIESFMALFPNVLTSIGGIGPVYSAGLLAEIGEVTRFPNHAALAKYGGLSWNKHQSGGFEAANTRLIFSGNKYLKYYLLEAANMVRMHDAEFNRFYHCKFKEVPKHQHKRALALTARKLVRLVYPLLSSNRLYRPPTA

SEQ ID NO: 255315 - protein, 378 aa, unidentified
MAHPCSVQPPGECNVTPQRTERTTTMTVFTDPEIYVTAGADTHRDTHMVAALDQRGAQLGVREFATDPAGHDEILGWLESFGTIDRIGVEGTGTYGAGLCRFLQRHDLDVVEVTRSDRQERRSHGKSDPVDAVAAARSAQSGRAVARPKTRTGSVEAIRSLRLVRRSATRDRTGAINQMRALVVTAPDEIREEFRGLTVRKLVARAARLRPGDPTTAAGATKFAMRELARRIKSLDAQLTDINAILGPLVASTAPGLVARHGIGTDTAATLLVTAGDNPERLRSEASFAHLCASAPIDASSGLIKRKRLNPRGDRQANEALWRIVLVRMSTEPRTRAYVARRTLEGKSKREIMRCLKRYVAREIFRDLNEIVQPLDRQ

SEQ ID NO: 255316 - protein, 338 aa, unidentified
MEVIRQNVGIDIAKDSFVATFTILQKGQIIKHVKTKKFKNSKDGIDEFFSWSTELRKDGSEVNFTMEATGIYYENLAYYLFDRDVTVHVLLPNKAKKFAESLNIKSKTDKIDSRVLGQMGVERVLEKWELSSKIYRHLRTLSRERQQLIKERTIIKNQLHAEEHTGDPIKTTIRRMKNRIKYLDKQIDSIERELEAVVSKDDYVFGKVKKITTTPGLAFKTVVAVIAETQGFANISNIRQLNSFAGYDVSIKESGKWKGKARISKKGNSHIRQAMYMPSWSSVKYSETYKSFYNRLNEKKECGLIAGTAVQRKLLGLIYTLWKNDTEYIENYEMKKVS

SEQ ID NO: 255317 - protein, 392 aa, unidentified
MVVSVGIDVSKDKHDCFIVSSEGEVRADVFTIPNTMDGFHCLLQRIRDCANAQDKIKVGLEATGHYSYNLLGFLMDNGLATYVLNPLRTNLYRKSLSLRKTKTDRVDARTIASMLLSDEGLKPYSDAAYHNEELKSLTRYRFDKVKERAKLKGSIARLVCILFPELEKLVPSLHIASVYALLEEFPGARQVAVAHLERLKALLETASKGRYKRDIAQEIREAARNSIASRMPAKSLELQHTIRLIRELDAEIHEIEAEIEAMMDEIQSPITTIPGIGCRMGAMILAEAGDFSRFDSPDKLLAYAGMSPSTYQSGQLKNCYPHMEKRGSRYLRYALYNATKYVCLWEPTFAAYLAKKRAEGKHYNVAISHAAKKLVRLIFAMEKSRQPYRAVA

SEQ ID NO: 255318 - protein, 347 aa, unidentified
MNSVGIDLHRKRSHVAVIDADGTQLLSRRIVNDPATFLELLEEVDGESRIALEATYGWEWLADVLEEAGYELHLAHPLRTKAIASARVKTDAVDARTLAHLLRTDLLPEAYVAPRELRDLRDLLRHRVALTRMRSALKQRVGAILAKHGIARPYSNLFGPGGMSFLAELELREGPRRRLDSLLSLIADFDREIDQTSREIDQRAKADPYVEVLCQIRGIGRYIAMLVIAEVGDISRFPSARHLCAWAGLTPTVRSSDGKARLGHITGQGSPALRWALVEAAQHSGRGGGPLRDAYERISKRRGKSVAKVAVARKILTLCFYGLRDGEIRCLAPRAKASTIRTTAVAS

SEQ ID NO: 255319 - protein, 413 aa, unidentified
MRLFAGDDWAEDHHDVELMDADGRRLAKARLPEGVAGIARLHAMIGAQLGEDADEEDAGQVAIGIETDRGPWVAALIAAGYTVFAINPLQASRYRERHGVSGAKSDAADAHVLADMVRTDSHQLRPVAGDSAQAAAIKVVTRTHKTLIWERTRCTQRLRHALRDYFPAALEAFEDLDAADTLELLAKAPDPASAARLTTAQISAALKRARRRDIATKAERIQAVLRAAHLGQPDIVAAAYAASVRALIAVLATLNEQVKTLQGQVEAYFGQHPDAEIIASQPGLGPVLGARVLAESGDDPGRYISAKARKNYAGTSPITRASGKKKTVMARYVHNDRLIDALMSQAFTALRTSPGARAYYDHQRARGAGHNPALRQLANRLTGILHGCLKTRTLYDEATAWPHYAATPEKTAA

SEQ ID NO: 255320 - protein, 371 aa, unidentified
MKKNSTAQRSPKRAAAREEGPITIGMDLGDKVSRYCVLGGQESDQVTEGSVGMNKKAMLQKFARMRRCRVAMEVGTQSGWVSRLLSRLGFEVIVANARQVQLISASSRKNDRMDARLLARLARVDPQLLRPIRHRSEQGQADLMTIRVRATLMETRTKLVNAARGLAKTVGERLPACDADALDVKKMEGLPELLCDRLRPLLEEVESLTAQIKKLDTTIEQIARTSYPETELLRQVSGVGILIALTFVLTVGDRERFLKSRDVGCYLGLRPKQSESGQSQPELSITKEGDRYLRTLLVQGAHLIVNRRGPDTDLKRWGLKLASHGGKNAKKRAIVAVARKLAVLLHRLWVSGEVYEPLRNSQAAQSSPRAA

SEQ ID NO: 255321 - protein, 393 aa, unidentified
MKFVGIDIASETHVVAVVSERSEVVVKPTPFTEDAGGYEKLLGLLGEPADTLVAMEATGHYWKNLFAVLAAKGFTVALLNPLRTRRFAGEDLERAKTDAIDALGIARFAAQKRPSPTRLPESATEELRELVRLRDRLVQDFGDRTRQLHRLVDLGFPEFTRYVRRLDSELACAILHDYPTAQAFQGVSVKRLARLRYDGRHTVGDELAGQLVEAAKRSVGQHHGEVYRVQVRYICEDLGVLRRRIRELEHDIERKLSEHEVGTLLTTIDGIGPLTAARIIARLDLAAFDSPGAVASFVGVVPAIKQSGKKQGNRAGISAIGDATLRSALWMPTLTAVRRNAWLKAHYERLLARGKLPKVALIACMRKLLTAIYSVAKHRRPFVPILPPPQAAP

SEQ ID NO: 255322 - protein, 428 aa, unidentified
MKNRNTQKLEAITPGTLIVGVDIAKETQWAQFVNYRGLELRKFLKFKNHKNGFDSILASIEAICKNRRLDNIIVGMEPTGHYWKPLANYLLKNKVNVVMVNPYHTKRAKELDDNSQTKSDKKDALTIARLVRDGRYYEVYMPQDIFAELRVLSNSRISLMKRSNALKNTITAVMDEYFPEIVTVFKHPLKGKAAMQILKSCPFPSLILELGIDGVLVEIKKAVKKTVGRKKASQLVKTAKSSIGVGYGLVSVKLKLGLMIEELELLTKQLKQLEKAMEKALTDTGHDELILSIPGTGVVTAASFLGEIGDPMRFDHPRQICKMAGYNLIENSSGKNKSRTVISKRGRKNLRSILYQMAITMVAVNHEMKELYRYLKTRPQNSLKKKQALVVISKKIITVIYNLIKKQTEYRAELVLGEFRKNQIKQAA

SEQ ID NO: 255323 - protein, 492 aa, unidentified
MNFENNLRPGNNGSGRKARGRTRFACPNPTRIKPRTPADPGAFIKKSERTTPQEGHRIRTTNDKGRGPCANKPMNDTISWESIIYYAGFDWAKDHHDVVVVNPQGKIIKDLTFEHSAEGWAKWKELVAAYPHLAVAIETSQGAAIEQLLTSGVVVYPVNPKSAERYRDRKAPSGNKTDFLDAWSLADALRVDGHGWRALRPLDPLIQELRLLCRDEVDLIAKRTELVNQLQAALHEYYPAALQAFEDWTATPSWNFVQQFPTPGLLRQAGRRRWEKFLHVHRLYRPEVNEKRLEIFAKAHEFCGPVAVTRAKSRLALALIKLLHALETQLDDYRKEIRRLFNEHPDHELFGSLPGAGEKLAPRLLSELGSDRSLFISAQSLQCYVGTAPVSFESGQVRQVYVRFMCNKSFRHAVHLWADLSRKSCSWAQVYYQQLRAKGKSHASSLRCLGQRWLKILWKMWQTKTCYDPDFHMANQLKHGSWVLAVKPAKSV

SEQ ID NO: 255324 - protein, 369 aa, unidentified
MEQNTIYIALDDSKRKLVVAMLRPGATEPEEREIPKDPSHIQRLFRRLQREGPVQACYEAGVSGYDLYRQLTAGGVTCQVIAPALTPRRPGQRIKTDRRDARKLVRLFRAGELTPIHVPDEAEEAARDLVRCREAVRRDVVRWRHRLLKLLDRHGRLWVAEKNWTQRHWSWLRAQHFALPALQRAFEATVFALEQALARQAALDHEIEALAQTAPYRDPVGWLRCFRGIGTLSAMVLLAEIVDFQRFRRPRELMAYLGLVPSEYSSGETQRRGALTKAGNTHARRVLIEAAWHYRHRPTVGRALARRSQGQPEEVVGQAWRAQQRLHRRYRHLIGHGKRPPVAVAAIARELVGFLWAAMTRRETRVQVA

SEQ ID NO: 255325 - protein, 353 aa, unidentified
MRTYYVGMDVHRATIAIVVLNGAGKVVEQLVVETSATRVRRYLKQLQGRVYVTFEEGTQAQWLYDVVQPLVTEVIVCDPRHNKLLKAGNKSDRIDAQKLAELLRNGSLKAVDHRDHGVRALKELVRNYDCLVSDTTRVMNRLKAMFRRQAIACGGHEVYRQDRREVWLGKLTERGAKERASSLYRQLAALKALRHEAKLAMVREARRGAAYVWLMSVPRLGAVSVAQLLAVVGTPHRFRTKRQFWSYVGLAVVTSSTADMEVVDGVLRRSRRPVATRGLNRNHNHLLKRVFKNAATSACQSEPFKQHYELRLQQGMDPALARLTVARQLSAITLSLWKRGEKFQAERMKRQAA

SEQ ID NO: 255326 - protein, 344 aa, unidentified
MNHSTIAVDLAKSVFEIAVSNHPGHVSERHRLSRPRFERFFAERLPSTVLFEACSSAHHWARELQRLGHSVILLPPHVTRPYAMRNKTDRSDAKALLEAFRNQDIHPVPVKSIDQHVLASLHRYRSAYIANRTARINTTRGVLREIGIFIPMGASRVVSTVRSLIEDPDSTVPRALRPTLHEACAEISHLESRTRDIERQIQSLARENPVAARLQTIPGIGILTATALVAFVGDVRRFPSGRHFASYLGLTPREHSSGLIRRLGSISKRGDPYIRMLLVHGARSVLWAAKKREHPNRLQAWALSIERSRGHNKAAVALANKLARFAWAVWSKDRDFEITTEVIE

SEQ ID NO: 255327 - protein, 356 aa, unidentified
MSTHGQSVLGIDTHKHIHVAVVLNGLGRNEATLQFPASDAGTATLLSWGREHGAPLTAGVEGTGSYGYQLTRALQAAGITVFEVNRPDRANRRRKGKSDPIDAEMAARAVLAGVATGTPKASDGRVEMIRMLKIARDSAGKARTQSLNQIRALLVTAPAEPRESLAGLTVGRLLDRCAAFRPGVLDSPTAVARHSLRLLARRNLQLRTEARELQVAIRGQILSTAPELLESFGVGPDGAATFLLTAGDNPGRLRSEAAFAALCGSSPIPASSGKTTRHRLNRGGDRQANAALHRVVVVRLRWHQPTRAYLARRLAEGKTKAEIMRCLKRYVAREIHGLLCPRGSGVGVADHGIEAA

SEQ ID NO: 255328 - protein, 326 aa, unidentified
MNLPAVVLGVDIAKLKFDVCLIKENQKVKHKVFANTRYGFEQLAAWLNSHQVGSLHICLEATGTYGEALALFLHEAGNRVSVVNPAAVKAFAASRLTRTKTDKVDAELIARFCLAQQPEAWRPPAPEVQQLQALVRRLESLIEMRVAEENRLSSGITVNAVRQSLEEHIKYLVEQIKQTEKMIREHINNHPDLKEQSDLLDSIPGIAQTTAALLLAEIVNIKQYKSARQVAAYAGLVPRERRSGSSVRGRVQLSKIGNARLRKALYFPAITALRCSDFFKVWADGLQARGKCKMAIIGAAMRKLIHLAFGVLKTGKPFDPNWAKTV

SEQ ID NO: 255329 - protein, 344 aa, unidentified
MEHTTIAVDLAKSVFEIAVSRHPGQVAERHRLSREAFLRFFAERQPATVLMEACRSSHHWARRIQALGHRVLLLPPQHTRPYVTRNKTDRSDAKGLLEAQRNEQIQPVPVKSIDQQALSALHRLRSAWLAARTCRLNTVRGLLREFGIAIPLGARRVVPTLQALLEDADSGLPDSIRPALDEARAEILELERRMRSVEHQLRALARQTPVVRKLRTIPGVGLLTATALVAFVGDVGRFPSARHFASYLGLTPRERSSGLRRRLGAISKRGDVYIRMLLTHGARAVLWKAKSRKEPDRLRAWALQLERTRGHNKAAIALANKLARIVWAVWRRDADFTEQAPIAA

SEQ ID NO: 255330 - protein, 416 aa, unidentified
MLFIGDDWAEDHHDVELVDDEGRRLARARLPEGLEGITRLHGLVAEHGAASWGDLPPEEVAAQVVIGIETDRGPWVTALRAAGYQVFAINPLSAARYRQRHSTSGAKSDAGDAHVLAEIVRLDRDHHRAVAGDSDLADAVKLLARAHQTAVWERTRHVLRLRSTLREYFPAAIEAFEDLAAQDALKFLERAPDPGRAAKLSRSQLMVLLRAARRHHVEAKADVLLAVLRAPALRQQPTLEGAYASVVAGQISIITVLNEQFAQLQKVVAEHFGRHPAADIYLSQPGFGVVLAARALGEFGDDSSRFTDAKSRKNYSGQSPITRASGKKTVVLARYAGNRRLGTALHLQAFAALGASPGARAYYDALRGRNIGHHAALRQLANRLVGILHGCLKSGTAYSEETAWQHHQKEVPAAAA

SEQ ID NO: 255331 - protein, 326 aa, unidentified
MEHELHYIGIDTAKEKLDVDVLRPDGRHRTKKFANTTKGHDELVSWLKGHKIDHAHICIEATGTYMKPVAECLYDAGYIVSVINPALGKAFAQSEGLRNKTDTVDARMLAEFCRQKRPAAWEAPHPLERALRALVVRHQALTDMHTQELNRTETAREVQRPSIDAHLLWLEAELKRLEKQIKDLTDDDPDMKHRRKLLESIPGIGEKTSAVLLAYIGLKDRFAHARQFAAFAGLTPRRYESGSSVKGASRMSKAGHVSLRRALYMPAMVATSKTEWGRAFRDRLAANGKKGKVILGAMMRKLAQVAYGVLKSGVSFDASRHNPVAA

SEQ ID NO: 255332 - protein, 345 aa, unidentified
MGNITRVGVDIAKSIFHVHAVDRFSEIQWKGKYSRSKWLAVIVEKVPISAEIAMEACGSANYWGRELEKLGYKVKIIHAQFVKPYVKSNKNDAVDAEAICEAMSRPNMRFVSLKTVRQQDVQAAHRIRDKLMMQRTAKANQIRGLASEYGLVAPIGIKKLREAIPIWHEDTENGLSSMFRILLNDLFSDLVALDERVAKVDELIRQDVQKDPVAMKLLELRGIGVLCASALSSAIGDGKTYRKGRDFAASIGLTPRQHSTGGKPTLLGISKRGDGYLRKLLVHGARAVIRHAHRHEDALSKWLMKLTSTKHVNIATVALANKTARVAWAMINNNESYRPELIAQA

SEQ ID NO: 255333 - protein, 344 aa, unidentified
MGEVSTIGMDIAKSVFQVHGVDAAGSVTIRRRIGRAKVLEYFGELPPCLVGIEACPSAHHWGRELQSLGHTVRLIPPSYVKAYLKRSKNDANDAAAICEAVARPSMRFVPIKTTEQQSALMLHRTRQLLVRQRTMLSNALRGHLAELGIVSAKGRNGTAELLEIIADGADSRVSPAVRGILEVLARQYGVIGTEIASIDKSIMALHRTCEASRRLAEIPGIGPVGATALVAEIGDWNAFSSGRSLAAWIGLVPKQNSTGGKDRLGSITKQGNRYLRWLLVVGAMAVIRYARKHGTQRRPWLARLMERRPTKVAAVALANKIARMAWAIMVGGEKYREPQLPLAA

SEQ ID NO: 255334 - protein, 441 aa, unidentified
MTEFFLGIDVSKGYADFILIDSQKNIVEKNFQLDDTFQGHNFLFSFLQSFFLNNPNANIIAAVESTGGYENNWVSFIAKLKDDFPICVTRLNPFGVSHSSKADLKRVITDKISALTIAEYVINHRAKISFVEEDYFAPLRKQWIYVKLLVKQKVQLYNQLEALLYTANPELITYCKHGMPNWVLVLLKQYPSAKSLAKASPSVLARIPYVTPQKAETIISNAKVSVASQTDPVTGALLKSVVGQIIFLDKTIKAQEEKLTRCCSFPEVKLLQSFTGIGAYSAVGLLLEIRAIERFSSAKKLAAFFGLHPVYKASGDGMGSMRMSKKGRREPRLILFNIARTAINCNPLIKQVYKNNLQKGKSGLSAMGVVMHKILRIVYGMLKTNTAFNPDIDIRNTVQAALKKPKVVMLKSRRFQQFDSLAPVSKKQNKKREEQKASQKE

SEQ ID NO: 255335 - protein, 360 aa, unidentified
MKKHNTERREQKGRGRKTIGLDLGDRTSRYCVVDEQGEVILEGSVATTESALRSWVEEMGACVVAMEVGTHSPWVSRLLKECGQQVIVANARRVRLIIESSRKNDRLDARTLARLARMDAALLAPIRHRSAQAQQHLIMIRARAALVETRTKLVNTVRGMVKATGKRLRKCSARSMGPAAARQIDDALAQVIKPLLASIESISGQIQQYDRQIVEVAKQYPEVARLDQVWGVGTLIALTYVLTIEDPGRFERSRDVGCYLGLRPRQRQSGARSPELGISKEGDRYLRTLLVQAAHYILGPFGPDTDLRRWGLRLAGHGGKNAKKRAVVAVARKLAILLHRLWVSGERYQPLRDAEIATAA

SEQ ID NO: 255336 - protein, 413 aa, unidentified
MLLLIGDDWAEDHHDIEIEDETGRRLAKARLPEGLEGITRFHALVAEHAPAAWAELPAEDVAGRVIVGIETDRGPWVSALRAAGYQVFAINPLSSARYRERHSTSGAKSDAGDAHVLAEIVRLDRDHHRQVAGDTDLVEAVKLVARAHQTAIWERTRQTLRLRSALLEYFPAAVEAFEDLAAADTLILLGRAPSPARAAKLTRSQVVSALRAARRHHAEVKADALLAVLRTPGLRQPPTTETAYAAVVVGQVGVITALNAQIAQLQEVVAEHFGRHPAADIYLSQPGLGVVLAARTLGEFGDDKKRFVDARARKNYSGQSPITRASGKKTIVLARYATNRRLGDALHQQAFSALRASPGARAYYDALRARKIGHHAALRQLANRLVGILHGCLKTGTKYDENTAWQHHTAAVA

SEQ ID NO: 255337 - protein, 352 aa, unidentified
MITIGVDPHKRLHVALAVDQAGQEIGEWRGTNSAQGWSDVAAWAASLGHERQWGIEGAWNYGRGLAQQLHAAGECVFDINPRWTAIRRRSARKPGKTDKLDARAVAHLVRQECDSLPRVQSEDQTVILDLLTTERESAVAEATRLRNQIHAHLMQLDPEYQTRLPSLKTKAGLDVVQSYLARGDGAIQRQRAAVVRKLAERLKLVLAQAEELAEQVKQLTAVSFLPLTRLCGINLITAGTLAAIIGPGNRFASDSQLAAYAGVAPLEASSAGLVRHRLNRGGNRRLNAVLYRIVLTQAHHLPEAKAYIERRLSQGKTRREAHRALRRFVVRAIWHLWQECLQVKLTNLVEAA

SEQ ID NO: 255338 - protein, 340 aa, unidentified
MTITTVGLDLAKSVFQAHGIDETGSAVLVKKLHRKQMLPFFSKLPPCLIGVEACGTAHYWARTLAAMGHEVRLIPPSYVKAYVKRGKSDALDAEAICEAVQRPTMRFVPTKTVEQQAILMAHRARSLLVRQRTMAANALRAHLAEFGLVANPGLAHLATLAEQALSDRDGLPPYARTALETLVRQITALTGEIALLDQQIAKWHAESEASRRLAAIPGLGIITATAIAATVSDPDQFTSGRQFAAWLGLTPQQHSTGGKARLGGISKQGDRYLRRLLVVGATAVMRHVKDKPTPMANWIRKLSEKKPFRVVSVALANKLARIAWVVLTRKEAYQPYAHLA

SEQ ID NO: 255339 - protein, 347 aa, unidentified
MDQISRIGMDTSKQIFQLHGVDAEERVVLRRKLKRKDVAEFFAGLAPTVVSLEACGGSQFWARVLRELGHEVRLIAPQLVKPYVKRGKNDAADAEALCEAMSRPTMRFVPVKSAEAQAALMLAGVRDRLIRNRVQLANAIRGHAAEFGLIAPKGPARIVPLLQRIQEETSIPVLARELFASLAREHRQLETEIAAVEARLMAWHRTSDVSRRLARIPGIGPITATTLVMKTPDPHSFRSGRDFAAWLGLTPKDHSTAGRQRLGSITRAGDETLRSLLVVGATSVIQKVRRGSSRYSSPWLDRLLERKAPKLVAVALANKIARVAWKLMTTGQTYDATHTPPAHAAAA

SEQ ID NO: 255340 - protein, 323 aa, unidentified
MSKHTTNCAGIDTAKRKLDVALDGRPEKLQIGNAADGHVTLSAWLRQFGVERVGIEASGGYEQEVVTQLRRDGFVVIVFQPAQVRAYAKFLLQHAKNDKIDAALIAACTAATKTINAPPDPRLAPFAQHLTLIEQLGDDIVRIKNRRENCRDQRILGVWKQRLLETERLQRTELKALAAAIRQHRDLAELLALILSVDGVGLRTAVAILVRMPEIGRLTREQAASLAGLAPFDDDSGDRVGERHIDGGRERLRGSLYAAALPAAMRWNAQLIELYRRLIANGKPHKVALVACARKLLIFVNAVVERATPWFKQPPVPARLKTA

SEQ ID NO: 255341 - protein, 321 aa, unidentified
MNKYNKIYGVDISKDVFDVVSCDGIHHQFENTPKGFNSFLKVISQSSLVVMEATGYYHYRLAQYLFRHGVIVSVVNPLSVKRFIQMRLAKVKTDKSDARAICEYGKVNEVPLYNALTDVQAECLQLFRLLDSYLKKRTATKNKLHGEETLGIPSKFVHQSLRRDLKHLDKEVKALEERLLLLVKQDQQHQLTLLKGIPGLGTKTALFLIVITDGFDKFETAGQLCSFVGITPTIRQSGSSVRGKSRISKVGNQKLRNLLFLCAFSACKHNRACRDVYERIVAKGKSKKLALIAVANKLLKQAFAIAKSGLPYDEKFVSKLN

SEQ ID NO: 255342 - protein, 338 aa, unidentified
MYYTGIDLHKFTSYLTTIDSDGCIVKQANIKNVDYNFLQYFSDLSGEHQTTVESTCTWYWLNDLLTSINIPLTLAHAKYVKAIAYAKVKTDKVDSHILAQLLRLNFIPQAHKISNENRTLRDALRARLKIVQRCTSVTNSMALVLAKYNLTEPEGLQDIPKLQYDQLSAHASLLKEQMLTLEKSLYPYLIPNDDIQRLLWIPGIGKMNAFTILLEADDINRFADVKNFFSYCRLVPSARNSAGKSKQRSSKDGNRYLKIVFTDAATHAVQYYSEIRKYHNSLLRKKNKQIAKTIIAKEIAEIVFHILKNKTNFNNKFKGVELQHKKSLQWPRVVSPYA

SEQ ID NO: 255343 - protein, 346 aa, unidentified
MNNSAFHPCGIEVSQHTLVVALRAHGHDEAPREFANTPAGHQALLRFLECAAGPVRVAMESTGLYGLDLALALHQADVAVMVANPRAVRHFATALMQRSKNDQLDAAVLREFAARMPFVVWRPPSAAALKLVAVARRLEALTDMMAAEKNRLHAASLSEALPVIIRRDVQRSIQTHQRAIERLTRAVEEFILDDPELARRFELLLSIPGVGTTSALHLLAELTLLPAGMDVRQWVAYAGLDPREYTSGTSVHKKVRISKAGNKHLRRALYMPALVAVRHDPHLRAFYEHLLARGKTKMQALVATMRKLLHAIFGMFKHHRLFDGAKVYKLAEAPSPSLAPMEVLCA

SEQ ID NO: 255344 - protein, 428 aa, unidentified
MTHSEIKSTEFAAYIGIDWADQKHDICLQEAGSNQIESFRLDHKPDSISNWVSELRQRFQGKPTAIALEQKRGGLLYSLMYYEFIVLYPVNPHALASYREAFTTSGAKDDPVDAGLLLEMVGLHRDKLYPWIPDDPLTRELSMLVEYRRRLVDDRTYLTNRLQALLKQYFPQALDWAGELDTVRALDFLAQWPQLEAIQKAAPDQLRNFYRQHYRLGEKLPQRLAEISAAQPLTRDKAVINASIPMVQALLEPLRGLIAGIETFDQQIEACYQQHPDKEIFNSLPGAGEVLAPRLLAAFGADRARYQSAEEIQCFSGIAPVTERSGKTKFVRRRLACPKFVRQSFHEFANSSIKWSRWARAYYDQQRRRGNKHHEAIRSLAYKWTRIIYRCWQDHEPYDESVYIAKLELRGSPLAKLIPTAAEQAVSS

SEQ ID NO: 255345 - protein, 422 aa, unidentified
MNDLNDKSFTAYVGIDWADTKHDICMQATGGQQREFDCIPHQVEQIEQWAQSLHKRFGGVIAVALELSKGPIVYALQKYDFFMIFPINPSTLAKYREAFTPSRAKDDPTDAELALDLLVRHPERFTPLNPQSVEIRTLTCLVEHRRNLVNDKNRITNRLRSALKQYYPQMLEWFEHLDTVLVCDFIVRWPTLKQVKRARKSTLEKFFHEHNMRFSNVLDARLKSIKAATPLTLDAAVVTPYSLQALVITDQLRVTLQAIRRYDDEIAEIAPKHPDYGLFSALPGAGPSLAPRLLVAFGEQRERFDSAATVQKYAGIAPVTERSGKKHWVHWRWQCPTFLRQTFVEWAAQTINKSFWAGAYYRQQRDKGCTYQAAVRALAFKWIRILYRCWQTRTPYNESVYLNALKRRGSPLLNPSTNGKMT

SEQ ID NO: 255346 - protein, 343 aa, unidentified
MGEVSTIGLDIAKSVFQIHGVDAGGAVVIRKRITRAKLLEFFAALPPCVVGIEACPTAHHWSRRLQALGHTVRLMPPSYVKAYLKRSKNDANDAAAICEAVTRPSMRFVATKSEQQQSGLMLHRSRQLLVCQRTMLSNAIRGHMAELGIVSAKGRNGTAELLKIIADEQDDRIPEAARFSLDVLARQYAAVRAEIVTIEKRIHAWHRSSEESRRLEEIPGVGPIVATALVAEVGDWKVFSSGRSLAAWIGLVPRQHSTGGKERLGGISKQGNRHLRWLLVAGAMAVIRYARQHGTKRPWLTRLMDRRPIKVAAVALANKIARMAWAMMVRGERFKEPRLLPAA

SEQ ID NO: 255347 - protein, 343 aa, unidentified
MHHLAVDLGSRQSQVCLRSAEGEIQKEAKISNGSLEAAFASFPKSRVVVESSSEAFAVADLALKAGHEVNIVPAGLARSLGVGQRGVKTDKKDAQNLSMASCRMQILPQVHLPSIEARELRRVLTSRAQLVTARTGMVNSVRGWLRTELLRLHPETGPQNFPKRIRELALSRESGLPEHIERLLKVIELLNEQVKAADLELEQLTQQHRTCQRLRTIPGVGSVTAATFFATLDDVRRFKSAHAVESYLGLTPGEKSSGEAIQRRGITRAGSVRARTMLVQAAWGAWRSRPDDPMVKWAVKISTRRPKQVAIISLARKMAGVMFALWRDDATYDPKHDNEVSCT

SEQ ID NO: 255348 - protein, 372 aa, unidentified
MNYNTVYVGMDVHKESFTLCSCKYEDEKASHYQRTPASYKNVLRYLAFLRTIYGEDTRFVCGYEAGCLGYSLYHQLENFNVECVILAPTTMLEQRSKRRIKTDKRDAEIIARSLAQHNYSPVHIPTETDNQTKEFIRMRDDHKAELKKIKQQILSFCLRQGYQYDGSGNWTAKHVKWLRSLKPAGLYKEILDEYLLTYTILTDKLNRLDQRIEELASKEEYKESVSKLTCFLGIKIHTALSVIVEVGDFQRFVSARKFAGYLGLVPGQHSSGDDRNGLGITKAGNTHVRRLLVESAQSYTRGKIGYKSRVLRSRQAGNSPQVINYADRANERLRRRYYQMVLKDGKKYNIAKIAVARELACFIWGMMTDNIY

SEQ ID NO: 255349 - protein, 341 aa, unidentified
MNEQEPLRVVIGMDPHKRSVTIEVMTADESILGGGRFSTDADGYARLLAYARAWPHRVWAVEGCAGIGKHVADRLVADGEDVVDVPAKMSARVRIFTTGQGRKTDATDAHSIALVGVRMSGLRPVINDDQLEVLRMCVDRRRSLGEEHTRKVCQLHKLLLELIPGGAKTSLSAAQAKELLKKVRPTTAAGKVRKAHAVELAEDLAKIYARTKAADKELKALVEATGTTLMSLHGIGPSGAARLLVEVGDVTRFPDRNHFASWTGTAPIDASSGEHTRHRLSRGGNRQINRVLHIMAVVQLRTRTTEGRAYYDRKKAGGKTSMEALRCLKRRLSDLSWVTSR

SEQ ID NO: 255350 - protein, 342 aa, unidentified
MTIVTVGIDLAKNVFAVHGVDAAGKPALVRPSVARSNLLELIATLPPCLIGMEACSGAHHWAREFEKLGHTVRLMAPKFVAPYRLSGKRGKNDAADAAAICEAVTRPQMRFVPHKSIEQQGQLMVHRTRQGFVEQRTATLNRIRGLLSELGLVLPLKAATVRREALARLEELPGWANTVIGDLLSEVTRLDERIAEYDRHIALMARHSTQAQQLMQLGGIGQTTAMALISTVGNGHDFACGRSFSAWLGLVPGQYSSGGKQRLGRITKAGDAYLRSLLVMGARAVLAAAMNTRTPKQDPISRWARSLAERRGYWRAVVAIAAKNARMCWAVLQRGDAFKMPA

SEQ ID NO: 255351 - protein, 338 aa, unidentified
MDTHKDLHVARAKDELGRGLGEITIPASAKGYRALLSWSRALGEVRAFGVEGSGCYGAGLARHLRAHGEVVIEVIRPDRQARRLRGKSDPADAEAAASAVLSGEASGTPKASDAAVEMIRALRVARSTANRARTQAINALHALVVTAPEELRADLRGLPGPRLVRTCARLRPGPLTDPVGATKAALRSLARRHQALSVEVRELDGELCRLTAKACPALLGIFGAGSDTAGALLLAAGDNPERLRSEAAFAKLTGVSPVQASSGKTTRHRLNRGGDRHANAALHRIVLVRLRWRHPPTIDYVARRTAEGRSKREIIRCLKRYVAREVYRALTDVPSDAS

SEQ ID NO: 255352 - protein, 420 aa, unidentified
MFAKDFPRRPMRRCYGASGERGIFSAGHKPMERPMPKPNDCSRSVTAFEQNSTLIAVIEMSLSSWLVAGVVPGIERHPLKKLETDEDALLKLLLRWRDEAVNAGHKIERIAIAFEAGRDGFWLARWLRARGIEAYVIHPASVAVSREHRRAKTDRLDTELLKRVFLGWLRGEPDHCSMSAIPTLEQEDAKRPNRERENLVGQRTRIVNRMKACLIRFGIRNFKPTLRKAPEGLEALRTPEGAPLPPNTRAEMRRDITRLRFVQDQIKEIGATRLQQLEQAPAEEPHAMIRLLARVTGVGIETADMLVNEILARNLRDQKAVARYAGLTGSPDESGKRSREKGLSRAGNARVRRGMIQLAWRFLIFQKESALAQWYRVATKDARGAIRKTMIVALARKLLIALWRMVTIGEMPDGVAMRAT

SEQ ID NO: 255353 - protein, 345 aa, unidentified
MLEGYRSVLIIDHHKSVSEQLVLNQETGEITRERVRGERAEVRRRLEGLPRPAVVYLEACRSWEWVSDLCDGLGIECRLIDPGKMPEIARSKKKTDRHDVDAMLSRLLAVGKLPESHRATRVERELRELTRNRMDVQRLVRQTLNRLHALCDGQGLPARQRDFTDLEWRGRMSAELGPQLGLVLEVLLDQLAHLRGAIERLEGRLVELTAERADVRALKTIPGIGPILAATMVAEIGDISRFKDSRHLASFSGLVTAVRSSAGKARMGHISKAGPPALRWALTQAIISGLRVRGNPFARYYRRKRPRGRGAMLAVCAAAHKLARVIFVVLSRQVAFDPVKVGRAA

SEQ ID NO: 255354 - protein, 346 aa, unidentified
MKEITTIGLDLAKQIFQVHAADFEGAPVISRKLRRADVLSFFRKTPRCLVGLEACGGAHYWAREIAALGHEVRLIPPAYVKPYVKRGKTDAADAEAICEAVTRKTMRFVPVKSADQQAAAMVLKTRELLVRQHTQAINALRAHLAELGIIAATGTTKVASLTDIVRDETDNRLPQAARFALSEIADQIEGLNRKIGKLEHAIVMEAKRDDDMRRLCTIPGVGAIIAASIKATVPDPGGFTSGRHFAAWLGLTPKPHSSGGKERLGGISKMGNPMLRSLLVLGATSVLRHVKGNASAPPWLSALLGRRPFKVVAVALANKMARIIWALLTKGGKYRTSGTTSEAAHA

SEQ ID NO: 255355 - protein, 430 aa, unidentified
MNYNTQNAKIEAITEKTLVLGIDVGSEMHYARAFDYRGIEYSKKPFKFSNTEAGFATFKEWILDLKERHEKDKVVPGMEPTGHYWFNLGKFLQDNEMKPVLVNPHHVKKTKELDDNNPTKNDRKDPKVIAGLVREGRYMIPYLPEGVYADLRTASNIRFQLQAELTRIQNRISRWFNIYFPEYKTVYGKPDAKSGMLILKAAPLPEDILTLGIDGVNQIWRDAKLRAVGKARAKTLIEAAEHSVGSKEGAVSARMEIRMLLEDYESRNIRLQEVMALIEGLVKQIPMAEKLLEIKGVGIRTVSGFLAEVGDISRFNNPKELQKLAGLALVENSSGKHKGETTISRRGRKRLRYLLFEVAMSLVSKNQEFRELHNYYTTRRLNPLKKMQSLMAIAAKLIRVFYAMLTKGVDYDPKKMVSDIKRPAVYLQAA

SEQ ID NO: 255356 - protein, 339 aa, unidentified
MTLGIDVSKNYLDCCLKGVNQKGILVTKATKKFKNDENGFQSMNVWLKGKTTEGKDILCVMEATGTYHEDVLYYLYEHKYNCVLVLPNKIFHYARSLNKKAKTDKIDAELIADYGAKNATEFSLWFPVTKNIKRIKEFSRSIEDVNAQLVENKNYLHALKIAHNTNPKIIKLYENLIEKLEKMKLELESGLDKEIETDSEMKRMAEESAKIKGLTVRSVARVLAEVNCFLSTTSIRKAISYAGLDIIVKQSGSSCFSSSISKRGNKHLRNILFMSALSSAIYDEHNKDLRQRLLERGHKPIECTVSVMRKLLITIFVLTKYNRKYDPNYNWHNANHIPT

SEQ ID NO: 255357 - protein, 413 aa, unidentified
MDEITEEPTALVERVAALDIGKATLTACVRVPHETKPGRRRQEVRTCATTTRSLLGLRDWLVCQGVTRVVMEATSAYWKPPFYLLEDDIAECWVVNARDVKNVPGRPKTDKLDAVWLAKLAERGMLRPSFIPPRPQRQLRDLTRYRRTLTHERTREKQRTEKLLEDAQVKLSSVISDIFGKSGRDMLDALIAGQRNPYALAALARGTMRAKTSVLQEALTGHFTDHHGFLLAMMLSRIDALTAQIGTLTARIEQAIAPFAHQVAQLDEIPGIGIIAAQDLIAETGADMSRFPTPAHLVSWARFALKARQSAGKTRPGSTGKGNPWLGGTLGESAAAAARTSTFLASRYKRIVKRRGKQRALVAVGNSLLTIAWHLLSDPGARFADLGTHLARPPHPPAAQTPASSPNSNASPA

SEQ ID NO: 255358 - protein, 410 aa, unidentified
MDTLIERCGGLDVHKDTVVACVRVPARGGGREQFIQTFGTTTVQLLALRDWLVAQGVTRVGMESTGVYWKPVYYVLEDALECWLLNARHLRNVPGRKTDVADAAWICQLVEHGLVRPSFVPPKPIRELRNLTRYRKAQIEERTREAQRLDKILQDAGIKLSSVASDVLGVSGRAMLRALIAGTRDPETLAELARGTLRRKIPALRQALHGRFGPHHALLVGTILAKLEFLDEALGHLSAEIEQVIAPFAAEAALLRTIPGVDRRTAEAVVAEIGVDMSRFGAAGRLASWAGWCPGNNESAGRHGPGKTRKGSKWLHTYLTEAAKAAARTKGTYFGAQYARLRGRRGSARATVAVGHSILVAAYHILDRHEPYRELGPDYFRRRHSREHQTRRLVRQIEALGYHVRLEEVA

SEQ ID NO: 255359 - protein, 425 aa, unidentified
MSERDYNRQVVKRERIGRETLVVGVDVGNAWNAVGFMNKEGKVLGSCTKLYNSREGFEEFVKMTEGFKAKHSLNSVLIGMEPTGHYWRKLAYFAKDQGYEVRFVRTTALKHHRELDESSSAKSDKRDALTIANITREGKYIDTVIEDGIVRQLRTLSKVRERLLRYSVGAKNALHAALDDYFPELHEIFWSMNSRSLWAVLDQCPFPEDVLLMKVSALRELIAYSARKKAGAAQKAKALKQAAKKSIGVKRIGSADRYRVKICIEEVKRTVLMLKDIDRQMKGVLKEIPSSEYLLSIPGIGPLSAAVFLGELGDPAYFQNARQIVKYAGYDPQESDSGSRISRRFISKKGRWLLRKFLFFMSMRVVVLSNYFKEYYQRKLQTKNRVGQLPRKKEILCAVAIKLIKVIFALLRDKRRFQDTVNIAA

SEQ ID NO: 255360 - protein, 427 aa, unidentified
MNYTQNRKIAQVTEVTLVVGVDIGSRWHYARAFDWRGIEITKKAFRFSNDLDGYTAFEKWVHETAENSAKMEVLIGCEPTGHYWYTFARYVGLHGMKLAFVNPYHVKQSKEMDDNSPRKTDEKDPKTIAKLVTEGRYSFPYLPEGIYAELREAMSVRDQIVKAMNAAANRIQRWLTIYFPEYLKVYKVFDSVSGLAVLWQAPLPEDVVKLGADGIVKLWHEKKLRAVGKKRAQTLIEAAKSSIGMPGGSCARMDLHLLLEDYFAKKEQLERITAVLQEELLKVPNAEKLLAVKGIGIITVAGFLAEVGDLGRFTSPKQIQKLAGLEPKENSSGKHKGRTSISKRGRRKLRRLLFQAVLPLIRSNEDFREVYTYYTTRKDNPLRGTQAVIAVGCKLIRIFYALLSHGTDYSSTRFRADILRPGQANAA

SEQ ID NO: 255361 - protein, 348 aa, unidentified
MDYYAGIDVSLEASSVCVVDSDGQIVREAKVLSEPEALIVWFGELGLGIARIGLEAGPLSQWLFAAMKEAGLTVELLETRHVRDAFKAMPVKTDRKDARGIAQLMRLGWFRSVHCKSMPAREIRALLTARKLVQSKLVDMEMSLRGILRGFGLKVGVTKPNRFGRRIEELVSGHATLETIAKALLAAHDVLLRELNGFEKRVRAMARDDKRVRLLMSAPGVGVIVGLTYVAAIDDPGRFKSSKQVGPHFGLTPKKYQSGEKDVSGRISKIGDASVRTALYEAAHIILTRPLKGASMLKSWGMKLARRAGMKKAKVALARKLGVILHRMWVDGTPFAGEPAAALRPASA

SEQ ID NO: 255362 - protein, 402 aa, unidentified
MNAVGIDVSKGKSMVAIMRPFGEIVSTPFEIKHTSSDINSLVKLIKSIEGESRIVMEHTGPYYEVLAHQLSEANLFVSAINPKLIKDFDNDSLRKVKTDKADSVKIARYALDKWQNLKQYSVMDELRNQLKTMNRQFGFYMKHKTAMKNNLIGILDQTYPGVNTYFDSPARSDGSQKWVDFASTYWHVDCVRKMSINAFIDHYENWCKRKKYNFSKSKSEEIYGKAKELVPVLPKDDITKLIIKQAVDQLNSASITVESLRTLMNETASKLPEYPVVMAMKGVGTSLGPQLMAEIGDVSRFTHKGAITAFAGVDPGVNESGSYEQKSVPTSKRGSSDLRKTLFQVMDVLIKTHPQDDPVYQFLDKKRAQKKPYYVYMTAGANKFLRIYYGRVKEYLASLPES

SEQ ID NO: 255363 - protein, 473 aa, unidentified
MARAARRPGARQYPKRRSSRGRSAPFEQMNLNAAGIDVGATEHWVAVPEDRDEEPVRRFGAFTAALYVLAEWLRQCQIETVVMESTGVYWITLFEVLEERGFDVKLVDAHDARQVPGRKTDVKDCQWLQELHTYGLLRGAFRPEDQICVLRSYLRQRSMLVAMASRAVQHMQKALEQMNLKLTEVVSDINGKTGMEIIHAILAGERDPQRLASHRDRRCKHDQATIAKALEGHWRAEHLFALQQALEQYEFLQQQLQACEQQIEACLQTFVTHVEVEPPQPTPACKRRARQRQAPSFDVHQYLDAMTGVDLTQIDGIDELTALKVISEIGLDMTRWPTGKHFASWLGLCPGNKLSGGKRYRMRSKPTANRAASALRLAAQGLVNSHSALGAYYRRMRARLGAPKAITATAHKLARLVYSLLRYGTAYVDAGQQAYEQKYRDRVLTNLQRKARVLGYQLVHVEDTGRVQAAATL

SEQ ID NO: 255364 - protein, 341 aa, unidentified
MNYTQNEKIEQVTDSTMVVGVDIGSQIHYARAFDNRGRELTKRIFSFHNDLEGFNSFNLWAETLKTENEKTAVLIGCEPTGHYWFAFAKYVNDHQKRLVMVNPFSVKKIKELDDNSPKKTDSKDPKTIAKLVVDGRYSIPYMPEGIYAEIRDLVYSRDRIMKQHNISANRIQRWLAIYFPEYLGLYTRFDAISGLAVLEKAPLPKDVIALGVNGIRKIWHDKKMRGRGVTEDRAKTLVEAAHNSVGLDGGIGTKSELYMLLEEHRLWTSQLEAVNKVLEEMILKVPHVEKLLAIKGVGSITIAGFIAEVGDIRRFDSPKQIQKYAGFELVENSSGKQFRKA

SEQ ID NO: 255365 - protein, 344 aa, unidentified
MEHFAGLDVSVKDTSVCIVDDTGKIIREVKVASEPEALSAVLKSPAYHFKRIGLEAGPLSQWLLSALAEAGLPAICVETRHMQAVLKAQINKTDRNDARGIAQMMRAGLYRPVHVKTLRSQKLRMLLTHRQLLQSKAIAVENDLRGTLRNFGLKVGMVGKVKFEARIRELVENQPDLAVLVEPMLIVRRVLREQIVILHRRLLAIVRDDEVCRRLMTTPGVGPVVSLTYRATVDVPARFHKSKSVGAVFGLTCSKYQSGEIDRSGRISRCGDEMMRVMLYEAAQSMLRSKKWSWLKAWAMQIARRRGMKKAIVALARRLAVIMHRIWVDGTEFRWTREQAAAAA

SEQ ID NO: 255366 - protein, 370 aa, unidentified
MNQSSTLYIGLDVHKDSIAVAYVATDHDAEVISLGTIGTRQADIDQLIRKMPSKAQHLVFVYEAGPGGYWLYRYLTQRGHVCWVVAPSLMPQKAGDRVKTDRRDAVQLARLMRSGDLTPVYVPTVEDEAIRDLSRAREDAVGDLKAAKFRLKAFLLRHDIRYTGHATWGPAHRRWLSEVVCATPAQQIVFQEYVRAVTEHTERLQRLEQELHDPVTSWRLQPVVEALEGLRGVQGTVAVTLVAELGDLTRFENPRQVRQYLGLIPSEYSSGARRRQGSRPKAGNTHARRALVAGAWAYRYPAKVSRHLQLRLEQVPTPLQDISWKAQVRRCKRFRRLMARGKHANQVGVAIARELAGFMWAIAKHVPVTP

SEQ ID NO: 255367 - protein, 356 aa, unidentified
MSRDIKYIGMDVHKEAIVIAVLDCSGKMVMETILETKASSILEFIHGLRGELHVTWEEGTWAAWLYDLLQPQVEQVLVCNPRRNALLKEGSKSDQVDAQKLADLLRTGMLRPVYHGENGLRTLRELGRSYQTISKDLTRVMNRLKALYRGWGIPCAGTQVYGPRYREEWLNKIPQAGVRRRAELLYQQLDGLQGLRREVRGEFLAESRRHKAAKLLRKIPCIGPIRAGLLIALMQTPHRFRSKRQLWTYSGLGIETHDSAQYRYVGGQLQRSKKPQQLRGLNRNHNHDMKEIFKGAAIRASCGTGPFRDFYAALLAKGMKPEMARLTLARKIAAITLTLWKRGEGFDAEQLKTQAA

SEQ ID NO: 255368 - protein, 345 aa, unidentified
METMYYIGLDVHKKTISYCVKDGGGNIHAEGSIPATRLTLDMWMKTLPRPWTVAMEATIFTAWIYDHLKPHAAAVKVAHPLMLRAIAAAKKKNDRIDAHKIADCLRCDFLPECYMASTEIRERRRTMRYRNLLVRQAVQMKNKIAVLLMEAGVSYNKQKLHKVGYFRELLATNQDIDEGLKPLLRLCRETVVRLGKMESALVRSLERDSLLVERVERLMTIPAVGPITALTWALEVGDVQRFSSIKKAISYCGLCGAERSSADITKRMPLSKQRNKHLQTVLIEAAKMAPRNSPELAMVYEQEKQKGNANRATLAVARKLVAYLVAVDRRQKEFLTVERENRTAA

SEQ ID NO: 255369 - protein, 360 aa, unidentified
MSRLTMFAGLDYHQNVIQVCVQDHTGQVRLNRSCNNDPAEVTALLRQAGPVAEVSLEACCGSAAFGEALAAMGSWRVNLAHAGYVSRLRASPDKTDFSDARLLSDLTRVGYLPSVWLAPPEIRDLRQLVRHRQSLVNQRRNLKLQIGAALREQRVKVPEHGRWSKRWVEAVREHAGLSPAVRWIIQEKLAELAWLSGRIERVAQRLREASSVHDLYDRLRELEGVGEVTAWTLTAHIGRIDRFKNGKQLARYCGLSPRNASSGEKNADAGLVNACSRELRAVLIQCGHGLLRRAGRWRELADKLKRRGKPANVVVAAVANRWVRSMHWRLASAETKLTDKKKLSEKNLTAKKRSAKKKCL

SEQ ID NO: 255370 - protein, 356 aa, unidentified
MQGTLGVSKPTRKRKETPVEHQRQYVGIDLHRRRSVIVRINDAGEVLETRRVVNDPLELALAIADAGDDPEVALEATYGWYWAADLLEAEGAHVHLVHPLGLHWDSRRVKNDVLDATELAKRLSRGDLPEAWIAPPELRELRELVRYRAKLVALRISAKAQVHAVMAKLGILPTLDDMFGPGGQRLLDEMPFSGAYAIRIASLRDLLELYGRELAMVEQVVARRLRGNLGYQAVQAINGVGPVMAAIFVAEIGDVSRFHSAGHLCSWAGLTPTHRESDIKVTRGHITKQGSNLVRWAAIEAVACYHGGAPIAPTYARVAARRGVMIARVAAARKLLCLVYYGLRDGEIRCLAEAAA

SEQ ID NO: 255371 - protein, 372 aa, unidentified
MSARLGPFRRHGGVCHPFAFSEQKGATMSMVRMIVGGVDTHADIHVAAAIDSNGGVLGIESFPADESGFEALLGWLTSHGEIQVVGVEGTGSWGVGLARFFHDHEIMVVEVDRQNRQNRRRVGKSDTTDAIAAARAALSGSASVTPKTRNGPVEEIRILLVARRSARSQRIETLNQLRHLVFTGPEEVRSRFKDRPKTGLVCEVAKLRPRKGSDPVLFTTLVTMRGLARRIEHLNREIKGLDAILTELVHDTAPSLVGLYGVGTDTAASLLVAAGDNPDRLRSERSWAHLCGVCPIPAGSGRTDGRHRLNRGGDRQANAAFYRIVLTRMSGDPETKAYVARRRGEGKNTAEIMRCLKRFVARETFKHLPRTA

SEQ ID NO: 255372 - protein, 317 aa, unidentified
MSKRSIVCAGIDTGKHRLDVALHGRPERLQVPNTAEGHEQLLVWLRQHRVKRVGIEATGGYEQTVVWRMRQGGFVVVVFQPAQVRAYGRFHLRLAKNDKIDAALIAACTADIRTIYAAPDRRLAELAELATQIDQITRAMARFKNHRESCRDAGLRQLWDDEIRRFRGLFRQRLKQLVAAIRRYPDLAERLDLILSIDGIALRTASAIVVRMPGIGQLSRGQAGALAGLVPYDDDSGEHAGERHIAGGRERLRNNLYVAAWIAPLRWNPQLTALYKRMRAAGKEHKVAVVACARKLLIFANAVVARGTPWQAHHTVH

SEQ ID NO: 255373 - protein, 312 aa, unidentified
MEHTFVGADIAKDQVDVHIRPTDERVQFSRDEAGLAGLVARLQHLGPRLVVLEATGGYEIPVAAALASAGVPVAVVNPRQIRDFARATGQLAKTDALDARIMARFAEVVQPAVRPLPTAAAQALGDLVARRRQLIEMLGAERNRHQQARDPQLQRRIATHVRWLTKALAALDTDLDDTIRSSPIWRERDNLLQSVPGIGDVTAYTLLADLPELGRLDRRKIAALVGVAPLNRDSGHWRGRRTIAGGRPAVRSVLYMATLTAVRFNPVIAHFYQRLTAAGRPKKVALTAAMRKLLTILNAMLRDQRPWQPQSA

SEQ ID NO: 255374 - protein, 404 aa, unidentified
MGQIFVGHDWAEDHHDIQINDETGRRLSRARLPEGVEGVARFHALVGEHAEDPAEVVVVSETDRGLFVGALVAAGYEVYAVNPMSVARYRERHATSGAKSDPGDAATMAELGRTDRHHHRRIAADSEGAEALKVLARAHQNLVWLRQRQANQLRSTLREFYPAALGLGELHGFDALGVLAVAPTPERGRLLSRSKIAAAIGRAGRQRHLDARAGELQAVLRAEQLAAPAAVSEAMGASVTAVVAVISTLNTQIARLEEQLEEGFDSHPDAKIVRSLPGLGTILGARVLAEFGDAPGRYADAKSRKNYAGTSPVTRASGKSRVVLARHVRNRRLGDACYLWAFAALSSSPGARAFYDAQRAANRTHNQALRALANRLVGVLHGCLTHATLYDEHTAWAHRLQLAS

SEQ ID NO: 255375 - protein, 345 aa, unidentified
MLHVGLDLSRKRVDVCLVSGEGELVEHFRAPADRDGLYGLTRRVAVYDEAVRGVVESMNGARFVHDELVKCGWEVLVADAQRVKGLAPLACKTDKVDARVLAELSFRDLVPAIWLPTPELRAERERARWRLHLVKHRAILKNRVHASLIAFGHQVPMADLFGVAGRRLLAELDFPEPWLGHVQASLELIDDLDHRIGEIERWLRRSGADHRYIPLLMSAPGIGWITGFTIAAEIGDISRFSSPVKLTGYTGLCPRVSQSGEVDRRGPLSKHGPRYLRWGLMEAAIAASSHPLYRERYQRTKRRLGRQRGAKVAQIELARKLTEAIWYMLTRNQPFKPFAPAGAIF

SEQ ID NO: 255376 - protein, 364 aa, unidentified
MNNQIYIGMDLHKNTSSFSVKDKEGKVIDECKLPTEPSAIKGYLKRFPDSSLAVEPVSQWYFYGDLIQGLGIDVHLANPLKVKAIASARVKTDKIDAGVLCDLLRSNLLPEAYFASPDARYWKEMVRYRSSLIRLRTQIKNKIHSILFRNGLRHPFTNLFGVGGRKWLESLDLAEHFAFNLKQYLGLIDAFSQLIKEADERIEKVVGDNQPAKLLTSIPGISYISVLTIMAEIGTIERFASAKKLQGYAGLVPSTYASGDRVVHGRLTKQGSRWLRWTMIEIAQRQLLCKRKPGFGWYYQRIKQRRGSGAAAAATARKLLAVVWRMLKDNRPFEIVPPAPRSKTSLLRGKSGAKDAHRKNIVSH

SEQ ID NO: 255377 - protein, 412 aa, unidentified
MKLRKGQPVRTGGRAVVGIDIGKRKHAATALSPQGEIIAQLAAFPNTRQGVDQLEKEVLRKAGGPSKVLVGMEATGHYWMCLYHELTRRGYVCVVVNPLQTNARSKARIRKTRNDKIDSGTIARLILCGEALATRVPTAEITELRLLARHRHRLWQAAGNMERYAHTLVDRIFPEYADVFSRTFLPSSQKLIREIGLAPAKLVENAPRVRELLRIAGRGRIAPETIDRLLQAARESIGVRQAEEVIESQLRSIFDYLDTVRQQIDEVDEQLDQRGRKLTSPLYSLGLTSRMVAVIHAETDPIGDFATAKQYVAYVGLDPSRHESGDTIQRRGKISKRGSPLLRHTLYNAAFVVCRKHGYFRRIYNKHCRLGKGHRNALVIVARHLACVIWRMLTDGRDFTKRPPKRIAVSGV

SEQ ID NO: 255378 - protein, 372 aa, unidentified
MNYNTVYVGMDVHKESFTLCSCKYEDEKASHYQRTPASYKNVLRYLAFLRTIYGEDTRFVCGYEAGCLGYSLYHQLENFNVECVILAPTTMLEQRSKRRIKTDKRDAEIIARSLAQHNYSPVHIPTETDNQTKEFIRMRDDHKAELKKIKQQILSFCLRQGYQYDGSGNWTAKHVKWLRSLKPAGLYKEILDEYLLTYTILTDKLNRLDQRIEELASKEEYKESVSKLTCFLGIKIHTALSVIVEVGDFQRFVSARKFAGYLGLVPGQHSSGDDRNGLGITKAGNTHVRRLLVESAQSYTRGKIGYKSRVLRSRQAGNSPQVINYADRANERLRRRYYKMVLKDGKKYNIAKTAVARELACFIWGMMTDNIY

SEQ ID NO: 255379 - protein, 392 aa, unidentified
MYIVGIDIGKNHHEASIVSPEGKQIGRSLRFATTHKGADSLMSFIFKNIGNSPCVFGMEATGHYWYPIYSFLKAKGYTIYVINPIQSDSLRKMYIRQTKNDSIDSFLIAEVIRFGQFGTTSMADENILAMRQLCRYRDSVISSRTEIKLRIGTIMEQIFPEYEKQFSSLWVSTSMGILEKYLTPENIENAPIDELFEIIKDKSHNRLTKAKAISIKEAAADTFGIKIAQDAFSFQLKQLIDRMNFLDKQIEALDCQILEYYEKFDCYLHTIPGIGIIGAATILAEIGDISRFKNSSALVAFAGIDPTVRQSGEFNSTHNHMSKRGSPYLRHAIFLAATTCSFHNSPLNAYYKKKRDQGKHHLTATGAVARKLTTIIYAVLRDSKPYEPKKFC

SEQ ID NO: 255380 - protein, 343 aa, unidentified
MKLSRVGVDLAKNVYQLHGVDGHGKTIWKRRLRRGQWLQALLDKTNSDCEIGMEACTGAHQWARELQSRGYTVRLIAPQFVKPYVKSNKNDANDAEAICEAMSRPHMRFVTVKSVDQQDIQATHRVRTEIKDHRNAKANQIRGLVAEYGLVAPQTLLALRRAIPEWLEDAENGLTDNFRCLLHGLWDDLLTLEDRFKELDKAIEKLARNNEVTKRLQQLRGVGPIVATALVATVGTGEQFSNGRQMAASLGLTPRQSSSGDKRRLLGISKRGDVYMRTQLVHGARSVVSQAKHRDDPLSRWVTDIAKRRHANVATVALANKTARMAWAMLRNETDYDPSLAVG

SEQ ID NO: 255381 - protein, 408 aa, unidentified
MGRAAEVVATSSSIRTDGGCPVAQVNDLSRSLTAFDPISTLVVVVEMSKASWLVSGVVPGVERQPLKKLEPDATALLRLIERWRNEAVRAGRPISRIALAYEAGRDGFWLARWLIARGIEAHVIHSASVAVSRERKRAKTDRLDAAMLMRVFLGWLRGERGHCGMVAIPTMEEEDARRPSRERESLVDERSRITNRMKSALARLGIRGFKPHLRKAPERLAGLRTAEGTGLPANIIEEFRRDMARLALVREQISSIEKTRAERLERAPDTGPHAMVRLLARVIGIGIETADMLVQEILSRKLRDRRAVARYAGLTGSPDESGLKRREKGLAKAGNARVRRGLIQLAWRFLMFQKDSALAQWYRTRTEGPSGARKTTMIVALARKLLIALWRLVTTGEVPDGVELRPAA

SEQ ID NO: 255382 - protein, 486 aa, unidentified
MANRTKGHSDLKDLPMLPHESIYIGVDIGKFQHVAGFVSKTLLERHQHFEQCPAFLFEQSREGFRAFVERICAYCPLEQCFILMEQTGHYHKALQQYLLELDLPVYVMHVQHRECGMIKTDKRDALGLANQLYNQLALGVQVPDKLQVVHRAIPPSEAAAQLKGLMRHRYELVTEATQRKNKLTAICDELFPELTQVLKNPNLPIALDLREKFPTPHAVATASLVALREVRRGSRPSEAQLVLLQQLAAQSIGTKDGARQRGLLLEQELLIKELRLMQEHMKRLDMEVAQIVEHSREGQILLSIPPICPMYAAAILATIGHIANFEDAGHLKSYFGWAPKRAQTGVSFDRTSLTRGGSREMKKVMYLVAWNAIKSETEWASLYKRLVPRLCTYDERTQTYKGKGKALGHVVGRLITLIYALLRQDDEMLSHLNSGTEPPEPVLYDPELHKRHRAGHYRPIRKEHTTNRIVQVERQENVIETKILPP

SEQ ID NO: 255383 - protein, 459 aa, unidentified
MTKKNTQSKKRAKTSKRQTVNAHAAGIDISASVEHFVAVDPDKTENCVRCFGHFTQDLYAMADWLTELGIQTVALESTGVYWIPVCQVLESRGIEVCLVNSKHVSNVPGRKSDVMDCQWLQYLHSVGLLNASFRPPAEIGAIRSIRRHRDTIVQTASSYVQRMQKALDQMNLKLHYVISDITGETGMNIIESILAGEHNPQVLAKLKNNRIKASEATIAKALLGDDLPQHLFTLKQNLEGYRHGQNLINECDSQLESMLEQIDSQMDSQKHPLPEKSKRKGSKEPNFQLREEMYRVFGVDLTGIDGISILIVYTIFSEIGTNLSAFPSEAQFVSWLGLCPGNKQSSGRILSARTRTVKNPVSKALRMAAQSMHHAKSALGEYYRRMRAKLGAPKAITATAAKLARILYKMITTKTAYDETQFARNEDSYQKRRLQNLKRQARELGFELVGIEPDATVVS

SEQ ID NO: 255384 - protein, 418 aa, unidentified
MEAIHDRVAGLDVHKKTVVACVRLKTGRQIERECRTFDTTTSGLEALLGWLEEAGCSHVAMEATGVYWQPVWRILSEGEFELVLANAAHIKNVPGRKTDMNDAMWIADLLSCGLIKASFVPAPEMQDLRTLLRTRKQLVREPTRHVQRMQKALEQANIKLDGKISDILGVSGRRMIEAMIAGESNPEVLASLADRRVKATRTELREALRGHLSDTHRFLLQTHLTQWDALEASVKAIDRQVDRLIAGFEQAARFRLLIALLCKVPGISKLAAVSILAETGIDMSRFPTAGHLVAWAGMCPGHHESAGKRKSARLRKAAPWLKTMLVQCAWAAKRQKNSYYRAQFYRLSGRRGPQKAICAVAASMLTAIYHIILRGTPYQDLCADYFDRRSDDAKARRLVAQLNKLGYDVQIQPTAEAA

SEQ ID NO: 255385 - protein, 417 aa, unidentified
MARVFEAVFERVAGLDVHKAQVTACVRIPDAAGRRVAHLAEFSTTVTGLLALADWLKNYGVTHVAMEATGVYWLPVWHILEDDFELTLCNARHVKNVPGRKTDVKDAEWLCQLMEAGLLRGSFVAPKPQRRLRALTRYRKTQIAERQREANRLHKALEDTGIKLDCVATDILGVSGRAMLDALVGGTTDPEVLADLAKGLLRKKLPQLKEALQGRFEPHHALIIGAILSHLDFLDEHIAQLSEAIEAELGPTGQAAITLAATITGVAARTAEAMVAEIGTDMSVFPSAGHLASWAGRCPGNDQSAGKRRSGQRRKGSKFLGIALQEAALAATRTKDSYLQAQYQRLKPRIGHRRALGAVQHSMLVAYWHMFTTGETYRELGGDYYQRRDPERLTKRLVARLESLGHHVILETQPRAA

SEQ ID NO: 255386 - protein, 340 aa, unidentified
MVSNHHKEVVMNVMIGIDPHKASHTAVALDGAEDQLSRVKVRATGRQVDQLINWAECFEKRTWAIESAGGLGYLLAQQLVARGEEVLDVPATLSSRIRVLATERSNKNDPNDAHSIAIAALRSPRLRSVEPADHAEVLRLLAKRNHDIGVQRIRTICRLHSLLAELAPGGIAKELYVSDAEALLSHLSPQTPAQQMRFDLVLELLDDVRRLDAQTKASHRRIKIAVKASGTSVTNVYGVGPVLAAGLIGYSGDIRRFANRDAYASYNGTAPIELSSGGRVVHRVSRRGNRKLNHNIHMAAITQIRNPGTQGRIYFERKVAEGKTKKEAIRSLKRQISNAV

SEQ ID NO: 255387 - protein, 428 aa, unidentified
MIHAEIERCAGIDVGKERLAVCVMIGPLAGEPRVEIRDYGTTVAELEKLRGWLRQEGVTHVVMESTGSYWKPVFNVLEETVQVYLANPQEVKNRKGHKTDKKDSWWLAHLLRHAMIRPSFIPPRGLRELRDFTRRRRKLIGAAAGEKNRIDKVLQDANVKLSNALSDIFGVSGQAMLEALLEGRAAPDEIAQLAQRRAKKKIPEILATLEQHRMSDHHRRMIRYSLEHMRFLEEQLTDLDEVIVAKIRELGLVKEWELLQTVPALKEHAAASVLAEVGPDMTQFASEKHLGSWAGLCPGNNESADKKKGCKPRRGNRFLKSALTESAWGASRKKDCFLRDKFWRVVAKHQQKKQPAVTAVAHTLLNLVYLVLKTGRPYEERGSTDLDQRQKDRIIRHHVRRLGRLGILVRTAPAPALKRGRKAKKETN

SEQ ID NO: 255388 - protein, 340 aa, unidentified
MLYVGLDIHIKHIAACVLSQTGQVVQRARVRGIDEMLGILKGLPDRFEVCSEASCGYGHYHDLLRPLAARVLVAHPGRLRLIFRSKNKNDRNDAERLAKLLYLGETPTVHVASLDVRTWRELINCRAQVIAKRTRAKNALRALLRGAGVVPPRNPGLWTKKGLAWLRQLDLPTASQQLRRDLLLEEVEALNRQVRRIEQELNRRAQQTPAVARLRSIPGVGIRTAEAVAAFIDDPHRFRHAQAVGRYFGLVPCQDQSGDKNRLGHITREGPAVVRQLVAEATWQAARRSPTVRAFFERTQRGDPQRKKIALVATAHYLVRVMWALLKRGTVWQENEALTQ

SEQ ID NO: 255389 - protein, 355 aa, unidentified
MSSEKYIGLDVHQATISVAVMDSQGKVVMESILETKASTLLEFFGGLRGSLFVTFEEGTWAAWLYDLLKPHVTEVLVCNPRKIPLLKQGNKSDKIDARKLAERLRLHDLKPVYHGEAGIRMLRELARSYLTVVKDLSRVMNRLKALYRSWAIPCAGRDVYYTRHRSQWLEKIPEAGTRRRAEQLYQQLDLLQHLRQQARRELLAESRKHAITAKLRKIPSLGPIRSALAVALIQTPHRFRSKRQLWTYSGLGLETRDSGEYHFVKGQPRRRKKQATIRGLNKDYNHDLKGLSKGAATRASVKPGPFQEFYQRSLAKGIKPTMVRLTLARKIAAITLTLWKKGEDFDINKLNSQAA

SEQ ID NO: 255390 - protein, 482 aa, unidentified
MKPEPQKKTEKVTERRTPSHWQEMNRKQRREMMRKIHSDDLRLDVVHPHAAGIDIGNESHFVAVPPDRDNQPVRRFGCTTAELRAMADWLNHCGIHTVAMQSTGVYWIAVYDILEEAGLEVYLVNARDTKNLPGRKSDVQESQWLMKLHTYGLLRNSFLPPQEIRTLRTYGRQRNDLVQSAGRHTQRMQKVLTQMNVQLANVLSDVSGVTGQAIIKAILAGERDPQKLAALRHPRVKASEEQIVRYLEGHWQVDLLFVLQQEQDGYEFCQKQMAERDRQLKPYLHDREDRSQGAPLPEETRKGRQRTKKGNAPQFDLRNELFRMSGADLTQIDGIDVMTATTILSEAGWDMSKWPDEKHFVSWLRLCPDNRISGNKIIGKGRPPTNNRACIALRMAASTLRKSQTYLGAQLRRLRTKLGAPIAIKAMAAKLARLVYRMLQHGKKYVDLGMEFDEAQQRHKQIHYLKRKAAELGFKIVEAPAA

SEQ ID NO: 255391 - protein, 451 aa, unidentified
MSKQRNKAVSLPVIEPNAAGIDVGATEIFVAVPADRDPEPIRCFPTFTVDLERLADWLQQYHIRTVAMESTGVYWIPLFQILEKRKIDVRLVNAHHVKNVPGTKTDVSDCQWIQHLHSVGLLRGSFRPDDEICAIRSLWRHRDNLIQLATLHLQHMQKALDQMNLQIHHVISDLDGTTGLAIMDAILAGERDPHKLAQLRHPRIRASEETIMKSLVGDHREEHLFTLRQSLKAYRYYQELIQEVDAQVKQMMQRLPSKVAEGEEPSQGSKRRARKTPWRNEPPQLREDLYRAFGVDLTEVPAINSLTAQMLLTEIGPNLDRFPTAAAFCSWLRLCPDPKISGGQVLSSRTRPTKNRAALALRVATQALYHSDSFLGDYFRRMKARMGTPKAMTATAHKLARIIYHMVTTQQQYDSTIFQKQEERRRHQKSAKLHAQARELGFQLVPINCVP

SEQ ID NO: 255392 - protein, 424 aa, unidentified
MNCNQNFKISQVTEGTLMLGIDVGSNTHYARAFDWRGLELSKVFKFKNSFEGFQSFVLWVNDLCCKYNKSKVIAGLEPTGHYWFSLGELLKENNITIAIVNPYHVKQSKELDDNLQTKNDSKDPKIIAKLVIDGRYSFPYIPEGIYGELRVADKLKNDITQQIISIKNKIHRWLSIYFPEYEKIYSSIDSKSGFLLLKETPLPKDIVELGSEGIVERWKQTKLRAVGLDKAKKLEEAAKKSIGCKNITSSARFEIKLLIEDYEYKQNQLNSITEELNKLCEKIPMIKEIAEIKGIGIATAISFVAEVGDIRRFKSAKQVQKYAGLALKENSSGKHKGLTRISKRGRKKLRTILFRATIPLIGFNKEFSSIYNYYIERKDNPLKKKQALTAICCKMIRIFFTILSKGIKYDETKMLHDIKRPVAA

SEQ ID NO: 255393 - protein, 432 aa, unidentified
MEKIRENAAGIDIGAKKVFVSIEGQEVRYFFTFTEDFEKLRDYLCEHKIKTVAMEATGVYWNILYEILEESGIDVWLVDGRQTKQVPGRKTDVKDCQWIQQLHSYGLLNRCFVAEADIKELRTYQRLREDHIRSASMHINHMQKALTEMNIRLSEVLSQIHGVSGIAIIEAILKGERNKEKLLKLCDKRIIKNKKEDVLKSLNGRYTKHGLFALQQAFDSYLFYQNQIGQCDQMLSEVIGKIGKGKPDQNPQGTRKPIRHNKPDINDLGGSLLKIFDGKDATALSGITDYSWMQLLSETGTDLSRWPSEKHYTSWLGLAPGQHSSGKMKRTKRKKGHPQAGQIFRQIAQSLITSKHIALGAFGRRLRARKGSQIAIKSVARKLAILYWRIMVKGMAFVEEGIKKYEEQLLVQKHKSLERLAKDLNVQIAYNV

SEQ ID NO: 255394 - protein, 401 aa, unidentified
MQEPLQHNSIDVFVGVDVGKGQHHAVALDRSGKRLYNKALPNDEAKLRALINELKAHGQLLFVVDQPATIGALPVAVARDEGVLVAYLPGLAMRRIADLHAGEAKTDARDAAIIAEAARSMPHTLRSLRLADEPLAELTMLCGFDDDLAAQVTQTSNRIRGLLTQIHPALERVLGPRLDHPAVLDLLERYPSPAALAATSEKTLANRLIKLAPRMGKRLAAEIVQALGEQTVVVPGTQAATVVMPRLAKQLAALLQQRDEVASEAERLVHAHPLYPVLTSMPGVGVRTAARLLTEVAHKAFASAAHLAAYAGLAPVTRRSGSSIRGEHPSRRGNKVLKRTLFLSAFAALRDPISRAYYTRKIQQGKRHNQALIALARRRCDVLFAMLRDGTLYQPKTVPNA

SEQ ID NO: 255395 - protein, 416 aa, unidentified
MSRKFMRTNTCGKLSQLLIIFERWFLHMYSYFVGIDIAKNTHWASCLSSDGEIILEPFSFSNDNSGFQKFISKLESLDKTKILIGLESTAHYGENIISYLFNLDYNIGLINPIQTANLRRSNIRKTKNDKVDTKIIIKALTLGNYSLITSRDINNLKLKGLCRSRRNLVTMRSKAKIQLVSYLDQIFPELAQFFKGNLHLNVSYQLLKEYSSPKQISSLHLTKLSNILHDNSHGRYNKQDAICLRELAKNSVGIDNPSLSLQIKHAILQIELYNEQIAEVEALYKQILDEMNTPILSIPGMSYNQAAVIIGCIGDINRFEHSCQLLAYAGLDPSVIQSGNFQARSTRMSKRGSGMLRYFLVYSAHNVVKNNKTFKDYYELKRSQGKSHYCALGHVAHKLVRIIFKMLKDNVAFNLD

SEQ ID NO: 255396 - protein, 400 aa, unidentified
MRVVFGIDVSKASSEVAILVNGEKVHNYTMSNDAIGFSRLLGDLKTVHKPEIIFEATGVYSRRLQAFLDEHGYAYTRLNPLEAKKQLDSLRVRKTNQIDAEKLAQSQFVLNRKPTYVQEEVYQNLRDLSRFYQNLTEDIVRAKNRLHKVLQVTFPELENILSTPTGEQYWNLVITFPCKDFVLDLSKNELSKSIRQSTSKRISDKRVAYLAEKLTALANQSYCAVKKISPILEEVHYYAKELLRLSEQRQAVLDQMVELAQPLPEYDILLSIPGIAETTATSIIGELGDIRRFQSANQINAFIGIDLRHYESGNFLAKEHITKRGNPYARKILFKCIHNIASVSHTNPCHIADFYEKRKRQSQTTSTKPHTIASIHRLIRTMYYLIMHNKLYDYASTQNR

SEQ ID NO: 255397 - protein, 429 aa, unidentified
MDKTQMPTDNTEDFAALIGIDWASEKNDVWVYDTATGKEAHREVKQSAEDLAEWVADLRVRFNGRKVAVCLEQARGGLIYALLGHEFITLYPINPSTLANYREAFSPSRAKDDPTDAELLMDLLRKHRDQFKPWRPDNEQTRTLTLLNEERRKNVQLRLKIVQRLHATLNNYFPQALELLSGNLTSELACAFILKWPTLDALKRAKPETVRAFYYRHMYRLSGLIEGNLEKIAAAVPLTEDAAILTASTLAAQTLARQIRAINVSITEYDQAIKRLFKEHPDSFIFKSFPGAGENLAPRLLAAFGSDRDRYEAATDMQTYSGIAPVVERSGKQEWIHWRWACPKFVRQSFHEFARCSIGYSIWARAYFDLQKERGKSKHAAFRALAFKWIRILYRCWKERTPYDEARYLEALKKSGSPLCARIEAIQNA

SEQ ID NO: 255398 - protein, 424 aa, unidentified
MKNTAARKLKQVPEGYLIIGVDPHKRKHAAVAITQDFTTRDKFKFDNTREGLETMLRRARMAMVKSGCRGIMFAIETGGHYWRNVAYFLDEQGVPFRFINQFTLKRRREGKDLNRRKNDYRDSEVAAQLLCTGEFTESTIPQGVYAELRTAHNAYRRLVKERTRITNLVKGLLDALFPEFTLVFKDPCGLTALSVLSTCPIPGVIAGMTEDEFVAIIEARHKGRRLMRKKLRALHYLARTSIGIDAGARSLSCEITFLVDKLELIRQQICIMEGTLVRLVDETEEGKYLLSIRGLNYIAVAGLLAELGCFKAYRSAKQMIKMAGSNPTESESAGKKRAKTPMSKQGRPVLRYCAWTSVIPMLRFNPDFRAWAKQRRERPVHANPLGGREVVGAALNRLFRLAFALVKNQTYYQDVKPALTPVAV

SEQ ID NO: 255399 - protein, 461 aa, unidentified
MPKQNSKKSQRGQGVKDLESLPTLNQNAAGIDVGSAEHHVAVPAGRDAEPVQKFGSFTADLHRMARWLKACGVETVAMQATGLYWVALYQILEDYGLQVNVVNAHHTKTLPGRKTDVLECQWLQKLHTFGLLNNSFQPAEQIWVLRTYMRQREKLVVGASTCIQHMQKALTEMNIQLANVISDISGMTGMAILRAIVSGERNPEALARLKNERIQASRQEIAQSLEGNWRPELLFVLEQSLALYDTYHQKIAECDDRIEAHLKCMESKTDAEQKPAPQARIARSHRKQTSWVDLRVQLYRVAGVDLTQIDGINVQTAQTVISEVGVDMTRWRSEKQFASWLGLCPDNRVSGGKVLKRGTRRVINRAATALRMAAWSLFRSQSALGANFRRLRRKLGAPKAVTAMAHKLARLLYRMLKFGQAYVDKGMEHYEAKYRQQQIKWLAKTAAALNLQLIPSPEVVE

SEQ ID NO: 255400 - protein, 326 aa, unidentified
MEHELHYIGIDTAKEKLDVDVLRPDGRHRTKKFANTTKGHDELVSWLKGHKIDHAHICIEATGTYMEPVAECLYDAGYIVSVINPALGKAFAQSEGLRNKTDTVDARLLAEFCRQKRPAAWEAPHPLERALRALVVRHQALTDMHTQELNRTETAREVQRPSIDAHLLWLEAELKRLEKQIKDLTDDDPDMKHRRKLLESIPGIGEKTSAVLLAYIGLKDRFAHARQFAAFAGLTPRRYESGSSVRGASRMSKAGHVSLRRALYMPAMVATSKTEWGRAFRDRLAANGKKGKVILGAMMRKLAQVAYGVLKSGVAFDASRHNPVAA

SEQ ID NO: 255401 - protein, 365 aa, unidentified
MNECTHIGLDVHKDTIAVAVLRPGTTEVDERVVPNTREAIRRLLSFHDPHLTSLCYEAGPTGYDTHRTIVDLGFDCDVIAPSLIPRRSGSRVKTDRIDARNLARLHRAGELTAVRVPGASEEAVRDLIRVREEVKCDRRIARQRIRSFLLRYGKRYPRPRDAWSTRYEVWARSLTFDEPLATEAFENLLGAYFVRDAQLAEMGRRIEEIARSETFAGDVARLSALRGISTLTAMTIISETCDFSRFADASSYMAFTGLTPSEHSSGASRHQGSITKTGNRHIRRVLVESAWAYRHAPAVRGKLRERLEGQSPEVAAYSWAAQVRLNRTYRTISARKGAHTAVVATARELSGFVWGLMTGNLGPAR

SEQ ID NO: 255402 - protein, 343 aa, unidentified
MHVNTIGVDLAKNVFQVHGVDSAGKVVITRQLRRKQVVEFFSKLPGCLVGMEACGTGHHWAREISKLGHTVRLMPPSYVKGYVKRSKNDAADAAAICEAVTRPSMRFVPIKSTDQQALLMLHRTRDLLIRQRTQLINALRAHLAEFGLVAETGREGLAQLGAIITDESNHEALPSAMKQALQAIVDQLAALELQVGALDRAIHAHHRANDMSCRLETVPGIGVIGATAIASTVADPSGFKSGRDFAAWIGLVPRQHSTGGKERLGGISKQGDRYLRRLLVIGATAVVRQARLHPQKHVWIMRLLAKKPAKLVAVAVANKMARIAWAIMARGGHYRAPELAAAT

SEQ ID NO: 255403 - protein, 369 aa, unidentified
MPHVTSIGLDVHARSVAAAAFNPFTGEVVHRDFGTDAAEIAEWALGFEEPRACYESGPTGFHMARELRALGLDCVVAAVSKMQRPAADARRKNDRRDAEFIARMLATHNIVEVPLPDAAVEAARDLDRALDDATAEYRRARQRLNMFLIRLGHVWDERNADGTRKGSWTRAHWRWISGIRLEGPQRDVLEYYVTAARCAESDRRQLEKKVLALARTDRWRPAVEALSCIKGIDTLTAFRLAAEAGSFTRFRTAPAFASWCGLVPSERSSGETERRGGITKTGNRLARTALVESAWHYLTCTPRPKAPAPGADVPAAIRARADDCTARLCRRREALAAAGKSPCKANAAVARELACWVWEIGRRAEGTLG

SEQ ID NO: 255404 - protein, 274 aa, unidentified
MPLYGGIDLHANNSVVVLLNDQDQVICQHRFPNHLPTILAPLSLHHGEVEGVVVESTSNWYWLVDGLMEAGYRGHLAHPAAMQPYNGLKYTEDHSDARWLAHWLRLGVFPEGYIYPKAERAVRDLFRKRAHLVRQHTANVLRVQNIMARNTGARFSVKRMHELTKQARQSMLAEEPQGLAVTRSLVVLDCLRHQINTLEQTVHTRLHHTPSYEQWLTVPGIGTILAQTIALETGDIRRFPTVGHSASSCRWVDSTKLSNGKRKGTGNVKNGNPY

SEQ ID NO: 255405 - protein, 325 aa, unidentified
MIGIDVSKATLAVCVRLADSGIELDHEFPNTATGHHKLHAWLKKHGEQTGWACMESTGPYHLNVAQFLHQHRYRVSVVNPKRIKAYGESRLSRGKTDKADARLIAEFGEKETLPVWQPPAQERVALKDLQDRLDELEESLRQHRQRREHCQNPSVLASLEREEAFIKQEIEALKREQGHLCDKTPCLREEIELLCTIPGVGELTATRLVARIDISLFDHAASFAAFFGVTPREHSSGTSVHKKARMSKLGSKRLRTALYFPAMQATRYNPQVQALYDRLVAKGHPKKSALGAAMRKLAQQIYGVWSSRRPYDATHGLPSLESFTA

SEQ ID NO: 255406 - protein, 429 aa, unidentified
MNSTQNKKIEQVKETTMIVGIDVGSEKHYFRAFNWRGIELTRKPVAFSNSMEGFNSFYNTIVELMQKSELEEALVGIEPTGHYWFDLGQFMGEKNIKFVMVNPHHVHKTKELDDNSPSKNDRKDPRVIAGLVRDGRYFYSYMPTGVYAELRNASNRRFVLVEEQTRAKNRLQKWIAVYFPEYKGIYTHIDAKGGLMVLKQAATPEEIVRLGVEGIIKIWKDAKLRGNGHKKAMLILNAAMKSIGLKAGLTEARMEIQDLIEDYELQTKRLERVNDLIKELCQQVRYADKLLEIKGIGITTVAGFIAEVGDITRFDSTKELQKLAGLELVADSSGKHNGKTKISKRGRKRLRYLLFEAAISVVGKNEEFKEIHRYYTTREKNPLKKMQSLIAVACKLIRVFHVILTKGISYDASKMLKDIRHPGEQLKAA

SEQ ID NO: 255407 - protein, 347 aa, unidentified
MRFYTHQHKYYCGIDLHTRKMYICILDEKGEIREHRNLKTDRDAFLKAVAPYREDIVVAVECIFTWYWIADLCHNEGIPFVLGHALYMKAIHGGKAKNDKIDSQKIAALLRGGMMPMAYVYPAKMRATRDLMRRRNHLMRKRSELYAHIQNTNSQYNLPDPFGPIARHRNRDGIAGQFEQPSVQKSIAVDIEMIRTYDGILSQLEKSIIKLANNHDPVSYALLQTIPGVGKIIALIILYETENIRRFASVQDFASYSRLVKCAKESNGKKCGSGGSKIGNAHLKWAFSEAAVLFLKGNDPAKKYLDRLTRKHSKSKALSILAHKLGRAVYLMLKNKEAFDQKKFLNI

SEQ ID NO: 255408 - protein, 384 aa, unidentified
MKKRSTEEMRRTRETKRAGGIKGADSASAGSARSLTIGLDLGDRMSQICVLDSMGEIVEETRVATTQNGLTRIFDVGRLGKCRIAMEVGTHSPWVSRLLREMGHEVLVANSRKLRFIYQNRGKTDRVDARSLARVARMDPALLSPVKHRDEEVAQDLAVLRTRDLLVRTRVKLIGHARGAVKSAGHRLKASSTRSFTAETESMLPEELKETLGAVFSAIDAISEQIRALNQRVREMAKKKYPETGLLRQVAGVGYILSLAYVLTLETPDRFEKSRMVGPYLGMVPARRQSGDSDPQLRITKEGDGFMRCLLVQGSQYILGPFGPDCDLRRFGLALEGRGGKYAKKRAVIAVARKLAVLLHKLWRSGEVYEADRRLALLPEPAKA

SEQ ID NO: 255409 - protein, 424 aa, unidentified
MREEGLSMAEEIEWFVGIDWASQSHQVCLVDARGECLGERAVAHGGPGIEELCDWLIARTGATPEVIGVAIEMTQGPVVEALLQRGFCVYGINPKQLDRFRDRFTVAGAKDDRRDAHVLGDSLRTDRHAFRRLSNDEPVIVKLREWSRMADDLQQERARLASRMREQLWRYYPQMLELADDLAADWFLDLWSQAPTPAKAVRLRQTTIERFVKAHRLRRWQAPEVLRILKQKPLSVAPGVVEAASDHIRTLTVRIRLVNQQLKAAHRKLDELCAQLIPSEEDEPGQQCEQRDVVILRSMPGLGRIILAVLLAEVWQPLRRRDYHALRSLSGVAPVTRRSGKTCVVVRRYACNKRLANALYHWARVATQHDALSRRRYAALRQRGHSHGRALRTVADRLLSVACTLLEQQTLFDPTYEVREAAGA

SEQ ID NO: 255410 - protein, 406 aa, unidentified
MIVQGTSVGLDVHALSVVAHAVDEETGKVARARLCPDHGEILGWLHQLRAPVRVAYEAGPTGFGLARAITGAGMECVVAAPSKLQRPAGDRVKTDARDAAHLARLLRLGEITEVRVPEREIEAVRDLVRAREDARADLMRVRHRLSKLLLRQGIVYSGGTPWTYAHEEWLRRHRFDDIHLKAAFDHGFDAVLAATAARDRLDEQIMVVATSPRFADPVNRLGCLRGISALTGLALTVEIGDWSRFTGSSIGAYVGLVPSEYSSGNSRVQGSITKAGNTHVRRLLIESAWHHRKSYSTSGLTLRARWAKVDPALRARGHAGNRRLNKRWRSFTERGKNPLVANVAIARELAGWCWSLATMQKTGRRPNLADPGDPGVGAVSEPTCKEAMSHNTIQRRSSVTLACRQQ

SEQ ID NO: 255411 - protein, 291 aa, unidentified
MGRVIIGMDPHKRSATVEVIDAREKVLAQGRFDTDSDGYQAMLKAGRKYPQRVWAVEGCNGIGRHIAQRLVADGETVIDVPAKLSARARVFATGQGRKTDPVDAHSVAVAALRTNGLRQVVVDDATVALRLLVDRRDGLGRARTDTVNRLHRLLLELLPGGAKRFLSATQARALLAAVRPRDIVGRTRRQLASELITELAQVDKKIKAANTQLNELVAATGSSLQDLNGIGPSGAARLIGDIGDISRFASRAHFASGNGTAPIDASSGDQHRHRLSRAGVPRQVGGSVRAG

SEQ ID NO: 255412 - protein, 283 aa, unidentified
MDNKSRVFGVDVSKATLLIGDYECATPLKVDNTPVAIAQWLSTIAHGSIVAMEATGIYHQVLASLAHAAGMRVFVLNPRALKHYAEAIGQRAKTDAVDTCMIARYAMHEQARLVSWQPAAAEASELTQLLKKRRGLVEASQTLSQMLCGMPALTSAREELLATLKRMIKNTEFLMRAELAKTPQLAELHRRLSGIVGVGFVVAAELVAALSRIRFARADSFIAYTGLDPRPDDSGVRRGRRRLSKRGPALLRCLLYNAGMAAAHSKLLRVPSDAPRAHRKLMR

SEQ ID NO: 255413 - protein, 279 aa, unidentified
MDHFVGLDVSVKETSVCIVDEVGKIVREVKVASEPEALLAVLKKPAYRFKRIGLEAGPLSQWLFGALAEAELPVVCVETRHMQVVLKAQINKTDRNDARGIAQMIRAGLYRPVHVKTLRSQKLRMLLTHRKLLQSKAIAIENDLRGTLRNFGLKVGIAGTVKFEARIRELVENLPDLAALVEPLLIVRRVLHEQISVLHRRLLAIVRDDAVCRRLMTIPGVGPVVALTYRATIDVPARFKNSKAVGAVFGLTPSKYQSGEINRTGAISKCGDEMMRVSC

SEQ ID NO: 255414 - protein, 346 aa, unidentified
MRFYDQQHEFYCGIDLHTRKMYLCIFDREGNKQLHRNMRAKPSEFLRAVEPFREDLIVGVECMFTWYWLADLCLDENIKFILGHALYMKAIHGGKKKDDKIDSEKIARLMRGGTFPLSYVYPREMRATRDLLRRRTFLMRRRSELLAHVQLVNQQYNHDPFEKMLQFASNRDVLDRFELDSARQNVQADLQMIGHYDQLLKQLESNLLQQAKLQDPQAYNLLRTIPGVGKILSLVLLYEIHIIDRFASVGDLLSYARLVTPKQTSDGKVTGHSGAKIGNPHLKWAFSEAVLMMMRHCENAQQFVARKEKKYGKSRAMTMLARKIARAVYQMLKRKEAFDAVKFFAN

SEQ ID NO: 255415 - protein, 446 aa, unidentified
MSATFTFTSLFILIVERRKDAMHERIEIGDRNEYIHPICCGLDAHKKSVFAAVFIYDNSDSPVKYYTAQFTTYPKDLKKMTDWIISKNCHDVCMESTGQYWHPIYDAAEEAGLHPLVSHPKYTKPLKGKKSDPADAKWIAKSYASGRVVASFIPSKEFRIMRSTIRYCQKIHNAMTGEKNRILNCLTGEGIKLDVVFSDVFGKTSRSIIDYMLNHPGEKFNVAPFIGKRCKTPIPVIQEAVAKASSVDISSLSKLKVAFSRLDRTVKDEAVLKQDVAERMKPYAHQLELIRTVPGFDRDPFTAMRVLAEIGPDMSVFPSARHLCSWAGVCPSHDSSAHKVKGRKISRAGKYLKPLLVNIARSVVRSKDHPEITSRFNRIKSRRGYMKAIIAICKMFLTAIWHILSKDEPYKTDGYMTAKKPKKAKRVMTRTQLAEYLASQGITVVD

SEQ ID NO: 255416 - protein, 387 aa, unidentified
MHLITSATVVATTARANNITLFASLELSKSKWVVTINSPGSEKFSKHVIEGGDGACLLDLLSRSRAKAEQRYGVGVKATVIQEAGLDGFWIHRLLLANGVESHVVDAASIAVARRHRRAKTDAIDGETLLRTLMAWARGERRVCSMVRAPSPEDEDRRRLTRERGTLLKERIQHTNRIKGLLGGQGVRDYNPLRRDRFERLEALRTGDGRQLPPMLKAEIRRELDRIALATTQLAAVERARDALIRTDAEEPNNPAALLLKLKGLGPEFASLLWLESLFRSFGNRRQVAAYGGLAPSPWQSGGVERDQGISKSGNRRLRKTMIELAWFWLRHQPDSALSRWFQARVGAAKGRIRRIAIVALARKLLVALWRYTTQGVVPEGAVFKAA

SEQ ID NO: 255417 - protein, 409 aa, unidentified
MNVLHERCAGLDVHKETVVACRRVMEGAEVKREVRSFPTTTRGLLGLADWLREAGCTHVAMEATGVYWKPVWHVLEGEFELVLANAAHIKNVPGRKSDVNDATWIADLLAHGLIRSSFVPPGPIQELRDLTRTRKQLVREVVAHKLRIQKVLEDANVKLGSVVSDVLGASGRRMLRAMIAGEHNPDKLAALAGERLSASRETLVEALHGRVTRHHRFLLKQHLEMVEHLEKTVGEFEAQIEAALEPFRPVIERLVTIPGVSATAASVIVAEIGVDMKRFPTVGHLISWAGLCPGLNQSAGKVKSRTLREGAPWLKTVLVQSAWAASRQQDGYLRAQFLRIKSRRGPKKAIIAVAASILTAAYYLVRDPVPYRELGPFYLMRLDHERAATRLTQRLRNLGYEVEIRKAAA

SEQ ID NO: 255418 - protein, 323 aa, unidentified
MIHSFHLGIDVAKAKLDCALRQPDGKIRHRVVDNTPAGFSALDVWLAKQGADAMHVCMEATGTYWEAVAEHLAARPDCRVSVINPAQIKAFGASQLIRTKTDKVDAKLIAQFCAERRPDPWVPATPAEQALRALVLRLDALQSMRIQESNRLEVARPTVRDGIVSHLKWLDEEIERVIKAIREHIDSDPSLRDKQRLLDSVPGLGERTIAVLLAFAAEPARFETARQLTAFAGLDPRQHESGSSVKGKPRLSKVGHAFLRKALYMPAMVALYRTDWGKRFRDRLAARGKPPKLVIGAMMRKLIHVAYGVLKSGKTFQPELHGA

SEQ ID NO: 255419 - protein, 350 aa, unidentified
MELANINTKYVCGVDLHSTKMYICVMDKEGNILLHRNMRNDFELFNSLISKYKDNISVGVESMHSYYWLADGCIEEGISFYLGHAFYLKAIHGGKKKNDKIDSKKIADLMRSNHFPTGYVYPKEFRATRDLLRRRIRFMIIRAEAYAHIQTIFRQDCNNITPGKVKSKKTRRELIDRFNNTSIQSNIAMDLDLIDFFDPKLNKIERQIRAEAKLYHRTEHNLLLTIPGIGDMISLIILYEIGDINRFKSPQKFSSYSRIVKCERESGGKKYKEKNWKIGNPNLKWTLGEIIVHAPRTSPVIRKYYDRLSNKHGKKKAKSIITHKFGVAIYYMLKNKQGFDEKRFVETNMK

SEQ ID NO: 255420 - protein, 337 aa, unidentified
MIVIGVDVHKHSLTAVAVDELGRALAEWGGPVGGEVVGWAGALGEERLWALEDCRHVTRGLEQTLLGEGERLVRVPPRLTAPQRRRGRVRGKSDSIDALAVARAALQEPLLDGPRPGEETLRELKLLVDHRDDLVAERRRCQQRLRWHLHELDQRFAVPLGALDRTVWIDRLGRQLGRREQTTQVRIARDLLARCRTLTRSIVELDRELQTRTKTIAPGLLELAGCGALSAAKLLCEIGPIDRFRTDAQLARHAGVAPLDASSGEHQRHRLDRGGNRQLNCALHRIAVTQGRVHAPARAYLERKQNEGKTRREAIRCLKRQLVRTVYTTLKNEPLLT

SEQ ID NO: 255421 - protein, 369 aa, unidentified
MTETTIFVGLDVHKKTIAVATVEGRASADVRFFGTIANTPETIRSLLKKLGKGGQRLHLAYEAGPFGYTLFRLATGLGHRCDVVAPSLIPRKAGDKVKTDRRDAMLLAQTLRAGQLTEVWVPDEAHEAMRDLVRMRALAMKDQRKARQQLHSFLLRHGRSFPGKHWTKAHRRWLGELKFAQPAQHLVLEELLLRIERVEQLCERMKTAIVDLVPQWTLAPVVAAVQALRGVSILVAATVVAEVGNFSRFESPRQLMAYLGLNPSEHSSGATIKRGPITKTGNSLARTCLVEAAWTYRHPARITQIIRERLKGLPEPIRAIAWKAQVRLSSRYRKLTAAGKPAPKAIVAVARELVGFIWAIARLVEPKVA

SEQ ID NO: 255422 - protein, 370 aa, unidentified
MKHSITSVGLDTHKDSIEIALAEHGGSQEVRRYGKIGGDLASLDKAVRKLQSTGAELRFVYEAGPCGYDIYRHLTKQDLSCVVVAPSMVPKKSGDRVKTDRRDAVSLARLYRAGELTPVYVPREEDEAMRDLCRAREDAVNAQRTSRQRLSAMLLRLGFRYSRKTAWTPTHFRWFSTLKMPHPAQQIAFQEYIHAVKESTERVDRLTEQIHKLMPEWRLAPVVKALQAMRGVAPMIATITMAELGDLGRFENPRQLMGYLGLVPSEKSSGKKERRGEITKTGNGHVRRALVEAAQTYHHPARISRLLLERQEGVPEAVCKIAWKAQVRLCGRFRKLIARGKNWNKVVIAIARELSAFMWAIAKEVQIQSV

SEQ ID NO: 255423 - protein, 338 aa, unidentified
MYYTGIDLHKRTSFITTIDQNGKVIFRRNFPNVEELILDYFRNLDGPTKIVIESMCSWYWLYDLLSANNFTTVISNPLKTKAIASAKIKNDKVDSHMLAQLLRADMIATVHVCAIKTRKLKELIRHRRRLVQDSARMKNRIHMLLMKNNINIPVSDLFGKRGMKLLKEVSLPAYHQQQFNSYLALLRYLTEQIEPLTEQIRDLAKKDPMARLLMSIPGIGFLTAMTIIAEIEDIGRFPSYRNLASYAGLVPSLDASADKSRTGRITKQGSPYLRAALVEAAQAIPRTKQSRLNIFFRKRIVRAGYRKAIVATAHKILQYVYYVLKNQVFYSEEYLARA

SEQ ID NO: 255424 - protein, 348 aa, unidentified
MEQFVGLDVSQQETHVCVIAREGDVIWRGVCRSTPEDIAATIRSKAANAVKIGLETGPLSTWHWHALREMGLPVICIDARHAQAALGMRINKTDKNDAFGLAQIMRTGWYREVGVKDLSNHEVRAVLGARAQLVGVKTDLRNQIRGLLKVFGVVLQRDGNASFEAQVWDVTRKSNVVLRSALESLLSALKTVGDQVKRLDRVAMDQAKSNPVCRNLMSIPGVGALTSVAFVTAIDDPVRFKRSRNVGSFFGLTPKRYQSGEKDVNGRISKCGDPLVRAYLYEAATSLLLRSHKWSALKAWGLRIAKRSGLNKARVAVARKLAVIMHQMWITGEEFRWSDKQNNTEVAA

SEQ ID NO: 255425 - protein, 452 aa, unidentified
MIQKKKSIEGRPLPVIQPDAAGLDIGAEKIWASVPTDRATPAVRSFGTFTPDLHRLVAWLKTCGIKTVAMESTGVYWIPIFEILEAAGLEVYLVNARHIKNVPGRKSDVQDCQWIQRLHSYGLLSASFRPEADMRALRAYLRHRGMLLEYRAAHIQHMQKALQQMNVQLTQVLSDITGVTGLDIIRAVVAGDRDPVRLARLRNPRCKSSSDEIAKALTGNYRAEHVFALQQALALYDFYTQQLHICDHQLEQQYSALTPRFDDDLPPLPPDPKVNSHSKNAPTFDVRGHLYRLTGVDLTVVDGLDDSTVQGVLSEIGTDMSKWRTEKHFCSWLGLAPHNDITGGKVIRSRTLKVHNRAGQALRLAAQSLSRSQSALGAFYRRMRARLGGAQAIVATAHKLARIIYHLLTHRQPYRHASAKAYDQQQHDRHTKSLQRQAAQLGYCLTPLPIPA

SEQ ID NO: 255426 - protein, 372 aa, unidentified
MQSYYVGLDVHSRESVFVVEDEAGAIVARGSVPTTVNGLKHLRDSCGLPAATDVALETGTSAFFVARELARLELKPVVIDAQEVRRKAQRPEQKSDTRDALELCEGLRRGFYRSIVHVPSPAISDLRTTLSRRRHFIRIQTAEVNAVKRLLRGVGRNSGRRGSLRTDAHWQSLLADDLVPEQLQDHVRHHYAVWRQAAERVRALDLSLGDSARQRRDTVKRLETVPGVGPIVALTAIAVFAEVSRFESAKHAASYAGLVPSTFQSGERDAHGHITKRGSAELRAMLCEAAHHARRPVHPLHPHFARVCARRGYKTAVVAVAHRLCRLLFAMLRDGTDFSVTRVGVEEGEFERTTTYKYRLRPKPAGRLPAAD

SEQ ID NO: 255427 - protein, 413 aa, unidentified
MEQQDKACGADIHKDFLVACIHSRDGSKVISKFDMTVEGILNFEEWLKTNGCKKVAVESTGNYWHLVYQVLEDDFEFILANAFQTRGHPGAKTDRLDAEWLAELCLNNQIKPSRILPEKDRELRALTRARKGYMDFRGKTKSRITQELEACTVKLSSVLSDVFGKTGRHILEGLINGMNIDDIVQNLPSKNIKKSKEEIKEAIQSGLTPVSMFLLRSHLDLIDEVDKKIEQIDIECRRLIQRRKTDLEIAMSMPGISIVSAVAILSEIGDYRNFGRGEQLAAFSGLDPSVYESAGKKYTGPITKKGSKYLRRMMIECAHASSSTKAKTRLKRFYLRVLAKKGKKVAIVALARKMLCILYHLLVNQEIYKDDGLEKPKRVKVKYSDVSNYPSLEEMVKIVGEAGYKVTREFPEG

SEQ ID NO: 255428 - protein, 312 aa, unidentified
MDNEIVIDKGCGLDVHKETVVACVMGSGIKKEIRTFGTRTNDLLRLKTWLSGLGITHIAMESTGSYWKPVFNVLEDGFTLILANARHIKNVPGRKTDVKDSEWICRLLRSGLLSASFVPPQGIRELRDLTRYRRKLTQSLSAEKNRIQKVLEDANVKISSVLSDTFGVSGSQMIEAVMEGKLSEAEIADLAKGKLKSKKAEIREALVGYFQDHHRFMIRTSLEHIKYLEKLISDLDQETKKKLAQYQKEYELLQTIPGVKEQGAAAIISEIGTDMDVFPSEEHLSAWAGMSPGNNESGGKKKVERRRTAIRI

SEQ ID NO: 255429 - protein, 430 aa, unidentified
MGLIVPSAMHPQQDDQPMPYEWFVGIDWGSQQHQVCVLDRDRHQVGERVVDHDGASLARLAAWLWIVSAGQPQRVAVAIEVPRGAIVEGLLERGFHVFALNPKQLDRFRDRHSVAGAKDDRRDAFVLADSVRTDQPSFRRLHLEEPQLLVLRELSRAEETLLEEFRRNANRLRDQLYRFYPQMLQLCPAADEPWLWDLIDLAPSPAHAALLSEEQVQWVLKVHRIRRVKAHEVLTCLQTPALPVAPGAAEAAQAHCGFLSPCLRVLAEQRQACGQQVSALLHTLAEQPDDGEGPSDVAIVLSLPGVGRKITAWFFAEAAQPLAERDYQMLRTHGGVAPVTKQSGKRRLVVMRRGCNPRLRHALYHMARVAMQRDAHFSSVYAALRAKGQRHGQALRNIGDRLLRILMAMLRHRTCYDASRIRREPVVQRG

SEQ ID NO: 255430 - protein, 387 aa, unidentified
MSQLNDLSRSLVALEQDATLIAVIEMGQSSWLVAGVVPGIERNPLKKLSPDRDRLLQLLHRWRKEAVQAGRTIKRIAVAYEAGRDGFWLARWLRAREIEAYVIHPSSVPVSREHRRAKTDRLDTELLKRAFLGWLRGEPKHCSMAAIPAPEDEDARRPSREREGLVGERTRIVNRLKANLARLGIRGFRPNLAHASSRLETLRTPEGAAVPENTLAELRRDMARLRFVKQQIKEIEGARARHLERASGERRAGMVRLLTQVVGVGIETADMLVQEVFSRNIRDRRALARYAGLTGAPDESGQKRRERGLAKAGNARVRRGMIQLAWGHLVHQKNSSLADWYRRRTADARSGTRKTMIVALARKLLIAFWKLVTTGEAPAGLLLRRAA

SEQ ID NO: 255431 - protein, 353 aa, unidentified
MDNGSRYVGLDVHRDTISVAVCDSRGKLMLERVIPTSATAVLELVELLRGKLHVAFEEGTSALWLVGLLQPRVAQVLVCDPRKNDRRGSKSDRIDARELADLLRCGRLSSVFHQDCGLTSLQQLTRTYLVLTKDQTRVMNRIKALYRSWAIPCAGQSCYSSKQRQAFLSQLPDAAVRGRAHIYYQQMDSLVTLRQQVRQQLLHEGRKHPALRLLRQIPYIGPLRATMLVVFIQSPHRFRTKRQLWAYCGLGIETHNSGEYRFRQGQLERKRQPTVMGLNRNHHHLLKYVLKSVAARCCSGSGPLRDFAQTLLDQGMRPEMVRLTVARKIAAIVLVLWKKGVSFDAHYLKPQAA

SEQ ID NO: 255432 - protein, 355 aa, unidentified
MNAIKYIGMDVHVATSSIAVLDANGKLIMEVTIATQAGALLDFIRGLSGTLHVTFEEGTSAHWLYTVLEPHVAQVVVCDPRQNPRRLGEKKSDRLDARKLAELLRLGSLKPVYHGNALGPALKELARSYRTLVSDTARVMNRLKALYRARGMRCAGTRVYSPRFRDQWLEQLPEPGARGRAERLYKQLDLLLPLRQEARAAMLAESRQHPAHKILCSIPSLGPVRVALLMALIQTPCRFRGKRQLWTYAGLALVTRTSADYQMVDGQVTRSRKPALVLGLNANHNHTLKGIFKDAAASALVHPGPFKDFYATRVAEGMKPELARLTLARKIAAITLTLWKKGESFNAEHVKAQAA

SEQ ID NO: 255433 - protein, 460 aa, unidentified
MKRKQESSAGRGKKLRLPKHLEHLHANAAGIDIGSRSHFVAVPEDRDPHPVREFSSFTGDLYLMADWLQQCGIDTVAMESTGVYWIPLYEILESRGFDVRLVNARQVKNVPGRKTDVLDCQWLQQLHTYGLLNGAFRPTDHVCALRAVSRQQQTMVRYCAAHVQHMQKALIQMNILLHNVVSDITGLTGMRIIRAILAGERNSHVLASLRDGRCKNSEKIIAASLVGNFRSEHLFSLRQAVDLFEFYQGKITECDQEIARLLARFDVRAEPESAPVPKKKTKSRKLKPDEALCTTLHRVAGVDLTQIDGIATDTALRIISEVGLDMSRWPNEKHFASWLGLCPGNKVSGGKRLSGKSKPVANKAATALRLAARSLFRSQSALGAYLRRQKARLGAPKAVTATAHKLARLVYRLLKFGTEYVDAGQDYYEERYRSRVLRNLRKKAQDFGFDLVSVGASQNC

SEQ ID NO: 255434 - protein, 343 aa, unidentified
MQVTTIGLDIAKRVFQVHGVDAAGAVVVRRKLRRSELLQFFAHLAPCLIGIEACATAHYWARELMALGHRVRLVPPSYVKAYLKRGKNDAADAEAICEAVTRPNMRFVLVKSEEQQGVLVLHRGRELLVRQRTMLVNGLRAHMAEFGIIVPQGIQRLPELVALLEDKKTGIPQIAREVLTAMVVQINNLTTSIRQMERRIAAWCRTNASARRLATIPGVGPITASALAATITDPTLFRSGRHLAAWLGLVPRQHSTGGKARLGRITKMGDQYLRKLLIVGMTAVIRSARRTKAPAFAWVNALLERRPARLVSVALANKAARIAWAILTRGETYRAPTMKAAAA

SEQ ID NO: 255435 - protein, 362 aa, unidentified
MKTNSFAAGPSTVIGIDLGDKKHAFCVLDQAGKILREDSIPNRASTLIELAQDHAGSTIAMEAGTHSPWISRLLESHGLEVLVANPRKLRAIYRNERKCDRVDAEMLARMARFDPSLLYPICHSSEQAQRDLLAIKMRDTLVRQRVRAIASLRDMLKSLGVRLPSANSAAFSARVRAHLEGGDELGVLEIAEPLLTAIDATSQQIQELDKSIHRSASLHPAATRLQQINGVGPITALSFVLCVEDPERFALARQIGPWLGMVPKRDQSGGADPELPISKCGNGYLRKLLVQCAQYIMGPFGPDCDLRRYGMRIAERGGKKAKRKAVVAVARKLAVLMLTLWKNQSDYVALMNSQTPGGMAAS

SEQ ID NO: 255436 - protein, 329 aa, unidentified
MIIHELSMPADYDGLIRYIRRGYPGCTVKLIYEAGFNGFWLHDLLEADGVDCVVTPPNKVTQEKDSRVKNDRIDARRLAKVLEDDDYKSCFVPDAELREDRQISRTLIGVQKDLTRLQGRIRHFFHFHHLAPGAFNGDSWKATDVKRLRTISLCEPLRFSLDIMLKELEVLLQCRRELKKQLLALSKKQRYCEAFACIVSQPGVGPLSAIRFVLEWGEDLTRFGTGRRFSSFLGLTGSEFSTAETVRRGHITKQGKAFVRSWLIQCAWVGYKRDPVLLEKYQNVLRATRNPKMAIVAVARKMAVRLWHLVMFRERYQIGLLEEQPAPAA

SEQ ID NO: 255437 - protein, 363 aa, unidentified
MSGRETAITTIAQSEPIRVTVGVDTHGDVHVAYATDQLGRHLAATRIATTPRGYRALLNWARGLGQVAAFGVEGTGCYGAGLARFLGAQGQVVVEVNRPDRQARRRRGKSDPVDAEAAARAVLAGQATAIPKTGDSMVEMVRCLRVARATAMKARTQAANALRALLVTAPVELREQLRDLDPSKLAATAARLRPGAIVTPTAATKLALRTVAERQLALTAELTTLDAELDRLTARAAPALRELCGVGAEVAGALLVTAGDDPARLRSDAAFSMLCGASPIEASSGKTVRHRLNRGGDRQANTALYRIVVVRLRWHEPTRKYMARRTTQGLSKKEIIRCLKRYVAREVFAALMKTNPNGLAQAP

SEQ ID NO: 255438 - protein, 331 aa, unidentified
MANSFKFFIGIDVSKATFDVTLLVGNSQKWVHKVFSNDLKGLLAMLEWLSRQEGFEVEGCLFCMEYTGMYGRKLMYHLLEKGYKLWMEGSLQIKKSLGMTRGKSDKIDSFRIATYAQTYQAKARVVTTHKKILDQLQDLLSARDRLVKAKKRLLAPIKELLRIDKTQGKNLDLACHPAVEGIKKAIQRVERRIKDLLKEDSEVEQQYELVTSVKGVGPVLALQLIVYTHCFKRIKNARQLACYAGVAPFLYQSGTSINKGAHTSSFANSTLKSTLHLASISSIQHNPDLKAYYQRKVSQGKPKMSVINTVRNKLLHHIMATVRSGEKYEII

SEQ ID NO: 255439 - protein, 412 aa, unidentified
MDVFCGIDWAEDHHDIALVGQDGQLLGRCRISDDAAGLAQLLTLLAGHGDSAGDLIPVAIETPRGLLVACLRATGRKIYPVNPMAVARYRDRHSVAGGKSDHGDAVVLANVLRTDMGMHRPLPADTELAQAIAVLARAQQDAVWDRTTAHNRLRSHLREYFPGFLAAFADARGGIVRPEARAVLAAAPTPADAARLTVTRLRAVLKKAGRSRGIDTEAARLREAFRNPQMRQLPLVEQAMGRQALALLRQLDAACASADDLEQAAIESFNQHPDAGIITSFPGLGALTGARVLAEIGDDRSRFQDAKGLKAYAGAAPITRASGKSRSVTHRKVKNNRLASAGYTWAFSALTASPGARAHYDRRRDDGDRHAAAQRNLFGRLLGCLHHCLITGQHYNENIAFPENPKKLPQAA

SEQ ID NO: 255440 - protein, 342 aa, unidentified
MEFYVGLDVSLKQTSICVVDQTGLIVREGVVDADPEAISVFLKSKAPDAVRIGLETGPTSTWLWTELKRLGLPVVCIDARHAKAVLKMQINKSDRNDAVGIARIMQTGWFKEVHVKDIDSHSVRALLASRALLVKIKRDLENQVRGLFKNLGLVIGRATFNVFAVRAEELIEDRPELIAAVRPLLEARNAVEQQVRELDRKVTKLARRDAQARRFMTVPGVGPVTALAFKATIDDPARFARSRSVGAYVGLTSRRHASGEVDWSGRISKCGDAMLRSYLFEAAGVLLTRVPKWCAVKAWGVRLAKRNGLSKAKVAVARKLAVILHRLWIDGTEFNWSKEIAA

SEQ ID NO: 255441 - protein, 359 aa, unidentified
MRVCGLDVHKSFIIAYIFDVFFKKDENGKPVIEAVEAAWGRFERTWGELDRLAEFLDKNETKTVVMESSGPYAYMVYMALENVGFDMWMAHPRDNKTNNQQKTDKLDAERLVKKFVVKEIRAYKLPTDPKIIKLKRLTRFRMKMVSRLVSIKNEIRKLRNKLDDALTFELKSLLRLLREVKRQIENVENRIESALSDFERDATLLTTIPGVGLQSAAVILAEIGGISRFASPRRLASYAGLVPSVYQSGDKTTYGKLRSDCNRRLRCVLYQIALKAIRYSPRLRNFYERLRRRGKAHKQAVIAVARKIAVAIWHILTKAVAWNEKLKRGYVPKKRRFKRITLKEGLRILRELGYEVSVR

SEQ ID NO: 255442 - protein, 410 aa, unidentified
MEVLYADCAGLDVHKDSVVACVRHTIDGNVRREVRTFKTTTADLMALSAWLSAQGCTHIVMEATGVYWKPVWHILSDGEFELVLANAAHVKNVPGRKTDVNDAAWLADLLAHGLIRGSFVPEEHTQEMRNVLRMRKQFVRERSSHVQRLQKTLEDANIKLDSVIADITGLSGRRMIEALIGGETDPRALAALAHRRIKATSAELEAALRGRVTKHHRFALRLLLQHIDAIDAAIAEIDQEVDANIEPFRTAITILSTIPGVSQLSAEVIAAEIGVDMGRFPTEGHLISWAGLCPKNDESAGKRRSARMRKGAPWLKTTLIQCAWAATRTKETYLQAQFHRLRARRGAKKAIGAVAASILTAAYHMLRTGALYQDLGAGHFDHRAKTTQTYRLIARLRSLGYAVQITPVAA

SEQ ID NO: 255443 - protein, 403 aa, unidentified
MNSVGIDISKGRSTIAVMRPFGEVVISPFEVRHTDSELSELARQLKSLDGETRVVMEATGNYHTPVAKLLHDAGLYVSVVNAKLVHGYGNNDLRRVKTDKKDSVKLANYGLDRWLTLTRYVPEEDTRLLLKNCYRQYRQYSKVQTVLKNNLISLLDTVFPNVNRLFSSPAREDGSEKWVDFVAEFWHCRCVSEKSEKAFANKYQRWCRKYGYNFNEAKAHTIHAETSGHIGVMPMSETTKLLVEQAVAQLRATSTALAALKHEMQALTSMLPEYPVVMDMFGVGPTPGPQLIAEIGDVRRFYSKKALVAYAGLDAPPNDSGDVTGRHKSMSKIGASSLRRTLFLVMSVYLQTAPLDEPVYQFMDRKRAEGKPYRVYMMASANKFLRIYYATVKAYLESLEHTA

SEQ ID NO: 255444 - protein, 443 aa, unidentified
MAFSGMILIREVADAPVIMGISKPAGLKSPCGEVKIVNPLYVGIDVSSRNNMAYLMKPDGGKHSSFSVQNNRGSAKLLSERIVSALTAMQLGDVVIGMESTSIYGDNLVYALREDGGLGRFQRKIHVLNPRQVKKFKEAYPDLPKNDWVDAFVIADHLRFGRITKEVYMDDYRYKALRTLTRARFDVIQNLTREKQRFANYLFLKCSGISQNKEIANSSATTIALMERFETVDDLANADLQELTAFIDETGRNFADPAAKAKAIRIAARDSYRLPITLNNSVNQAMAVSIASIRALEKQAKVLDKAIVRQFEIIPNTLSSVPGIGKVYSAGIIAEIGDIRRFNSHASVAKYAGLVWTQHQSGDFEAQHTHLIKSGNRYLRYYLLEAANSVRRCDSEFRRYYDLKFKEVNQFQHKRALALTARKLVRLVFRLLKDNRLYIPPEG

SEQ ID NO: 255445 - protein, 401 aa, unidentified
MPQLWAGMDAGKAEHHCMVLDSDGQRRLSQRVANDEASLLKLIADVLALSEGELVTWAIDLNSGGAALMIALLTDNGQKVLYIPGRTVHHASGSYRGDGKTDAKDAFVIADQARMRRDLQTMHRGDDIAVDLRILTSRRLDLAADRTRAINRLRAQMLEYFPALERAFDYSSSKASLVLLAGYQTPAALRRIGTNRLAEWLKNRKVRNSRLVAATAVEAAQAQHTAVPGEKLAAVLVARLAREVTALDEEIAETDALIECRFREHPHAEVILSMPGIGSVLGAEFIAHTGGDMSVFGSPDRLAGVAGLAPVPKDSGRISGNMRRPRRYCRRLLRVFYMSAQVASRCCPTSKAYYDRKRAENKSHKQAVIALARRRLNVLWALMRDGRTFEITPPGNPIRLS

SEQ ID NO: 255446 - protein, 338 aa, unidentified
MTCIGFDHHKKWTQAAAVDDQGKIIREMRVLNDNSSLKGFLKGLPKPLKGVVEAGPTWGWIYDTLTELGVKMIVANPSAVRAIAEAKIKTDKIDARMLASLLRVGLIPEVYVPTEEVRSQKMLWRERIWLVRMHVRLKNRIHRLLNHYHLEVPEFSDLFGAAGRRFLEELKLPEPGNRILNAQLKLLQSYRLQIEEVQRWAVKATQGHPNRAYLESLPGFGKVFAPIVALEIDDPKRFASPGKLASYCGLVPSLYSSGGKSWQGGIGKDGNHWLKWAFIEAAWAAIRSSAYFRVVYQRLRQRKTAQVSIIACARRLCEIAYHLLKERRCYEERPYRCA

SEQ ID NO: 255447 - protein, 353 aa, unidentified
MIHLGIDLHKQFSFITAMDQQGNILTKSKVSNQRERFLEFLSSYPPSKSQIVLEATWNWYWLWDLLEEQGYRLQMAHPLKTRAIASARIKTDKIDSEILAHLSRSNLVPQSYVVDRETRFRRELIRYRASLVRLRATIRNKLHALVARNGRTCPYRDILGKKATAWLLSLELAPVYREALEGYLRVIDPLGVEIDRATQRIKLSAQESQWASRLLKLYGVGEWTALLIVSEIGDIGRFPSAKHLCSYAGLVPSVHVSGNTSYTGHITKQGSKWLRWALVEAAHHAMRKPPYQAFYQKTAKRRGKAIAKVAVARKLLKAIYHLLREKRASSPNEDKETISLGRARSGVMVEARP

SEQ ID NO: 255448 - protein, 376 aa, unidentified
MNSVGIDISKGRSTIAVMRPFGEVVISPFEVRHTGSELSKLARQLKSLDGETRVIMEATGNYHASVAKLLHNAGLYVSVVNAKLVHDYGNNELRRVKTDRKDAVKLANYGLDRWLTLPRYIPEEDTRLLLKNCYRQYRQYSKVQMVLKDNLISLLDTVCPNANRLFSSPIRGDGSEKWVDFVAEFWHCRCVSEKSERAFTSKYLRWCRKHGYNFSEEKAHTIHAETCGHIDVIPKSETTKLLMEQAVAQLRATSAALAALKHEMQSLASMLPEYPVVMGMFGVGPTLGPQLIAEIGDVRRFYSKKALVAYAGLDAPPNDSGDVTGRHKSMSKIGASSLRRTLFLVMSVYLQTAPLDEPVYQFMDRKRAEGKPYRSP

SEQ ID NO: 255449 - protein, 396 aa, unidentified
MYYVGIDVSKHHHDATVIDATGRVVIAPFRFLNTRQGVATLLSRLRPLNPVCIAMEATGHYWLPLYEALTDRGYSVSIFNPFQIKAYRQIGLRKTKTDAVDSFWIADFLRIGRGQPMVVPTPLVRQMRELARFRFSLLQRQGNIRRRALTILDRVFPEYLTLFPRPFSPTSRALLRRAVTASSFAAWPLEDLAQTLSRASRGHFGLREAGKLQCLAQDSLGIRSLGPVAYLEMQLLLDQLALLDDQIATLDEELARLLQRTGTYLTTIPGLSTTLAATILGEIGDIHRFANLKQLVAYAGLDPTVHQSGQFQASHSRLSKRGSTYLRWALWMAASIARQHDPDLKALYQRKRSQRKHHNVAMAAVCHRLLARIYVVLKEQRPYKARDSDTRHSPID

SEQ ID NO: 255450 - protein, 407 aa, unidentified
MKKKDVIEFKQVVERGCGMDVHKDLIVATILGKDIKMQTKSYNAFTSSLIKLKEWLLKNGITHVAMESTGVYWKPVFNILGDDFKILLVNARHVKNVPGHKSDKKDSRWLAKLLLSGLLKGSFIPERPIRELRDLTRYKTKLINQVTAEKNRFQKILEDANIKLSSVLKDVFGATGTKIINHILEHESYRPEDILQYVHGKVKSSREDIKEALTGYVTPHHRFMLKTIMRNILRIESTIAEVDTQIEVSIEPYKVERELLESIPGVSKVGSTCIIAEVGVDMGQFPDQNHLASWAGICPGSNETAGKNKSGRITHGNKYLRSLLVECGWAASRTKDTYLSAKYKSLVGRRGKKKAIIAVGHKILIATYFIIRDKIEFKELGPDHLNNFKKDRLIAYYRQQLEKLTAA

SEQ ID NO: 255451 - protein, 352 aa, unidentified
MMIIGCDFHPRFQQISFLLEETGECGQRRLMHTAEAVEYYCSLRGTRVRIGIEATGSYGWFRRLLNELGHELVVGDATQIRASNPRKQKTDKRDAEHILGLLVADRFPAIWQPPAENEQLRQLLLHRSRLVRLRTRVTNQLDGMAKNEGWLIPGGWSEKRRQGIEALPLPGWYGERRKDLLGLLDRLEERIAPLNKAVSQAAARNAEACLLMTHPGVGPVVSLAYVLTIGNWQRFPRGKQVGSYLGLIPSEDSSSDKRRLGHISKQGNTLLRWLLVEAASTAQKYDASWHRQYLRLSMSKHHGVAKVAIAHKLAVRLYWMLRSGQDYGQMMERGSHARQSECPVGRSKGPIE

SEQ ID NO: 255452 - protein, 315 aa, unidentified
MTTSSGKFVGIDVAKDKLDIAELGEKEASLVSNDEKGIASLVQKMQALRPELIVVEATGGYQRAVVLGLYEAGLPVAVVNPARVRQYARACGLFAKTDKLDAFNLAEFGKQVRPRPFEAKSEAGRYVSALLVRRRQVEGMLKAEKSRLRTVHVDMRGSLERMSEVLKEEIKHLEKDLDGFMKEHEDWQEQEQILCSAKGVGRVTAATLLAELPELGKLDRKKIAALVGLAPMNFDSGKKRGYRKTKGGRIEVRSVLYMSTLVATRYNPLIQAQYQELLRRGKVKKVALTACMRKFLTILNAMMRDRAPFRQAALV

SEQ ID NO: 255453 - protein, 389 aa, unidentified
MKIFVGIDIAKLNHFAAAISSDGEILLEPFKFTNDADGFQLLVSKLESFDKNSIIIGLESTAHYGDNLVRYLVAEFYQVCVLNPIKTCQMRKNNVRKTKTDKVDTFVIAKTLMMQDDLRFITFFDLDMMDLKALGRFRQKTIKQRTRLKIQLTTYVDQVFPEIQYFFKSGLHQNAVYALLKEAPSPKEIASMHMTHLANLLKVNSHGHFTKEQAKELRILAQKSVGANDSAISIQITQTIQQIELLDSQLEKIEAEMTDIMKFNDSVIMTIPGIGYINGGMILGEIGDIHRFSNPNKLLAFAGLDPSVYQSGNFQAKTTRMSKRGSRVLRYALVNAAWNVVRNNATFKAYYDAKRAEGRSHYNALGHCAGKLVRVIWKMLTDEVEFNLE

SEQ ID NO: 255454 - protein, 311 aa, unidentified
MTLICGVDVSSETLDARIGPDGPAERFANTPEGIEALAAFGQAHGVALVAMEATGGYEKLPFMLLWAHGLPCAILNPRQVRHFAQAMGFLEKTDRIDAGLIAAFAAVKRVAPQEPAPETQQQLEALVTRLRQLTELRVAEKNRRCLVADGGVRASIGEVIALVSRQIRSLEAAVASLINDDPLWRQLDQAFRSIKGVADRTVARLMAEMPEIGTLSNKAIAKLAGLAPLARDSGKSNDRRPVRAGRANIRSILFVVAEIVRRFDPDFAAFHAKLNRAGKPKKLIRTALARKLLVRLNAKARNARAELAFAP

SEQ ID NO: 255455 - protein, 319 aa, unidentified
MIIIGVDFHPEFQQIASVDADTGEFQEKRLGHREEAETFYRALASQKVRVGMEASGHARWFERLLAELQIELWIGDAAEIRTRRVRKQKTDRQDAQLILKLMLKDDFPQIWVPSWENRDLRQLLWHRHRMVQARTRIMNQLQAVALNEGLRCKKRLWREHGRQQLEAFRLAPWASRRRRDLLELMDRLNPTIAELSQAIEQEVEKCPEARRLMTHPGVGALTALAFVLILGKAERFGSGKQVASYLGLVPLEDSSGNRRRLGHITKQGSSMMRFLLVEAAQVTVRSVPEWRSKYLHLMMRRGRKTAKVAMARKLAVRLY

SEQ ID NO: 255456 - protein, 404 aa, unidentified
MERAEMDYDVYVGVDVGKTKHYAVALDGATGKRLFSRPFGQDEASIRELLEDASGYGKALVTVDQFGNIGRLVVAVGKDMGLDVAHITPKDFKDISTTYKEGKSDAKDAFIIADVSLSTPRLIRPVGTRDGVIAEIKVLNSRRADIVKERTRYYNRLHDLLLQASPPLEQLFEGEKLHSGLAVKMFERYGGPRGLKRAGKARVSKWAGSVKCQKNRGPAMAEEVFEALGTMTVELPATEVIEIQIKKLARRILELDQEESELDAAIEERADAVPETAILKSIPGIGRVHGATIAAEIGDISRFPDANHLASYGGIAPVKEESGTSVKKNKRRKSGNRRLKNALIQSAQMAIRFDPRCKAYYNRKRAEGLKRKQALRALARRRVDLIYALLANGTFYEPSHRAAA

SEQ ID NO: 255457 - protein, 423 aa, unidentified
MTKLTSTPAGAVLVAIDMSKNRQEVLIERPEGGRRRRMTVMATRQDYDGFAEQLAAIGRPIIVGFEATGNYHRTLAHRLLTAGFELRLISSVALARTREALHNGWDKNDPKDAQVILHMLRIGATQRYVDPLVAGINDLQELSKTHETISRMRTQTWHRILTHYLPLYFPEIARFAGNSRFDWFLALIERFPTPATITALDREAFSAAAWPLIGRKVSKARLINDIYETASASTALPVPEDSAAITMFRMVIAQGRSLIRQRDEIERLAHARLTDDVDYQLLRNIPGIGPINALTILAEAGDLRRFNHHRQFLKFCGLNLATCQSGTFRGRTKLSKYGNARLRRTFWMAAQVAARQRDNSFRDKLGRYVAGHADDADRRRKAMTALTAKMARVAHAVVKTGTEYRPFLERSDARWKAPSLQVP

SEQ ID NO: 255458 - protein, 412 aa, unidentified
MQAIIERCCGIDVHKKIITACLIIGKFNELPTVIIKTFSTMTRDLLACKDWLESEGCTHVALESTGVYWKPVFNILEDSMEIILANARHIKNVPGRKTDVKDCEWIATLLRHGLIKGSFIPPRPIRELRDLTRYRKKLIQQRSSELNRIQKFLEDANIKLASVVTDITGVSAQDMIHHLIRKDMTPQEMAELARGRLRTKITELEKALEGALREHHRLILTLSIQMIASYDQAIDTLDREIDERMKPYSKESERLQTIPGIKKRAAETIVAETGVDMSRFPSANHLSSWTGVSPGNNESAGKRHSGRTTQGNKWLKAVLTESAWSASKTKGTYLKARYQRLAARRGKKRAAVAVAHTILIMIYHIIKEQRTYIELGADFFDRLNEQHILKRLTSRIQALGYKVDLEKLTVAA

SEQ ID NO: 255459 - protein, 346 aa, unidentified
MEHYVGLDVSLKLTAICIVGRTGKIEREGVVASDPEAIAAFIKSYAPNVVRIGLETGPTATWLWTELRKQGLPVICIDARHAKAALKMQINKSDRNDAVGIARIMQCGWYKEVRVKELDSHATKALLVSRALLVKIKRDIENQIRGLLKNLGLVIGQAKMNAFAVRAAELADNRPALTAAVEPLLKAREAVEQQIADLDRKVLRLARNNAQVRRFMTAPGVGPITALCFLATIDDPTRFKRSRSVGAYAGLTTRRYASGETDWTGRISKCGDKMLRSYLYEAANVLLTRVAKWSALKAWGVRLAKRSGLRKAKVAVARKLAVILHRMWIEGNEFRWSSKEATSQPA

SEQ ID NO: 255460 - protein, 429 aa, unidentified
MSNPLSVPDSAVQTVPTLFVGIDWADRKHDVYWITLDGRHGHRVIEQSPEQIEELLASLRDLAGEGWIAVALEKSRGPLQYALMFREKLQLYPIDPKQFAQYRGSFTSGGGKSDMRDAALLVRMLRERHQQLKALHPDDEPTRRLAHLCQARRQLVDEATRLKIQLQSLLKVFFPLLLELGRADSGLVLEVLRRWPDPRQFRRLHPNTLANLFRRHGIRNQETIVERTARIRSAPLITKDAPLIEALGYRVTALGGQLKPLLESIDKLERAIDEAFAEHPDGGLLKHVAGAGRALAPRLLAAFGSDRERYVDADEFAAVTGIAPITRQSGKTKVVVRRRACSRFLKQTFHEFADAARKWCPWSKAYYELQRSRHMGHHAALRKLAKRWIRILYSIWKTRTPYDPERHLQRLYAVKHPLLAYLPTSPSTP

SEQ ID NO: 255461 - protein, 594 aa, unidentified
MTSKSLAPSDRTGRPTARLGVGIDTSRYGHYAAFLTDDGQPAAAELSFAESSQGYAQLHKRLELLAQRHPSATFALRLDVAGQYADNLLHFLHGLAHPSRGAAGPLGARPVAISCGDPQRNKNYRAALFGSKKSDAVEARACARFAATEQPAHTPALPAPLRVLRQVAARLHACVRHRTRVINQLHQLLAVSFPELALCTKDIAAGWVLEMLHRYPTAALLAAAGSADLAAIPYLPHDSIGPLLEYARTSVASLSAPAMAELVRDQVRQVRDADARQQRLEGLLVRAYRGLAKPNHLDSIKGFGEVTAAVLTAFILDIDRFETPGHLVAYFGVIPIEMSSGIDREGQPRGSRRWVMSKRGNDLVRRYLWMAALSAVQCNPAVRALYRRVVAKHQGHKGIAIGHAMRKLLHLAFAVWKSGKPFDPAHHPWETAADGTSGAAEKAGAGRAQQKQAAGHKPGCLPAEGVVTAACPDKVGAGGPLGEGTYIDFSHLKSQLSLERVLGHLGLWERLRGSGPQRRCACPIHRGDGRGRTFSVNLQENVFHCFDARCGKEGDVIDLWAALHHLDLRSAAIDLVRTFALEPAPARRTEKRDG

SEQ ID NO: 255462 - protein, 418 aa, unidentified
MRVNEKIEKITEDTIICGIDVGKTNCCARFCNYRGLEVYKKVWFDRTKDLDVIGAHITAASHLTGLNNVIVAFEPTGHYWLNINKYFKDNEIETVLMPTQTVKQEKGVHDGGMVKSDPVDAMLIARLTSEGKYVKPIERDELYQNIYSGYSEYEDINKEINRTINKIHVWNDKYFPELEHVYKVNSVAIKAIYENQLLPCEIAEMSEEEFINVMTENNSRAKKSAIKKIYELARKTSGIIPDAFTKRSIKRLYERYQKLLKELEEIKKELIELASQIDYVEEAVKIPGVSYISVIGIIAETGDLNNYEHAKQVLKMSGLSLKETSSGQKKGKRHISKRGRAKLRRNLKQTGISLVRNNSFFLQLHTYYTTQRENKLSKLISINAIIRKFVYILMALVKNKDSFDEEKAIRESCILSSC

SEQ ID NO: 255463 - protein, 424 aa, unidentified
MEVMHERVAGLDVHKETVVACVRVMVGGRRPKRECRTFATTTEGLLNLLEWLTATRCSHVAMEATGVYWTPVWKILSDGDFELIVANAAHIKQVPGRKTDMNDATWIADLLACGLIRASFVPEEEIQELRSLMRTRKQLVREQTRHVQRLQKTLEEANVKLDSVVSDIMGVSGRRMIEAMIGGERNPQRLAALADRGLKASPKQLYDALHGRLREHHRFLLKLHLTQWDALDATIRDIDRQVDGQIERMDETTEDQQPPFRQLILRLCSIPGVSHLSATSILAEIGRDMRRFATAGHLVAWAGLCPGQNQSAGKSKSSRLRKGAPWLKTMLVQCAWAAKRRKDSYYMAQFQRLKARRGPQKAICAVAASILTAIYHMLRANAPHRDLGADYFDRRSPDAKARRLVRQLTKLGFAVNLQPLDNAA

SEQ ID NO: 255464 - protein, 453 aa, unidentified
MMAKRKEKAVRRSALLEPDAAGIDIGAQEIYVAVPPDRDEHATRRFTSFTCDLKALADWLQGCRIRTVAMESTGVYWIPLYQILEQRGFEVYLVNAHYLKSVPGRKSDVSDCQWIQYLHSVGLLRASFRPSDAICAVRSLWRHRSSLLQMASEHTLHMQKALSQMNLQIHHVLSDITGVSGLAILDAVLAGERDPVHLAQLCHAFVKTPREIVAKALVGDYRPEHLFTLKQSLEGYRFYKKLITELDEETARLMQAVPSASEQLAPMPTRTKHTVYQRNGNDPRFDLRSELYRIAGVDLTDVPGVSAVTAQVILTEIGPDVSRFRNASAFASWLGLCPEKRVSGGKVLSCKTRKVKSRAALALRMGANSLCRAKGYFGEFFRRMRAKLGTAQAITATAHKIARILYHVLLSKEPYTESIFHLCDEQAQFRAEKRLRKQAAQLGFQVVPIPAVP

SEQ ID NO: 255465 - protein, 392 aa, unidentified
MVVSVGIDVSKDKHDCFIVSSDGEVLADVFTISNTLDGFHGLLQRIQECSAPQDKIRVGLEATGHYSYNLLGFLLDNGLATYVLNPLRTNLYRKSLSLRKTKTDRVDARTIASMLLSDAGLKPYTDTAYHNEELKSLTRYRFDKVKERAKLKSSIARLVCILFPELEKLVPSLHIASVYALLEEFPGVKQVAAAHLARLKALLETASNGHYKRDMALEIRDTAKNSIGSQMPAKSLELQHTIRLIRELNREIDEIEEQIQSIMDELHSPITTIPGLGFRMAAMILAEVGDFTRFDSPDKLLAYAGMSPSTYQSGQLKNCYPHMEKRGSRYLRYALYNATKYVCHWDSAFADYLAKKRAEGKHYNIAISHAAKKLIRLIFAMEKSRQPYCSAA

SEQ ID NO: 255466 - protein, 412 aa, unidentified
MADIAAYIGLDWGDERHSVHLQMADGTLEHVELEQKPDVLHAWVTQLKERFAGGQVAIAIEQRKGAVVNALMLYDFLVLYPINPKALARYREAFRTSRAKDDPADSQLLLDLVVRHRDHLRAWIPDTTEARKLQLLCEQRRKLVNHRVALTNRLTSLLKQYFPQALEWVGDLASLQGCDFLAQWPNLDAVQSARPSAVRKFYQAHNCRMASVIDARLAAIKIAQPLTIDPAIVEPLSLSVQTYATQVHGLIRAIQAFDVRIAHVFADHADHDVFASFPGAGDVCAPRLAAAFGTDRSRWESAAELQSYSGIGPVTERSGKTRWVHHRLACPKFVKQTFHEFADQSIRFSRWARAYYDQQRRRGNDHHAALRALAYKWIRILFRCWKDRTPYNEERYIDALCRRGSPLVKHFA

SEQ ID NO: 255467 - protein, 354 aa, unidentified
MLADQADHVLGVDTHRDSHSAAILAADTAIVQGQTTTAANERGYRRLLRFARENAPGRRRAWAVEGTGSYGAGLTMFLHREGELVLEVDRPRRPARRDRAKSDELDAIRAAKEALAREHLARPRQRGEREALRVLLATRESAVKSKRAAITLMKGLLVSAAPSLREGLRGLATREQLDRCARLRISPTQTSEQRATIIAIRASARRATALREEALQLEREIEPIVERVAPSLLTEMGVGPIVAAQILCAYSHTGRIRSEAAFAALAGVAPIPASSGQTVRHRLNRSGDRQLNRALHTIVLCRMRDDPQTRAYTARRQAERRSTREIKRCLKRYTARHLYRLLNNTLPNLANSET

SEQ ID NO: 255468 - protein, 289 aa, unidentified
MKNHHSFNDSVILGVDTHLDIHVGAVLSYDGKLLGTKVIQTNQVGYEELFDWVLTFGSVERAGIEGTGTYGAGLTRFLIKKGLDVLEINRPDRSKRRLKGKSDPLDAENAARTVLSGSAKAVPKLQSGACEALRIISVARRSAVKAKIQVINQLRALLVSAPQDIRDMLWKSKPLECVTACMSFESAEKSPLLLALCCTLRSLAKRWLALAEELTQLDELLDNLTQEYAGSLRRQFGVGPQTAAILLAVAGDNPERLKNEAALASLCGVNPLPASSGTPLRYRPFGQIR

SEQ ID NO: 255469 - protein, 449 aa, unidentified
MHGAHIGGQRAGTFLELVRGVDPTRVLLVGVDVAKATWFVVASNLLGEVVVDGVRLVADRAGLAELERVLGAARARVDAAMVVVGIEAAGHHHQTLTGHLLDRDELVVRLLNPAQVAAVRKQQGNRRRKTDWLDAAAICELLARGEGALVHLDDSAAAALRPLWSGRKDLVDTRSRLRQQAGALVDCLWPGCSAKDTAAGVTPVLCDLFATKAGRVLLGLLAQGWTPARVAATSVAALRGLFAVRGCRLTRPLAARLIGRAQAALPAHPAATVGKAATLAALLGTIDTLDREIACLEAAMAPLLARTQGAKLTQLRGVGVVAAAGFVAFVGSTDRWAEWSKVWRAAGLDPARSQSGPTDARLGISREGSAWGRRAILDLAAAVCQQPGPWRDQLRTRTTQQHKPAKIALAATANAIGRTLFALMASGADFDPGFEAKRAAARKAGGRAA

SEQ ID NO: 255470 - protein, 399 aa, unidentified
MFVGIDWAKERHDVCVVDPAGKVRGLATVAHSREGFDELLGHLGRWADQGEVLVGIERPEGRLVDRILEAGYPIVLIPTFAMKDLRRRYAVGGAKSDPGDAYVITDVARTDGHRLRRLEPLSEQTRALRSVVRARDDLVHQRVALGNQLRACLEAYWPGATVIFADVCSEIALAFMERYPTPESAVRLGEVRLGSFLKKAGYSGRRPAAELLERLRSAPAGVFGVEAEARAESMRAIARVMRSLNRSIKDLDRAVIAHLGEHPDAEVFTSLPRSGRINAAQMLAEWGDCREAYPEPDAVSMLGGLCPVTHASGKHRDVTFRWACNKRLREAITTFADNSRHASPWAADVYRRAITRGCDHPHAVRILARAWVRVIWRCWQDRRPYDPALHGAAVLLEAA

SEQ ID NO: 255471 - protein, 343 aa, unidentified
MQTVTTIGLDIAKSVFQVHGVDAAGQVVIRRQLKRRYVLAFFQKLPPCLVGIEACASSHHWSRELQALGHSVRLMPPVYVKPYVKRQKNDANDAEAICEAVTRANMRFVPTKTPEQQSGLVLHRTRQLFIRQLTAVTNAIRAHLAEFGIVAPVGRNGVEELLLVVTDTNDKRVPEVARVCLSALGVQLRRFKEQILEFDRLITAWHRSNEMSMRLDDIPGVGPALATALVASVADPKVFRSGRNFSAWIGLVPKQHSSGGKDRLGNISKQGDRYLRGLFVIGALAVIRYAKIHGTKHRPWLTALLVRRPTKVAAIALANKIARMAWAMMAKGERYKEPVALAA

SEQ ID NO: 255472 - protein, 430 aa, unidentified
MGLIVPTTIRPERADQPLPYEWFVGIDWGSQQHQVCVLDRDRRRVGERAVDHDGASLARLADWLWGMAVGQPQRVAVAIEVPRGAIVEGLLERGFHLFALNPKQLDRFRDRHSVAGAKDDRRDAFVLADAVHTDRPSFRRLQLDAPPFLLLRELSRAEETLLEECRRSANRLRDQLHRFYPQMLQLCSAADAPWLWDLLDLAPTPAHAALLSAEQVQRVLKAHRLRRITAPEALACLQAPALPVAPGVTEAAQAHCGFLLPCLRVLAEQLRACGQQVDALLRTMADEPGAGERPSDVAIVLSLPGVGRKITAWLLAEAAQPLAARDYQVLRTHSGVAPVTKQSGKRRLVVMRRGCNPRLRHALYHMARVAMQRDTHFSSVYTALRAKGQRHGQALRAISDRLLRILVAMLRNGTCYDASRIRRESAVQMG

SEQ ID NO: 255473 - protein, 345 aa, unidentified
MYSVGIDAHDRLYALCILDEGGKVVKEKTITGGAGEVAEFLRRLDGPARVCYEASLGYGTLYDALSPAAAQVQVAHPAHLRAIFRSKRKNDRLDARKLAVALHLDQVPRVHVPTLEVREWRGLIEHRRRLVDKRTAAKNALRALLRSQGVQAPRGAKLWFGRGRAWLRSFSLLSPLTTLRRDQLLAELERLGETIDAAESMLDRIGDKHPGVQLLRTIPGVGPRTAEAVMAYVDDPNRFGRSSRAGSYFGLVPSLDESAGVKRYGHITRQGPATVRKLLAEAAWQVIRYSPSMRALFERVKGGKKDRTGIALVAVAHRLARVMVAMLKSKEPWRKEQRKGVNDAA

SEQ ID NO: 255474 - protein, 409 aa, unidentified
MQVVHEVCCGLDVHKKGVTACVLWASGRRRQTRAFGTFTRELLELGDWLRACGVTHVAMESTGVYWKPVWNLLEGLFEVLLVNAQHIKAVPGRKTDQKDSEWIADLLQHGLLRASFVPPSPIRELRDLTRYRASLAQEINRIANRIQKVLEDANIKLASVATDTLGASGRAMLEAMVQGEQDSQRLAEMAQGKLRNKIPELQEALQGRVSRHHRFLLRELLDHLYFVESKMQRIEQEVAERLGPFQSEVARLCTIPGVDRVTAWGLLAEIGLSMKQFPDAQHLASWAGLCPGSHESAGKRKSGKIRKGSLWLRRCLCQGAWAVSTKKNNYLSALYRRLAARRGSKRATIAVAHKLLVIAYHILRDGTCYSDLGADYFDRLNPEGLRRRLTKRLEGLGFKVTLEPLAQVA

SEQ ID NO: 255475 - protein, 344 aa, unidentified
MANLNQFCDFTKLIGIDIAKSVFQIYSCDTQTGEITNVQIKRDKVLESLANCGKCLIGMEACGSSQYWARKLQTLGHTVRLMDPKLVKPFVRHNKSDKADAEGVYHALVSGVRSVAVKTKTERDIQTLLTMRALLVKQRTARINHVRGLLAEYGHVMPKSVDQFDKKVDECINSLEGDAVQLVIDMLRDTIKSIRDEHDRIKTLQREISRLASQTKNAKHFLTVPGIGETIMAYMCVLLADPTQFSSGRQFAAYLGLVPMHTGSGGKTVTTKIPGRCDKALRALLVQGAHAVARSKYRTDWVKNILAKKPKKVAMVAIANRMARQCWAVASKGQDWRRMPVTAA

SEQ ID NO: 255476 - protein, 284 aa, unidentified
MKRKVYVGMDVHKETIQIAYLTSNTKEMVKEQQIKHNEVHIKKFINKLKTEWNEIHCCYEAGVTGYPLYRYLKSLGVNCILVAPGKIPRQSSDKIKTDKRDAIKLARLLRSGDLESIHVPSEEDEAVRDYLRSRDSLRLDLGRNRQRLMKFLLRKGNVYSTTKYWTVSHYKWLNNLHFENEILHETFNDYYSRVRVQEENLKAMDQKIQEIAKSEAFRERVGILRCFRGVDYLTAMFLLSEVNDFRRFKTAGSFMSFLGLVPGEYSQRFEKKTNRDYKNGKSET

SEQ ID NO: 255477 - protein, 400 aa, unidentified
MLSIGIDVSKGKSTVCGMKPGGEIVYAPFEVQHTREGMSELVLLLHNSGEEVRAVLESTGSYHCPVVAALLENGIFVSVVNSLRMKRFCSQSIRKVKTDRIDAMQIALYGLAYWQELQPARLPEDTYRELQLLARQYYQMTSMLIKAKVDFNALCDQVLPGMQELMSDHAGRHKLSDFVLRYHHTTHILEMGETRFRKDYCKWAEKKGYRNCERMAVLIFATAQNGIPVLPNAPSTQIVITEAIRVLHTVEASRDAILTQMQALAKTLPEYSLVREMPCIGDTLAPRLIAEIGDVRRFHSKRALIAYAGIDAPPYQSGKFCANNRHISKRGNRYLRKTGYEVMQSYVMHKPANDPIFTFIEKKRGEGKSGKLAMVAGLNKFLRVYYGKVTELYRSLPAIE

SEQ ID NO: 255478 - protein, 369 aa, unidentified
MNEPSTFVGLDAHKDSISVALLRPGSHRPQEWKIVNEPKAVRRLARQLIGEPGLRACYEAGPGGYVLQRQLAQEGIQCAVIAPSLIPIKPGQSIKTDRRDARKLAELFRAGLLTEVHPPSEDEEAVRDLCRCRDDAQRDLTRARNRLAKFLLRRGRVYAIGRRPTWSQKYWTWLRNQSFEREADRVIFDDYLLTVQQADARVEALDQELERASLKEPYRAPVAALRCFHGVNTVTALAVVAELHDPFRFPSARQLSAYLGLVPREASSGGSRHLGGITGAGNRHLRRLLVEGAWHYRHKPQVGRALQLRRRDQPGEVIALADRALRRLTLRHRRMSYQGKHPSVVTIAIARELAGHLWNALRTTMPATC

SEQ ID NO: 255479 - protein, 431 aa, unidentified
MIETVASTQHTGLSQEASSAHQWFAGIDWGDQTHQVVVLDQQRRRVGERVVPHDGTSLAQLASWLREVSGGAPNRVAVAIEVPRGAMVETLLEQGFEVFAINPKQLDRFRDRHTVAGAKDDRRDALVLADALRTDPQSFRAVRLGAPDLLVLRELSRAEEGLLQEFRRTANRLRDQLHRFYPQMLQLCSAADESWLWDLLELAPTPRHATLLSEDQVRRLLKAHRLRRFKAQDVLACLQVPALHVAPGAAEAAQAHCSFLLPCLRVLAAQLRACEQHVNTLLSALAEDNAASDPSDVAIVQSLPGVGRQITAWLFAEAAQSLAERDYPVLRAHGGIAPVTRQSGKRRQVVMRRGCNRRLRHALYHMARVAMQREAHFASVYEALRGKGQRHGQALRNIADRLLRILMAMLRDRTRYDSSRIHGGQKVLMER

SEQ ID NO: 255480 - protein, 346 aa, unidentified
MKKIFIGIDFSKEKFDATVIKAEGVEERAERQHEVFDNKVSGFRRLLRWVKSVADEPDAGLWLFCGENTGGYSRALCNYLYGSGYDMWLENALSIRRSSVLQRVKSDKADAGVIAEYAMRNYDQMRLYRPLGNNLERLREVFLYRHSLVKLKASMSTRRSEKKLTQEKSDISRFMAQSSKHLINEFNKKIAECDRRIQEIIAGDEDLCRNFEIITSVPGVGTQNAVCLMVYTDNFGRFDYNSRKIACYYGVAPFGRQSGTTVNTPPHVSPFANKLIKALLTQAALASVNFCPKMAVYYRRLVEAGKKKPVAVNNVKNKLLHIITAMVRKGEKYNPDYDYHAALKAA

SEQ ID NO: 255481 - protein, 309 aa, unidentified
MSVFVGIDVAKATLAVALRPSGEVFEVANSPAGHRALAQRLRKLTVERVLLEATGGYERAVMAALQAEWPVVRVAPHRARSFATAMGRIAKTDPIDAAMLAHMAQVVDTPPAQPESPQQLRLQSLVQRRHQVVQQRDDERRRLQQVQDQPLVVASLKRLLRAQQAEIALLDKAIAQAVAEADRQRADRLLAIPGVGPVTAATLIAFLPELGQIERRQIAALVGVAPYNADSGGKTGLRRIRGGRAGIRRVLYMATWSAIRAQPALNQRYQALRARGKCAKVALVACMRSFLGQINAMLRDGGQWQPTPA

SEQ ID NO: 255482 - protein, 394 aa, unidentified
MLEDGQEPNKHLKFSNDSLGVANLVDRLNNLISLYKPTILKIGVESTNLYWWHLFELLSSNNSGLTLKPELYLINPNRISSYRKSFSNLPKTDPTDSWFIAEVVRIGRLKPNHPYDLRYAPLQRLTRFRFQLVESLIKEKNRALNLIFLKFSSYADKSNNPFSDIFGKTSSALIEHFTPDEIANTNIEDLVRFISKSSKNHISEEDILKCIEILNDLSKKAYRLNPKLLDTVNVTLTMTLENIRYFESQIKKIDKVIEREFSAFPEKQILSLVKGLGPVLAAGITAEIGDISKFKSDKKLASYAGLVWKKHQSGNYESEDTPLTRSGNEYLRYYLVESANCLRMHNAEYSEYYNRKYHEVRTHQHKRAMVLTARKLVRLVFALLSRSQNLLGRS

SEQ ID NO: 255483 - protein, 344 aa, unidentified
MVTIGIDPHKSSHTAAALDEAGQLLGELRLPATPSTLVRLRRWAEPWPERTWAVEGANGLGRLLAQQLLAAGEIVLDVAATLSARARQLQRGHGRKSDGIDARSVATVALRSADLRRIVGEEHSAVLRLLSTRRDELTGERRRVVNRLHRLLRDLHPGGARTDLSAKAAASLLAKLRPRSAADLERKAMARALLVDLRRLDRALADNRARCAAAVTASGSSLPSILGISDVLAAKIIGHTGDVGRFASAQRFASYTGTAPIEVSSGDVVRHRLSRGGNRALNNALHLAARVQVMHPGPGRDHYRRKLAEHKSSSEALRSLKRQLAKVVYRHLVADHVRRLVSLS

SEQ ID NO: 255484 - protein, 413 aa, unidentified
MSEIVHTDGTVFPKQASENGPKARRRKPASVASILLPAGQRLPAASRRHPQLAAACAAGQRGRFVARGSTSHRSTLAPGLHLVQLEPLKEPLSSHRKEECTMPAKAPPTYVGLDISKARLEYTLDEQRTASTDNDAAGHVRLIRWLKSLPNVRVVCEATGGYERAVVAALLGSGLEVCLVQPGRARAYAHAEGLLAKNDPIDAQMLRRYGQAVKLRLTAPTDPAVARLRDLLDQRRDLVDRLVEIDNQLQQASEVRARWIEREKRFLEQQLDALAQEIARHIDDDPTLRQKHARLQQLTGVGPILASTLLAYVPELGGVGDSTISALVGVAPFADDSGPKSGPRHVRGGRAAVRHVLYMAAVAAVRSNRVLAEFYRRLRSAGKPPKVCLVAVMRKMLTVLNRLLAQPDFILAD

SEQ ID NO: 255485 - protein, 468 aa, unidentified
MWRPRIKYLAVQPSIEPDNVKENNMLRRTVGIDLAISAVQVAQIFDDGVAVGKPIRFRLSAEDLRGFVAAVTQGVPAGVPIQAIMEPTGMAWFPVASWLKTAGVQVIRVKGQRVKALRQYLSEHAKTDLADAHVLGALPSFGSRVLDPVHVPSPDHHALQRLTKQRHRYQEQICASRRRILDLIRWACPALEPILPDTMTRLTLAILAEFFDPHRVIKMRRGTLTRFVSQNACGNHPRSGPFIEKLVQALKESAHASLALHGERVDFESLQFEVRQEVELLRMLDHNIAELEKQIELLYERQHPSDALRSIPGIGPTLAPLLVGVLAQAERFRNERHVRGFCGLFPTKSSSGGIDRPGQRITKSGNDRIKRALYVAADTARKIDPDLAAVYWRLMVKKGHHHKQALCAVATRLVNRIFLVLKTGKTYVLRDRDGRPITVADGKRIVAELFTVPADIRRARSRHIEAAA

SEQ ID NO: 255486 - protein, 381 aa, unidentified
MLDQTAHNPVPTVYAAIELSKKSWVVAIVQPAKGQPSIYRIKGGAFSDLVMRLRTATPGGERLLLCYEAGYDGFWLARSLQTEKIDCRVLDPASLQVNRRARRVKTDRIDVLMLVRALIAVDRGDRHVCSIVRVPTVEEEDARRSHRERQRLIRERTAHINRIKGLLFGQGIRGVEPRLRRSRIDFSDLRTGEGLPLPARLRAELKREYARLDLVETQLRVTEAERDTADAQDPSIEYKRNMLIQLRGVGPASAAILTREIFGRRFANRRQLGSYLGLTPSAYDSGSTTRCQGISKAGNSFARRVMIEVAWLWRKYQPNSALAKWYEERAAGQSPRIRRIMLVALARKLIVALWRYVEIGLVPAGAVSCANNGAALDAAAA

SEQ ID NO: 255487 - protein, 339 aa, unidentified
MTIVGCDFHPGWQQIAVLDIETGEVRELKLSNGNGEAERFYRQLPAPALIGLEASGNSQWFEDLLARLGHEVWIGDAARIRASYVRKQKTDRRDAAHILTLLLENRFPRLWRPSAAQRDLRQLLIHRHKLVGIRARVKNGLQHLMLNRGVQLKRKLWSQAGQQALRDLPLEGWAAKRRQDLLQLLTPLEEQVHELDQAVENAAVGNPQAQLLMTQPGVGPITALAFVLTLGDVTRFQRGKQVASYLGLIPSEHSSSNRRRLGSITKQGNPFLRMLLVESVQTVNRLDEGFRKQYQHRCHRMAKGVAKVAAARRLAVRLYWMLRTNTGYPEIAHIESSSR

SEQ ID NO: 255488 - protein, 454 aa, unidentified
MNYIGIDLHKMSSQICVLDDKDQVVEELSVKTERIRLAEVLKGYVGSPLLLEASTESLWAAPFLESLGHQVIVADPNFSAMYASRGAGKKTDRRDARALAYAVAHGIYRQAYRRSPQAQRVRDTLQVREALVRTRAGLITQTKTLLRKQGLRLARCSSTVFVQRLGEMNLPTEMRDLFAPLCEMISGLCEQIQTLDQKLTQASEKDPVVQKLMTVPSVGLITALCFSALIERPERFESADKVASYLGLVPREHSSGGEGKAKRGRVTKAGNLQMRNLLVQCAHSLLKCQKPETKWLWSWAQWLENKNGNKQVAVVALARRLGGILWAMMRDATEYQPRPVQPSLEQQVATRIARIGFDHVVGFLADRLMEAMWRESLHLVNDGVASTGEIDDAIRYGAGIRWSFMGSFLIYTLAGGDALGRAVHDAGVSGACRLDIPQGRQPASRQSREHDIRG

SEQ ID NO: 255489 - protein, 374 aa, unidentified
MNKFSKYVGLDTHKDTIAVAVCEANRDKARYYGEIPNTPQALEKLTKKLSPEGEVLSFCYEAGPCGYGIYRQLSALGHECEVIAPSLIPVKAGDRVKTDRRDSESLARLHRAGELTAVWVPGPEQEAIRDLTRAREDMKALARQAKQRLGAFLLRHGVSYDGGKSKWTKTHFNWLSGVKFEQPIQQIVFQEYVDSVKQLQSRVEDLEKEMEKGLTGWSLAPVVKALMALRGCKLITAMTIMAELGDLSRFDSPRQLMAFLGLVPSEHSSGNSTRRGGITKTGNGHVRRVLVEAAWCYRFPARKTAHLQRHAGMSSEAVQAIAWKAQKRLCGRYQHLLNRGKLKVQICTAIARELVGFIWAIACEVNGKKARSVI

SEQ ID NO: 255490 - protein, 339 aa, unidentified
MNRIVVGVDIAKRVFQLHWVEPETGEIVALQLKREKFLEHFANRSSCLIGMEACGGSQHWALSVQKLGHEVKLLSGRMVKPFVVGNKNDAADARGIWMAVQQPGIKTVAVKSEEQQAVLALHRMREQLVKFRTAQINGLRGLVMEYGEVMPQGRAGIKRDIPGALGRLADRLPAMVIETLREQYARLSELDEEIGQIERRLRHWQREDSATQRIAAIPGVGLLSATAAVATMGDAKAFKSGREFAAWLGLVPGQTGTGGRVRLLGISKRGDKYLRTLLIHGARAVLTHSKSPPEWLSELIKRRPKNVAVVAMANKMARTIWALMAHERAYQSGYVSRPA

SEQ ID NO: 255491 - protein, 434 aa, unidentified
MEEVTDEPLYRDRVCGIDIGKAGMVATIRVPSDRDPARRAQETRSFGTTKREVLALADWLRCWQVPAVVMEATGDYWKGPSCRLEAEGFECVLADAKQVKNLPGRPKRDPADSRWLAACFERGAVTSCFVATPEFRIIRLHTRYRRELTEERTREKQRAEKLLESAAIKLSSVVSDLHGVTGRDIMDHLIAGQRDPKALAQLARARARRKIAELEEALEGAEFFTAEHADLLKVMLERIDRVAEEIARLTEVIERLLAPYEEQLEQAESMPGWGRRAAQDAVAETGVDMTRFRTGGHLSSWAGKTPLDNQSGKRTGRSKSKKGNRYLAAITGETAAAVSKTQTREGARYRRLARRRGKAKALVATGNTQLKVYHKLLSNPGMRYQDLGADYYERQRDIRRQVSHHVGKLGALGFEVTLARIPEPEPDETGAQTA

SEQ ID NO: 255492 - protein, 321 aa, unidentified
MYKYKQIFGVDISKDVFDVMNSEGKHLQYENTSKGFNQLIKHLTKKDLIVMEATGYYHYCLAQHLYDQGYTVSVVNPLAVKRFVQMKLSKIKTDKSDTLAICEYACSNEVPLFTSKDSNQAECLQLMSLTEIYLKQSTALKNKLHGEKTLGIPSKTVYHSINRSLKMIQKEIQLLERKLLELVKEQQQKQLTLLKSIPGMGTKTSIILIVLTDGFTKFENAKQLCSYAGTTPTIRISGSSVRGKSRISKMGNQKLRNLLFLCAFSACKYNKACRELYERIVSKGKSKKLALIAVINKLLKQAFAVAKSGLPYDENYVSNLS

SEQ ID NO: 255493 - protein, 351 aa, unidentified
MSQPVSTTIAVMGIDIGKNSFHVVGLDQRGAIVLRQRWSRSQVETRLANIAACLIGMEACVGAHHLSRKLKAIGHDARLMPAKYVRPYSKGQKNDFRDAEAIAEAVQRPTMKFVATKTADQLDLQALHRVRERLVSQRTGIINQIRAFLLERGVAVRQGQRFLRLELPRLLTAPPDVLSPRMVRVIEDLAGDWRRLDERIEALSAEIEAIARRDAGCQRLMSVPGIGPIISSAIVAAIGKGDAFGKGRDFAAWLGLVPRQISTGDRTILGKISKRGNRYLRVLFVQAAWVVLIKPKTWERHGLKPWLEAAKKRLHHNVLAIALANKLARIAWSVLANHRNFQASNIGAAAQ

SEQ ID NO: 255494 - protein, 379 aa, unidentified
MANQMLQKDDTKTGRLLVAIEMSLSKWGLAAAIEGQPRKRVKTVEGGDFQALLGAVADFKARFQLSPDAPVVFCYEAGRDGFYPYRRLVELGHTVWVIDSASIEVSRHRRNAKSDGIDVDKLVELMQRKARGEQKALRVVRVPDVRSEDQRQLPRERENLLTDRRRVLNQIESLLFAQGYREVPQNSRALKFWLEQPRELGSQLHERLQRDVERLALLESQLTDVAQRMKEQAHHEQAGNIGRVALALMQLCGIGLIGAWVLASEIYGWRVFRNRKEVGSVLGLTPTPYSSGNDQREQGISKAGNKRARSLLVELSWLWLRYQPDSALSRWFKERFSGGGKRLRRIGIVALARRLAVALWRYTAQGVIPEGARLKTAGA

SEQ ID NO: 255495 - protein, 372 aa, unidentified
MSAEHITWVGMDAHKDSIKVAAFFPERPEPVEWTETTTVEAVRRLARKLQREAPGEVHCCYEAGPTGYALQRQLRAAGIGCTVIAPSLIPVKPGLRIKTDRRDARKLAELFRAGLLTEVHPPSEADEALRDLCRCRDDVRVDLLRARHRLTKFLLRRHCIYRQTKNHWGSRHWAWLVQLRFDDAMSQATFDSYQLAVQQLEERQRQLDTQLAEFGGQEPYREPVAWLRCFRGIDTVTAVCLVAELHDFRRFRSPRQLMAYVGLVPSECSSGERERRGAITKAGNRHVRRLLVEAAWHQRFRPALSAPLRRRREGQPARVLAIADRAQERLYARCRRMGLQGKASPKIVVAMARELTGYLWAVLHPAAAATRV

SEQ ID NO: 255496 - protein, 385 aa, unidentified
MANQNDLSRSLVAFEQDNTIIAVIEMSLNSWLVAGIVPGIERHPLKKLSCDEQMLLQLLYRWRDEAVKAGRMIARMVVAFEAGRDGFWLARWLRARGIEAYVIHPTSVAVSREHRRAKTDRLDTELLKRAFLGWLRGEPDHCSMAAIPSLQEEDAKRPTRERENLVGERTRIVNRMKACLVRFGIRNFNPTLRRATERLNELCTPEGVSLPPNTLAELRRDMARLRFVMDQINEIEAARLQRLEQAPAEEPHAMVRLLALVIGVGLETADMLVHEILSRKLRDRRAVARYAGLTGAPDESGSKRREKGLAKAGNARVRRGMIQLAWRFLLFQKNSALSQWYRTRTESAGKKRKTMIVALARKLLIALWRLVTTGEVPAGVVLRAG

SEQ ID NO: 255497 - protein, 343 aa, unidentified
MQIRSVGIDLGKTTFHLVALSAAGKVLLRKKFTQKQLITFTANMQTCLIGMEACSGAHFLGRVLREQGHDVKLIPAQFVKPFVKSNKNDFLDAEAIAEAVERQNMRFVPIKTDDQLDLQAMHRVRDRLVARRTSVINQLRAFLLERSMVFAKTPFKLKQAMPEILENADTNLTPRMRNLVSLLWSEWKDLEQQIVAMNLEVEQIASSDPACQRLRQIPGIGPLVATAIVAAIGNGAAFRKGREFSSWLGLVPRQHSTGGQARLFGISKRGNCYLRKLLVHGARSAVLRVKRERSPFGPWLDALERRSPVKVVITAAANKLARVAWAVLSSGEEYRPPTALTIG

SEQ ID NO: 255498 - protein, 392 aa, unidentified
MIFIGIDIAMDKHDIIIIDDLGEIIYDHFIIHNNRSGFKKLHTVIQSCTKSVNDIRIGMEATGIYHNNLRDYLISKGYTVYCTNPMLVSLSRKSASPRLTKTDKIDAIAVCRHLMHNLNRLHPYTPPLYHLVELKQLSRDYNSNNQIITKAKGELKRLLQMFFPEFLKHFNPFSKWALDLLYDYPLPSDYKGLHIESLVQRIHSRSNHIEQAKLLKHIAKNSIGNSNSLNTYLIKFCVSNIIHFNSQNETLKKLISQHMTLYPKILSIPGIGPINGATILGETGDIGRFPNKHKYTSLFGIEPIVHESGKYKRKRTRISKRGSKYLRTAIYSAARVACVNPMTKDNKFKRKYLKMMSKENKHHTTVIFAIAKNMVHSIYKILKTDTFYNDLL

SEQ ID NO: 255499 - protein, 349 aa, unidentified
MTVTHYIGFDVHKKSVSYCVKDAAGTIAEEGKLRATHEALRQWAGKRTEPWHGAMEATLFSGWIYDTLKPFAAELQMGHPAMMKAIGASKKKNRIDARKTADLVRCNLLPACYVAPVEMRELRRMLRYRNLVVAQAVRMKNKMSGLLMEVGAEYNKQQLHGKKYFAELLGRLEEVPESVKELLRLSRGALEMFETTQRQILGQLQKEPRLVERLEVLKSIRGVGDVTALSWALEICDPHRFPSIGDAVSYCGLTSALVSSADKQRRGPISKQRNAHLQTVLIEAAKLAPQWNPQLAALHEREMGRGHRNRATLLVARKLVAYLLAVDKSGKPFQIRTPAAVENEVLTAP

SEQ ID NO: 255500 - protein, 340 aa, unidentified
MNEITRVAIDTSKSVFTLHAVDARDQPVLRRNLRRQDLVPFFAKLPPVTVSMEACGGSHYWGRTLQALGHRVRLIPAQYVKPFVKRSKNDRNDAQAISEAAARPGMQEVAVKSADVQARAMLLTVRELLVRQRTQLVNALRGHATEMGLVAPVGGKGLAMLRSEIEADATLPEAATEALRLLGREVDQLEARLAAIDKNLLAQHKADPDSRRLSAIPGVGPMSALSFSRMVDATQFESGRHFAAWLGLVPREISTGGKQRLGGISRAGNERLRQLLVLGATAVIRFARPGRPGVSAWLLALLERKPRKLAAVALANKMARIIWAMLTRGEDYRLAKPVVA

SEQ ID NO: 255501 - protein, 333 aa, unidentified
MNEQAVGIDVSKKKLDICVATGNKFKSKVFANSPGGHEALHAWLQQQDIPVDTPVVLEATGPYSEAVAIFLADLGWSISVVNPARISGYAQSELSRNKTDKADARLIACFAQRARLECWAPPSLAVRELRALVDRLQALIDMRQQELNRLEALSQTSTSTVEKMVKEHVDWLNDQIKKIQSDIDDHIDGSPEFKNDAELMQSIPGIGRRASSQMLAYIGDVRRFKNAKALAAFIGVTPRQRQSGSSIKKRSAMSRAGHVAARKSLYMPGLVAKHHNPVVVAMAARLQARGLSPKAVVGASMRKLVHLIYGVIKSGMPFNAEIAMNGLDHQEGI

SEQ ID NO: 255502 - protein, 411 aa, unidentified
MRLFVGDDWAEDHHDVELMDAAGRVLAKKRLPEGVVGMARLHELVGQQLGEDADDAEVVIGIETDRGPWVAALVAAGYTVFAVNPLQASRYRERHGVSGAKSDTGDAHMLTDMVRTDSHQLRAVAGDSADAGAVKVVARAHKTLIWERTRQVQRLRHQLREYFPAALAAFEDLDAPDALELLGKASDPARAARLTRAQVSAALKRARRRDIPGKATAIMAALRSPQLGQPPAITAAYAATVRSLIAVITTLNEQVKALQGQVEADFGRHPDAEIYLSQPGLGSVLGARVLGEFGDDPGRYASGKARKNYAATSPITRASGKKKVVAARFIRNDRLTDALMAQAFAALQASPGARALYDAERARGAEHNPALRKLANRLTGILHGCLKTRTLYDETTAWSHREKTPQSGIAA

SEQ ID NO: 255503 - protein, 394 aa, unidentified
MIPHFYGFDIHQKYVVAAAVDREQHVCLAPERIPMDQLADWAVHHLAAADTVVVEAGTHAFHIADLLSGHVKRVVVANTYKTKLIAEAQIKSDKVDALALARLLAANLICDVWIPSAQVREQRTLSAHRASLQQRCTQVKNQLHNMCHRRSQQCPEPSLFTAAGRQWLLDLPLPEADRMRIRHLLLQLQCLQEQMDEADREIARRSVQDKRVPRLMQVCGIGYYTAYAILASIGNIQRFPSGDKLAAYAGLVPRLYQSGDRAFYGHITKGGNPLLRWLMVEAARSAVRYDPHWRQIHDRIAHRRGTNIATVPVARKLLVVIWHLLTEKSVYCHLRPQAFVRKLQEWAFRIGRNYLPAASSKEFVYDHLSHLGLHKLAESLAYGGRNCRLRLQAA

SEQ ID NO: 255504 - protein, 316 aa, unidentified
MTNLNMSPSVVNVGVDVGKASLDIYIYEKAIHWQETNDADGIKRILKRLSHYKIERLVMEATGRYEFNLAQAAHAKKLPVCIAKPSSVRQYAKAINILAKTDKLDAQIIAEYGAIIQPAITPQKSKNLLAIKDLISRRRQLMGMRTQELNRKNIMGASFEISCKRIIKYLDQEIARIENKLAKHVEDEAQWAEKKIILKSAPGVGDTLVYTLLADLPELGDLSRTQISALVGVAPINRDSGKMRGKRRIKGGRYAVRTVLYMATLSATQCNPVIKAFYNQLVAQGKHKKVALTACMRKFIIMLNAMVRDRCEWTVN

SEQ ID NO: 255505 - protein, 402 aa, unidentified
MNAVGIDVSKGKSMVAIMRPFGEIVSPPFEIKHTTSDINSLVELINSVEGESRIVMEHTGRYYEVLAHQLSKANLFVSAINPKLIKDFDNDSLRKVKSDKADAVKIARYTIDKWQNLKQYNVIDELRNQLKTMNRQFGFYMKHKTAMKNNLIGILDQTYPGVNTYFDSPARSDGSQKWVDFASTYWHVDCVRKMSLNAFIDHYQNWCKRKKYNFSQSKAEEIYGKAKELVPVLPKDDITKLIIKQAVDQLNSASITVESLRTLMNETASKLPEYPVVMAMKGVGTSLGPQLMAEIGDVSRFTHKGAITAFAGVDPGVNESGSYEQKSVPTSKRGSSVLRKTLFQVMDVLIKTHPQDDPVYQFIDKKRAQGKPYYVYMTAGANKFLRIYYGRVKEYLSSLPES

SEQ ID NO: 255506 - protein, 358 aa, unidentified
MVDKVTEAAVVGGVDTHKDLHVAAVVDQNNKVLGTQYFATTRQGYRQMLAWMTSFGTLKRIGVECTGTYGSGLLRYFQNAGLEVLEVTAPDRMERRKRGKSDTIDAECAAHAAFSGIRTVTPKTRDGMIESLRVLKTCRKTAISARRVALQIIHSNIISAPDELREQLRNMTRMQLIRTLGSWRPDASEYRNVTNVYRISLKSLARRYLELHDEIADLDVMIAAIVDELAPELIKRNAIGYESASQLLITAGDNPQRLRSESGFAALCGVSPVPVSSGKTNRYRLNRGGDRAANSALHIIAIGRLRTDAKTKEYVARRVAEGHTKMEAIRCLKRYISREVYTLLRNQNRRINSIPITA

SEQ ID NO: 255507 - protein, 378 aa, unidentified
MPDVSSVAPEVVRKFVVFDVHKNSLVAGVLPPSGGAPEVERVENTERAVRRFVKRQGGPDGLAVAYEAGPGGFALYRLLSELGVACDIIAPSLVPVRAGDRVKTDRRDAKKLVRLYRAGELVFVRPPSVEQEGLRDLVRCRDDVGRARTAARHRVAKQLLRHGRVFREGKKSWTLRHRAWVRRQRLDDGLAQRALEHALAHLDSLDAQLAAIDAELEQIAGQAPWCDPVRWLTAFRGIGIRTALGLLAEIGDWKRFGHPRELMSYLGLTPSEYSSGDQQHRGHITKCGNEHARRLLIEAAWHYRHRPRRARTGPDVPPDVSARAWRAQVRLHHRHRTLTGHGKRSTVATVAVARELAGFLWAAMTHQPLRDSQEVAAA

SEQ ID NO: 255508 - protein, 382 aa, unidentified
MDTSKNWSRIIGLDLSKATFKGCILYGEGFIQRKNFSGEMKRDESGYVLINNTIQAGDIVLMEAGSSSFNLARYLQKNSKASGVVVLNPAHLRIIWDSQKKNDKADAMKIACIARDMRPEAWPRVTVPSEKEQSERSVIMHWIFLRKQETMLCNRFFALFNSLGYPEIDKSRLKKDSDFRIQTINDLLSFNELAFTDAIMLEEQIAIIQRQLSFMEDRLRNICLDHPQQALAWLSIPGIGLVNAATLIAYIGDGSRFSKPDQLMNYAGMVPKQNQSGTVDIKGKITKRGCSAIRRSIVQGAQVLIQLPPTCDITRFAYRKKKECPFNGKVAVAVANRMLRTGLALLHHNDLYRPMVENGLNRFRRKLVDNKLQALVPYLTSN

SEQ ID NO: 255509 - protein, 430 aa, unidentified
MNYKQNEKINQVKESTLVVGIDIGSTTQYARAFDWRGIELGKVFTFSNSREGFEAFKAWMQHLQDKYRKSDVIVGIEPTGHYWFDLGAYLEDEGILLVMVNPYAVKQTKELDDNSQSKNDRKDPKVIAKLVTEGRYSAPYTPDGVYADLRIMVANRKRLIREMTQIKNRFARWFAIYFPEYTDVFGDYEAQSSMLLLKKVCTPEAIVELGAEKINQIWRDAKLRAVGMKRATTLCETAKRSIGLKKGSSAARYEMKLLLEDYEYKKAQLDAVMEEIEKLCRKIPESEQMLAIKGIGVITVAGFLAEVGDVRRFESPRQIQKLAGLSLRENSSGKHKGQTTISKRGRSKLRAVLFNAAIPLIAKNPEFKSLHEYYTTRANNPLKKKQSVIAISCKLIRVFYAILAKGVTYDAQKLISDIHRQPQVPAEDQL

SEQ ID NO: 255510 - protein, 343 aa, unidentified
MYFIGLDVHKKTISYCVKDAAGRVHQEGKVGSTRRELDGWIRTMPQPRMIAMEATIFTGWIYDHLLPHAEKVKVAHPVMLRAIAAAKKKNDKIDASKIADCLRCDFLPECHIASTEIRDRRRTLRYRNLLVRQTVQMKNRVSGLLMETGVSYNKQRLHKVGYFADLMTTNEEVDESIRPLLKLSREMICRSQKLDYALVSSLERDPLLKERLRRLRTVPGVGPITALTWALEIGDITRFTSIKQAISYCGLCGDEKSSADQVMRMPISKQRNKHIQRVLIEAAKLGPRECHELAEVRAKELEKGDRNRATLAVARKMVCYLLAVDRRNQDFVPAEKFTRRRAA

SEQ ID NO: 255511 - protein, 360 aa, unidentified
MSNLTTTTSPIVVGGVDTHKELHVVAVVDAHDRVIGTESFSTTRAGYRALVRWMRTYGDIARVGVECTGSYGAGLMRHLDTAGIDVLEVTAGDKADRRKRGKDDTIDAEQAAHAAYARVRTVTPRAHDGMVESLRALKIARSSAISARRVALQLIHATIISAPEELRDQLRNMTRMQLIRTLASWRPDLSGYRDPVTATKISLRSLARRYLELHDEIADLQVPMHALVDELAPDLLARVGIGYESAAQLLITAGDNPERLASEASFAMLCGAAPLPASSGMTTRHRLNRGGDRAANSALHMIAISRWRIDPTTQAYVARKKTEQHSNPEILRCLKRYIAREVYYLLRNQQRAIHQIAPAA

SEQ ID NO: 255512 - protein, 346 aa, unidentified
MLKADTRTVIGGVDTHQDLHAAAVVDDNGTVLGSDSFSTTRAGYRAMLRWFRSYGDVIRVGVESTGSYGAGLTRHLALAGIPVLEVTGPDRSMRRAKGKDDEIDAIAAAQAARTGQRVQVAKDRSGAVEALRVLRTTRKTAIKCRRATLQQLHNTIVASPDELRDQVRNLTRMQLLRTCASWRPDTLGYRDPVVATRIALKSLAHRILDLNDEVADLDRLIDPLVEELGAKLTQLEGVGTHSAGEFIVTAGDNPDRLRSESSFAKLCGACPIPASSGKIQRHRLNRGGNRQANSALHIIVLSRMRIDPRTKKYVERRLKEGRTKREIMRCLKRYVAREIYHVLVAT

SEQ ID NO: 255513 - protein, 373 aa, unidentified
MSDYSAFVGLDVHKDTIAVAVADAGRTGEVRFWGEIANTPDAVSGMLRKLGGRHPLMHFVYEAGPCGYGLHRQITATQHHCEVVSPAQTPRKPGDRIKTDRRDAIILARLSRAGELTSVWVPDTIHEAMRDLIRLRQAMVKDLRAARQRTKSFLLRHGRVFKGTSWKRSHRIWLGNQSFAHPAQQIAFQSYLNAVDQAQARRDEVDVQIRLFAADWSMAPVVEALQALRGVAFITAVTVVCEVGDIRRFAKPRQLMAFLGLVPGERSSGETRRQGGITKAGNVLARAVLIEAAWSYRTPAKIGAQMMLRQEGIPQAAKDIGWKAQVRLCGRYRRLMARGKKSALAVTAVARELVGFIWAIAHITEPTGAEGAA

SEQ ID NO: 255514 - protein, 354 aa, unidentified
MKYYTSTTQFNCGIDLHARQMYVCVMNREGKKLVHTNIKNNDFDYFLKLVAPYRHDLTVCAECMFGWYWLADACQAAGLHFVLAHALYLKAIHGGKNKNDRIDSEKIAHLLRSNLIPPGYVYPAEKRPLRALLRQRLLYVWNRSELLARLQSHQLAYNRPTSRQNIYNRESWTEQLLASETDPVRQLALQNDLALIGHYDAQLASLEKELLKLTKRTAHRDFTLLQTAPGIGDYLGLTILHEIGDLARFPTVKDFLSYCRLVKGTVASAGKIKGLRGARLGNPYLRWAFGEAAVVAKRDSMLSSLAQRLETRMGGNKFKANTVLAIKLARAVYFMLKNKTAFDSDRLVAALSQN

SEQ ID NO: 255515 - protein, 395 aa, unidentified
MDSVVVGVDISKDSFSAAGLDGEGKECFSGFYSMDCDGFCKFVEILTIRCQDLQKVWVGMESTGCYHINLFSFLTSQGIHAVVINPLLIANFAKRSLRKTKTDKKDAKTIAKFLMENREEISSLSISQDLQDLRDLARERESISHLITASKVEIKRVLRTTFPELESVGDLFTRSMLRFLKEYPSARRVKMAKLKNLAKVLNQPQVGNKPSFSAEDILRVAHRSIATVSPAKELILQGKIATLVHLQERLEELTKLLTEVCKATRVEDWKILRSIKGVGPKTAVPFLAEMGSVENFSSHKKLIAFAGMDPSVCQSGKFVGKSKLSKRGNRHLRRAIYLMTAAVVSQNAFFKAYFLRRKREGLIPQKALLATAHKLIRVIFAMLSHRTYFQEKMAQ

SEQ ID NO: 255516 - protein, 363 aa, unidentified
MHSINNTELSSLEETRCQFNGGKADIKLGIDVHQDFYVVVMQEGGSNPKPPQRFQKQALLRWATKLKQSGAEVYAVYEACGFGFSLQRQLSALWIKCYVVCPQKLDERNKRVKTDGLDAKALCLRLDRFVQGNKDALALVRVPTEEEERFRAIHRQREQLVKARKQLEAQGRSLLVNHGLEPVQQWWKQRAFSKLPVPEWMKLLLGNTQPILIGLQEKIAALSLQLQNAAAADQPRGLGKMTSVIIDREIGDWHRFNNRRQIASYTGLCPGEYSSGNTRLQSCVTKHGNPRLRAALVELAWRLVRFQPNYKAVRKWRQILAKGALSTGAARKKAIVAVARQLAVDLWRIKTGRLRAEELGLIN

SEQ ID NO: 255517 - protein, 321 aa, unidentified
MAQNDLVVVGIDVAKDKVDACIRRFALRQAFPSTPQGHRKLVAWLRKHKVDKAAMEASGGYERDWAKVLRQAGIEVRIVDPKRVRSFALSAGRLAKNDTIDAEMIVWFAETFDEAPGQAHDAAREELAALVKARKNLIDVKTRLQSQNEHAVPGPVQKAHAHVLKSVAAEIAKLETAISTKIKATPAFAERAEIIESVPGLADATSAVLIAGASELGKVSDEIAAALIGIAPYDDDSGKRRGERHIKGGRRWVRNALFTPCLGAATQHNPVLKAYYERLIARGKEPRVALIACMRKLIVILNTMIARGEKWDPSRHRVAVS

SEQ ID NO: 255518 - protein, 343 aa, unidentified
MECYVGLDVSLKQTSICVVSRTGSVVREGVVDSDPAAIAAFVRSKAPGAIRVGLETGPTSTWLWTELKQLGLPVICIDARHAKAVLKMQINKSDRNDAAGIARIMQTGWFKEVRVKDIDSHSVRALLASRALLVKIKRDLENQIRGLLKNVGLVIGRAKFNVFTMRAEELIADRLELIAVVGPLLKARQAIEQQTDDLDRKVLNLARHDAQVRRFMTAPGVGPITALCFKATIDNPARFKRSRSVGAYVGLTTRRHASGEVDWSGRISKCGDAMLRTYLFEAANVLLTRVPKWSALKAWGMRLAKRNGLRKAKVAVARKLAVILHRMWVDGTEFNWSTKKAAA

SEQ ID NO: 255519 - protein, 409 aa, unidentified
MVSGTIADYCALSNADAVNVGIDMGNRSWSMAAHFYRTGKVKQYTFKGRTCADDCVAAIKAIADAGHAVHVTYEVGRDGFLPARRLREECGAQVTVLPVNRLEVVCQGKKVKTDRIDAVFLAGLDARAMPKLPAVWTPPEETEARRRALRERQRLTTNIGRLNNQLISILKRWPVASIDNHQAAAKWEELLLAEDQPLRAVPKLEQLGMANMVEELALLEEHLAKWDDTLREEEQHQREEAAQLGQATVLDILRQYRGVGTEISRHFDWYLGDPGRFKRGGSLASYLGLTPTPYCSGTMNREQGISKQGNKELRRKMIQLAWLWRQWQPDSALARKWEPRLARRGRERKTAIVALARQLCVAFYRLLVHGEPIEGAVMNAPLPASLLPQPHSGGAASTSRRTLSNVSTS

SEQ ID NO: 255520 - protein, 339 aa, unidentified
MGLHCAVDLHGNNGYYGIVDETGKRVFKQRIPNSLPSVLTALEPYREQLEAGVVVESTYNWYWLVDGLQANGYGARLANPAAMQQYNGLKNTDDETDAFFLTEMSRLGILPEGHIYPKEDRSVRDLLRRRLLLVRQRTAHILSFQNLIARERGEQISSNGIQKLWPNEVARFFDDERLVLMGQTNIEMIRFLTKHIRRIEKVVLDAIKLRPEYKKLLTVPGIGKILALTIMLETGDINRFEKVGNYSSYSRCVKSSRTSNEKKKGENNRKNGNKYLSWAYVEAANFIRRYCPEAKRWHQRKAARSKQVVATKALASKICKACYFIMRDQEDFDVSKIFG

SEQ ID NO: 255521 - protein, 403 aa, unidentified
MNDEAVELVGKGARGGKRVSVFHHKRPRFAAGELSTNPQLFAGLVRAARRSLGTLSPSGSMGRPHRFADEPERLLGSEEPAFFARMGTMRENTTDVFAGIDISKDALDIGLLPSKATFHLPYDEKGIAEAVQRLAQAKPTLIVLEATGGLETRVAAHLVAGELPVAVVNPRQPRDYAKATGQLAKNDRIDALILADFARAVRPQVRPMKDESTQELDGLVTRRKQLVDIRVQENLRLNRAPKVQQKSLRNHIAWLDKDIAAIDKDLTARLRNSDAWRVKDDLLRGIPGVGPTTSAVMLAKLPELGTLDRKKIAALTGVAPLADDSGKHHGKRFVWGGRADVRSVLYMAALTAMRWNPVIKSFAQRLKSAGKPAKVIIVACMRKLLIIMNAIIKNNQPWDPKIT

SEQ ID NO: 255522 - protein, 389 aa, unidentified
MSQPFDASKSLATLEQDNTVIAVIEMSQSKWLVAAVVPGVKRQPLKKLQADEEALLKLLNRWRTEAGQTGREIKRVVVAYEAGRDGFWLARWLRTRGVEAYVIHPASIAVSREHRRAKTDRLDTELLMRAFLGWLRGEKRHCSMAAVPAAEEEDARRPNRERENLVTERTRIANQMKAILARFGIRSFKPTLRKAAQKLDGLRTAEGTPLLENTRAELSRHLARLRVVREQIRAIEQKRLHKLAAAPAEENGPHVMVRLIARVFGVGVETADMLVNEVFARHLRDRKAVARYAGLTGSPDESGKRRRERGLARAGNARVRRGMIQLAWCFIKFQKNSALAKWFDARTADGRGSTRKTMIVALARKLLIALWRLVTTGEVPEGVILRPAA

SEQ ID NO: 255523 - protein, 360 aa, unidentified
MSTATAPTPEASTGPDVVVGVDTHKHTHMAVALSGNGGLLGSLKLDAQRSGNQELMRWAAAFGSNPVFAVEGTGCYGAGLCRALQTAGLEVVEVNRPDRSTRRRLGKDDTIDAESAARSYISGKATVIPKAGDDLVEMIRMLKVVKDSATDNRTAALNQLHAIVVTAPAVLRERLQRLKGKELVECCSGLRSGEISTPLAAAKMALRTLARRIQQLDLELKETVAQLDRLTMQHCPELRNTYGIGVDISATLVVAVGDNQERLKSEASFAALCGVNPLPASSGKVVRHRLNRSGNRQANCALHRIVICRLRRHQQTRDYVERRAAEGRTMKEIIRCLKRFVAREVFGILRGGPAVRTAAA

SEQ ID NO: 255524 - protein, 357 aa, unidentified
MATGSVAQVGVSVIVGVDTHKDVHVAVAKDELGRSIGGISIPATAKGYRTLLSWARGLGEVRAFGIEGTGCYGAGLARYLCGQGQAVIEVNRPNRQARRRRGKSDPADAEAAARAVLSGEADGAPKSGDGAVEMIRVLRVARTTANRSRTQAINALHGLVVTAPAELRERLHGLLAPRLVRTCASFRPSEVSDPSDATKVALRLLAKRCLDLEQEIQVLDREIERLAREACPALLDVYGTGPETAGALLLAAGDNPERLRSEAAFAKICGASPVQASSGKVARHRLNRGGDRHANSALHRIVMVRLRWHHQPTMDYVARRTAEGKSKREIVRCLKRYVAREVYMALAEGRTQPLAGS

SEQ ID NO: 255525 - protein, 324 aa, unidentified
MKVQHIIGADLSKTTIDLFLQSRLQIENTKIGFQQMMNWFKQQNINASEVMIVMEHTGLYSYCFENFLHEHHIAFCKVNAYAVKRSMGLVRGKSDSIDARRLANYGSKEKLSVEPQLSKELQRLQMLYSTRERLVRHKAALLNAVSEYRNIGLAASDLIMTTHTTVIKSFEKQIEKLQNQMDDIVKNNPSIKGNQNLLQSIKGVGRVLSIATIIKTRNFTRFQSARKFACFCGTAPFEHTSGSSIRGKTKVSQLADKTMKTLLDLSAKSAIQYDKELREYYLRRIESGKSKMSTINIVRNKILYRMFAVIKRQTPFVENYLQTA

SEQ ID NO: 255526 - protein, 344 aa, unidentified
MERYAGIDVSLKWSSVCVVDATGKIVRETKVPSEPETLVAFFRQLGLPLTRIGLEAGPLSQWLHAGLTRAGFEVVLLETRQVKAALSAMVVKTDRKDARGIAQLLRMGWFRPVHCKSLPAQETRALLAGRKLLQGKLLDLEFSIRGILRGFGLKVGPVSKGRFVARIRELTSGQPMLERVVEPMLRAREALSKEFHALHRAMLDLVRNTSLCRRLMTVPGVGAVVAITFATAIDDPARFRRSRAVGAHFGLTPKKYQSGETDVTGGISKVGDGTVRVALYEAANVILTRSGRFSALKRWAMEVAKRRGMKRATVALARKLAVVLHRMWLDGSEFRFGKEEAAAA

SEQ ID NO: 255527 - protein, 318 aa, unidentified
MLIIGCDFHTRFQKIAMMDTTTGELVTRRLEHGTGEAERFYAALAAPVRVGIEATLATQWFEKMLRHYGHELWIGDAAEIRAAMVRKQKTDDRDALHILDLLMQNRFPRIWVPSPAERDVRQLVRHRHKLVRFRTSVMNQLHALAMGQGLCLRKKLWTTVGRQKLESLTLDPWASRRRRELLELLDQLDPSIGELDRAVISEAESRPTAVCLMQQVGVGPVTALAFVLTVGPVSRFPNSKKLVSYLGLNPSEESTGGRQRLGAISKQGNTMLRCLLVEAAQTSARLDPELRRNYQRLKLRRGNSGVATPRGDTFAEKP

SEQ ID NO: 255528 - protein, 354 aa, unidentified
MLIIGCDYHPSFQQIAFVDTETGEVKERRLVHREEAEKFYRDLAAQGRQVRVGMEASGHARWFERLLAELQFELWMGDATEIQRKRGRKQKTDRQDAQHILSLLLKDDFPPIWVPSWENRDLRQLLWHRHRMVQARTRIMNQLQAVALNEGLLCRKKLWRERGRQQLEAFQLAPWASRRRHDLLELLDRLNPTITELSPAIEREVEKCPAARQLMTHPGVGPLTALAFVLIIGDASRFQCGKQVASYLGLVPLEDSSGNRRRLGPITKQGSSMLRFLLVEAAQVTVRSLPEWRRKYAHLMMRRGRKTAKVAMARRLAIRLYWMMRQGRDYQQWNKFGSHAGQPGNRDGVPSNIE

SEQ ID NO: 255529 - protein, 424 aa, unidentified
MNANWSEQSYFAALDWAKDHHDVIVVDRVGTIVADFRFPHTASGWEEFSQKMQPFGHCPLTIETSAGMAVDQLLQRGFPLYPLNPLAAKEYCKRKAPSGNKTDRQDAWAFADALRTDGHTWRLLRPQDEATATLRLLCRDEIALIEHRTALVNQLQATLGEYYPLALGSFEDWAKPFAWAFVRTFPTPAALAKAGKRKWESFLHVHKLWRTETAPERLATWARGQQLNASPAVLSAKSLLALSLVNVLEALQRQIQEYRRRITEAFAQHPDHDIFGSLPGAKQTLAPRLLSLIGAVREVYPDADSLMCQAGVSPVGYQSGRICKARVRFLCDHFLRHTVHLWVDQSRKTCDWAQIYYQAKRDKGHSHASALRCLGKRWLKVLWRMWQNHTAYEESKHLKAIEQHGSFVWKSLQNQILNSTPAGE

SEQ ID NO: 255530 - protein, 412 aa, unidentified
MQDILTCAMGLDVHRDVIVACLARGELGTEPEIEIRSFSTLIPEMRKLRDWVLEVECRHVAMESTGIYWQPIYEMLEPCFDGQINILVVNARHMKNVPGRKTDMRDAQWIATLLRAGLLKGSFIPDKTFRELRHLTRYRKSIVRDITAQKNRIDKFLQSSGFRFTAFLSDAFGASGRNIIRHLMEYGNISREALDRCLKTQTRKRIDEILVALNGSLSEHQRGFLRMIFEHLEALEQHRHSVENAIAEEITKHEKALSLLCSIPGIDVTAAAAIIAEIGTDMSAFPDSQHICSWAGLSPGNNESAGKRKSAHINKGNPYLKSMLCEVGWVISGKRTLYLSGWYWRIKQRKGAKRATIALARKLLALIYTMLKVGTPYNEECFETRRKQSEHKRASRMVNELQKLGYFVVAPD

SEQ ID NO: 255531 - protein, 365 aa, unidentified
MKKSNTTTTKAFRKMQKLTIGLDLGDRSSWYCVLDESGAAVLEQKLATTPKAMQEVFGGMPRSRIALETGTHSPWVSRLLSELGHEVIVAHARNVRLIGESRRKDDRLDAKTLARLARIDPQLLCPVKHRSAKAQAHLTVIRARAGLVRARTALINVARGLTKSYGERLRGCSSRNLNSKKAEGLSVELQTALGPLLEGIESLSERIRECNQRIEHIAQEHYPETALLQQVKGVGTLVALTYVLTLEDPHRFSKSRDAGCYAGLQPGRRNSGQSEPQMRISKEGDAYLRGLLVQSAHHILGPFGADSDLRRWGLKLAERGGKNGKKRAIVATARKLAVLLHRLWVNGEVYEPFHSSSRRVLVAAA

SEQ ID NO: 255532 - protein, 410 aa, unidentified
MGYETLIRRAHVMTRKNTLKSLPTDTEFRVVGLDLAKIDVSVAAIPVDDNTPSLVDRMTYADLLDWAGKISPTLFPMEPCNGYSLLCLQLENLGHEIKVISGSTVSMWINTHLSGQKTDLNDAIALARLAVSDAELTPIRHKSITEIRIQTVQAVRQQLMSQRSKSIVSFKALAQQWGIPCAAGHRNLKKLRESIEAKVDLITRPVANAMLFLLDAVKSLDRQIGQFNQTLQELVMSDERGRLLQSVLGVGTQISARVITVVGNIERFNSPRSLVAYVGVAPRNFITGHKNLTKKKHGNCPDLSHKGQGKISRRGDKLLRSLFIQGAACLYMQFCKDQLPECQLKRWILKQLASQKPYGKLIVSLAAKLIRIVWAVLTYGEKFNIQKAGMTRSMWSEMALETPLNKEVPA

SEQ ID NO: 255533 - protein, 421 aa, unidentified
MPSKRKKKKTQVIEVTKLDSLQQINLNAAGLDIGAAEIWGCVPEDRAEVSVRVFETFTVDLHALADWLEECGVETVAMESTGVYWIPVYEILEARGFEVYLVNARHIKNVTGRKTDILDCQWIQQLHTYGLLNASFRPEAEMCALRAYIRHRDNLIRYRSVHIQHMQKALQQMNVQLTNVISDITGVTGLKIIRAIVAGEHDPVHLAQFRDPRCKSSQTEIAKALTGHYQAEHLFALQQALELYDVYNQKIKACDREIEQKYAAFKPVIDLESQPLPPPAKKKRRQAHEPEFDLRSYLYQLCGVDLTRIDGLQALTVQQAITETGVDMTPWPTVKHFTSWLTLAPHNDISGGKVLKSGTQKSKNRAAQAFRIAAQSVSRSDSALGAYYRRMRAKVGGPKAITATAHKIARIFYRKRSGVIP

SEQ ID NO: 255534 - protein, 449 aa, unidentified
MGNGSGVSRGDRNRNARLGRLRVLVPVTNAIVGIDLADKKQMVVVTDHDSKVIARRTFRCRAWDLGVALDWAAGRAAAKGWTGVTVACEPTGHRWRVLGQLAADRSVPFVCVQPMVTSWSRRTEDLTWDKTDEKDAVLIARLTAQLRCYVPEPVDETWGRLRHLGTRREQLITEAGSQIQQMRDLLECAWPAALDTARQPFRSGTWIAALSVIAGRDGGDFARTRRLGAIRFERAVRREITRRGGQKPCLRIVRGLFAALADPAGVIAHRPGALERVQLLAEDWRHAKDRLAETERRMTAVLGELGLTGLVTSMTGLSAIGAAAILAETGDPRRFATARAVVKHAGLAPREKLSGAFTGRTRLTGQGRPGLRLAAWRAVWGAQRANPVYRARYQHLTSREQNKLTPTQAQTVIAAAILRQLHAIITTGQAWDPATATHGTRPQSRALAA

SEQ ID NO: 255535 - protein, 450 aa, unidentified
MTSKKKGKGTPTALAPINRRAAGVDIGSRFHVVAVPAELDAEPVRSFHSFTGDLNRLADWLVVLGITTVAMESTSIYWVPVFEILETRGLEVVLVNARDAKNVPGRKTDVNDAQWIQQLHAYGLLRASFRPGAAIVALRAYLRHRERLLEYAASHVQHMQKALMQMNLQLHHVVSDITGVTGMRILRAIVAGERDSKVLAAFRDVRCKSSVETIRDALTGNYRPEHVFALRQAIELYDTYQTKVQDCDAEIERSVRALPAEDGAASLPPRRIRTVQKNEPAFDVRPVLHALLGVDLTQIHGIGPYSALRIIAECGTDMSRWRTAKHFTSWLTLAPGSKISGGKVLSSRTRRSTNRAAVLLRLAATTVGRTNTALGAFFRRLAVRTGKAKAVTATARKIAVLLYNTLRHGMAYVDPGADYYEQRYRQRTIDNLRRRADALGFSLVETPTPG

SEQ ID NO: 255536 - protein, 434 aa, unidentified
MIRVKDTSKIPNPPEEINFFCGFDWARHDHYFVLKNTSNEVLGEGYFPNSPEGFEDFLARLDACRDGRPVALIIEATRGSATSVLARVEWVKLYPVNPSKTRKLIELDGSGDGKNDPRDSHLLCDHLISNHHKLRRDYESDEDILCLRELVQTEDEYIGGQTRLKNRIKAQIGQFCPGLEAMVGNKLDIRAYTQYLLTLDPRQLAGDDKVVQLLHKHHVRSKKVVERFLERHRKLRMLPLGQKLLAVHVEKLRGLVRQLHVIQDDLGKCETEIAAYFNELPNADIYRSQPGLGERLAPRMAALFGKNPEKNFANKNEACAYFGQSPVTESSGGCDKNREPRRKRLARKKEVKKRRSCNGQARHTAFLWSRATECLSDVRAPWQRAYLARQKERGDKAATRYRKLGKKMITVLYTCLANNQPYSLDLYQKNSHGQ

SEQ ID NO: 255537 - protein, 353 aa, unidentified
MTSLTDLREVVDVVIGVDTHVHTHSAAAVDARTGGVLGEVTVDATADGYAQLQAFADEHATLHAWAIEGTGGHGAGLTRHLTRRGELVVELDRPERARRRNGAKSDPLDAIRAAREALSRARLGTPRSSGDRQALSVLLAARRSAVEAGTDAQRQLFSLVIAAPEPIRARFRGLKLPAMLRTAAALRVHPAWDTETTITVTTLRSLARRARTLSQEAAEHEKTILGIVRSWRPDLLAQPGIGPIVAATVLCAWSHPGRIHSEAAFDMLAGAAPIPANSGQVTTRHRLNRYGDRQLNRALNTIALSRIRYDQTTRDYVARRTTEGKTSREIKRCLKRYIARDLFRTLEHPPATT

SEQ ID NO: 255538 - protein, 406 aa, unidentified
MLNAVGIDVSKGRSTVAVLQPGGVVLHRPFDVFHNTKDLHNLARYLVSLDGETRVVMESTGRYHEPIRNVLSEAGLFVCAVNPHLIKNFGNNTLRKVKTDSADAKKIASYTLDNWATLREYSVMDTTRTELKTIHSQFNFFMKQKTSAKSNLIALLDETYPDVNKLFSSPIRSDGSEKWVDFAYSFWHVNCVLDAGLKTFTERYQRFCKRHHYEYQPNKPVQIYEQAKRLVPAVPKDPIYKELIQDSIQQLNLISQHVEQLRKKMDELASALPEYDTVRAMYGVGPSLGPQLIAEIGDVTRFTHREALTAFAGVDPSKNDSGQVVHKSGRASKRGSARLRKTLYQIMSVMLKLGPRDDDPVSQFLFKKKSEGKPYLVYMTAGANKFLRVYYGKVKECLRNQAAQET

SEQ ID NO: 255539 - protein, 344 aa, unidentified
MDNHTQYSGFAGVDLAKKVMQIHFVAGDGEITDKQVKRAEFLDFFRNRSKCLIGMEACGASQDWARKLEAMGHEVHLMSPKAVKPFVSGQKNDYNDAIGIYKAMFNGVRRVPVKSTEIRDLQTLRRIRSQVTKDRVKEINHVRGLLAEYGIVMGKSITAFNKGISSALESLKERGDVSPLVAEELRTTVESIKTKIERQKKLDREIEQLARGCKNYENFLKTPGVGPFTAAMLCVLLCDPAIFANGRQFAAYIGLAPRSRGSGGKNFIIGIPSKFNCDSESRAVFVECAQAIARYKNKSPWVDGILRRKPKKVAVIAIANKLARQVWAMANKGESFKQMTILTA

SEQ ID NO: 255540 - protein, 393 aa, unidentified
MHYVLAIDVAKEKSMGTLISSCGEVLIDPYEFNHSKQDFSSLLVRIKKLNIKDVSVIMESTGIYHRPVERFFLENHFKVYVINPLYSKNHKNSLRKTKTDKLDCLSLAELFFTHTFREVVKPSELYLNMNALSRQYFALSESTIDLKNRYKNLLYLCFPEYEKIFVGNMVYSDIALSFISQYPHPEIISKTRLCFLQTFFKRKKFRYWKSKTTKIKEIANTSYPSVNYNDEIVANLSQIAKIINNQQNNINIVKEKLINFAKCTPYFTPINSINGIGEFTTAIIIAELGDINRFNNIKELTAYCGLDPTIKQSGKTINTHGPISKSGNKYMRHILFLSALNIVRITSLSKKENDIEIYYRKKRNEGKHHYVATIATTTKLLRKIFAVCKQINK

SEQ ID NO: 255541 - protein, 313 aa, unidentified
MEVLVEICAGLDVHQATVVVCVRRPGKRGRRTGEVRTFGTTTREILRLADWLTGEGVTHVAMESTGVFWKPVFNILEGHVEVILVNAEHYKAVPGRKTDVRDCEWLAQLLEHGLLRASFIPPQPIRDLRDLTRYRKSLVQHRATEGNRVHKLLESANIKLGIVATDILGASGRAMLRALMAGEADGTVLAELAKGALRRKRGHLAEALTGRFTPHHAALLGELLAHIEYLESAIARLNERVEAAVRPYAGHVARLQTIPGVGREAAETIVAEIGVDMSRFPSAAHLASWAGVCPGNNESAGKRKTGKTRKGNR

SEQ ID NO: 255542 - protein, 345 aa, unidentified
MPTAEGHTFAGIDVSGHELSVARRNGQGDQRPALAKFPNHPSGHKALLAYLLRRGGRVRVCLEASGNYSLDVALTLHAHRQVEISVINPRRARRFAESLGERSKTDPVDARVLCEYAARMPWVPWQPPSPVALHLRALTRALADLSAIHTQQNNRGLAAAASQALPNSVVREMQRHQKYLEQRMTRLRREAMRLIADDPELNRRFRLMLTTTGIAQTSALQILGELAVLPEMLDARQWVAFSGLDPRLFKSGKSVEKRPRISRGGSRHLRRALYMPALVALRRDPYLRGFYQNLLARGKARLQAVVAVMRKLLHALFAMFRTNQPYDGSRLCAFRPAAHAVTVCA

SEQ ID NO: 255543 - protein, 403 aa, unidentified
MNAVGIDVSKGKSMVTILRPFGEIVSSPFEIKHTSSDILSLIKLIHSIEGESRIVMEHTVHYYEVLAQQFSAAGLFVSAVNPKLVKNFNNDSLRKVKSDKADSIKIARYALDKWQNLKPYSIVDELRTQLKAMNRQFHFYVKQKTAMKNNLINLIDQTYPNANTYFNSPPRSDGSQKWVDFVYTYWHVDCVRKMSLNSFVKHYQNWCKQKKYIFNKSKAEEIYTKATELVPVFPKNEITKRIIRQAIAQLNSTSATVETIRILMNETASKLPEYPIVMQFKGIGPSLGPQLMAEIGDITRFTHKGALTAFAGVDPGVNESGSYAQKSVPTSKRGSSNLRKTLFQVMDVLIKTMPQDDPVYQFMDRKRAQGKPYYVYMTAGANKFLRIYYGRVKEYLCILSESS

SEQ ID NO: 255544 - protein, 349 aa, unidentified
MVMLAEVVELVIGVDTHKDTHTAAVVVAATGAMIQQVTVPAAPAGYRQLLKLAGQHQGQRVWAIEGTRFLQGHAEQVVELDRPKRAARRHGAKSDPLDATRAAREALGRDQLAQPRAAGHRAALQVRLTARRSAVQASTDAQRQLHALVVAAPDPLRGRLRSLTTHQLVIACGRLRLRAHWDIETTTFAASLRALGRRIQLFQAEIAEHTRAITALVRAWRPDLLGCCGVGPIVAAIVLCAWSHPGRCRTDAAFAMLGGAAPIPASSGQTVRVRLNRSGDRQLNQALHLIVLTRLRYDPATRVYAQRRRAEGKTNREIRRCLVRYVARQLYRILEANPGFDPTQERPTE

SEQ ID NO: 255545 - protein, 344 aa, unidentified
MPHYVGLDVSQKMTAICVVDEQGRRLWRGACVTDPGAISARVLRHAGVVDVKVGIETGSMTPWLVHGLRGAGIDIECLDARHVKAALHMRLNKTDENDAEGLAQVMRTGWYRPVHVKSFDAHRARALLGARAQLVGMRTRLSNMIRGVLKTFGLLPGAGRGLRFDRKVEVLLEGAPEIGLIVRPLLATWRQLREQIAVFDKAVQQRVRADPVCRLLMTVPGIGALSSLVYVSTVEDPGRFSRSRAVGAHLGLTPRRYQSGETDRSGHISRCGDGLARTLMYEAAVVILHRVKRSLHLKDWAAAIEQRSGPGKARIALARKLSVILHSVWRSGEPFRWTPHTTAA

SEQ ID NO: 255546 - protein, 362 aa, unidentified
MGMRRIIALDLGKFKTVACVMNAVDRSHVFEAVEMSPSAVHDLLARHATDPAADTLVVFETCDCCGWVYDLCVALGLVAKVVAANSEAWQWRRVKRKTDRDDALKLAKLALLDQLTIVHMPSPIQRQKRRLILHRRSVVARRTQSRNAIRSIFSQQGIALVRGSKQWTQAGVEQLRKHARPLAECTDVLDLWRGRLHAELQLMADADAQLKIFDRKLDALAAEDDRVKLLQTIKGVGPRVAEAVVSHLDDPHRFTDAEHVASYGGLVPKQIESGEMSRFGHITRRGPSLLRSMLVESAWVVWRHNPWAQAWVAKISRGSRGRRKIAIVALARRLLTILWAMLRDNQPFRVPGGPPATLSLTT

SEQ ID NO: 255547 - protein, 348 aa, unidentified
MGHFVGLDVSVKETSVCVADAAGRVILEQKVPTEPADIVTLLSSLGVSFCRIGIEAGPLSQWLVNALTEADLPVICVETRHMKALLTAQQINKTDRNDARGIAQMMRVGLFKPVHVKTLVAQEQRMLLTSRKLLQRKLLDLEADLRGTLRNFGLKVGVVSGGRYEARIRELVTDFPRLAAIVGPLLNVRRVMRQQLAVLHKMLLDTVRDDPVCRLLMTAPGVGAVVALTYRATVDQPQRFVHSRAVGAHVGLTPKRYQSGETDYDGGVSKCGDALLRTMLYEAAQVLLVHSGKWSWLKAWGMRVAQRRGIRRAIVAVARRLAVVLHRMWVDGSEFRWSKDSTAVPAAA

SEQ ID NO: 255548 - protein, 407 aa, unidentified
MSHNIAAIDVHKKLLVVVIANSAKPDAPLQSRKFGTGAAEMRHLSGWLSQYEVSEAVMESTAQYWKPVWMELEPHMRLHLAQAQSNKGRKGRKSDLVDAKRLLRRFVAGELDLSFIPEPEQRAWRMVTRGRLQLIRERVQLQNQIESLLEEGRIKLSSVISDLLGASGRRILRAMASGETSPEALAKLGDRHLKCGLPALVDALTGSMGNLHRRLLAQHLDRIELIDRQIEELNQSAAAQMQPYQETVARLVEIPGIGAGAAQEILAEIGPDAAAFPSSRQLASWIGVCPGSDESAGENHSGRCAKGNRFMRRLLAQAAQAAARTKRSHLESVFRRLVVRTGYVKAIWAIAHRICIIVWKILHKGDRFIEFSEARNPKAIQRAINRHLKALRRLGYTIPQPAVAACA

SEQ ID NO: 255549 - protein, 336 aa, unidentified
MKYIGLDVHKVNTAACVLSAGGKELRSLSVSSREKGLQEIVDAMDGEECMVLMEASTYSIPVYRFFQERGVPTHAAHARYLKMITQSDKKTDKYDAAALARYLRAWDRGEAPLSLSYVPTREEARLKDLCRLREDITQNIGDEIRRIKAHMVRNEQELPLTYRDLKTVKSRKYIAENFAADMTLALRIQSLASLLERGKAIDRELERIGMLDESVRLLVSIPGIGVRSAVQIMSMIIDIDRFEDSEKLCSYFGMVPRVRSTGGKEMHGRMTKAGDPMMRCILDRVTYVHICNCQSSITAFYERKSAENKKKALTSASRKMLCLIHAVLKRGKPFSA

SEQ ID NO: 255550 - protein, 336 aa, unidentified
MIVIGVDVHKQSLTAVAVDEAGRMLDEQTVAVADGALVAWASTLCGERLWALEDCRQLTRTLERELLSVGEELVRVPPKLMAPERRAGRARGKSDPIDALAVARAALREPSLSRPREDEQPFRDLKLLVDHRDDLVDERRRAQQRLRWHLHQLDPAFAVPAKSLDRPTHLDRVGRWLARRPPEVQVRVARDLVVRCRSLTRAIVELDRELQQCTAQLAPALLELPGCGAITAAKLLAEIGPIGRFETDAQLARHGGVAPLEASSGRVQRHRLDRGGNRQLNCALYRIAITQGRYYPEARAYLERKQAEGKSRREAIRCLKRQLARVVFNTLKRAPP

SEQ ID NO: 255551 - protein, 374 aa, unidentified
MSNSITYIAMDTHKKEHKVALHYPGQEEIVRFTVRNTAREISKMTKKIIRQAPGEVKFCYEAGVCGFVLKRRIEAHGCKCAVIAPSLIPRKPGDRVKTDRRDALKLLMMFKAGLLTEVHAPNKQQEAGRELTRCRQTAQENLKRVRHQLLKFLTRHGYLYSDGNHWTGKHIKWLRSLEFEEALLEDVFDNYFTQMQHCIQRLDSLDSEVEKLAKSKPYKEIVGFLRCFHGIDTLSAIITITEIFDFGRFSSPGELMSYLGLTCSEFSSGEKQKRGPITKAGNKRVRRVLVEVAWHYRHPCNVSKALRVRRDGQPQWVIDIADRAGQRLRKRYRHLTNRGKMPCKVTVAIARELAGFIWSVFKEYERRKTVKQAA

SEQ ID NO: 255552 - protein, 426 aa, unidentified
MGDQNSGGTSFVAIDIGKAYHAVLVELPDGAHQRFRMANSAEDYSRLVAFLRTLPGTVRVALEPTGNFHRTLAFRLLTEGISVVSVSSVAGARYREAMFNSRDKNDPKDATVILQLLKHGLVQHYQDPLLAGHHDLQELAKTYRQVTLARKRLADSLLNHYLPLYFPEIARYWESTRVEWFVAFLSRFPTPQAIQTLSLPAFVEAAWSLIGRKINKRAKLEELYELAQSSIALPVAVDSPAIDTFRLQLAHFARLAELRRELEAQAHRLLKDRPDYQCLCSLPGVASVLAMVILAEGGDLRRFRHHRQFLKYCGLDLAKCQSGQFRGRERLSKRGNALLRMAFWMAAQRAVRMTENSFRDKYERYMKQDPGNADVRRKALTAVAAKMARVAYALVKRLEPYRGYHEHALPSGSIPLNRAVGAPATP

SEQ ID NO: 255553 - protein, 410 aa, unidentified
MKVIYERCCGMDVHKNIIVACILTGRKKETKSFSTMTSSLLGLIDWLKGADCQCVAMEATGSYWKPIYNLLEMEGIHTLVVNAQHIKAVPGRKTDVKDSEWIADLLRHGLLNASFIPKREQRELKELVRYRRSIVQERARELNRIQKVLEGANIKLASVISEIDGKSSRDMLDMLVAGCNDVQAMADKARRQMRKKIPQIKEALHGFMGDHQRLMLRLMLKHIDTLEGEVRTLDKEIQEKMKPVNEQLYLVDSIPGVAERSAQVIIAEIGINMNQFPSPAHLASWAGLCPGNNESAGKRKSGKTRKGSDILRSTLIECAKVAGHLKNTYFSSQYSRIAARRGKNRATVAVAHSILKAVYYMLKNNSPYRELGADFFELRQKTEIVKKSVKRLEALGFNVTIEQSIDANTA

SEQ ID NO: 255554 - protein, 399 aa, unidentified
MFYCPPRDIRVSVDVGCKQHQVAVGLSDGQILDEFSISHQPDGFASFFERLSNLERQYRCPIRVAMEGYNGYARPLDQMILARGWQLYNINNLKLARFKEIFPGAAKTDILDARKGLELFQLQEHLPTAKDVLQAVAEPPRENQILKRLSRRRKRLVNERVRVKNLLQSDLQAVCPSLLALTSDVGNLWFLHFLTSTDELTKLARMRLKTVRKISSIGPKYAGVIQKWQKNAQFSAEVEWVGEMIQQDATRVLELRQQIKALEAKMEALISESSLATIIHSIPGFGPISTAELAGEVGHEKRFLQESSLALYLGMAPLSKESGQYKGSKSPRQVNRRARAAMMVAVDRHRKQVPASQKYYEKKRAEGKGHNQAIRSLGRQLCRVIFKMLKEQRSYIPPE

SEQ ID NO: 255555 - protein, 312 aa, unidentified
MIDQCYGGIDVSKDCLDVMVLPERQSFSVDNTAAGCSELVTRLRGLSIAAVGIEPSGGYERGVIRALLAAGLSVRRINPNKLRQFARARGVLAKNDRLDARLIAVYVAIMPTRVVQHDSAAEQLAEVVTMRRQLCDEHVAVANQTAHLEDTMLRRLNKRRLARLEADILLLDRRMAEIVGGNASLARRYELLTSMRGVGPTLAFTLIALLPELGQMGRKQIAALVGLAPYDFDSGRLKGHRCIYGGRLPVRNVLYMAALSACRYNPTLKVFYRRLAGANKKPKVKIVAVMRKMIVILNAMLRDNVAWQPNFA

SEQ ID NO: 255556 - protein, 316 aa, unidentified
MTIIGIDISKGWFDCFCTTRTIGKQFPNNPVGWEKFLTWTNGSAHIVMEASGPYYLGLATWLYEQKVTGSVVNPLVIRRYSQMKLSRTKTDAKDAGLIACYGVEQQPKSWKPPSKVRQALKQLMSLRDGFLRQQAVLNGQQEAFGQHSVEPLVEELIAEQREQIALQLVRIERRMEALATEHYDQQLQVLLRVPGIGNKTAIHLLTITDGFRRFDSPRKLASYVGICPRIWESGSSVKGRGSISKIGCPQMRKLLYMCSWTAKTCNPGCRQMYERLKARGKPEKVIKVAIAHKLLRQAFAVGKKCEPFKAKKAMAA

SEQ ID NO: 255557 - protein, 338 aa, unidentified
MPVAGIDLHATYLVVTIVSNEGFILQKPRRIRNSEADRLVELLEAHKPVEIVVEASGMWPWLFDRLDGPDTPVVLAHPKRLRAIADSNYKTDAIDAELLARMRLVDLIPEVFPKPPEQREQATLVRHRARLVRDRTAVLGRIHAELHSIGFTLPRGRLHTREGRTWLHSEAWPMLGPQQRLLVQTHERLIDQLSMMIKGLDKKVRHVGRRIPAVQLLETIPGIGPYRALLIVTEVLPISRFRSPKHLVSYAGLAPRSSRSGQSVHYGSIPAGANRWLRGAFVQAALSHYRATPDSWLSLFYEEKKERLGWRVARIAAARRLARATHSMLRTGQVWSHA

SEQ ID NO: 255558 - protein, 340 aa, unidentified
MVHVGVDLDKRSSQIAVLSEDGEIVQHRLANDAARLEKFFADLPPHTPIAIEASGTWWWLVDLLEELGHQPVLSNPKQTKAIAAARLKNDRVDAERLALLLRGDLLPRVWIPPTALREARELIRHRIQLVWLRGVLRNRLQAMLARRNLQPTSGQSWLTQRGQRELQRLPLGETPSRIREDYAALLPMLDAQIRRLDADLVTRWGADARVRRLTTIPGIGPFIAIVLVLELGDIERFASAKRVASYVGLTPRIRGSAGRVRAGHITKEGNRLLRWVLVLAATQAVRRPGPLRAWFHAVKKRRGKKVARVALARRLAEIVFHVWTQECDYFTVVRHGVVRG

SEQ ID NO: 255559 - protein, 468 aa, unidentified
MKRKSRHAKQQKASLLSEDLQLIEPDAAAIDIGSRSHWVAVNPQRASEPVREFGTFTTDLNRLADWLTECRASSVVMEATGVYWVTLYELLEERGFKVYLVDAHTVRHLPGRKKSDVVDCQWIRRLQSYRLLQGSFRPPQQIRRLRTYLRSRSKVLECAAQQQLRMQKALTLMNIQLHHVISDLDGVTGMGIVRAIVAGERDPKQLARLRDPRIRASRETIEKSLQGNWQEELLFDLKIALESYDHFQTQIAAYDEQIRQELKALPSKVDLQKQPLGAPRPKSCRTRPGTTQQQQFDLRQELYRISGVDLTRIDGVSLQTAQKVLFEIGTDVSAWSDERKFSSWLGLSPNHHISGGKVLKRKSRKVINPLSIALRLAARTLRNSKSALGANFRRLIAKIGMPKAITAMARKLAVLIYRMLKYGSDYVDKGMQHYERKYQETKLQYLRRQAARLGMQLVPNQGVATSVH

SEQ ID NO: 255560 - protein, 362 aa, unidentified
MCQSVIAKQHLQRRVTEMKITTIGLDLAKNVFQVHGVDDRGKTVLTRQLRRQQMPSFFAKLEPCLIGMEACSGAHFWARVLRSFGHEVKLMAPQFVKPYVKANKTDAADAEAISEAVTRPNMRFVPVKTVDQQAVLSLHRARSGFVKARTALVNQIRGLLSEYGVVLAPGIRQVRAGVPSIVEDAELDLPPMFRQLLSQLYQYLCQLDDQVQSIEQPLKNWHRSSVDSQRLEQVPGIGWLTATALVASIGDATSFKNGRQLAAWLGLVPRQHSSGGKPRLLGISKRGDAYLRTLIIHGARAAIRVVDRDRSPTGQWVREVSKRRPKNVVVVARANKQARIVWALLAHQRDYDALHTPVRQAA

SEQ ID NO: 255561 - protein, 373 aa, unidentified
MSETIVAYQSFVGVDLHKTTVTLVAVDANGELIAKLTIATKCIDKITDWLRSLPDPVAMAVEACPFVEWFIDRFRWCVFRMDIADATELARLRGKRRKTDPNDARDIAERLAAGRCPLGFIADEELMQLRKLGRHWRQLSHLLSRTKHAMRSMLHAANVAGPKVLDAAAAHRWFLAERHLLKPVQQETFCDFLDTLMLVERQRERLRRQITLANRSERFREIVALLKSVPGIDEIWACIIVAEIGPFDRFPNADALEFWAGMTADLKESAGRRQSGNITKAGSRTLRWALCKAGVTLCHSDAAQEAIRQRLIKRTGGIKPKANTAMGRRLLRILYAMVRDGKPYHNAQPVARNLAANKARAAKRARKIRKEAA

SEQ ID NO: 255562 - protein, 348 aa, unidentified
MYKVDPKADARSKHPAHSKLGGYTMEVYILGVDVAKAKFDVCLLWEEGAVHRVFPNNPNGFAALRGWLRKRGATQLHTCMEATGRYWEALATCLHQAGYTVSVVNPRRVKSFGESELQRQKTDRVDAGVIARFCRATRPKPWTPPPAELRQLQELVRRLDALKRMQTQEKNRLSNPGVTPLVEADIEDHLAYLRERIKEAERAISGHINAHPQLREQRDLLTSIPGIGETTAALLLGELGEVANYRSGRQVAAHAGLTPKHFQSGSSIKGKPHLSKIGNVHLRKGLYMCAIVAKHHNPIIKAFCERLLAAGKPTMLVIAAAMRKLLLIAFVVLKSQTPFNPNYQPCLP

SEQ ID NO: 255563 - protein, 354 aa, unidentified
MEAVSRMGVDLAKRVIQLHCVDRQERVILRRSIPAERFAEFMSRLQPCDVAMEACASAHHWARKLARMGQRVKLISPQFVAPYRKGGACCKNDAADAEAICEAAARPTMRFVQVKTVEQQGIATLHRMRQGWLEERTALINRLRGLLAEFGITIPQRIEALRRIPEILEDANNELPGIARSALYAAWGHLKVLDERMREVDRQIEQHAKQDDRASRIMALPGVGPITASALVAALGNAREFKNGRQFAAWLGLTPRQNSSGGKSQLGSITKRGDSYLRMLLVLGARSALMTAGRRTDRLSRWLQEVQGRLGWQKALVALANKHARIIWALLTRDESFRPNHVPACFTPMQPQEQ

SEQ ID NO: 255564 - protein, 313 aa, unidentified
MTDLSEYVGIDVSKAMLDVACFQSRAFQQFRNTPKGISKLVIWLLEIHPNLVVLEATGGLELACVAELMQAGLPVAVVNPGRIRGFARSIGQLAKTDKLDAMVIAHFAQATQPKPRKAPTPQEEQLSALLTRRRQLIEMLTAEKNRQHSARFGMQTDIQEHIDWLEQKLDQLDEEIQACIDQYPDWKQKADLLSSVPGVGRVTTVTLLGLLPELGTINRQQIAALVGVAPVNKDSGKRQRKRRVFGGRANVRSILYMAALSASNHNPQIRDFYNRLLKNGKEKKVALTACMRKLLVILNAIARSNQIIEASLA

SEQ ID NO: 255565 - protein, 479 aa, unidentified
MKKDAKTGTDRDGAAAAAEHGGDGAEVAEDRVQVVERAAAIDVAKGSGMVCTRVPGSRPDRRRQKVWRVGATYAGVIALMDHLRCEGIQRLVLESTSDYWRIWYYLAEAAGLEVWLVNARDVKHLPGRGKSDRLDCVWHCKLNERGMLRRSFVPPEPVRDLRALTRTRARLAQDQARHQARVEKVLEDALLKISVVISDLFGTSGRRFLDALVAGERSPRALAALGDRRLKATRRELEDALTGRFRDIHAFEIATHLRLIDAINAEITRLDEAIGQQLAQVPRTAPCCTACGLAGGGHAPGCAGEGTPLLSLAGRLDEITGVGECNARVIIAELGTDPSVFPTPGHAAAWARLTPRSRQSGETARPGRTGKGNRYLRGALGQAAMTAARTDTRLGALYRRIARKRGKQKAIVAVSRVICEIAWILICDPAARYHELGPDYYRTRSPARQTREKIREIERLNPGKKVILADAGPAVPGAA

SEQ ID NO: 255566 - protein, 387 aa, unidentified
MKKLYSKVACSGMDVHYEFSKVTFRDEAGGVVRRERLDHRDRERLRERIARWPKGLPVVLEASFGWGWLSDLLEEAGLEPHLSNCYKVEQMRKARGWVKTNEKDADLVSLLPFETSSWWEVWRAPPEVRDQREQMRFRADLVALQTCVKNRIHAVFHRHGIFHDFSDLFGGQGRAFLSELCLHNPTGLPPQAWLALRGQVRLLDHVRHQLADIERNLHRQWTTTPLVRRLKTIQGIGLVLAHVLSAEVGRIERFGNHKRLASYSLLAPRANDTGQADPTTAPLGRHLGTRGNRTLKWAFIEAAHGAVRSGGRWRAMFDRVTEGGRKDRNRGYIKVARELVKVVYVVWAKGVPYSSTPPARPGRGKNQKPSRSGTGQLCHPMVHALPA

SEQ ID NO: 255567 - protein, 341 aa, unidentified
MQKTKYFSGFDISADDFSASCITCPDNLVFQTQKFPNNLDGFNEFTILLSKHNIKPSELIICMEATGVYSENLSYFLVSKGFSIVIEAPHKIKNKTKDSPRKNDFIDALSIAEYAYRYTDKLSCWKPKGEIIEQIQVLLSTREHLTSQLTANGNALKTLKYKYYQTPLANQIYQQTIDKLKEHIKQIDKEIKFLIDKDDSFKKKISLIKSVPGVGLLLSANLLVLTKGFTEHLNYKHTAAYSGICPYEQTSGTSLHKPPRSRKAGPAKLRKLLYLAALSVRTHNQSFKKYFLRKVAEGKNKRLVLNNIENKLLKIIFAVINSGAPYMENYISINPVLLKTA

SEQ ID NO: 255568 - protein, 360 aa, unidentified
MKIVGVDLHAKQQSIAMLDTETGELTEKVIRHEGNVVREFYVGLEGPVVVGLEATGSMQWFLELLDELGIQYRVGHPAKIRAAEPRKQKHDRRDARLVLDLLEPDHFPDIWMPSTEQRDLRTLLRDRHQWVKMRARLQHTLQSIALNHALRKGTSLWTAAGQDSLQRLPLPPYTSQRRNQLLSLYAELQRRIQELDRQVEEQAGQRPQARRLLTHPGVGPVTALATEVFLGDPSRFTTAHQVASYIGMIPREYSSGQRQRLGNMTKQGNSLLRYLWTEAAMHAVRNDPELKRFYRRKLIQKGMGKARIAAARKLGIRLWIMLRDQIEYEEFCRRGKLRQNGEAHAGMPDFNSGPATTVTG

SEQ ID NO: 255569 - protein, 427 aa, unidentified
MKDVMYQPTLCVGADVHLDEIVLRAVDKALGHEVVEHFRVTNNLPGAQLAAATIAAVAAELGYARIEIGCEATGMLWIPFHRYLSTAPPLQPFELELVCFNPKLVAKFKDGLVLRSPKDDERDAFDVAARLRFGELPISYVPSDFWQGLRRLTRYRYRLSKAMSQEKMRFQSHAFLKCSDWKRVKAFSDIFGATSVALLTEFTVAEVQEMTHDQLVNLLTHRGHGRFAVPTATARAVREALRTSYPIDPRMDEMVTAALAAGWDHIRYLNRSMKRLDQLIARYIDPVPNPIITIKGLGAVITAGILAEIVDVLRFAEEKHLAQYMGLTWRKSSSGGFVSQNTRLTKVGNVYLRYYFILGANLLRQNNLEYKAYYWRKYQEVPKYQHKRALVLTARKLVRLVHALLTKNEPYVRPQTTSQDQEDDRLQ

SEQ ID NO: 255570 - protein, 329 aa, unidentified
MEVLHERCAGLDVHKKSVSGCVLVPEGREKRSFGTTTRQLRELADWLEGYGVSQVAMESTGVYWKPVYNLLEERGFQILLVNAKHIKAVPGRKTDLSDAEWIAQLLRHGLLRGSYVPSRPERELRELVRHRRTLIRQRAETVNRIQKVLEGANIKLASVASDVLGASGRAMLEAMVAGEEDPAQLASLARGTLKGKRAELEEALEGSLRPHQRLLLASLLRQVEFLDREIAGLDEEVARRMRPFEPALEQLDTIPGIGRRLAEEIVAETGTDMSRFPTEAHLASWAKVCPGNHESAGKRLSGRTGKGNPWLRTALVEAAWAAARTKGTF

SEQ ID NO: 255571 - protein, 366 aa, unidentified
MKKPSTKMVRRMGTLQDEQLTIGLDLGDRSSFYCVLNGAGEVILEAKVATNPEAMKKTFAKMAPSRIALETGTHSPWVSRLLSELGHEAIVAHARNVRLIGESRRKDDRLDAQALARLARIDPRLLSPIQHRSAQAQADLSVIRGRYALVRARTALVCSARGLTKSFGERIRGRNPKAFRPEMGEMLSPQLQAALAPLLSALEAITAQIREYDAQIEKLAEESYPDVALLKQVKGVGTLIALTYILTLEDPRRFEKSRDAGCYVGLQPGRRNSGRSEPQLHITREGDSYLRMVLVQGAQHILGPFGEDSDLRRWGLKLAERGGRNGKKRAIVAVARKLAILLHHLWISCEAYEPLHNTRRRRLAAA

SEQ ID NO: 255572 - protein, 385 aa, unidentified
MTTAHRTDAIAPPAVRLYLALELGWTEYKLAFTIGHGQAARLRTIKARETESLLSEIVKAKRRFRLPDDAPVVSCYEAGRDGFWLHRWLAATGIENVVVDSASIEVNRRKRRAKTDRLDAAKLVAMLLRYHAGEGKVWSVVRVPNDGDEDARQLHRELMELKDERTAHVNRIKGCLASQGLAAEVTEDFPARLELLRCWNGLAVPAELRQRLLREFERWRFVRQQIVDLEKERRQRIRRQASPQVEKVRTLLTLRGIGLNGSWLLVYELFGWRRIRNRRELAALVGLTPTPYDSGGNSREQGISKAGNKRLRKMLVELAWCWLRWQPDSALSQWYAARFARGGRRARKVGIVALARKLLIALWRYLEHGEIPQGVKLCDWETKAA

SEQ ID NO: 255573 - protein, 389 aa, unidentified
MKETIYIGIDIAKYKHDFCIISSTGEVIVQNNSFENNKKGFQLFFSYLKPYNKADVQILFESTAHYSMNLELELIDQGYSFMKMNGLIIKQFFKAQTLRKTKTDKADAFALTHYLMANTYKPNSNRLYHIYSLKSLCRTRDRLVKERSKFKVYITNELDKSFPEIKKFFDNKISITLLYILEKYKNKNKIALMKDYDSIRKVSAANFSFTRFLLLKQLAKESIGHPTETSDFLIESYVKSINCLSEQIDSIEKQIIEAVRKLDTHILSIPGIAEISAGSIIAEFGDIKNFESPEKMLAFAGLEPSIRQSGTLSTEGHMVKHGSGYLRNAIMRVVNSLVMHDQVFNEYYNKKRDEGKHHLVAQSHVAKKLIRIIYTLETKGIDYDINFVK

SEQ ID NO: 255574 - protein, 415 aa, unidentified
MPHQFTAGRAMSAFDQDHSLIVVIEMSLSTWLVTGLLPGVERQPLKKLHPDPDLLWSLIDRRRQECQASGREIARLVVAYEAGRDGFWLARWLEARGVEAYVIHSSSVAVSRDRRRAKTDRLDAALLLRVLLGWLRGEAGHCSMAATPSVEDEDARRPTRERENLVGKRTRIVNRMKAAFARLGIRDVNPAQRKAFEKLDGLRTPEGRVIPPLAMAELRRDIARLRFVENQIKEIEQQRMVRLDVAKPDEERANGMVRLLTRVVGVGVETADMLAHEIFLRDLRDRRAVARYAGLTGSPDESGSKRRERGLSRAGNPRVRRGMVQLAWRFLVFQKDCALVRWFRARTADAIGRRRMSLIVAFARKLLVALWRLAMGSEAPVHNAHCAFGLPKKVSTPVFVPLPPPARRKVNDQGH

SEQ ID NO: 255575 - protein, 405 aa, unidentified
MVDIMVSDFMKGRYNLMKIFVGIDIAKLNHFAAAISSDGEILLEPFKFTNDADGFQLLVSKLESFDKNSIIIGLESTAHYGDNLVRYLVAEFYQVCVLNPIKTCQMRKNNVRKTKTDKVDTFVIAKTLMMQDDLRFITFFDLDMMDLKALGRFRQKTIKQRTRLKIQLTTYVDQVFPEIQYFFKSGLHQHAVYALLKEAPSPKEIASMHMTHLANLLKVNSHGHFTKELAKELRVLAQKSVGANDSAISIQITQTIQQIELLDSQLEKIEAEMTDIMKFNDSVIMTIPGIGYINGGMILGEIGDIHRFSNPNKLLAFAGLDPSVYQSGNFQAKTTRMSKRGSRVLRYALVNAAWNVVRNNATFKAYYDAKRAEGRSHYNALGHCAGKLVRVIWKMLTDEVEFNLE

SEQ ID NO: 255576 - protein, 350 aa, unidentified
MTIVENTTITVTGGVDTHLEFHVAAAVDANGGVLGVETFDTTTGGYRRLVAWLAGFGEISLVGVEGTGSYGAGLARHLAGKGIRVVEVDRPNRQARHRAGKTDAVDAIAAARAALTGTATGVPKSRTGNIEAIRVLMVARRSAGEEWIAIVNQMRHIVFCAPDDIRARFIDLSPVRLAKTAAALKPRRTSGDIVRYTTLSTLRELGRRAMFVREQKLRLGVEMRPLLRETAPALLDVFGVGYDTAAKLVIAAGDNPHRIRSEAAWAHLCGVAPIPASSGKVQRHRLNRGGNRQANSAIYRIMLTRMSNDERTRAYIARRTAEGKTMGEIARMLKRYIAREVYKTLPTTIA

SEQ ID NO: 255577 - protein, 332 aa, unidentified
MNYVGMDVHKLFCQTCVLDEQKEEIANDKVRTDRDSIERYVKNFDDDTKFAIEATIRSRFVYRILTAKGFEVKVADPKALAAITRSKKKTDLNDARILAKMLYLDEIPETYVPDERIMKIRDLTRNRKQLVERSTAIKNQIHATITEEGVWIPPKTDIFTNERKGWLRSLGMLSVDINLNCLDVTGENIKHYDKLIDEVFNETPEAQLLETIPGVGVLSAVSIIAEIGDASRFSSPDQLCAYSGLVPSVRQSGSSAHYGRITKQGPPQLRALMIECMHMHAQHDPDSRLSGFFQRKTNERGRKKAVVAGGRKMLRIIYYMLRDTERYHSQGS

SEQ ID NO: 255578 - protein, 426 aa, unidentified
MRDIGLDVHLDFCEVAICEAGRVRSAGRVETTPERLELFAGSLGPDDRVALEVTGNAWEIARILEPHVAKVIVVSPADTGMRQARAKTDRLDARTLAKLLAAGELDAVWVPDRPTWVMRRRLSRRGQLVHARTRVKNEIHAVLMRQLTGRPPVSDLFGNNGRAWLAELALPVEERETVDGGMRQIEFLDSEIAQVESLIATAALESADIKRLMTVPGVNVIVASSFMAAIGDVGRFKGARNLVGYLGLDPRVSQSGSGPATHGRISKQGSSRARHALVEACWSAVRQPGPIKAFYERVRARRGHRIAIVATARKLACLFWVLLAREQDYAYQQPSLTKRKLRLLEITAGAERYTPKANGIWSANTAVRDAERALAHQAELAYKNTVRDWHAAQAKKQPAKVGASATPGRASNKPSKGKAARQTTSP

SEQ ID NO: 255579 - protein, 429 aa, unidentified
MNSTQNKKIEQVKETTMIVGIDVGSEKHYFRAFNWRGIELTRKPVAFSNSMEGFNSFYNSVVELMQKNELKEALVGIEPTGHYWFDLGQFMGEKNIKFVMVNPHHVHKTKELDDNSPSKNDRKDPRVIAGLVRDGRYFYSYMPTGVYAELRNASNRRFVLVEEQTRSKNRLQKWVTVYFPEYKGIYTHIDAKGGLLVLKQAPTPEEIVRLGVEGIIKIWKDAKLRGNGHKKAMLILNAAMKSIGLKAGLTEARMEIQDLIEDYELQTKRLERVNDLIKELCQQIRYADKLLEIKGIGITTVAGFIAEVGDITRFDSTKELQKLAGLELVADSSGKHDGKTKISKRGRKRLRYLLFEAAISVVGKNEEFKEIHRYYTTREKNPLKKMQSLIAVACKLIRVFHVILTKGISYDASKMLKDIRRPGEQLKAA

SEQ ID NO: 255580 - protein, 379 aa, unidentified
MSMPNFFVGLDVHKDTVTIAVFRNRDPEPMRVDRLPNEHKRLRRYFQRLSAEGSVRACYEASGAGYVLQRALTEWGIDCELAAPSLIPRRPGEHRKTDRRDAIKIARDFRDDRLVLIHIPTETDERVRDLVRCRETFQREIVRSRHYILKFMRRRGFIYREGTNWTQRHLNWIRQVLAPGILAEEDAVVLGEYLALLEYKLQRRDELDGRIEALALTPRYKPIVDRIRCFRGFKTQAAMVLATELGDVRRFEGPRQLMAYLGLVPGEDSSGDRRRLGPITKAGNARVRHILIQAAWHYRRRPTVGATLRRRQQGQDPDVIAHAWKCQHRLYKVFHRLAAKKPRPVAATAVAREMVGFLWAVLNDIDVAQLQDSEVSRAA

SEQ ID NO: 255581 - protein, 350 aa, unidentified
MDKELYIGVDVSKQTLDLAYYDGESIDWKKAHIKVSNNNAGFKKIGSWVAKVSKGVDIVLFCMEYTGLYTQNFRLWLEEKHYIYRMVEPRKMHRFEPDLDDGLRSLDHIKTDELDSFRIAIYCEQNHRKILRNPSKLPPPVYFKLKRLLAERKQTVKQSVLYKQQLHDICAYDTDLSVERKNGQLKTLNDALKGIDNEIDMYIKEDADISKNFSLLTSIPGIGRVVALETIVLTENFMAIDNPRKYACYIGVAPFKKESGTSVRKGSSVSKKGFKQAKADLSIACLVCMQHIPNIRDYWERKRKEKCSGIVFNAIKFKMILRMFAVIKRGTPYVETDNYRNGKNKQPEVN

SEQ ID NO: 255582 - protein, 326 aa, unidentified
MEHELHYIGIDTAKEKLDVDVLRPDGRHRTKKFANTTKGHDELVSWLKGHKIDHAHICIEATGTYMEPVAECLYDAGYIVSVINPALGKAFAQSEGLRNKTDTVDARMLAEFCRQKRPAAWEAPHPLERALRALVVRHQALTDMHTQELNRTETAREVQRPSIDAHLLWLEAELKRLEKQIKDLADDDPDMKHRRKLLESIPGIGEKTSAVLLAYIGLKDRFAHARQFAAFAGLTPRRYESGSSVRGASRLSKAGHVSLRRAFYMPAMVATSKTEWGRAFRDRLAANGKKGKVILGAMMRKLAQVAYGVLKSGGPFDASRHNPVAA

SEQ ID NO: 255583 - protein, 400 aa, unidentified
MRFYTRQHRHYCGVDLHARSMYVCILDAEGAVLVSKNIPASPEPFLELIAPYREDLAVAAECMFTWYWLADLCEDEGIVFVLGHALYMRAIHGGKAKNDRIDAHKIAALLRGGMMPQAYVYPRAMRATRDLMRRRNHLMRKRAELLVHIQNTNSQYNLPAFGVRIAKPHLRREAASHFPEAAVRKSVELDVSLIDHYDRQLPELERYIESSAHGHDPVALALLRTVPGLGEILGLSIVYEIERIERFQRVQDFLSYGRLVKPTKESGGKILGHSGRKIGNAHLKWAFSEAAVCFLRGNRRAQALRVRLAAKHGKGKSLAIIAARLARAVYFMLKRRTPFDAERFFAHSGSAGTKGSSLNVLTGAAVQGARPERSSTQLTVPASTAAELGRKRMRPAAQPR

SEQ ID NO: 255584 - protein, 323 aa, unidentified
MTDMLGIDVSKETLDADWAHGERKRRRTFQNGPGGWQKMLAWLKDGGGSHVHVCMEATGRHSLGLALALHDAGYVVSVVNPAQIRDFARTKLGRNKTNKVDAALIREYVELFKPTPWAPSSPAMRRLCELQTVRAGIVGGRTEWRNRIGSGLGDDTATKLAAATIEHFTGQLEAVDRAIAETIDQDAELRGRRDLLLSVIGVGETLAALLLAEMPEPGVLRRSSEVVAYAGLNPSHHRSGTSIDRPTRISKIGNAALRSALYMPALAAMRFNPAIAALRARLQSAGRLKPKQIVVAAMRKLLVLCFGVLKTGARFDPRIAMPT

SEQ ID NO: 255585 - protein, 355 aa, unidentified
MDSTKYIGMDVHKETVSIAVMNSAGKLVVESIIETKAATILQFIQGLRGNLEVTFEEGTWAAWLYDLLKPHVTKIVVCDPRRNALLKEGNKSDKVDARKLAELLRAGLLRPVYHGENGLRTLKELSRSYLTISKDLTRVMNRLKALYRGWGISCEGATVYAPHHRSEWLGKITEAGVRRRAEFFYQQLDALQALRQQVRRDLLAESRKHSERKLLRQIPSIGPIRAALLMALIQTPHRFRTKRQLWAYSGLAIETHDSAQYRYVAGQLQRSKKPQQLRGLNRNHNHDLKAIFKGAATKASSGAGPFHDFYEALLAKGMRPSMARLTLARKIAAITLIVWKKGAHFDAEQLKSQAA

SEQ ID NO: 255586 - protein, 323 aa, unidentified
MSKNTNFFGIDISKDVFDVMDNKDQHFQFQNSIKGFRAFKKILSVDSICVMEATGYYHLKLAYYLLENNIKVSIVNPLSIKRFIQMKLSKIKTDKADAKMIRLYAQNNTIKLWEGKSKNQKETLQIAGLLDVYTKQATALKNKLHGEKTLGTPSQLVVKSLKRSLKMIKKEKDLLEQKLLELVKEDNQQLLTNLESIPGLGRKTATMLIVFTDGFKRFDSAAALCSYCGITPIIRKSGTSVNSRPRISKMGNQKIRNLLFMCSFSASKRNKACNDIYNRITNKGKSKKLALIAVSNKLLKQAFAIAKSGIPYEQNYRSVLPVH

SEQ ID NO: 255587 - protein, 324 aa, unidentified
MSFSFSGVDENEQPVLRRQIRRGEVAKFFAKLAPARIGIEACGASHCWARVLRGLGHEVMLLPPQYIKPYVKRRKNDKIDAEAICEAMSRPTMRFVPVKSAEQQAALTMLGVRDLLVKQRTMLINAIRGHAAEFGVTAPKGPQQICELLRRLVVEGSVPALAREMIGVLAGQLEALNTKLREIEARLMAWHRQDQTSQCLATIPGIGPIGGVSFALKVPDPKGFRSARHFAAWLGITPREHSTGGRQRLGKISRAGDEGLRRLLVLGAMAVIQQAKKGRAAPWLLGLLARKPKKLVAVALANKMARIIWAMMVSGETYRRQTAA

SEQ ID NO: 255588 - protein, 400 aa, unidentified
MINFYFLFFIKFRHSKNELTITNNRPGFIQLLHELTAFSKHPQIIFEATGVYSRTLQSFLEDYGYDYVILNPLKAKKEMDMGLRHNKTDKTDAYHLALIQRLYHHPINQLQSQTYKQLNALSRFYDQLTADLVMAKNRLHQALQSTFPEIENLFSSAKGKNYWQIVVRYPHCDLVRREDKKQLINWLMSLKGIAFKHALRTADKLIELAYQAYPVVSCSSIEVEQVQYYAHRLLNLSDQRENLIARMVKLAKSLPNHDLENLESIPGFAQTTAVRVLAELGDLRRFSNPNKINAFIGIDPGRYQSGEMDSNLSITKHGNAVARKLLYRAIGQIDNAAKTNPCHIADYYESKKLSSQTKGFKKIAIASIHKLIRTIYALIINDQPYDYNVATHNQKDFSRN

SEQ ID NO: 255589 - protein, 434 aa, unidentified
MTATDSSATTRILVAIDIAKAKHEVLVELPTGKRRKMIVRNQLSDFRQLASYLKRLEGALEIAFEPTADYHRNLAYFLKAQGFAVKLVSSIAVARTREALHNSWDKNDPKDAQVILHLLRNGNTQYFYDPVIEQTNDLQELSKTHFQVSLRKTRVQHSLLNHYLPLYFPEAERFLSNSRSIWFARLLIEFPTPQAITQLTENEFIERASQLLWRKQAKAPILRALYAKAQESVALPVPLESQAIATFRLTLAQHLELCRIRAELEETAHELLQSQLDYQILRSVPGVGPIIALTVLAEAGDLRRFGHERQFLKFCGLDLATSQSGAYRGRTQLSKRGNSRLRSALWMAARRATHMQENTFRQKFSRYLRSDPTNTDLRRKAYTACTAKMARTIYGLIKHQQFYRAYREDAIPKPGGRTRSHGPLRQAASGGLTS

SEQ ID NO: 255590 - protein, 316 aa, unidentified
MLYVGIDVAKNKHDVTALNVPGKTVLKPLTFSNNKAGFELLDLSFRQLNQDCLIALKLLSDPNREQFHFLHEQGYKVYTCNPLLIKEFAKSLSLRKTKTDKKDAHGIALKLLSDPNREQFQHDNRQVELKILARHIHRLKKKQSDWKVQYTRCLDIIFPELDKIVGKHSEYTYQLLTRYPNPQKRLEAGFDKLIEIKRLTASKIQDILSVAPRSIGTTSPAREFEIIEIIKHYKRLIDKAETCVNDLMAEFNSIITTVTGIGGRLGAVILAEIRNIHAFDNPAQLQAFAGLDSSIYQSGQIDLAGRMVKRGSPHLR

SEQ ID NO: 255591 - protein, 404 aa, unidentified
MEIRSIGIDLGKTTFHLVALGRASEVLMRRKFTQKQLLTYTANLQACLIGLEACSGAHFLGRALREQGHDVRLIPAQFVKPFVKSNKNDFVDAEAIAEAVERKNMRFVPIKTDDQLDLQAIHRVRDRLIARRTAVINQLRAFLLERGMVFAKTPAKLRIAMPEILENAENNLTPQMRNLLELLWEEWKMVEQQIGVLSHELERIADADAGCSRIQQIPGIGPVVATAIVAAIGNGAAFRKGREFAAWLGLVPRQYSTGGKARLLGISKRGNPYLRKILVHGARAAVLRIKRDQAPIGAWMDALERRAHRNVLIVAFANKLARIAWAVLSTGEPYRPCTSVAIPASENIYSWFTTRLPTKVCGGITRDERRVTTACLRTCWTYRFTTTARLIRTDTRATHQGQEY

SEQ ID NO: 255592 - protein, 429 aa, unidentified
MVGYSELRRSPSVFVAIDVSKSRYDVLIEPPGERRKRLILGPTKAAFEQFADLLKQYQLPCHIAFEATGDYHRPLAVFLQRQGFALHLVSSIATNRTREALFNSWDKNDPKDAQVILHLLKTGGTQTYHDPLVNGYNDLRELSATYQQMCLAKVRLQHSIKTHFLPLYFPEAELFAGTTRAEWFVQLLLLTPCPAAVVRRSKATFIRLASKIKGRKVDKVRWLGDFYEAARTSIGLPVGEDSEAMRMFRLVLEQYAALIALRRRLENDAARKLAGHPDYQRLRTIPGIGPVLALTILAEAGDLRRFGHHRQFLKYCGLDLCTDQSGKFRGSTHLSKRGNARLRYAFWMAATNAIRTRENSFRAKFARYVRSDPTNADLKRKAYTAVAVKMARVAYGLVKNAIDFRRFYEATEPSGGIHSPRAVEALATS

SEQ ID NO: 255593 - protein, 306 aa, unidentified
MLLDGKYQSRQFENKPSGFSLLSKWVTSFKKPAYLCLEATGIYGLALAKQLYKTNQKVIVANPLQTHAFAKMEMVRNKTDKADAMSIARYCQYLFNKGEIDKDLFIPRSAVFERVQFLVTRLDQLSKMKSQENNRLSVSLDKTAAQSVKSMLMSIDKQIASMKKEITRIVKQDEALAAQLKLLVSINGIGDKTAWALLAYIGDITLFENAKQISSYAGLNPSITQSGTSINHSSLSKTGSARLRKSLYMPAMVAIRFNPLMMAFYNKLLSKGKPKKVALAAVMRKLLVLAYGVLKSGKPFDVNYQH

SEQ ID NO: 255594 - protein, 346 aa, unidentified
MFAGIDTHKDTLAVAVIDTGGRVITMCELPNQDDGFTELAALMCRHQVARVGIEGSTNFGWAAAMLLLSEGVNIVEVPPLMTSRERRSRPGQGKTDPVDSVAIARITARETTLPPVRPMTGPAADLRVLMDYRDQLVTERTATANRVHSDLGWLRPGYQHQLPRLTNPAHLRQGVDLLAGDASVRAAVTRNRLTRMIAINAELRALRLQITALLTASGTTLPAYGVGPFVAARILAEVFDVRRYPSRHHFAAANGSAPIPASSGRTVRYRLNRGGNRQLSRALYTVAITEIRADTEGRAYYLRKRSEGKTSREALRCLKRRLSDVVYRTLRADLATTQRPQLIGPA

SEQ ID NO: 255595 - protein, 388 aa, unidentified
MQTAADHPEAPTAIRHDLGAIFISLELSRSTWLITSLSPGGGEKMSKHSVRGGNVAGLLERFAQLQEKARARTGRTFPIIVIQEAGLDGFWIHRVLQNEGIESHVVDPASVATSRRRRRAKTDRIDGEALLRTLLAYKRGEPRVCAMVKAPTPEEEDRRRLCRERKVLTNERVQHVNRIKGLLFGQGVSGYEPLRRNRRQQLNELRTGDGRPLPKHLKTQISRELDRLELLLEQIKAVETERDALLAAQKVALPGPAAMLLDFKGIGPEFTAVLWSEGLFRHFDNRRQVASYAGLAPTPWQSGSVDHEQGVSKAGNPRLRTTLIQLAWLWLRHQPQSALALWFKERVARNGGRHKKTTVVALARKLLVALWKYVTVGVVIEGAVMKTA

SEQ ID NO: 255596 - protein, 371 aa, unidentified
MAKASTFVGLDVHKNSIVVALLRSGQHEPLEWKLANEPGAIHRLIRKLERESEGGLQCCYEAGPTGYVLKRQLDQAGIACQVIAPSLIPVKPGSAIKTDRRDARKLAELLRAGMLTEVTPPTEDEEAVRDLTRSRDDAQRDLTRARNRLSKFLLRRGCVYAIDRRPTWSQKYRAWLRALTFERVADQVIFEDYLLAVEQVEGRLEALTDRIEGFAEQAPWRERTQALRCFHGINTVTALALVAEIHDPRRFPHPRKLMSYLGLVPRESSSGMRERRGGITGAGNRHVRRLLVEAAWHYRHKPVVGRALRQRRREQDPKAIALADRALRRLTLRQRRMLYQGKHSNLVNIAVARELVGFVWNVLHTHAAAQA

SEQ ID NO: 255597 - protein, 412 aa, unidentified
MEMVVERPAALDVHKEQVTACVRVPGEGRSREQHLAEFATTVTGLLTLRDWLAALGVGQVVMEATGVYWKPVWAVLEDEFECLLVNARHVKQVPGRKTDIKDAEWLCQLAEAGLLRASFVPPKPIRALRNLTRYRKSQIMERSREASRLHKALEDTGIKLDCVATDILGVSGRGMLDALVGGTTDPEILAELARGQLRKKLPALREALEGRFDHLHAAWIGAILAHLDFLDEQISSLTEVIGEQIAPFERAVELLCTIPGVQRRNAEVIIAEIGADMAVFPTAGHLASWAGICPGNDQSAGKRRSGRTRNGSKWLDWALSESAISATRSKNTYLAAQYARLKPRRGHKKALGAVKHSILAACWHMLSTGELYNDLGGDYYRRRDPERATKRLTAQLEALGHKVTLEQLPDAA

SEQ ID NO: 255598 - protein, 343 aa, unidentified
MTLIGCDLHARMQQVAVLDTGTGEIQEHQFPHHGDAVERFYAALPPPVTVAVESTGYSLWFHTLIRQLGHTLIVGDAAKIRAMVVRKTKTDRRDALHLLELLRHDRLPTIWVPDPATRDRRALLAHRMRLVRIRTTVKNGLHAIALSHRLVEGSKRLTKPRLAVLQGLSLAPYTARRRDESLELLHWLDEHIRQLDDQVAEAAASDPAARRLLTHPGVGPVTALATIVVLGPVGRFPGSKEVASYVGLAPALHASADTHHLGQITKQGNPFLRLVLVQAASIAIRYDEDLHRLYMTLHRRRGHAKAKVAVARKLLIRLFIMLRDGIDYDEFRRRGRAAQPMPT

SEQ ID NO: 255599 - protein, 348 aa, unidentified
MSQSKQYVGLDVSLKETSICVIDDADKIFWRGQVDSTPEAIASAIKQHAPHAVRIGLESGQLSSWLFHELKQAGLPVICVDARHAKAALSLKVNKTDANDAFGLAQIMRVGWYREVTVKGLDCQAVRALLVARAQIVSQITTLKNCVRGILKTFGRVLPKGLRSQFPARVRAAIDGHQMLGTIIEPTLRVLEAMRVQLRVYDKAVIQRARSDDTARQLMSAPGVGTVVALAYITGVEDPARFKRSSSVAAYFGMTPRRYQSGEVDHAGRISKCGDGMVRGLLFEAAKVLLSRSARPSALKTWGEALGKRIGAKKATVAVARKLAVILHRMWTTGTTFQWNAEAASSAA

SEQ ID NO: 255600 - protein, 357 aa, unidentified
MIAMKYYTSTTEFNCGIDLHARQMYVCVLDRTGKKLVHTNIKNNDFDFFLKLVAPYRHDLTVCAECMFGWYWLADACQAAGIPFVLAHALYLTAIHGGKNKNDRLDSEKIAHLLRTNLIPPGYVYPAAQRPLRALLRQRLLYVWHRSELLARLQSHQLAYNRPTPRQTLYNRQAWSESLLTAEPDPVRQLALQNDLALVRHYDAQLALLEKELLKLTKQTAGRDFTLLQTTPGIGDYLGLTILHEIGDIARFPTVKDFLSYCRLVKGTVASAGKIKGLRGAKLGNPYLRWAFGEAAAVAKRDPLVIGPLAQRLEARLNNKFKANTILAIKLARAVYFMLKTKTVFDPERLVAALSKN

SEQ ID NO: 255601 - protein, 420 aa, unidentified
MDVVLERCAGVDIGKDEVVACVRTPGPKGKGRRKETRTFPSFTGELEAMADWFAAEGVTEVVMEATGSYWKPVWYVLEERAFELKLVNAQHVKFLPGRKSDVLDAEWLAELLEHGLLRGSFVPPLAIRELRDLTRYRKRLIQAHTSECQRIQKTLEDAGIKLDSVASDVLGVSGRAMLHALVAGERDPEVLAELAKGRLRKKIPELRQALRGRFRDHHALLIGLCLEHTAHLEAAIAQLDERVDALFAANTSEAGVAFERARDRLDTITGVGKRAAETIIAEIGVDMSRFPTAAHLASWAGMAPGTNITGGKRQSGKTTKGDVWLRDILCQCAWAAARTRDTYLSAQFWRLARRIGKKKAAVAIGHSILVISWHLLTNDCDYDDLGGDYFQRRTNPDRRRDHLIEQLHGLGYQVTLKKTA

SEQ ID NO: 255602 - protein, 346 aa, unidentified
MTIVERGRTVIGGVDTHLDVHVAAALDPIGGLLGVESFDAAPRGYKAMLEWMGAFGTVSKVGVEGTGAYGAGLGRFLRRAGVEVIEVDRPNRQARRSKGKSDSADAVEAARAVLSGRAAGAPKSRDGSVEAIRALLVSKRSARHARSRALHQMRQLSYTAPDQLRSRFKGLSITDLVDHAAALRPRASGDPVLYATKVSLAALGRRVQSLEDEIADVDELLTDLVTQSAPQLLGLYGVGVDTAATLLVTAGDNPERLRSEAAWAHLCGVAPIEASSGKVTRHRLNRGGDRHANQALWRIVMTRLAWDPRTRAYLERRTKEGRSKREVIRVLKRYVARDVFKYLPRA

SEQ ID NO: 255603 - protein, 341 aa, unidentified
MRYIGLDVHKDNITACVLTSTGKPKFEKNFIKDSESWNLSELMEYGDKEGFCVMMESGTYAYQPFRYFSDRGVETHVVHAQALKVITQSDKKTDRKDAQTIARMLRLWKKGDIDLQMAFMPTREQCELKDICRYREEISKKIGDETRRIKSHMSRNCEHLPEAYDNFQTQRARNYVKFNFSSDITLMSRMAELERLFEERGSIQKEVESRLPGSREVELLTTIPGVARQTAVQIMSMIVDIDRFDDSEKLCAYFGMVPRVRDSGGKEHHGRMTKNGDRMMRAIMERVTESHVRNCDSSVTKYYKRKCSEMGTKKALITASRKMLSVIYAMLKSGSDFRLAA

SEQ ID NO: 255604 - protein, 320 aa, unidentified
MTSRGAEKMQNDTIGVDVSKDRLDAHRLADGASRRFANDKCGRKAFVKGFAQTPAERLVFEPTGPYHRAFERALGAAGVPFVKVNPRQARRFAEAIGKLAKTDRLDGAMLARMGAMLELKTRPPQSEALLELKELHLAREALVKDRTAAKNRGKVLAAPLLKRHNAQRLEQIKRQITAIEAAILEQVQADPDLAQRFAILTSIPGVSAITAFALLIEMPELGALEPGQAASLAGLAPVARQSSRWTGRAFIRGGRANVRQAVYMPALVATRFNPDMKAKSKQLINAGKPAKVALTAVMRKLILLANALLKANRSWAPKPA

SEQ ID NO: 255605 - protein, 339 aa, unidentified
MKLYTGLDLHSSNSYLGIIDETGKRVYKQKLPNDRERIVAALSPYRNDIAGIVVESTYNWYWLVDLLMGAGYHVHLANPAAIKKYTGLKFADDQHDAFWLGEMLRLGILPEGYIYPLEDRPIRDLLRKRMHLVRLRTSLIVSLQNILSRNNGFKLKTSDVKALTEDRVAPYLAGNEDLALSGMVSKESIDFLTRQIKKIETVIEAKVELKPPYEKLQSVFGIGKILALTIMLETGPISCFAKVGNYVSYCRKVSSKWISNDKVKGKGNTKSGNKYLAWAYSEAAEHARRSYTQARAYYNRKMQKTNFMAAHNALAHKLARAAYYVMRDEVNFMPEKIFV

SEQ ID NO: 255606 - protein, 400 aa, unidentified
MKGFFTYEIIGIDIGKNKHFFCVMDQQTGEIISQPVSFSNDKEGFDFLVKKIKSYPKDSILIGMEDTGHYHFALLKYLLDLQYTVALINPKTTDFNRKMQGGITKNDKLDTINICDVLDTPERKKQYRITKVNSFDLYEQKQLTRHHHNLKEEENVYKNRLQKCIDIVFPEFNKLFNSKYGIVYMNILKMFGSAENIANTDIRTIRKCFEIEGRGNRISLTPERLKECARSSIGISSSAEVIQIKHLTAQIELIEEQLTEIDKKIEEFSIQNNSPILSIPGISHFSGTSILAELGDISNYSKPSQIIKFAGVAPLHYESSQFNAQHTAITKKGSKYLRKTLYQIILPVIRHNPVFNKYYQLKISQGKGHRCAQGHCVRKLLRIIYHLLKTNQQFDPQLLR

SEQ ID NO: 255607 - protein, 316 aa, unidentified
MNTQVFVGLDVSKQHLDVAVRPQNRHFVTPNDDRGIRQLVKRLAALKPQLIVLEASGGYEFLATAALAEAQLPVALINPQAVRKFAGATGKLAKTDKIDAQVLAHFAEALRPEPRPLPDQEQQVLKAALQRRLQVVKMIGQEKNRLEKTYLPALRQDIQAHLAWLQQRLEQLDRDLDDQIRQSPLWRDRDRLLQGIPGIGPAVSRAVIAQLPEAGMLPGKKAVALAGVAPYNRDSGRWRGKRMIRGGRSYLRHMLYMAAVVASRFNPVIRAFYQRLLAAGKPKKVALTACMRKLVLIINAMLKNNQPWNQLIAQVP

SEQ ID NO: 255608 - protein, 457 aa, unidentified
MRFERGLFFLAAPATCPDCAESTYRSVSFARWFSALSYDGRCEVSQLLRWVGRAIGLDLHRDFCEIAICEDGVVRSAGRVSITPEALEAFAASLESTDRVALEVSGGAWEVARILEGHVQRVIVVSPDDTGIAQARTKTDRLDARALATLLWRGELDAVWMPDERCRVLRRRLARREQLVRSRTRVKNEVHAVLMRRLQGKPPCSDLFGVKGRKWLRSLQLPIEEAETVQSALRQIAFLDREIADVERLIAKQMLHSPDAKRLMTVPGVNLVATAAFLAAIGDIGRFSSSRRLVAYLGLDPKVRQSGEQPARSGRITKRGSASARWALVEAAWSVVNQPGPLRAYYRRIRARRGHGKAIVAAARKLAVLFWCLLTRGEDYAHQQPSLTAQKLRRLELTAGAPVCKGKPSGVWVTHARMRQAEKQLAAQAQASYERTVRDWQAGKGKKAGASVTAERA

SEQ ID NO: 255609 - protein, 430 aa, unidentified
MGLIVPSTMDAEQPDQPVPYEWFVGIDWGSKQHQVCVLDRDRYRVGERPIDHDGASLAQLAAWLWTVSAGQPHRVAVAIEVPRGAIVEGLLERGFHLFAINPKQLDRFRDRHSVAGAKDDRRDAFVLADSLRTDQPSFRRLQVDDPQLLRLRELSRAEESLLEDFRRSANRLREQLHRFYPQMLQLCSAADKLWLWDLIDLAPTPAHAALLSEEQVQRVLKTHRIRRVTAQEVLACLQEPALPVAPGAAEAAQAHCEFLLPCLRVLADQLQACSRQVSALLKTLAETPVDGESPSDVAIVLSLPGVGRKITAWLFAEATQPLAERDYQVLRTHSGVAPVTKQSGKRRVVVMRHGCNPRLRHALYHMARMAMKCDAHFSSVYVTLREKGQRHGQALRNIGDRMLRILMAMLRNRTCYDARRIRREPVVQMG

SEQ ID NO: 255610 - protein, 372 aa, unidentified
MESILYVGMDVHTSNYTLCTYSIEDDKEFGLVKFGPDHLNIVRYVKRLKEHHGQDTRIVCGYEAGGLGYSLYRILTANNIECVILAPSTMPKAPNERKTDYRDAAKIARCLAYNSYRSVYIPDAEDEAVKEYIRMRDNTKDHIKQLKQRILALCTRWRKEFNGTKKFWTIAHMKWLQHLEFENPVAQEAFDEYVIQLNEANARLKRYDERIKKWAELPRYAEKVSKLTCFCGIKTHVALATIAEVSDFDRFPNANRFASYLGLVPGEYSSGSNVNRLGITKQGNSHIRKLLTEAAQCYARALPGKPSAELLKRQEGNDPKVIAYANKGNERLKRKFRSIAARKPKPLAVTATARELACFIWGMMTDHLEQVY

SEQ ID NO: 255611 - protein, 421 aa, unidentified
MSKQDVKDEVFYLRAAGLDLGKRSLVACVRVPHPSLAGRWSLETERFGTVPAEVRRLLDWLTTRRVDVVVLEATSDYWRSVYYVLQPQLNLMLVNPQHLKGIRGRKTDPSDAAFLARAGASGMVLASFVPPRAIRELRDLTRRRTELTVMKGSEAQRLEKELEDTGMKLTSVLSDVLGVTGRAILFALIGGERDPRRLAALAVAGARKKADQLIDALDGQFTDHHAWMCRHLLAQIDHFDALIAELDTRIAALTRDHDDDLTNLDTVPGIGRKAAEIVWAETGGDMDTFATAAHLASWIGVCPGMNESAGVSKSGATRHGNTALKRVLGTAALAAIRKKDSYLGVFYRRIAARRGGKRALVAVMHKIVIAIWHVLKHKTAFQDLGADYLPKRDPQRAMRRMQREANSLGLTIRFDPIPQTA

SEQ ID NO: 255612 - protein, 349 aa, unidentified
MVADELDYVVGVDTHRDEHTLALVEATTGAVLAQQTVAASAGGYAQALRFAQQQAEGVRLWAVEGAGHYGAGLARYLSERGETVLEAGRSPRGERRLRGKDDQLDAVRAARAALASEPLARPRSGERREALRLLLVARRSAVEVRREALVQLRSVIVTAPDRLREELRGLPVRRLLERCSNLRRSNSARADQRATRLVLRSLARRIEAVTLEAAELEGEILAQVRALAPQLLEEPGVGPIVAAQLLVAWSHPGRVRSEAAFARLAGVAPVPASSGQTRRQRLSRGGDRQLNRALHTVILHRRQHDPQTRDYIARRIAEGKSRREATRLLKRYLARHLYRLLQNQEPLLA

SEQ ID NO: 255613 - protein, 388 aa, unidentified
MQTVADRPEAPTAIRTDLGAIFVSLELSRSTWLITSLSPGGGEKMSKQVVRGGDVAGLLERFARLREKARARTGKVFPFVVIQEAGLDGFWIDRALQNEGIESHVVDPASIATSRRRRRAKTDGIDGEALVRALLAYKRGEPRVCAMIKAPTPEEEDRRRLCRERKVLIAERVRHVNRVKGLLFSQGISGYEPLRRDRRERLDTLQAGDGRLLPDHLKAQVCRELDRLELLLEQIKAVEAERDVLLAAQQVAAPAPAAMLLDIKGIGPEFAAILWSEGLFRHFDNRRQVASYAGLAPTPWQSGSVDREQGVSKAGNPRLRTTLIQLAWLWLRHQPHSALALWFEERVRRNGGRLKKTTIVALARKLLVALWKYVTAGVVIEGAVMKHT

SEQ ID NO: 255614 - protein, 377 aa, unidentified
MGNDSTVWVGLDVHKESITIAYAIDAGEVESMGKIGTTPTEIDRLCKRLQSKARYVRVVYEAGPCGYGLYRRLVAQGLDCMVCAPSLIPRKPGERVKTDRRDAIKLARSLRARDLSAVYVPSVEDEAFRDLARAWASARDDLRQARQRLKSFLLSHGVHYIGRADWGAAHRRWLSKYSFETAWRQLAFEEHRRSIEDRLAQCERLEVALREAVVEWGFYPAVLALQAMRGIQFITAVGMISELGDLSRFDHPRQLMAWLGITPSEHSSGGTRRQGGVTKAGNSYARKLLVEAAWSYRHPARVGKTLQPRHEGIPKAIIDRAWDAQLRLCKKYRKLATRGKNVNVAVVAVARELAGFIWDIGRLAMSLALPRRTARPA

SEQ ID NO: 255615 - protein, 395 aa, unidentified
MSNRGVQPDRVIIAIDPHKASWTAAAVGVSLQPLATIRVSVSPQGYRDLRRFATRWPGAEWAIEGAAGLGAPLAMRLFADGIAVVDVPAKLATRVRMLSTGHGRKNDAADAVSVAVAALTAAGLRAVAVDEAITALRALIEHRDDVVKIRTQTVNRLHALITQLLPGGAPRQLSAETAAQLLRTVRPRTPGPRTLRRLAAELIAEIRHLDRRIAAATGDITAAVAASNTTLTELCGIGDLTAGKILARVGDVTRFPSAAAFASYTGTAPIEVSSGDVVRHRLSRAGDRQLNYCLHIMAITQIRRDTPGRAYYQRKRAAGKSHKEALRCLKRRLSDTVYRHLQHEANTPTATGPGGHTGATTESSATGSTPTTGSSDKSQPGPAGTEPTTHQPRST

SEQ ID NO: 255616 - protein, 431 aa, unidentified
MDKVIIGVDPHKLSVTIEARDNREILRATGQFGTDARSYRQLLQIAAQWPERVWAVEGANGVGRPLTQRLLASGERVLDVPAKLAARARVFDTGQGRKTDATDAHAIAMVALRDKKLREVSTDPELMVLRMLCDRRDELSRARAQALNRMHRLFLGLLPGGAPVKKSVSQYQALLATVRPRDLAGKTCRRMAAEELEDLHRLDAKLKSMKAELKTAVLATGSHLMDIHGIGPAGAARILADVGDIARFPDRNHFASWTGTAPIDASSGQHLRHRLSRAGNRRLNHVLYMAGIVQLRYDTAGRAYYRRKRAAGKTSMEAMRCLRRRLSDAVYRQLAADAAAQEEASPGGHPGASLISSAAGLSPDTGTSDQPLPGPADLTLPPPRPASQPMAPAAAGTRRRARGVNVERPAGRTTLTPTSAAVPSTAPGPCP

SEQ ID NO: 255617 - protein, 457 aa, unidentified
MPSRHPKPESLRVTNRHAAGIDIHLAEHWVAVPSESAPPLAKGHPANLPAHVRKFGTCTADLEMLADWLTACGITTVAMESTGIYWITLFELLERRGFEVFLVNPRQTKQVSGRPKTDVLDCQWTQRLHSYGLLAASFRPADDVVVLRSYLRQRLMLIEYGGHHIQHMQKALEQMNVKLGVVVRDITGKTGLAIVKSILGGVRDPLQLAKHRDERCKHSEAEIARALYGNWREEHLFALKQAVAGWEFYQEQMRTCDDRIEKCLKAFADKSAGKTLAAKRQRKTKPNAAPFDVRGRLFQMSGVDLTAIEGIEVSTALVVLSEIGTDMSKWATEKNFTSWLGLSPQHQGSAGKIKSRHVRRGSNRAARAFRLAGQGCHQAKNAIGAFYRRIQARCGGPKAVIATARKIAIRVYRLLKFGTEYVRQEMAVAEEAYRLHQLQGLARKARQLGYRLAPATP

SEQ ID NO: 255618 - protein, 341 aa, unidentified
MQQQVNTVAIDLAKKVFHLVGTDTTGKILWRKRLTRQALMPFMAQLPPVTIGMEACGGSHYWARRFREHGHEVKLMAPQFVKPYVKTNKNDMRDAEAIAEAVTRPTMRFVPPKAIEQQDIQALHRVRERLIGARTALINEVHGLMHEYGIVIPKGVSKFRQAVVNKLDSDQDKLTALSQEMFQKLVEEFVTLAAQIAYYQEKLETLGQKHAECQRLMTVPGIGPMTATAPVAAVGDIGIFKNGRQFAAWLGLVPRQHSTGGQTRLLGISKRGDSYLRKLLIHGARATLRWAQLKTDRRSQWIRGLLERRGWNRTVVAVANKNARIVWALLSRHGVYSEGVI

SEQ ID NO: 255619 - protein, 401 aa, unidentified
MQDTQQHGAVDVFVGVDVGKGQHHAVALDRNGKRLYNKALPNDEAKLRALISELKTHGRLLFVVDQPSTIGALPLAVARDEGVLVAYLPGLAMRRIADLHAGEAKTDARDAAIIAEAARSMPHTLRSLRLADEQLAELTMLCGFDDDLAAQVTQTSNRIRGLLTQIHPALERVLGPRLDHPAVLDLLERYPSPAALAAASEKTLANRLTKLAPRMGKGLATEIVQALSEQAVIVPGTQAATIVMPRLAQQLAALRKQRDEIAAEVERLVLAHPLWPVLTSMPGVGVRTAARLLTEVAHKAFASAAHLAAYAGLAPVTRRSGSSIRGEHPSRRGNKVLKRALFLSAFAALRDPVSRAYYSRKVQQGKRHNQALIALARRRCDVMFAMLRDGTIYQPKSAPNA

SEQ ID NO: 255620 - protein, 336 aa, unidentified
MDDIRTITSINPAEYSLFVGMDAHKRRTNVVVLDRADVVCVKSFPSDPKGIVGYFRKHYGQRRIAFVYEAGPTGYGLYDELVGSGQVCLVVAPSLVPRKPNERVRNNRLDAGKLATGLRGGTLKGIRVPSERDRRLRHLVQLRNVYVQKCSNMKLRIKSLLLQEGIPFPGSESGSRWTKSAWEAMQTAPVYEKVRFKLNSLLSSITFFRAEAHKVTQEIGRYCESDADLAESVRFLCSIPGIGPTVAAALLARIGDWRQLKSPREIGSFLGLTPWEDSTGDDVHRGSITRLGHSRTRSMLIESSWTAIRHDPELRAVYLRIYRRHPKHLAASERSI

SEQ ID NO: 255621 - protein, 349 aa, unidentified
MELDTIGIDLGKTIFHLVGLNRDGEVVIRRKCSRLQLLRFTSNLRVRLIGMEACGGSHFLARSLREQGHEVRLMAAQYVKPYVKTNKNDYIDAEAIAEAVGRANMRFVPIKSDAQLDIQSLHRVRDRWVARRTSVINQIRGLLLERGITFRKGRRHAEACLPDILEDADNRLSGLLRILLAQLQDELRQLQSQIGEADARIAKAAREQESCQRLMAIPGVGPLTATAVVASIGNGAEFRKGRSFAAWLGLVPKQESTGGKQKLLSISKRGNHYLRRLFISGARAVLQCRDKQPLGLSAWLGQLASRVHSNVAAVALANKLARFAWAVLAKSEAYRPPLSVVSPEALACN

SEQ ID NO: 255622 - protein, 404 aa, unidentified
MIFVGVDWAEAHHDLAVKDAAGKTLAKRRITDDLEGVRHLHEVLACYTDDPSEVLIGIETDRGLFVSALRSVGYRVFAVNPFSASRYRDRHSSSGAKSDPGDAEVLADLVRTDSHNHREIAGDSELVEAVKILARAHKALIWTRQRQTNSLRSILREYYPGALAAFADGLNAKQAIEVLLIAPTPELGRGLSRSRIASALRRGGRKRSIEERSTEIQQALRAPQLEAPALISNAFGETVKALASVIAELSRQIESLEAELASHFDKHPDAKIILSLPGLGTVLGARVLGEFGDDPDRFASAKCRKNYAGSSPITRASGTKRVVLARYARNRRLADALYLWAFASLTASPGARALYDRHRDAGDSHHQALRVLANRFVGILHGCLVSGTLYDETVAWETRAEIAA

SEQ ID NO: 255623 - protein, 404 aa, unidentified
MKGPIVSIDVSKGKSDYQAFKEMNVKYTGSLSIKHTKEGFDEIVSLVREMEKKLETEVCVVYEATGVYHRVLKKVLEDNNIKQFIINPLLSAKTRKNDSLRSPKTDKLDPKSIAKTYYSHSLHNSHKPETIYHELRELSRYYEDILVHLRKDKVAFRAQLDVVFPGYDTLYDDLYGPVALAVIEKYPHPEMLQKKKINTVSKVIQSKTCHRQAMSDTMADKAIEYSKTIYSGCDKDDIEVLILQRFIKKLKEDMAEAERTIGEMIKLAQELPDFSIIKSIPGIGDNLAARIIAELGDMTRFKKKNELVAFAGLDPRISESGQNDGDHMHITKKGNKRLRCLLYLAVTCSIRLKRDDNSIKDFYIKKKQQSNPMCSKAAKTACASKLVRIIYSMCKTGELYQYNK

SEQ ID NO: 255624 - protein, 348 aa, unidentified
MIILGIDAHKRTHTVVAVDELGRQVGMKVTASTTTVAHLELVTWAEQFGPHEWAVEDCRHLSRRLEADLLVAGERIRRVPPKLMAHARDAARTYGKSDPIDAAAVARAAQRYPDLPVAQLDGPSREMRLLVDHREDLVKDRTGHLNRLRWHLHELDPTWDPKARSLARYKHLDATARRLAGFTGMVARIALDLVIRIRELTVAINDLEREITQRVAGLAPTLLELAGVGALTAAKLVAEVADVRRFKSKDAFARHNGTAPLPVWSGNRERHRLSRTGNRQLNAAIHRIAITQMRCHDDAKIYLERRREFGNTSTEALRALKRRLSDVVYRALLADAQPASTTCLAQAA

SEQ ID NO: 255625 - protein, 348 aa, unidentified
MDKLYHAGIEVSAQQFLVVLTADASAEGVARREFANTPEGVQALVRWLVVPGRRVRVVMEATGLYGLDLALRLEREASLELMVANPRAVRHFAHALMKRSKNDPIDARVLVEFARRMPFQRWPRPSPAALHLHALARRLEALTDMHAAEKNRWHAAHLSDAWPEDVRRDLQRSLRALERAVKRLTRQAVEVIAQDPDLNLRYQLLLSAHGIGPTSAVQILAQLAVLSPDLDVRQWVAQAGLDPRHYDSGSSVHRKTRISKAGNRHLRRALYMPALVASVREPHLRAFYLHLLERGKTKMQALVAVMRKLLHAIFGMFKHQQPFDGAKLYPLPQETGRPQGTFSAAEVA

SEQ ID NO: 255626 - protein, 326 aa, unidentified
MTYQLGIDISKAKLDVALLNADGKYRSKVFGNDATGFKSLLQWLHTHVHSGKAEVHVCMEATGSYHEALALFLSDQGIAVSVVNPLLVKRFIEVDRVRNKTDEGDARCLARFCQMTQPQLWEAPSVAVRTLQALVLRLDTLQEMRQGELNRLEVAHVSVQQSIRDVIADLQRSIEAVREHIRQTIDDDPDLKQRQGLLASIPGLGDKTIPQLLAYIGRPERFKSVKALIAYAALAPLIRQSGTSLNHHKGTHPQGHRELKSALYYPAMVAGKYNPLIAAFWQRLKAQNKPGKVIVVACMHKLLAIAYGVLKSRKPFNADHLKSIVT

SEQ ID NO: 255627 - protein, 348 aa, unidentified
MKKLVAGMDLHSNNVVIGVMDLDGQRVASGKVACDLKAVEHFLAPYKSRLEQVAVESTYNWYWLVDGLQAQKYPVVLANPAKVDQYSGLKHADDTSDAFFLAELLRLKILPTGYIYDVQLRPVRDLLRRRLTLVQHRTALLLSFKSLYTRTTGQELALGKLKAMAIPEAQQLYEHPANQLIAGLQLHHIEQLNASIATLEKAVLASARELPGYARLTTLPGVGKILGMTIAMEVGDIQRFAGAGELASYCRTVAAERVSNQKKKGENNAKCGNKYLAWAFVEAANFARRYDEQCRQWYDRKAAKTSKIIATKALACKLAKAAWHVMTAGVDYDPQRVFGPLRTPTLKA

SEQ ID NO: 255628 - protein, 301 aa, unidentified
MAMLSFGGIDVSKDRLDITVLPDEQCSSVSNDAAGWAELIEQLRGSSITAIGVEASGGYERGVVRALLAAGMSVRQINPFKLRQFAKASGTLAKNDRLDARMIASFVAIMPTRPVQRQAPMIEQLAAMLTVRRQLSDHKVATENASRLLEGAMLQRLSRRRVAGLTADINLLDQRLVEIVTADAALAHRFWLLTSMPGVGAVLACTLIALLPELGQMSRKQVAALVGLAPYDFDSGKLKGRRCIWGGRARVRHVLYMAALSASNWNPALKAFHDRLAVTGKKPKVVIVAVMRKMITTLNDA

SEQ ID NO: 255629 - protein, 386 aa, unidentified
MAIPEKIRIEQDTLPQPTLFLAFELGQDTWKLGFTIGMAQPPRERTIPAGALETLQQEITRAKQRFGLPEDARVVSCYEAGRDGFWLHRALVAHGVQNHVIDSASIEVNRRQRRAKTDRLDVRKLLTMLLRHSAGEKKVWSVVRVPSVEEEDRRQLHREMQTAKQDRTRVINRIKGLLAGHGVQLTLQGDVDAQLDQVQQWDGAPLPSALRTRLKRAWQQVGFLTAHIQTLEAERRALLRRREDPVIAQVRQLFTLRGIGVNSAWLYVMEFFAWRDFQTPKQVGALAGLTPTPYQSGQSRRELGIAKAGNRHIRAMAIEIAWAWRRFQPDSALSQWYERRFGAGSARLRKLGIVALARKLLIALWRFVKTGVLPEGAVLKTVAPRR

SEQ ID NO: 255630 - protein, 345 aa, unidentified
MDKIYIGVDFHARQQTICYLTTDSGELLFHQLQHQDKAAVRAFYAQFSGTVIVGLEASGYSPWFERLLEELGCEVWLGHATEIRRRARWRHKNDRRDAELILDLMRHDEFPRLYLPPLQSRDILRMLRYRQKLIKMRTIGKNSLQALALQSGLAKGPHLFTKAGLQELRSVAMSPAMQWQRKQWLQMLEPLNERLLETMLWLKQQSQADERISRLRTHPGVGLLTALCLVHSLEPVSRFRNTRKVTAYAGLDPVERSSAERQRFLGISKGGSRVLRFLLVEAAHTAIRKDADLRRFYRRLVERHGRPKAKVAVSRKLLIRTYIMLRDEIDYAEFQRRAVAARPAR

SEQ ID NO: 255631 - protein, 442 aa, unidentified
MPSLRCIEPNAAGIDVGATEIFVAVPQDRDPSPVRSLETFTQDLHRLKEWLQQCRITTVAMESTGVYWIPLFQILEKAGIEVCLVNAQHVKHVPGRKSDVIDCQWLQYLHSVGLLRASFRPEDRVCIIRSLLRHRDSLVQMAAAHVQHMQKALTQMNLQIHHVLSDITGQSGLAILDAIVAGERNAVVLAQLRHSRVQASEEVVVKSLVGDYRREHLFTLRQSLEAYRYYQRLITGCDEEIEEQLQNFDRHLPPDAPALPPERYPHPRRKNEFRFDMRSELYRIFGVDLTAIPSINALTGYTVLAEVGTDWSKFRNIHAFASWACFCPHKKSGGKVLSAKTRRSANRVNRALRLAAQSLERNTSYLGIFYRKMCARLGRPAGITATAHKLARIIFHMVTTGKAYDESIFAAEEQRQRKHLESSLRRKAAKLGYQLIPLPQTA

SEQ ID NO: 255632 - protein, 320 aa, unidentified
MSEFDDLSRSHTTLEQDCMLIAVIEMSLSSWLIAGIVPGVERQPLKKLDPDADALLKLLHRWQREAVQTGRSIKRIVVAYEAGRDGFWLARWLRSHGIDAYVIHASSVAVSREHRRAKTDRLDTELLMRAFLGWLRGERRHCSMAVIPTLEQEDAKRPNRERENLVCERTRIVNRVKACLVRFGIRNFKPTLRKASERLNSLRTPENVPLPPNTLAEVRRDIARLRFVIDQVKDVEAARQERLQQAPNEGPHAMVLLLARVVGIGIETADMLVNEVLSRKFRDRRAIARYAGLTGSPDESGKKRREKGLRGPAMPGFVAA

SEQ ID NO: 255633 - protein, 433 aa, unidentified
MIKINYMSTLFVGIDVSSKSNVVFAMDFDENKFIASSFRNNQPGADELAGMIHDCMLHHPNLNTIVVALESTSVYSIHIANYLSTCETLMPYKPYVYCLNPKATANYRKSYLAMDKTDPLDAYLIADFARVGRTKKCEPWRGAQFLALKRLTRHRLHLAECITREKTYMVSNLYLKFSELQLLDDDNQPFSNIFGTTASAVLTEFMSLQDIIDSPEEDLLQFLAHKSRNRITDISKTSDLLKKAARDSYRLDKCMYEPLNVSLASSFNCIQTYQKEIKLIDQAINRCISGMNPNALTILKSIPGIGPVWASGMIAEIGDISAFHSSDALAKYAGLTWTKSDSGDFTSEDNHISKAGNTYLRYYLGEAANSVRRHTPEYSEYYLKKYAEVTKHQHKRALALTSRKLVRLVFGLLARNQLYTGEKLDAELHIESN

SEQ ID NO: 255634 - protein, 386 aa, unidentified
MKKNNIPEQSPSKRANKMSRKVNRTGQKSRQQTGPVTIGLDLGDKSSRYCVLNEAGQVVLERSVGSSKKAMTQVFGAIPRCRIALEVGTHSPWVSRLLERLGHEVIVANARQVKLISQSSRKNDRLDAQMLARLARVDPQLLRPIRHRSEQAQGHLTVIRVRAALVDARTGLVNAARGLAKAMGERLPKCDTDQMGEERLKMLPQGLREALRPLLQEVESLTGKIKECDVKIEQIARTEYPETCLLRQVSGVGTLIALTFVLTVEDKKRFAKSREVGCFVGLRPSQSDSGESKPQLPISKEGDQYLRKMLVQGAHCILSKRGPDTDLKRWGVALSDRGGKNAKKRAIVAVARKLGILLHRLWVTGEVYEPLRNSQAAAKQKKTAAA

SEQ ID NO: 255635 - protein, 310 aa, unidentified
MDEVIVGIDVSKDRLDVHVLPGGQAFAVARNGEGLAALNDRLLPLGPRVVALEATGGFEQVAAASLASAGLPLVVVNPAQVRAFAKALGQRAKTDPIDAAVIARFVAATKPEVRPLPDVATRLLAELVGRRRQIVAMLAAERQRQTRLTARHLARSLARLIAALERELNAVDTEIDTAVRGSPAWREREDLLSSVPGIGPVIARTLIAELPELGSIGRKQIAALAGLAPYTRQSGRWKGKTFIGGGRSAVRSALFMGAMAARRHNPVLAAFYKRLVDAGKPKLLAIIAVARKLLTILNAILKTKTPWQNA

SEQ ID NO: 255636 - protein, 365 aa, unidentified
MDAPCTGVECAKMEVLLTPQQGTPMSEITVIGLDLAKHVFQVHGADPDGRPVLRRRLRRGQVLEFFATLSPCLIGMEACAGSHYWGRELQALGHEVRLIPPQYVKPYVKTNKNDAIDAEAISEALTRPTMRFTTVKSAEQQSVLMLHRTRELLVRQRTMLVNALRGHCGEFGIVAAQGLSRASDLIKRIEDPADTALPDLARQALQCLTSQIRAIQEQIALIEKKLLAWHSSCEASRRLAEIPGLITATAVVASVGNATQFRSARQFAAWLGLVPQQHSSGGKQRLGHISKRGDGYIRRLLVHGARAHLSWSRRKKQIRSAWLTGLLARRPTNVVLLAMANKTARIAWAMLSRGERYREMIAAAA

SEQ ID NO: 255637 - protein, 305 aa, unidentified
MDVVFSHVCGLDVHKKNVVACVITPDTKEIRTFSTMTDDLILLVDWIKSNGCTHVAMESTASFWKPIYNLLELEDIQTLVVNAKNIKNVPGRKTDVKDAEWIASLLRHGLLQGSFIPNRDQRELRELIRYRRSLIDERAREANRVQKVLEGANIKLSSVASDVLGKSGRAMIEAMIAGEESPELLSELAQRRLKNKKAELKRALNGLMGNHQKLMLAAQQRHIDYLDEEISRLDEEIKRRMLPFEEDLELLDTIPGVARRTAETIAAEIGTNMDQFPSAAHLCSWAGLCPGQNESAGKRKLRKDP

SEQ ID NO: 255638 - protein, 397 aa, unidentified
MMRFAGIDIGAERHMVAVLDEQGEVLCRSSPFGEDASGYARLFELLGPSADCLVALEATGHYWRNLFVALIAKDYAVAVLNPLRTARFAEEELRRTKTDAIDALGIARFAQQKRPRAAQLPDSVTEELRELERLRERVVEDFADRLRQLHRAVDLGFPEFTRYVRTLESQLAATILSRYPTAASFRGVSVKKLARIVYDGSHKIGEELARNLIEAAEKSVGAHHSEPYRRRIKYLCEDLDVLRRRLKDLARDVERKLDDHEVGKLLMTIEGLGPLTAACLIAELGDPARFDSPGAIASYVGVIPRIRQSGKKRFTKGPAIPLGNARLRKSLFMVVLQMVRRNPWLRQYYERLRAAGKPGKVAIIAAMRKLLTAVWSVATHRRPFVPIMPQLPAPINA

SEQ ID NO: 255639 - protein, 340 aa, unidentified
MDKLTTIAVDIAKRIFAVYWVDRQTGEIGDKTMTRAKFEEFMRRREPSRVVLEAGGSAHYWGRWLALQGHEVQLIAAQHVRPFVRTNKTDETDARAVWEASHRPGMKWVAVKSEASQAVLSLHRMRTQLKDMRRMQSNQLKALLYEFGIVAAKITTAQIEAWVSAGRVPQLLQASLGAQIERIAGLKRQELELTRCIERHNAGDALATHLLAVPGIGTLTASALAAELGEGAAAGYTNGRQYAACKGITPRLSGTGGKVRAGAISKRGDPYVRTLLIHGARSVISHQRRAKSLSPWLKGLLERRPLNVAVVALANKMARTAWALAAHGRDYEQNYAAQAV

SEQ ID NO: 255640 - protein, 335 aa, unidentified
MSGQYVGIDLHRRRSVVVHKNEAGEVVSVRRIENDPVNLAAAVADAGEHPEVILEATYGWYWAADLLDELGCNLHLAAPSSLNWGQRRVKNDERDATDLIDLFRLGRMTEAWIAPPATRELRELVRYRAKLVQLRSGLKAQLHSVMAKNGVLPSRWDMFGPGGTAQLDALELPDAYTTRIVSLRGLVDVFDNEVSALDRQIHRELKDDPGYRAIQVIEGVGPILAAVFVAEIGDVHRFPSAPALCSWAGLTPKHRESDTKVVRGKITKQGSRIVRWAAIEAISKQRGGAKLRADYHALTARRGKHKARVAVARRLLTLVYYGLRDHEIRCLNLAA

SEQ ID NO: 255641 - protein, 366 aa, unidentified
MNYVGIDIAKTFHVVTIIDENEVKVFKKAFRVENDSNGYSSFITKLDTVSTDKANFLIGLEATGIYGENLLEFLISKGYNVKLLNPFQTSRYREQTTMKKVKNDNIDSLMIALFIKDGKYSEGYVTNDEYQSLRTLYRNRTSIQDDMKDVKKRILTNHAVTFPEFEYITNPFTNIGLALLDKYPTAHHYKNSSVDRIVKVFRHIKGNNFNDEKAIQILNASKNSVYSGKAKDARAIAIRSSIRLLKLYMEEIDILEQEIFSLLEKQNISTDKFEEDMKVDDKTTTLIDHLKSIPGVAEKTIAAIISECGDLTRFPTTAKFIGYIGLFPTENSSGNYKSTGHLSKRGSSIAKHALYMSSVSCMLHNS

SEQ ID NO: 255642 - protein, 318 aa, unidentified
MQTQSRYLGVDVSKDLLVVVFERHRWQFANSKSGYAKLIGQIRKQPGPIHVVCEATGPYHLAMCLALQEAGIAFTISNPAWIKYFGLSEGVLAKNDPIDAALIERFANAKRPAADAPITREQIALSELVNHRAQLVASRTSMLASRQQLLDPAVRKEIDRALGALERCITRVQRRLQQMVDSNSLWKEKVAQLSSVSGVGFLTAVVLLAKMPELGSLSRGQCAALAGLAPYDDDSGARNGRRSIRGGRSEVRSALYMAALSATTHNRVLRQFYERLTRAKKPFKVAITAVMRKLLVYLNSLLKTFAPAPSPSGGQTYP

SEQ ID NO: 255643 - protein, 433 aa, unidentified
MSQFLHDFVVGIDVSSEFSVVAMLAPSGELIRKPFRIDHNPAGFHKLLDILKKEEERLQRKPIYFVESTGIFHLPLFFFLRSNNLKGFVLNPLSVHSTKNFDLRKVKNDSKDAEAIARLAKYQDVKVSLVPEPQILALRMMTREYYALSDTLTEMKNRLSTDLYLLFPGFLDVFSGAFGKTALAILKDFPSPRAILAADTDSLTSLISKTSRKGTAWATKKVNQLKDCAQLASSMPHEFSWLDAKIKVHIDGIESMQASLDGVVTQIQAMIDSELFPADAKRHIELLDGIPGIGFLTAATLIAEIGDFRLFKSAKALTAFFGLDPSVNQSGKFQGDRNKISKRGTRIGRRILFTIAMASIRTTRKGDEINPVLREFYAAKCVNKKKKVALVAVMHKLLHYIFAVLRDQKPFEIRQPEDHQSWRNTKLRQAPAA

SEQ ID NO: 255644 - protein, 411 aa, unidentified
MRIVHQRCCALDVHKKSITACVLVWDGQQLIEERKKEFGTTKKQLGRLRFWLMACKVTEVAMESAGVYWKPVWHVLEKQNQFRLKLVNAQHYHGVDGQKSDQIDASWLAELLQCGLLKGSFVPEQWQRELRDLTRLRVALLQDQNRIQNRIEKLLEDANIKLGSVVSNTLGTSGRKILKAVIAGDKDPGWMADYAQGRLRAKRQELAEALYGFVTGHHRTLLDMLLRQIESLDRDIASLETEIRRRLEPHQDLVERLAEIPGFGEITAWTVIAELGLDMNVFGTPDRAASWSGLCPGNRKSAGKRGHGRTRKGNRWIRRGLTQSALAASHAEDTYLRSFYWRISSKRGPKKARVATAHKQLTIAFFIIRDGVRYHDLGPDHYDRRQPERTRRYLIKRLEGLGLKVSVEPAA

SEQ ID NO: 255645 - protein, 313 aa, unidentified
MPQSECYVGIDVSKGTLEASAYPDGSRVEEVNDAKGRRALNRWLKRKAPTLIVYEPSGGYERPLAHSLSEAGLAHRRVDAWRVRRYAEALGRRAKTDRIDAEVLARFAAVAAEEQGPEAEESAPPQLVSLMAARTQLVAEQVRLAGQLDQVGDPLAKRLLEARLKLVQRQMQIVLKAVRKRVAEDPILQRRFQVLCSAPGVGEITALTILAELPELGRRDSRRIAGLVGVAPRDRQSGKTRGRSAIQGGRSGLRRVLYMAALSTARTKGKWAGLRQKLTERGKPPKVVLVAIMRRLLVVLNAMLKNDQLYQPV

SEQ ID NO: 255646 - protein, 387 aa, unidentified
MFSVGIDVAKRSHQACVLDDSGQMVGQSFKFSSSRSGVDLLVSTLQELGSPATIAMEASGHYWQGLYHYLTSQGFSVLVVNPLQTEAYRSTGVRKVKNDRRDAFVIADFLRIGRIQPNYVPGEAVVQLRELTRYRMDLEDQIGDAKRRILTMLDRVFPEYPGLFSDAFIVSSRAVLKEAVAAADFAAFDLQELTSILNQASRGRFGEGKAREIQERAKESLGMSFLGPVAMVKVGTLLEQIVLLKRQIQEVEAAITELMEREPQYLTTIKGIGPVLAATLLAEIGDIQRFSSLESLVAYAGIDPTVFASGEFSGRRQHMSKRGSPYLRRALWLTAHSTRYWNSDLNSYFQKKLSEGKPYKVAMGALCRKVLSRVYVVLKENRPYRPC

SEQ ID NO: 255647 - protein, 374 aa, unidentified
MYPVGIDWSEKYLDYCIKNEIDDTIKRGRVDNNEDGFNNLMKSFLDSNIKLTDIAVAIESPHQLVVDFLLARGISVYPVNPTAVRNYRKSHKLSGSKSDESDAELIASYLFVHYKTLRVWKLSEPKLRQLKLLVSDRDKVVEEKVRLQNQLRSALLNYFPQALLAFGDITCETALDFLYKFPTYQAIEGQKEEYWKLFLDSHRVFNPKARQRFFSAIKSKQRTIDEAVVNAKSLLVLTIVSQLRPLILALKEYQKQIESLLKEFDDGNLFQSLPGVDVIIAAKLLVHIGIDREQFADANELQNYFGTVPYTKKSGKYRGIHFRFACHKVMRATLHQMALASLRCSIWARKYFDKKRKEGKRASHALRCLANCRL

SEQ ID NO: 255648 - protein, 496 aa, unidentified
MPKTRLTAYTPASRPASAILDNEIIINETGEEINRTKDYGIGIDCHSKFIQVCVIVKEDYRYLAYQKEFNTEWSSLVKAKQWSTQVLQTKAVPAIVPDSSVHYCIESTSVYHFPILMAWEGTVSVVNPTIAGATKRKTDVLDAKLLAVHDLTSVWSESYISPAEVKELRLLVAEREHFVKLSSQCANRINNAIIRFGITIGRSGSVVKNEAIRQIVEDQISDTPPILEELCPTGIPKDVRPMIQREYEKYDEFQSYIKEYDERIRNKVISMKWETASGKLNGEEMLQILMSAPQVGETTAITWLTFIITPNRFPNAKALAAYCGLDPSLKISAKHVTSTVKRGGCKVLHKTLTSCADRLIRNHTEMFGQWGYNLYLQTGKWKKASNAVARKLAVALYFMMLTGKEFSYEKYSLIKNISVFNISVDELPELIPDFKRYIKILHENNINNTSELVTAFLSCSLGSCKGLGKKFFSTLREFMNNQHKYKQIYENMRCNL

SEQ ID NO: 255649 - protein, 440 aa, unidentified
MVNTKQKDEIEFAAFMGIDWADQTHAWALELPTHCGVEHGDLAHTPEALEAWAAELAHRFGGQPIAVAVEQSRGALLFMLTKYAHFVLFPMHPATLASYRKGFRPSGAKSDPSDADLLVDLLVHHREKLRRLNPDSEQTCTLQFLVEGRRKFVNDKTRYSNRLTAYLKIYFPQALDWFFEVTSQIAGDFLERWPTLRHAQKARPETLRQFFRQHNSSRSDSIERRVQEIRNAVPATEDAAVIDSCSTAVLAWVRMLRELRATIASYDQKIETLARQHPDFAIVNSLPGVGPALAPRLIAALGTQRDRYARASDLQCYSGIAPVLATSGKQHWVHWRWACPKFLRQTFHEWAVHSLSTSAWAKAYYDQQRGTGKPRNTVVRALAFKWIRILFRCWKDRKPYREDFYREALARHQQRASKRAPVQLQWKTCAGFSKITAITS

SEQ ID NO: 255650 - protein, 351 aa, unidentified
MKITKLSTSHNPMNYVDANFYDYYIAIDWSSTVMAIAWMRSNSINPVVKNNLPAKLKVIKDYIKDLSGKKILTIEETTGAQWLYVELKDYVDKIIICNTYRNALLKEGPKNDAKDASDLCRLLRAGLIKEVFHSTDENYKIRKFFSAYNDLVKAGVRVQNQLSAIYRSYGQNHKKDKLNIKDDPYIDFIIEDKLKAIALYKEEKKIYEKFFREIMKSNKTIKNLTAVRGIGLINAVKIFSKVIDATRFETKYRYWSYCGLTKYRMESGQKYYGKRNTQYSRILKEAYKTAVMAALRGKNDIREYYDSLLKEGVPEKLAMNKVCRYIATSTLAMMKHGTEYKPYNWRENKIK

SEQ ID NO: 255651 - protein, 317 aa, unidentified
MGDSPVFAGIDVSKNQLDVGTRPRKTYFSVANDFKGVQSLLRRFEKIRPQLVVLEASGGYELLVVAALAQAGWPVAIINPRQIRQFAQATGKLAKTDKLDAQVLAHFAEAVHPEPRPLPDPELQELRALVRRRWQLLATIRQEQNRLDTTVNPKVRQDLQRHLKWLNADLARLERDIQDFIRNTPLWRDRDRLLQSVPGVGPLTSYTIITHMPELGTLEGKQLAALVGVAPFNRDSGQFRGQRKIRGGRGKVRRQLYMAALTAVQHNPALRTFYQRLLQAGKKKKLALTAVIRKLLLILNAMVKNQTPWNPNLHHSA

SEQ ID NO: 255652 - protein, 400 aa, unidentified
MYVGWDWASESHDVTAIDQTGKVVFHTEVEHTEAGLTSVLSRLRRLREPAELPVAIERPSGLVVERLLDQGHPVVPIHPNTFNAARPRWGASRAKSDPGDSYRLADFLRTDGHRLRRLEPLSEVTRNLQALVRSRDDQVEARVAAANQLAALLDSHWPGAGAVFERLDSKIALAFLETYPTPESAARLGERRMARFLIRHSYCGRRSPAQLLARLQAAPLAPSRLDPEVLRELVLAQVRLLRTLMASIANLDRAIAALLPEHPKTAVLAPLPRIGQNVNLGQVLAEVGPILDRAIDVEQAAAECGASPVTKASGKSKSVCFRWAANTRARKALQTWVDNSRHGSPWAAHAYAQARAKGKRHPHAIRILMRAWLRVIWACWHSGQPYDPALHRAAITAAAA

SEQ ID NO: 255653 - protein, 359 aa, unidentified
METQSNKLDFSNQNIFVGFDVHLRSWKITVMTEEVTYKTFVQDPKPDLLYQYLRRNFPGGNYHSAYEAGFCGYWIHNKLKSLGINSCVINPADIPTSNKEKIQKEDKRDSRKIARSLRNGDLIPIHVPTSKTIEDRGLVRIRSTMVKDQTRYKNRVKSFLYFHGIDIPESFAKSQSHWSKRFITWLESIKMEEESAQITLSLLISEINHLRASVLEISRKIRKLSETPGYKENIKLLRSVPGIGITTSMEILTEIETIDRFNNLDKLCSFIGFVPSTHSSGEKDKTGDITPRGHSVLRSALIESSWIAIRNDPALMKSYLEYCKRMDPNKAIVRIAKKLLSRIKYVLKNKQPYVSSIVR

SEQ ID NO: 255654 - protein, 319 aa, unidentified
MAVLGLDISKAKIHLALRTADGKLRRKVCRNDVSGFGELLAWVARYAAPSMHACLEATGTYGDGVALALHEAGYTVSIVNPAAIHAYAASQLMRAKTDAVDAALIAEFCRTQRPPAWTPPAAEIRALQALVRRLDALLAMHTQEANRLAAGVSIADVRTSIEAILASLDAQIAHVRQRIRDHIDRHPGLRQQRDLLTSIPGIGDATAATLIAELFDKPYRSARQAAAFAGVVPRIQQSGQWRGRARLSKLGPGRVRKALYFPAITAIRCNPTINATAQRLRASGKPAMVIIGAAMRRLVHLAFGVLKSRRPYAPDLARP

SEQ ID NO: 255655 - protein, 403 aa, unidentified
MLRWVDFHWRGIELTRKPVAFSNSMEGFNSFCNSVVELMKKNELKEALVGIDPTGHYWFDLGQFMGEKNIKFVMVNPHHVHKTKELDDNSPSKNDRKDPRVIAGLVRDGRYFYSYMPTGVYAELRNASNRRFVLVEEQTRAKNRLQKWVAVYFPEYKGIYTHIDAKGALLVLKQAPTLEEIVRLGVEGIIKIWKDAKLRGNGHKKAMLILNAAMKSIGLKAGLTEARMEIQDLIEDYELQTKRLERVNDLIKELCQQVRYADKLLEIKGIGITTVAGFIAEVGDITRFDSTKELQKLAGLELVADSSGKHDGKTKISKRGRKRLRYLLFEAAISVVGKNEEFKEIHRYYTTREKNPLKKMQSLIAVACKLIRVFHVILTKGISYDASKMLKDIRRPGEQLKAA

SEQ ID NO: 255656 - protein, 482 aa, unidentified
MANRKLSTFERLQQGNLNRKQKRELGRRLHSEDSGLQVVHPDAAGIDIGNESHFVAVPPDRDTKPIREFGSWTAALHEMASWLKECGITTVALQSTGVYWIPVVEVLETAGLEVYLVNARGTKNLPGRKTDVQECEWIRKLHTYGLLRNSFRPPEEIRAVRTIWRQRDRWVQEAGRAVQHMQKALTTMNVQLANTISDISGSTGQAIIRAIVAGKRDPYELAELRDRRIAASKEEIAHSLQGNWREDVIFELRQSVESYDFFQKQMAACDQELIKYMAAIETREITPKQDLPENATPLPSAKRARRSKTRRKNQPGFDLATELERTMGADLTRIDGIDVIISQVIFSEIGPDFSAFPDENHFASWLTLAPKRDISGGKVIRHISAAGRNRVANALRMAAESLSRSNSYLGARYRRLRARLDGRVAVKAMARYLACLVYRIVTKGQAYVDRGAAHYEAKRQEKERIALERRAASLGLKLVAAS

SEQ ID NO: 255657 - protein, 424 aa, unidentified
MKFKMQNKQNQLIERISVKHLVVGVDIAQQFHVARAVNFRGIVVGDPLTFNNNEEGFASFLKWIKNLQRLNNLDEAIVGMEPTGHYWINLSKWLSNQDIEVVTVNPHLVKKNKENRDNSQSKSDKKDALVIADMVKNGYYSEVRYTSESFEKLRVIMSNRDVVVKRLVSSINQLNRWVDIVFPELRQVFKDIKGKGAIATLRLFPTPMELETMQPHDVITGWKSIMKRQPGLKKALLLLQLAKKSVGTKQALDAYKFHLEQLLEEYDLAVTQLERVEQQVTEALNKIPFAKKLLTIKGISEISLAGILGEAGDLSGFSHGNSLLRHAGLHLAEASSGKWKGQIVISKRGRSRLRRFLYLATMSLVTNNPEFQALHSHNVKVKKMKKMKSIMKLIGKLARIFVGISKRNESYSPDKVSPFSTLAA

SEQ ID NO: 255658 - protein, 395 aa, unidentified
MDNSDRTRLEQFRQFKREIRGSERYLIVGLDIAKDSHHAFFGTATGQTLWKRWLFDNSQEGFQKLLLQTEALQVQHGLPQVVFGLEPTANYHKPLGEHLIRQGHQLVLVSGVAVKRNRELLDGRWDKHDTKDAANVADLISQGKCLYYEHPDPRIRDLRLLLSLQKRLKRQEQGARVRLRNGLVAQYCPELDSSLSRLVAPGKERDLLLAMQKASPIGCAAHPELAFVAQRMVQELQGTRETLKAVQERIQRLCFQFPEYPYLLSIPGFGPEISSQVLGAIGDPFRFQNGRQVLKMAGLDLSADRSGKTCNAAPPVLSKKGKADLRYALYQAALIASTRNAAFMAYYTQKLKGRAKEPGIQTKIRVKLAAKLLLIAWTLMKRKEPFDPERLAVQI

SEQ ID NO: 255659 - protein, 389 aa, unidentified
MQSEIEVIEQDRTVITTLGAIFFSMELSRSKWLITSLAPGGEKMSRYVIEGGDIAGLMDRLRQIREKAQHQTGKLYPFVSIQESGLDGFWIHRVLVSEGVESHVVDPASVAISRRRRRAKTDRLDGEMLVRTLLAWKRGEPRVCSMIVPPTIEQEDRRRNSRERRALIADRVKLVNRIKGLLFSHGIRSFEPLKSDRRTRFDELVTGDGRALPPHVRAEALRMLDRIELILEQMKAVEAVRNTLVASAPEDEAVPACAANLMTLRGIGPDFAEIIWSEGLYRHFDNRRQLAAYAGLAPSPWQSGTISHDQGVSKAGNPRLRTIMVQLSWFWLLHQPESALSRWFHERVERNNGRGRKITIIALARKLLIALWKYVRHGVVIEGAVFKAA

SEQ ID NO: 255660 - protein, 361 aa, unidentified
MSLSSWLVAGVVPGIERHPLKKLETDEDALLKLLLRWRDEAVNAGHKIERIAIAFEAGRDGFWLARWLRARGIEAYVIHPASVAVSREHRRAKTDRLDTGLLKRVFLGWLRGEPDHCSMSAIPTLQQEDAKRPNRERENLVGQRTRIVNRMKACLIRFGIRNFKPTLRKAPEGLEALRTPEGAPLPPNTRAEMRRDMARLRFVQDQIKEIEATRLQQLEQAPAEGPHAMIRLLARVTGVGIETADMLVNEILARNLRDQTAVARYAGLTGSPDESGKRSREKGLSRAGNARVRRGMIQLAWRFLIFQKESALAQWYRVATKDARGAIRKTMIVALARKLLIALWRMVTIGEMPDGVAMRAT

SEQ ID NO: 255661 - protein, 339 aa, unidentified
MKTKYFIGLDVHKEKTSYVVRDKIGNILTEGKTTTKYPELYLQLKTYLTGAKIGLEASTSYYTLYQEFLKNGFDIKVANTIQLRQLIAKNDKLDARRLSEMLRLGTFPCSYIPDDKIQRMRNLVHVRHALMEEKVRCNARIQAFLDKNSVVMPICDAFSKKWRHTLEEYLNAGKLNEELQYEYDHFLFLEKKQIQVERDMKRYTQIHWKKEYRLIQSVTGFGPVLACYIIAHVLPIERFLSNKKLRRYAGVIPVSKESGEHSSKGHIPKGSSRKQLRWALVQAANTAGKTDTPLGRYYRIKKKQKKISAIAKIAVASSMIDIIYKVLTTKQPYQVLSAN

SEQ ID NO: 255662 - protein, 317 aa, unidentified
MTRSMIGVDVSKDSLDAHARTAKESRKFTNTAAGVAELVAWAKTYAPDRIIFESTGHYQKLAVGALLAAALPAVVVNARQVRDFAKGTGQLAKTDAIDAVILAHFGEVVDTHVRPLESKEILEFRDLYDRRGQLVRMLAVEKNHRHAAEHSSAKVIRNIESHIGYLEKQIGGLEKRLDDIVESSETFRAKDEILQTITGIGPQVSRTLLAHLPELGQRTRQSIAALAGLAPYNDDSGLESHTRHVSGGRGKVRIGLYQAAVAAIRHCPDMKKFYASLKARGKASKVALVAVARKILVLANALIRNMSPYKPTANSVC

SEQ ID NO: 255663 - protein, 343 aa, unidentified
MQAVTTIGLDIAKSVFQVHGVDAEGNVIIQRKLKRRYIVAFFQKLPPCLVGIEACASSHHWSRELRALGHTVRLMPPAYVKPYVKRQKNDAADAEAICEAVTRANMRFVETKTPEQQSCLMLHRTRHLFIRQQTAVINAIRAHLAEFGIVAPVGRNGVEALLDVVADTSDKRVPEIARACLVALGAHLRVLKTQILEFDRLIMAWHRSNETSKRLDEIPGVGPALATALVASVGDPRAFRSGRDFSAWIGLVPKQNSSGGREKLGSISKRGDRYLRSLFTAGALAVIRYAKLHGTEHRPWLTALLARRPTKVAAIALANKIARMAWAMMARGERYKEPVALAR

SEQ ID NO: 255664 - protein, 280 aa, unidentified
MAVTIVEAGPVVVGGVDTHLDVHMAAALDGIGGLLGVEPFPATPAGYRMLLAWMGSFGAVARVGVEGTGAYGAGLSRFLRRQGVEVIEVDRSNRQARRQHGKSDPADAIEAARAAHNGRARGLAKSRDGNVEAIRALLVAKRSARAVRIKSVNQIRQLTFTAPDALRERMRGLGTVPLMVEAASLRPRPDAGTVVYSTKVALQTLGRRAVSVDAEAARIDELLGELVADTAPSLLDVFGVGVDTAATLLVAAGDNPQRLRSEAAWAHLCGVAPIPASSGR

SEQ ID NO: 255665 - protein, 415 aa, unidentified
MESVSRIAGIDVHKKMLAVVVRQQCGDAVEYVKRQFGTMKSEIGHLAAWLQHHGVTEVVMESTAQYWRPVWHGLEAHFQLHLTHPIRTRAPRGRKRDFRDAQRLADRWHSKDLEESFIPASEQRAWRALTRGRVQLTRKITLIRNHVEGLLENGGIKLTAVVSDAFGVSGWAILEKIAAGTTDVEELLVEARGRLRKKKDELREALAGRLEPTYVILLKQYMKQVELFREQVEQLNQALATAMRDFVPALVRLTKVPGIDLYSAQELLAEIGPRAAAFPTAEQFASWVGICPGSQESAGINHSDRCAKGNRYLRRILCEIAWPSIRAKDTFFSSLFNRLKPKIGAKGAAWAVAHRIGKVVWLILHEQVEYEEKGRAPLNTSTLVRKLRRIAKQLSLQGLSLKDVIEQNLALGSIG

SEQ ID NO: 255666 - protein, 352 aa, unidentified
MNHLKYIGMDVHKATTVIAVLDSVGKVLAEAIIETKASPILDFIRSQRGTLQVAFEEGTQAAWLHDLIRPRVANLVVCDPRKIAIQGNKADKPDARRLAEMLRTNGLKPVYHGERSTRTVKELAQSYTSLVEDSTRVKNRLKALFRARGIDCSGSAVYSPKERKEWFVQLDTAGVRTRAGRLWEELDCLAALSEAAEKELLAEARKHAATKILRSIPGIGPLRAAVILGVADTPHRFRTKRQFWTYCGLGIVTKTTGEYKLVSGQVCKTKMRPLVRGLNHNYNRALKQAFKGAAMTAASGPWKSHFDAMVANGTREPLALLTLARKIASTTLALWKKGERYDHNKLRMKHAA

SEQ ID NO: 255667 - protein, 389 aa, unidentified
MCICGIDVAKLNHVALVQDEQGHVVVPAFSFGNTRSGFEELHRCLAALPTPVTIGLEATGHYWWALFEYLTQLNYPVVVLNPLQVHAYRKTGIRKCKTDRTDAFWITDLVRIGSGRLLHSNTPSLLQLRELTRFRAQLSDHIGDCKRKVLSVLDRVFPEYETLFSDVFLRSSRALLAEAVAAQDFTEFDLGELTHVLRSASHGRFGSPKAQTIQAAARQSVGIPFLADAARMEMRCLLEQIDLLETQRQLLDQTIADLMAQLPQHITSIPGVGAVTGAAIMAEIGDVQRFATIEKLVAYAGIDASVHQTGKFHATQMHMSKRGSPHLRMALWQAASMAIRYDPDLATYYQRKRSEGKHHCTVIGAICRKLLARIFIILKEHRPYVIHQF

SEQ ID NO: 255668 - protein, 405 aa, unidentified
MRIVMLGIDLGKNLCSLAGLDETGAVVLRRRMKRASVLPFTAQLETCTVAMEACCGAHHLGRQLVAQGHLVRLMSPAYVQPYVKAQKNDERDAEAIAEAATRPTMRYVEIKSEAQLEVQSLHRVRGRLVAERTALINQLRALMLERGIAVPQGRSKLVRYLPEILADERNGLGPRLRRLIEDMREECRSIDRRIKGYDDELAERVRNEDTAKRLIKIPGIGVLTATALVAAVGNAQAFSCGRDLAAWLGLVPRQATTGGKPRLLRISKRGNGYLRMLLIHGARPLSRVSPRKIRRSAGGLSLCLREHTATAPQLPDVPTIAESGLPNYKYESWFGILAPAGIPRAILTKISQDIAKAVNIADVRERMEKQGALVVTNTPEQFDAIISNDTERNTRILREAGVASD

SEQ ID NO: 255669 - protein, 367 aa, unidentified
MSLIHVPPGVTVLAMDVHKNSISTGVLEPGSSVALVDKISSDDEMVRRLIARFDDPARVWACYEAGPTGYELARTMRRAGVRCEVIAPSLIPTRPGDRVKTDKRDARRLAVLFRASQLTGVRVPTVAEEAVRDLCRARADMVIDRSRARHRLGKFLLRHGRIWRGGDNWTLRHHTWINQQHFDDATLQVTFGHYRATLIARDAAVEAIDADIAACRATAPFGDAVARLGAYRGITELGALTLASEVCDWRRFPTASMFMGFCGLVPSESSSGDRTQRGGITHAGNTHLRTQLVESAWAYKHRPYAGSTLQRRQAGLDPDVIARAWSAQLRLCGKFRRLDARKTNRKIVVTAIARELAGFVWAEMTTE

SEQ ID NO: 255670 - protein, 391 aa, unidentified
MIYIGIDVAKDKHDCFITNSDSEVLFKAFTIFNNLDGFNDLYQKIESVMDDVTKVKVGLEATGHYSYNLLGYLIDKGLPTYVINPLHTNLYRKSLSLRQTKTDKVDARTIASMLMSDVNLKSYSDTSYHNEELKSLTRYRFDKVKERAKLKTSVSRLVCILFPELEKLVPTLHIASVYAMLSEFPGAKQVANAHLTRFTNLLSEASKGRYGKETAIAFRDAARTSIGSNMPAKSLELKHTIKLIQELTSEIDEIEHEIKLIMNELNSPILSIPGINYRMGAMIIAEIGDFTRFDSPDKILAYAGFSPSTYQSGQLDGAYSHIEKRGSRYLRYALYNAAKYVCIWDPTFAEYLAKKRAEGKHYTVAISHAVKKLVRVIYHLEKTNQQYIKAA

SEQ ID NO: 255671 - protein, 324 aa, unidentified
MNKDIKIFGIDISKDTFDVMDSDGNHYQFSNNLKHFLKFLKLLDNHSHCVMEATGYYHYQLAYFLLEHNIKVSVENPLSIKRFIQMKLSKIKTDKSDAKMICLYGQQVDMKLWKGSSSNQLECLQMMSLLDIYTKQSTALKNKIQINDVLPNPSKVVLKSLKQSLKHLHKEMLSIEEKLTVLVKSEHQQTLTKLESIPGLGRKTAIMLIVTTDGFTRFENSSQLCSFSGLTPVIRQSGTSIRGKARISKTGNTKLRNLLFMCSLTACKHNKACREIYERITNKGKSKKLALIGVCNKLLKQAFAIAKSGVEYDAGYRSVLSIVR

SEQ ID NO: 255672 - protein, 482 aa, unidentified
MKKKNIYVNQSQELLSLFEKAGNNEKIMCVPIDYAKKDHIVMFCNGYGHILRKPFSVKNSPEGIEYLTEQVTRSCSHRHIDPKHVFFGGEDVGSYAENFTNTLRSGGWIVAGVNAHDAKEQRANIQASTDRLDLMGIASMLLNRRGNCSPAQSGIYRNLRTLVRHRRKLVSMSTEEKNRIHTVVDRLFPGFLDEKKSGILPFSTSSLYLMENRFSPLQIRRRKRHKLIEVLHRYGTTKPENTAAKLQEYAVRVLNTSDEYVFTLQLSLAQHVKHFRCLQDSINQLENEIAVWLAQTQGAFLTAVRGIGIVLAAGVSAEIGNPYEQKPLNNLVSYSGIIPRVKQTGGSEGKTRTGKVAKRCNRILKDYVVQSGLHMGLHGPEDLMADYKRREAAGQHADFGIGRRYLRMAMCLMRTSQIYMPQRLRNREVKPEERAGYYLMTWPSLRKKWNEAGALEIAFEKERPLGQWRNMVQELYEIKLKL

SEQ ID NO: 255673 - protein, 367 aa, unidentified
MTERTRFVGLDAHARTIAVAVAEEAGAPDEYGVIPNDPSSVRRLVGRLGGPGMRLVACYEAGPTGYALHRQLETLGVECMVVAPSLVPTRAGDRVKTDRRDALKLARLLRSGDLTAVWVPDEEHEALRDLVRARADAKADALRAKHRLSKLLLRRGIRPPHGVRAWTERHWAWLGQIRLEEPSAEIVLEDYRSVVRAAEDRVRRLEGALLSAVPERHRPLVGALQAFRGMAFLTAVTIVAEVGDLRRFATAPQFMAYAGLVPSEYSSGATRHRGRITKTGNAMLRHVLGEAAHHARHQPRIGTTLRRRQQGIPAAIVELSWRSQIRLHHRYRHLSARLGRPKAITAVSRELAGFVWAVGQQLEVPAG

SEQ ID NO: 255674 - protein, 282 aa, unidentified
MIDGILGIDVCKNTLDVSISSYTKVRTKSFTNSPDGWRHLLDWLIAQKIQRVHACLESTGRYSLGIACALYEADHVVSIINPAQIRDFVRTKLGRNKTDGVDASHIREYCELFKPSPWAPPSEAHRRLGELQTIRSGIIAGLTEWKNRKNSGIVDAEAQALADATISHFTSQLGAVDKAIALTIDNDCDLQSKRDLLLSISGVGETLAGVVLAELPGPDVLRSSAEVVAYAGLNPRQHQSGTSIDRATRTPRLATLFFALHYTCRPYPPCGIILRSWRWCLG

SEQ ID NO: 255675 - protein, 324 aa, unidentified
MTMATLLAAAPAPLAPAPGGYVGIDVGKDLLALAVHGAPLPPPLANDAAGITALVTQLTVWAPTLIVVEAVGGYEASCALALQEAALPVLVVNPRQVRDFARSQGILAKTDRVDARVLAHFAAITTLTPRPLPIGAVRELATLVGARRDLVAAQVNVRNQRTLLDGVAAASLDRVLATLAAEIAALSAAITALIAATPVLAGADALLQGVPGVGPIVAATLLAELPELGTLSRRQIAALVGVAPFARDSGRGHARRQCWGGRAPVRTALLPGDDLRPAAESRVGSRAHPAAGDRQAQEGRARRLYAETADPAQCPAASRSSLAG

SEQ ID NO: 255676 - protein, 367 aa, unidentified
MKKVSTRAAAQSRNISQQRLTIGLDLGDRNSWYCVLDESGQIQLEQRVRTNAKALREVFGEMPHSRIALEIGTHSPWISRLLSEFGHEVIVANARKVRLIGESRKKDDRLDAQTLARLARIDPELLYPVKHRSVQAQADLTLIRARAGLVRARTGLVNTARGLAKSYGERLRSCNVRNLNPEKAESLSPELQAALEPLLNAIESLSERIVEYNERIEQRAQQSYPQVALLKQIKGVGTLIALTFLLTLEDPHRFGKSRDVGCYLGLQPGRRNSGESEPQLHISKEGDPYLRTLLVQGAQHILGPFGPDCDLRRWGLKLAERGGRNGKKRAIVATARKLAVLLHHLWVSGEVYEPLHNSSRTTVGAAA

SEQ ID NO: 255677 - protein, 472 aa, unidentified
MATQAKHYQKNRSMKKGFSNSSLQNSKPHRAGKKAVLERIRFHAAGVDIGSEEILVALSDRQQPVQKFSSFTQGIQEALAYIKSHGADSVAMETTGIYWWPIYEMFEAGGLDVYIVNACHAKNVPGRKTDVLDAEWLRELHTYGLVRSSFVPDDFIRKLRVYMRQRSDDIEMGASHIQHMQKHLDAMNIKLHTVISNITGVSGLKVIRAILSGERDAAKLALLCQEHMEEEKIKSIQLSLEGHYKEEHLFGLQQALTGWEFYQSRLKECDREIEKLLRAITKDKPVPQDIKKPKIITNFNRPEIDGLHTLLVTFTAGRDASQLPGFNDYSLMRVISETGIDMSPWPTEKHFTSWLNLAPWNNSSGKKKGTRTRKIENRAGQMFREMARSVGNSKYQALGGFYRRIKSRQGAKAANKATARKIAVLFYRLMKYGYDYVEQGLEEYEKKYKEKALKSLIKKARQLGMQLVPSAA

SEQ ID NO: 255678 - protein, 364 aa, unidentified
MEKIGVVEGKAQAAKRPAAGTPVWMAIDISRSKAVYCLRWDGSEQRRLSTPLGIEHVRAVGQQYRGCQMHVAYEACGFGYELAWWLQEHAVAVSVIAPSRVERIPGLQVKTDRVDVGKLVRKLEKGDLKAIYIPSRPVHEQRQIGRPYAQSLKERKRAQVRIRSMMQEHGRLGPLPAAGWKVYSAWLDGQDRPEPIRLCVQAHQPLRAVADHQAKRMNAELYRLAHSAEYRPLVQALSAQPGVGWQSAIRWVLEIGAIGRFRTTDALPHYLGLTPSQYSSGELDHRGHTLKCGPGFLRAMLLQCAWSAVRQGDDLELQQRFATLAPRIGRKRAIVAVARQLVIKLRARWRTHVMSSAPPQALAV

SEQ ID NO: 255679 - protein, 344 aa, unidentified
MDQIIRIGMDTSKHVFQLHGVNAAEEPVLRKKLRRQDLITFFGKLPPTVVALEACGGSHHWARLLQSLGHQVKLIAPQLAKPYVKCGKNDAADAEAICEAMSRPTMRFVPVKTADQQAALMLVGVRDRLIRQRTQLINVIRGYAAEFGLIAPTGLCRVGPLLDRVKTDETLPALARELFEMQATEYAQMQARLEEIEDRLMASHRAHEISRRLAKIPGVGPIGAAMLVMKTPAPEAFRSARHFAAWLGLTPKDHSTAGKVRHGVITRAGDEALRSVLVVGATAVIRQLRRGQCAPPSPWLVALLQRKPSKLVAVALANKIARIAWKLMVTGDSYRAPTSVSAAA

SEQ ID NO: 255680 - protein, 351 aa, unidentified
MRRPKDKLIAGIDLHSNNVMIGVMNQEGKRVAHRKLECDLEAVVEFLKPFKSQLQSMAVESTFNWYWLVDGLRAQGYPIDLANPAKIEQYSGIKHADDQDDAFHLAELQRLNILPKAHVYDPRLRPVRDLLRRRTNLVHQRTALLLSFKSLYTRTTGRRLELSEAKKMEPQAAPRLYEHPANQLIAQVQAEHMQALNQSVSRLEKAVLACAREIPLYEKLLTLPGIGRVLGMTITMEVGDIRRFKTDGDFASDCRLVDAQRLSNGKCKADNNQKCGNKYLSWAFVEASHFARRHDAFCRRWYDRKAAKTSRIIAVKALGCKLAKAAWHMMTKQTNYDAKRMFPELATMKRD

SEQ ID NO: 255681 - protein, 351 aa, unidentified
MDIIKILADYYCGVDLHARIIYVCIMNRAGKVLLKRNMPNNFQIFKQMITPFLPNLAVGCESTYNYYWLLDGCTEAQIPFYLGHALYMKAISGNKKKDDPIDAKTIADLMRTNFFPQAYPYPREMRATRDLFRRRTRLVRIRAEAYTHTQLVMHQHAITDVKSAQVKNRKTRRELLELFDQPDVRFNVETNLDVIDAFDPLIAKLEERIKKQALYHNPGHFRLLLAIPGVGNMIALNTLYETHDISRFRKAQAYASYCRVVKCQRTSAGKATPNKNQKIGNPYLKWAYGQMAVYAVEASEPIKKLFTKMERKYGTQRARARLRHKLAVAVYFMLKNNQAFDEERFVRTSKY

SEQ ID NO: 255682 - protein, 376 aa, unidentified
MENDSTLYVGLDVHKDSITVAYAIEMGEVELFGKIGTMQIDVDRLCKKLQLKARQICFVYEAGPCGYGLYRRLVDKGFDCMVCAPSLIPRKPGDRVKTDRRDAIKLVRSLRAGELSAVHVPTVEDEAFRDLARAWSAAREDLKAARCRLKSFLLAHGVHYLGRPNWGPSHRRWLSTFSFDSAWQQLAFNEHRRSIEDRLAQCERLELALREAVINWRFYPVVLALQAMRGINFTSAIGLVSELGDLTRFEHPRQLMAWIGVTPSEHSSGGKRRLGSITKTGNSYARKLLIESAWSYRHPARVSIDIQRRHEGLPKPIIDRAWDAQLRLCRRYRKLVARGKTPHVAIIAVARELAAFIWDVGRLGMTLATPYSEQAV

SEQ ID NO: 255683 - protein, 330 aa, unidentified
MLGIDVSKATLVCTLVDPRDQRVCWETAVPNSAAGVARLIQRTAADCAWVVEPTGRYSDLVVQQASSAGRTVLLAQPKRAKAFLAAVSPRAKTDRVDSAGLARYGLAATLRPYPVKSETMAQVEQLLAARKGISESMARLKQQREALPYAAAPLAAAIAALAHEQAVIDRELAVVTQQEDAVARLRAIPGVGPVTATAVALCLRTKQFDHPDQFVAYIGLDVRVRDSGQHRGRRTLSHQGDAEVRRLLYLGAQANLRSKDPENPFTQQYARERAKGLSSTGALCAVARKLARTCWSLVTHGTQYEAERVHRQPVPPQIAANVPYPLDSEP

SEQ ID NO: 255684 - protein, 352 aa, unidentified
MVKRSTTVGLDVHKETIDVVIAEPGADGEVRHFGTIGGDLGSLDRMLTRLRRPGRRLQFVYEAGPCGFHLHRHLTGQGVECAVVAPSMTPRRSGDRVKTDRRDAEALARLHRAGELRAIYVPTPEDEAIRDLVRAREDAVEIQRRARQRLKAFVLRHGFRYAGRAGWTFRYRHWLSGLRFPHPAQQLAFQEYIDTIGEAEKRVACLTEEITKALEGWSRAPVVRALQALRGVSLLTAATLVAELGDITRFATPRELMAYLGLVPSEYSSGPKTRRGAITKAGNSHVRRVLAEAAWAYQGQARVGRAMMCRQEKLPRAIRDIGSRRTYPRFSPQLAGSNDRRSKVRTRPAAQS

SEQ ID NO: 255685 - protein, 376 aa, unidentified
MERGSLMLNTTTFVGLDVHARSIKAVALDAMTGEVRSATFGYDAAEVAGWVSSVDPSAKCVYESGVTGFDLQKRLASMGIDCVVGAVSKMIKPPADRKRKNDRNDAEFLARMLSVGNVVEVWVPDDGCEAARDLSRALDDAREDLKRRKQRLSKFLLRHGYAFSETTPTGRRKGNWTAAHWAWIKSISFPEKADDDALAYYVDAVRQAMEDKARLERLVEAEASKPRWKRRVDSVRCLKGIDVTSAADLVFEAGEFSRFKSARSFAAWLGLTPSEHSSGESVRQGGITKAGNKHLRRVLVESAWHYLGCSPHSKDLAKGQVPDPAARRHAAKGVRRLVERRRAMLERGVHKNKANVATARELACWCWAVGCMVENG

SEQ ID NO: 255686 - protein, 417 aa, unidentified
MGLKIVYPICCGIDVHKTFVVACIASTNKGVTTYKRHRFSTFTKGLRELSQWLCENDCQDVCMESTGKYWIPVFNVLEESCNITLAHPKYVKAIRGKKTDKKDAKWIADLFKHDLVAGSFMPPLAIRQLRDLMRYRFKLTNFISSEKNRFQNSLTVSNIQLGSVVSDTFGKSSMNIINKLLEDPTDTNFDIKSLIHGSMDHKIPELKLAIDGFITPEQVGKLAVIKQHYEDLKARKANLEKLILSLAEPYKEEINLLMTVPSIKNIFTAIAIISEIGVNMDVFPTAKHACSWAGLTPTNNESAGKKKSVRISRAGVYIKPLLVQCATAVVKSEKHPEIRNRYLRIKKRRGHKRAIIAIARMLLTAIYHILKKKEPYNPELYQKADVLPVNREITVEQAIALAKSQGFRITIPEASGT

SEQ ID NO: 255687 - protein, 355 aa, unidentified
MNSYAGIDLHKDYSYITVVDREGVRLAQGKIDNQPENLQLFFNKLANPKAVIEATFAWGWLSDLLTSQGVEVVLAHPVKVKAIASARIKTDKIDSEVLADLLRADLIPTAYLATKQERERRDLLRLRCSLVNTKSSLKRRVHAVLHKHNLRPPKNKQDKELSDLFGKAGRHWLEQIITERQQAIDEYTSLELTEYLGTIDHLTERVERINQVIKKVAGENPTAIFLERLPGIGYFSALTLAVELGDINRFYSAGAICSYAGLTASTYQSGHTTRHGRIKHGNKYVRWILIEAVPKAIKKDKVLFSFYQRLKAKKGSPKAKVAAARKMLAQIYHSLKNQRYFLTDQGSPGFFSGNS

SEQ ID NO: 255688 - protein, 332 aa, unidentified
MDNFYFIGVDVSKKKQDFCVLFEGKVLREEQVSNHQQAVARLIGELKNDLEMDNEQFLICAEHTGQYTFPLVCACKSVECKLWLENPSQIKYSSGMQRGKNDKVDAKRIAIYASRFGDKVKYYDRPSEEIERLKQLERERALYVTDLAKYKGQMYDQKDFMPAALYRKKTKRMKGLIQELQAAIDAITAEMEKIIGSTEVLARQMELLMSIDGVGKVVALNVIIETEAFSRFDNPRKFCCHAGVAPFSYTSGSSQHSKNKVSHRANKNIKKLLHMAAVSVTHRKEGELKAYYMRKVEEGKNKMSVINALRAKIVARMFAVIKRNEFYTPIYS

SEQ ID NO: 255689 - protein, 314 aa, unidentified
MLKLLHRWREEAEKAGRRIERIAVAFEAGRDGFWLARWLKARGIEAYVIHASSVAVSREHRRAKTDRLDTELLKRSFLGWLRGERDHCKMVEIPTMQDEDAKRPNREHDSLIGERSRIVNRMKAALVRLGIRGFNPKLKRATTRLDGLHTPEGEPIPPNALAELRRDMERRRLVNNQIRQIEEERLERIEQAPCDGAHVMVRLLARVMGVGIETADMLVHEVLSRNMRDRRAVARYAGLTGSPDESGRKRREKGLARSGNARVRRGMIQLAWRFLLHQKNSPMIVALARKLLIALWRLMREGIVPDGVVLRPAQ

SEQ ID NO: 255690 - protein, 393 aa, unidentified
MRVANSKSEIDGFVEALRALGHRCEIAFEPTGDYHRPLAYVLGQAGFHLALVSSLAVARTREALYNSWDKNDPKDAQVILHLLKNGTTQRYLDPLVTGHLDLQEMAHTYQQVSLRKVRLQHSLITHHLPLYFPEAERYLHSSRAEWFTALLLFAPCPAAVRQYSKAAFVKAASAQIAGRKVDRARWLADFYETACHSVGLPVTPESETVRMLRVVLEEYRAVCALRKRLEIDITTQLATHPDFVRLQTLPGIGPILAMIILAEARDLRRFGCTRQFLKYCGFDLCTEQSGQFRGRTHLSKRGNARLRYAFWMAGTVAIRMQQNSFRRKFEDYIRPDPKNADRRRKGYTAVAAKMARVAYAVVTSGIDYRRFPEATRPGGKIPSLGAVEAHATS

SEQ ID NO: 255691 - protein, 372 aa, unidentified
MTPNSITWVGMDAHKNLIAVAALFPDRPEPVEWTATTTPEAIRRLARKLRREAPGEVRCCYEAGPTGYALHRQLEAEGVICEVVAPSLTPVKPGSRIKTDRRDARKLAELLRAGLLTEVHPPSESDEALRDLCRCRDDVRIDLLRARHRLTKLLLRRHCIYRQTKHHWGTRHWAWLEELRFDDAVSQATFDSYLLAVRQLEERQDQLDAQLGEFGGRDPYREPVAWLRCFKGIDTVTAVCLVAELHDFRRFRSARELMSYVGLVPSECSSGERQRRGSITKAGNRHVRRLLVEAAWHHRHRPMISAPLQRRRAGQPVRVLAIADRAQERLGARYRRMTGRGITSPKTIVAMARELAGYLWAVLHPAATATRN

SEQ ID NO: 255692 - protein, 370 aa, unidentified
MSQSRTLFIGMDVHKDSIAVAYVAQDHGAEVTYLGARGTRQCDIDQLVRKMQSKAKHLLFVYEAGPCGYWLYRYLPRKGSDCWVVAPSLIPHKPGDRVNTDRRDARQLARLARSGDLTVVYVPKVEEEAIRDLSRAREDAISDLKDAKFRLKAFLLRQDIRYVGRAHGGPAHLRWLSEVVCPTPAQQIVFQEYVRAVQEHTERLQRLAQELQEQVNAWRLNPVVEALQALRGVQFTVAVTMVAEIGDLTRFDTPRELMQFLGLIPSAYSSGEQRRQGSIPNAGKTHARKAVVEGAWAYRYPAKVSRHLQLRLEKPPKMIQDLSWKAQVRLCTRYRRLVSRGKHANVVTVAMARELVGCMGAIATQVPLTA

SEQ ID NO: 255693 - protein, 336 aa, unidentified
MVYVGVDLHRKTAHVVALDQRGEPILSRRVATCPDELLRVFGELDHQPLEVAFEATLGWGWFADLLTDAGIPAHMAHPLATKAISSARVKNDSVDAKTLAHLLRTNLLPEAWIAPPEAREARRLARMRTSLVRIRSQLRCQIHAVLADHGVHAEVSDVFGKAGRIFLEELRLPPISRDRLEANLRLIDALTDEVAEAERQLRQLFRGDERVRRLMAIPGVGFITAVVVVTEVWDITRFASPDRLCSWAGLTPSEHSSAEHTRRGHISKQGSGWLRWVLVEAAARPQTDPSLRAFVDRIASRRGTKIARVALARRLLTLCFYALRDEGGCRAFPLAR

SEQ ID NO: 255694 - protein, 450 aa, unidentified
MNLYIGVDIGKELNYASFLNEKGLEIDKRFKFKNNYLGFLKLKDNIDKLTYDYNLKYDDILVGFESTGHYWINVDWFLTEKLNIKTVMVRNDAVRHTRALNSQGKGKNDSLDSRTIAECLKNGYYFDVQGRKEDYIVLRRLTRERSELEKEIARYKNRFRAWLDVNNPIFLENFSNVFSSGALALLKVYPSPLDIIKDSYLEVREKLREVGYSRTNKTLKIYYEEVETYKNIINGISYADRLEISEYIEALEMYMKKKENLDERIEALMNFLEGKVYTSLSEIKGMPKAQVASLIAEIGNINNFKSAIHLISYAGLNLQGEGSGKNKGHSWISKTGNRKIRKELYVITFNLVRHNDYFRGLYCYYKSYKRPNEKSSKEMLIALMCKLLRVVYGMLKYNVEFNLNEMLKNYDFRNINKEKFIDEFLGNSEKKQKIIPQEIEDIFLNNRKSN

SEQ ID NO: 255695 - protein, 360 aa, unidentified
MAKSISRTRIERKSAIAAIGVDLGDRWSHWCVIDHQGNIMQEGRTATERAALRAEFGRYQTTTIAIETGTHSPWVSRELESLGHRVYVANSRKLRLIYQNRRKDDRIDAQYLARLARLDPQLLAPIRHRSVEVSEHRTLLRSRDVVVAARTRLVNHVRGVIKSIGSRLPSCSTETFTTRVREQIPESLRPAIMPLLELLSSLNTQIRTFDRHIQQIAQRHYPVTARLRQVRGVGPLTALAFVLTIEDPSRFTSSRTMGPYLGLAPGQDQSGQSSPQKRISKEGDELLRRLLVGCAQYMLGPFGTDCDLRRHGLRIAAGGGKNGKKRGVVAVARKLAVLLHRLWVSGAQYDPLYNARQLAA

SEQ ID NO: 255696 - protein, 413 aa, unidentified
MEVLYPRCAGLDVHKATVVAAVRLVAGREIVREVRTFATTTASLLELAEWLAAQGCTCVAMEATGVYWRPVWHILAEHGFALVLANAAQVKNVPGRKTDVGDATWLAELLAHGLIRASFVPDAPSAELRALLRTRKQLVRERAGHVLRLQKTLEDANVKLDGVVADLLGKSGRAMLEALVAGETDPGRLAALAHPRLSATPERLREALRGRVTAHHRFLLRLHLDQVDALDAAVGRVDREVEEHLAPFRAAAELLASIPGVGALAARVIVAEIGLDMGRFPTAGHLVSWAGLCPRSDESAGKRRSTRLRKGAPWLKTTLVQCAWAASRKKASYLQAQYHRLRARRGPRKAACAVAASILTAAYHMLKDGTPYRDLGPDHFDRRAKEVQARRLVRRLADLGYAVELAPLEPAPA

SEQ ID NO: 255697 - protein, 389 aa, unidentified
MFYLGIDVAKRKHTAMILDEQGQVIRRAFSFTNDRSGFGQLLAEIRALPESVTIGLEATGHYWLALYDHLTRRDYTVLVLNPLQIAAYRRTGIRKRKTDRHDACWIADFVRIGGGQPCQVPQQIILQIRELARFRFRLVQQIGDCKRKAISVLDRVFPEYETLFSNMFIRTSRRLLQEAVTAEEFAAFALDELHSLLSSSSRGRFGLSKAQQILDTAAQSVGVSFLADAARLELHCLLNQIEFLEGQVADVDAALDTLLQQTQQHLTTIPGISSTLAAALLGEIGDINRFPSLEKLVAYAGIDPTVYQTGQFEAQEAHMSKRGSPYLRHALWLAASVARQHDPQLKAYYQRRRAEGKAHGVIMGAICRKLLARVYVVLAENRPYVADQL

SEQ ID NO: 255698 - protein, 355 aa, unidentified
MSSEKYIGLDVHQATISVAVMDSAGKLIMESILETKASTILEFLAGLRGTLSVTFEEGTWAAWLYDLLKPHVAKVVVCNPRKLALLKDGNKSDKIDARKLADRLRLKDLKPVYHGENGIRMLRELARSYLTIVKDLSRAMNRLKALYRSWAIPCAGRDVYYTRHRGQWLAKIPEAGTRRRAEQLYQQLDMLQYLGQQARRELLAESRKHTITAKLRQIPSLGPIRSALAVALIQTPHRFRSKRQLWAYSGLALETRIRGEYCYVHGQRRRSKKQISIRGLNKDHNHDLKGLFKAAATRASVLPGPFREFYPRSLAKGIKPTMVRLTLARKIAAITLTLWKKGENFDIEKLKSQAA

SEQ ID NO: 255699 - protein, 420 aa, unidentified
MTSPNAIPADAVLVAIDIAKACNEVLIEAPSRKRRRRLSVLNNRAEHDRLVEVLQTYGRSVICAFEATGNYHRPVAWRLAEAGFEVRLVSSLALARTREALHNSWDKNDPKDAQVILHMLKIQATQVYHDPLRAGINDVQELSKTHEAIARAKTEIQHRILTHYLPLYFPEIDRFRGNSRSDWFFAFLHAFPTPASIMVLTKEEFVTAAWDVVGRKVSKTQILMDIYETARSSIGLPLPLDAPAIRMFRMVIDEARSLIRQRNEIEAQADELLRHSQDYQLLRQIPGIGPINALTIIAEAGDLRRFGHHRQFLKFCGLDLSTQQSGQYRGQTRLSKFGNARLRRTLWIAGQVAIRQRENGFRHKFERYIARDRDNPDLRRKAMTAITAKMARVVHAVIKGGSDYRPFIEGRVPGGRTSVS

SEQ ID NO: 255700 - protein, 320 aa, unidentified
MSPNTTNTMTETNSVVHAGLDIAKAQLQLHLENQQHVLPNTVTGHQRLIRLLRVVAGVHVVCEATGGYERKVVSALHSVNLRVSVVNPAQVRHFALAQGQRAKNDPIDAALLTAYGHALRPNATPVPQPVLAELRELVQWRDHLKEQLVRARQPAEHATLAFVRRQQSKEATHLEKQMAAVEKELAAALARHPRWREQVQRLAELDGVGTLTAVSVLSQMPELGHLNRGQAAALAGLAPWTRQSGPWEGQRHIGGGRAVVRRALYMSAVALARQTGSTLGKFYARLRAAGKPAKVALTAVMRKLLLQMNQVLKYHVPDPA

SEQ ID NO: 255701 - protein, 397 aa, unidentified
MVFIMIYVGIDIAKNKHDCVILSDHATCLRPCFSLKNNSQGFALLINAIKEACGGDFNHGEVKAGLEATGHYAHNIVAFLNSNGIDTIIFNPFLVNQYRKSRSLRKTKTDKADAILIAELLISTAANPAAPSYHNQEMKTLCRYRFSLVKQRSKLKADMSRYVDLLFPELGSIGLNPTSSSVMAMLKELPGASYISICNISQLTDILSSSSRGRYGKEMAEQVKAMAKESIATANKALSYIMSDTIEQICLLNKRIAKIDGELKNEVEKSGTKLTSIPGIGFCIASVILAEIGDINLFSSADKLQAFAGLDPSTFQSGNFTASHTHMVKRGSAYLRWAIMQGARLCSLNNLKYKQYLDKKIKEGKHYNSALGHLSKKLIRLIFHLLKENEEYDPKVA

SEQ ID NO: 255702 - protein, 388 aa, unidentified
MGPVVGLDVSKGTSTLQAFTDRNKPYGKMISIAHTQDGFEKLGNLLEELKQVTGLEPAVVLEATGHYHRSLVAYLEREGYRHFIVNPLQSKRAKGTRLRKVKTDAADAWHLAEMFYRGDIQPHRTWTEEMTELQHLTRQHEFMTSLLVQAKQNARALLDQVCPAYETVFYNLFSTTSLLVLRHMLSGRSVTVETMRQTAGTSHGQAWIQAKVERIQALPPLSHSSKAQQMALLSMVEMVLTAQEQLRQLEDAIKEIAMTLPEVELLKTIPGVGDKLAAALAAEIGDATQFRDPKQLVAYAGLDPGVHSSGKFTASSNRISKRGSKRLRRALYMAVQCGLKNGANERLKTYYEKKRKEGKPYKVVVIACANKLLHHIHAILVKGEPYQA

SEQ ID NO: 255703 - protein, 325 aa, unidentified
MAVIGIDVSKQKIDCAWLRDVATGKVKTRVFPNRRQDFPRLLEWLEHQTGEPQDQWHVLMEATGIYHETLAYWLHAAGIQVYVLNPAQVRDFSRSLGVRGKTDKKDSVVLARYGATQRPEAWQPEPEEMRKLKALAARLDALDKDIQRERNRREKAEFAMATDILRSIDDILLALTRERDRLHQEIDDHLDQYPGLKQDRALLQSIPGVGPAVSLRLLAMLRSRVFTSARQAAAFAGLVPVSWESGSSVRSRPRLSKAGNPKLRQSLYMAAVVGLKRNPDISALYQRLTGNGKSKMAALGAAMRKLIHIAYGVLKTQTEYRPQTA

SEQ ID NO: 255704 - protein, 436 aa, unidentified
MEKIFENSAGIDIGSEKIFISVEGQKKVEVFRTFTSGLLLAVNYLKEYHVSTAALEATGVYWVILYDLLEQAGIEPYLVNPKETKQVPGRKSDIQDCQWIQQLHSYGLLRKSYIPDCKIRVLRTYIRQRGKLIENESRYINRMQKSLILMNIRLHTVISQIHGSSGIKIIQAILSGERDAKTLTQLCHTSILKHKREDVLESLKGTYKEEHLFTLQQAYDAYCFSKGQIEQCDVQIEKALNSITNGKQEPNAINKAKPIRHHKPNIKDLHKKLITATEGKEATLLPGITDYNLMQIVSEVGTDLRQWPSKKHFTSWLKLAPGKNQSGKINKRAKSSQTTKAGQIFREAAQTLLTSKNIALGSFARKLRSRKGPAVAIKATARKLAEMYYLTMTVGIEYVETGILKYEKISLERKFLSLQKQATKLNLKLTDIQAVT

SEQ ID NO: 255705 - protein, 434 aa, unidentified
MGHRARIGKYYQSFKEHLPATPKNIEVKYMEKVCGVDVHRDLLVATILSGETETKETRHFANDPDDIDHLKEWLKGHECKRAVMESTSIYWVPLYLALEESGFEAVLANAHQVKGIPGRKTDQSSSEWLAHLLRGGQIKPSYVPDKRLRELRELTRLRVKYVQNRTAFKNRCQKVLNRVNIRLRSKLSDVFGKAGMEILNGLMAGKSVEYILEHTENKRLKSRCDEIKSVAKGALSENDIFVLKHLTNTIKHLDEQIHQLEARIETVVNKEDIEIVSSVPGVGSRSAAAILAEVGDAKRFSNGKQIAAWTGLVPSVYQSAGTFVTGSITKQGSKWLRWSMVEVAHAAVRVRDSRFRALFLRVQAKKGKKTAYVAVARKMLTVIWHLLVNGEKYVEEGFEKTARISKAAYGGHVPLEDMAEVLRSAGYIISRPNG

SEQ ID NO: 255706 - protein, 348 aa, unidentified
MKTTPQPYYLGVDICKAKLDVHCRAWPSTRSFTNDARGIASLLKAAARLGAVHLVAEATGGYEKRLMEAAFAAGVTLSLTNPRQVRDFAKARGTHAKTDPIDAAVLTHYGECFQPRPSLPQSPQHKALQACVRRRANLVLQRQRERIALEKTDDAFVRQDIRSLLRVLDARIKKAEKHIASLIADDADMKAKALRMEQVAGVGRVVSSTVLAELPELGKISDKQAASLVGLAPFNADSGKRGGQRRTKGGRELVRRTLYMPALSSCFRNPVFKHIYQRLIHKGKPHHVAIVAVMRKLVCLLNRLLADPSFQPPKVKPASCRCSHSKPARCRSHTLASRIGWGHGDCAP

SEQ ID NO: 255707 - protein, 367 aa, unidentified
MSSIAAAGGLTYLGLDVHRDTISVGVLRPDHDVPEVERMAHDESSVRRLVARFPDPRRLRACYEAGPTGYELARLLARLQVGCQVIAPTLIPTAPGDRVKTDSRDCRRLARLHRAGELVAIRVPTVAEEAVRDLCRARADLVEDRTRARHRLSKFLLRHGRVWRGGATAWTVAHERWLLTQRFDDLALVATYGHYRAVLDARDAQLEAIGADLATWYGRPPFADQVARLAAYRGVTRLGALTLASEVGDWRRFASAPQFMGFCGLVPSEYSSGNSTWRGHITKTGNGHLRTQLVESAWAYQYRPAATLELRRRQHGLPPETIARAWTAQLRLCGRFRRLHARKNAKQLVVIAVARELAGFLWAEMVA

SEQ ID NO: 255708 - protein, 352 aa, unidentified
MDQITTVGVDLAKDVIVVCAGNATGTVVLRKQMSFGAFATWAASLPPCVIGMEACSSAHHWVRVLGSLGHSPKLMAAELVAPFRMSRAAKNDRNDAEAIMVALVQPTMRFVSPKSIEQQALLSWHRARAGFIEERKSLLNRTRGLLAEFGIWVGRSAAVLTRKLPELMDHPDLPDLFKPILLHTQEHLEHLERRIGECDARILGHARSSEPALRIQQLSGVGALTASAVVATIGSAQDYRNGRQLAAWAGLVPRQNSSGGKSRLGGITKRGDSYIRGLLTQGARSTMQAALKRLPHQRTRLQQWIVGLRERAGYHKTLVAIANKHLRMIWAILAKGEDYDPNAWRRYQPARI

SEQ ID NO: 255709 - protein, 422 aa, unidentified
MLGVGIDWAEAFHDIALGTPEKGVIQQFRIEHSPAGVERLITRCLALEDDPAEIRVVLETRHGVLVEALVDAGFVVIPVNPDVVARRRGPARKKDDAEDARICCLLALDRHTPLRQLIPHGEIAGELRAIARDDERAARDHVRLLNRLRADLQITYPAALVLAAGDLGTPTVLRLLERWPTQPELAKATREELVGFARASRHGWPERFAERVTTALAAPALPVRAHLVRAKAAGIRLAATQLLALHEARRSWERRMAELLLGGPRTGRDRTVTDPDPEKAFPGGEIYLSMPGLGDRLAARVAGEIGDHIHQYETPNALQCYAGSAPVTRRSGKSDFVVARRLAHNHHLGDAVHQWAFCSLTASAWAREFYDEKITAGKSHHAALRALSNRWLEILWHCLTKGIPYDETTHQANRNRALGHAA

SEQ ID NO: 255710 - protein, 365 aa, unidentified
MSKDIKKPAGETRRYVGIDLGDKKSRVCILDERGEIVLQEWVVTTPEAFFKRFHGETKMDIAMEVGTHSRWASDLLGRCGHKVVVADPRQLGLITKNDAKSDKRDARTLAQLLRADPRLLSPIEHRAERLQTDLTVIRMRDNLIETRTRLVTSVRGVVKATGGRLPSGETSSFPQQVSDLIPEPLRPALAPVLEVIDRLNEATYEYDCLLEHWAGTRYEDSSRLTQIKGVGTLTALTFMLTVGDKARFSRTRDIGPYLGLRPRLGQSGDNEPQLRITKAGDGLLRKTLVECAQYMVGPFGQDSDLRRWGLKMIEAGNGSKRARQRAVVGVARRLAVLLMSLWKSGQTYDPLRHSRAQESSQEVAA

SEQ ID NO: 255711 - protein, 320 aa, unidentified
MTTATAAAGIDAGKTYLDVGIEPLRQHFRVLNGASGIDDAIVRLRRAGVGKVVLEAIGPFAQPAVAGLVAAGFEVGLINPRRIKAFREAEGRRAKTDRLDARLIARFAVQMTDALRPVPTADQQALKALATRRRQLVEMIAMEKTRLKQTADPLLCESHRTAIALLSAERVRIEANLDARVAADAAQTRKRTILRSLPGFGPAVSTTLVTDLPELGLLDRRAIASLAGLAPHPSQSGASIGRNQIGGGRPCVRTALYMAALVAGRCDARFRAEYQAMRADGKPAKVAIIAIARKLLVLANSLVKNDRLYDPDHEPANVSH

SEQ ID NO: 255712 - protein, 456 aa, unidentified
MGHARARKIPAQLVEDEDYQLRHERVAGIDIAKAKADVCTRLPPAREGGRRASRVEEVPARAAEILALAARLLADGVELVVMESTSDYWRIWFYLLEGAGFNVQLVNSRQSRQLAGRPKTDRLDAQWIARLAEMGLLRPSFVPPPEIRALRDLTRTRLQLVRDRTREWQRLEKLLEGALVKLSSAVHSLAKTDTARVILQALAGGEGDPLALAGLADPRVRGGRAAIAEALEGMTVAGHHRMLIRVHLDHIAFLDRSVAAVEDEIQAALDAIPAARGVSADGIRCAGPGPDAAVLPAAERLAEIPGVSLDLARAIIAETGLDMARFPTAAHLVSWAGLSPVTRQSGPRSRKPQKGQGNDYLKGYCTQAATGAARTDTFLGERIRRLSRRLGPNKAKCAVARSILVIAWHLLASPDAIFTDLGSSWHERKTSRDRKIRTHVRQLEALGLNVTITPAA

SEQ ID NO: 255713 - protein, 377 aa, unidentified
MKSIKFVGLDVHAETIAVAVAEQSGEVRSLGVIPNREESIRKLVKKLGPVEQLRFCYEAGPTGYVVYWQLTALGAKCEVIAPTLVPVKSGERVKTDRRDALKLARCYRAGELTAVWVPDAQHEALRDLVRAREAAKKDQLRAKHRLGKFLLRHGRRPPTGVKPWTLKYLTWVKQGVHFEQPAQEATLLDYLHEVEHAEARIARLDLAIEEAVKSTPPEMKAVIEGLQALRGIAQVAAVTIVAELGEISRFSRARQLMGYGGIVASEHSSGESNWRGGITKTGNAHLRRVVVEAAWAYRHRPNVGAALRQRQELVSEEVREIAWKAQHRLYTRYRKLMARGKDKGKVITAIGRELLGFIWAIGVKVEAAQKVTERRAA

SEQ ID NO: 255714 - protein, 400 aa, unidentified
MTTRLEKIFAGVDTHADTHHAAVIDSNGKQLGDAQFPTTPAGYAALAAFLTAFGMAVRVGVEGTGSYGAGLARHLGAAGFVVVEVLRPSRQVRRTRGKSDPLDAYAAARTALAQEEHATPKTGAGQVEAIRYLLVARRSAVKARTAAIVQIKSLLVTAPDLIRERYRSLGDKALIAALARLRLSTDPLLAAVGQGLRSLARRHQLLGEEVSDLDQALAALTAAANPALVAAKGIGTITAAQLLVTAGDNPDRLRSEASFAALAGVSPIPASSGKTNRHRLNRGGDRQANAALHRIALVRMSYEPRTRDYVARKRALGHSNKEIIRCLKRAIAREVFTLLTTIVEVPVTDDLRPLRQARKLSLMTVAEHFNVWPATISKLERGTHRDDDLANTYREWLTAA

SEQ ID NO: 255715 - protein, 356 aa, unidentified
MSQKSTSAIAVVGIDIGKNSFHVVGHDRRGAIVLRQKWSRGQVEARLANLPPCLVGMEACMGAHHLSRKLQLLGHNARLMPAKYVRPYSKGQKNDFRDAEAIAEAVQRPTMKFVATKTADQLDLQALHRVRERLVSQRTRIINQIRAFLLERGIAVRQGLRFLRVEFPGILATRTDVLSPRMVRILEDLSADWRRLDARIEGLSGEIETLARQDQHCERLMTVPGIGPIISSAMVAAIGTGDVFSKGRDFGAWLGLVPKQISTGDRTILGSISRRGNRYLRALFVQAAWVVLVKVGPTHWERYGLKSWIEAAKKRLHHNVLAIALANKLARIAWAVLNKGHAFACVKTDAMASRPG

SEQ ID NO: 255716 - protein, 493 aa, unidentified
MIGYSIGIDLSINGAHDCTVLDATGQLVQRFTFDSSSAGLQQLEQRIRAIDPSHGAPVVVMEPTGLAWFLPCLYLYAQLPDVRVVRIKTSKVAALRRYLKQDAKSDRLDSLTLAKMPLVDPEKLYAVDFPSAALQGLDRMTRQRARLVESLIGRKNRLQALLRGYLPGLMAAAGKPWEPVFRALLTVSLNPFTLAGAGRNMTELREALQDKFARKALPENLLPQLRTACEHLTRLYRPIIEAGLLTEAFFDDVCDEVARELRLMDAEEQEVKDLETAIARRYQEVAPQDHLGTMPGLGAVTAPTMLAAVGTPQRFQNQAAFRGWTGIVPHASESADSQAKGLPMTKAGPKRVKLALYQAAQFARLWDPQLAKIYYDQMVHKGKPHHKAMGAVMSHLASRIHAVLTEQRDYVLRDMDGREITAREARIIVQTQYQVPAEIRAERRTSRRRKRDVSTGLHRGSAKRSSQRSSPSSQQHSTRSQAMDQTGAVVISR

SEQ ID NO: 255717 - protein, 363 aa, unidentified
MGREPWWLEPGLVGDLEGEGVVAIVGGLDVHRGQLTFDYLDVESGEVETGRVVPADRVQLREWLTRFKGCDDVAFALEGCTGWRYVVEELERVGIETHVAEPAETATLRGSKRRAKTDRSDARHLRNLLLEERLPESWIPPSVVLEARAVVRLYKDLLDERTGWLQRVQATLFHQGVPELGAKLISEAGRQRLEEADLSLAGRQAVEVGMRQIDRLSEEMEPLRRQIGRLSMRQPGCRALRETHYGVGPLTSVTIWAEMGDCRRFRNSDSAVRHTGLDVTVHSSDGKRTRGHLAKQGPPMLRWALYEAALYAARPTSPDYEYYRRLKARLDGQLALLTVARKLARRCYHTLRSLGEAALAPPA

SEQ ID NO: 255718 - protein, 379 aa, unidentified
MDVIYPRCAGLDVHAETIVACALWEEDGHIQKDIQTFSTFSKGLGDLLEWLEEHGVTHVAMESTGVYWKPVFAFLEGYVDLTLANPQRIKNVPGRKTDVSDAEWIAKLLRHGLVEKSFVPPADIRELRDFTRLRKKWVGQLTSEKNRIQKVLESSNVKLGSVLSDLFGVSGKDILARLLEKGYVDKDELDQCLRGRLKKEKKQAVYDSLLGTLTEHELRLLRLLWKHVEELERLIEEVDQHIDRLLEPYREEVNLLMTMPGVKKQTAAVIIAEMGTDMSVFETPERAASWTGLSPGNHESAGKRKSTRTTKGNPHLRSALCEAAWSAARSKTHPLSRKFWSLAARCGKKKALIAIARRMLVIIFCMISRKEPFRQPQLI

SEQ ID NO: 255719 - protein, 452 aa, unidentified
MPITILEVGKMKEQKTFRKEQMKLPKHLQHINQHAAGIDIGSRSHFVAVPEGTDEQPVREFSTFTGDLERLAEWLIACGVTTVAMESTGVYWIPVFEILEGHGLEVKLVNARHVKNVPGRKSDVLDCQWLQQLHTYGLLRGAFRPVEQVCTLRAYVRQRATLVRSAASYIQRMQKALAQMNLQVHNVVTDITGVTGMRIIKAILGGERNPNILAAMRDQRCKNSEATIARSLKGSYRPEHLFSLRQAVELYEFHQAKIADCDHQILEQLKSFDAQDILPPANVGEALQRMSGVDLTSIDGINTNTALKILAEIGTDMSRWKTAKHFASWLGLSPGTKVSGGKVLSSATKPVANKAAAALRMAAFTLFNSKSALGAYLRRQRARLGSPKAITATAHKLARLVYAMLKHGTAYVDAGQAYYEERYRSRVVQNLKRKAQELGFELVTIQGATAAV

SEQ ID NO: 255720 - protein, 341 aa, unidentified
MSEVSTIGLDIAKQVFQVHGADASGHVMFRKRLTRARLIEFFRSQPRCLVALEACGGAHHWGREIAKLGHTVRLIPPAYVKPFVKRQKNDAADAEAICEAAQRPNMRFVAVKDEEQQASGVVFRARDVLVRQRTQCINALRGHLTEYGWVVPKGATHVPTLIDQIEDPNCQLPERARPIFKVLISNLKSLDENIAVLDVEIGRRSKEDPVARRLMTIPGVGPIAATAIVALAPAAETFKSGRDFAAWLGLTPLQKSTGGKQRLGATSKMGERTIRRLLIIGGSAVVRQACMRGAPAGSWLARMLERKPRMLVTVALANKTARIVWALLSKDEVYRAPIVGA

SEQ ID NO: 255721 - protein, 391 aa, unidentified
MLNDAPLPAQAAIRTDLGAIFVSMELSRRTWLITSLSPGAGEKMSKHSVPASDVPGLLHRFAELKRKAAARSGRDFPIIVIQEAGLDGFWIHRVLQSEGIESHVVDPASILTSRRRRRAKTDRIDGETLVRTLMAFKRGEPRVCSMARAPTPQQEDRRRVCRERRILVGERVRHVNRIKGLLFAQGIFGYEPLRKCRRERLEDLRTGDGRPLPVHLKAQIIRELDRLELVLAQLKTVAAERDTLLKTASDEMPSPPAMLVQLKGIGPETAAVLWSEGLFRRFDNRRQVAAYAGLAPTPWQSGSIDHELGVSKAGNPRLRTTMVELAWLWLKNQPTSALSLWFHERVERLGGRMRKTIIVALARKLLVALWRYMTAGVVIEGAVMKPASATI

SEQ ID NO: 255722 - protein, 344 aa, unidentified
MTNIQHKETAREAKPDLFAGIDVGAEELILVIRKNGKPFDPQKFANTPADRDRLVKKLVKLPGIIVCLEATGVYHFDLSLALHDAGVLLMVVNPKASHNFAKVLMKNSKTDAVDANTLAEYAARMDFVAWTRPSDETIALRSFSRRINALTGQKAAAKNHLHALTATSETPKVVLKDAKLAITQLEKRIDCLTAGALVLIGKHPELERILALLIGIKGVGETSAIALMGELLLLPPDLSHREWVKFAGLDPRAFDSGKSVHKKTRISKAGNRHIRAALYFPALSAKQHDKHVKAYFQHLMDNGKTPLQGVCAVMRKLLHAIHGMLKKNEPFDNTRFYAIPESIG

SEQ ID NO: 255723 - protein, 361 aa, unidentified
MIMGFTKPIEHANLITKEGNLMNPLYVGIDVSIVHFMLPNGDKHSNFSVANSHDGSTQLVKRICSALTSESLDTVSIGLEATSVYGDNLVYFLREDASLASFNRKIHVLNPKQVNKFKESYNDLPKNDWIDSFVIADCLRFGRINKEVYIGDYHSKALQNLTRARYFAVCNLTKEEQRFMNVLFKKYSTMTQEKVFSDTFSTTALAVYDEFESTEALAYMDLQELTAFIIKKGKNRFPDPDAVAKAIQKAARSSYRLPKTVNDSVNQVLSISITSMKALESQIKEFDKAIATQMELLPNVLISIPGIGPVYSAGIMAEIGDINRFNNQAALAKYAGLAWTQHQSGGFEAQNTRLIHSGNRF

SEQ ID NO: 255724 - protein, 454 aa, unidentified
MSLEDRPVEQPHAAGVDIGAREIFVAVPHDPEGQPVRKFATFTEDLWRLADWLQGCGVTTVAMESTGVFWIPLYELLEQRGLKPCVVNARHMKNVPGRRTDWHECQWIQFLHSVGLLRAAFRPEEQVCAVRAIVRHRQQLVEMAAQHVQHMQKAMTLMNLQLQHVLSDITGTTGLAIVDAIVAGERDPKELSKLRDPRVKASSDVIEKSLCGNWREEHLFTLGQSRQFHRFYQEQIVICETNIERLLQQFDPRVDPQQTPLPPDNKCNRSGAKRRKKAGHVESQFDLRTEAYKLFGVDVTQIPGLETNVLPLFGEVGRDLSRWPTASHFISWLSLCPDNDISGGRVLWRGMRKTNNRAGQIFRLAAQSLHRSPTPIGEYLRRLKAKLGPAGAITATARKIATLFYTLVTRQVEFDHTLWHANDAQRQQRIQTRLTRQARRLGYQLVPLEVSSST

SEQ ID NO: 255725 - protein, 381 aa, unidentified
MDESIKFFVGLDTHKDSIAVAVCEAGREPSRFVGIMGPNVPGVLKMLRKYGPAQQVSVVYEAGPTGFGLHRVLSEHGYRCSVIAPSLVPRRPGERIKTDRRDCARLAELSRAGELKAIWVPDPAHEAMRNLWRAREDAVNLRLKARQQLKAFLLRQQRRYSGKTSWTKMHERWIADQRFDHPADQIALTEYHLAVQAADERVKRLSTALAQATQGWRFEPIVAALRALRGIDTVSAIGLVCEIGDIHRFATARQLMGYLGLVPSESSSGPSVRRGSITKTGNAHARRLLTEAAWNYRFPARMSNELRDRSKALPPDIRTHAWKAQVRLCSRFARMSSRGVQANKVCVAVARELAGFVWAIAKLTSSDSRPQHQATDTGAIG

SEQ ID NO: 255726 - protein, 421 aa, unidentified
MSSRTLSKKLASVKPGTLFVGVDLALDRNVAVVLSERAERLARFGFPNDRDGYDYFYRRLKAVQERQQAPAVLVGMEPTNYFWKLLASDMEQRRPDYGYRLVNPYTVKKNREGDQLDRSKDDNRDAFTIGDLLRTGKYTQTRLLHGAYAELRQYVTLHTRLKRDIRRQKTLIRNVAGQLFPELPGVFKDFSGETALAMLRHHASATIVQRMSQKAFIASVRANFSGRRLQVAKLRRAHGLAARSVGLKDGVEALQLALRLHIGMLEALRRRVEEVRAALIDVFLALPESDYLLSVHGLGLITAATILSEIGDPKHYSNGNQLIKLAGTQPVLNTSGRKTRSRTPMSHKGRPRLRTALFFAVMRLVQVDEAFARQYLQLQTREKNPLTKMQALGALMNKLLRILWALMHNRTFYNPDFQRVA

SEQ ID NO: 255727 - protein, 388 aa, unidentified
MTQYIGLDVSMKETAIAIRRSGKRIWRGKCASDPAAIAELIRMRAPNAERVVFETGPLLVWFYHVLRAEGLPAICVDARHPKAALDMAANKTDANDADGLAHLAEVGFFREVRVKGFDSMLSRTLVAARTKLMRTTLDVANQIRGLMKTFGLIVPCSMGGKFEAHVRSLLAENTGLSRIILPLLEAWRSLRLQAARLGQQLLAEARRNQQCQLLMSIPGVGAITATAYLTAVEDPANFKRSRSVGAWLGLTTRRYQFGEVDYDGHISRRGDTHVRSLLYEAAVVILTRSRADSDLRSRGIRLREKIGFKRSAIAVARKLAVIMMRCFAPVSSSTGRQPPSNSRAPQRPRREEASLPGPRLVHSVKTVALRVCSERARHTLEGPTREAP

SEQ ID NO: 255728 - protein, 391 aa, unidentified
MLPARLREQNESVKFLVKGDSMSVRRILAKTIDTDLEYEAIGIDLAKNCVSAALLTTDGEVVGIDRLDYSELEKSAQALSPTTFAMEPCTEMNYLVQKLEAWGHRCLVIGGKNVQNYVENHYSGQKTDLNDAQALAFLAQDKQLRTIKAKDIEQQKYASLTTLREQYIKQYRQTIVSLKGICQAWGLNISKGISGKAQLKDLIENHAAFPEELRESLVDMVTHAQTTQKVLNKITKTLEVLAKNDKVCQLIQTIPGLGTICSCRLRATIGDIKRFKNPKDFPAYYGLVPRSIATGHNEKKGKITHRGDRTMRSLMVQGAGCVIRLATCGKLKSKQLTKWILKKQKEKMPWGKLVCAVAAKLLRIVRAILISSKPYNPKIAGVAKCSLSKGS

SEQ ID NO: 255729 - protein, 329 aa, unidentified
MDEVVVGLDVHLKNTQVTVMKLNGEVVKKERIKTCKAELRRSLETVPEGSRVALESVGFCWPWIDFLDELKFVPLLANPMRVKLRAEDVKNDKVDSKTLADLTRMNWLPTCYVPSTEMRWLRSLLRHRSFRTKLSTGVKNRTKSEFRKRDIELEVNLGSMKGRKAASGLGVFEVSQNVELLELMNRQTKEIEAMLFKRYGHVKPVELLMTIPGVGFLSAITLYAEICDIKRFSSAEKLAHYAGLVPKVRQSGEHSFTGKETRGDAWLKWILIEVAWAHVRYCPNGHLAEVFIDACKRKGDSRDAIKIVARKLVNVVWAVWSSERDFTVK

SEQ ID NO: 255730 - protein, 312 aa, unidentified
MDAIYVGIDVSKDRLDVAVRPSGESFVVSRTGAGIDELIERLQSLSIKLVAVEATGGFETVVAAGLAGAGLPVVVVNPAQVRAFAQALGRRAKTDPIDAAVIAHFVEATKPQRRQLPDATTRLLAELVARRRQIVEMIAAESQRARHITVPRLKKGIARLHKALEKELSELDDDISDHVRGSPAWAEKEDLLASVPGIGPTIARTLIAELPELGSLDRRQIAALAGLAPWTRQSGQWRGKSFIGGGRSSVRRVLFMGAMVAARFNPQLKQFRDRLVAAGKPKLVAMIAVARKLLTILNAILRDKTPWQPKNA

SEQ ID NO: 255731 - protein, 340 aa, unidentified
MLYIGLDVHKEFCQACVIDESGRALSNERFSSTSEELDRFLDRFQDAKFVLESTGIWEFIYEGIEKRGFEAVLAHPLKVRAIAEARVKTDKVDAETLAQLLRADLIPRSWIPPKDIRDLRQLVRQRAYLVRESSRFKNRIHAEILRRGVRRPGNLKTPFSQKSIDWMHSLSIPTVTSCLNCLENVQAQIEEMNIQLLEEYSRRPDAQLISTVPGIGFYGALLILAEIDDVSRFRHPEKLCAYAGLVPTVSQSASSVRYGSISKDGSAYLRWILTESVHVHTRYEPESQLSSFHARVARRRGKRIATVATARKLLRIVYWMLVRHEPYHSHGFNPVKRLHC

SEQ ID NO: 255732 - protein, 393 aa, unidentified
MNEARYFCGVDVAKDSFVVSVKNGRFLAKNRTFTMDRSGFRDFERIISDFKEGVVIGMEPTGIYHHNLLNFLRERDYNSVVVNPYMLHQFFKFTNNKPTKTDKKDSKTIAEFLEFKQDELKESPKTVDERYSARYFVREKERITQDIARTKTEIKRMLSLVFPEAEKLSGVYSQEFLSVLLEFGGAAKIRRTSKARFVSIAKQLSDKGRGRKSKFSPEKIYELASSSIAGEWPDYEELLKIKIRRLYRLLEEKEQITKLIEEKAEKFFKREIEILSSIPGVGKESAIYLMAELVNIKRFEDYRKLVGFCGLDPVIKQSGRFKASWRISKRGNAHARRIVWIMAGCIKRSCPYFREYYLKKRNEGKSYKEAVIATSTKLLRTIFALLNENRVFK

SEQ ID NO: 255733 - protein, 325 aa, unidentified
MAYLGIDVSKDTLAVKLLLADGQQEQGEYSNSASGFKKLGRWLKPHQVEGVHVCMEATNIYWEEVAQYLHDQGYKVSVVNPARIKGFAQSQLRRHKTDKVDADVIAQFCQAITPSIWVPPTPEQRKLRALVRHQKALQKTLTQQTNRLATCTEPAVKSSLELIITTLSSEIERLQVQIQAFIDDHPDLKQQFTLLISITGIGPKTAIGLLAEMYDLADYDTARSAAADAGLTPSHYSSGKTVHRKSKLSKMGKSSVRGLLYFPAITALQHNPIIQALKQRLQAQGKAWKVILGAAMRKLVHLAYGVLKNQTPFDPNFLNNPSPST

SEQ ID NO: 255734 - protein, 350 aa, unidentified
MAKSITDLSAVTTVGLDIAKNVFRVHGIDEAGEVVAARSLRRGRVLAFFSGLPPCLVGLEACATAHHWARELTKLGHEVRLIPPSYVKAYVRRQKNDAADAAAICEAVTRPSMRFVPVKTIDQQSVLMLHRARSLLVSQRTALINALRGHLAEFGIVAAQGRQGAARLMALLAESREEEIPGVARAALLPLVRQIERLDHEVRALDRQILEWHRASEASRRLATIPGIGPLTASALVAGVTDPAHFRSGREFAAFLGLVPRQSSTGGKERLGRISKMGDRYLRTLLIVGATAVLRHARKEGSALKGWARALMERKPFRVAAVALANKMARIAWAVMARGEPFRSFRTQTA

SEQ ID NO: 255735 - protein, 421 aa, unidentified
MKGLRTKRVNMIKEGTLIVAIDIGMVSNHGCCVAADGRSTKTFKFDNTREGLDRLWNMVLASKTRFQCNEVIVGYESTGPYGEPLIHYLKKKPATIVQVNPLHTKRMREINDNSPLKTDRKDPRVIADVIRIGHALSVLVPEGDAAYLRRINNARERHVRERTALLNQLQQFVFLIFPEFTRIIKTIFCKTALHILKKYTTPAKICGVKIEKLAEEMWRRSRGKFGVKHATALINYAKTTIGIQEGVNGLVMDIQHALVQLEMVDSLIAELEHEMETTLQRIPYSRKLLAIKGLGIVTVAGLIGEIGDFTKFTTQSEIAKLAGLDLYEVSSGKKQGQRRISKRGRSLLRKILYYAAIQTIRENGIMHDYYQRLIGRGMKSMMALVAVSRKLLRIIFAIVRDDSEFVMNHEAQRKEEMRRAA

SEQ ID NO: 255736 - protein, 349 aa, unidentified
MSQTAQTAVAVIGIDIGKNSFHIVGHNERGAIVLRQKWSRGQVEARFANLPPCLIGMEACVGAHYLSRKLNGLGHDARLMPAKYVRPYSKGQKNDFRDAEAIAEAVQRPTMKFVATKTADQLDLQALHRVRERLVSQRTGIVNQIRAFLLERGIAVRQGQRFLRAELPRILATPPDVLSPRMARVIEDLAGDWRRLDERIEGLSAEIGVLARADSGCERLMSVPGIGPIISSAMVAAIGTGDAFTKGRDFAAWLGLVPKQMSTGDRTILGKISKRGNRYLRVLFVQAAWVVLIKPQSWERHGLKTWIEAAKKRLHHNVLAIALANKLARIAWSVLARGRGFEASRLQVA

SEQ ID NO: 255737 - protein, 299 aa, unidentified
MEVVYRRCCGIDVHKKLIVACLNKEGKRELRNYGTATKDIKELAKWLTDEGCEMIAMESTGVYWKPLYNLFEVMGLSAMVVNAAHMKALPGRKTDVKDAEWIADLLRHGLLRSSFIPCREQRELREVARYRKSLIEERAREINRLQKILEGANIKLDSVVSNINGQSARKLLSLITTNTELVADEVAQLIHVRMRPKLGQIMSAIEGITTPLQRRLLAQVIDHIDDMTRRITDMDGLIQEYMTGYEQAIEAIDAIPGIARRSAEVIVAEIGLEMERFPSAAHLCSWAGLCPGNHQSAGK

SEQ ID NO: 255738 - protein, 428 aa, unidentified
MIDQQHSTAASNLVAIDIAKDWNVALVQDTCGRRHRFKFANRGADHDRFVHFLRSLPGAVRIGLEPTGDYHRPLAHRLLREGFEVVSISSLALARFREARFGTWDKNDPKDAQVILAMMEQGMVQIYWDPLLTGAHDWQELSNTYFHVTLARTRLQHSLLLHHLPLYFPEFTRYWHSTRTTWFIHFLQRFPIPAAIRALDRDAFIAEAWTIAGRKVNKRAKLEEIYDLARESIGIPVALDSAAVETFRLQLSRYAELNRQRDALDRRAQELLAGNLDFQRLQTLPGVGAITALTILAEAGDVRRFRHHRQFLKYCGLDLVKSQSGQSKGREVLSKRGNKRLRLAFWIAGLVAIHQRENAFRDKYERYLSATPFDADRKRKALTAVAAKMARVAYAVIKHGSDYQCFFEQRIPSGSIPLARAVEASSTS

SEQ ID NO: 255739 - protein, 338 aa, unidentified
MNYVGIDHHRQYSHMTLMDQEGQVLRSGRVPNLRSEIERFLEGGEAMEAVIETGRSSYTMVDVLEEMGVAVKIAHPNEVKAIARAKIKTDKRDSEVLAHLLRMNMVPEVYRRSTENRQAQRVLRQRSFYVSAMTALKNRVLAFLAQQREEIREEVARETNIFSDKGQKALLGLDLAPGEKRLLEALLKTYRHLETRIHESTELVEKLYEKSREAQLVRTIPGFGKFLSVLVTVEIAYLARFADAAHLHAYAGVIPSTHSSGDRTHHGKIIRAGNRRLRWAAVEAVWPAIRADFDLRCFYERLARGKGANKAKVATARRLLTIIYKVLKEGRNYIAYPR

SEQ ID NO: 255740 - protein, 388 aa, unidentified
MTQAPVPHSVPTAPDYDRTLVLAIELSNKSWVLAAQVPGLPRVKAKRTIEPTAEALLAAIQGYRERAHAAGRHIERMVATYEAGWSGFWLARWLATHGIETHVVQPSSVPVDRRARRAKSDGIDAELLLRTLLAWLRGEPRVCSMVPVPDEADEDARRCIRERAELVAERVALVNRIGAVLATLGVGDYNPLLRNRRERLDALRTAQGAPLPPHAHAKISRMLDRLDLVRTQITALEQERDAVLEDEVPDRAGAMIQQLATLRGIGVQSATVLVREAFVREFANGKALGSYAGLTATPYSSGGTDREQGISKAGNRRLRTVMVELAWLWQRYQPGSAEVSWFRERVSGTGARMRKVMVVALARKLLIALWRFATQGVVPDGAVMKPAS

SEQ ID NO: 255741 - protein, 366 aa, unidentified
MIVIGADTHKGSHALAAVDEGTGRVRGSRQIKADEPGHLAAVRWARGLDEERVWALEDCRHVSRRLEQALLAAGERVVRVPPHRMGASRKGEREPGKSDQIDALAVARAVVKDGVEQFPVAYLNEQAMEIRLLLDHRGDLVAERTRTVNRLRWHLLELCPELEHSLKRGALNQARVLDRVDRRLRKLPAGARVRVAREQVSHLRTLNREIDALQCGLVELVKVHRPQLLAEQGCGALTAAILIGHTAGVKRFGKESSFALLTGTAPIPCSSGQRIQHRLNRGGDRQLNHALHIIAITRAQRDPATKTYLARKEAEGKTKKGALRCLKRHLARRFYHLLAEPPADQQQAAVDPNSNGVAPSPMVCVT

SEQ ID NO: 255742 - protein, 408 aa, unidentified
MKTLHQRCAGLDVHKQEVVACLRLVTQGRVHREVRRFPTTTRGLLELAAWLEAARCTIVAMEATGVYWKPVWHILDGSFELVLANAAHIKGVPGRKSDVNDATWIADLLAHGLIRASFVPPQPIQELRDLTRTRKQLSREIVRHTQRLQAVLEEANVKLASVITDILGASGRRILKAMITGETDPSHLAELGSRRLGCSRDTLVEALDGRVRDHHRFLLDQHLKTIEQLEETMAAFDARIEAALAPFRDTVERLTQVPGLSTRAAEVVIAEIGLDMSRFPTAGHLLSWAGLVPALDESAGKRRSTRVTKGAPWLKPVLVQCAWAAANKKNSYFEAQFLRLKGRRGPKKAAVAVAASILTTVYHMLRDGTCYQDLGPNYFARRNPARTARKLADRIRSLGYIVEIRSAA

SEQ ID NO: 255743 - protein, 421 aa, unidentified
MPTVEWIGVPVMEVVFDRVAGLDIGKASVTVCLRTPGARWGRHSETRTFKATTGSLGLMRDWLVEAGVTIAAMESTSTYWKAPFYCLEEVMEVWLLNAAHMKAVPGRKTDVRDAEWIAQLLEHGLLTPSFVPPPPIRRLRMLTRYRVQLMGDRTREMTRLELMLEDASIKLSSVASTMTTVSARAILTAMIDGETNPLVLADMARGKMRRKIPELAQALEGHFDAHHARLARSILARIDQVQTALAELDEVIAAEAAPWQHQLDLLQTMPGIGPRVAQVILAETGADMTQFGSAARLASWAGLAPAIYESAGRRTPTGTRHGNKWLSGMLVEAAGSVARMHNKNYLAAQYDRLSSRRGARRALVAVAHSMLVDVYYMLLRDQPYHDLGPDWLSHRNDQARTRKLVAQLERLGHTVIIDPAA

SEQ ID NO: 255744 - protein, 384 aa, unidentified
MPRVVIGVDPHKASNTLVVIDAREQVVAEQRFVNDRAGYRSMKTFARAFPERTWAVEGARGVGAGLAQRLVAEDEPVLDVPAKLSARVRALGGGSGRKTDSADAFAVAVAGLRAHDLRIVRPDDVTEVLKMLTDRRQELVRERIATVNRLHEVLTQLIPGGARKNLRASTARRLLSSVRPRAVVGKARKQLALDYIGDLERLDTRLKDLKAQIADAVAAQGSSLVSIDGVGPLGAGKTLAEVIDVRRFPSKAHFASYTGTAPIDVSSGENNRHRLNRGGNRRLNHVLHIAAITQTRMAGPGQDYYRRKRDQGKTHLEALRCLKRRLSDVVYRHLLNDLAAGSPGGQVGASLQSSAADLIPMASTSEQSLPGLKVDPTPDLVVVS

SEQ ID NO: 255745 - protein, 344 aa, unidentified
MDHFAGLDVSVKETSICIVDDTGRIVREVKVASEPEALVAVLKNLAYHFKRIGLEAGPLSQWLYSALAEADLPVICVETRHMRAVLKAQINKTDRNDARGIAQMMRVGLYRPVHVKTLRSQKLRMLLTHRKLLQSKAIAIDNDLRGTLRNFGLKVGIVGTVRFEARIRELVENLPDLAALIEPLLIVRRTLREQFCILHRRLLATVRDDEVCRRLMTTPGVGPVVALTYRATVDVPARFRKSKSVGAVFGLTSSKYQSGEVDWSGKISRCGDEMMRTMLYEAAQSMMHSKKWSWLKAWAMQIARRRGMKKAVVALARRLAVIMHRMWIDGTEFRWTREQAAAAA

SEQ ID NO: 255746 - protein, 354 aa, unidentified
MNGIAAKVRSLITRRQGKHTMESVRKHIGVDVGKEWLDICHPDGTKEHVRNSRKFRRRLIEKAKHQDAIVSFEATGPYEEALAEECTQAGVKAVRLDAWATRKYAESQGRIEKTDEIDSEMIRDFAASLKAEKLHLVKPVSLARRHLKRLVAVRDNLLKAVAILRNQLEALADDTGLRRDVNAAIRAIERKIEKVEAECDEVIASDDEMRSLSERFLRVKGVGPCLVRTVLASCADIGAFNSKSIAKMSGNAPIDHRSCTIVRKSKPRRGRSDLKKAFYMAAVSASRSNQVLHGIYQRLVSRGKPKKVALVAVARHLAIVLNYIAKYPDFEPEPDQRRGERKPSASREKPKMAN

SEQ ID NO: 255747 - protein, 315 aa, unidentified
MSDKPCFVGIDVAKAQLDIALRPSGERWAVPNDTNGVTTLVDRMQTLQPTLIGLEATGGLERLVTSALATGGLPVVVVNPRQVRDFARATGQLAKTDALDARALAHFADVIRPTPRPLPDAQTHELRALLGRRQQLVAMRTAEQNRLAGTSARLMKDIAAHITWLNAGSTTLDDDLETMLRASPLWREHDELLQSAKGIGPVCAHTLLLELPELGTLTRQQIAALVGVAPLNCDSGTLRGKRTIWGGRAHVRTVLYMSTLVATRFNPQIKAFYERLLAAGKVKKVALTACMHKFLTILNAMLKHRTPWQPQEVQS

SEQ ID NO: 255748 - protein, 388 aa, unidentified
MIQVDDLSRSLIAFEQISTLVIVVELSQSSWLAAGVVPGIERRPLKKLDPDPTALLHLVEGWRDRATKAGRAITRTVLAFESGRDGFWLARWLRVHGVETFVMHSTSVAVSREPRRAKTDRLDTEMLIRVFLGWLRGEPRHCKMVAIPTLEEEDARRPSREREILVGERTRIINRMKAALVRLGIRGFKPGLLTAPQKLDALRTPEETPIPPNMLDEMRRDMARLAWVREQINAIEQARLERLERAPATGRHAMVRMLARVIGVGVETADMLVQEALSRNLRDRRAVARYAGLTGSPDESGSKRREQGLSKAGNARVRRGLIQLAWRFLRFQKDSALAQWYRGRTEDAAGKRKRTMIVALARKLLIALWRLATIGEIPVGVALRPAVA

SEQ ID NO: 255749 - protein, 374 aa, unidentified
MMVLGADTHKRSHTIAAVNDLTGRQLADVTVRATRRAFEELLVWARGLDGRERVWAIEDCRHVSGALERFLLARGERVMRVPPKLMAGARTSGRERGKSDVIDAIAIARAAIREGIDSLPVAQLAGPELDVRLLVDHRERLVGQRTRLINDLRWNLHDLWPEYEIPPRAMIHRGWQDRVDGRLKRAEQSARVRIARDELRRIRELTRSITALEAELAPLVAALAPGLIAERGCGTLTAAKLIGEIAGIARFASDAKLARAAAAAPIPASSGRTDRHRLDRGGNRQLNCALHRLAVSKGRLDPETAAYLARKQAEGKSRREAIRCLKRHLARRVWKLLQPPTGPSLSEIGSRPPTIAKPGVMIHCNTPSGTPALT

SEQ ID NO: 255750 - protein, 391 aa, unidentified
MKGDFRIVGFDCGEDEHGAVLLGTDGEVERTIEVVNRRDEIERVLAELMLAIGPSSRLGVVVESKRSHGRIVADVAQALGCRVWQVNTVALNHSRALEGQPRKDDEWDAYLGGRMAFLGMRGCRLVVESTDEERALSRLTRAYGRLRKVHTQAVSRLRASLLELAPEMLHNAWEGPKVGSKAVLYLLERWPGFEGLERARLRSIEGILHTCRYGRRAPGVAKKLREMARRIEVEPEERAAFTMEISLLVHQIRECKESMDRLHTEIAERVQRHPVGAKLLEMRGIGPVIAGVLVSELLPVARTSTEPKCATYSGVTPLARKSGKSLDSDRLAQGVNKHVLHALYTSSVVAIKHSPIDRAYYQKKLRGYKGHRKPHVAAFIALSRQRHKLFD

SEQ ID NO: 255751 - protein, 370 aa, unidentified
MAQSTPLFVGLDVHKDSIAVAYAAGGSAEPPVFVGAIGARQADRDRLIQRLRSKAATLVFAYEAGPCGYGLYRYLTGKGLTCQVVAPSLIPKKPGDKVKTDRRDALELARLLRSGDLTAVYVPSVEDEAVRDLCRARDAARVTGKDAKLRLKAFLLRLGLHYVGRATWNDAHRRYLAKVVCPTPTQQIVFQESVRAVDEQVDRRQRLDAELLERAPAWRLAPVVDALQALRGVQFLVAITVVAELGDLTRFDSPRQLAAFVGLIPSEYSSGGSRRQGGITKAGNGRARRALIEAAWAYRHPAKVSLHIQQRIDHLPKALQDLGWKAQVRLCKRFRRLVARGKHPNVAVTAVARELIAFMWAIAKAVPVPA

SEQ ID NO: 255752 - protein, 349 aa, unidentified
MKIIGCDFHPGYQQIALLDLATGEILEKALSHERKEEVRTFYAGLQGPVRVGIEASGQSQWFERMLAELGHEVWIGDAAKIRASCERKQKTDRRDAELLLRLLAEDRFPRIWVPTAAERDERQLLLHRHKLVRMRTQVKNQLQALALNQGVQRKWKLWSKAGREQLESLPLLPWASRRRAELLQLFDQLEASIGELDRAVAEQAWARPAARRLMTHPGVGPFTALAFALTMGPAERFQRGKQVASYLGLIPSEHSSGGRQQRLGHISKQGNPFLRGLLVEAAQSAVRYEPEMRRAYQRLAQRKCRALAKVAMARKLAVRLYWMLRLRVDYAQLIQGSHAGQPGTFCGRG

SEQ ID NO: 255753 - protein, 314 aa, unidentified
MDGYVGIDVSKGRLDVLLVRESKREGQQFTNTPTGYEKLHRWLERRLKAEPVHVCLEATGSYGEAVAEYLYAQGYTVSVVNPARIKGYAASQMQRNKTDKLDAALIADFCRTQQPEAWTPPAPEMRQLQQLVRHLDDLTQARQMAKNHLEQTGLGSSIVQHWQDQLSLLDSQIAQTQHPTLKQQADLLRSIPGLGDTTIGKLLAECRDIRAFRDVRQLVAFVGLNPRHHVSGSSIHKRPTISRTGSASLRAALFMPALVAMRFNPILRAFADRLRARGVAGKAIVVAVMRKLLHLVYGVLKSGQPFDPNWAIAA

SEQ ID NO: 255754 - protein, 349 aa, unidentified
MDLGDKHSHLATLDQGGELIEETRLPTTQAAFHRKFSTLSACRVAMEVGAQSRWVSHLLKELGHEVLVANARKLRAIYANPRKDARTDAETLARLARLDPHLLSPIHHRSPKAQTDLAVIRSRDALVRSRALLINHVRGIVKSFGDRLPSCSANYFAKKVTSDIPEPLQPALMPILETIASLTQQIRAYDRQIKSLCEIKYPETKLLRNVSGVGPLTALAYTLTLEDPQRFPKSRDVGPAIGLVPKRDQSGGRDPQLRITKTGNIFLRRLLVSSATYILGPFGPDCELRRWGVRLAERGGKNAKKRAVIAVARKLAVLLHHLWKNGEVYDPFYHTQKEETGSAVLPTAA

SEQ ID NO: 255755 - protein, 453 aa, unidentified
MAQGSGLTRGDRNRNDRIAALRGVVRRDRAVLAIDLGEDKQAAALVDHEGRVLARRIVKAKAHQLGGLLAWAAEQAARAGFAGLTVACEPTGHRWKALMGLADAAGHGFVCVQSLAVARAREGDDYTRDKTDHRDAYLIGKLVIRLECYLPERAGEDWARLRHLGARRFALVADVISCMQQVGDLLACAWPAALETAKRPLESTTWLAAMGVVTDRCNGDPARLRKMGYEKFVAAVRRELPRWGAKKIYHKIVKGLWEALADAGGVIAQRRGALERVHLLMGDWRSLLARLADTEGRMTAVLDELGLTELVTSIDGLSAVGAAVILAETGDLTRFASARSVVKHAGLNPSEHTSATLAGKTRISHRGRPGLRAAAWRAVWGGMRHNRVLHARHAHLTGRDGNRLSDGQARAACAATLLRWLYAVVTTRRMWDARIAAGAISARRGAVTTAAAA

SEQ ID NO: 255756 - protein, 321 aa, unidentified
MQGKAETKPATALYAGIDVSKARLDAQLHGMGERLQVANEAGGHARLVERLETHGVVKVMMEPTSHYHREIHRRLHEAGIGVVLINPLRARLFAQAHGKLAKTDAIDAAMLARMAAQTELKPVAPPSAQQQELQELTSARRAALAERTALNNRLGATTVAFLKGELTKRLRSIAGHIDRLQARIDALIKADPEMSRKARILRSIPGIGPVTTQALLAQLAELGQLTAKQAAALTGLAPYARDSGTIQGKRHIHGGRADLRSALYMAALTASRKNPDLELFYQNLIARGKAAKLALAAVARKLVILANTLVSQNRSWELKTA

SEQ ID NO: 255757 - protein, 372 aa, unidentified
MTLPAMPDAEVRVTLGVDTHAEVHVAVALDQLGRRLGACTVATTPAGARELLWWASQFGPIEQVGCEGTSSWGVGLARFLRGQGLAVLDVNRPSRQTRRRRGKSDPVDAEAAARAVQAGTATTVAKTADGQVEMIRTLRLVRRSALKARTQAANQLQSLLVTAPDELREQLRGLSLDRLVAAAAQLDPDGRVTTTLGASRLALRSVAVRYQQLTAEITALGQQLDRLVAQAAPALVALPGVGTDTAATLLIAAGDNPERLHSEAAFAHLCGVAPIPASSGKTTRHRLHRGGNRDANRALWVIAMGRLRWDQQTRAYMARRTAEGKTKLEIIRCIKRYLARELYGVLSAPTDRGIRPPTRPPGSRRDTATDGH

SEQ ID NO: 255758 - protein, 422 aa, unidentified
MSEVTFPRLVSRGCGIDVHQKVVVATIDGEGLTKETREFETFTSSLTEMRHWLETNGITHVAMESTGVFWVPVFTILEKSIPNVWIVNARHIKYVPGHKTDRKDSDWICKLLLAGLLKPSFIPPLEQRNLRELTRRRRQLVQEISSEKNRMMRLLEQCNIKLKSVMSHMDGKVATQLLDKLCSGEEVTMDYINSVYHGRLNATPEELYKACQGKIDNDNLFLMYIIKAHIYEMEKLVAQLSERITEKLSPQRAILDMLKAVPGLDLRTSENLLAEIGFDMSKFPSAKHLGSWAGLCPGNNESAGKRKSGRITHGNKQVKAVMTEAAWASTRTKNTFYSERYHRIAARRGKKRALIAVAYSMLTTVYNILANNVTYNELGAEFVTLLIEKKRKRYLTAELAKLGYEVQIVKKQLPLKTDGCST

SEQ ID NO: 255759 - protein, 307 aa, unidentified
MFVGIDVAKDRLDVHVRPVGESFVVARDGEGIEELARRLSAVTPTLVVLEATGGFETVVAAGLAAAGLPVAVINPRQIRDFARATARLAKTDTLDAAVIAHFAEAVNPPVRLLADPQQRLLGELMARRRQLIEMMVAEGNRRRLLTARRALKSVDRVLATLKAQLEEIDHDIDIAVRGTPAWREAEDLLISVPGIGHKIARTLLAEMPELGRLDRRQIAALTGVAPFNRDSGTLRGRRTITGGRAVVRSALYMSVLVSIRRKLPLAHTYHRLRASGKPAKVAIVACMRKLVTTLNAILRDKKPWATA

SEQ ID NO: 255760 - protein, 391 aa, unidentified
MYYCGIDVGKNSHTVLVMDERGEVTRSAQRIENDRGGLNQLLGLLSSYAGQILIGLEATGHYWLALFEALTRQDYPLVVLNPMQVRAYRKIDIRKRKTDRQDAYWIADFVRFAQPSSSSLDIPVYLQLRELSRFRFRLTQQIGDCKRKIICILDRVFPEYERLFSDVFLQSSRQLLQEAVTAEDFAGLDLAELERVLNRVSRGRFGSEQARAIQEAARESIGVSFLTDAVHIEMSCLLKQIGLLEQQQKTVERKLEEMMACLPQYITTIPGIGLATGAMLLAEIGDIHRFESLEKLVAYAGIDASVYQTGLFKGDKMHMSKRGSHYLRYALWQAASASLLHNPEMKSYYDKKRGEGKPHGVAMGAVCHKLLSRIYVILKECRPYVIYPQNN

SEQ ID NO: 255761 - protein, 414 aa, unidentified
MKFNCCGLDVHKTWIYACIGITDSNNRTEYKQARFSSFTKGLNELCDWLAKYNCKDVCMESTGKYWIPVFNILEQHELWVTLSHPKYTKPMKGNKTDRKDAKWICDLYMCGMVKPSFIPPADIRELRDLVRYRFKLTCMITGEKNRAQNCLTVSNLKLDDVFSDVFGKSSRSITEQILQHPGEKFDVSPFVDGRCKTPIEEIQAAVDGAISKEQAVKLRQCLDHIDELQKHISEVEQETLRLSDKYEAALNLIRTVPGFDKNPMTAIQVLSEIGGDMSVFPTAKHLVSWAGCCPRNDKSDRKIKSTRISCAGSYFKPVLVQVANALIKSKKHPEFTTRYKRIKARRGHKKAIIAICRMILTAIWHILSDLKPYTPDGFLESRPVGKEKILTTSQALNLLKQRGYLIKDDALPAS

SEQ ID NO: 255762 - protein, 368 aa, unidentified
MSTTVYIGMDVHSTNYTLSSYIFEEDKHFATVKLSPETNSILNYIKRIRKEYGDDIDVITGYEAGCLGYTLYKDLKKNDVECIIVAPTSLPKQKTGEIKTDKRDARKIAQALAAGNYKKVYVPDNHDDQIKQYIRMRDDHKLALKKVKQQILSFCLRNGFKYSEGRSHWTKKHLKWLRDLEMSELLKTILEEYLISYDYYSLRMEQMDKRIEQFADEERYKESVEKLCCLSGMSVHKALCHIVETSDFSRFRKADAYSAYIGTVPGEDSSSDKVNRLGLTKAGNSHLRTLDIEAAHAIGRTAKKKSKALMLRQSLCSPEVISYCDKANERMRKMYIDISLRKNKQIAAAAVARELSCFIWGLMTGHTS

SEQ ID NO: 255763 - protein, 297 aa, unidentified
MTQVTTIGLDLAKRVFQVHGVDATGTVVVRRSLRRRQVLAFFAKLPSCLVGIEACATAHCWAREITKLGHDVRLIPPAYAKAYVRRNKNDPADAAAIWEAVSRPSMRFVAIKTEAQQAAAGIHKVRAMLVKQRTMLINTLRGLMAEFGIVVADGRQHVEELIAVLTDPAEARIAAPLHDGLMAIVDSLRSLEQRIERIEKQILGWGRSNPTCRHLTTIPGYGPILSSAMAAMVVEPTAFASARHFAASLGLVPRQDGTGGKVKLGPISKRGNGYLRRCWSMARCRCCAASAPRRIPG

SEQ ID NO: 255764 - protein, 371 aa, unidentified
MKQESAVFVGLDASKLKISVALAEDGRQGEVRFLGDIEHTPEAVRRLVTKLAGKYRRLLFCYEAGPTGYGLQRQICALGHDCAVVAPSLIPKRPGERVKTNRRDALTLARLHRAGELTAIWVPDPGHEAVRDLVRARDAAMEDLREKRQPLQAFLLRHGRIYPGLRPWTQVHARWLSNLSFAHPAQYLVLREYRQAIEDAEARLERLTQQVSEVVSSWSMAPVVEAYQAMRGVAFLTAVTFVAEIGDVRRFETPRQRMASLGLVPSERSTGEQVRRGSITKAGNPRARRVLIEGAWTYRYPARLSRPLQVRQESLPKTVRAIAWKAQLRLCARYRRLMAAGKRQTLVTPAIAREMAAFLWAIGHAVEPRSA

SEQ ID NO: 255765 - protein, 464 aa, unidentified
MHLGGFSPRLFNVDELPKRTAVCCITQVKSTSSKVRIPTRAIPSLHISGRDLMQDILTCAMGLDVHRDVIVACLARGELGTEPEIEIRSFSTLIPEMRKLRDWVLEVECRHVAMESTGIYWQPIYEMLEPCFDGQINILVVNARHMKNVPGRKTDMRDAQWIATLLRAGLLNGSFIPDKTFRELRHLTRYRKSIVHDITAQKNRIDKFLQSSGFRFTAFLSDAFGASGRNIIRHLMEYGDISREALDKCLKTQTRKRIDEILVALNGSLSEHQRSFLRMIFEHLESLERHRHTVEDAISEEIVKHEAALSLLCSIPGIDVTAAASIIAEIGTDMSAFPDSQHICSWAGLSPGNNESAGKRKSAHINKGNPYLKSMLCEVGWVISGKRTLYLSGWYWRVKQRKGAKRATIALARKLLALIYTMLKTGTPYNEECFEIRRKQSERKRASRMVNELQKLGYFVVAPD

SEQ ID NO: 255766 - protein, 404 aa, unidentified
MYNAVGIDVSKGKSTVAVLQPGGTVIRKPFDVSHTSQNLNELADYLSSLDGTTKIVMECTGRYHEPMVKALSEAGLFVSIVNPHLIKNFGNNSLRKVKSDPADARKIARYTLDNWTELRQYSGMDNTRTQLKTLNSQFSFFMKQKVAAKANLIALLDNTYPGVNKLFDSPTREDGSEKWVDYAYSFWHADCVRKIGLKAFTERYKSFCKKHHYIFQQDKPEKLFNASKELVAVFPKEKTYKLLIQQSIQQLNLASEHVERLRREMNELASTLPEYSTVMGIYGVGKTYGPQLIAEIGDVFRFTHREALTAFAGVDPGVDESGQHKSKSNRASKVGSARLRKTLFQIMTTLLQNAPEADPVYRFLDKKRSQGKPYYVYMTAGANKFLRIYYGKVKECLRNLEQTE

SEQ ID NO: 255767 - protein, 457 aa, unidentified
MDKQKQEKEKSKRVSVVKMPVVNPDAAGIDVSATMHAVAVPPGRDDVNVKEFGAFTEDLLTIAEWLKKCEVTKVAMESTGVYWKQLYLVLIEHGFEVALVNAKHVKNVTGRKTDMDDAQWIQKLHSCGLLTSSFLPDDTTESLRSLVRHRKKLIDDASRYVLRMKKALELMNVKIQSVISDLMGKTGTAIVEAIIAGERKPENFMQHIDYRIKADHEEIKKSLQGNWRDEHLFLLEENYKLYGFLQERIISCEKEIEVHLQKMVAMNNEGVIEELPKEGVLKKTKVKKSKNQPKYNVREYLLKIHSVDVIDIFGIRESSALEILAETGTDLSKWENEKKFVSWLNLCPNNKITGGKLISSTVLKKKAGLATMAFRAAANSVQKSDHWLGDYFRRKKAKGGNKYAVIATARKIAIIYYKMVRYKQGFKPMDADEYRENYKAAKVAWLEKQLAKLKAAA

SEQ ID NO: 255768 - protein, 332 aa, unidentified
MVAGTHGSLNKAGSTKMTQISRTAGIDTSKAKLDAAVHGGSEHWQVANTPVGWRRLAEHLAKAEVTRVGIEASGGYERGVVGYLREQGLIVLLLQPIQVKAYARVHLRRAKNDKLDAVLIAACAATVDQPRLAPDERLAKLAQYLTFIEQIEEDIARYKVRLEHVDDRRLRRMVLADIARLKARRSTELLRVVTALRVYDDLARRLDLVLSVPGLGERTAIALIIRMPELGRISREQAAALAGLAPYDDDSGVHKGQRHIAGGRGRLRRSLFAAALPAAFHWNKALIQLYKRLIARGKAHNAALIACARKLLVYANTVVYRGTPWVEKPATA

SEQ ID NO: 255769 - protein, 376 aa, unidentified
MKRHGEAFVGIDTAKARNAIAVAEGGRGGEIRYLGEFDNTPAAVIKLVRKMADRYETVHFCYEAGPTGYGLYRQIQSLGHECTVVAPSLIPRRPGDRVKTNRRDAQTLCRLLRANELTAVWVPDETHEAVRDLVRTRAMAVEDHRRKRQHVTSFLLRHGRIFDGKTSWRGRHLRWLDGQNFVHPAQRFAYQELLNAVRITADRIDRLDAALAEIVPNWTMASVVAAFQAMRGVAFSTATTLVAEAGDLRRFNHPRKLMAFLGLVPSERSTGETRRQGGITRAGNARARSALVEAAWTYRHSAGLGVGHQRRQVELTEKVRDIAWKAQARLCARYRRLAAKGKRLTVVTTAIARELAAFLWDIARHVDPAPLQSRDA

SEQ ID NO: 255770 - protein, 339 aa, unidentified
MNEITTIGLDLAKKVFQVHGIDAAGEVVMRRSLRRAQVLAWFAALPPCLIGLEACATSHYWARELRKLGHTVRLIPPAYAKAYVRRNKNDPADAAAICEAVSRPSMRFVAVKSEAQQAAAGLHKVREMLMKQRTMLMNQLRSLMAEFGIVVGTGPQHVAKLVAILDDPADERIPAPLHEALVGLAQGLRGLALRMTTLDRQILAWGGDNASYRHLLTVPGYGPILASAMAAMAVEPAAFHSGRGFAASLGLVPRQDGTGGKVKLGPISKRGNGYLRRLLVNGAMSVLNAKRARQNPWLIKMLASKPRKLVAVALANKMARIGWAIMMRQEDFRTRPAAA

SEQ ID NO: 255771 - protein, 393 aa, unidentified
MICVGIDVAKDKHDCFILSSEGEALADVFTIQNNAEGFDRLLQTIRRCTRPEDKIKVGLEATGHYSYNILGFLLDEGLPTYVINPLHTNLYRKSLSLRKTKTDRVDARTIAAMLMSDVDLKSYTDTAYHNEELKSLTRYRFDKVCERAKLKQSVSRLVTILFPELEKLVPTLHMASVYALLSEFPGAKQVAGAHLTHLKAVLYDASRGRYGRDMATTLREAARCSVGSVMPAKSLELQHTIRLIRELDAEIEDIETAIQSMMDEIQSPITTIPGIGVRMGAMILAEIGDFSRFDSPDKILAYAGMSPSTYQSGQLSLSGTYSHMEKRGSRYLRYALYNATKYVCLWNPTFAAYLAKKRAEGKHYNVALSHAAKKLVRLIYAIEKSQKPYCSAA

SEQ ID NO: 255772 - protein, 333 aa, unidentified
MKSGTVHIGVDVSKEKLDIYVPAKKEGSRPVTKEVDNSVAGFRELRDLARKAKATVCVEPTGGYELELIAFMHKFDVPVAYTDALRVRQFARAEGNLSKNDTIDAALISRFADKIGVRVLEAQEVEAVELKRKAKFRQMMVDSRTAMINRLETEIDPEMKALLKEQIRLASRIIEKAERLCLDTVKKNERMDGLRDRFTQIGGVGDLTAISILSGLPEIGTLSDGKLNRLVGIAPEEKQSGTKEWQRRIWGGRKDVRNALYMAAVASIKWNAILGSYYHKKRAEGHPHKWAIVPTMRKLLSLLNRIARDPGFTPMPEPESTKQNAHVGRKKSA

SEQ ID NO: 255773 - protein, 391 aa, unidentified
MIYVGIDVAKDKHDCFITNSDGEVLFKAFTITNNLDGFNELHQKIASVMDDVTKVKVGLEATGHYSYNLLGYLIDKGLPTYVINPLHTNLYRKSLSLRQTKTDKVDARTIASMLMSDVNLKSYSDISYHNEELKSLTRYRFDKVKERAKLKTSVSRLVCILFPELEKLVPTLHITSVYALLSEFPGAKHIASAHLTRLTNLLSEASKGRYGKDTAITFRDAARASIGSNMPVKSLELKHTIKLIQELDSEIDEIENEIKIIMDEINSPILSIPGINYRMGAMIIAEIGDFNRFDSPDKILAYAGFSPSTYQSGQLDGAYAHMEKRGSRYLRYALYNATKYVCHWDPTFAAYLAKKRAEGKHYNVAISHAVKKLVRVIYHLEKTKQQYIKAA

SEQ ID NO: 255774 - protein, 338 aa, unidentified
MKVYGGIDLHSNNSLVCLLDEKDRVLYQKRLPNRLDQILSELSPYQEAVQGLAVESTYNWYWLVDGLMDAGYRVHLVNTAAVQQYSGLKYTDDSHDARWLAHLLRLGILPEGYICPKAARAVRDLLRKRSQLVRHRTAHLLSIQNLLARNRGQSLSGNLVKRLSEAQVEELLPEPDLALAVKSNLRVMQCLEEEIKKLEKVVKARVRLKPAFRSLLTLPGVGSTLGLTMMLEAGDIRRFQKVGHFSSYSRCVRSIKLSNGKKKGEGNRKNGNKYLAWAFVEAAHFAIRYSPQVQRFYQRKRAKTNGIVALKAVAHKLARAAYFVVRDQVPFNVVKAFG

SEQ ID NO: 255775 - protein, 464 aa, unidentified
MRSPTPALAAGPSAERTSPQEGSCIRSRPFRRSGSLQTARTMNTTQWSEHTHFAALDWASDHHDVVLVDHSGRIAAEFRFAHTAAGWAEFTDKMKPYAGAPLALETSSGPAVDQLLQRGWTLYPVNPKAAERYRERKVSSGTKTDRHDAWSLADALRTDGHGWRKLLAQDEATATLRALCRDEMGLIEQRTALVNQLIAALREYYPAALKLFDDWTMPFAWALIPQFPTPGALQNAGQRKWEKFLHTHRLWRRDTAPARMETFAQANALPASAAVVTAKSLLAITLVKVLQALQSQLDEYRRRITETFTQHPDHDVFGSLPGAGEKLAPRLLGELGAVREEYPNADALCCQAGVSPVSFQSGKIDKARIRWACDVALRHTLHLWADCSRKQSAWAAAYYTRKRAEGHDHASALRCLGKRWLKILWRLWTDRQTYDETRHQQNQKKHGSWVSGLLAAAKPQLATA

SEQ ID NO: 255776 - protein, 379 aa, unidentified
MFENITYVALDDHKRKHQVAVLLPGMERDDATTWRVENTPVGIRKMVRKVLKMAPGDIRFCYEAGPNGYVLQRQISKYDRVTCVVVAPSRTPRRPGERIKTDRRDARKLVGLFRAGELQAIVPPMEEEEAIRDLCRCRRIAQMRATASRHQLDKFLTRNGYIYRDGKNWTRRYWDWLRSLQFDDWRRERTFQAYVFGIEQDEDRVKRLDLEILRAAEEEPYRTLVGFVRCFRGLDTLSAMVLTTELYAVGRFTTAPSLMGFVGMVPSEDTTCWDPHRGPITKAGNEHVRRILVEAAKHYRHPPRASKALAERRKGQPDWVIAIADKAQTRLHQKYWKLVMGKGKHPNVAAIAVARELVGFIWAVLIQAAMTQSVDELVA

SEQ ID NO: 255777 - protein, 361 aa, unidentified
MMGTMTWVGLDVHARSTQGAAIDAMTGELSRMRFGPGIDGPVAWLAELPGPVRACYEAGPTGFGLYRAATAAGVGMQIIAPGKTPRGPSDRVKTDRKDAELLARLLLAGSLTRVVVPAPEVEAVREMTRAHDACRRDLMNARHRVSKMLLRHGRVYPKATTWTAEHRRWISQQQFPQPASEMVFADLIAAVDGLTSRKQAIALRLSELATDERWWATVARLRAFRGIDTLSALSLHLELGADWKRFETAPALSAWLGLTPSLNQSGESSRQGAITKTGSVLARRLLVESAWHYSRQPRLGATLANRQAGQPDHVLQISNRAQQRLYRVSRSMRARGKPHNVTVVACARQLACFLWAAATTE

SEQ ID NO: 255778 - protein, 392 aa, unidentified
MSPATVRLRIGDDAAGYTRLLALLAAHGDTTGLPVPVAIETPRGLLVACLRAGGRKVFAINPMAVARYRERYSVARKKSDALDAAVLAHVLRTDMDAHRPLPADTELAQAIAVLARAQQDAVWDRTQAHNKLRSVLREFYPAILAAFVDKRDGIMRPEARAIMTAAPTPAAAARLTKTQLVALLKRAGRKRGIEAEAARLRVVLRAGYLHQPQLVEDAYGRHTLALLRLLDAACANADELEMAAATSFALHPDATIITSLPGLAALTGARILAEIGDDRSRFADARSLKAYSGAAPVTRASGKSRYVMTRRVKNQRLAAVGYLWALSALSNSPGARAHYDRRRETNERHTAAQRNLFNRLIGILYHCLQTGQAYDEQKAFQTSPTVALAAAA

SEQ ID NO: 255779 - protein, 429 aa, unidentified
MRTESTPGARGPVFCGVDTHADSHWLCVLDWRGRKVLSRQFPADAAGYEALAGAIAAAGEPACIAMEGTSSYGAGLTRHLASLGMPVREALSPARTQRRRPGQGKCDEADAERAARAAMSGSKLGTPKSQDGWVDGVRCMLAARSGAVKARTSAINTARSLLTTAPEGLRSRFRGMGGPRLMEELPSVRSEGALGAALGALADLWAAARDAALDMERAIGASLEENCPALLAMYGCGPVSAAKLAVAAGDNPGRLRSEASFAAICGACPIPASSGKTVRHRLNRGGDRQANSALYEIARQRVMRDPETAEYAERARGRGKSDREVMRCLKRYVAREAYRALMHPHEVRRPEDASALVAARRAARVSQVRAASILGTSEKYISMLERGQREFKPIRRAYEAWVEAGLPLDWDRQAFEAERKMDSKKDLAI

SEQ ID NO: 255780 - protein, 369 aa, unidentified
MKKNNKNRKEDARRNALQARSRKTKLTVGIDLGDEWSQCCFLDEEGEIVEGCRVKTTREAMKTRFGELKPALIAIEVGTHSRWVSQLLRELGHEVIVANARELRAITGSDRKSDKVDAEKLARYARVDRRILRPLRHRGEEAQVDLLVIRGRAVLVKTRTQMVNSVRGMVKSFGYRMPKCSAEKFAQLKNLVPAVVKESLAPMMEALEQVQKKIEEYDERVKKLATEKYPETKVLRQVWGVGEITTVSFVLTIEDKNRFGKSRDVGPYLGLRPRRSQSSESDPELRITKAGDCFLRSLLVECAQKILSEKAPDTALKQFGKRIEARGKKKAKKRAIVAVARKLAVLLHKLWVTGEVYEPFPGARERKAA

SEQ ID NO: 255781 - protein, 410 aa, unidentified
MEVLYRRCCGLDVHKETVVACLRLVSDGKVDIEVRTFETTTASLIALSEWLAQNGCTHIAMEATGIYWKPVWHILADGEFQLVLANSAHVKNVPGRKTDVNDATWLAELLAHGLIRPSFVPDTQTQELRTLMRTRKQLVREKASHILRVQKTLEDANIKLDSVITDVMGMSGRAMIEALIAGESDPTKLASLANYRLKASQQNLREALRGRVTKHHRFLLRLHLNQIDALDAAIAMIDRQVEAGIAPFRAAVEQVSTVPGIRDVGAQVIVSEIGTDMSRFPSDGHLISWAGLCPRSDESAGKRRSNRLRKGAPWLKTTLVQCAWAAVRKKDSYLQAQFLRLKARRGPKKAIIAVAASILTAIYHMLKDGTTYQDLGSNHFQKRSKNQQTLRLVKRLTDLGYDVALKPLAS

SEQ ID NO: 255782 - protein, 362 aa, unidentified
MTDVSKVLPQMTAGLDLGDKYSYLCLIDTQSGEVMEEGRLRTNPEAFKRRFVSEQPPMRIAIEAGTHSPWASRVLEECGHEVLVANARKLRLIYANKRKTDEIDAENLARLARLDPKLLYPLQHRGENAQAHMALIRSRQALVGCRTQLVNHVRGAVKSFGARLPKCPARSFHKRVSEHIPEALLAALEPVLEQIGSLTERIRQYERQLETISKEHYPHETDLLRQVEGVGTLTALSFVLTLEDPHRFEKSRSVGAYLGLVPARDRSGERDPQKRISKEGDEMLRKLLVGSAHYILGPFGKDSDLRRHGQKIASRGGKNAKKRAVVAVARKLSVLLHSLWVSGELYDPLYNAHRRRERGEAA

SEQ ID NO: 255783 - protein, 426 aa, unidentified
MKSTTQNAKIAAITEKTLIIGIDVGSETHFARAFDWRGYEFSRKPLEFSNTGEGFETFRAWIDELKEKHGMDKVMPGMEPTGHYWFNLGKFLQDHGMTPVHVNPHHVKKSKELDDNTPSKNDRKDPKVIAGLVKDGRYFRPYIPDGIYAEIRALSGLQVLAQSEITRLKNRIARWFSIYFPNYKDVYGNIGAVSGLMVLEAAPLPADIVKLGVDGVNRIWREAKLRGVGLKRAKTLVTAAEHSIGSRDAQEAARIELRILLADYKMQTAQEAELMALIEDKIRKVPYVDKLLEIRGVGLKTVTGFVAEVGDITRFDDPRQLQKLAGYAIVKNESGKHKGESHISYRGQKRLRYVLYEAAVSVVSHSAEFRSIYQYYTTREKNPLKKMQSMIAVACKLVRVFYLILKTGATYDAGKLMDDIRRPVAA

SEQ ID NO: 255784 - protein, 376 aa, unidentified
MRLQEYGRNPDKRKEYVHHPDLLLGGVDVRKAKHQACMGTQSTMRCRKFEFIHTREGFQRFEQTLRNHLVQTRCQRLLIAMEPSGISWQALYERLQGCGYEVCLVHCQAVRNNRKTMQAGTSKTDATDAYSVFALLRQGKCFLLVARAFELKAAYRVMQRHMALKKRGRQLRNQLRAALHLALPELNPLIKDLTQPTALRFLQTTPTPATVRHNGRTGFREQWQRRRRCGQWRSDTFNTIYDLAPASIGRTDPYHLDAFEITALAQDLADALAKHQMYLDKVLERLAHRPAFQLLLTLPRIGRPTAAAILTAIGDIGTYTNGTQLVKLAGLAIRLFERGSSMRQLPPISHVGSAYLRYWLYHYAKRLVAHEPHCRA

SEQ ID NO: 255785 - protein, 414 aa, unidentified
MSPRPSVTCGIDWAEGHYDIALVDADGRLVDKARLDDTMEGFTTFIELLATAGDTADNPIPVAIETPRGLLVSALRATQRRVYSINPMAVARYRERWTVARSKSDHADAMVLANILRTDAHAHRPLPHDSELARAITVLARAHQDATWRRTKASNELRSLLREYYPGFLQAVAARGATNLASADARVILAIAPTPTAGANLTTARIATALRRGGRQRNIDRIAAQIHHALRRPQLRQPPAVEHAMGVQAGALLAMLNAACDGLEQLAKATTEAFGQHPDHDVIVSFPGLGELSGARVLAEIGDDRDRFADARALKAYAGSAPVTRASGRSLVITHRRIKNNRLAAVGYTWAFMAMTNSPPARAHYQQRKNAGDGHPAALRHLFNRLLGQLHHCLQTGQTYDEAKAFPAAQPNAA

SEQ ID NO: 255786 - protein, 325 aa, unidentified
MEKLYGGLDIHKENLAGCIMDRDGNITREHIFPSSKKAVERFLCDIPSSGITIAIEACGMWRGTYKILTDMGYEVKLANPKKTHDIACKKKTDRVDAKILADLLRTKYLPEVWIPDEQTLKFRDLARHKSNLTRLKTQVQCKIKSYLLRKGVKYGKLWNEKTLSTLAKEDQDIQNLINVYNSLKKEEKEIMKRIKQIARNRKETTLLMSMPGIAEFSSLMILAEIGDIQRFRSPKELVSYAGLCRGIYQSASTERSVHNTAVNKWLKWIIYECSGRAIMLDQRFQQYFYPIQKRKGANTARRATARKMLTIIWYMLTNKETYRAS

SEQ ID NO: 255787 - protein, 335 aa, unidentified
MHYLYYVGLDVSKETFDASLVAFEDANEMAHRKFANSRKGICSCLHWVEKRHGIRLDDVIFCAEDMGSYISEMAVCASDRTLNFNFSLISPLVIKYSMGIARGKTDRVDARRIAEYAITHYRKIALYLPAEKELCQLRTWLILRAHLAKQRVAKLVLLEKLDYKEKFADVSIQRSMLQEEIAYAETHMKTIEREMKELIAADSNICRNYKLLTSIKGVGPITAIVMLCSTLNFTKITDHRKFACYSGLAPFEHSSGTSVRGGCHTSSMANRDIKVQLNRSALIAIRCDPQLKAYYERKVAEGKHKFSVLNAVRAKIAARCFAVVRRGTPYVALQI

SEQ ID NO: 255788 - protein, 458 aa, unidentified
MSKKHVSLEVVNPNAAGIDIGSRSHWVAVGQDAQDVREFGVYTEDYQKLSVWLKKHQVTTIAMESTGTYWQNVFSYLVAEGFDVILVNGRQTKNIKGKKTDIKDCQWIQKLHTLGLLSSSFLPDSTTDVIRTYSRHRQNILKQSGATVQKMQKYLRLMNLRLDVVVNDIVGLTGKKIITAFIAGEKSGKELAKHRHYNIRKPEEEIAKALQYNGREDYFFALKQEWKTYLHLQKQIDETDKEIKKLLKNIIKNDDNKKNQIAKKKDYKRKNKNAIRNTDMNKIGVQYFEGIDLMAIEGVNDATVMAFISEIGLEGIKKFKTAKEFTAWLRLAPNNKISGGKVLSHHLPKGSNRLKIALRQSANVIGNLKEGHLNNFFRRINYKKGRATAISATARKLAVIIWNMLTKGVQYQPPIEYLFLDQKRKLRLVSRIRKNIAKFDIKPQDVGFDKMLNTSVEI

SEQ ID NO: 255789 - protein, 468 aa, unidentified
MAGWDRLFGIPVSHARMFTHQIEWILSFTTISKGAVAIMSFLPNYISVGVDVAADFSWVCILTPDRREFRKPFKVEHDNADSLKNAALTIKKAEELYSMKSRTFLESTGIYHFPLFCHLKELGFEVFVINPLITNSNKNVGIRKVKNDKYDAKRIAGLGYSPDLKVSVMPAELIMNLRCLCREYYSLVDNRSAYVNKLKAQLRIVFPGFCKVFSDVTSATGIAVLKSFPAPEDILKAQPNEIIDLIAVASRKGLKYAKSKYEKLFTAASNALNFRYNLSTVYDVLEMHIHLVEEFDKKIDLVLSKIKTFVDRNKSEEFVRQIEHLDSIPGVGFLSAVTLMCEIGDFTAFSKPKQLFAYFGVDPSVSESGNFKGTENKMSKRGSKIARRVLYSIALASVRLKQNGVATNPVLHEYYQKKKESKAKKVALGAIMHKISDIVFAILRDDKPFELKTPDEHIIQYQNSTKAA

SEQ ID NO: 255790 - protein, 336 aa, unidentified
MRYIGVDLHTTQITVCYLTEKEEFLIAKYQLCEIERFVSGLSLSDEIAVEATGNTRWFYEQVKESVKRVVLVNPRQFEVVKNSVKKTDRNDAINLAVFLKADMLPEVRAKKEEADKVQSLVGTRTKLVRLKTSLTNKIHALAVSNGRKLRKTSLASEKGLEKVLQEEWTAIERIELDIIIEQIRSLKAGIKKLDKAIAEESEKLKGFANLVSISGIGSLSAGILLSVIGEVKDFPNADKLASYFGIVPRVSNSNETVNHGRITKRGSKTGRTTLVQCSLAAIKKNDYLRKYYEQVKARRGHGKAKIALARKYLKIIYSTLTNNWVFADFNNFELAE

SEQ ID NO: 255791 - protein, 385 aa, unidentified
MQIIVGQSRFAPFGLSFTGFDELKEGVQTVTARYDYHIGVDYHKSYSHLVVQDSAGKMLRSGRVKNDRQALGSFLERYRNNSHAVMEATRNWMVMYDWLDDICEDVVLAHPLKVKAIADAKIKTDKIDATVLAHLLRADLVPQAWAPGDRVRELRLTLRERMFYVRLRTMTKNRVVTVFDRYPEQTAQLKKLGDLFGKTGRQQLVGLNVSEIDRIQIDRGLEFIGDINERIKQSEATIRAMTKTNGNVKLLKTIPGIGKFFARLIDAEIDDISRFRNPKKLAAYAGLVPSTYSSGGKTYHGKIIRQGNKWLRWAFVEAVQPAIATDPQLRAQYEHLKFRGVNKARVAIARKLLAITFQILRDQRPYEKRSDNSVEGSSSTKSRLS

SEQ ID NO: 255792 - protein, 309 aa, unidentified
MKEEKVYVGVDVAKATLEVAWAHGRWPGANSVAGRKALVKRLAQIPGSVQVICEASGGYERALIQALHGAGIKVSLVQASRVRQYARASGVWAKTDSIDAQLLARFGAVIQPEATIPPEPEQDQLRELESQRRHLSRLLVAEQNRSAQLTQSALVRLSKSLRHQIQKQIQQIDRLIEELIAQSPKLSTKAHKLTAVAGVGPRTAALLLAQMPELGELNRREAAALAGLAPFNRDSGLTKGKRAIFGGRRAVRTGLYMAALVASRHNPILAAFYRRLRQAGKPPKLALTATMRKLLIALNASLKPQPICA

SEQ ID NO: 255793 - protein, 342 aa, unidentified
MKAKAQPQVATLYVGVDIAKDDFAAATVWAEQTKSLGKEENTEAGCETFASRIAARQQACGAEQVHLVVEPTGGFEAELVARAYRCGWRVTVVNLGVVRKWAQGQGRRAKTDRLDARVLAEYGAKEHPEPQQELPEEIAELDSLLGRKLDLDKLLQSERNRYGRLNRHTAPAVRRSLEQVIAALEQELATIEAAIKQLQHAQPTIKQQLAFLLSVPGIGEKIAPLLLVQLHRFWARTNGRGTAKQLVAYLGLDPVPYESGTSVRHRATISRQGNSLLRSKLFLGALGGVGGKNQLRLFYHSLLARSKPKKVALIACARKALTWAWAVFAHNTYFDPALAAKA

SEQ ID NO: 255794 - protein, 326 aa, unidentified
MRSKVGCDISKQKFDVALLLAQGKYRSKVFDNDVSGFKAFVAWLEDHASGGLSDAHVCMEATGAYGEQLALFLHDHGVKVSIVNPLRVKRFMESEGIRNKTDAGDAKALARFCEKNELDAWEAPSRSVRALQALVVRLDTLLAMRQSEMNRWDIAHESVKGSIERVIAALDKTIEEVKAQIHSTIDDDPDLKERKDLLETIPGLGDRTIPQLLAYIGRPERFRSVKTLIAYASLTPRIRKSGSSLNETKGTHPAGHRELKRALYYPAMVAGRYNPLIAPFWARLKAQGKPGKVIVVACMHKLLAIAYGVLKSKKPFDPNYLQSQAA

SEQ ID NO: 255795 - protein, 344 aa, unidentified
MNYYAALDVSLRSVHLCVIDDEGQLIAETKLSSEVTDIIAYLDALHLEISIVGLEAGTLAQYLTYGLLSADYQVVCMEARQVKAALSAMRNKTDKNDARGIAQLLRTGWYSKVHVKSMASHRVRALLSSRKAVLSKCIDLENEIRGLFKVFGIKLPPKLGHGSFDVAVRDIIETDATLSHALLPLLDARLVLYHCFRELDNRTRHMAHTDPVCQRLMSAPGVGFITALTYKAGVDDPYRFKHSRTVAAHFGLTPRRFQSGEIDIDGHISRCGDRDVRCTLYTAANALLTRSAKWSPLKAWGMKLAKTRGHRRAVIAVARKLAVILHRMWLDDVPFRWSTEAARS

SEQ ID NO: 255796 - protein, 343 aa, unidentified
MEYFAGIDVSLEQSSVCVVDGAGKIVREAKVASEPEALVGFFRGLETGVTRIGLEAGPLSQWLYAGLTTAGFEVVLLETRHVKAALSAMVIKTDRKDARGIAQLLRMGWFRPVHAKSPAAQEVRALLVARKLLQTKLLDVEFSIRGILRGFGLKIGEVSKGRFAARVRELAAGHAMLERITEPMLRAREALRTEYARLHGEMLAIVKPDPVCRRLMTVPGVGALVAITFKSAVDDPARFARSRVLGAHFGLTPRKYQSGETDVTGAISRVGDAMVRMALYEAAHIMLSRVTRFSSLKRWALDVVRRRGLKRAKVALARKLATVLHRMWVDGTSFRWGKQAAAV

SEQ ID NO: 255797 - protein, 313 aa, unidentified
MDLLSVGIDISKHEWAIAVHPSGERWTSPTTPAALETVVARLTALAPQIIVVEATGGYERALVAGLVAAGLPVAVVNPRQVRAYAQALGRTAKTDAIDAEVLALFGARIQPLARAVPDTATQALAALVARRRQLLEMLGAEQRRLEHAPATGRITRDLRNHIRWLERRVDEVDGDIGTTIEASPVWRVQDDLLRTVPGIGPTTARTLLAELPELGHLDRRAIAALVGVAPFNCDSGTHRGRRHIWGGRAAVRATLYMAALVATRHNAPLRAFYRRLRDAGKPAKVALVAVMRKLLTIVNAMLKHQTPWEQQPA

SEQ ID NO: 255798 - protein, 387 aa, unidentified
MIYYIGIDISKYKHDFCIISNTGEVIVENSSFENNQKGFQSLLETLKTYDKQTVRIAFEATGHYSLNLELFLTNQGYSFMKINPLVVHQFIKARSLRRTKTDKADSLTIANYLMSVPFVPNSKLLYHIYSLKSLCRSREVLVKERSKIAVTLTNQLDLTFPELKPFFKNNICSTLLYILNKYKNAEHISLMKDYDSIRKISHGRFSYANFIKLKELAKNTIGYHDDNTDLLISTYVSLYNELSNKIDPIDKQISTIIKELNPRMLSIPGLGELSAAAILAEYGDIKNFSSPNKMLAFAGLEPSVIESGTLQSNGKMVKHGSGHLRYSIMNSAMIILRFSPTFYDYYLKKRSEGKCHRVALSHVCKKLIRVIYSLEKYNQDFDSSLLK

SEQ ID NO: 255799 - protein, 370 aa, unidentified
MQQSRTLYVGLDVPKESIAVADIAQEPHAEVISLGNIGTRQCDIDKLIRRLQSKSPHLVFVYEAGPCGYWLYRYLTKKGQVCWVVAPSLIPKKPGDRVKTNRRDAIKLARLMRSGDLTPVYVPAVEDEAIRDLCRAREDAIHDLKTAKFRLKAFLLRHDIRYTGRATWGPAHLRWLSEVVCPTPAQQIVFQEDIRAVTEHTERLARLEQALTAQVQTWRLAPVVDALQALRGVQCTVAVTTVAELGDLTRFETPRQLMNYLGLTPSEYSTGERRRQGGITKTGNSHARRALVEGAWAYRYPAKVSRHLQLRLEKVSKPIQDISWKAQIRLCKRYRQLSARGKNANQVVVAIARELSAFMWAIAQEVSLAP

SEQ ID NO: 255800 - protein, 353 aa, unidentified
MERIYIGVDFHARQQTICYLKIETGELVFCELGHENKEQVRAFYAAFSSQVIVGLEASGYSPWFERMLEELGCEVWLGHATEIRRRARWRQKNDRRDAELILDLMLHEEFPRLHRPAVQSREVMRMLRYRQKLIKMRTMSKNSLQALALQSGLARRSRLFTREGKHELSIALMSPAMQWQRDHWWQLLQSLNEQLQETMGWLKTHAQGDVKVARLRTHPGIGLLTALCLVHTLQPVDRFRNTRKVAAYGGFDPLERSSAERKCFLGISKAGSRILRHLVVEAANVAVRSDEDLKRFYKRLAERRGRPKAKVAVARKLLIRAYIMLRDEIDYAEFRHRAVAARLAREITKASSA

SEQ ID NO: 255801 - protein, 325 aa, unidentified
MEKVFIGIDVSKLTLDFYVKSNSSQQHYQIENNVKAIKKLLKPFQNSKNTVIAMENTGRYNLALYEFLAENNFSVFVVNPLHLKRSIGLLRGKNDKVDAQRICIFIEKNHMDLEPWNPSNIDVQKIALLNTERRHRVKLKSGLLRQIQDLELLKNIADKEIIKLNQQLIKTIEKQIKVIEDRISALIFSNQELKEQFNRMISIPGVGKVLATLMIIKTKGFSEVKSARKMACFAGVVPFEHRSGSSIYYKPRISTMADKELKKVLHLAALSTIRLKNDMAAYFNRKVNEGKNKMSVLNAVRNKIIHRIYAVVKNKSVYENRFVMS

SEQ ID NO: 255802 - protein, 356 aa, unidentified
MLNITRVGVDLAKMVIQVHAVDVAGKVVINRSIKRASFLAWCSGLPAGCLVAMEACTGAHHWCRQLIKRGLDARMMSAQFVAPYRIQGKTGKNDANDAAAVCEAASRVHMHFVPPKTLDQQGMLCVHRLREALKQERTACINRIRGLLAEFGVVLPQTPAVLGLHLNDVLEDASNDIAGMARLVLQKAQQHWRELDAHLQWCDERIAAHRKDSEQVQRAAEPRGIGVITASAAVATVGDFKQFKNGAQFGAWLGLTPRQNSSGGKTSLGGITKRGDNYLRTLLIQGAKAVVLTGKHNDDPISQWAQRLRERCGWQKAVVALANKNARILWAIMTKDESYDARHVSTRATAARPIAA

SEQ ID NO: 255803 - protein, 317 aa, unidentified
MLQPNTNTAGIDTSKLKLDIAVHGQTGCWQVANALPGWRSLVVSLIKAGVVRVGIEATGGYERGVVEHLRAAGFVVLVLQPSQVRAYARVHLRRAKNDALDAALIAACAMAIEAPRIAPDPRLVKLAGYLTFLEQTEEDIARFKTRLEHVDEPELRRIVTTDIARLKARRSAQIRLIERQLRAHPDLGRRLDLVLSVPGIGKRTALALIIRMPELGQVSREEAAALAGLAPFDDDSGKHKGQRHIAGGRGRLRRSLYAAALPAAFRWNKGLVELYARLIARGKAHNAILIACARKLLIYANTVVQRGTPWIDSPVRG

SEQ ID NO: 255804 - protein, 341 aa, unidentified
MDEKKDIWCGIDVSKNDMAVALDIDRDKPVRRLPHATFKRTIDGLREMLDWCAEQGAGGDKLHVLMESTGVYSRDLLQWFQNHFPEIHVSMGNPKHVKHFIDSEHLGNKTDNLDAMAIARMGTVQKPHRTPLPPPEYLQLQELIRARDDLKTKMRALEVSRSTMRDDGSVASASVLQVIRVMADGVKKIEEAIYDLVARIPEIKAVVKRMSTMPGIGTISACTILSELGMFSPEFTRTSFSGFTGLQPVLRQSGTSVNSSRIGKNGSPLLRKVIYLCSIHAVEKIPSLKSFHARLIARGKKPLTARCACMRKMLLILRSMVLNKTDFKENYLTSPKMDKVV

SEQ ID NO: 255805 - protein, 343 aa, unidentified
MKLMRIGVDLAKNVFQIHGVDRHEQPVWRQRLPRDRWLQTVLEKTEPGCEIGMESCGGAHHWARQLQARGFRVRLIAPQFVKPYVKSNKNDANDAEAICEAMSRPSMRFVAVKTIEQQDIQATHRIRAGLIEQRTAKANQIRGLIAEYGLVAPKELLMLRRAIPCWLEDADNGLTARFRRLLNGLWDDLRALDERVSELDGEISAIAASEPSAVRLQQLRGVGPMIATALVAAIGDANQFANGRQLTASLGLTPKQHSSGGKDRLLGISKRGDAYLRTLMIHGARSALRTAKSKDDRLSQWVVRLAERSHPNVAAIALANKTARMAWAMLRNGTDYQPDRAAA

SEQ ID NO: 255806 - protein, 396 aa, unidentified
MISVGIDVSKGKSTVCIMKPCGEILESPFDIGHTADELDSLISLIKSFDEETRVVMEDTGHYHLPVATYLSSHNIFVCCVNALRMKKFCSQSLRRAKTDKIDSIKIASFGITYWNELVKAYPSNVIYDELKFLARQYYQVTGMLVKSKVNFSNLLDQVMPKINDVLSNQGENHKLTEFVNRYIHFQNILDMGEMKFTSDYCKWAKKKGYRLNERKAAEILALAQNGIPTLPNSQSVKIAVSEAVKLIHSIEESRNTILAQMQDLCNTLPEYSVVKEMDCIGDTLAPRIIAEIGDVRRFKNKHSLIAYAGIDAPPYQSGAFHASERHISKRGNSYLRKTGYEIMQSLIKHKPADNAVYNFIQKKRSEGKCGKEAMIAGLNKFLRVYYGKVMEFYSEH

SEQ ID NO: 255807 - protein, 409 aa, unidentified
MERVVERGCGLDVHKKSIAACVRIPDERGQRRQQVRTFGTVAAELLALRDWLEAHGVTHVAMESTGVYWKPIFYVLEEAFTCVLVNPVHMAQVPGRKTDVQDCVWIAQLLEHGLLRGSFVPPAPIRELRDLTRYRKTITQERSRAINRLHKTLEDADIKLASVATDVLGVSGRAMLEALVRGNTDPDVLADLARGALRKKLPALRQALSGRFHPHHAFLVSQILAHVDYVEEAIEAVSQQIDVVIAPFTSALERLSTIPGVKKRTAEVILAEIGPDMSTFPSAAHLASWAGLCPGNNESAGKHRSGRTRKGTPWLRTALTEAALGAIRHGRGALATRYRRIMRHRGHKKAVIAVAHAILVVVYHLLTRQTTYHELGDDYYDRRHAERSKRRALETLERQGYRVVLEPTA

SEQ ID NO: 255808 - protein, 453 aa, unidentified
MSQFQTLEAPSAAPEFAAFIGLDWADQKHSWKLVVAGSAECESGELKNTPEALHLWASDLYPRFDGRPVALAVEQPRGAIVSQLGNFPHLILYPIHPTTAARYRQAFFPSGTKNDPLDSALLLELLVQHRDRLRRLDPDTPVTRLLQVLVEHRRKLVDEKTRQSNRLTAALKSYYPQPLQWFDDIDGPLGCAFLQRWPTLAQAQRNHPGTLRKFFSQHNCRSADRIRQRIEAIHQAVPAVTDPALLEAGASVVSGIVRLSQALGDSIAEVDVKLQTAAAEHPKAHIFAGLPGVGKVLLPRLIAAFGTQLDRFPSADELQRYSGIAPVRSQTGNTEIVHMRRACPKFLRQTFIEFAIHSVAKSVWARAFLQYELASKKEYFVAIRALAFKWQRVLHACWRSNTPYNEQRYLQVLQKRNSPIVKLFPIANKALETPTSVEWKSIAGFNTLASKNT

SEQ ID NO: 255809 - protein, 408 aa, unidentified
MPLRHPRPPTLSATVVLVGGADTHADTVHIAAITTLGREIDDREFPTTAAGYQAAVAFLTSHGPINQVGIEGTSSYGAGLARAVTKAGLQVIEVNRPNRADRRRQGKSDPLDAYHAARAVLSGRATSDPKDQSTEAIRSLHNTRRSAVKASTAATNQIVAMLITAPDEIRAKYRALKGQPLIKALARCRTTVADPVDAAVLTALKALAHRHQFLTTQAEELSTLIDALVTTANPALRAAFGVGPDTAAQLLITAGANPDRLRSEASFAALCGVSPVPASSGKTTRHRLSRGGDRHANNALYRIAMSRMAHEPRTRQYVARKVAANRSTKEILRMLKRAIAREIHRLLTHKVALPEYADLRPARQAKNITVTAAAKAFNMWPAAISRIELGQRRDDDLANRYRTWLQAA

SEQ ID NO: 255810 - protein, 313 aa, unidentified
MTFSSDYVGVDVSKQHLDLAMAGARVFRVPNNPAGMSRLVARLAGLQRPHLVCEATGSYTRLMAREMARQGIAFSAINPRRVRDLARADGQLAKTDAIDAAVILRFACLMQPEPSPAPDPHTLEMADLVRRRRQMVDMLASEKQRREHPETARVRTSIDAHIDFLGTQIAEMDQAIATQIRSDGALQHRVELLTTIPGIGQTTAAVLVAEMPELGTIGNKQAAALAGVAPFNRDSGETRGQAHIAGGRLSVRCALYMATLSAIRANPPIKAFYQRLREQGKPAKLAIVAAMRKLIITANAVLASNTPWKTNMD

SEQ ID NO: 255811 - protein, 365 aa, unidentified
MKSVFYVGMDVHKDSVRIAVLKGTGKETVYEGTLGNDLNKIVKIVSGYREKGTVIAGYEAGCMGYTLQRSLAAAKVDCRVIAPNKVARLGSQRIKTDTRDAILIARMLKNNEGESIHVPTKDDEAARDLLRCREDIRLQAHRIKQQLTKFLLRNGHIYEAKRQLWTKAHRDWMTGIEFGSDVLKETFLQYWCSLLEIEDRLGRIEAKVVEIAESAAYREPVARLRCFKGIDYITALALVCEVGDYRRFGSAASFMSYLGLVPSERSSGPKRRQGGITKTGNAHLRRLLVESSWHYRHRGNPSAALQARRMGMDERVIAYADKALSRLQTRFAHLVYKGKSSKTVVTATARELAGFVWGTMVGVYC

SEQ ID NO: 255812 - protein, 362 aa, unidentified
MVLGVLGIGRGLVAVLVFLKPERLRAPACPRAHSQARDLKTMSVTSVVVGIDVAKAHVDVSVLGCPSSIAQRFDNEVEAHSALVAVLKPLNVALVVMEATGGYEAALACALQAAGLPVAVVNPRQARDFAKSMGRLAKTDRIDARMLAEFAGVLVRRDDLASLIRPLADAQQQALAAMVTRRRQLVTMMLSERQRLQLAIAVVRPSIEAMIEAIRQQLDDVEAQMVGHVQAHYADLNKLLRSAAGIGPVASATLIAELPELGRLNRREIAALVGVAPMANDSGNSKGRRRVQGGRFEIRRVLYMATLTAARHKPAIKTFYDRLLAAGKFPKVALVACMRKLLTSLNAMVKTNKPWDKSLHGA

SEQ ID NO: 255813 - protein, 428 aa, unidentified
MIDQDYSTAASNLVAIDIAKDWNVALIQDAAGQRQQFKFANRGADYDRFVQFLHSLSGPVKIGLEPTGDYHRPIAHRLLREGFQVVSISSLALARFREARFGTWDKNDPKDAQVMLVMMRQGLIQIYWDPLMNGFHDWQELSNTYFHITLARTRLQHSLLLHHLPLYFPEFTRYWYSTRSAWFIRFLERFPVPAAIRALDRPAFVAAAWELVGRKVNKRAQLEEIYELAGESIGIPVALDSPAIETFRLQLSRYAELSRHREQLDQRAQALLKGNPDFQRLQTLPGIGAITALTILAEAGDVRRFRHYRQFLKYCGLDLAKSQSGQSKGRETLSKRGNKRLRLAFWMAGLVAVHQRENAFRDKYERYLRATPFDADRKRKALTAVCAKMARVAYAIVKHGSDYQRFFEQRIPSGSIPLARAVEAVSTS

SEQ ID NO: 255814 - protein, 432 aa, unidentified
MNQNKMATNFAATNFAATIGLDWADKKHDLWIQPSDGGKPEHRVIEQTPQALHEWVAQMRARFPKGRIAIALETSRGAVISALGAYDFIVLFPINPAMLCSYRAAFCVSGAKDDRTDAMLQEEYLRLHSDKLRPLEPDTELTRQLAGLVENRRGLVDERTGLVNQLHSLVKTYYPLIEVLFADMTLPLAADFLRQWPDLASVQKAGPATLRKFFYGHNCRCDKIMEERLQAIAKAQPLTQDPALIVPAVLKAQALAGMLQVLHQSIGQMEKIIEQTTDAHPDAAIFRSFPAAGPALAARILTAFGTNRNRFASAQEVQQFYGIAPVKKQSGQSKVIAMRHRCPKFGRQTFHENAGHAVRQEGWAKRCYEQQRERKKGHHASVRAVAFKLMRIYFRCWKDKKCYDANLYEKALENHGSPLAGLNKKAARANGE

SEQ ID NO: 255815 - protein, 481 aa, unidentified
MSTRKRSPATARPAPQPARPARAPAPALTILHPNAAGIDVHSDMHMVCVPAQSIGPPAPSEAGGLPANVRRFGANSGDLVAIANLLKECGVTTVAMESTGVYWIPLFELLESRGFEVWLVEPGQLSRCGARPKTDVLDAQWIQRLHSYGLLQRSFRPPDSILALRAYHRQRQMQIRYAASHTQHMQKALEQMNVKLAEVVSDITGLTGMRIIAAILQGERDPQQLVRLRDPKCKNDPATIAKALEGTWRPEHLFELRQAYDLYQFHHRQIAQCDAMIQAELAQLPDRAGEQPFTAKPRRCGRKPNDLSFDACKPLFRALGVDLTEIDGIDVGTALVILAEIGVDVSRFPTEKHFASWLGVCPRQHESNRTQKKRGPRKGKNRVAVALRLAARALGRTMSPLGMFYRRIKSRLGGQGAVTAAAHKLACLVYRMLKYGKAYVRQSVEAHQQKVREQIERSLRRKAAALGYELIRKPPAESVLT

SEQ ID NO: 255816 - protein, 343 aa, unidentified
MQNTIYGLDLAKRVMQLHWVDWETGEIHRKQVRRGKLLEFFVNREPGIVAMEACGSAHYWARELGKLGHEVRLIAAQFVRPFVKTNKTDAADAAAIWETVQRPDMRFVAVKSEEQQSVLALHRMREQLVKIRTMQVNEIRGLLYEFGVDLPQGREKGLKEIPDALSTLEDRLSAVALETFRRQIQRLAEFDKDIADIEKRLRLWKKDQEAVARLMAIPGVGLLTATAIVATVGNMKSFRSGREFASFLGLVPRQTGTGGKIRLLGISKRGDTYLRTLLAHGARAVVNCQTRDRNPWIDKLRCRRPHNVVVVAQANKMARTIWALLAKNRQYDPNYKPMAVAVA

SEQ ID NO: 255817 - protein, 350 aa, unidentified
MMEITTIGLDLAKRVFQLHAVNGKGEVVVRKRLRRAQVLRFFEQLAPCLVGVEACGTSHYWAREIAKLGHEVRLMPPGYVKPYVKRGKTDASDAEAICEAVTRPTMRYVAIKSPEQQAALAIHRTRDLFVKQRTQLVNMIRGLLAEFGIDIRRGIGQALRLARHIDAGDMPDMPAAAKMIAGLAGQILDLQVRLREIEGELLAWQRSNDLAKRLATIPGVGTVCATALAASVTDPHQFRSGRQFAAWLGLTPLQHSSGGKERLGRISKMGDKYLRRLLVVGMTSLVRRAKYKPNAVDPRLAHLLSRKPVRVVTVALANKTARVIWVIMTRGGTYRAPVSAATALFAASAA

SEQ ID NO: 255818 - protein, 315 aa, unidentified
MNDKQLIGIDIGKYWLDVAWEGSQRVERYHNDAAGIAALTDKLDSARHIVVFERCGGWERPLETVLAEKVMSWAVVHSQRVKAFREAQGVKAKTDRIDALLLRDYGRDRLNAGKLRLGCREDVTLDALMARQRQLKAALHAETCRLATAPLDAVRTSIGGMIAHLEEALATIATELVQHEHEHSELSFREGVLCNQIGVAEQTARGLLAAIPELGRLDCKGIAALGGLAPRVHESGSIRKRRGLAPGRTSIKVILFNPARTAMRFDPEIKEFCSRLRARGKPGKVIMVAVMRKMLVRLNAQLRDAMAQAAAAAAH

SEQ ID NO: 255819 - protein, 340 aa, unidentified
MTITTVGIDLAKNVFAVHCVDQNGKTVLVKSRVTRAALPGLIAGLPPCVIGMEACSGAHYWARLFRQYGHEPRLMAAKFVSPYRMAGKSGKNDAADAQAICEAVRRPHMRFVPVKDESQQAMQCLHRTRQGFIEEKTATYNRLRGLISEFGVIAPQSTDALRHIVFEQKNSLPLQVQQCVDDLLEHVARIEDNIAECDRILSRMAKTDHRSQRLMELKGVGPTTACALVASIGNAHDFKNGCQLAAWLGLTPSQYSSGGKSKLGRITKAGDSYLRTLLVQGARSVLIGAEKRTDLFSRWVCSLVERRGYWRAVVAIAAKNARLCWASLHYGDDFRLYSAS

SEQ ID NO: 255820 - protein, 318 aa, unidentified
MNIIGLDISKDTIDATLHKTNGSIHYIKFKNNDDGLKQFRLWIKGNRIRKAYIGMEATGIYYEKAADMLSSYYTVYVINPLKIKDYGKSRFNRTKTDKADSNLIADYIKRHQDTLIPYQISKNKALQKLINLKNQLQQHQKQIKNRLHSTEEDFIRNIHQDLIDTIQDKMEQVKIAISEQIKKQTDNNHYRNLQTIPSIGKDTASVLYAQLTEKHFKTANQFVSYAGLSPAIIQSGTSVRGRGRLSRYGNRRLKSTLYMPALCAYRFNAFPKLINNLKKAGKPKMVIIVAIMRKLAKLAYYIVKTGQPYDAERHRLNQ

SEQ ID NO: 255821 - protein, 454 aa, unidentified
MQKQDSYDYYVGIDCAQNKHDFAIKNNQDKFLIKKGHFSNTLQGYEKFLNTVLSKCLDKDKILFGMEVTGIYGTNLYERLKSDGYHVVMIFPDSVKNYRDYKRLNKTDKIDSACIAELLLNGDAQIVHAEKNGYTDLKAYIRRRNALKVTCTQETNRFLAKVCLYFPDLLKVFPSGRATLKAIFSIYPTPYSIIEADFNELVSVLQKASKNKFGVDKANELIHAARNSIVVRKSISDGELYNIHSLIDSIDSLESEIRNLEKIIDSKAEEFPAYHVLLTLTGCGKITAATIVAEIGDISRFHKASQIVSLAGLYGDNSKSGSSVNKRGKISKKGSRYLRHAIYMVAEFARRNNPIFKAYFTKKKNGDRTKHILAVNAVANKLCKVIYSLMKNQSTYIIQYRDLAKLSESTQNEFFQNAETDFSAKTRRKKYLYEDEYGELHEFVFKSIKTALIE

SEQ ID NO: 255822 - protein, 354 aa, unidentified
MSQTFNAAVSVVGIDIGKNSFHIVGHDERGAIVLRQKWSRGQVEARFANMPPCLVGMEACVGAHHLSRKLRALGHDARLMPAKYVRPYSKGQKNDFRDAEAIAEAVQRPTMKFVATKTADQLDLQALHRVRERLVSQRTGVINQIRAFLLERGIAVRQGLRFLRSELPRLLTTPPDVLSPRMVRIVEDLAGDWRRLDERVERLSDEIEAIARQDASCERLMSVPGVGPIISSAMVAAIGTGDVFTKGRDFAAWLGLVPKQISTGDRTILGKISRRGNRYLRVLFVQAAWVVLIKPKIWERHGLKPWIEAARKRLHHNVLAIALANKLARIAWSVLARGRAFEARKIDQAANQSA

SEQ ID NO: 255823 - protein, 361 aa, unidentified
MVVQRTSVGLDVHARSVVASALDGVTGEIMERRLTPAHADVAAWIAGLPTPLKVVYEAGPTGFGLARFLRAAGVDVEVAAPSKLLRPSGDRVKTDARDARHLARLLHAGQIVAVAVPDEATEAARDLVRAREDARGDLMSARHRVSKLLLRQGLVWSGGKAWTGTHDRWLRAQRFDSGPLQLTYDTAYETMLAAVERRDRLDRAIAALAADSAFTPVVGQLGCLRGVSTLTAFGLAVEIGDWHRFTGRSIGAYLGLVPTESSSGASRSQGGITKTGNGHARRLLIEAAWHHRPAYRAPGVDLRRRWQAASPAARDRGRRGNRRLHERWAAFDARGKRAVVANAAIARELAGWCWSLAVLQD

SEQ ID NO: 255824 - protein, 403 aa, unidentified
MARVFIGVDPHKLSATIEVVDDRETVLATGRFATDKAGYTAMRKHVSSYPDRVWAVEGSNGAGRPLAQRLLADGEAVVDVPAKLSARARMFDTGHNRKTDPHDAHAVAVVAVRTTGLRVLAYDAQLEALRLLVDRRAELTRARIQCVNRVHRLLSELVPGRSKRNISTAQAKRILATVKPRDLAGKTRRRLAAEQIAELVTIEKKAKAITRELKQMVAATGSTLMELPGVGPVVAARTLADTGDVARFTDRNRFASWTGTAPIEASSGEIVRHRLSRAGNRRMNHMIHIAATSQLRHDTEGRAYYRRKLAAGKTKAEAMRCLKRRISDALYRQLVNDAKAAAAADIDAGPGGHSGAALQSSAAGSHPHTGTSDQPQPGPAPTTLPATATTRKTTTSKILEPAP

SEQ ID NO: 255825 - protein, 343 aa, unidentified
MQVVRIGLDLAKYVFVVHGVDSHGKVAVRKTLRRDGVALFFANLPRCLVGMEASNGAHYWARVLTDLGHEVRLISPQFVTPYVKSNKNDRNDAEAICEAVGRPSMRFVPPKSTDQLAIQAIHRIRRRLIADRVRLVNQIRGLLSEHGIVIARDISQLRRRLAVIVGDDNDGLSEMVRSLMRELQKEMTDLDDRIAIYDRRIREIFRASEQCQRLSKIEGIGPVTATALIAAVGDRTCFKNGRQFAAWLGLVPKQRSSGGRARLVGISKRGDRYLRTLMIHGARSALSRSGGKQDPRSLWLGKLRQRRHPNVAAVALANKNARIVWSMLSNNAAYQPILSVTAA

SEQ ID NO: 255826 - protein, 348 aa, unidentified
MIVLGADMHKGSHSIAAVAGETGELLDDKTVRVGDRGFAAALAWARGLGPERVWALEDCRHVSGAFERFLVVRGECVVRVATRLMAGERRGGRERGKSDLIDAVAVARAALRVGLERLPVAQLAGVELEIRLLVDHRERLVRMRSALNNDLLWHLHDLWPDQTLPGSALLSNKWASRMARRLARHEQSARVRIARDELRQLRELSRVIDELEREIAELVARVAPQLLAEPGIGPLTAGKLIGEIAGAQRFSSDAKLARAGGIAPIPVSSGKTNRHRLDRGGNRQINTAIHRVAVTRARCHPETRAYIERKRSEGKTNRDAIRCLKRHLARRVWLLLQPQDPRPLPSIV

SEQ ID NO: 255827 - protein, 429 aa, unidentified
MLKINFMSTLFVGIDVSSKSNVVYAMDFYKNKYIQTSFSNNQPGADELSALIKDCMVAHSDLNTIVIAMESTSVYSIHIANHLSTCEILLPFKPYVFCLNPKMTANYRKAFIAMVKTDPLDAFIIADFARAGLIETQPWRGSQFLALKRLTRHRLHLTECITREKTYMISNLYLKFSELQLLSGENQPFSNIYGATSSAILTEYLSPQEIMDASEEELLTFIAEKSRNRITDISKTTELLKKAARDSYRLDKCLYEPLNISLASSFNCIDTFKKEIKAIDDAIEKTIKGMHPNALTILKSIDGIGPVFAAGIIAEIGDINVFHSSDALAKYAGLTWSKNQSGEFDGEDTHMQKAGNTYLRYYLGEAANSVRRHIPEYRDYYAKKYSEVPKHQHKRALALTSRKFVRLVFGLLVKNQLYTGENLDTEFHI

SEQ ID NO: 255828 - protein, 415 aa, unidentified
MEGLSPLHRRVAGIDVHRMLHVVTVLIEQPDGSISKHCREFGGFKRDCRALATWLAELQVQLVVMESTGIYWKSVYAHLENAGITAWVVNAHFIKHVPGRKTDMLDSEWLAVLARFGLVRGSFIPPKDLRELRLVSRYRRKLNANCASQINRLHKMLDDAGIKLGAVVADIHGVSARAMVRGLIEGQPLAVLLSHARGALKRKTEELTASLDGELSERHLFVLRHLSDSIDAMQRQLADIDAYLLRAMQPYAWAHALLQTIPGIDQIAAALILIEIGDDMGRFGSPARLACWAALSPGNQESAGKRRSGRTRHGNNVIRYILCECANAARMTKSTLASKFKTLVVRKSHKKAIVALAHKMIRLIYILLSRRQPYLDQSIDYAAISAKKNAPRWIKQLRAIGKWPSHNPPAASAAH

SEQ ID NO: 255829 - protein, 395 aa, unidentified
MKHILSFDIAKGKNVYCFIDEFKNIIIEPTLIEHNKNKFDNLLNLVKDYSNLIVVMESTSIYHLPVENYFRSKGIETIVMNPKLVKQFKDTLNKSKTDKLDCFKIARCYLGTIDNFYQKQDEYFMYNPLARQYWSLVEGQTRLKNRYKQLIEIIFPEFYLIFNDLYDDLALDFIHDFPHPTFFINRRIDYLMNYLKEKNGTTQAYRFKNKVLKMKELASNSLCYVAFDSFQVQNLVQVIEMIQFHKTEINKIKNQLINEMKNKNLFKIINSIPGFGEFSTALFLAEVGDITRFDDKYQFISFIGIDSVTSQSGVSAYHGPISKTGCKFGRTILFNIVTTIIQISAHADKTNPIYLFFRKKQSEGKHHYKCIIACETKLCKIIYKLCSSNCLYENK

SEQ ID NO: 255830 - protein, 421 aa, unidentified
MRGLRRRGLRAVKEGTLIATVDIGATTNTGYCTTVDGRDMKVFKFGNSREGFEKFWHMIITARNRFGCDDVIMGYESTGPYAEPLVHYLRDKPVRIVQVNPLHTKRLKEVNDNSPGKTDDKDPRVIADIIKLGRALSVVVPEGDAAYLRRLNNARERHVCEHIALLNQMQQLVFLIFPEFKTLIAPMRGRTVRFILKKYTTPESIGALTKEVFGEEIRKKSMGKLGIKEAELLVTAARHTVGIKEGVPGIALDLKHIIAQLEVVERFMSEIEAEMVMTLDRIPSSSRLLSIKGMGVVSVAGLIGEVGDFSKFKTQSELMKLAGLDLYEVSSGKRKGQQRITKRGRSLMRKILYFAVVQMVKKHGIMHEYYERLTGRGTLRMRALVAAMRKLLRIIHAMMRDERDYVGQYEAPKRRMIKKAA

SEQ ID NO: 255831 - protein, 316 aa, unidentified
MDGANLTWIGIDVAKATLDLHFLPSGQPHSLANSPAGHRQLRKLLPAPDACRIVLEATGGYERQLVADLLDAGFHVAVVNPKRVRDFARALGLAAKTDRLDARVLALFAEKVQPAPAQKTPEKQAEIQQLVARRRQLIDLRTQESNRWDVTPSKAARKSIQAVLNTLERQVRDIEKAIEDLVESDDEWRQKTELVQSVPGLGGVTATTLLADVPELGQLNRQQISSLVGLAPFNRDSGQHQGKRTIGGGRKSVRSVLYMAALAARRCNPVIKAFADRLAQHGKPFKVVLTACMRKLLVIVNSLVKSGQPWTPNLAS

SEQ ID NO: 255832 - protein, 340 aa, unidentified
MKPTIAVDLAKSVFEVAVSQRPGRVEQRRRLSRRRFLPFFAQQPPATVLLEACSSAHFWARQLRDLGHEAVLLPPRHVRPYRQGNKTDRADAKALLEAHRNEDIRPVPVKTVEQHALTALPRLRSGWIATRTARINAVRGILRELGLTIPVGAQRVVSCVRALLDDDAVPQSLRASLLDACDEIRGLEEKVRSTERQLEALGRQIAAVGHLRSVPGIGLLTATALVASVGDVRRFPSGRHFASFLGLTPKEHSSGHVRRLGRISKRGDAYLRTLLIHGARSVLWAAKSKKEPDRLRLWALELEQSRGHNKAAVALANKLARFAWVVLNEQRDFQTTRRAA

SEQ ID NO: 255833 - protein, 383 aa, unidentified
MKAVCGLDVHKDSIFLCILHSDGELFEQVFGVLTFQLEEMRKLLQKHHVFEVCMESTSIYWIPIWRVLSPHFTLRLVNPYFIKQLPGHKSDVKDAQWIAECTMKELVRGSFVPPEIIQQLRQYDRRIFDLNAEIVRKVSKVDGVLQRCNIRLSNYVSNIECKSYRDVVRRLSEGVTNPNELMKLVHGRIVNRHGAETILASLTGVVSQAEIDVLRQLHEEIDIAESHRNECQQRMLEICEKHFPEELERLQKIPGIKERAATSLIAEIGTDMSKFETANHLASWSGLRPRNDESNKKIKSRKITHGNVYLRNTIIQCAWAASRQKDSFFSRFSYHQTIVRRKNKMKVIVAVARKLLIAVWHVLHDKTDYVDFKPDREESANNG

SEQ ID NO: 255834 - protein, 312 aa, unidentified
MAELSFGGIDVSKDRLDVLLLPEGLCFSVCNDAPGWVELIVRLRPLAVSAIGLEPSGGYERGIIRALLAAGLSVRRINPNKLRQFARARGVLAKNDRLDARLIAEYVAIMPTRVVRRDDAVEHLAEIITMRRQLCDEHAAAMNQAAHLEDPMLQRLSKRRLARLEADILLLDKRLAELITADPRLAHRYRLLISMPGVGPILAYTLLAMLPELGQIDRKQIAALVGLAPYDFDSGKLKGHRCIYGGRMPVRNVLYMAALSASRYNPALKTFSKRLAAASKKSKVIIVAVMRKMIITLNAMLRDNTEWRPSSL

SEQ ID NO: 255835 - protein, 335 aa, unidentified
MKKIYVGIDISKEKCNLCYRDGLEIVMEEESVNDVKALKKSLSAVLKTFSVAIDEVLVCAEYTGRYIYPLTVACQELDIFLWMDDPTRIKNSMGLTRGKNDVIDAARIAEYAYRYSDKAIRYCIPDAALVSMKSLLVDREFLLIDKKRYQSQITDQKRYMASGDFKHKCARWKKVIRAIDEQIKAIDTEIESLIAANPVLTRQKELLTSIDGVGDRIAINMIAITGGFTRFQNARQFCSFAGLTPYKYDSGTSVRSKAKISKRANQTMKALLHLAAVGAATHMKESEYRDYFDRKIKDGKHVMCILNVVRAKIVHRMFSVIRRDTEYTKTYKPSV

SEQ ID NO: 255836 - protein, 384 aa, unidentified
MDQSSTVYVGLDVHKDSIDIALAEAGRDGEVRHIGSMGGDLVSLDKALRRLISRGAPLHIVYEAGPCGFVIWRHLRAQGLACDVVAPSSIPKRSGDRVKTDRRDAILLARLARAGELTAVRVPQAADEAVRDLVRAREDAVRECRNARHRLKALLLRNGITYAGKSAWTAAHLRWLATLKMAHPTQQIGFQEYLHAITEATARIGRLEQALRDALPGWTLRPLVQALHALRGVQLIAAMTLVAQLQDFMRFANPRQLMSYVGLVPGEYSSGPKRRQGAITKAGNSAARRMLVEVAWHDQHSPRVTPIIATRQEHLPKEVTDIAWKAQLRLNAKFKRLGARRVMKTKAVVAVARELAGFVWAIGRQVQTSGWQGVPMGTVAATTH

SEQ ID NO: 255837 - protein, 338 aa, unidentified
MSVTIIGLDIAKSVFQVHGADDAGNPLIRRKLRRRDVVRFFVNIERCLIGIEACHSSHYWARELIALGHDVRLIPTQYVRPFRRGGKNDANDAEAICDALSRPSINTVAVKSAEQQSVQSLHRSRERLIHQRTSTANQIRSLIAEEGVVCGRGITQLRRCLHEVIADPDGVTPLLRSLIGQSLEQLAALDQWIGELDLKIHELARQSTVCRQLTRLPGVGPVIATAILGTVGSAHAFRNGRQFAASLGLVPGQRSSGGRTLLLGITKRGDAYLRKLLVQGARAIMRVVDRHDDRQSQWVRQLLERRHKHVVAVALANKLARTIWALLVKGEQFEMVRR

SEQ ID NO: 255838 - protein, 454 aa, unidentified
MGRRTTSGTKKKKHSHIFDQINHNAGGIDAGAEYHYVAVPEGRDPIAVRRFSTSTYGLYELADWLVKCEVDTVAVEATGVYCVPLLEVLDARGIKVLLAKPSSLKSVNDRRKTDMVDCQWIQMLHTFGLLRASFRPAEQVAVLRTYVRQRRMLIEHASSSIEHMKKALTQMNIRVDQAVSDVTGVTGMRIIRSILDGERDPEVLAAMRDERCAKSAGAIAQDLTGKYSDDHLFELDQAIRTWDHFQAQIAECDRKIEQQAGLFDKKASREEIPKPRRREHVRKHVLAFAAREMFYEILGQDLTQIDSLSTGAVVTLLAEVGPSLNAFPTVKHFTSWLRTSPGSNQSGGKNKSGKNRNSTNRLATALRVAAQTLEKSKSALGAFYRRMKARLGPEKAINAAANKLARMIYFTLTQNRPYIDPGPDYYLQRNRNRIIKGMKKKASELGYELVPKPA

SEQ ID NO: 255839 - protein, 338 aa, unidentified
MKAYAGIDLHSSNNFTAVIDDQDQRLYGRRLPNTMDAVVSALHPFREHLKGVVVESTYNWYWLVDGLQAHGYKLHLANPSAIKQYEGLKHTDDKWDSFWLAHMLRLNILPEGYIYPKDKRPVRDLLRRRLLFVRHRTAQILSLQSSITRNLGYKMSARDIKKLDKPDADTLFKDPFCILAAGNTIATIRFLTTRIAEIEKAVKAHIQLTPQFRYLLTTPGIGEILGLTIMLEVGDIRRFPQVGNYSSYCRCVKSERFSNSKKKGEGNRKNGNKYLAWAYVEAAHFAIIHYPEIQSFYQRKKVKTNGIVAIKALSNKLARASYYIMRDHVPYDPKRLFR

SEQ ID NO: 255840 - protein, 330 aa, unidentified
MRKATEAGIDVSKDVLDIAVRRDGTRDETARFPNDAAGHRALVRWLTKRGRTARVVLESTGVYSLDIALALHAARGVAVMVANPRAIKQFAGALMQRSKTDLTAAVALREYAMRMPFVAWAPPVAEVLALRGIARRIAALIVERTRERNRLHAAQATSDRLAVVVNDIEVNLRHLERRIARLSADAVALVREHPALQRAFEQLTSVPGIAAHSAVQLLPELLVLPQGMTVRQWVAHAGLDPRAHQSGTSVDKPARVSKVGNAHIRRVLFMPALVAVRHEPHVKAFFDKLVARGKTPLQAYVAVMRKLLHAIYGMFTTNTVFVGEKFHAAA

SEQ ID NO: 255841 - protein, 407 aa, unidentified
MRPIYGRCCGLDVHKKTVVACRLTPEGSQTRAFGTMTTDLIQLREWLLAGGVTHVAMESTGVYWKPVFNLLENHGMELLVVNARHVKAVPGRKTDVKDAEWLAELLQHGLLKASFIPDRESRERRELVRYRRSLVEQRAHLVQRIQKLLEGANIKLGDVASDVMGVSGRAMLQALAQGVDDPAAIAGMAKTALRNKIPELERALTGSVRHHQRFLLRSQFRLLESIEAEIARLDEEVAERMRPFQVALERLDEIPGIGRRAAEQILVETGTDMRRLPTSAHFASWARVCPGNNESAGKRQYASIGGGNRWLRNALLEAAWTVSHSRKQTFFTARYRRIASRRGKKRAAIATAHSLLIAVYHVLRDGVVFQDLGPAHFERRNVDAIVRRSLHRLEVLGYKVTLEAMPA

SEQ ID NO: 255842 - protein, 338 aa, unidentified
MSVYCGIDLHSNNQVVVILDEKDRVLVERRLPNELEIVLGVLEPHRQELAGVAVESTFNWYWLVDGLMEADHRVSLVNTSAVQQYEGLKFTDDRHDARWLAHLMRLGILPTGYIYPKEERPIRDLLRQRGRLVQQRTSNLLSIQNLLARDTGKMIKGNELKRITAEQVAELLETPERVLAVESRLQVIAVLDEQIGRIEAAARAHGELRPEYRVLRSVKGIGQALGLTIMYETGDIRRFPAVGNYASYCRCVKSARLSNKRKKGEGNRKNGNPHLSWAFSEAAHFARRFQAKARKFYERKLAQRGRIVAERALAHKLCRAVYFMLRDQVPYDESLLFR

SEQ ID NO: 255843 - protein, 458 aa, unidentified
MRKPVEIDSEDDGPVIARAAAIDVAKATGMVCTRVPHPGKPGRKVTKVWEVDATTEAIVELAGYLAGLEIERVVLEATGDYWRCWHYLLSAAGIQCWLVNARDVKNAPGRPKTDKLDAVWLCKLNEKNMVRPSFVPAEPMRQVRDWTRDRFDLVADRTRVRQRVEKLLEDALLKMSVVITDIFGVSGRAIMAALIDGERDPAALVALAVPRIIKNKRAALQQALTGRFTDHHAARLKMLLAQHDQLTTLADQVTARIVQAITALPPTPAGDATSGPGAPAADPSEPDTAAACGAYLSAVQRLSEIPGIGPETARSIIGEIGLDVAGVFGTAQRLCSWAKVSPRTVQSGATKRGGKTGKGNFYLKSGLGQAATGAAKTDTFLGARYRRLVKRMPKAKAKTAIARSILVIVFELLADPTKRFQDLGPDHYTKRMDTGRRTTKLASELRALGWSVTLTPAA

SEQ ID NO: 255844 - protein, 351 aa, unidentified
MEEYIAFDSHKHYTWVEQERAASGKIRQYRLEHAPGAILRALRDCPPGTAVALEATANWYWIVDEIEQAGLVPRLVHPRKAKLMMGLINKTDKLDAHGLNVLARNGTLPVVWIPPGPLRELRELTRTRVVLVAQRTRWKNRVTATLAKYGAPASDHSDPFGERARAELAQRSERLPEQARWVLDQMLRQIDTLREQITQCEQRLEQLVEVTPAMQRLRSLPGVGVILAATIQLEIGDVARFPSAEHLAAYAGTTPRVHASGDRTRYGRTRPDVNRYLKWAFAEAANSVAVNHTRCPQRHVSQLYRRLRERKGHSRAVGAVARHLAEATFHLLSRQQVYRDPAVVTARATEV

SEQ ID NO: 255845 - protein, 436 aa, unidentified
MNTIEKLDPVVSIGIDAAVVAAHQVAIRGPGIVEDFRVRPTLAGLEELSVRLADWAPAMVVAEPTAGTWLPLLHAVTESGCRAGFVANRDSARLRKAIAGANKTDVIDADLLARSAEILGVEQAPIPPAGQIGLRRAMRRRHRAIVEAHRVDCRLWALAAWAFPDVWLACGGHGVAQPVLGRWSDIRALGRARTASIGEVVAAHSRDKNPIRRAERIKAGAAGWSEFWIGRLDLDDLAWEVGQCLDDIAIADAKLSATTERALGRWQQLWPDDVLRTIPGIGPICAASIRGWWGQGTHLRSAKAAAAHVGLNPSNWESGQYRSPSRHITKQGPADLRLLLYQAANVARHHDPGLAAHYRRLMCDRGHTHISATSAIARKLAGRAWKILQTQQPYEVRDLDGNPIDPVTARVICAELAVPADIRRRNRATQQGRRTP

SEQ ID NO: 255846 - protein, 411 aa, unidentified
MTKIIVAQDAPVLVAIDIAKARHEVLIAIPDKKRRRRLTVLNELADFNRLATALKEYGRPVRVAFEATGNYHRALAYHLATSGFEVKLVSSVALARTREALNNSWAKNDPKDAQVILHMMEIGNEQYYHDPLVCGTNDIQELSKTHDIVSKSKTELWHRVLTHYLPLYFPEADRFYRSSRSDWFFAFLERYPSPHLITAMGKAAFTADAWDVIGRKVAKERLLADIYETAKSSVGLPVAPDSDAIRMFRLVLGEGRSLIAQRNQIEDRAVALLKDLPDYQLLTSIPGIGPINALTILAEAGDLRRFGHHRQFLKFCGMDLATIQSGTFRGQTKLSKYGNARLRRTLWMAGQVAILQRTNSFRDKFERYIAQDRQNTHLRRKAYSAIAATLSGHCCAIPCRAVNGPYCSRDH

SEQ ID NO: 255847 - protein, 419 aa, unidentified
MNYVGFDWASRAHDVTVLDEAGGVLDRWAFPHSETGWVTTLDRLARHGSAAEVPVIIERTCGLIVDRLLAAGHPVVPVHPTAFYAARPRWGASGAKSDPGDSYKLADYLRTDGHRLRRLTPTDPGLHELQALVRLRDDQVRARTAATNQLTAILDNYWPGPKQLFMSLASQIALAFLTDYPTPTSAAHLGEARMAAFCRRHAYRGGKSPAELLSRLRAAPVAPVGLPPATLAAMVTAQVTVLKTLQTVISDVERLIAVRVVAHPRSNLFENLPGVGMINLAQLLAEVGPILDRVDSAEQAATECGAAPVTRSSGQTRGVYFRWAANTRARKAITSFAHNARMQDDWAAALYADARARGKRNPHATRIVARAWLRVIWACWTSGQPYNPDRHHSSRFLHRCHPAGAQARSRWSPPPEERS

SEQ ID NO: 255848 - protein, 428 aa, unidentified
MKYNTQNKKIASITEKTLIIGIDVGSQTHYARAFDWRNYEYSRKPFAFSNDESGFLAFKAWMDEIAEKHHKDTVIPGMEPTGHYWFNLGVFLQEQGMRVVHVNPHHVKKSKELDDNNPNKNDRKDPKTIAALVNEGRFSYPYIPTGIYAEIRNLSNLRFQTQEAITRLKNRIARWFSIYFPEYKDVYGKLDAVSGMMVLREAPLPEDIVALGVEGINQIWRNAKLRAVGLKRARTLVNKAEHSVGSHEAPEAARVELSLLLKDYEMYSQRMEELMQTIEEKLREIPYIDKLLEIKGIGMTTVCGFIAEVGDIRRFDNPKQLQKLAGYAIVSNNSGKHNGESHISYRGRKRLRYVLYEAAISVIGKNAEFKEIHYYYRSRDKNPLKKMQSVIAVACKLIRIFYMIMTKGIDYDGAKMLGDIRRPTVSAA

SEQ ID NO: 255849 - protein, 324 aa, unidentified
MSNLSPSFVGVDVASAHLDIALHPQNIHFRVPNNEAGLDDCLKRLQRLTISAVAMEATGGMERLAASRFQAAGYAVHVLNPRRISNWRQVVARQAKTDRIDALLIAEFAATVPLRQTHVTTPQQRILRDLAARREQIVIAITNSKKQLVRAIVPVIRQSIERQIAFCTQESTRIEREMESIFRQDAGLMRQHELLESIPGIGKLSAMLILAELPEVAFLPPKKLASLVGVAPHPLHSGTKTTKARITGGRARIRSKCYMMAHGSIVHNPWMKTYAHRLLARGKSRREVNIACINKLLHVAHAVLIRDKPWQPEPPIQKNLDQMT

SEQ ID NO: 255850 - protein, 455 aa, unidentified
MPKQKRTRNARTLPVARVLEPNAAGIDIAATEVYVAVPTGRDPQPVRRFSTFTDDLHRLADWLQACRVQSVAMESTGVFWIPLFQILEDHGFRVCLVNARHVKNVPGRKTDVSDCQWLQYLHSVGLLRASHRPTQTICAVRSIWRHRESLVQMAAVHIQHMQKALDQMNLQLHHVISDITGTTGLAIISAVLDGERNPENLATLRDPRIVASRETIARTLVGDYRVEHLFTLRQSLQAYRQYQQWIAACDSEIERQLQVLPSNLPDDPKPLSKPRDHHKPRRNEPRFDLRSQLYRVFGVDLTAVPGVSSLTAHTLLTEVGPDLRRFPNAAAFASWLGLCPDNRISGGRVLSVVTRKVKNRLTIALRMAAQSLHRSQSYLGQYFRRMRIRLGTPPAITAAAHKLARVLYHLITTRQPYEESTFAAMEERARQRQLLRLTKQAARFGFQLVPGRSVP

SEQ ID NO: 255851 - protein, 333 aa, unidentified
MQKKLFIGIDISKLVMDATVLFPDGRHDHHQFKNSRAGFNQLLRWVRRLSSKEAYELIFGFEDTGVYSIGIGRFLSGLKLRFVSENAYRIRRSMGIQRGKDDKADSLLIARYLKRNLEELSFGQAAPDLLLELGQLSSQRERLLKERAAHKTRIKELKVLEGCLDMRFLLRIEADMVRLLDKKLREVEEEIGKRIKAQEGLQEKKELLCSVPGVGEQIANQMLIITRGFTRFPDWRKFSCYAGLAPFKHTSGTSVRGRTKVSKIANKKIKALLTMGALTSIKSKNEYRQYYERKTAEGKHPMAVLNAIKNKIVSRMFAVIERNTPYVCLQGRD

SEQ ID NO: 255852 - protein, 405 aa, unidentified
MERVIERCAGLDVHKKTVAACVRVRGTQHVRTFGTTATELLVLRDWLLAHGVTHIAMESTGVYWKPIFYVLEDAFTCVLANAAQIAQVPGRKTDVKDCMWIAQLLEHGLIRASFVPPAPIRELRDLTRYRRALIEERTREANRLHKVLEDAGIKLASVASDVLGVSGRAILAALIEGTTDPLVLAELARGVLRKKLPALRHALMGRFRGHHAFLVAQILAHLDYLDELIATVSGQVEVAIAPFADELARLDTIPGINQRTAEAVIAEIGVDMTVFPSARHLASWAGLCPGNNESAGKHRPAHARKGNRWLRSALTEAALAGAVRSKKGALAARYRRVMPHRGHKKAVVAVAHAILVTAYHLLARQVTYSDPGADYYERRHADRVRQRAVQTLERQGYRVSLEPAA

SEQ ID NO: 255853 - protein, 387 aa, unidentified
MYFVGIDISKFKHDCAIVDEFGDVITPSWSFQNDREGFSLLKELLDALDGEKKIGLEATGHYGQNLKLFLENNDFSFMEFNPLLINRFVHSKSLRKTKTDSIDALMIAQYLMTVEYKPYPPSFYTFEKLKSLTRFRDSLIRQRSRQLVELTNILDKVFPEFKPFFKGRFSATALYILSHYASPEKISNMNSKSYEPLRRLSRGRFSMVDFVELKTLARNTVGSTSDYLLQEMEITIDIYNQLQSKVEEIELQIHDCVLALAPPILTIPGIGAASAAVILSEFGDLSKFNNPSKLLSFAGMEPGYFQSGTSESTGKMVKHGSSHLRYAMMNCAQTVINNEPTFAAYYAKKRAEGKEHRVALTHVAKKLLRVIYTLQTKELSYNPDLGR

SEQ ID NO: 255854 - protein, 347 aa, unidentified
MSHTKKGDKAMQVERIGFDIAKQSFQVHGVDAHGKAVVRKQLSRSKVLPYFAQLRPCLVGLEACGGAHYWARELQKLGHEVRLMAAAMIQPYRTGQKNDRNDAEAICEAVSRLRTRFVAVKSEAQQAVLTVHRVRELLVTERTALVNQIRGLLMEYGVVIAQGIQRLRRELLALLDSAPTLPTLVREVVAELRERLLELDRRITEYDRRIEQLAKQNEAARRLMQVEGVGPITATAIVATIGDGHAFHHGRQFAAWVGLVPKQHSTGGKSVLGRITKHGNVYLRTLLIHGARAVLQFSAKRSDQKSRWVEQVRRRRGNNIAAVALAAKHARILWALLARGQEYRLAV

SEQ ID NO: 255855 - protein, 330 aa, unidentified
MKKREFVGIDLSKEKIDVRLQLARQENVFDNKLSGFKKMLKWITKSLDQASDLLFCFEHTGMYAFPLLMFLEKEKLEYVQVSGLQVKRSLGIQRGKNDRVDAKRLAEYAYLHREELRPHKLQSDILLKLKSLLALRSRIVRQRAGYKASVKEYKSYMALKETDLIIHSQKRIINALTLQIEAIEKEIKQLIASDEKILRQFILASSVKGIGLICACYMIVLTNCFTDFKTWRKFACYAGSAPFEHQSGTSIKGKTKISHYANKQMKTLLTNAVKSAIRHDKELGMYYKKRIVEGKHKKVVVNIIRNKLISRVFATVKRGTPYVDLVKYAA

SEQ ID NO: 255856 - protein, 342 aa, unidentified
MEITTIGLDLAKSVFQLHGIDASGSVVLRKKLRRSELIDTFQKLPPCLVGMEACATAHYWAREISALGHQVRLMPPAYVKAYLRRQKNDAADAEAICEAVRRPTMRFVPVKSAERQAVLVLHRSRELLVRQRTMLINAIRGHCAEFGMIVAQGARKADDLIAQVRKADTAMLPDVARATLLLLAGQLDALALAIHALERRLLAWHKQDAASQRLATIPGVGLISATALAASVTDPSAFRSGREFAAFLGLVPRQNSSGGKDRLGRISKMGDGYLRKLLVVGATSVVRRARTHDLAAAPWIRALLERRPARLVTVAMANKTARIVWALLSRGDVYRPPMTATA

SEQ ID NO: 255857 - protein, 357 aa, unidentified
MEGPIVSIDVSNGNSHYMCFIKNNKRFGKVKKIDHDIEGFKRLLEDIQKLEAETNEKVCAVFEATGVYTKPLERFLSKNSIKTYMINPLESARKRKEEIHNKKTDKLDPISISKVYYDKEEMMELKKKDETYNWLRKKNRLYEDQLNHLRKYKVTFQNQLSICFPGYLDLFKDGYSDIPMTILKKYPHPDLLKNKKAETVARYFEKNTCHTHKVSLEYALKIIEFAKKTYPGCEKDDVEVEIFKILLDKVIETQRECEKTLNEMITVASTLEEYRYISSIDGIGPNLAARIIAEIGDIEEFKSREALVAYAGLDPHIYQSGDQDGKHLKISKKGNKYLRCLLFLAVGCWYYVKKKDS

SEQ ID NO: 255858 - protein, 408 aa, unidentified
MLEVKLERCAGIDVGKRYIDICVLIGPADHKPAEEVRRFRTTVRDLEQCRAWLVEKGCSEVVMESTGSYWKPVFNVLEGSVKVTLANPEQVKALRGKKTDRKDCRWLAGLLRHGLVQPSFIPPRDIRELRDLTRRRRTLLLNGGEERNRIQKILEDANVKIGSVLSDVFGLSGQDILEGLLENKLGAEEMAQLARGRARTKIPQLVEALEQHRMSEHHRLLIRQALRHMQFIEEMIAELDKEIREKLQPYQKQLELACTVPGIGADAAASILAEIGMDMSDDGPFASCHHLASWAGICPGNNSSGGKRKNTRIRKGNRWLKATLCQTAWAAAATKNSSFQSRHRRLRLRRGAQRANIAVGHAQLIALYWVLRLGVPYQQQSQQAREQERESLIRHHLHRLTELGYAVS

SEQ ID NO: 255859 - protein, 354 aa, unidentified
MRCTTKYVALDVHQATTAASVRDEAGRVLARSIVPTEEAALVEFFRGMRGAVHVVFEEGTQAQWLYDLLAPLVDRVLVCDVRGQARHGNKGDRVDADQLSDLLRRGGVRAVYHGSAHRAALKEFTRTYRNLVEDSTRVMLRLKALFRARAIPTPGTKVYQAGERAQWLERLGEAGARYRAEVLCAELDVLRGLRPKAKAAMVAEARRDAAWPVLLAIPFLGPVRVAQLLATMQTPWRFRTKRNLWAYCGLAVVTRSSDDYALVAGQPVRRRRPPLTRGLNRNHNRVLKDVFKGAATAATARPGPLQDFYHGLIARGMREELARVTLTRKLAALTLRLWKRGERYDPTKLTMQAR

SEQ ID NO: 255860 - protein, 354 aa, unidentified
MIIIGCDFPTRTQVIAMLDTETGVVVEKRLEHAGGEAKAFYEGLKEPALVGIETTGYTRWFAEMLQELGHELVVGDAAKIRAKETRKQKHDRRDAEHILNLLVRGDFPKIWLPPAQERDVRVLIEHRHQLVELRTRARNGLQAIALSSGLRRRGRLWSQAGQGELQKLPLREGMGRRREDLLRLVRQLSTWIEELDQRIDEEVTRREDAQRLMTHPGVGPQTALATVLVLGPPERFPDRQHVTSYLGLIPQEESSGRRQRFGHLTKQGNRLMRFLLVEAAQTASRYDPRLRRAYRRLVFRKGAPIAKVAVARKLAIRLYIMLRDGIDYEEFCRRGPDRSGPGSHAGMLGDVALV

SEQ ID NO: 255861 - protein, 421 aa, unidentified
MRGIRGKRVKMVKEGTLLVTIDIGMTSNTGYCTTVDGRDTKPFKFGNTREGLDVFWSMLLTSKNRFCCSEVVVGYESTGPYAEPLVHYLMDKPVTIVQVNPMHTKRIKELNDNSPLKTDDKDPRVIADVLRLGHALSVVVPEGDAAYLRRLNNARERHVGERTALLNQLQQLVFLIFPEFKTVFNDVTVKTARHILKNYTTPERIGTLHKDSLGEEIRKRSMGKFGVRQAELLISLARDTIGIKEGVAGIVLDIHHILVQLETVNAFIEEIEAEMAKALERIPCSMRILSMKGLGVVTVAGLIGEVGDFSKFRTQSEIMKLAGLDLYEISSGKRKGQKRISKRGRSLLRKILYNAAVGTIRKNGIMCTQYEKLIGRGMKRTPALIVIAKKLLRIIHAMLRDDRDYIRNYESPKRVVIKKAA

SEQ ID NO: 255862 - protein, 376 aa, unidentified
MEHNSEAFIGIDTSKLKNAIAIAEGGRDGEVRYLGEIETTDAATRKLVKKLATKYRKVTFCYEAGPTGYGLYRLITSLGHECSVVAPSLVPKKPGDRVKTNRRDAVGLAKNLRAGELTAVWVPDMRHEAMRDLSRAREAAVDDLKSKRQQISSLLLRLGLHYPGKKTWGKSHRNWLASLKLDQREQRIVLEELFGAERQAQERVDRLVSAIIDAVPEWSLAKIVTALMAVRGIDLVAAVTIMAELGDLSRFASPRELMAFLGLVPSESSTGDSVKRGGITKAGNRRARRILVESAWSYRYPPRISRDKLAKVAAAPEPVRAIAWKAQTRLSSRYRALIKRGKRPTIVATAIARELCGFIWAIHRAVTAPGGRQLAS

SEQ ID NO: 255863 - protein, 350 aa, unidentified
MKKRNTVGLDMGDKIHSLCVLDWRGQVVERAEVGNTGAAIRKWFGKMKPCRVAMEAGTHSGWVSRILEELGHEVLVGNPRKLRAIWDNAQKNDVRDAEMLARIARFDPQLLHPIRHRGKEAQCDLAAIKARDELVKVRTALIAHVRGLVKSTGERLKKCSPECFHLRAAEAMPADLAPALEPVVASIAELTVRIRHCDNLIEQLSADKYPETERLQAIPGVGPVTALAYVLTLEEAERFEKSRDVGPFLGMTPRRDQSGQTDKQLRITKAGNAYLRRLLVQCANYVLGRHGPDCDLRRFGLKLAERGGKNAKRRAVVAVARKLGVLLHSLWKSGEAYEPNRRPVRAQKVA

SEQ ID NO: 255864 - protein, 380 aa, unidentified
MFSVSPIERSVPVFHSIAFESEQHLSAFDVSSLSLHSLACDLAMTAPDSASSPVSSASPAIGVDVSKASLEVALIGTEETSASHTAVPNTEEGFEELVDWIGRQTVASNVHVCLEASGGYEKPVARHLYEQDLTVSVINPQRTSAYAKSQLTRSKTDQVDARILARFCQREEPSSWQPASSEQRNLKEMTRGLQGLKKERDRLNNQIDQSSNPTVTGSLESVLESVNEQIDRLEEAIDNHVQSADALARSQELLETIPGVGQTTAALVLAELGDPERFESARQAAAYAGLTPSHHESGSSVHRKPRLSKVGSSRLRKALYFPAISALRCNTAIEALGSRLAERGKAKMVIVGAAMRKLLHICYGVLKNQSPFDPSLHPGT

SEQ ID NO: 255865 - protein, 335 aa, unidentified
MSKRTLYVGIDVSKKALEVATTVDGKEAEATKEIRNNLGGFRMLEEWTRKQSHKHGCEEIHYCIESTGVYSEKVVEYLQGRGDLMVSVVNPFVVKSFGKSLGVRTKTDRVDSELLALYAATVKPKVTEKRPEDLKELRSLVRHLEYLINRRGQEVGRLESTTNALVADSIKGIIKSYDKQIEKIKEAIEEHLRKHPDLRERTELLESIPGIGEITSKILLCELHMEGGGERISAKAQTAHAGLAPQHRISGSSVRGKPRICKTGNSRLRRCLYFPTMVAIKHNPVIRRFYRRMLENGKPKMVALVAAMRKLLVIAIGVLNNRTEFDENWDGREYA

SEQ ID NO: 255866 - protein, 428 aa, unidentified
MSFDRLKRPRKRKRLLGHKLKPSRANLLIQNSKPHLSMKTSYFLGLDAAKHKIRAALAGESERVLFEKDLPVNATGLSQLLAKLKAQVKEPEQLLVLIEATGVLHLNWSAALTRAGHAVVVINPLIARRLYTLENSIRDNKSDPVDARGLCSIARLHGSKLLALYRFGLKPEQFTLQRLQSVRKALRKALTNLKKTYQSLLDVSFPELGGLLQLDGVGIRELLAQAPTPAAIARKRLCTLEKNWMLRPKAAALKKLAADSMADPALSAASAPALQVMLQSLALVEGQLRKLDQQIETIASKSVDAQSKALLETMPGFGALNASKVLAFLPTEILHSGSNRSAAARLQAFMGNDPRLRESGQCKGHTKMSKRGVEMLRTAFFQCAFSASQHDPELRAYYQRKRAQGKKHEAHPHPQTRRRPTFRQTLPV

SEQ ID NO: 255867 - protein, 348 aa, unidentified
MRFYTRTHKHYCGIDLHARSMYLCILNGEGKVLLHRNFKAEPAAFLNAVAPYRDDLVVAVECIFTWYWLADLCAEEGIPFVLGHALYMKAIHGGKAKNDKIDAHKIAVLLRGGMLPQAYVYPKPMRATRDLLRRRNHLMRKRADLLAHIQNTASQYNLPPLGARVDRKAERVKIPEHFPDPVVRRSIELDLSLIAHYDQLLNTLEQELARMAKAHDAFAYHLLRSVPGVGRILTLVLLYEIEDVNRFPRVQEFLSYARLIKCQKGSAGKVLGHSGKKIGNVHLKWAFSEAAVLFLRANPEGQRYVERLAKRHGKGKALSILAAHLGRAVYAILKRREPFDQAKFLAHG

SEQ ID NO: 255868 - protein, 373 aa, unidentified
MKYSTVYVGMDVHKDTFSLCCYTNEKEQAEYPQKVDGHYSKVINYIEAMRFHYGDDALFICGYEAGCLGFTLYHQLTDHNVKCIILAPTTMLQQKGRKKVKTDKRDAALIARCLAHHDYSPVHIPTEQDEQTKEYIRMRDDHKLALKKVKQQILSFCLRHNYRFDGTTNHWTQAHLKWLRSLKPEGLYAEILQEYLLTYDNLTDKLERFDKRIEDLASDETYQENIHKLSCFIGVKTVTALAVLTEVGDFKRFASAQHFASYIGLTPGEDSSGDDQNRLGITKAGNRHVRSLLVEAAQSYSRGQIGFKSKALKTRQDGNPPEVIAYADKANERLRRKYYRMVLKNNKKTNVAKTAVARELACFMWGMITDNIA

SEQ ID NO: 255869 - protein, 349 aa, unidentified
MYSEKISTKDRIINNDKYDYYIAIDWSQSNMAVATLKKEGVKPKITDVDSDVKHLKAYLSNLKGSKIVTIEETTSTHWLYVELYEYAEKILICDPYRNRLLSEGPKTDKLDAGKLSLLLRSGLLKEVFHSLDKTYELRKLVRDYEQLVKLGTRVKNEKSAIYRGAGRSYKKLEKIDDEILKWIINQKDKRIDLYNEQKREYEKKFSEIVGQNKNLQYMKGINGIGVIRAVTILSNVVDANRFKTGGKYLSYCGLVKHQKMSGGKSYGKKNTRCNRGLKAVYKSAAISVINGNCPLREYYDSLLSKGIPEDNARNQISRRIALITYGILKTGTKYNPYKWRESKPKEKAD

SEQ ID NO: 255870 - protein, 482 aa, unidentified
MKKRNIYQNQSQELLHLFEVAGSGQKVMCVAIDYAKNDHLVMFCNGHGDILRKPFSVKNTAEGIAYIDAQVRRCCRQRNIEKQHVFFGGEDANSFAKNFVSALRNKGFVVANVNAHEAKKQRGHVQASTDRIDLMGIANLLLNCRANCCSAQAGIYANLRTLVRHRRRLVQMLTEVKNRVHGIVDELFPGFLNQNNSGIVAFTQTSLYLMQERFSPKQIARRRRQKLVEILKRLGTSRPEKTAAKLQHHAAKVLHAPVEHVDTLQLSLSQHVKHIRCLKESVCQMEKEIALKLSQTQGAFLTSVRGIGLVLAAGLTAEIGDVNAQKPLNNLASYAGIVPRVKQTGGLQGKTYTGPVAKRCNRILKDYVVKSAYHLGLHGPPDLMADYRRRQVSGQHADFGIARRYLRMAICLMRSSQVYLPLNLRKENSTRQQRAGYYLKSWPYLREKWQRAGALEAAFTTPRPLGLWRQMVQQLYEIKLKL

SEQ ID NO: 255871 - protein, 442 aa, unidentified
MNPIPNDPNPASTLVAAPALPRPEPAFAAFIAIDWADEKHAVALQAAGHTQIERTTLEQKPEALTQWIAGLRQRFAGAKIALILEQKRGALLWALQPHEHLVLYPINPQMSAKFRQAFHPSGAKDDPLDADLQLDILLHHRARLTAWQPDEATTRQLSLLVEGRRRFVADQVRATNRLRDALKSYFPQALALVGEDLSSRMACAFLKKWPRLASVQAVKPAVLRQFYYAHHSRSAELLAERLQIQAQAQPLTTDEAILAAQSLLVQSLAQALATLHPVLARYDQQIAQLFATQADFAIWESFPGAGPALGPRLAVAWGTQRDRFADRQAMSAYSGIAPVKEASGKALWIHMRWACPKFLRQTFHEMAKCSLQRCAWALCYYRMQIERGKGHHAAIRALAFKWQRIMWRCWQDRTRYDDAKYVASLKRSASDLYARLSAAPAK

SEQ ID NO: 255872 - protein, 338 aa, unidentified
MLYVGVDLHKHSISVCVVRTVGRGRKIVERRKFRCEDEEQIAEYFASLGEYQLVVEATASYEWFVRLVEPTADRVVLAHPGHLRVIAQSKRKTDKLDAQTLAEFLAMDQIPEAWRPTPRVREHRTLVRHRQYIVGRTTSVKNKLRRVLSHYNADLKELFTQKGRKYLAKIELSESDRFVTELLCEELDQHSERLKRLNKQLKAFAKQATVAEREARAVLNSMPCVGPVTIDVVLAEAGDIRRFGSQRKATAYAGLAPGIRESAGRAKQLGITKQGSGLLRTTLVETAWRLVIKTRRWSNVYEKLKARCGAKKAIVAVARRVWCVMVSILQSGQKYQLT

SEQ ID NO: 255873 - protein, 338 aa, unidentified
MKVYCGVDLHSNNSWIGIMDRKEKRLLQKKLPNELPVILSALKPYRKDMVGIAVESTFNWYWLVDGLIDNGYKVHLANPSAIKQYEGMKHSDDEKDAFHLAHLLRLGILPEGYIYPKEDRPVRDLLRKRLHLVRHRTSHILSFKNLVSRNLGIQMPSNEIKELTEDAVEALFKEKHLVLAGKANIATMRFLKERIKEIEAAVVKKVKLRKEYLNLLTVPGIGKILALTIMLETGDISRFPEVGNYASYCRCVGSTRISNGKSKGEGNRKNGNKYLSWAFVEAANFSVRGYPYVRGYYQKKAAKTNSIVAIKAVSHKLARASYYVIKNQEVFDPKKAFA

SEQ ID NO: 255874 - protein, 362 aa, unidentified
MQKHIFVGIDLGDKNSVARIAVGREKSERFGFVNTRTGRGRLIAEVKRRAEQAGTATIVMAYEASSCGFILHDEAKASGIDCKVLAPTKMDKSVEQKKNKNDDRDADDVIEKLRGHVLAGNRLPTVWIPDTETRDDREVLRTRLALSERQTQVKAQIQMLLKRHGLEKPTDLGTTRSKAYRRWLGSLAEMKTVGWGTRNSLASLLRQLKDIEQEIGNLDKLVESLGDQQRHKPIVEALMKESGVGLLTAMVYRTEIGRASRFSRGRHVGKFVGLTPTSHESGQQSDRKGHISRQGPPRLRKVLCQASWVHVRHDPYARGLYQRLVEKNPKKKKIAVVAVMRHLAVRLWHRMREAELEQKTPS

SEQ ID NO: 255875 - protein, 314 aa, unidentified
MSNETCVGIDVSKEKLDVAIGSSGEVWQVTNDEAGHGELRTRLAAARPRLVVLEASGGYEAIAAGALWEAGFQVAVVNPRQVRDFARGMGKLAKTDQIDARVLALFGEKVPLEVRAPIDAEAKELQGMVLRRRQLVEMLTMEKNRRGLVAAGRARKSLDKHIAWLEEAVRRASDDIDQTVRKSPLWREQEDLLRSFKGIGPVSARTILVELPELGMLNRKKIAALVGVAPFNRDSGKFRGKRMIAGGRSHVRTVLYMAAVTAARSNPVIRNMYQRLLAAGKAKKVALIACLRKILTILSAMMRDNARFAAPTPA

SEQ ID NO: 255876 - protein, 343 aa, unidentified
MTRFVGLDVSQKLTSICVVDETGRRLWRGQCSTDPEQLERMVKGHAGEDARVGLETGPMTPWLVHALRGRGLDVVCLDARHASAALKMQMNKADQNDAEGLAQIMRTGWYRPVHVKSLDAHRARALLGACAQLVGMTTRLSNQIRGVLKTFGLLPGSMRGLSFDRRVESLLTDRDDLLPIVRPMLVAWRQLREQIAEFDKQVRALTRKDPTCRLLMSVPGIGVVSVLAYVSTIEDPARFARSRSVGAHMGLTPRQYQSGEVDRSGRISKCGDTLARTLLYEAAVVILARVKRASGLKDWALAIAKRSGSGKARVALARKLAVILHSIWRSGEPFRWPEQPASA

SEQ ID NO: 255877 - protein, 445 aa, unidentified
MSGILPPRAAADTEGQAPRYIGLDLAKKETQLALLNAAGQQIHSRRFASTRENFLQLASELGPLDCVALEVTTNSFTIARLLWPSGARVSLSDPMRTRIIAESKFKNDKIDARKLAELDRVDYLPKVWLPDPDTETLRHLLSQRQSLVDRRTEQKNRVHALLHRYLLRFEGTDLYGAAGRRFLDALLADATLAPYDAFELHSSLKEIDRLEGQLTEFEQLLADFIVTRPLLLAQLDHLLSVTGVSLVVGAGLLAAIGEVTRFAKPKRLASYFGLVPSTYQSGDSRAFHGRITKRGRAQARWLVIEAAEHLRKSPGPLRSFYQRLAKKRGHNIAVVAVARKLTELCRQLLTKTEDFIVSPLYATGLSGRSLKTRIARQAASQAETQYEKLLATRATAARATAAHESAALPANSSSFNPLRPTLPDWQRVLQQVAAQLSREPVKKGG

SEQ ID NO: 255878 - protein, 355 aa, unidentified
MSLPMEEHEVILGVDTHLDVHVAVLVDEVGRVVATHSFPTTARGYEQLIEWAGSFGRLSRAGVEGTGTYGAGLARYMRERGVQVLEINRSDRSRRRLRGKSDPTDAENAARAVLAGDAHAIPKTQSGVVEAMRAINMARRSAVKAKTQAINQLRALLVTAPEAIRATLWKVKPEHCIARCARLQSLGETPLLKALTSTLRMLARRWMSLAKELRQLDTALDELTKRAGRRLLTRFGVGPQTAATLLVTAGDNPDRLRSEAALAALCGVSPLEASSGKTTRHRLNRGGDRAANNALWTISMVRMRSDPRTRAYVARRTTEGLSTKEIQRCLKRYIVRELYPLILADLADAARPNLT

SEQ ID NO: 255879 - protein, 422 aa, unidentified
MKVFKIDDFAALVGIDWADKKHDVCEMPIDTRHYQFSIISSKPQVLHEWANGLKKRYPNKQIAVACELKKGPLIYALSKYEHITLFPINPSTVAKYRKAFSNSGAKNDPSDALIQTEILTLHMDKLVPIVPESSEIRTLGQLVEYRRKLVQDRVNLSNKVTATLKNYYPQALDWFKEKDTVIFCDFITQWPTLAEAKKARKLTLMKFFNRHNSRYPSVNEKRIEEIKTACSLTDDPGVIEPNAIMVEVLIAQMKVLLIGIEHLDKAIKVRYKSQTDKRIFDSFPGAGAQLAPRLLVAFGVNRDRYDIADEVQKYTGVAPVIEQSGQKKWVHWRYSCPTFLRQTFVEWAGLSIRYSFWAKAYYEQQISKGKPHNTVIRALAFKWIRIAFRCWKNNTPYDETTYLNALKKRGSPLLKFMVSEQI

SEQ ID NO: 255880 - protein, 348 aa, unidentified
MDVHSKSTVWCLLDAAGEVLDTGSVATTSVSLAALVEKLGKDDLLAGQEIGTMSYLVHDTLSAAGVKILSFNAAQLRMIAASRKKTDRRDAYWLAKALASGMYPHPVYIPTGEIRELRALLTQRRMLQVERNRWRYRARAGLRSVGRTAPPGGAHLARSLRRWLAPGSGLESHVRELLGLCQRQEAALALELSRVDTDLRRKAQAIEPVTRLKTIPGIGDLVALTIYASVGEIARFPNAKLLGAYAGLVPSVYQSGSSQRLGGITKQGSNLLRSALVQSANVLMARCRKAEAKPLREIAARVQTSRGRRKIAVVALARHLLRIAYYLLRDGTTYDDRRLQSRSSELAA

SEQ ID NO: 255881 - protein, 347 aa, unidentified
MSQYIGIDLHKTKSFVTRVDQRGRVLEQVELRHAAGELQRYLEKVPRDTRIVVEATGNWMWLYELIEDRHPDLVLAHPLKTKAIASARIKTDKIDATTLAHLLRADLVPAAYVPPRAVRDTREVLRYRASLVRVRTQIKNKIAAILSKNGLVTPTKTAFGVKSRQFLATVGVRPCYRLALDGYLRQLAHLTDEITQVAQTIDAQAQADPQAQLLCTMPGIGAYSALLILSEIGDVHRFPDSRHLCSYAGLVPSVHASGGKTRLGRLTKQGSTWLRWILIELSMHAIKGAPQFQQLYQRVARKHGRNAGRTAVARAMLKTIYAMLKRQEAFRPIEQGSTGQRLRAMAG

SEQ ID NO: 255882 - protein, 385 aa, unidentified
MTVPAQFVPRNYDVFAGLDVDKNSMAVIFTDHEQLMQSLRLPYSAAQLLNYVRKRFPGQRLAFVYEAGPTGFGLYDELVAAGHPCLVVAPPMVPTAPGARVKTNRLDARKLSTALRGGELKSIHVPSPKYRELRHLVQLRDTHVQQLTATKCRIKALLLYEGIAFPADEGKEKQWSQRVLDELLALPCSEAVRFKLDQLIGTLHFNFNAAAAAQKQIRHYCKKDQELRRSIAWLKSLPGIGEIVATHLVARLGDPVLITNVRQIAGFLGLASSEHSTGDKQNRGEITRAGDSRLRNKLIQSAWVTIRRDPELREFYQRVYQRHPKKVAARKAIVAVTRKLTTRIYAVLKEQRPFVLREVSTAPLTTEETAGHRERLDGQQNEQPR

SEQ ID NO: 255883 - protein, 351 aa, unidentified
MMNITTVGVDLAKEVITVCSMDTHGHVLKTLDLRATEFSAWLLQLPANTILGMESCSSAHHWARKMQTMGLVPKLMAAEFVQPFRKSRSSKNDHNDAEAIAIAVKQPQMRFVTIKTEAQQARLAWHRCREGWKEERTALINRTRGLLLEFGHPLARSSKAFTIGLQAALHHDALPTQFRTLLTHVQQQLQQLDQQLAQCDRSIALSAKQDDPSQRLQAQPGIGPISADALTATVGNARDFKNGRQFAAWLGLTPRQYSSGGKTKLGRISRRGDAYLRTLLVQGAKSTLQSVLKKAPHLLSHMQQWILKLYGRVGYHKTLVAIANKHARQVWAILTKGEAYDQDAWKRIVST

SEQ ID NO: 255884 - protein, 338 aa, unidentified
MALYCGIDLHSRDCWLAILDEGLKVTQEAKVGNDLEALLQTLEPYREDLEGVAVESTFNWYWLVDGLEEAGYRMHLTNTWAVKQYEGLKYTDDRHDARWLAHLLALGILPEGYIYPKKERAARDLLRRRAFLVRKRTSFLLAMRGAFECRTGMRISSNDLKKWEAKDVEAHMEDPAEAFSITCLLEPMHALSAQIKKIEKGALARGRLRPEFAPLETVWGIGKILALTIMYEVGDIARFRKVGNFTSYCRLVNTARLSAGKRKGSGNPRNGNPHLSWAFSEAAHHAVRHHPEAQKFYQRKRTKTNGIIAIRALAHKLARASYHVMRDHVDFDPEKTFA

SEQ ID NO: 255885 - protein, 273 aa, unidentified
MNSQKYIGMDVHQATIAVAVMDDQGKLIMECILETKAATILEFIQGLRGTLWVTFEEGTSAAWLHDLLQPHVSHLVVCDPRRNALLKDGSKSDRIDARKLAELLRGNQLKAVYHGENGVRTLKELGRSYLTLTQDLTRVGPIRAALLVGLLQTPNRFRTKRQLWAYSGFSVEIHDSGEFRYVRGKLRRNRERITVRGLNDNHNRDLKNLFKSAAISASARPGPLYDFYVALLAKGMRPTMARLTLARKMAAITLTIWKKGVDFDPKQVHRQAA

SEQ ID NO: 255886 - protein, 384 aa, unidentified
MNKHSMIFIGLDTHKEFHEVAYCEEQRGAAPVHYGRIPSSKVSVKKLLRQFESKYPGATLHVVYEAGPCGYWIYRLITSLGHCCYVVAPSLIPKKPGERIKTDRRDALKLVRSLKSEDLTPIYVPEPEDEAVRDLSRAREAAMKDLKEAKYQLKALLLRNNIRYEVTANWSKKHLRWLTELILPHPAQQIVLQEQLQTIEERIRRLERLDNELTHHVHQWRYYPVVKAVQAMRGVRLLVAVGVVAELGDLHRFDHPRKLMAYLGLVPSEQSSGGKRHLGAITKAGNGRARRLLIEGAHSYRYPANVSTELQLRQEGLPKDIVDIAWKAQLRLCKRYQRMSKKGKHYNLIITAIAREMAAYIWAIAKEVVLTPVNPKLRLSRVPA

SEQ ID NO: 255887 - protein, 584 aa, unidentified
MQKTKEPKSERIIGVGIDTARYGHVVKFMNEDRRIAAPELTITETRDGYDKLEGQLNKLHRSSPGTRFKIHIDAAGQYATNLERFLRGLSLPIDVSVGEPTRNKNYRQAHYPKTKTDGVESLAMARFAVVEQPPASPELPAEFYVLREITSRLQGAVKDSTRAVNRLHNLLARVFPELATIVSSIASSWVLELLEKYPSAAKISRARLKTLQKIRGAKADKVKRIHEEAKRSVTALEEPLVESLLQELVAQVQHTKKVEKRYETLLINAYDQQPHSGHKQVETIVGIGKITAAILVSKIISIDRFEEPKNLIGYFGVFPNLNSSGVYSDGTPRPAPNGQMSNKGNDLVRRYLWTAAFSAMQHNPAVRALYHRLRARGTRGDVAIGHCMRKLLHLVFAVWKTDKPFDKNHYPWEAKSNEVETATEESAHKKNAVGPNLVTNSEELDRQEVTTATIILEQHPTSVKQEETQRSAAKPNNSVDYAYLRSQVTIEQVLRHINHNEKLRGAATQRRGPCPIHKSTRENSKSFSVNLTKNVFQCFNKTCAAKGNVLDLWAAIQGQTIHQAALDLAQTFGLKIAVTEKRNP

SEQ ID NO: 255888 - protein, 343 aa, unidentified
MAIVNRIALDLAKDFIQVLALDENEQEVFNKKLRSNKVLAKLATLSRTDDCEVAVESCGMSHYWRRECEKLGYKTVALPPRFVKAYLQGEKNDANDARAIAEAASRPNRQTVRLKSIEQQDLALMVNQREGFVQTRTQFSNRLRGQLAEYGILLPKRVGTILQRVPEVLEDDSNALTLQSRDLINRLYQMLRAVDEEVKALDKHLATQAERNEDSQRLMTLPGIGPITATSLLALIGDVSEFKRGRNLSEYLGLVPRQNSSGGKDRLGGITKKGNTKLRTLLVHGARSALRVAQQRHDRLSLWAQDVAKRRGNNVAAVALANKHARIIWAMLKNKEDYRMTAA

SEQ ID NO: 255889 - protein, 427 aa, unidentified
MSRVESIQSEPEFAAFIGIDWADQKHIWCLQTAGSKQCESGELEHSPEAVESWVANLYQRFAPRPIAVAVEQSRGALVFMLNKYELFHLFPVPAQMAASMRQALYPSGAKDDPRDADLLLDLLLQHRNKLRRLSPDSEATRRVQNLVEERRKLVDEKTAQINRLTDHLKVYFPQMLEWFGRLDSELVCALLERWPALEELQKASPASLRTFFRKHRCRDRERIECRIEAIRRALPAIQDRAVIEAKSAVVRVIVQLVRILIGGIEDLDGQIEEAAAAHPDFFIFNSLPGAGPVMAPRLLAAFGSQRDRYRSAHEIQSFSGIAPVTESSGKRKWVHFRWACPKFLRQSFHEWAGHSIVQSAWARVYYQQQRSKGNTHHAAVRALAFKWIRIVFRCWQDGVAYDENTYLAALVKHGSPLSGFVAIGKTL

SEQ ID NO: 255890 - protein, 345 aa, unidentified
MAEVTTIGLDLAKRVFQVHGVDAAGVVMVRRALRRQQVLAFFAKLPRCLVGIEACATAHYWARELASLGHDVRLIPPPYAKAYVRRNKNDPADAAAICEAVSRPSMRFVAVKTEAQQAAAGIHKVRELLIKQRTMLINTLRGLMAEFGIIVAEGPRHVSELVAILADPADARIPAPLHHGLMAIVETLRGLEQRIERVEKQIVGWGRANATCRHLITIPGYGPILSSAMTAMVVNPAGFTSARHFAASLGLVPRQDGTGGKAKLGPISKRGNGYLRRLLVNGAMSVLGSRRAKDDAWLVKLLQRKERKVVACALANKLARTGWALMMRQQDYRRPRQDQLCPDLA

SEQ ID NO: 255891 - protein, 360 aa, unidentified
MNSLPATVGDFYQYVVGVDTHAATHSYAIIEAPNGGLIDQNAFPTSPAGLRRAREWITRRTEGDLDGVLIAVEGTGSYGAVLSGVLQQGGYRVVEAPTPRRARARSKTDALDALLAARSSLIMPLTTLRDRRAGELQSALQVLTGARDQQNADRLRCINALTALVRTHDLGIDARRALTGTQIATIASWRRREETLGAAIVRAEATRLAKRITMLEEDLAENREQITHLVGATAPELLDLPGVGAVTAAVILTVWSHPGRIRNEAAFAMIGGICPIPASSGNTTRHRLNRGGDRRLNRALNTIVLTRMRTDPATRAYIERRQSEGKTRREIRRCLKRYISRQIFRALAVAHPAPDAVATA

SEQ ID NO: 255892 - protein, 365 aa, unidentified
MNFTQNEKISQVTNETLVVGIDISSENHYVRAFDWRGIELSKTFKFESTSYGFKRLMEWLDETCKSNSKTKVIMGAEPTGHYWFTLAEYLKENNIKFVFVNPMHVKRTKELDDNHPSKNDRKDTKVIAKLVIEGRYLIPYIPEDIYAELRVANERRMRITREIVAIKNRIQRWFAIYFPEYTHVFGSWECDSSIEVLRNCPLPADVMSLGAEDINQLWREKKIRAVGIKRANALIETAKTSVGVKNGANAARFEMSMLIEDYLIKKEQEARIIEILKTLCIQVPNSEKLLSIKGIGILTVASFFGEVGDIRRFESPKQIQKLAGLAIANDDSGKHRGKAGISKRGRKLLRYTLFQAVISLLMHSP

SEQ ID NO: 255893 - protein, 344 aa, unidentified
MDNHTQYSGFAGVDLAKKVMQIHFVTGDGEITDKQVKRAEFLDFFRNRTKCLIGMEACGASQDWARKLEAMGHEVHLMSPKAVKPFVSGQKNDYNDAIGIYKAMFNGVRRVPVKSTEIRDLQTLRRIRSQVTKDKVKEINHVRGLLAEYGIVMGKSITAFNKGISSALESLKERGDVSPLVAEELQTTVESIETKIERQKRLDREIEQLARGCKNYENFLKTPGVGPFTAAMLCVLLCDPAIFANGRQFAAYIGLAPRSRGSGGKNFIIGIPSKFNCDSESRAVFVECAQALARYKNKSPWVDGILRRKPKKVAVIAIANKLARQVWAMANKGESFKQMTILTA

SEQ ID NO: 255894 - protein, 414 aa, unidentified
MQQIYERVAGLDVHRDNVVACFRRLGSRGGVVFEKDRFATTTAGLRVLEAWLAERQVELVAMEATGVYWKPVLYALESKFTVWLCNARNVKKVPGRKTDMSDAEWLTDVAAHGMIRPSFVPPPPIRELRELTRYRKTQIDARAAEVQRMEKVLQDAGIKLTSVASKVLTQSGRAMVEALIAGERDGAKLAELAKGKMRPKMAALAEALSGHFGAHHAVACERILGHLDFLDASIGALTEQIDARTAAFAPVYASLLPVPGLDRLTIDVIIAETGADMARFPSAGDLASWVGVCPGSHESAGKRRRVATTAGNQWLRRALVESARAAARTKHSYFGAQYRQIARRRGPNKAAIAVAHSLIELVWHLLSTGEVYNDLGEDYFSKRQDPERRAHRLVAQLEQLGFKVTLEAAAAATT

SEQ ID NO: 255895 - protein, 328 aa, unidentified
MTEQSRVVLGIDISKATLDVELVRPEQATQQASYANTQTGFKKLEKWLRKRKAGQVHVCLEATGMYGDEVALFLHEAGHTVSVVNPARIKAYAASQLQRNKTDRLDAALIADFCLTQKPTAWEPPEPAILELRALARHLLDLKDMRQQERNRLEAGVTSDTVRQTLEAHIAFIQHQIDQLEQHIRDHIDQQPGLKRQRDLLASIPGIGHLTAALLLAEIGDWRRFAHAGQVVAFAGLNPRQRRSGSSVRGQTRLSKTGNAILRRILYCPALSARRYNPRIAPWCDQLAGRGKTKMQIIGAAMRKLLVLAYGVLKSGRPFDPTYHPVSS

SEQ ID NO: 255896 - protein, 359 aa, unidentified
MGNGTFVGLDVHARSVVAGLIDERTGEVRAVRAPHTTDELVGWLGTLAGPVRATYEAGPTGYGLARALEDAGIACLVAAPGRIPRASGDRVKNDRRDAERLARLLRAGELVAVAVPTVADEGARDLVRAREDARADLMRARHRLSKMLLRYGRIYDRTAWTLTHDAWLRRQRLCEPAAQAALIDYYDAALQAAMRRDRLDGAITELAQRPDLAPLVRRLSCLRGVSTLTAVGLAVEIGDWHRLSGATIGSYLGLTPSESQSGARHTRGPITKTGNGHARRLLVEAAWHHRRAHRTSAELERRREGARPEVRVRAEAAGVRLHRRWTSLESRRGLRSSVVAVAVARELAGWCWSLAVMDD

SEQ ID NO: 255897 - protein, 350 aa, unidentified
MMIGVDYHPSFQQIAFLIEGTGEYEERRLNHSDGEAEKFYRDLQLRGVQVRVGMEATGYSRWFERLLAELGFEVWIGDPAEIKAKRVKKQKTDRKDAQLLLKLMMEDRFPRIWVPSPENRDVRQLLWHRHRLVQMRTRIMNQLQALAMNEGRRWKSKLWSEQGRAELEKLALAPWASRRRHELLELLDRMNPTIEELTAAAEQEARKRPEALRLMTHPGVGPLTALAYVLIIGTPSRFHRGKQIGNYVGMIPSEDSSGGKQRLGHISKQGNSLLRFLLVEAAQAAARNNSDWRRRYIHLAMRRHKSIAKVAMGRRLGVRLYWMWRNGCEYSPSMEFGSYAGQLGTGHGVQ

SEQ ID NO: 255898 - protein, 343 aa, unidentified
MDEYIGLDVSMKETAVAIRRDGVRVWRGKCASDPHNIAELIRKRAPTVKRVVFETGPLSVWFYHALRAEGLPIICIDARHAKAALDMATNKTDANDADGLAHLAEVGFFREVRVKGFDSMLARTLIAARTRLVHMTTELSNQIRGIMKTFGLVVPAGKGSVFEKNVRDLVSSQRDLAHIVLPLLDAWKGLRARAADLGRQLVADARQSQACRILMSIPGVGAITATSFATAIEEPGNFKKSRSVGAWIGLTTRRYQSGEVDYDGHISRRGDRHLRGLLYEAASVILTRSAKQSSLRTWGLQLRERIGFKRAAVAVARKLAVIMHTMLKTGELFNPTAGVTVAA

SEQ ID NO: 255899 - protein, 343 aa, unidentified
MQTITTIGLDIAKSVFQVHGVDAAGQVVIRRQLKRRHVLMFFQKLAPCLIGIEACASSHYWSRELNALGHTVRLMPPAYVKPYVKRQKNDAADAEAICEAVTRANMRFVPTKTPEQQSCLMLHRTRHLFIRQQTAVINVIRAHLAEFGIVAPVGRKGVEELLDVVADPSDKRVPEIARACLFALGAQLRRLKEQILEFDRQIMAWHRSNETSLRLDAIPGVGPMLATALVACVADPKAFRSGRNFSAWIGLVPKQHSSGGKDRLGSISKQGDRYLRSLFMAGALAVIRYAKINGTRHRPWLTALLARRPTKVAAIALANKIARMAWAMMARGERYKEPVALAA

SEQ ID NO: 255900 - protein, 376 aa, unidentified
MKKKRDREGMVTAALDLGDSKSLATILSPDGDVVDRFSISMSDDGYSLFASKVPKDARIAFEATSMAYPVSRRLTALGYSDITVAHSKELAWIVKSKKKNDRIDSLKIARLHMAHMLPESHLLSREEQVKRDLLIQRVTLGKEIGKMKLKLIAYLKREDVYLSLPESSDSFSRERRQAIRSMRFGGDGDDDDGRDLVVGTMMDRLEFLERQCAPLEEKVRTIVRDSEDIRRLMSIKGVDFYLASLASSYVGDVNRFPDDDHLASFLGIIPESWDSANVKRRGHMSKEGPSTARWAFSVMTDTVMRYNPRLKTYYLSVKKRKNSGSLAHVATMRKLVRMIDHMLRYKENWRWEDEASTAKKLANLDREAEAKTTGGD

SEQ ID NO: 255901 - protein, 343 aa, unidentified
MKIIRVGVDLAKNVFQVHGVDRDERPVWKRKLKRDEWLNALLEKIEPGCVIGMEACGGAHHWARELQARGYTVKLIAPQFVKPYVKSNKNDANDAEAICEAMSRPNMRFVSIKSVAQQDTQAVHRIRTGLMEQRTAKVNQIRGLVAEYGLVAPLRVSYLRSAIPEWLEDAENGLTSQFRRLLNGLWSDLQSLDLRISDMDRAILEIAVADPVANRLQQLRGVGPIGATAILASVGDASQFKNGRQMAASLGLTPKQNSSGGKEKLLGISKRGDSYVRSLLIHGARSMVNASKGKDDRLSLWVLGISSKRHPNVAAVAMANKTARIAWAMIRKGSDYQPDWAAA

SEQ ID NO: 255902 - protein, 339 aa, unidentified
MKNTKYYIGLDVHKERTTYVVRDKIGNILIEGETATLYQELFPRLKTYLTSSIIGLEASTSYYKLYQHFLKHGYTIRVANTIQLRQLITKNDKLDAQRLSEMLRLGTFPSSYIPDETIQQIRNLIQIRHSLMEEKVRCNNRIQAFLDRNGVMMPSYKAFSKKWRYALMQHMGTDRVSIELRHEYDHYIFLEKKQEQVEQETQGFARKYFPTEYNLLQSITGIGPVNACYAIAHILPIERFSSNKKLRRYAGVVPTCKESGKKRSHGHIPKTSSRRLLRCALIQAANTIGKTNTNLGRYYRRKKKQKKNAGIAKVAVASSLIDIIYKVLTTKQPYTPNNC

SEQ ID NO: 255903 - protein, 403 aa, unidentified
MNAVGIDVSKGKSMVAAMRPFGEVVVKPFEVRHTASELRKLADYLKSLDGETRVIMEYTGRYYQPIARYLYEAGIFVSVVHAKLIHDYGNNSIRKVKTDRADAVKIANYGLTNWAFLKQYAPEDDTRLLLKTCNRQYGQYMKLKIALKNNLIALLDQTFPGINTLFSSPARPDGHEKWLDFAAKFWHCACVSKLTKAKFIARYNKWCTQAGYYGSDAKAAEIYEMACRQVPTLPCNETTKQLIAQTAKQITTLTFTLVSVRQEMQRLAALLPEYPVVLAMCGVGNVLGPQLIAEIGDVRRFQRKQSLIAFAGVDAPPFQSGAFESTDRSISKRGSPFLRKTLFMVMGSLLQNSPAGDAVFQFLDRKRAQGKHFYVYMIAGCNKFLRIYYARVKEFLNALNSAA

SEQ ID NO: 255904 - protein, 457 aa, unidentified
MTQNNPKSKARGIIQVINNNAAGIDLGSKSHWVCCPSGKTDQEVKEFKSDTTSLMELAKYLKAKGVKSVAMESTGVYWIPLFELLSESGFDVILADTRMLSKVPGRKTDILDCQWIQQLHSYGLLKGAFRPDDETVKFRALARMKKTLVLEQSDWLRRMQKALDQMNIRVHRAVSDISGLTGLSIIHAIVDGERDPLKLAKFRDSHCRKTEQEIARELTGNWREEHIENLKIGLKMYLFLAERIEEVQSNICKLIENICANKDKAQNPAPPNPKKSKAQNINRQRKEPMRQLMYKMSGYDLTRIDGISADTAEIILSEVGYDLTKFITEKQFISYLRLCPNLAVSGGKKVHSKKKKVVGCCRIREALRMAALTLRNTNSALGGYYRSIAFRKGASVAIFATARKLAQYIFRMLRYGQDYIDIGIEAYEERRKNRRIKNFKANAKDLGFTIVPMETSF

SEQ ID NO: 255905 - protein, 376 aa, unidentified
MGQISTVRSRRFLGLDVHKATIAVAVAEDDDQQPQMWDTIPNEPGAVRSMVRKLSRGGVELKAAYEAGPTGYGLCRQLLGLGVDCMVVVPTLIERPRGRVKTDKRDAILLARLLRRGDLTPIWIPDEEHEALRALVRARYDAKEEHHRARQRMNKFLLQMGIRVPAGIKPWTKRYHQWLKEGVQLAQPPAQVVFEDNRRVEQQAEERVRHLEQELRTWSAENPRVALMIEALQILRGIGFLTAATIAIEVGDFRRFATAPGFMNFIGLTPSEHSSGESQHRGGITRAGNRYLRHVMVQSAHHSRHVPNVSRERGERMKEMPKELVEIALRAQGRLHYRYRTLSRRIGRPKSIVAVARELSGFVLEVGHHIEELRAA

SEQ ID NO: 255906 - protein, 414 aa, unidentified
MDGEINKSCGLDIHKRFVIATILSRSGEKQQQRFARDDDGILNLKNWVTSEKCDVVACESTSDFWVPIYESLIDHLPVIVGNARDMKAFTHKKTDKIDSEVIAQLSLNKMVQPSRVFPKRHREFRSYVRLRLTLVRKRTDIKNEAHAILSSEMLHLGDVLTDIFGKNGRAILAGISSGKNVDQIIESLSPNVRKKAVQIREILDREISQSAAIRLQICLNLIKHLDDEIEVLEREIFSYAYSNHNHEMEILMSVPGIGEIGAATLIAEIEDFRDFSSGDKLASWLGLVPNVYQSADKYHNGRITKRGSKVARWILTQIAQAAARKKNSRLKEFFNRKKKTIGFAKAIIALARKIVTIIWHLITKDEMYEDETGYQKGEIQKRKIVETEIFSVDERITIISGIIAIMGKKEGEST

SEQ ID NO: 255907 - protein, 359 aa, unidentified
MNKCSTEKKKIYVGFDVSEKTIEVIAVCGTETSKGCCKIDNNQDAIKKFLSEFKDPKRVCVVMETGTHSLWMSELIEKLGFEVIVAHARDLALIYRSDKKNDQLDAEKLARLAQADRKLLHPVKHMTLERQTDLTVLKARDLVVRQRTQLINTIRGLLRAAGHKLIEEEYSTRTIKKCCSALPEYMRPAIMPLLQQICYLDLAIKEYDRLVRKLCKKYPATKILQQITGVGELTSLAFVLIVGDPHRFDNAARLCAYLGVVPKQDQSGDTDKQLGITKKGNKLGRKLLIQAAHYILGPFGPDSELRSYGFRIQARGGKIAKKKSYVAVARKLVTVMLALWKNPDIEYDPNFKATRKLHK

SEQ ID NO: 255908 - protein, 441 aa, unidentified
MERIKNPNAAGIDFSSREHVVAVPKYQTEHSVRTFGTFTEDLHRLAKWLTSCNVKTIAMESTGVYWYHLYTVLLDYGFEVYLVNAYYVKNVPGRKSDISDAQWLQELHSFGLLKACFQPDNLTRTLRNYVRLRKSIIEQMGSEVQRMQKALEQMNIKLNNVIRELTGKTGMAIIEAILSGERSPVALAKNRDYRIKASEQVIVKSLTGNWREEQIFNLQMAYEHYCFLQNQLKKCDKESEKTIKKMSGSSTKQKEIKEKKKAKNSLNFNASQYLYNALGVDITQIFGVKETTGLTIVSETGINLKETFPSEKQFLNWLNVVPDNKITGGKVISSRVRKKKNKAGFAFRDAANALWRAQNPLGDYLRRKKARSGSKQAIVSTARKIAAIYYKMVTEKVEFDPQYLKQKTKQYLEQKLIDLEINTIRIKKLLANEMEFNDAVI

SEQ ID NO: 255909 - protein, 421 aa, unidentified
MRGFGLDVHRDFCEVAIAEQGQVRSAGRIASRVEALELFAESLAPGDVVAVEATTGTDKIVSVLQRHGIRVVVANTRKLKSITEAKAKTDRLDARTLARLLVSGLLDEVWTPDERTRALRRLTNRRERVVRARTRAKNEAHGVLSRNLCERPPVTDAFGKAGRGWLAGLELPIDERLTLDGCLRQVDFLDAEVAALDREIAKQALAWPEVLRLMSVPGVNVQTAAAFMASVGEIGRFSSPPKLVSYLGLDPRVRQSGNGPARHGRISKAGASETRHMLGEVAWKVMQTPGPLRVFFERVRARRGPQIAATSTARKLAVLFWHLLVREQDYAFARPAMTRNKIRKLELLAGAPSQKGRKGVAGGKSKKVFEAERELSRQAEVAYRRLVNDWQAAGPRKVGAGATPGRASPRPSKRQAARQTR

SEQ ID NO: 255910 - protein, 339 aa, unidentified
MQVTTVGLDLAKNIFHVHGVTETGEVVFNRPLRRAQVLAFFERLSPCLIGIEACASSHHWGRELTKLGHTVRLMPPMYVKPYVKRGKSDAVDAEAICEAVTRPTMRFVEIKSEDQQALLSLHRARDFVVRQRTQLINMLRSLAAEFGIAIARGVARAIDFAKGIIEGKQSGLPELAQDVLRVLSRQLVELHNRLHWYEITMRIQARLSRQAQLLQTIPGVGPVTASAVAATIGSGHQFKSGREFAAWLGLTPRNHSSGGKERLGKITKMGDRYLRQLIVVGMTSRVRQVSNHPERADPWLTKLLQRKPARLATVAMANKTARIMWAVLTRNEPYRPHTA

SEQ ID NO: 255911 - protein, 394 aa, unidentified
MKLIGIDIGKNKHFFCVMDQQTGEIISQPVSFSNDKEGFDFLVQEIKSYPKDSILIGMEDTGHYHFALLKYLLDLQYTVALINPKTTDFNRKMQGGITKNDKLDTINICDVLDTPERKKQYRITKVNSFDLYEQKQLTRHHHNLKEEENVYKNRLQKCIDIVFPEFNKLFNSKYGIVYMNILKMFGSAENIANTDIRTIRKCFEIEGRGNRISLTPERLKECAISSIGISSSAEVIQIKHLTAQIELIEEQLTEIDKKIEEFSIQNNSPILSIPGISHFSGTSILAELGDISNYSKPSQIIKFAGVAPLHYESSQFNAQHTAITKKGSKYLRKTLYQIILPVIRHNPVFNKYYQLKISQGKGHRCAQGHCVRKLLRIIYHLLKTNQQFDPQLLR

SEQ ID NO: 255912 - protein, 323 aa, unidentified
MQGRDTKMADFVCVVGIDLSARRWDVACYPGDAVASFTTDAEGRSGLLAWLARHAPAGVIACEASGGLEQQLAELLVPTGFTLRILDAARVRRFALAAGQRAKNDRLDARVIAHFAATFPGPAYLPDKDRAALAELGAVRDGIVADITAVTNQLRHIRLAGLQALMADRLAALRRWQRRVEAQIEAVLSQNLVMAARRRLILSVPGVGPVSAARLIAHMPELGQLTGRQAAALVGVAPFDDDSGGRRGRRRINGGRTNVRNTLYMAALVAARQNPVLKTFYERLINAGKAAKLALVAVIRKLVVILNAIIKSGQPWTNPANTN

SEQ ID NO: 255913 - protein, 410 aa, unidentified
MAREGEMDMKHVLAFDVSMGKSTMVIYNHYKKCEFEGEIYHNKSSFKALNDKICEMTKLDGQAPEIVFEASGVYSRPLEYFFQTEGYTYHRVSPLEANLQTASMRRHKTDKSDAHELAKSHFRIERSTTYQEDNYFKQMRALTRYYDELASEVTNLYSRMHAILQLSFPELEHLLSKRSALFLNIVQLYPHPEEVLACSKTVIRNRIKANTKKNISLTRAEAKALELLNAAIDSYPAISKEDIRCEQIRDYAKRITDLKEKKEQLIKQMVDLSKERIEYQVLLSFPGIGEATAVRLIGEFGDLRRFQSHKQLNAYVGIDIMRYQSGHTFYKDKINKRGNNKLRKILYFMIQTMIKLRKKTNNHIVEYYDKLKTQPQGKPHKVASIACVNKFLKVAFHLITHNITYNYEAA

SEQ ID NO: 255914 - protein, 364 aa, unidentified
MKRKVYVGMDVHKETIQIAYLTSNSKEILKEQQIKHNEVQIKKFIKKLKTEWNEIYCCYEAGVTGYPLYRYLKSLGVNCILVAPGKIPRQNTDKIKTDKRDAIKLARLMRSGELESIHVPSEEDEAVRDYLRSRDSLRLDLGRNRQRLMKFLLRKDIKYSTTKYWTVSHYKWLNNLHFNNEILQETFNDYYSRVRVQEENLNSMDKKIQEIAESEPYREKVGILRCFRGVDYLTAMFLLCEVNDFKRFKTAGSFMSFLGLVPGEYSSGSKRKQTGITKTGSPRLRRILTEAAWQHRFPGTGSKIITARRSGQPALVVALAEKASPRLHKKFRNLQLRGKTPQVMITAVSRELSGFLWAAMNLVA

SEQ ID NO: 255915 - protein, 330 aa, unidentified
MSNCIGLDISKRLIAVHIPINNSDIEINNNITGMRKLSSKLKKLYKKEYNDLVFIYEPTGNYSAVLTKYCHTKNIRCFIINPSQFSNHAKALGQRVKSDKVDAQVLSKALHLARDGEVRVPPYNKVVEEIKELMGYYRFTTKLRVQNSNHLEALDAKNGSSYAMNDLKKNIVELRLKEKEIIANIKAIIATDDKLSKGYDNIRTITGIADIGGIALLHLFIKYPDANQRQITSLAGLDPIDKSSGTSIQSKARISKAGSVLYRGSLFLGTLSAIRYDENFTRLFERLTSKGKHTTVAQIAVMRKMIIIAHSLYKNDNVYDKELYAKNIDS

SEQ ID NO: 255916 - protein, 429 aa, unidentified
MNSTQNKKIEQVKETTMIVGIDVGSEKHYFRAFNWRGIELTRKPVAFSNSMEGFNSFYNTIVELMQKSELEEALVGIEPTGHYWFDLGQFMGEKSIKFVMVNPHHVHKTKELDDNSPSKNDRKDPRVIAGLVRDGRYFYSYMPTGVYAELRNASNRRFVLVEEQTRAKNRLQKWIAVYFPEYKGIYTHIDAKGGLLVLKQAPTPEEIVKLGEEGIIKIWKDAKLRGNGNKRALKILNAAMRSIGLRTGLTEARMEIQDLIEDYELQTKRLERVNDLIKELCQQIRYADKLLEIKGIGITTVAGFIAEVGDITRFDSTKELQKLAGLELVADSSGKHNGKTKISKRGRKRLRYLLFEAAISVVGKNEEFKEIHGYYTTREKNPLKKMQSLIAVACKLIRVFHVILTKGVSYDASKMLEDIRHPGEQLKAA

SEQ ID NO: 255917 - protein, 319 aa, unidentified
MNLVPVGVDIAKLKFDVAVLLPNQKYKTKKFPNTSAGCREFMTWLTRFGDCHVCMEATGCYSTELATLLADNGCCVSLENPARIHAFANTELTRNKTDKSDAALIARYCALHQPAPWYPAPLSERQLTALVRHLRNLEEMRQMEVNRLEAADDVIIPSLNEHVAMLDELIEETRKKINRHIDDNPDLKRDRELLKSIPGIGEILSVSLLAFAGNLRRFRDSKALVAYAGLNPRRCESGMWKGKSRLSKVGNAELRSALYMPAVVAGRCNEVVKNLMDRLAARGRTGKERVCAGMRKLLQLAYGVVKSGQEFNAEIPLAG

SEQ ID NO: 255918 - protein, 340 aa, unidentified
MNKFSKKNWFVGIDISKDKIDAALVNEMDPKRFINGTFSNDLKGFEAMEEWLSKLKVKVTECLFCMEHTGNYGLLLFAWLSQQNADFCVEPGLQIKRTIGMTRGKDDKVDARRIAIYALEKKSKLKQYHLPSENLIRIKQLLTYRDQLVRLRTSLKNSLKSHRQYEQISSMSFVTSDIQKQIVHLNESIEQTEKQMKEVIKSESELKQNFKLTTSVKGIGLVIGAFMLVSTNNFTGFDNGRKYACYSGIAPFPNESGSSIKGKTQVNHLANKKIKTLLSNGANSAISHDPELKSYYQRKRKEGKEHKVVVNAISCKLVNRIFAVVKRQTPFVSIYQQKIA

SEQ ID NO: 255919 - protein, 348 aa, unidentified
MKKSAKAQAGQVFAGIDVSAHELSVGMRRGIEDRLAVTTFTNSAAGHKALLVFLLQGNARVRVCLEASGNYSLDLALTLQAHRQVEISVVNPRRARRFAESLGERNKTDRVDARVLCEYAARMPWVPWQPPSPVALHLRALTRAIADLSGIRTQQNNRAHAAAASHALPGLVVKEMQRHQKYLEQRMTRLRREALRLVAGHCELDRRFRLMQTATGVGETSALQILGELAVLPDTLDARQWVAFSGLDPRLFKSGKSVDKRPRISRGGSRHLRRALYMPALVALRRDPYLRRFYQNLVVRGKARLQAVVAVMRKLLHALFAMFRTNQPYDGSKLCAVDVTGNNVAVCA

SEQ ID NO: 255920 - protein, 338 aa, unidentified
MAIVSVGIDLAKNVFAVHGVDESGKPALVRPSVPRAKLLELIASLPPCLIGMEACSGAHHWAREFQKFGHTVRLMAPKFVIPYRLSGKRGKNDSADAAAICEAVTRPNMRFVPVKSAEQQGQLLVHRARQGFVEQRTATLNRIRGLLSELGIVLPLKAAVVRRDAIARLEDLPGWANTVIGDLLSEVSRLDERIGQYDQHIRTMARQSTEAQRLMQISGIGETTATALLSTIGNGRDFKCGRQLCAWLGLVPGQYSSGGKQRLGHITKAGDPYLRSLLVLGARAVLAAAKNKSDPISRWANALAQRRGYWKAVVAIAAKNARMCWAVLSRGEDFRLPA

SEQ ID NO: 255921 - protein, 442 aa, unidentified
MEITHTHCAGLDVHKKVVVACSLIQTAHRKLQRTVRSFGTTTSELLALSDWLTTQGVTQVAMESTGEYWKPIYNILEFNFQVMVVNAQHLKNVPGRKTDVKDAEWIAELLRHGLLRDSFIPPLIQRDLRDLTRQRITLVRERARVTNRLQKVLEWANIKLASVVTDITGVSARRMLRAIVDGQTDVQDLAQLAKGRLVHKPPQLEEALLGKVRDHHRFLIQQHLDHLEFLEAQIIRFNQHIEQSIKAQNYFEPRNQSESESNSSDSDSDEPTESSSTLSWTQAVSLADTIPGVAQNTAELLVAEIGTDMNRFASASHLAKWARLCPGNHESAGKRLSGQTGRSNPWLRTSLVQAANAAVRCRNSYLRVFYRRLAGRRGRKKALIAVAHRILIALYHMFKKREPYRDLGVNYLSNQSQQQHSVQRLHSQARQLGYQLELTPIN

SEQ ID NO: 255922 - protein, 384 aa, unidentified
MSIVGIDISSTSATFCILGNTGVIAQDNFPLNKIGFNKLLATPGINKDSTFVMESTGKYHLTCYHYLLNHNMTAYVVNPLLIKQYKDTITLRKTKTDKSDALLIAGYANNPSIQLEGRKIELETESKLLSRDRLSNSEALAKAKTRLKGDIAVSFPELHSINVFTDSWLNLLSVYGSSKQVSSASITQLAKAIRGTRVKSTERDKKLAKKAKELAKDSVGVDLHAAITKHQAKTVLYLKKEDKELTKALVDMEKEIHSQEMEIITSFPGISDTTAAHFMAEIQDIHRFSRYQKLIAFIGTDPTIYQSGNEDRHGRISKRGNKVLRKYCYLMASNSLRSNPVLAEYYSRKREQGFPHRKAMIATTNKLIRAIYALLIRGEKASIQ

SEQ ID NO: 255923 - protein, 374 aa, unidentified
MAGDYNAFVGLDLHKETISAAIADAGRDGEVRLIGVIQNQPEAIGKLARKLIARHGKVEFVYEAGPCGYGVYRQLIALGLDCRIVAPSHTPVLPGNRQKNDTRDAVMLARLLRAGELTYVWVPDPVHEAMRDLVRARHVASHDTRKARTLIQLFLLKHGLRYEGKSWSNRHRRWLTDRRFEHRGQQIAFQSYLNRLNQAEARKKELEMQIADLMPDWSLGPMVTALRSLKGVGMVVAATLVAEVGEFSRFASPRKLMAYLGLVPGEHSSGGSIRPRGITKAGNGDLRALLFEAAWSYRTTPKVGQWKSTRTADVPQEAKDISWKAQLRLNSRYRKLVGRGKKSNVAVTAVARELVGFMWDLARRFEPAPGAAPA

SEQ ID NO: 255924 - protein, 344 aa, unidentified
MIVVGVDPHKKTHTAVAVNKATAEVLGDTKVTADDRGHVALLDWARALGDDVEFAVEDCRHVSGRLQRALLDAGQVVVRVAPKLMAGARRSTRERGKSDPIDAKAVALAAVREPNLPRARLIEDDLDIKLLLDHREDLVAERSRVQQRLRWHLHELDLESDIPAGALDRGVWLRRVGGRLARQEQTTRVIVARRQLRRIGEITREVRELDATIAGRVKASHPTLLAIPGCGPLTAAKIVTEVAGVDRFANDAQLAMHAGVAPLSCSSGNRDRHRLSRSGNRQLNLALHRIAITQGRIHEPAKLFLKKKEAEGKSRREALRCLKRHLVRTVYNNLRDPIAAMGLT

SEQ ID NO: 255925 - protein, 464 aa, unidentified
MSKKKRSVAGLQALYGRVCGLDVHKKVIVACVRILDPKDGTVQSTLRQFGTMTADLRELRQWLVELKVTHVAMESTGVYWQPVFNVLEGHFKTWVVNAQHIKKVPGRKTDMKDAEWIAQLLQCGLLRPSFVPDRPQRELRDLTRQQTKLVQQRNAVDNRIQKVLETANIKLGSVASDVLGVSGRKMIEGLIAGEKDVAALAELAQRQLRGKIPELQRALEGELNDHHRFLLRQLLGQYDFLEKEIASVSERLGAVAPPSFRAAVEQLDAIAGVGERGAQALLAETGTDMSRFPTHKHFTSWAGQCPGNHESAGKRRSGKTPAANRHLDAVLTEMAHAAVRTKNSYFKAQYHRLAGRRGKKRAIGAVKHSLLVTVYFMLRDDKPYKDLGVDYFDKLNPQQRIRYHVRKLQDLGQQVELSPIASGEYRLYSRKKDRSGKRRNLGTFKTRSAAEKHERAVQYFKRHG

SEQ ID NO: 255926 - protein, 474 aa, unidentified
MKKHKQAEAKTKSEAIKPIGEQEPDSAGIDLGANEIWVAVPADRDQKPVRQFGAFTRDLMAIVQWLVQLGVRSVAMESTGVYWIPLYQLLEEAGLKVCLVNARHVKNVPGRKSDVRDCQWLQYLHSVGLLLGSFRPAQAICASRSIYRYRQNLLSMAAQHVQHMQAALDQMNIKLHHVIDDLSGVTGQAIIAAILSGQRDPVQLAQLRDKRIKAPEAAIAKALEGDWRKEHLFVLAKAWAQYQEVQKQIQDCDQELWNYTRELEACTQVIKPAKVMRLKSELMGVEPLSNPPTQKRFRRKTSKNQPEGPWQQELERFFGVDLTAIPGISVLTGLTLMTELGNDLRAFKTEHHFASWLCLCPDNETSAGKVLRRRTRRSQNRVRQALRMAASSLHHDKSYFGDKYRRLRARLGAPKAITAMAHQLARILWTLITRQLPFDPSVFAYHEKAHQQRRLKRLATSARQMGYHLTPLAA

SEQ ID NO: 255927 - protein, 345 aa, unidentified
MKKVVAGIDLHSNNVVIGIMDMDGKRVANQKVSCELKEVAKVLAPYEKRLEQIAVESTYNWYWLVDGLRALKYPVVLANPAGMQQYNGIKHADDTNDAFFLAELLRLNILPTGHIYDPELRPVRDLLRRRLMLVHHRTALMLSFKSLYTRTTGQELALGKLKDLEVQEAQELYEHPANQLIAGMQVKHIEQLTESIEKIEKAVLSCARELPCYSKLTTLPGVGRILGMTITMEVGDVKRFAGQGNFASYCRTVEAKRTSNSKKKGENNSKCGNKYLAWAFVEAANFARRYDEQCRRWHDRKAAKTSKVMATKALACKLAKAAWYLMAGEVGYDAKQMFGPPATTK

SEQ ID NO: 255928 - protein, 387 aa, unidentified
MQSVTSATAVATTARANNITLFASLELSKSKWVVTINSPGSEKFSKHVVEGGDGACLLDLLSRSRAKAEQRYGVQVKAIVIQEAGLDGFWIHCLLLANGIESHAIDAASIAVDRRHRRAKTDAIDGETLLRTLMAWARGERRVCSMVRAPSPEDEDRRRLTRERGTLLKERIQHTNRIRGLLSGQGVRDYNPLRRDRFERLEALRTGDGRELPPMLKAEIRRELDRIALVTTQLAAVERARDALIHTDAEERNNPAALLLKLKGLGPEFASLLWLESLFRSFGNRRQVAAYGGLAPSPWQSGNVERDQGISKSGNRRLRKTMIELAWFWLRHQPDSALSRWFQARVGVAKGRIRRIAIVALARKLLVALWRYATQGVVPEGAVFKAA

SEQ ID NO: 255929 - protein, 415 aa, unidentified
MRQTHVLVAVDVGMQRHRVAVGVPGQRLACEFDLDHTPEGFAAFFRRVEAYTHPGDLPVAVAMEGYNGYARPLDQQVLARGWRLFNVNNLKLARYKEIFPGPAKSDPIDTRKMLELFALREELPLAKDVLGEVGAVPEANAQLKRLTRRRRVLVNEKVRVINRMQSDLHAVCPGLAAITGAVDNLWFLRFLTCRDALPKLARVQRRSLAQIRGIGKKYTEHIRAWQPRAQFAPEVAYVGPMIVADARRILELIEQIDALEAACASIAEVSELASRIDSIPGFGPISSAELAGEIGTLERFPSEASLALYVGMACLSHQSGQLSRARAPRQVNRRAKAALMIALARHIEQVPQSKGYYDRKRAEGKQHNQALRALGRHLIRVLWAMVQHQRDYEVRTPAQHPQTDLTHDPTHTLAA

SEQ ID NO: 255930 - protein, 373 aa, unidentified
MLSPGGARGVEKAELNGNVDSDNTTEAPQGHMYYIGLDVHKKTISYCVKDASGQVHQEGKVGATRWELDDWMNTLPQPWTVAMEATIFTGWIYDHLLPHAQQVKVAHPLMLRAIAAAKKKNDRIDAGKIADCLRCDFLPECHMASTAIRDRRRTLRYRHLLVRQMVQMKNRISGLLMETGVSHNKKRLHKVGYFRELLSANEEVQESIRPLLRVSRDSIVRLQKTEYALVSSLQRDPLLAERIKRLRTVPGVGPITALTWALEMGEVSRFPSIRQAISYCGLCGDEKSSADKVTRTPLSKQRNKHIQRVLVEAAKLAPRQDHNLALVYEREKQKGNANRATLAVARKMVAYLLAVDRGQRDFVPFADSQSAAA

SEQ ID NO: 255931 - protein, 408 aa, unidentified
MNAVGIDVSKGKSMVAALRPMGEVALLPQEFLHTEVGLEQMAYAIIALGENTRVIMEATGRYHEPVATALHEYSIYVCVLNPLFIKQSGGGSIRKVKTDKADAMKIAKYGLDNWVDLREYTPMDTVRQQLKLCSRQYNLYMKTVVSLQNNLISLTDKTFPSVNELFSSPERADGHQKWVDFVMTFYHCDCICRVSENAFAERYQKWCKRKGYHFSAEKAQDVYLGSCGHFTTLPKNDNTKLLITTAAQQLLAGKMTLAALRTEMTRLAKQLPEYDIVRAMYGVGETTAVQLMAEIGDVRRFPRRSSIVGFAGVDPAVDQSGKHSAKSVPTTKRGSPHLRKTLYQIVCTYLKKSPVDEPVYQFLDKKRSEGKPYFVYMTAAQNKFLRIYYARVKECLEAFDAQQDTSQR

SEQ ID NO: 255932 - protein, 375 aa, unidentified
MEKELDKIKVFAHHCGYQNIWVVAEPTGIYHRALFRAAKRLNLYTAYVSAESVAKMRVIETNDTGKTDIKDPHVIHTLASIGKTQRHRSFVEPYNLLRRWNKIYDTADKDCVRAKGAVHTVIKELFPDFSMKKEFLFGTSGSALMEKYKYNPFCINKSGEKRFATVMKKAVPRIKNITIEKICSSAKASARNQLSPRYIKILELELKQRWHDLQIALDRKQQTKEAMELLYEEACHCDPKLPHAYKGVITTFHLARIIAETGPLSDFDSWKKLMRFAGYNLCERQSGKYRGKTKISKKGRQLLRKVLNLIIFPLITKNGLYGSYYHQKKETMPGTKAMTAVSRHFLKMLYGMYRTGSEFNKERVFTCESQIKKAA

SEQ ID NO: 255933 - protein, 348 aa, unidentified
MRFYDTSHEFYCGIDLHARLLYLCVLDADGEKQFHRGIPASPEALLSAVRPYREGLVIAAECTFTWYWLADLCAREGIPFVLGHALYMKAIHGGKAKNDRIDSDKIARLLRGGMFPMAYVYPREWRATRDLLRRRALVVRRRAELLAHAAMTRQQYNLPAWPKRLAYAANREGFLDQFEDPEVRTSMALDLSTIAHYDDQIRELEGHLVRRAKVHDAHAFHLLRSVPGIGKILALTILYEVHDIRRFPRRQEFLSYSRLVKCAHESAGKKLGSGGKKIGNAHLKWAFSEASVLFVGKSERGKKIVERLRRKHGKGKALAILARRLGSAVYHMLRRGEPFNEARFYQGT

SEQ ID NO: 255934 - protein, 411 aa, unidentified
MELVYNVAGIDVHKRMLAVVIANARDTELQFECRKFGTTLSELRRLSAWLRESEVQEAAMESTAQYWKPVWITLEGSCRLHLAQARSNRGPRGRKTDFRDAKRIVNRLLSGDLILSYVPEAEQRCWRTLTRSRYQLREDRVRLQNQLENLLEEVQIKLSSLLSDLLGKSGRRMLRALADGETDPALLANMGSGRLHAKKEELKDALSGQLGPIHRQLLSLYLERLNLIESQMETLERSIAQALQIHQDAVTRLVEVPGIGVDSAQQIIAEIGPAAASFPTAAQLASWVGVCPGRQESAGESRSNRSAKGNRTMRRLLNQLAHAAVKKEGCCLQLIFRRWLPRMGYKKAIWAIAHRLCRLIWKVLHDGVRYIEKGFEPNPKALRERRRRLVAELRQLGYQVELLPLDPRPAV

SEQ ID NO: 255935 - protein, 371 aa, unidentified
MEHTRFVGLDIHKERISIAVAESGRSCAVEYLGEISNDPVAIGRLCDRLERPSKTLAFCYEAGPCGYGVHRHLISLGHRCDVVAPSLIPTRPGDRVKTNRRDATMLARLHRAGELTPVWVPDVDHEAMRDLIRLRSVVRQIVSRARQHLQGFLLRHGRKHGRGTAWRMAYRRWLSTLAFEHPAQQIAFQDYVDAVMDAERRLQRVEEQISCLLPEWNLRPVVDALQAMRGIALITAVVLVAEVGDFTRFANPRQLMAYFGLIPGEQSSGETIRRGGITKTGNAHARRALVEGAWAYRMKARIGRHKVDRIEALPKVVRDIAWRAQLRLCTRYRRLSARGKTANVVNVAIAREMVGFIWSIACTVQSAPKTA

SEQ ID NO: 255936 - protein, 417 aa, unidentified
MIPAVVERCAGIDVGKKLLLVCVVIGPAHQEGKAETRKFGTIRSELEKVRAWLKSEGCTHVVMESTGCYWKPVLNVLEDDPDYPLHIVLANPQQVKAVTGHKTDPHDAHWLAHLLRHGMVRPSFIPPRALRDLRDLTRRRKQIIGGASQERNRIQKLLEDANIKIGDVLSDVFGLSGQLMLEALLDGQVEPMAIAELAKGNARKKIAELAAALEGHQMRPVHRTLIRHAMEHMAFLARQVESLDDAIEGLVREAQFRDAHQLLQTIPGIQETAAATILAECGPDMKQFPQPENFSSWAGVAPGNNESAGVRKRAPAMKGNPHLKTALVESGWSASRTQGTEFKEQYERLRGRIGHKRAIVASAHLLALQIYQVLSSAQPYQPRSRQFKPREIRRLHRHHSRRLKSIDRWLKDEPLEA

SEQ ID NO: 255937 - protein, 382 aa, unidentified
MKHYSTLYVGMDVHRDSFTLAHRDSFTLAHFALDMKQPTGIVRTDNDYRRIVAYVHHLREKYGQETRIVCGYEAGCLGYTLYHQLTKMNLECVILAPTTLPSPRGGKRVKTDGRDAANIAQCLAYGTYSPVHVPSAEDEQVKEFIRMRNDHCQMLKKLKQQILSFCLRHGYQYSGTRSNWTQAHMKWLDALQPEGLLGDTLEEYLTSFRYHQNKLERLDRRIEEISREETYREPVGKLCCLIGVKPLTALSVVSEVSDMHRFPTAEKFAAYLGLVPGEHSSGNSVRRSSITKAGNVHVRALLTEAAQSYTRGKVGYKSSALKKRQSGQSETVIAYADRANERLRRRYYQMTLQNGKRGNVAKTAIARELACFMWGLLTDHVV

SEQ ID NO: 255938 - protein, 385 aa, unidentified
MSEENPVELRVSVDVGYRRHSVAMGLSSGEVLEEFEIDHRLEGFQEFFTRIEVQRKKRNCAVSVAMEGYNGHARPLDSMVRQRGYRLYNLNNLKFARFKEIFPGAAKSDRIDARKGLELFQLSDHLPLAKEVLQEVRGTSPENEVLKRLTRRRRRLVNERVRVVNNLQADLQAVCPGLLEITREASNQWFLNFLLSADRLPQLARLRRSTLVKIPSVGVKSASIIEGWQTRAHFSQEVEWVGEMIQEDAKRCLELDEKIKRLEAKIAEVAKGSKIAKTLRSLPGFGAVCTSELAGEIGTIERFASEGSLSLYLGMSTLDNRSGKYQGTKAPKHVNTRAKAAMMIALDRHRKYVPESQGYYEKKRSEGKKHNQAVRALGGHLSRIL

SEQ ID NO: 255939 - protein, 354 aa, unidentified
MDMTDLAELVDHVIGVDPDRDRITAAVVSVTTQGELAAATFPATRRGYGQALRWAKTLTVDERRAWAIESTGSYGAGLAATLAGKGEFVIEFDHPSTRASKDGAKSDSLDAVRAARETLGRKSWATPRSRGLREGLRTLIVARDSAKLARVAAINVLKALIVTAPVDLREDLRGHTFGQLVDRCIRLRPDTATDPEHAETKLSLRSTAARIKQLTIECRELELAMLPIVREICPALLNEPGVGTLVAAQILISWSHAGRCRDEAAFARLGGVAPLEATSGQDQTRHRLSRGGDRQLNRALHTAILARAKVHPETREYLARRTAQGKTKREAMRCLKRYYARHIFRLLESAPTPS

SEQ ID NO: 255940 - protein, 346 aa, unidentified
MFTIGVDLGKRQSQWAVIDESGKVLVERKLRNRREIVQRFLRALPDKVGQVGCETCINTYWLVEVLEEIGITVTVGHALHLRLIAEARIKTDKIDARVIGELLRVGFFPKVTLPPKEIREVRELLRGRIKLARNVSQAKNRIHGLLTRAGVDYEAKEIRGVGVEAWLAGLDLTEPQRFMADTFLKIWKELEGHVERTEAELVKRVQLVGPWVSVVERLQSVPGIGLFSALLLFLELWDMDRFPSPKKLASYVGMVPGVHQTGQTLRGGALTKQGNVYVRWVLIQCAWAAVRWDTRYRGMFEYYAKRKVRTRAIIPVARQILTDVYHVWKGGITYEELIQKKQRQPA

SEQ ID NO: 255941 - protein, 280 aa, unidentified
MKTYAGIDLHSSNNYIGVINAKDKRLYSKRHDNRIEDVLKVLGKFKASLQGVVIESTYNWYWLVDGLMDQGYTVHLANPNAIQTYNGLKHTDDKWDSFWLAHMLRLGILPEGYIYPKHQRPIRDLLRRRLMFVRQRTSQILSLQSMITRNRGLNFSGAQIKRLRDPFIEKLFSDHHLVFTAKRNIATIRFLDQMVSEIETEVASQIKLKKEFISLLTTPGIGNILGLTIMLEVGNIGRFPKAGNYSSYCRCVESKKTSNGKKKGENNKKNGNRYLAWAYV

SEQ ID NO: 255942 - protein, 452 aa, unidentified
MEEKEISMEVVNPHAAGIDVGSRSHWVAVGEREQDVREFGVFNQDLFEMADWFKEKQIRTIAMESTGIYWQNLYAVLISKGFHVILCNGKFTKNIKGKKTDIKDCQWIQKLHSLGLLSSSFLPDGKTEQLRTYCRQRASLLHSSASASKKMQKNLSLLNLRLDVVVNDICGLTGLNIIRAICDGETSPEKLASLRHGNCRKSEAEIARALQSNGRKDYLFALRQELDTYDHLQRKISECDKMIEEMLNEIIDNDENKKQHHIEPKTYKRINKNTPKDIDLNLKSYQMFEGTDLLAIEGISYSTVLSIMSEIGIEGIRKFPAAKHFTSWLRLAPNNKISGGKVLSSKVPKGSNRLKIALRNAANAIGNLKESTPLRDFFHRINFRKGRVSAISATARKLAVIIWNMVVRGVQYINPEGYLFLDQKRKLGVMKRIQKQIAKFDLTVDDFKIAST

SEQ ID NO: 255943 - protein, 406 aa, unidentified
MGEGRRFAGVDWASEEHAVCVVDEDGRIVEGRRYAHDERGIAALCARLLGVGVELVAIERPDGLVIDRLLDAGLSVIAVHPNQVVAMRPRFSAAGGKSDNFDAFVLAELARTDSHRFRILVPDSDRTKALRAITRAREDLVGARVALGNELRAQLECFWPGASKIFAEVDSPIALAFLARYPSPADARGLGEQRLASFLARQGYSGRRTPGELLSRLRGAAEGRAGELESKARRQIVLALLAGLQPLVTQISDLTRQLRAALEDHPDADTFRSLFIDPKSVVCAATLLAEIGDSRERYPTYRALAADGGQAPVAVESGKSKRARFRWACDHRLRDAIATMADASRHHNPWAADIYTRARARGATHQHAVRILGRAWCQVIWRLWHDHTTYDPDQHTARQRLTAATT

SEQ ID NO: 255944 - protein, 403 aa, unidentified
MNAVGIDISKGKSMVAVARPFGEVVSKPFEIHHTINEIADFIEYLNVLDGDTRIVMEHTGRYYEPMARQLSKAGFFVSAVNPKLIKDYGNNSLRKVKTDKADALKIARYALDNWQELCQYTSMDTLRNQLKTLNQQFAFYSKQKTASKNNLIALLDMTYPGVNTLFDSPVRDDGSQKWVDFSETFWHVDCIRNMSLSAFTERYRKWCKRHGYNFQSSKPAEIYSQSKNLIAVFPKDDLTKTLIKQSITQLNTVSKTVEHIRTEMNHVASKLPEYPVVMAMYGVGASLGPQLMAEIGDISRFHRRENLTAFAGVDPGANQSGKYEAQSVHTSKHGSPRLRKTLFQIMDCLVRTKPQDDAVYHFIDKKRAEGKPYFVYMTAGANKFLRIYYGRVKEYLASITVDE

SEQ ID NO: 255945 - protein, 473 aa, unidentified
MARAARRPGARQYPKRRSSRGRSAPFEQMNLNAAGIDVGATEHWVAVPEDRDEEPVRRFGAFTAALYVLTEWLRQCQIETVVMESTGVYWITLFEVLEERGFDVKLVDAHYARQVPGRKTDVKDCQWLQELHTYGLLRGAFRPEDQICVLRSYLRQRSMLVAMASRAVQHMQKALEQMNLKLTEVVSDINGKTGMEIIHAILAGERDPQRLASHRDRRCKHDQATIAKALEGHWRAEHLFALQQALEQYEFLQQQLQACEQQIEACLQTFVTHVEVEPPQPTPACKRRARQRQAPSFDVHQYLDAMTGVDLTQIDGIDALTALKVISEIGLDMTRWPTGKHFASWLGLCPGNKLSGGKRYRMRSKPTANRAASALRLAAQGLVNSHSALGAYYRRMRARLGAPKAITATAHKLARLVYSLLRYGTAYVDAGQQAYEQKYRDRVLTNLQRKARVLGYQLVHVEDTGRVQAAATL

SEQ ID NO: 255946 - protein, 316 aa, unidentified
MAKKVTEITLGVDVCKAELVIYDWDTEDTVTLENKDSTIKAWLEALYGPVRIAIEPTSSYHLAFVELAHALGYEVYLINPRQLAHYREAVDVRNKTDPLDAWLLARFLTHEADSLRPFKPQCANAQQLWSLLKRRATVIKARTQLRQSFAEIKLPIKAVFSEIQRVLDRIDQRIQALIRKLGWWADYQRCLTIPGAGPLNAAALVTVFHRGAFAGADAFVAFIGMDIRVRESGKFKGKRKLSKRGEAELRRLLYCATQGARSYQPFDDFYQKQLDKGLPKIAAKVILARKIARIAFALMTNQQSFKKKEIVYSFSP

SEQ ID NO: 255947 - protein, 381 aa, unidentified
MTTKATRNAQDTTSEGTLFVAFELSEKTWKLGFTTGHGQKPRERAVTARDQKRVLDEIAQTKRRFDLPETAPVVSCYEAGREGFWLHRFLEAHGITNHVVDSSAIAVSRRQRRAKSDGLDVRKLLNMLIRYEQGERQVWQVVHVPSVEAEDQRHLHRDLETLKRERASTTARLKGLLSSQGIQVTSLTKLPEQLDAMRLWDGSPMPPGLRQRVLRVYAHHQFLSAQIAEVEAERCALLHDSTDASIDKIRQVMLLKGMGSNGSWLLVMEFFGWRECKNRREVGGLAGFTPTPYQSGESAREQGISKSGNRHVRWMTTELAWSWLRFQPESALSVWFRERFGSGGKRLRRMGIVAVARKLLIALWRFLETGVLPEGAVLKEG

SEQ ID NO: 255948 - protein, 357 aa, unidentified
MRRVSIRNTEALSGKTIYIGIDVHKENWQTTVRTDGEEIFNGRIPGDYHSLQKILERFTGCQIKVAYEAGPFGFWLYDKLTEDGIETIVVPPSLIPLESGNRVKTDKRDSKKLARLLESNMLKKVYVLTEEERIHRELIRTRRQLVEHRGSVARQIKSKLLFHGISSPFPNKFGWGLKYIQWLKDLDLQSNYLRASLDTLICLYEYLTGEIKKIIKRIVELSAIEKYKQRIKLIRTVPGIGLITGMEILVELQNVERFRTSEEIASYIGLTPSEYSTGEHVHQGRITRCGNTRVRTALIESSWILVSRDPFMRLKYMKLKNLKGAKRAIVAIARKLIIRIRSMLLHNTPYMIGNQEA

SEQ ID NO: 255949 - protein, 309 aa, unidentified
MNKAVVYIGVDVAKASLDVAWAERSRRFANNKSGLSALTKWVKQSPFALHLICEASGGYERGLLDAAEQNRIKVSLVQANRVRQYARAAGILAKTDKVDARVLCAFGSAMQPEPTPPLSAQQKRLRELETQRQHLSRMMVAEQNRLAQLNDKELQRLTRSLLATLKKQMTAIDMRMEGLIAEDQTLKQKAQKLTAIAGVGTRTAVLLLARMPELGTLNRTQAAALAGLAPFNRDSGTSRGKRTIFGGRRALRCGLYMAALVAARHNLILRNFYQRLRSNGKPHKVALTAVMRKLLLALNHTLKPTPCFA

SEQ ID NO: 255950 - protein, 414 aa, unidentified
MEQIHERVAGLDVHRDSVAACVRMTGPRGGVANEKERFATTTTELARLAGWLAERQVTLVAMEATGVYWKPVYYALERGFDVWLCNAHHVKNVPGRKTDMSDAEWLADVAAHGMVRPSFVPPPAIRELRELTRYRKTQIDARVAEIQRLEKLLQDAGIKLTSVASKVLTQSGRLMVEALIAGQCDPAALAELAKGKLRPKIPQLTEALNGHFGAHHAVAAQRILGHVDFLDASIATLTEQIDARMQPYGAARCLLAPVPGLDRLIIDTVIAETGADMTRFPSAAHLANWAGVCPGNHESAGKRRRVGVVPGNRWLRRALIEAAHAAARTKASYFGAQYRQIARRRGPNKAAVAVAHSLSDLVWHMLSTGECFTDLGADYFQRRRDAQREADRLVRQLQALGYRVNVTEPPTPAA

SEQ ID NO: 255951 - protein, 415 aa, unidentified
MALKIVYQICCGIDVHKTFVVACIASTNKQGVTTYKRHRFSTFTQGLKELLQWLLDNHCKDVCMESTGKYWIPIYNVLEKDCTVVLAHPKYVKAIRGKKTDKKDAKWIADLFKHDLVAGSFMPPADIRQLRDLMRYRFKLTCFMSSEKNRLQNCLTVSNIQMASVVSDTFGKSSQRILDKILENPQDTSFAIEPLIHGSMKKKLPELELAIDGFITPQQAGKLQVIRKHFENLESRKAELEELILALASPYQQELDLILTAPSFKNTFTAIGIISEIGVNMEAFPSAKHLCSWAGLTPTNNESAGKKKSVRVSKAGCYIKPLLVQCANSVVKSEKHPEIRNRYLRLRKRRGHKKAIIAIARMLLTALYNMLRNKEPYNAELYRKCDVLPVNREITAEQAILMAQFQGYKIKPATE

SEQ ID NO: 255952 - protein, 426 aa, unidentified
MNEVDIIRLEQFRQLKKEIRGSKEHLIVGIDVAKDKHNAFFGTATGKTLFKRLVFGNTIEGFNRLLIQADSLKVQYGLTKTVFGLEPTANYHKPLGEFLIKDSHMVVLVSGVAVKRNRELLDGRWDKHDTKDSANVADLISQGKCLFYEYPSMALRDLRNLLSLKKRLKKQEHGLRVRIRNHVLAQYFPEMDSYYGQSESDSLEIVKWCLNPSVIAGLEYEQFLQLVAPQKRGIWQQNRLKAIWTKAADSIGCDAGESLEFEAKAMVEALEHIRETICATDAKIKEICLEFPEYTYLLTIPGFGPDVSSKVLGAIGNPFRFNSGKQVLKMAGMDLSANRSGKNSDSATPVLSKKGKADLRYALYQAALIASIRDRHFIVYYTNKLRGREKEKGIKTKMRVKLAAKMLIIAWTLMRKKEVFYTPQAY

SEQ ID NO: 255953 - protein, 429 aa, unidentified
MNQVPVAGIDVGKRFSEMAILSPSNQVYARIRINHDAYSNFDRAFELLRKAEKEFAAKPVVVMESTGHYHKILFQALNKNGYEVCVINPIQSDSIKNIRVRKVKNDKVDARKIALLYRFEQLKTTNIPHEDVDCLRSLCRHYYKLSDQLTVYKNRLLGIVDQLFLSFTDVFKDISSCTALAILEKYPTPEDILKADRQELISLIQKTARKNIKWATRKYESLCSKASNFSPLSINSIANVAMLKANIAMIKTLMQSLDEAVEAIHELLDKDASKDMPVLSLTIELLCSIPGIGLLTAATIVAEIGDFSAFPKPDKLVAYFGIDPSVTQSGQFKGTENKMSKRGSRLLRRVVFTTALANVRKKRNGQEYNPILYEFYRKKCLSKPKKVALGAVMRKLVTIIFAVLRDRKPFVLRKPEEHAKMLVAKNSAA

SEQ ID NO: 255954 - protein, 299 aa, unidentified
MGTSEKGEAARFANTPDGQQACLAWVTARCHPGAVVACEASGGLERDVVEVFHGAGFTARLLDAAQVQHFGRSQGHKAKTDAIDAAMIARYAATFPGRPAVPDPARKALTDMIGARDLLVGQVTASRNQATHFTDPSVRRSVELCIATMLRQIAALDRLIVRLIDATPAFAERNRIIRSMPGVGPATAARLLASLPELGTASAKQMACLVGVAPIANDSGNRRGARHISGGRHDVRKVVYMAALVATKHNPALRAFYERLCAAGKPKKLALVAVIRKLIGILNVMLQRNQMWRPTTLKA

SEQ ID NO: 255955 - protein, 345 aa, unidentified
MKITTIGIDLAKNVFQVQGVDERGKAVLRKQVKRKDVVKFFANLERCLIGMEACGSSHYWARKLTELGHTVRLMAPQFVKPYVKTNKSDRNDAEAICEAVARPNMRFVPVKTGEQQAVLSVHRARQGFVKARTAQANQIRGLLAEFGIVIPQGIGHIAKRLPEILEDGENGVPGMMRQLLQRLGENLKAMDRQVGELERQITLWHRDNEPSRTLEAIAGIGPITASAFVASVGDAKSFKNARQVPAWLGMVPRHEGTGGKVKLGRISKRGDVYLRTLLIHGARSVIRQFERKPDRADGWLKKLLARRNKNVAAVALAAKNARIAWALLAHDRTYQSDYVTKRTAV

SEQ ID NO: 255956 - protein, 345 aa, unidentified
MKITTVGIDLAKNLFQVHAVDERGRAVLRKQLRRDQMARFFANLPPCLIGMEACASAHHWARTLQKFGHTVRLMAPQFVKPYVKTNKNDVADAEAICEAVSRPNMRFVPIKSVEQQAVLSLHRVRQGFVRARTAQGNQIRGLLGEAGLIIPKGVVNVAKRVPALLEDAGDEVPASFRRLIQRLTEHLKELDRQVDELEAQIKAWHRGSELSRKLEKIPGIGPLGASALVASIADATSFDNGRQLSAWLGLVPRQDSSGGKPKLLGISKRGDVYLRTLLIHGARSAILAAQRKALNTNVWLASLLNRRHPNIAAVALANKNARTVWALLAHGREFRTDYAPEVSAA

SEQ ID NO: 255957 - protein, 338 aa, unidentified
MGRVHDAMARIQERGMGASVTAAGFDVGRDFLDVCVAPVNACRRASNTDAGIASLLALLRRHRVTRVVLEAIGPYAARLVQALVAGQFEVAIVDPRRIKGWRTAQGGRAKTDKVDAKLIASFALVMPDVFRPLPDADTLRLRGLSTRRRQLTEMMAMEKTRLKQALDPVVATSHRDMIELLKSQRAAIEAEMLACIDKAGLTERFDILMSAPGVGTAVALTLVADLPELGELDRRSIASLAGLAPHISQSGLDRGKAAISGGRPCVRAALYMAALVASRSHPPIKDEYKAMVSAGKPPKVALIAIARKHLLALGAHLREGRKWGTRPHKNDTQPLTPT

SEQ ID NO: 255958 - protein, 405 aa, unidentified
MSTKYTSKSSRDNVLGAASNSNTSLLDAKPDAFIGIDYHKRYSVFHAVDCDGRDLAKGRIEHHSPESFVHLVKRWQRPRVVFEATMNWHWLFEVLETAMPAGHITMANPGKTRIIAEAQVKTDKIDARILAQLLRVDLIARVHIPARPTRERKEVLRQRCFFVRQRTMLRNRIHRLLGGQHDLQLPQVSDIFGSKGMGFLEKLKLPDPAGMLLKQQLALLKSVKEHIKADETALEAMMSARPEQAFVQSIPGMGPILAAVVVNEVDMIARFTSAQKFCGYAGLCPSTSSSGGKTYNGRLMRHCNKWLRWAFVEAAWVAIGCSPCFGDIYKRKRANGKKANTAILCVARRMARIAWQLLTQSRVYEIFPPPQLRDRPVGQAPAATGSVKEVGKSARAKGKRSKPTD

SEQ ID NO: 255959 - protein, 344 aa, unidentified
MDHFAGLDVSVKATSVCIVDDAGKVVREVKVTSEPEALLAVLKNPAYRFRRVGLEAGPLSQWLFSGLAEAELPVVCVETRHMQAVLKAQINKTDRNDARGIAQMMRVGLYRPVHVKTLRSQKLRMMLTHRKLLQSKAIAIENDLRGTLRNFGLKVGIAGKTKFEARIKELVENLPDLAELVEPMLVVRRTLREQIVILHRRLLAIVRDDEVCRRLMTTPGVGPVVALTYRATVDVPARFRKSKSVGAVFGLTCSKYQSGEIDWSGRISRCGDAMMRVMLYEAAQVMLTRTNKWSWLKAWAMQIARRRGMKKAIVALARRLAVILHRIWVDGTEFRWTREQAVAA

SEQ ID NO: 255960 - protein, 335 aa, unidentified
MEWTVAIGVDTHKEIHVAVALDALGAQLDSREIAATVAGYRSLLAWAKEFGVPAFAIEGTGSYGAGLARFLTSAGVDVFECERPRRGERPRGKSDLIDAALAARRLLSGERLGLPRGGGRREELRLLLLERRGAMQARTAALNQLSAVLVTAPDPVRTRLGALAGDRLARAAARLRPSAAVANSVLQRLGRRVERLSREVAEVERALAELVAELAPSLLEECGVGPVCAAQLLVSSGDRGRMRSEASFAALAGTSPVEASSGKQRRHRLNRGGDRQLNWALHVVALQRIRHHQQTRGYYQRLLAAGKTTREARRCVKRALARYFYRRLSELPTLP

SEQ ID NO: 255961 - protein, 436 aa, unidentified
MEEVEDEPLFADRVAGIDIGKKEIMVTIRVPSDTGSRRRQQETREFPATRKGLLELADWLRCWQVTKIGMEATGDYWKPVYFLLEREGFDCVLYHAAQVKALPGRPKTDKLDSVWLARITERGSLPGSFVPPEDIRRLRTHTRYRRHLVQARTAEKARCEKLLEDAHLKLSSVISNIHGVAGREMLTAIIAGQRDPKVLAQMARTRMRGKIRQLEEALDCSFFTEEHAFILAMMLANIDHLTAQIKELSTKIDALCEPYARQIAQLDAVPGFGIITAQDIIGEIGVDMRVFPTAGHLCSWARQAPQVASSAGKRKGKNATGRGNPYIGGALGEAAANAGRTQTFLGTKYRRLIRHMPKKKAQGAISRTQLVITHALLSDPEAEYTDLGTDYYEQRADIRRRARNHVRGLERLGYQVTIEPITPDPETGDLPITKAS

SEQ ID NO: 255962 - protein, 388 aa, unidentified
MYLVGIDIAKYKHQCFIATTHGEVIKEFSFDNNSNGFKVLLEHLQALDHSYEIKIGLEATGHYGNTLKHFLSANSYTFVEFNPYLTKQFFKSTTIRKTKTDKIDARMLARMLASVDYKTLHTKYYHINELKSLCRTRNSLIESRSNTLVQITNALDIIFPEFKRHFNNRLGLTALFILEKYTSPKKIAKLNKNHFEKLYKLSRGKFTYPNFRKLKELAKDTVGIESKSNELKLKLYTKLYHSYNTKIKILEAEIEEIMSYTTSYIKTIPGVSLMSAANILGEVGDFTLFSNPAKLIAFVGYDIAVYQSGESKSYGKLVKRGSSLLRKTVWNIVLGCIREVPVINDYYYKKKNEGKHRNVIFSSIARKLLRIIYYLETNQISFDQNIIR

SEQ ID NO: 255963 - protein, 338 aa, unidentified
MIVIGLDVHKQSVTAVAVDEAGRPLEEKVVSVGSDELLGWAASLAAERLWAVEDCRQLTRWLERQLLSVGEELVRVPPKLTVPERRAGRTRGKSDPIDALAIARAALREPDLSRPRPDERVYWELKLLVDHRDDLVDQRRRTQQRLRWHLHQLDPTFEVPLRMLGRFSHLERVRRWLARREPELQVRLARELVSTIGQLNRTITALEQELEQRTAAIAPALLELPGCAAVTAAKLLAEIGPIDRFKTDAQLARHGGVAPLEASSGRTQRHRLDRGGNRQLNAALYRIAITQARYHAPARDYLERKRSEGKSKREALRCLKRQLVRVVFNTLKARPALI

SEQ ID NO: 255964 - protein, 343 aa, unidentified
MSISMIGLDTAKSVFQIHGVNEAGKVEIKRKLRRSELIAFFEKQESCTVVMEACGAAHHWARLLTGLGHTVKLIAPEAVKPFVKKGKKNDAADAAAICEAASRPSVKFVPAKNLEQQGILALHAARSLLVKQQTMLANAMRGLGTEFGIIVPKGMRNLDELMTLVDTDESIPKQAKQAITGLDDYRKELSEGIETFEAEIVAHARHDETARRLATIPGIGPITASLIAATVVDISLFKTARQFAAWLGLVPRQNSTGGKTRLGRITKAGNKEIRKLLVLGATSMVNRADGWDSAVGAWLRDILQRRPTRLVTVALANKMARIAWAVMTRKEVYRPKGGIAVAA

SEQ ID NO: 255965 - protein, 344 aa, unidentified
MSEIQVVGLDIAKNVFHVHGADGAGRPTIRRQLRRTELLRFFANLPPCIIGLEACGTAHHWARELAELGHTCKLIPARYVKAYLKTNKNDMRDAEAICEAVQRPTMHFVPTKTVDQQAALMLHRSRELLIAQRTQLGNSIRGQLAEFGIYLRVGSWTLTRQVAEHVAGSDGVPVTVKTLIELLVEQWRQIQDRIAHVEREIERWHRATDASCRLAEIPGVGPITASAMVASVGDIHAFRSARHFAAWLGLVPKQHSTGGKPSLGSISKRGDGYLRRLLVHGAQAVMRWHRTRSNGARPWLDELLRRRPVNVAAVAVANKNARTIWALLTRGERFNGYRSGAAAV

SEQ ID NO: 255966 - protein, 376 aa, unidentified
MKEKVRFLGLDVHAETITVAVAEPNGEVRSLGTIPNRAESVRKLIRKLGPADRLQACYEAGPTGYVLYWQLTGLGVECAVVAPTLIPVKAGDRVKTDRRDALKLARCHRAGDLTAVWVPDPGTEALRDLVRAREAAKQDQLRARHRLSKFLLRSGQRPPLGVKAWTQRYMAWVRQLRYPQAAQAAALVDYVHEVEHMAARVLRLEQAITEAVKLAPAEIQQVVRGLQALRGIAEISAVTIVSELGSISRFESARQLMGYSGAVPREDSSGKSTRRGPITKTGNAHLRRIAVEAAWSYRLRPGIGPKLRQRQQGLPEEIKEIAWKAQHRLSKRYAKLTAAGKDQRKIVTAVARELLGFIWAIGVRAEAASQQQEIAA

SEQ ID NO: 255967 - protein, 453 aa, unidentified
MDAVVERCAGLDVHRDNVVATVRFPAEDGRRFKLSTRTFRATIAGLTELREWLAGFAVTLVGMEATGVYWKPVFQALEDRFECWLLNAQHLRNVPGRKTDVKDSEWICQLVAHGLVRPSFVPPPEIRRLRDLTRFRKAQINERTRAIQRIEKVLQDAGIKLTSVASGAWSKSARAMLEALLSGVSEPERLAKLAKGRMRAKIPQLREALESRFKVDHHGIMVAQLIAHIDTLDHAILLLDEKIEQLLAPHAKVVELLCTIPGVALRTAQVLIAECGLDMSRFRTAGHLASWAGICPGHNESAGRRRSGRTRPGPKWLTDALTESAKAAARTKGTYFAAHFAQLRGRRGEPKAIGATRHDILIAYYYIVRDEVPFRELGPEWLRRRYSPEPGASSNNSKRLATRSRSSRPTPPKRLPPPPDPTHNRRRSTDTAPAVPTPPAQTRSQPGGFTHQQ

SEQ ID NO: 255968 - protein, 422 aa, unidentified
MAMVMIGVDPHKASHTAVAIGAAEQSLGQLRVRASAVQVERLVGWAQAWPERAWAVEGAGGTGHLLAQQLLAAGERVLDVPPKLAARVRLLATGNTSKNDPNDARSVAVAALRSAGVREVRRDDHAAVLKVWSKRYQDLGRARTQVACRLHQVLCELLPGGVPGQITAGQAAHLLDAITPADAVEEARWELAAELTDDLRGVDAQIRETRKKAATAVQAAGTSLTRLFGVGPVIAAAVIGDVRHVSRFPNRDHFAAYDGTAPIEVASGGRKIHRLSRRGNRRLNHAIHMAAVTQIRYRHSPGRAYYDKKLAEGKTGKEALRCLKRQISDAIFACLQADARRAAAARSPGGQPGHHSGSRAAGLHPARRLFGQATPGPATHPTTPAGTDAPAAFPAPLPSRASEQPGPGPGTARPRSGASRRP

SEQ ID NO: 255969 - protein, 323 aa, unidentified
MKKFVGIDISKETFDIYFEQEDKGCHVKLNQTEEDYKVLLRLIDSKSICIMEATGNYHLNLANYLHQADIKVVAENPLKIKRFSQMSLQRTKTDKADAKLIYEYGRLILSSTELHFWQPDKVEIGHLKQYDTVRNQLIKQRTALSNSEEALSALTCLNDEVTEVLNDMVAAVDKAIKQLDKGMLKLVKEHHAETFDLVTSVPGVGAKTATMMICLTDGFNKFSHDQVKQFISYIGMSPRTFESGTSVKGRAHISKVGNSRMRSMLYMCSWTAKTKNQQCAALYDRLSDKGKPEKVIKVAIAHKLIRQIFGVIKSGTPFSKEYA

SEQ ID NO: 255970 - protein, 372 aa, unidentified
MKEETAGHPGVVGGVDTHKDLHMAAVVDEHDRVLGSECFATTRHGYRQMLIWMRSFGELLRVGVECTGTYGAGLLRYLQHAEVTVLEVTAPDRSDRRKRGKDDTLDAENAAHAAFAGVRTVTPRTRDGMIESLRVLKVCRKTAVAARRVALQLIHNTVVCAPDELRESLRTMTRMQLIRTLAAWRPDLSDYRNLTSAYRITLKSLGRRYLELHDEIADLDVMIAALVNELAPDLVSRNSIGYESAAQLLLTAGDNSERLQSEAGFAALCGVSPVPASSGKVTRHRLNRGGDRAANSALHIIAIGRLRTDPRTKAYVDRRVSEGHSKLEAIRCLKRYIAREVYYVIRKRNRQIGQVQVAWKRPVPDNRQAFVI

SEQ ID NO: 255971 - protein, 367 aa, unidentified
MKKVSTAVIKQSRNFSQQKLTIGLDLGDRSSCYCVLDETGRMVMEHKVCTTPKALQAAFGAMPRSRSALETGMHSPWISRLLSGLGHEAIVAHARNVRLIGESRRKDDRLDAQTLARLARIDPELLCPVKHRSAKAQADLTVIRARAGRVRARTALVNTARGRAKSYGERLCGCNVRNMNPEKAEGLSPELQAALEPLLMALESLSEQIREYNERIEKLAQESYPQVTLLKQIKGVGTLIALTFLLTLEDPHRFRKSRDVGCYLGLQPGRRNSGQSEPQMHISKEGDPYLRTLLVQGAQHILGPFGLDCDLRRWGLKLAERGGRNGKKRAIIATARKLAVLLHHLWVSGEGYEPLHNSGRMAMPAAA

SEQ ID NO: 255972 - protein, 354 aa, unidentified
MYGLKHQKEKRSMDHFAGLDVSVKETSVCIVDDTGKIVREVKVASEPEALLAVLRNPAYHFKRIGLEAGPLSQWLCSALAEAELPVVCVETRHMQAVLKAQINKTDRNDARGIAQMMRVGLYRPVHVKTLRSQKLRMLLTHRKLLQSKAIAIENDLRGTLRNFGLKVGMVGTAKFEARIKELVENLPDLAILIEPLLIVRRALREQVVILHRRLLAIVRDDAVCRRLMTTPGVGPVVALTYRATVDVPARFRKSKSVGAVFGLTCAKYQSGEIDRSGRISRCGDEMMRVMLYEAAQSMLRSKKWSWLKAWAMQIARRRGMKKAIVALARRLAVILHRIWVDGTEFRWTREAAAA

SEQ ID NO: 255973 - protein, 320 aa, unidentified
METERVYAGIDVAKDSLDIAVHSSGQRWQFANDDRGVDQAVACIQELSPALVVLEATGGIELPITASLGLAGVPVAVVNPRQVRDFAKATGKLAKTDTLDARVLAHFAAAICPMPRSLPDAAAQELATILTRRRQLVEMLTAERNRFLTARKPVRERIQAHISWLEQELANTDRDLDHGIRKSPLWREKDTLLQSVPGVGPVLSATLLAQLPELGTLNRKQIAALVGVAPLNRDSGHFRGKRTIWGGRAAIRAVLYMATLSATQHNPVIRAFYTRLCSAGKAKKVAITACMRKLLTILNAVLKHHTPWHHVDSHIFVPCS

SEQ ID NO: 255974 - protein, 494 aa, unidentified
MANGLESTAIVVFRKARALAGLPFFISGGFIMLLKLELCVGIDPARRANHTAFIAANPFTGPKCPKRAFSFPHTLKGFLSLRDYILKVTGKKSLKDVIINTEPTSGVWRDIARFFFDQGASVFYTRPDVVSALRKTHSRFAKTDRIDSRTLAGMPWSFPERLIPFVPMEKRIRKLREFSNQRFCIVKEITRWKNRFLARIEPAWKPLLISIDKDEVFSQSIRAFWLRFSHPGDVIRLGPKRFHKWCEKHFHGGLSKEVEGKILVASDKANELWQALGKDEEERDSLSFCISQDLTLIDPLEKQLKLVEDRISKARKDVPECDILEEMPGVGDVVSVTLASFLMPITRFSNARKLSAYTGFVSRVKSSGKREIEGLRITKCGNRRLKRDLALAADTAMHKDPQLAAFAVRLFEKGKHYNKVRVAVGRKIAVRAGSLLKRIAAGEKNVHFEYRDLEGRPIPKQEAKELADTIWLLHDRRKKEKKRKSADSKKIVAA

SEQ ID NO: 255975 - protein, 349 aa, unidentified
MLHVGLDLSRKRVDVCLISGEGEVVEHFRSPCDRDGLYGLSRRVAVYDEPVRGVIESMNGARFVHDELVRYGWEVLVADAQRVKGLAPLACKTDKVDARVLAELSFRDLVPAIWLPTPELRAERERSRWRLHLVKHRAILKNRVHSSLIAFGHQVPMADLFGVAGRKLLSELDFPEPWRGHVQASLELIDELERRIGEIERWLRRSGADHRYIPLLMSAPGIGWVTGFTIASEIGDISRFSSPVKLTGYTGLCPHVRQSGEMDRRGPLSKHGPKYLRWGLMEAAIAASSHPLYKERYQRTKRRLGRQRGAKVAQIELARKLTEAIWYMLTRNQPFKPFAPAGAIFALTA

SEQ ID NO: 255976 - protein, 286 aa, unidentified
MERYTQNHVRISMGLDLGDRFSYLLAMDREGTILAENKRLSTTRVAMEEYFSDFDPSETRIICEAGTHSPWVSALLERMGFEVVVANPSHAGRALAANGRKNDRVDALTLASLGFDSLWLLHPIKHRSKGAQSDLAIIRARDCAVSMRTQAINCVRGLVKSSSARLPSSSSASFHRKVLEGIPPELKPALLPLLEHIGQLTALIRAYDKEIENLAEKYPVTKKLRAIGGVGPLVSMAFVLTLEDPKRFRRSRAVGPFLGLVPKQHDSGESSPQLRITKAGNTSYGQ

SEQ ID NO: 255977 - protein, 322 aa, unidentified
MDQAGTIIKEQQFKSDAKEIKRFIKTLKVKNIQAAIEATCTWYHVYETLDALGVKTTLVNMRRTKTIAESKIKTDKLDAKTIAHCLRTGFIATAYIPPKTIMEQRIILRHRMSLRKEITRYKNKIHAILLRNGIQHSDYSDLFGPGGMRFLRSVTLPDSEHYSLTSYLNIIETLLHEKTQTAENIETLCKNNPQAMLLTSIPGISYYSAMIILTEIGEIHRFPHPKKLCSYAGLVPRTIQSGDHVYHGRILKECNQNLKWILDQCTHIHTRHCPNSSITRLFYRVENKKGRNKAIVAASRKLLTCIWYMLMKNETFKYSNDD

SEQ ID NO: 255978 - protein, 341 aa, unidentified
METQRHIGIDLHRNQFTCCVRLENGRNYLSEWKLEDLPRFVKKLRASDEIAVEVTGNTRLFRDAVAPHVARVVAVDPNQFKVISHSVKKTDPNDARNLALYLEKDLLPEVRMKDKTQAQLASLTQTRDTLVKLRTSLKNKINNILSAHGINLEREALSSEKKLNEVLAMRFDPMVKIELEVLVEEIRSLNQRIAKLDKTIADEGSKLEGHKNLTSIKGIGPLSGSILLSVIGDIDDFADEGKLAAYFGIVPRIANSNETERSGRITKRGSKLGRTTLVQCALIAQRYSPYLKRYYEKIKARRGTGKGIIALARKLLGIIYRTLKNNWVFEDFPNFVLAEAA

SEQ ID NO: 255979 - protein, 404 aa, unidentified
MKQLLYAGIDWATKTHAVGVVDDHGGIRARFEVANTGKGFGGLIRRLTKLQVVGVAIERPDGPLVEAMLDAGLRVVVITPRQVKALRSRYRAAGAKSDAADALLLADVLRTDGHRLAPLCPDSDATIVLRALSRTRKDLQKARVALCNQLTAQLERCFPGAVGLFADLHSATAIAFLGRYPTSQAAADLTPVTLAAFLRRIHYCGRTPVAVLLERIQTAPAAAISASQATGRAVCVTALLDAIQACHSRERELEAEIIERLEVHADAAVFTSLPKAGHGIRAAALLSEIGDVRTRFPDEEALAALAGVAPVTRASGKLHSVGFRWACDKKLRNAVIDFADDSRHASPWAAKVYTDALARTRRHPQAVRILARAWIRVIWRIWQDHTSYDPAKHGGAVRHLAAPA

SEQ ID NO: 255980 - protein, 412 aa, unidentified
MDRWIERCCGLDVHKQTVAACVRVPGAQGRRTQEVRTFGTTTPDLLALQDWLAAHQVTHVAMESTGVFWKPVYYVLEARFTVLLVNAAHVKQVPGRKTDVRDCQWIAELLEHGLLRGSFVPPPGIRDLRELTRYRRTQIQERTRVANRLHKVLQDANVKLSNVTHHVLGVSGRAMLDALVAGTTDPDVLADLARGQLRKKLPALRQALTGRFRAHHAFLLGQILAHLDYLEEAIAAVSAHIEEQLRPFAPQVERLMTIPGVQRRTAETILAEIGTDMAVFPTAGHLASWAGMCPGNDESAGKRRSGKTRKGSKWLRTGLIEAANAAARTKATALGARYRRILPHRGHRKAIVAVGRHILEISHHLLRTDRTYQELGPDYFDRRHAERLQRRCVRQLEQLGLQVTITPAPAAA

SEQ ID NO: 255981 - protein, 423 aa, unidentified
MSYRIAGIDVHKKMVAVVVSDVEVDGEYQFERVRYSSSPEHLRFLAEWLIAQKVEEVVMESTAQYWKPVWGALERYWKPICQEREGAGPMSGTLHLAQAQSNRGRRGRKKDFPDAERLVKRLVADELVLSFVPDTEQRLWRTVTRRKYQLTRNHVRLQNQLEGLLEECHIKLSSLVSDLLGASARRMLKALAEGETNPVALAAMADKNLRATQAQLCDALGACTELKPIYRRLLNMFLEELQFIDLQISKLDQELASLLLRHHDAVVHLAEIPGLGVDSAQQIIAEVGAGAATFPSAKQLSSWVGACPGEEESAEVSKSHRSPKGNRHMRRILNQAANAAAKSKGTIFEIVYRRLVSRLGHNQTIGAIAHRLCRLIWIILHRGVRYEERGPSVNAKTRRHRTNRMIRELRNLGYRVEPLVTTV

SEQ ID NO: 255982 - protein, 366 aa, unidentified
MKKTSTVRVNGNMIFKGHKLTIGLDLGDRWSFYCVLDEAGQIILEQKLPTTPEAMKQTFESIPRSLIALETGTHSPWVSRLLRELGHEVLVAHAQKVQLISKSNRKDDRHDARTLARLARIDPELLGPVRHRSAKAQIHLTVIRARAELVSARTALVNAARGLAKSYGERLRKCGTQQVSRELAAELSVELREVLEPLLQEVESLNERIKQYDARMEKIARESYPQVELLKQVKGVGTQIALTFVLTLEDPHRFPKSREVGCFLGLRPGRRDSGESQPQMHISKEGDPYLRTMLVQGAHYILGPFGQDSDLRRWGLKLAARGGKNAKKRAVIAVARKLAVLLHRLWVGGEVYEPLRNSHKAMRAVA

SEQ ID NO: 255983 - protein, 396 aa, unidentified
MISVGIDVSKGKSTVCIMKPCGEILESPFDIGHTADELDSLISLIKSFDEETRVVMEDTGHYHLPVATYLSSHNIFVCCVNALRMKKFCSQSIRRAKTDKIDSIKIASFGITYWNELVKAYPSNVIYDELKFLARQYYQVTGMLVKSKVNFSNLLDQVMPKINDVLSNQGENHKLTEFVSRYIHFQNILDIGEMKFTSDYCKWAKKKGYRLNERKAAEILALAQNGIPTLPNSQSVKIAVSEAVKLIHSIEESRNTILAQMQDLCNTLPEYSVVKEMDCIGDTLAPRIIAEIGDVRRFKNKHSLIAYAGIDAPPYQSGAFHASERHISKRGNSYLRKTGYEIMQSLIKHKPADNAVYDFIQKKRSEGKCGKEAMIAGLNKFLRVYYGKVMEFYSEH

SEQ ID NO: 255984 - protein, 375 aa, unidentified
MNNNNTLYVGLDVHKESITVAYAINSEPVELMGKIGTSPTDIQNLCKRLRSKSSQVSIVYEAGPCGYGLYRRLVKSGFDCMVCAPSLIPKKPGERVKTDRRDAIRLVRSLRAGDLSAVYVPGIEDEAFRDLARAWASARDDLRHARQRLKSFLLVHGVHYVGRADWGPAHRRWLSKYSFESPWRQLAFDEHRRTIEDRQAQCERLESALKEAVTEWRLYPVVEALQAMRGIQFITAVGLISELGDLTRFEHPRQLMSWFGITPSEYSSGGSRHQGSITKAGNSYARKLLVEAAWSYRHPARISPAIQKRQENLPRPVIDRAWDAQLRLCKRYRKLQAKGKNVNITIVAVARELTGFIWDMGRIAMSVAQQPQCHK

SEQ ID NO: 255985 - protein, 329 aa, unidentified
MTTTQAVVGVDVSKATLAVCHQVGAHVQHLEVANTPVGFRQLVRTGGATSLYVLEATGPYYLAVAYHLVAAGAQVAVLNPLVVKRFIQMHLGKGKSDRKDAQWLLRYGQQQAAPRWQPEETILVECRQAEQVVELLIRQKTMVHNALEALQAQPVVSPAALAQLRQTLLHLEEQVQQLETKLLTTIEARYPPEMHLLCSIPGIGRKTAAYLLLFAGGFTSFQNHRQLIAKTGLCPREFSSGTSVRGKARISKMGGALIRSKLFMCSWSARRANGACRALYDRLVAKGKNGKLALIAVCNKLLKQAYAIVTSGVPYQADFAKKVVAPLAF

SEQ ID NO: 255986 - protein, 427 aa, unidentified
MKYNQNFRIMQVTESTLIVGVDIAKKKHYARAFDWRGIELDKTIIFKSRYQGFQDFIGWVNEVSSKYCKDKIIVGLEPTGHYWYTFAQEFLTQGHMIVQVNPYHVKKAKELDDNSPSKSDRKDPKTIAMLVKDGRYQIPYMPHGLFAELRKANNLREEWLVKSWSIKNKVHRWLDTYFPEFTDVFKSWEGKAALLTLKEIPLPDMIVKLSAEEIVSMWRTEVKRAVGLKRAQELKETAMYSVGVNEGTEMAFYEMQLLMKEYHEIRTILEDIEMRLEELVLTIPGAARLLEIKGIGIKTAAGFLAEIGDISRFNHPKQIIKLAGLNLRENSSGTHKGLTTITKRGRSRLRAILFRAMLPLVAKNAEFNALHKYYTSRKENPLKKKQSLIALCGRFIRIAYTLITRNAEYNPVKVLGGLAVVAAPIAA

SEQ ID NO: 255987 - protein, 474 aa, unidentified
MARVARRQGGSQARKKGHSRRARSAQLEQLNLNAAGIDVGADAHWVAVPKDRDEQPVRCFGAFTADLYALAAWLRQCQIDTVVMESTGVYWIALFEVLEERGFDVKLVDAHQARQVPGRKTDVKDCQWLQELHTYGLLRGAFRPEDEICVLRSYLRQRSMLVAMASRAVQHMQKALEQMNLKLTEVVSDITGKTGMTILRAILAGERDPQRLATYRDKRCKHDHATIAKALTGHWRAEHLFALQQAVDQYDFLAQQLRACDGYIEECLQTFVPDVEADSPPSPPVRAWRSSRSNPLCFEVQTYLEAMTGVDLTQIDGIDSLTALKVISEIGLDMTRWPTSKHFASWLGLCPGNKVSGGKRFRIRSKPSANRAATALRLAAQGVANSHSALGAYYRRIRIRLGAPKAITATAHKLARLVYSMLRYGTAYVDAGQQAYEQKYRARVLTNLQRKAKAFGYQLVHVEDAGSAQATATL

SEQ ID NO: 255988 - protein, 424 aa, unidentified
MAFKIFRKNCCGLDVHKTWIYACMGITDTNGRTEYKQARFSSFTKGLQELADWLAKYDCNDVCMESTGKYWIPIFNYLENDIDVCLTHPKYVKAIKGKKTDKKDSKWIADLYKFDLVRCSFIPPKDFRQLRELSRYRFKLVCMKSSEKNRIQNCMTISNVGIASVLSDPFGKTATEIISYLLEHTADSMDEKAVRKLIKKGAKSKSDEIIEAIKGYTIETDQAKKLELARGHLEYLDDMITQTEVELYVRIKPYYEFVEFVSTMPGMTELSSTIVLAETGVDMDIFDDAKHLCSWCGLSPANNESAGKKKSVRIAKAGDYLKPMMVQCALAAIKSKKQPYFAIKYGRIKKRRGHKKAIIAIARMMMVCIYHMVSEKKPFIPTDYEELMNPQNHVERVVLNENNVFAYLESLGYDSSKLVKRNDN

SEQ ID NO: 255989 - protein, 347 aa, unidentified
MLADQLDYVIGVDPHRDVHALAVVDVRSGGVVFETSVSASREGYAHALELARQHAPGRRVFAIEGTGSFGAGLTRVLSGEGERVLEVGRLRRERRSGGKTDALDAIRAARSVLGQTRPGLPRAGGEREALRALSAAREGAVNAKRAGLCQLRGLLVSAPEPLRADLRSLSRAQLLRRLAAVRPARCQDAELRGTLLALRSLARRVKALTDEERELAREIETVTRKLAPQLLEQPGVGPLAAAQILISWSHRGRITSEAAFARLAGCAPIPASSGQTIRYRLDRSGDRRLNRALHMILVTRRRAHPPTIAYINRRIQEGKSRREANRCLKRYLARSLYRLLENAPMPT

SEQ ID NO: 255990 - protein, 457 aa, unidentified
MDQQLGKSNGLSLERIEPNAAGIDVGATEIFVAVPPDRDRQPVRSFKTFTDDLRQMAAWLVQCGITTVAMESTGVYWIPPHEVLEEAGIRVCLVNSKHVKHVPGRKSDVSDCQWLQYLHSVGLLRASFRPESEIRAIRALSRHRSSLIEIASVHVQHMHKALTQMNLQIHHVLSDITGLSGMAIIEAIVAGERSPVRLAALCNQRVRSDQDTVIKSLVGNYRSEHLFTLKQSLTAYKHYQELIADCDREIERLMRLLNGKIDPPPSSPATPPDPRFQKRSKNQFRFDMGSELNRVFGVDLTTIPGISALTAHVLLAEIGPDLRHFANVAAFASWLALCPANTKSGGKVLSSKTRQTNNRASHALRIAAQTLARSKSHLGNFYRRMRARLGGPQAITATAHKLARIIYHLLTTGQHYDETVFVKEDKKQAQRQEKRLRKQAKTLGFQLVLITATVSCS

SEQ ID NO: 255991 - protein, 489 aa, unidentified
MPTKANIYAPSNPQLIKLFEVAGHPAKVACVALDYAKAQHLALICNGLGDVLQGAFAVDNAPTGVSQLLRQVRRTAKQRKIRPEHVFFGGEDYPSYAENFVRHLRQEKFLVVRVNAWEAKQQRSNFQASSDSLDLLGIARCCLNRRGETVRDLPVAYTNLRIATRDRDRLVRSRTAISNRIHSYVDRLFPGFLQGQKSGLCPFSPASLGLMVDRFSPQQLSRRPRQRLAHWLGRQGVEQPDAVAAQLKQLAQAVLGPAPEQTVMLQRSLAQFVQLYRGLDQSITLLDRELAYWLARTPGALLTSIGGLGITLAAGWTAELGPPSQWRAVRQLCSYAGVVPKSKQTGGPQKEPVVGPVQPRCNKRFKNVVLQAVEKVRLYGPDDLQQAAQQLEAQGSHVEFALAKRLVRLAKYLALTGTIYRPKALLASDTPKATLLTYYQNLWDKLLRKWKNKADLKDVFAPEHPLGQWRNMARTLYALELRLPQQRAA

SEQ ID NO: 255992 - protein, 349 aa, unidentified
MTRSALSYQDKKVFIGIDVHKESYSVTCICDQIIVKKAKVLAQPDLVAQSFLNWFKGADIQSAYEAGFSGYGLHRSLKSIGINNIVVNPASIAIASNDKVKTDLRDSKKIAEQLSAQQLTGIDIPSEEVEASRTLTRTRAQVVETRAKVSRQIKSKLHYFGLMKLDDKRLISSRYLKQIEAMTLSAEVMFGFKILMEQWRFLTLQLYELRKALQKQAEKDKTLHEIYQSVPGIGLVTGRTLSNELGDLSRFKNERALFCYTGLTPKEYSSGNNIRRGHISRQGSANVRRLLVEAAWRAIAKDQALHEAFERIAKTRGKKRAIVAIARKLIGRIRACCKTKTPYVVGTYK

SEQ ID NO: 255993 - protein, 373 aa, unidentified
MSVYVGIDVHRKRSQVAVVDQTGEVLVNRNVPNGTETVLSVIGELPAGTPVAFEAAFGWGWLVELLDDYGFEPHLVHPTRCKAIASARLKNDKVDAHILAQLLRADLLPEAWIAPPAVRQLRARLRHRIQLVRLRTLLRNRIHAVLAEHGHDRPAGCWSGPGRDWLAGLDLPAASREVIEDCLGMIDAIEPVVDRLDGEVRDQARTDPRVRVLTGLPGVGELTALVMLAEIGDIGRFGSARKLAAWAGLTPTVRGSDRTIRHGHISKQGSTWLRWILCEAAQSAKRSPEFAATYQAIARRRGKKIATTAIARKLLTRAYHLLTEADAEADAEADAEAGVDADTLAEETCTPRRTRAGTQTGRSPQPGRARVSA

SEQ ID NO: 255994 - protein, 343 aa, unidentified
MQSITTIGLDIAKSVFQVHGVDAAGQVVVRRQLKRRHVLTFFEKLPPCLVGIEACASSHHWSRQLQALGHSVRLMPPAYVKPYVKRQKNDVADAEAICEAVTRANMRFVPTKTPEQQSVLMLHRTRHLFIRQQTSVINAIQAHLAEFGIVAPVGRRGVEELLTVVADPNDKRVSDVARACLVALGSQLLSLKKQILHFDRMIMVWHRSSATSKRLNYIPGVGPLLATALVSSVADPRAFRSGRNFSAWIGLVPKQHSSGGKDRLGSISKQGDRYLRSLFVVGALSVIRYAKLHGTKHRPWLTALLARRPTKVAAIALANKLARMAWAMMAKGERYRQPAALAA

SEQ ID NO: 255995 - protein, 341 aa, unidentified
MPIVTIGIDLAKNVFAVHGVDETGKAMLIKPRVPRDQLAILISHLPACLIGMEACSGAHHWARMFQQHGHTVKLMAPNLVAPYRMSGKRGKNDAADAAAICEAVTRPSMRFVPLKDEHQQATLCLHRTRQGFVEERTATYNRLRGLLSEFGVVLPQSPEKLRRYITEHLDTLPGWAKRSISDLLEHAGHIEDRLLEYDRAIAEIAREDVRSKRLMQLRGVGTTTASALLASIGAGHDFRNGRQVAAWIGLTPGQYSSGGKARLGSITKAGDAYLRGLLVNGARAVIANLGEKQDRFSRWVRTLVERRGYWRAAVAIAAKNARLAWASLKYGDDFKLEPAAD

SEQ ID NO: 255996 - protein, 398 aa, unidentified
MKTTDRTAAIGLDVHRRFSTVTARNAEGKIAWRQRLEHEGRDDLRKHLETWPRGMPVILESSFGWEWVCEELEQAGLEPQLASSRKVAAWRNARGMAKSNRTDADLLSELGRQTDRWWQVWLAPPEVRDRREWMRYRISLVRLQTGLKNRVHAILHRHGILHDFADLFGAPGRRMLTRLAHDAENPRLRESGRATLKGYLQLLDHLRRQIAAVTRTIYRQLRATPEAERLQGLPGVGPILAHTILAEVGDFGRFRSAKHLASYSLLAPRAFDSGEETDEAPKGRHVGHVGRRTLKWAWIEAGHGAVRRGGRFRAIFDRYTDGGKRNRNRGYILVGHELCRTAYAISKKETEYRDDPPARPGSSKKGAVSQQRDRCRRARSQNSRPGTGQPDTGLVIVG

SEQ ID NO: 255997 - protein, 341 aa, unidentified
MKVSTISIDLAKNVFQLMGFTEANKGVFNKRLNRAQLKHFMQMQPPCRVVMEACYSSHYWGRLFESIGHTVHLIPAQHVTPFVRGNKNDSNDTLAIFEASRRPFIRFVPIKTQTQQETLMLHRLRERLLKTRTAVTNQLRGLLADIGLVFPLGIPAFNESMQALSLDTTLSVSVQWLVNDVYQEFKTLNLRIKAIEKQLKTDIEANSLGQILLSIPGIGYLNASAFIASIGSGQAFTSARDFAVWLGITPKQFASGNKSVMGGISKRGDQYLRKQLIHGARAIIVHARKKHDALSVWITQLSARKPFNCTAVATAHKLARIMWTLLQKQCHYTPQPVKVIT

SEQ ID NO: 255998 - protein, 382 aa, unidentified
MTARREGEIGVSMVGRQKRCANNPGDVVEEVVLGVDTHLDVHVAVALDGLGRRLGELTVPTTEKGYEGLICWAEGFGRVRGAGVEGTSSYGAGLTRHLRAVGIRVLEVERPKRRHLRRKGKSDSRDAEAPARTLLAGETAGEPKSADGRVEMIRVLRAARRSAVKARTQAANQLRGVRVTAPEALRRRLRSFSTKELVAVAARFRPGGNPGGVEEATRFALRSVARRYQALSEEIAVLDVQLDRLVAKTVPELTSLPAIGTDHAATLLMVAGDNPERLGSEASFASLCGVSPVEASSGKVVRHRLNRGGNRDANRALHLICVVRMRIDERTRRYAARRASEGKSKKEIIRCLKRYVAREVYRVLTTSVDFADSPRKRDASPL

SEQ ID NO: 255999 - protein, 334 aa, unidentified
MMVMAAIDIGKSVLQAASLDDVSGVAGEARFAADRECLASWVDGFEGGLGVVAIEATTGWKWVANELSARGVEVVLVDPGEAAARKGRKRRAKTDRLDARFLLSLLASGMLPRAWMPPAEIQELRALTRTRKALVDARSGMAERVQALLMHEGWPCQRGRLLTLSGRRWVDGLELEPAIRLVLDSLLGVIDDIDRGLEPLDHELRQRAKQDPRLRALQGIYGVGPIVASHLLAEIGDAHRFTRARQVVRLSGLDPVVLESGETKRRGRLAKAGPPLLRWALVEAAKHGRRSSSPDHERWQRIQKRRGSKIADITIARTIAGRALNVLRDLPEAA

SEQ ID NO: 256000 - protein, 355 aa, unidentified
MSQEKYIGMDVHQATISVAVLDSRGKLIMESILETKAATILEFLQGLHGSLSVTFEEGTSAAWLHDLLKPHVTRLVVCDPRKNALLKDGSKSDRIDARKLAELLRGNQLTSVYHGEHGMRTLKELGRSYVTITQDLVRVMSRIKALYRSWAIPCSGTSVYAPRHRAEWLGKIPEPGVRLRAERLYQQLDLLQPVRQQARRDLLTESRKHHAVKLLRQIPSIGPIRAALLVAQLQTPHRFRTKRQLWAYSGFALKTHDSGEYRYVRGKLQRNQERMTVRGLNNNHNPDVKNLFKGAAISASTHPGPLYDFYVALLEKGMRPTMARLTLARKIASITLTIWKKGADFDATQLHRQEA

SEQ ID NO: 256001 - protein, 361 aa, unidentified
MPTLVKDTPRGFDGQTIYIGIDCHKKSWKVTLLSDNFELKTMSRDADAQGLAKYLQKHYPGACYKAVYEAGFNGFTPCRTLRSLGIDAQVVHAADIPTSQKDRQRKNDTVDSRKLANTLRSQLLKGIDVPDRHLELDRSLLRLRYSLTKDLSRVKNRIKSLLFQYGISIPEELDRGSKSWTKAYVAWLESEMVKYPDLKFIIQAHLDYGQYLKVKKKEVSSRLRALAKSNNYRENVLLLQSIPGIGVVTAMTLLTQIGDIHRFTNFDRLCGYFGLMPKVHASGDRESSSGISSRGRTNVKNTLIEAAWSAVRSDPALTLRFTNLSKRMKKNKAIIRIAKNLLNRIRYVLIHREPYKYGVVC

SEQ ID NO: 256002 - protein, 451 aa, unidentified
MESSFAGVDWASEKHDVVVQNAAGEEVLAASFAHDEAGLRSLCRQLVRLNVELVAIERPDGVLVERLLDAGLRVLALHPNQVAATRARFRASGGKSDRFDAFVLCELARTDHHRFRVLEPDSDQTKALRALCRGREDLVQTRVALTNQLRTELDRFWPGAVKIFRSLDSPVALAFLQKYPSPIEARTLGEQRLAAFLRGQHYSGGKSPRELLRKLRSAPEGRAGEVEINTRRQLVLALVALLKPLVAQIKQLERHIAQALAEHPDGELFRPLFRDRKSVITAAELVSEIGDCRGRYPTGEALAGDAGQAAVAIESGKRKAACYRWACNKRLRDAVCTLADSTRHWHPWAADHYARQIARGHDHPRAIRSLGRAWCRVLWRCWQDRTPYDPARHRALQQHVSVTIPGASGPRPDTAATQRMLGAAVTQQGGPNGPSATRLTASRHPLKHSGG

SEQ ID NO: 256003 - protein, 359 aa, unidentified
MSEITRGFIVRVGVDLAKRVIQVHAVDATGRVVVAKALQRDAFMAWCGQLPPGCLIAMEACSGAHHWTRKLITMGFDARMIAAQFVAPYRMQGIGGKNDANDAAAVCEASSRPMMRFVPLKTPQQQAMLAVHRLREGYKTDRTACINRIRGLLTEFGMVFAQSPDALRKVLGDVIEDATNELPALMRTALQQAHLNWLELECHIAWCDERIAAHVRVDEQAKVAAQLCGIGPVSASALVASVGDFTQFKSAKQFGSWLGLVPRQNSSGGKTSLGKITKRGDEYLRTLLIQGAKSAVLSAERRSDRISRWSVQLVERVGWQKAAVALANKNARILWAVLSKGKVFDSNYVSVVPVTAAVA

SEQ ID NO: 256004 - protein, 421 aa, unidentified
MKPQAPEAFAAFIGLDWADAKHDVCLQAAGAERREFLILEHRPEAIDAWVQTLRTRFHGQPVAVCLELNKGPIVSALRQYDFLVLFPVNPFTLAKYREAFTPSRAKDDPTDAELQVELLLKHRDRLTPLAPQSPTMRALAQLVEHRRRLVGDKVRLTNRLTSALKNYFPHVLQWFAEKDTALFCDFLSRWPTLKAAQLARRTTLETFFRAHHVRAADVIDSRIQAIKSALALTTDEGVITPNVLLVHALVAQLRVTLQAIADFDKAIAPLAQGHPDFPLFDALPGAGAVFAPRLLVAFGEQRERFTSAADLQKYAGIAPVTERSGKKSWVHWRLQCPTFLRQTFVEWAAESTRHSFWAQVYYQQQRDNGKAHQAAVRALAFKWLRILYRCWQDRTPYNESVYLNALNRRGSSLMQNLAKES

SEQ ID NO: 256005 - protein, 394 aa, unidentified
MIYAGVDIAKTDHVIGAVDERGAEVCRPLPFKNTEAGLERAVAWLEGLAGSPSDVVVGMEATGHYWMACYSFLVARGYSVAVINPMQVKAVRKLKKLDKVKNDRIDAWLIAETLRIGQYDETRLATDEVASLRSLSRYLQSLRGMAAELKTQCVCLMDAHFPEYAGIFSDMFGAGSRAVLSKSPLPFELARRRADSLARDIAEASRRGGKSAGYAARIKAAARSSIGVRLGQEAASFQVKSLIRQIEFADSECAKVEARVRALLDEVEPLVLTIPGVSYATGAQIVSEIGDVSRFRNASALVSYAGLNSSVSQSGQFDSGGGPITKHGSPYLRRALWLAANRARQYDPGLRAFYDKKRAEGKPHRVAVTAVARKLCHIVFAVMRDQVPYDPGRE

SEQ ID NO: 256006 - protein, 342 aa, unidentified
MNFIGLDIHKKTISYCVKDNSGKVLSEGKIPATRQGLQEWIRTLAKPWTVAMEATMFTGWIYDYLRPHAAAVKVAHPLMLRAIAVAKKKNDRIDAGRIADCLRCDFLPQCYMAPMEIRQRRRTLRYRKLLVRQNVQLKNKIAQLLMESGVTYNKEKLHQQGYFHQVLPANQEIDPSVWPLLKLTREMIERTQKTERALLRSLEADPLLAARVERLMTIPAIGHVTALTWVLEVGEVERFHSVKQAISYCGLCSGEKTSADSSRRMPISKQRNRHLQTVLLEAAHLAPRLNPELAVLYEREAAQSNHNQATIAVARKLAAYLLAIDRGERAFVTHQVHSSVAA

SEQ ID NO: 256007 - protein, 343 aa, unidentified
MVHYVGLDVSLKQTSICVVNQAGSVVREDVVDSDPEAIDAFVRSKAPGAVRIGLETGPTSTWLWTELKRLGLPVICIDARHAKAVLKMQINKSDRNDAAGIARIMQTGWFKQVRVKDLDSHSVRALLASRALLVKIKRDLENQVRGLLKNLGLVIGRAKFNVFAVRAEELVEGRPELTAAVKPLLEARKAIEQQVDDLDRKVLKLARCDTQVRRFMTAPGVGPITALCFKATIDDPTRFRRSRSVGAYVGLTTRRHASGEIDWSGRISKCGDAMLRMYLFEAAGVLLTRVPKWSALKAWGTRLVKRNGLRKAKVAVARKLAVILHRMWIDGTEFNWSTKKAAA

SEQ ID NO: 256008 - protein, 409 aa, unidentified
METIRQRGCGLDVHQASVVACLLIHQVGRKVKKLIRTFGTTTRDLLALRDWLQSEGCTHVAMESTGVYWKPVYALLEGAFEIVVANARHIKNLPGRKTDVKDAEWIADLLCHGLLRSSFVPPKPIRELRDLLRYRRKLVESRGAERNRLLKLLETANIKLSSVATDVFGASGQLMLDALLEGVQTPQQMAELAKGRLREKIPQLQLALEGRLEEHHRFLLRLQRRRLQQVEADLAELEKHLTDKLQPYASQHTLLMEIPGVDRIVAATLIAELGIDMSVFGSAPRAACWTGICPGNDQSAGKRRSGRISQGNVHLKTALVEAASAAARAKGTYLREKFFRLKARRGYKRAAVGVAHKILIAAYHMLDKQVSYNDLGDAYLDKLSTKNLSRSLVQRLERLGFHVTLTAAA

SEQ ID NO: 256009 - protein, 391 aa, unidentified
MTILVGIDVAKDKHDCFFMNSEGEVLAKPFTIFNNKEGFDFLYEKIQSVSSSDNIKVGLEATGHYSYNIIGFLLNKGLATFILNPLHTNLYRKSLSLRKTKTDKIDSKTIAMMLLSDVSLKSYSDISYHNEDLKSLTRYRFSKVEERAKLKTSLSRLAQILFPELEKLVPTLHMTSIYQLLEEFPSASAIASVHLTRLTNLLSKASKGHYDRETAIKIRDAAKNSIGSNMPAKSLELKHTIKLIRALTIDIGEIEAEISKMMDMIASPITTIPEIGRNIGAMIISEIGDFSRFSSPDKILAYAGFSPSIYQSGKLDNCYAHMEKRGSRYLRYALFHAAKLVCHWDKTFADYLAKKRAEGKHYYVAISHAVKKLVRVIFHIEKTKQAFLKAS

SEQ ID NO: 256010 - protein, 429 aa, unidentified
MNSTRNKKIEQVKETTMIVGIDIGSEKHYFRAFNWRGIELTRKPVAFSNSMEGFNSFYNTIVELIQKSELEEALVGIEPTGHYWFDLGQFMGEKNIKFVMVNPHHVHRSKELDDNSPSKNDRKDPRVIAGLVRDGRYFYSYMPTGVYAELRNASNRRFVLVEEQTRAKNRLQKWIAVYFPEYKGIYTRIDAKGGLLVLKQAPTPEEIVRLGVEGIIKIWKDAKLRGNGHKKAMLILNAAMKSIGLKAGLTEARMEIQDLIEDYELQTKRLERVNDLIKELCQQIRYADKLLEIKGIGITTIAGFIAEVGDITRFDSAKELQKLAGLELVADSSGKHNGKTKISKRGRKRLRYLLFEAAISVVGKNKEFKEIHRYYTTREKNPLKKMQSLIAVACKLIRVFHVILTKGISYDASKMLKDIQHLGEPLKAA

SEQ ID NO: 256011 - protein, 364 aa, unidentified
MHRNRTSVGLDVHARSVVACGLDGQTGELFERRLCPDHNEIISWIRGLPGPVGVTYEAGPTGFGLARFLTGQGIDCQVAAPSKLQRPPGDRVKTDLRDARHLARLLHLGEIVAVTVPSVEQEAARDLVRAREDVRGDLMATRHRLSKLLLRQGIVYFGGTAWTGTHDRWLRAQRRGSVFATAGLGTAFDIAYDTLLATTARRDRLDAAIAEMAAASEFTPIVTRLGCLRGIATLTAFGLAVEIGDWHRLTGRSIGAYLGLVPTEYSSGSSRSLGPITKTGNGHARRLLIEAAWHHRPPNRTGAELRRRQDAASPAARDRGQRANRRLHDRWVQFNLRRKRAVVANTAIARELAGWCWSLAVLDD

SEQ ID NO: 256012 - protein, 355 aa, unidentified
MESTKYVGLDVHQEATTIAVMNSAGKLIMESIVETKAITIRQFIQGLHGDLHVTFEEGTWAAWLYDLLKPYVTKVIVCDPRKNTLLKVGNKSDRIDPKKLAELLRNGALSEVYHGENGVRTLKELARSYLTISKDLGRVMNRVKAVYRSWAIPCAGTQVYALCHRSEWLSKITEAGVRRRAEHYYQQLDALQTLRREVRKDLLLESRKHNATKLLRQVPCIGPIRAAQLVALMQTPHRFRTKRQLWTYSGLGLETRDSAQYCYVEGQLQRSKKPQQLRGLNSNHNHDLKNIFKGAATMASVSAGPFHDFYQALLTKGMRPTMARLTLARKIAAITLIVWKKGVRFDPQHLKQQAA

SEQ ID NO: 256013 - protein, 410 aa, unidentified
MEVLHERCAGLDVHKDTVVGCVRISEGGRVGREVRRFATTTRGLLQLADWLREARCTHVAMEATGVYWKPVWHVLGEEFELVLANPAHIRNVPGRKSDMNDASWIADLLAHGLIRSSFVPPQPILELRDLTRSRKQLTRELVQHTQRVQKVLEDANVKLASVVSDVVGASGRRMIRAIIAGEDNPHKLAALGDPRLAASRQTLAEALHGKITRHHRFLLRQHLQMIEQLEKMVAEFEAQIEAALAPFRAAAERLKTIPGVGAIAAQVMVAELGVEMSQFSTVGHLRSWAGLCPRLDESAGIVRSRRLRKGAPWLKPVLVQCAWAAIRSKKHNYLRAQFFRLRAHRGPKKAAVAVAASILTSAYFLLRDQVPYRDLGGQYFARRDADRTAQRLARRIRELGYQVEIRKAAA

SEQ ID NO: 256014 - protein, 485 aa, unidentified
MFGGGIMQAAEGTMQTTIPGVIACGMDIHKDTADVFVRIGDGSPDGQVIYRKFSTMRKSLFELRDWLISLNCYKILMESTGVFWMPIYWILEEVSGMNVGVGNSRDLKNAPGRPKTDKEDAKWLSRLCMFGLVLKSFIVGRPFRALREYTRYHKKLVQERSRQINRIEKLLQMNGFKLSSVLSDITGASGIRILTKLAEKGELCASDIRPELHKRCKSTPEEIECAINGNMKISSRMLLKMQIKKLERCDREISEVYDSMFILSEEYTSEIRIIASIPGMSTLSAIYIIAEIGTELSSFKTSNHLTAWAGLAPKENQSASKARASKTKKASQYVKSLLIQCAWAASKTRNTRLSLWFWRNKSRLGDKKAITAVARKLLCYIYAMLKSGKLYDSNPDVAYADNIGALKLVAAHQIVGRHTKETPLLQHCNNNNDFSHSHDGTCDESVLAVKQVDIEKQFKNRIESPNVTTAPKKRGRPKKTLQTSI

SEQ ID NO: 256015 - protein, 408 aa, unidentified
MGRAAEVVAPSSSIRTDGDCPVAQVNDLSRSLTAFDPISTLVVVVEMSKASWLVSGAVPGVERQPLKKLEPDATALLRLIERWRNEAVRAGRPISRIALAYEAGRDGFWLARWLIARGIEAHVIHSASVAVSRERKRAKTDRLDAAMLMRVFLGWLRGERGHCGMVAIPTMEEEDARRPSRERESLVNERSRITNRMKSALARLGVRGFKPHLRKAPERLAGLRTAEGTGLPANIVEEFRRDMARLALVREQISSIEKTRAERLERAPDTGPHAMVRLLARVIGIGIETADMLVREILSRKLRDRRAVARYAGLTGSPDESGLKRREKGLAKAGNARVRRGVIQLAWRFLMFQKDSALARWYRMRTEGPSGARKTTMIVALARKLLIALWRLVTTGEVPDGVELRPAA

SEQ ID NO: 256016 - protein, 368 aa, unidentified
MSSMTLTRPVSAIDEGVPLAEIVDVVIGVDTHEDFHVAAVVASGTGAVLGRLVVEATVDGYEELVEFADEQAGLRAWAIEGTGSHGAGLTRHLEQTDELVVELDRPVRAKRRGGAKSDAIDAVRAAREALARPRLGTPRAGGQRQALAVLLAARRSAVAGATDTERQVRSLLIAAPDQLRSRFAGLKLPAIIATASRLRAPTAADEVTTLTITVVRDLARRARTLRAEAAKHEKDILRLVKAWRADLLEEIGVGPIVAATVLCAWSHPGRIHSEAAFAMLAGVAPIPATSGKTNNRHRLNPYGDRRLNCAIHTIALTRQRCHQPSQTYTERRTSQGKTPREIRRCLKRYIARDLYRLLENGSQPLDQT

SEQ ID NO: 256017 - protein, 388 aa, unidentified
MIYVGIDIAKLNHFASAISSDGEELIKPFKFTNDNDGFHLLISKLDPLDKYSLIIGLESTAHYGDNLVRYLVAKNYKVCVLNPIKTSTLRKNNIRKTKTDKVDTYIICKTLMVQESLRFVTFYDLDLMDLKALGRFRQKTIKQRTRLKIQLTSYVDEIFPELQYFFKSGLHQKSVYALLKEAPTPEAIASMHMTHLAHLLKVNSHGRFDKEMAQHLRVLAQKSVGANDSSLSIQVTHTIQQIELLDSQLERVEAEMTEIMKFNDSVIMTIPGIGYINGGMILGEIGDIHRFSSPNKLLAYAGLDPSVYQSGNFQAKQTRMSKRGSKVLRYALVNAAHNVVKNNATFKAYYEAKMAEGRTHYNALGHCAGKLVRIIWKMMTDNVEFNLD

SEQ ID NO: 256018 - protein, 366 aa, unidentified
MGRYVGLDAHSKRCVYVIQDENGRIVGEGSVSTTVDGLSSMRSRYELSAGTRVALESGTMAFFVARRLSELGLEPLVVSAQEVRAKAIRPNQKSDRRDALELCEGLRRDSYRSIVHVPPEPIERLRETLGRRRHFVRLKTMQVNAVKRLLRAAGLQELGRRLQSSQGWDKFLAAVAIDPTLHAFCQAHHALWRCADEQTATLEQSLREQQQPFQREVERLQTVPGVGPIVALTALAVFSDVSRFPTAKHAASYAGVVASTYDSGERIQHGHITRRGSSELRSMLCEAAHHAWRPSSPFNPYFASLCVRRGYKMAVVAVAHRLCRILYAMLKHETDFDLNMLGVETGRFERTTVRQYRRKTSVTASA

SEQ ID NO: 256019 - protein, 328 aa, unidentified
MSKERFYVGIDVGCSEVWVVAGKSKARKFSHNDQGVKQLYRWAKEKSGELLLHFCMEATGVYSQSLAVRLLGCGRCEVSIVNPAQIAAFAKAQMRRSKTDQIDAQVIWAFAQAQQPRCWQPERQAIQELAALVAQADALRKTQRSWKNRQHAHQYYPSLPRTVQQTTAKVDQMLKQQLEKVQQEIHRLCQADTELKRDLDLLCTIPGIAELTATRLLAYGKSALTERSPKELTAHAGLAPRHRQSGTSLNGRSRLSKQGDARIRCTLYMPTVAALTFNPIIRYHYQRHLANHKPRMVALMACMKKLLLMAQAILISQQPFNPNLIPLT

SEQ ID NO: 256020 - protein, 320 aa, unidentified
MRNAVGLDISKLTFDASAMVGKTEHSAKFDNDSKGLDQFSDRLKSLGCQNLHICMEATGNYYEEVADYFAQYYSVYVVNPLKISKYAESRFKRTKTGKQDAKLIAQYCRSAQESELVKRQKPTDEQYRLSRMTAAYAQIKSECAAMKNRHHAAKDEEAAKAYAQIIKAMNEQLEVLKEKIKEQTEKPNCKEGVKRLETIPAIGRMTAAVLFHHLTSSKFETSNKFAAFAGLSPQQKESGTSVRGKGKLTKFGNRKLRAVLFMPAMVAYRIRAFPDFIKRLEEKKKPKKVIIAALMRKLAVIAYHVHKKGGDYDPSRYKSA

SEQ ID NO: 256021 - protein, 378 aa, unidentified
MNRIIKIGMDVHTTNYTLCIFEPSFEHDGTVHCITQVKPEVKNIIHIIETFKKKHENEELNIVCGYEAGCLGYSLYHELKEKGIECVILAPTTMKTEKGGRKLKNDYRDAKMIAECLAYGGYSAVHVPTELDNSVKEFIRMRDDIKENLKSIKQQIIAFLTRNGKQFNGKSYWTRKHIDWINTVSFSEPLLQDTLKEYMIEYNHLCDRVETLDRQIEEISVKEEYVEKVQQLQCLIGIKTHTALSLIVETSDFNRFKKGNMYSAYLGLIPGDDSSGGHEDKLGITKAGNNHLRRLLVEAAQGYTRGRVGFKSKDLKSRQEKCSSEVVAYADRANERLRRKYYRMTLRGKKFNVAKTAIARELACFVWGIMTDHIDLCS

SEQ ID NO: 256022 - protein, 394 aa, unidentified
MKLVGIDVGKNSHHFCVMDKETGEFNVAPSSFSNNKEGFDFLINSLKPYSKKSILIGMEDTGHYHVALLKFLLSNGYTVALINPKTTDLTRKMEGGITKNDKLDTITICDVLDTPERKKQYRITKVDRFDLYEQRQLTRHHHNLKEELNVYCNRLQKSIDLVFPEFNTLFSSKYSIVYMNLLKTFGSAEAIASTDIRTIRKCFEIKGRGNRISLTPEKLKECAKNSIGISSEVETIQIKHLVSQITLIKEQIAEIDKKIEEFSITNNSPILSIPGISHFSGTSILAELGDIGNYSKPSQIIKFAGVAPYHYESSQYNAQHTGITKKGSKYLRKTLYQIILPVIKYNPVFKKYYLLKISQGKGHRCAQGHCIRKLLRIIYHLLETGQSFDPALLR

SEQ ID NO: 256023 - protein, 353 aa, unidentified
MQTQSKRIDFSGQNFYCGFDTHKKTWTVTIETDEIALKTFTQNADADLLVQHLRKNYPGGNFIAGYEAGYFGYGIQRKLESMGVHCLVINPADIPTTNKDKDQKRDPRDSRKIAKALKNKEVSTIWIPPVALEEDRQLLRTRYALAKDQTRTKNRIKAFLQIHGIKYPEIFSQSGSHWSARFVKWLQAIQLTEPSGTEALQSFVRHLQFLRTEILIVSRKIRVLTKSSRYEKTYNRLIKIKGIGMITAMTLITEIGDINRFKNPDNFRSFIGLIPSSRSSGEKEYQGRITNRANSHLRYLLVEATWIAIRNDPYYLHHYKEYRKRMKDNNALIRTAGKLANQIFYSMKNTTEK

SEQ ID NO: 256024 - protein, 351 aa, unidentified
MSHKTAATVAHTIGIDTGKNTLHLIGLDDQGAIVLREKIARGRIAARLANVPRCLIGIEAGMATHYVARELGALGHDVKQVPPAYSKPFRQGHKNAFRDAHAIAEAVQRPSTRCVPVKTDDQLDLQALHRVRSRLVGQRTAVINQIRGFLLEHGIAVRQGLRFLRQQLPDILAKRSDVLSPRMIRIMEDLSGDWRRLDERIEHITKEIEVLAGTDVNCGQLMTVPGIGPIVASATVAAIGNGAAFARGRDFAAWLGLVPKQMSTGDRTILGRITKRGNRYLRMLFVQGARAILLRPKSWVKHSFGPWLTTAARRLHRNILTIALANKLARIALSVLIQGRSYETRIVPAAA

SEQ ID NO: 256025 - protein, 371 aa, unidentified
MNHVTSIGLDVHARSVTAVALDSITGEVRSQKFGYSPAEIAGWILQLDSPKAVYESGVTGFHLVRELREMGVDCIVGAVSKMHKPASDRRKKNDRNDAEFLARQLMAHNIVEVFVPDVETEGARNLSRALEDVRDDLTRAKHRLTHLLIRWGYIWNELNEDGKRRGSWTHAHWEWIRGIELPDAAARESLDYYISEVRHIESQKKAIEKRVAQCASRPRWRDRVEALRCMKGIETVTAFALTVEAGVFSRFDSARAFASWLGLVPSEHSSGERASRGGITKAGNSHLRKLLVEASWHYTRATKERKRSLCDESVPASISNHAAVGVKRLVERRRHLSCELRKRPVVANVATARELACWIWALGRMSEGALA

SEQ ID NO: 256026 - protein, 338 aa, unidentified
MGIVPVYVGLDYHDETIRVCVLDEDGVVLGNRNLANDPGAVRDFVHRLGGVVRGVAIEACCGAADFATELEALTEWTVKLAHAGAVQRLKQGPDKTDHGDAWHLANLLRVGYLPEVWLADEDTRQLRRLVRYRQGLVTERKQIKLRIRALLREERIVNTSGKNPWTKAWLAWLPTAPLGEHSRWVLEQELRRLERIEVDIVQVEGRMEEATQEDPVMVKLLEQPGVGLITAATLRAVVGRFDRFRSGKQLSRYCGVTPCNASSGKRQSDAGLIESGHDILRPMLIQLAKRLPRHEPRWRELHGKLRKTKPANVASAAIANRWLRRLYHELVSVKVQAG

SEQ ID NO: 256027 - protein, 461 aa, unidentified
MQQPIEVQVDEHEQIVERVTAIDVAKASGMVCLRVPHESIPGRRVTKVWPVAATTAALVELGDHLRCERVQRVVLESTSDYWRPFYYLLEAAGLTVWLVNAAQVKNVPGRPKTDKIDAVWLAKLAERSMVSPSLVPAEPMRQVRDLARARFDLVEDRTRVKQRVEKLLEDALIKISSVLTDIHGVSGRAMIEALIAGQRSPKALAELAKGRARTRRAALTEALEGRFTDHHARLARMLLDQLDDLSARIDQVTDLLDAAITAQPTASATAGATAGATASATATTGADEPAQQPTACGYTSAVTRLCAIPGGGPDSMRAVIGEIGLDMSVFGTPARLCSWAKVAPRTVQSGRKTGRARTGKGNPYLKAALAQIATGAAKTDTFLGERYRRLIKRMPKAKALVALQRSILVIIYHLLADPTAEFTDLGADFYQRRIDRARRTTHLLRQLQALGYQVQLTEDAA

SEQ ID NO: 256028 - protein, 380 aa, unidentified
MSSFSPSIIWIGMDVHKDTVMVAVFRDQRSEPEVVQQLPNDPRKLRRFFERWASRGEIRSCYEASGAGYVLHRDITEWGHDCEVIAPSLIPIRPGERRKHDRRDATQLARLYRAGELTPVRIPSADEERVRDLVRCRQCFQREILRSRHYVTKFLARRGFVYREGTNWTQRHWTWLRGLLRDGGLERADRTAFGEYLALLEYKISRREDLDEQIEKLASGPHYRPAVERLCCFRGISTIAAMTLVTEIGDWRRFERPGQLMAYLGLVPSEHSSGERHRRGPITKAGNSRCRHVLVQAAWSYRSRPTVGAELKRRQQGQPPEVVAHSWKAQHRLHKLYHRIAAKKSSRIAVVAVARELVGFLWAVMQDLEHEQLIPVREAA

SEQ ID NO: 256029 - protein, 320 aa, unidentified
MMAQKDRVVVGIDVAKDKVDACIRSLSLRQTFPSTPQGHRQLVAWLRKHKVDKAAMEASGGYERDWAKLLRQAGIEVRIVDPKRVRSFALSAGRLAKNDAIDAEMIAWFAETFSEAPGQTHDAAHEELVALVKARKGLIDVKIRLQSQNEHAVPGPVQKAHARVLKSLAAEIAKLEAAISAMVKATPEFAERAEIIESVPGFAEATSATLIAGIPELGQVSDDIAAALIGVAPYDDDSGKRRGERHIKGGRRWVRNAIYMPCLGAATQNNPVLKAFYQRLIAKGKEPKVALIACMRKLIVILNTLIARRQKWDPSRYALN

SEQ ID NO: 256030 - protein, 344 aa, unidentified
MEIMTIGLDLAKSVFQVHGVDAAGKTVVRKALRRAQVLTFFSKLPPCLVGIEACGTSHHWARELIKLGHDVRLMPPAYVKPYVKRGKTDAADAEAICEAVTRPTMRFVPIKSPEQQAALSMHRSRDLLVKQRTQLVNMMRGILAEFGIEIPQGLHRALEMARAIVGGEAPDVPSDAVKVVARLSQQALDAHAQLREIERDLLAWQRRSDLATRLLTIPGIGPIGATAIAASVTDPRQFRSGRQFAAWLGLTPLQSSSGGKERLGRITKMGDKYLRKLLVVGMTSIVRRAKNKPQAVDPRLLALLARKPMRVVTVAMANKTARIVWAVMVRGEVYKERHVPALAA

SEQ ID NO: 256031 - protein, 409 aa, unidentified
MEVLYERCSGLDVHQATVVACVRRPGERRPRTSEVRTFGTTTGELVALADWLMREGVTHVAMESTGVYWKPVFNILEERCAVVLVNAQHIKAVPGRKTDVRDCEWLAQLLEHGLLRASFIPPAPIRELRDLTRHRTVLVQQRANEANRLQKFLETANIKLGTVATDVLGASGRAILRALISGERDPTRLAELAKGALRRKRARLAEALQGRFTPHHAAVLGEVLAHIEYLEGAIERFDRLIAEAIQPYTDQVGHLQSIPGVDRDAAETIVAEIGVDMTRFPTAAHLASWAGICPGNYESAGKRQRGTTRKGNRWLKTLLVECGWGAGRARQTYLGAQYARLSRRRGRKKAAMAVGHSILVAAYHIIRDRVPYRDLGPDHFDRLASERLTRHYVHRLEQLGHRVALDPAA

SEQ ID NO: 256032 - protein, 346 aa, unidentified
MKITLTGVDIAKSVFHLHAVDRHGQCQWQKKLKRREWVDELCEQVPEGTTVVMEACAASAHHWGRELQRRGYHVQLIAAQFVKPYVKSNKNDRVDAEAICEAAVRPSMRFVAVKSIKQQDAQATHRIRSELVKQRTALANQIRGLVGEYGVIAPVGIAQLRRALPCWLEDAENALSFQFRIELAELHEDLVRLDEDERVDVLDKRIAQQAKENPVAKRLLKLRGVGPLTATALAGALGDGGAFSKGRDFAASLGLTPRQHSTGGKDRLLGISKRGDSYLRKLLVHGARAVIRFAKNRDDSLSRWVNDLTARKHVNVATVALANKTARMAWAIVHGGTEYDPALAAG

SEQ ID NO: 256033 - protein, 336 aa, unidentified
MYYVGLDVHSRQSTFCVLDDHGAKVLSRTVHGRWDKVVHELGKIKRPFTVCFEASTGYGPLHDGLRRVADRVVMAHPGHLRLIFGSKRKSDRVDAAKLALLLYAGVIQPVHVPCSQVRGWRRLIEHRRALVAERTRVKNRTRALLRSVGVRPPKGLWSASGIAWLRALAFTEPGDALGRDLWVERLASLDRMIRRVEDELDRIGGSHPGVTLLRTIPGVGQRTAEAVMAAIDQPKRFGKNKAIGTYFGLVPCQDASAHVNRLGHITKDGPDTARGLLVEAAWQGVRHSARIRARFERVCKGDPARRKIAIVATAHYLSRVILAMLQTGETWHDEAA

SEQ ID NO: 256034 - protein, 408 aa, unidentified
MDLTTYVGLDVHAESITAAILSAENEKPEVLQLSSDLMKVRRLFRRLADKGPVRACYEASGAGFVLQRVLARDGFHCDVIAPSLIPRKPGDRRKTDRLDALMLAQLYRSGHLTPVHVPTEDHESLRRLLRLRTTYHQYCTATMHRISGVLRNHGFVFKEGKSTWTKKHRQWLACLRQNLTGPLQTALAMELEHLEYLETQQRTLDAGLESFASSPQFRIPTEALCCLRGVKTLTALTLLCEIDDIRRFASPRALMAYFGLVPSERSSGDKEHRGPITKAGNIHVRRLLVEAAWNNRHRAAADLILNRRRQGQPPAIVAIALKAQHRLYKKFWHLDQRKRCHYRRGQRTPRLYLGHLESTTTDNLLTPYIHREESTDRRMLVSSMRSQPACLEKAGSGRTPNDAALPLA

SEQ ID NO: 256035 - protein, 350 aa, unidentified
MIVNHYIGFDVHKKSVSYCVKIADGTIVEEGKLRATHEALRQWAGKRREPWRGAMEATLFSGWIYDTLKPFAAELQMGHPAMMKAIGASKKKNDKLDARKIADLVRCNLLPACYVAPPEIRELRQMLRYRNLVVGQAVRMKNKMAGLLMEVGAEYNKQRLHGKKYFRELLDTVQEVPDSVKDLLRLSRGAMEMFETTQQQLLVRLQKDLLLSKRVSMLKSIRGVGEVTALTWALEVSDPQRFSSVARAVSYCGLTSALDSSADKQQRGPVSKQRNAHLQTVLIEAAKLAPRWNPQLATVHAREVERGNRNRATLAVARKLVAYLLAVDKSGQPFQVHSPSTAETEVEKVA

SEQ ID NO: 256036 - protein, 354 aa, unidentified
MLDTTTFIGLDVHARSIKAVSLDVMTGEARCATFGYDAGAVAEWVRSVDPRARCVYESGVTGFDLQKRLSGLGVDCVVGAVSKMIKPSADRRRKNDRNDAEFLARMLSVGNVVEVWVPDDECEAARDLTRALEDARDDLSRSKQRLSKFLLRHGLAFDKRTPTGRRKGNWTRAHWSWIESIRFAEGADNDVLAYYVDAVRRAAEEKARLEGLVEAEARKPRWRKRVDSLRCLKGVDTASAADLVFEAGEFSRFRNARSFAAWVGLTPSEHSSGESDRRGAITKAGNKHLRKALVEAAWHYLTCSGRPKGLAKGQAPDRGARRHAAKGVRRLVERRESLLARGVHGNKANVAEEA

SEQ ID NO: 256037 - protein, 348 aa, unidentified
MRFYTTQHTFYCGVDLHAKTMYVCILDETGEIRLHRNLPCRPDAFLQAIEPFREGLVVGAECLFCWYWLADLCADEEIDFVLGHAYYMKAIHGGKSKNDRIDSRKIVALLRGGTFPVAYVYPRGMRATRDLLRRRLHFVRKRGELLAHIQNTNTQYNLAPLEGRLADAGNREGLLEHFGDQEPVQMSVAADLAMIDTYDQTIHELELFLAASVRDHDGSSYHLLRTVHGIGNILALTMVYEIHTIKRFPSDGDFLSYSRLVKGDRGSAGKKSKPGGGKMGNAHLKWAFSEAAACFLVANPKGQKLRDRLVKKHGKGKAMGVLAAKLGRAVYYMLKRKEPFDLDRFTAA

SEQ ID NO: 256038 - protein, 313 aa, unidentified
MMASQDVFVGIDISKDRLDVHVRPLGVGFSVSNEAAGYAALIARLRPLRVKRIVLEATGGYERALWLALSEAGLVAAVVNPRQVREFARAAGRLAKTDRLDAAVIAHFAETFAPRLGKPDPVADRLGEHVRYRRSLQDELVALEHQRRRLETPALRERADRRHAALRAEVKEIECEMRAIVDGDPAKKALFACLIALKGVGLVLACTLIANMRELGSLSRHQAAALIGVAPLNHDSGTRRGYRAIAGGRRRVRNVLYVATLSAVRYNPAIKEFYRRLSASGKPPKVALVACMRKMLVMLNGRVRDERAAAAIR

SEQ ID NO: 256039 - protein, 310 aa, unidentified
MEQRFVGIDVSKECLDVHIRPSGKAFAVARDGEGLAALIERLQAVKPALVVLEATGGFETTVAATLAGAGLPLVVVNPRQIRDFARSTGQLAKTDALDAAAIARFAEAVRPEPRPLPDDQARLLAELVARRRQLIEMMTAERNRRRQLSRPRLVKALERHLAALQKDLSEIEREIDTTVRGTPAWREREDLLRSVPGVGPTVARALIADLPELGSLGRKQIAALVGVAPLNRDSGKMRGRRTTWAGRAKVRATLYMAALVASRHNPILAAFYRRLLNAGKAKKLALTAVMRKLLTILNAILRDRTPWQNA

SEQ ID NO: 256040 - protein, 387 aa, unidentified
MSQLFDASKSLSSLEQDSTIIAVIEMSQAKWLVAAVVPGVERQPLKRLDADEAALLKLLHRWRNEAGQAGRQIKRIVVAYEAGRDGFWLARWLRVRGVEAYVIHPASIAVSREHRRAKTDRLDTELLLRAFLGWLRGEKRHCSMVAIPTVEEEDARRPNRERGNLVTEQTRIVNQIKAILTRFGIRTFRPTLRKAEEQLEGLRTAEGAPLLGNTRAELRRYLERLRIVREQIRAIEQGRLRKLATTPEKGPHAMVRLIARVLSVGVETADMLVNEVFSRHWRDRKAVARYVGLTGSPDESGKRRRERGLARAGNARVRCGMIQLAWRFLRFQKDSALAQWFQARTADGRGSTRKTMIVALARKLLIALWRLVTTGEVSDGILLRPAS

SEQ ID NO: 256041 - protein, 347 aa, unidentified
MNFYNNMHPYYCGIDLHARLLYVCIIDNAGLILVHKKIKDDPEALLKLLKPYTGDIVVGVECMHCWYWVADFCKEHTIDFILGHALYMKAIHGGKAKNDKIDSYKIAKLIRGGNFPLAYVYDKDMRATRDLLRRRTKIVRHGADLKAHVANTASQYNLPAHNVNLKNVCDREKMRYYFPDPVVQRSINLNMAILDCYHNELKPLEHYIEQMAKQHNPVHLNILQTINGIGRILALTIIYEIGDINRFSSVQKFASYSRLVKCKAESAGKTYGTQGNKIGNAHLKWAFSEAAVLLLRHNHNANKYLEKLQKRMSKAKALSALAHKLGRCVYYMLKKETVFDEAKFLKS

SEQ ID NO: 256042 - protein, 422 aa, unidentified
MLEETQDAEAIIERVAALDIGKAELMCCIRISADSTGGKRQQEVKPYSTMTRSLLRLADRLAELEVARVVMEATSDYWKPVFYLLEAHGFEVWLVNARDVKHLPGRPKTDTLDAIWLCKVAERQMIRPSFVPPPPIRRLRDLTRYRIDLVNARGAEKNRVEKLLEDACIKLSVVASDIFGVSGRDMMSALTAGERDPKVLAQLARSRMRTKITLLEEAFTGHFTDHHAFLLTRMLTRVDAINADIAAIDTRINEVIAPFASAVARLDDIPGIGPTAAAVIIAEIGIDMTRFPTPGHLVSWVRFAPGVKESAGRKKGNAATGHGNRYLARVLGEAAVGAARTNTFLGERYRRIAKRRGKKRALVAVGRSILVIVWHLLADPDSTFHDLGPGFHNTRTATDRQRRNHVRQLEALGYTVTLEPAA

SEQ ID NO: 256043 - protein, 273 aa, unidentified
MKQYVGLDVSQKETSVCVVDDAGRTVYEGRVKSDPGALTELLRKRAPHAERIGFETGAMASWLWHELRRVELPVVCIDARHAHAALSVRVNKSDRNDAKGLAELVRVGWYREVKVKSEESQRVGAILVARSRLVSIRRDIENQVRSIIKEYGFLFRRAIGLQFRNQVIELLGEDHHLRAVIDPLLSIHEQVCRQQDKFDDEVRHLAKSDETTRRLMTVPGVGVVTALTFRHTIDEPSRFRSASAVGAYLGLTPRRNQSGEADTNGRISRWGDR

SEQ ID NO: 256044 - protein, 414 aa, unidentified
MDVLVERCAGLDVHRDTVVATVRVPAEDGARNRRAQHTRTFATTTAGITALGDWLAEHEVTRSGMESTGVYWKPVYYLLEDQLEVWLINAEHLHNVPGRKTDVADSAWIAQMVEHGLVRPSFVPPPPIRELRDLTRHRRTLVEERTRVVQRLEKVMQDAGIKLTSVASALLTKSGRAILEALLAGQDDPDALTELARGRLRAKIPALREALAGRFRVGHHGLLVAQMLAHVDFLDAAIAELDTTLERAATPFAATLKRVCTIPGVSVRTAIMLLAECGADMTVFRTPAHLASWAGICPGNNTSGGKSRSGRTRHGSVPLRTALTEAAHAAARTKNTYLAAHHAQIRGRRGLPKAIGATRHDLLIAYWHVVHDQVNYADLGPDWAQRRRSTEHRTRRLVHQLEQLGHTVTLEPSH

SEQ ID NO: 256045 - protein, 334 aa, unidentified
MMNFQALGIDISKNKFDCALIRDIGSGKIKTKALPNRLKGFNQLTEWLYKNIGEDLSLLKVFMEATGVYHQALAEHLHEKGIAVYLLNPADSAHYAKYDSLHKTDKSDSQSLARAGIDRILNKKARQWQPAPAHIKHLNALLARLDALESDLQRENNRMEKAEFGRAPKEVIQSISSMQAGLQQQISTLKQEIEQHIDQHPDLKKDRALLRSIPGVGEVISLRMMALYHSKEFASASQMAAYLGLVPRKRDSGKHKGKAMLSKRGNSTIRAKLYLAAVVAKRWNPDINAHYHRLKARHKTEMQTIGAAMRRLVQICFGVLKNQCEYQAKITIAA

SEQ ID NO: 256046 - protein, 308 aa, unidentified
MVWIGIDAHKSSLAVAVIDELGRELACAEFGNEVSEHEALHAWVIGQAPGERRFGIEGAGWLARGLACFLLEQGEDVRDVRGTLTERERRRLRGAGKSDPRDALAIARVTAREELPRVRADSAARELKLLCDYRSQLQCERTRVANRLHVDLVTLPPGYERRAPTLTSSARLEQAEQLLEADEGVQAGLARRRIERLHELDAEIKQIGCEIRGRVRATGTGLVELVGLSDLLAARIIGEVGDISRIQTKDRFARINGTAPISASSGQQTPLPAEQGRQPPPQLRAAHDGAHPGADGPARPRLRRTPPR

SEQ ID NO: 256047 - protein, 400 aa, unidentified
MDPQIRVGVDVGCKAHQVGIAGPDGTIREEFTILHSQEGFREFFSRIERERCALDLPVAVAMEGFNGHGRPLDRMIQERGYRLYNVNNLKLARFREVFPGPAKTDSLDVRKILELFHLKDHLPMAKDVLQEVLPVPPENERLKRLTRRRRQLVREKARVVNRMQSDLQAVCPELLSITGSVDNLWFLRFLSSRDDLRKLARMRNKSVLEIPGIGKKYGGIIGEWQKRAKFSPDVEYVGPMIVSDARRILELLKEIATLDAAIEELSQESEMACRLDSIPGFGETTSAELAGEIGTIDRFDSEASLALYVGMCPLDKQSGQSHRTRTPRNVNTRAKAALMTAVARHIEKVPQSRAYYEKKRREGKKHNQAIRATGRHLVRVMWSMMKQGRDYELREATWPT

SEQ ID NO: 256048 - protein, 350 aa, unidentified
MNRIYIGVDFHARQQTICYLTTEGGEIQLHELKHQNKQEVRDFYSQFEGQVIVGLEASGYSPWFERLLEELGCEVWLGHATEIRRRARWRQKNDRRDAELILDLMLHDEFPRLYLPPLQSREVLRMLRYRQKLVKIRTMGKNSLQALALQSGLAKGSHLFTKAGQQELRAAVMSPAMQWQREQWLQLLDPLNQRLTETMLWLKQQSLDDLRIARLRTHPGIGLLTSLCLVHSLEPVTRFRNQRKVVAYAGLEPLERSSAERIRFLGISKAGSRILRYLLVEAAHVAVRKDEELKRFYQRLAARRGRAKAKTAAARKLLIRAFIMLRDEIDYAEFRRRAVAARLARQITKA

SEQ ID NO: 256049 - protein, 399 aa, unidentified
MSVNSSLEIRVGVDVGCHSHNVAIGLSTGQLLDEFDIPHNSEGFRLFFARIEKQEKKHDCPVAVAMEGFNGYARPLDTLVRGRNYRLFNVNNLKLARFKEIFPAPAKTDHIDARKCLELFQLRDYLPLAKDALLEVAATPLENDILKRLTRRRRQLVNERARVLNIMQGDLQAVCPGLLEITGDAGNLWFLRFLTSADTLTKLARLQRTTLLKITGIGVKYASNIQSWQKHAHFSHEAELVGEMIREDACRILDLHDKIQAMEAKLEDIANRSVIAQKIGTIPGFGAISKVELAAEIGTIDRFEDEGSLALYLGMATLDNSSGKQKGTKTPKHVNTRAKAAMMVAVDRHRKFVPESQRYYEKKRAEGKKHNQAVRALGRHLCRVIFKMLKQEKDYEIRK

SEQ ID NO: 256050 - protein, 342 aa, unidentified
MTNFNTKYQSVCGIDIAKNVIQIYQVNQDGECKNFQVKRKEFLQLFENREPSLIGMEACGGSQYWARELQKLGHTVNLMAPSAVKPYVSGFKSDRKDAIGIFNAMLAGVRKVAVKTEAVTDLATLLGIRARRLKARTAKVNMVRGYLMEYGIVMARGLRQFKNSIADSLLQLERAHASNMVKEEFKFLVDEVDKETEAILRLDREINSLAKQCKNFDHFLTALGVGPITAATMSVKLADPQVFKNGRQFAAYIGLVPQHYGSGGKNVNTTIPIKCNKELRGLLVQCAQSIRRTKNKSSWVTQIEERKPNSVVTIAVANRLARRLWAIASKGEDWKRMDINFG

SEQ ID NO: 256051 - protein, 422 aa, unidentified
MRRFIVALKIVYTICCGIDVHKSFVVACIASTNDNGVTTYKKRRFSTFTRDLRLLAQWLADNNCHDVCMESTGKYWIPIYNMLESTCKVVLAHPKYVKAIRGKKTDARDAKWIADIFKHDLVSGSFIPPHEIRQLRDLMRYRVKLTNFTTGEKNRAQNCLTVSNIKLDDVFSDVFGKSASAITEQLLLHPNGDFDVTPFIDGRCKTPSEKIQSAIDGLMCSEQALKLKVIRTHMDSLELCKANLESVILALAEQFRPQIELVMTVPGVQLFSAISIISEIGVDMSVFPTLKHLCSWAGLVPQNNESAGKKKTTRITRAGAYIKPLLVQCALAVCNSDKHPEIKSRYLALKKRRGHKKAIIAICRMLLTAIYAILKKSEVYNPTLYRREVSIPDTRAITVEQAIAFVQRHGFLVVDSDGVIAS

SEQ ID NO: 256052 - protein, 479 aa, unidentified
MEEQDGQPRRLVGIDLGIASRHSVRVLEADGRVAGRSSCVPTVESLSAVEQAALAGAPDGTRLAVVFEPTGPAWMPIAVFFARRGHAVYRVSSAKAADLRRFLRRHAKTNGIDAETLARMPLADPRGLQQLELPGPEAAALDRRVRACGRLTEAASKHKVRIKDLVRQLMPMTPLTGDLGKADLAVLERFADPRLLLAAGAAGLTRLITTASGHQQGPQRAGQWRAAAAAAVELYGDHPAVPYDELAAEVATEIRLLRAIQAELAAHAAAREQHYQHADPGQLARSLPGFAEISAPVLVAAMGRPGRFRDGTRFKSYAGLTPRASETGETDRKGQPMSKAGPSPLRSAFVRAADTARRQDPQLARIYYRQMTERGATHLKACCVVASHLAERAWTVMSRGTPYVICDNNGNPVTPGEAKKIIAEKWTVPEDIRKRRRSRKQAGKAPQAASARPDRRGDPPRPRSSRPPGQAVKPATPPG

SEQ ID NO: 256053 - protein, 336 aa, unidentified
MERHYVGIDLHRRRSVIFTMDGDGQRLGCKRIANDPMVLVEAVTEFGPMPEVVIEATYGWYWAVELLREEGMNVHLAHPAGNDWGKRRVKNDERDARDLADLLRLGRLAEAWIAPKEIRELRELVRYRYKLVNLRTGLKAQVHAVMAKEGVLPALGEMFGPGGNAQLDAMDLAESYGVRVRSLRDLIAVYDAEVAKLERDIHRRLKGDPGYEAIQVIPGVGRVLGAIFVAEIGDVTRFKSPEALSSWAGLAPRHHESDTKVIRGQITKMGSKMVRWAAIEAVSGRRGGTKLRQDFHAICERRGKYKARAAVARKLLTLVYYGLRDKEIRCLAEEAS

SEQ ID NO: 256054 - protein, 343 aa, unidentified
MEHYAGIDVSLESASLCVVDATGRIVREAKVASEPDVLIGWFCGLEFAVTRIGLEAGPLSQWLYAGMRDAGLAVELLETRHVRDAFKAMPVKTDRNDARGIAQLMRLGWFRSVHCKSLPAQEIRALLTARKLLQTKNHDVEMSLRGVLRGFGLKVGPTTPRTFVGRIRELAAGHGTLSTVAEALLAARSMLFEQCQKLEKRLRSLAREDGRVQLLMTAPGVGAIVALTYASAIDDPGRFRSSKAVGAHFGLTPKKYQSGETDVTGRISKIGDGGVRTALYEAANVILTRPVKGSTLKSWGMRLAARTGMRKAKVALARKLAVVLHRMLADGTEFLADKAAVAR

SEQ ID NO: 256055 - protein, 340 aa, unidentified
MEKRYIGIDLHRNRFTCCIRLENERTYVTEWELEELGKFVKKLRRTDEMAVEITGNTRLFFDAVKPHVARVVVVNTNQFRVIRQSVKKTDPNDARTLALYLSKNMLPEVRMKDKEHGQLASLIQTRDTLVKLRTALKNKINNILSARGLNLPKEALSSEKRLNEVLALPFDEIVQIELRVMVEQIRSLNKSIADLEKTIGDAGSKLEGHQGLSSIKGIGKITGAILLSVIGDVNDFADEAHLASYFGIVPRVANSNETERSGRIHKRGTKLGRTALVQSALVAAKYSPYLKRFYEQVKARRGAGKAIIALAKKFLGVIYRTLKNKWVFADFPNFVLAEES

SEQ ID NO: 256056 - protein, 341 aa, unidentified
MSDYSYFCGIDLAKNHFSLHAVDQNGKVILHKSVTRSKLLTTIANMPLMRIGVEACGGAHYWARTLNKLGHDARIMAVKYVIPYRTKGKNDLNDAVAICEAVQRPSTRFVPVKSPEQQAILSVHRMREHWVRERTALMNRMRALLSEFGLIIPVGRSSLMKHVPLMLEDAENELPHLARTVIADAYHHLGELNQRIADTEQVFDSFAKVSANVQRVMKVRGIGPQTATAILASIGNGSQFDKSRDFSAWLGLVPKQYSTGGKPRLGRITKHGDKYLRTLLVHGARTVIANLGDKQDKLSQWCRGVLERRGMNRAIVALAAKNARIIWSLLHNQTEYENYAA

SEQ ID NO: 256057 - protein, 319 aa, unidentified
MELSVIGMDIAKNVFQLHCVDRQTGEIERIKLRRNEVLPYFARRTPALVAMEACGGAHWWARQLQQLGHTVRLLPAKAVRPFVLRNKTDAADARAIWTAVQQPEMKTVAIKTEYQQSILALHRMRAQLLKFRHMQTNAIRGLLLEFGHPLPESYLALRKAFPTVMATLDKQLPGILIETLREQWARVQSLDNEIALIEGRLKRALAETPTCQMISDIPGVGLMTATAAVATMGDPASFKTGREFAAWLGLVPRQTGTGGRIRQLGISKRGDAYLRTLLMHGARAIIARRTYSDWVAGLIAHRPYSVVIAAIANKFTRTI

SEQ ID NO: 256058 - protein, 421 aa, unidentified
MNFTNPRAEKSRSQSKNNQETQFRISYTATGQELIYGYVPVGIDLAGRKFQVCFYNEDNELVNTTLDIYELRLFIAGSQQKLLISMEGCTGSSYWANYAIAHGHKAVVLDARAIKNRKAQKDDFNDAFFIREALFTKHQTCRIRTQEEIDLKSFYAQREQCIKSLNAVCSNVRQRLIAAGAYEYIVTDADSALVAIKCYKNQINNKADVGFSSLTLKTLDSFVEDINYLTQKIDSINQDIIDVKARESRVAKQLMSIPGIGPQLALLLSLDIADINRFKTARALQAYFGLFTAHSGSGGKIEMGKMSRNGDPVVKRMLYQAVLTLLHCGNKLQIAPRSEYIQRMYSRHTVAFKRGVICMCAKIIRVVFGVLHHGTAYDPQIDGSLGNKKARIHAYSNRCLNKVSADALLQEQYGYTEAALD

SEQ ID NO: 256059 - protein, 385 aa, unidentified
MSKPDDLSKPLVALDHDSTLVCVIEMSGSSWLVAATVPGVDRRPLQKLPVDPARLLAQVERWRQEAARAGRTITRTVVAYESGRDGFWLARLLRGHGIEVYVIHASSVAVSREQRRAKTDRLDTEMLMRALLGWLRGEPGHCRMVAIPTVAQEDARRPGREREGLVAERTRLTNTIKAELALWGIQGFKPGLRKAAEHLDALRTVEGEPLPPNTLARLHRLLKRRTLISDQIKAIELAAAQAIERDPTGPNAMVLLLAQIKGIGLETAQMLVQEVLSRNLRDRRAVARYAGLTGTPDESGSKRREKGIGKAGNPRVRRGMIQLAWRLLMFQPDAALVRWYRERTAGGKGAIKKTMIVALARKLLIALWSYATAGVMPEGVVLKAV

SEQ ID NO: 256060 - protein, 351 aa, unidentified
MFAQSLGIDVAGKAFRVCLKIRRTDGQVKIKGSRKFSNTPKGFAALLKWVTSKQTSDDPMRAVMEATGVYYESLAYFLHEQGWRVFVLLPNRIKGYFKFLNLKSKTDKIEAAGLAELGINHNLPTWEPASPQMYSLKRLCRERNTLIDEKTVISNRLHAEKSCKTPDRGTVRRLKQLIRLIDKQVKEVEQDLSQGLEQDPELKQRIDNICQVKGLGWITVLCIIAETNGFKLVTHKSQLVSYAGYDVVERQSGSTINGKTRISKKGNRHIRRALHFPALSVVKYHDEFTNLYNRVYDRTKIKMKGYVGVQRKLLVLIYTLYKKNEAYDPKYAQRNEDDSRSRQGTMPAYTG

SEQ ID NO: 256061 - protein, 343 aa, unidentified
MQTITTIGFDIAKSVFQVHGVDAAGQVVIRRQLKRRHVLAFFQKLPPCLVGIEACASSHHWSRELQALGHTVRLMPPAYVKPYVKRQKNDMADAEAICEAVTRANMRFVPTKTPEQQSCLMLHRTRHLFIRQQTAVINSIRAHLAEFGIIAPVGRKGVTELLHVVADPSDRRVPEVARACLAALGTQLLRLKQQILEFDRMIMAWHRSNQTSKRLHYIPGVGPILATALVASVADPRTFRSGRNFSAWIGLVPKQHSSGGKDRLGSISKQGDRYLRSLFVAGALAVIRYAKVHGTKHRPWLTALLGRRPTKVAAIALANKIARMAWAMMAKGERYKQPVALAA

SEQ ID NO: 256062 - protein, 483 aa, unidentified
MKPKQVESNKKASCRPTPTRWHKMNHKQRREMLRKIQSEDLSLEVVHPDAAGIDIGNESHYVAVPCARDRQPVRRFGCTTAEVKAMSDWLKQCKIQTIAMQSTGVYWVSVYDILEEAGFEVYLVNANETKNLPGRKSDVQESQWLMKLHTYGLLRNSFRPSQEIRTMRTYWRQRNDLVRAAGRHIQRMQKALTQMNIQLANVLSDVSGMTGQAIVNAILAGERDPYQLAALRNWRVKASEEEIARSLEGNWQEEHLFVLQQEQDGYQFCLKQMAECDQRLQQYLRQQEDRSQGASLPEEKRKERLRKKKKGNTPQFDLRTELFRMTGTDLTQIDGIDVTTTMTILSEAGWDMSKWKTEHHFVSWLRLCPDNRISGGKIIGKGRLPTNNRVTNALRMAASTLRLSNTYLGAQFRRLRTKLGAPVAIKAMAAKLARLVYRMLRYGMAFIDRGAEFYESQHRNLQINYLKRKAATLGFQIIEAPAA

SEQ ID NO: 256063 - protein, 348 aa, unidentified
MAHFVGLDVSVKETSVCVVDDTGKVILEQKIPTEPADIIALLTSLGVSYGRIGIEAGPLSQWLVNALTAAERPVICVETRHMKALLTAQQINKTDRNDARGIAQMMRVGLFKPVHVKTLVAQEQRMLLTSRKLLQRKLLDLECELRGTLRNFGLKVGVVSGSRYEARIRELVVDFPGLAAIAEPLLNVRRVMRRQFAVLHKMLLDTVRRDPVCRRLMTAPGVGAVVALTYRATIDQPQRFVHSRAVGAHVGLTPKRYQSGEVDYDGRVSKCGDALLRTMLYEAAQVLLTHGSKWSWLKAWGMRVAQRRGMRRAIVAVARRLAVVLHRMWVNGREFRWSKDSVAVPAVA

SEQ ID NO: 256064 - protein, 340 aa, unidentified
MRQVVTIGLDIAKDVFQAFGADVEGNQIFNRKLTRSEVLPFFERMPQCKVGMEACSSSHHWARHLSRLGHDVRLLHPAYVRPFVKRDKTDANDAEAINEALLSKRMWFVPVKTVEQQATIMLFRTRAMFIRQRVKAVNALRSHFAELGFVAARGRANLKALKALMESESGRKLPHGAKFALNLIREQLDYINLQIEKIEGEIQAQVKEDEELKRLTTVPGVGPIISVAVRAFVTDASSFKSARHFASWVGLTPRSHSSGGKEFLGHMSKRGNRQLRALLIIGAMSVLRQAKDSQSWICRLRKRRPFKVAAVALANKISRILWALMVKGGTYHSSGITGAV

SEQ ID NO: 256065 - protein, 368 aa, unidentified
MPRMPQAPEPSQHSDPAAEDVEVVLGVDTHKDVHVAAVISGMGALLGARSFPATALGYRQLLGWARGLGIVRRAGVECTGSYGAALTRHLTAAQVEVIEVNQPDKAARRRRGKTDTLDAEAAAQAVLSGRATATAKAADGPVEMIRMFKLAKASAIKSRTQAINQLKSVLVNADPQLREAMSGLTNPRLIQRCAELGTGTPHDTTSAAAYTVALLARRILALTTEINELTRRISDTLTAHAPRLMDRHGVGPDTAAALLITAGDNPDRLHNEASFAALCGTSPIEASSGKTQRRRLNRGGDRQANCALHTIVLTRLRWDPRSRAYVTRRMAEGKTRREAMRCLKRYVAREIYQLIKPRTEPPPQTRAA

SEQ ID NO: 256066 - protein, 345 aa, unidentified
MDKIIRIGMDTSKHVFQLHGVNAGEKPVLRKKMRRKEMIDFFTTCPPTLVAIEACGGSHHWARLLASFGHEVKMIAPQLAKPYVKRNKNDAADAEGLCEAMARPTMRFVPVKTVDEQAALMLISVRTRLIANRTQLANAIRGYANEFGISAAKGLAHIPMLLERIKVEKTVPELAQELFMSQAEEYAELEKKIADVEAKVKAWQRNDERSIRLNTIPGIGPIGSALLIMKTPAPELFKSGRQFAAWIGLTPKDHSTGGKVRLGGITRAGDEALRATLVNGATAVIHHARRSGKASRWLVELLKRKPPKLAAVALANKIARIAWKLMVSGEPYSTQSGSALNGCAT

SEQ ID NO: 256067 - protein, 390 aa, unidentified
MFDELQSRDYRIQIGGHYMNYNTVYVGMDVHKESFTLCSCKYEDEKASHYQRTPASYKNVLRYLAFLRTIYGEYTRFVCGYEAGCLGYSLYHQLENFNVECVILAPTTMLEQRSKRRIKTDKRDAEIIARSLAQHNYSPVHIPTETDNQTKEFIRMRDDHKAELKKIKQQILSFCLRQGYQYDGSGNWTAKHVKWLRSLKPAGLYKEILDEYLLTYTILIDKLNRLDQRIEELASKEEYKESVSKLTCFLGIKTHTALSVIVEVGDFQRFVSARKFAGYLGLVPGQHSSGDDRNGLGITKAGNTHVRRLLVESAQSYTRGKIGYKSRVLRSRQAGNSPQVINYADRANERLRRRYYKMVLKDGKKYNIAKTAIARELACFIWGMMTDNIY

SEQ ID NO: 256068 - protein, 345 aa, unidentified
MTPPTHRSAYQLFVGIDIAAATFTAVSTTDGPPRERARTFYQTPEGFAALMDQLRATGVAPAHTLIVVEATGSYWVALAVTLHEAGYVISVVNPAQAHNYAKSLPRRAKMDVLDAPVLAQFAAERKPAPWTPPPTIYHELRQRLIARDALLTMRQQARNQRHALLQWPIVVESVKVQLDGVIADLDGRLASLEAEIAQVLSEGAWAESAALLLSITGIGLITTAWLLVGTQNFQTCGSAASAAAYVGLVPLAHESGSSVRGRAQIGHGGQGRLRTALYLATLTAARFNPIIKAYYERLRAAGKPMKVARCAAARKLLHLAWAVVTKRQPFDPAYQTRLVEERRAA

SEQ ID NO: 256069 - protein, 344 aa, unidentified
MDYFAGLDVSVKETSVCIVDETGKIIREVKVASEPEALLAVLKNPAYPFKRVGLEAGPLSQWLYSALAEAGLPVICVETRHMRAVLKAQINKTDRNDARGIAQMIRVGLYRPVHVKTLRSQKLRMLLTHRKLLQSKAIAIENDLRGTLRNFGLKVGLVGTVKFEGRIKELTENLPDLAVLVEPLLIVRRVLREQLAILHRRLLAIVRDDEVCRRLMTVPGVGPVVALTYRASVDVPSRFKNSKAVGAVFGLTPSRHQSGESDRPGAISRCGDEMMRVMLYEAAQILLVRSTKWSWLKAWAMKIARHRGMKKAIVALARRLAVIMHRIWVDGTEFRWAREETAAA

SEQ ID NO: 256070 - protein, 467 aa, unidentified
MTPHKDYCLDPRPLAPTPTLPQSPMLADALQVCHPHAAGIDIGEAEHWVAVPPGGDSQPVRRFGTFTADLDALADWLLDCGVTTVAMESTGVYWIPLFELLEARGMQVLLIDPRQAKRAPGRPKTDRLDCKWLQRLHAYGLLAGAFRPDDQVCVLRGYLRHRQMLLTYAAHHIQHMHKALQQMNLKLTQVVSDLTGVTGMAILKAIIAGERNPQHLAKLRNSHCHHDEDDIAKALQGTWRAEHLFALQQAVALYEFYHQQLALCDQQIKRHLETFADKSEGQPLPPKARRSKKTNEPRFDARTPLYRMAGVDLTTIEGIADNTALVILSEIGTDMHRWPSVKHFCSWLGLCPQHKISGGKVLSRRVRPGAHRVTVALRLAARSLHHSQSALGAFFRRMKARLGTPKAITAAAHKLARLVYHLLKHGSAYVQQGLENYEAQYHERKVKTMAKQAKALGYTLVPLVAQG

SEQ ID NO: 256071 - protein, 326 aa, unidentified
MQCYVGVDVSKAKLDIAMLLAHDKYRSKVVANDPSGLALLLQWLKTHAPCELDQVHMCMESTGGYHEALACALSDHGVCVSIVNPLRVKRFAQASGQRNKTDEADAKTLAVFCRGQRPERWQAPSLGVRTLQALVARLQTLQAMRQAESNRLELAHEAVAASLRGMIAGLDEEIERVREQIRRTIDDDPDLKTRADLLQTIPGLGDKTIPQLLAYVGDPQRFGSAKALAAYASLTPLIQQSGTSLDRRRGTHPMGHRDLKRALYFPAMVAARYNPLVARFSERLKAQHKPGKLVVVACMHKLLAIVYGVLKSGQPFNSHPLGSSGA

SEQ ID NO: 256072 - protein, 380 aa, unidentified
MFKERTCVGLDVHARSVVAVAIDTVTGEVFRARLSPAEGAVREWVEALPGPAAVVYEAGPTGYGLARVLSGAGLRCEVVAPSKLHRPPGDRVKTDERDAQQLAELLMMGQICPVRVPTPAQEAARDLVRAREDCRRDLARTRHRLRSLLLRYGWVYPGGSLWTCRHDQWLRAIVLEEPASRAALEEYYQAAVATLDRRDRLDRQIETMAADRDTPERTALVARLCCLRGVSTLTAFALAVEIGEWDRFTGASIGAFVGLTPSEHSSGQTRRLGSITRAGNTHVRRLLVEAAWHHRRPYRPSAALRARWEKSTPAAQRRGDLANRRLHHRWARFDARSKKSTIANTAIARELAGWCWSLAVMDTTGPELSSSGGAAPRDTT

SEQ ID NO: 256073 - protein, 338 aa, unidentified
MEVYAGIDLHSSNNYVGIINEEDQRLYQKRLPNRLEDILPVLEPFKELLKGVVIESTYNWYWLVDGLQDHGYKVHLANPSAIKQYEGLKHTDDKWDSFWLAHMKRLNILPEGYIYPKEERPVRDLLRRRLLFVRHRTSHILSLQSAITRNLGYKMTGNEIKRLDESDADRLFDDPFLVSSAKNGIATIVFLSERIKEIEKGVKSHVRLNPEFERLLTMPGIGNILGLTIMLEVGDIRRFPKVSNYSSYCRCVKSERVSNKKKKGEGNRKNGNKYLAWAYVEAANFAIRSYPEFQSFYNRKKAKTNGIVAIKALSNKLARASYYVMRDQVSYDASRMFR

SEQ ID NO: 256074 - protein, 469 aa, unidentified
MGHKRSRSRQPSGKPTKHTSLLKRVNHNAAGIDCGSETHYVAVPPEKDPEPVRSFRTFTTDLNRLADWLEGCGIKSVAMEATGVYWIPIFEILEQRGFEVVLVNARHLKNVPGRKSDVMDCQWIQELHSVGLLRASFRPAAEIASLRAYLRHREKLVQGAASHIHRMQKALVQMNLQLHHVISDIMGVTGMRILRDIVAGVSDPKALAAHRDNHCRASAEQIAASLTGNYRPEHLFALRQNLEMFDAFQRQIQACDAEVESVLNALAAVSKRRPNAPPPAPRCKPRFSDNEPRFEIRDPLFRLSGADITQIDGIGPYTALQLIAEIGTDMTRWRTHKHFTAWLTLAPRNKVSGDRLISSKTQPSANRAAVLLRMCAMVLGRTSTALGAYYRRIAYRIGKPKAITATARKLAVLVYRVLSGELNYADPGAQAYEESHRTRTLQNLRNRARTLGFGLVDLETGEAIRGTVS

SEQ ID NO: 256075 - protein, 409 aa, unidentified
MRYYVGVDWADQTHAVWVVDESGTKITARTVPHTAEGFVEWGRELDEWRVQGIERWAAIERPDGRVVDFLLDHGVVVYPVNPKALNRARDRFRQSGAKSDPFDARVLADFLRTDHLHLQALQPSSDAAQELKLLTEDCQRHIRQQTRLVNQLTTTLKAYYPRALEVAELTTALAREFLHAYPTPEALTVLTARQWQRWARGRRVSEARIGALWAVLQQPQLPVPAHVVRAKARLMQSLVEQLTPVVVAVAQYRKTIDDFFARMPAAQWARTLPIGKHGITAPTLWARLGDAPGRWESFRHLQAQAGAVPVTKRSGKQRVVHFRFACDKALRHVVDQVAFLSLLSSDWARAYYDQQRARGHGHRQALRALGAKWLKIIFVMWHRQVPYDEQYHLATMTRQQLRQRQTKIA

SEQ ID NO: 256076 - protein, 421 aa, unidentified
MLGVGIDWAEEFHVVALGSPGAGVFEVMRVEHRPQAVSALVEHIAGLEADPAEVRVVIETRHGLLVEALVEAGYTVLPINPELVSRRRGPARKKDDAEDARICCRIALDRHAGLRQLIPHGQIAGELRSIARDDERACRDERRLLNRLRADLIVTFPAALAIAGDDLGATRILRLLERWPTAQALAAASREEIIEFGRAQRTGYLQRLADRIAAALAGDHFTAPEHLVRAKAGTIRLTARQLLLIDAQRRAWDKRMGELLLGTPGSPAEDQPGQAFPGGEIYLSFPGLGHRLAARIAGEVGEHIEQFTTPNSLQCYAGRAPVTRRSGKRDLVVAHRLACNRYLADAVHKWAFASLRRSAWAREFYDAQRARGKNHHAALRALGNRWLEVLWHCLTHNVPYDEVLHAANRNRALAMVTAPAA

SEQ ID NO: 256077 - protein, 366 aa, unidentified
MKKIITVAENRNEIFKHQQLTIGVDVGDQISHYCVLDETGNVILEQRVPTTPKGIQQVFGKISRCRIALESGTHSPWLSRLLTQLGHEVIVAHARNVQLITESTRKDDRLDARTLARLARIDPELLGPVRHRSAKAQIHLTVIRARATLVSARTALVNAARGLTKSYGERLAKCGTEQMNREVAKGLSPELRDVLEPLLGEIESLNERIAEYDRRIEQIAKEVYPEVALLKQVKGVGTLIGLTYILTLDDPHRFRRSRDAGCFLGLRPGRRNSGMSEPQMHISKEGDAYLRTLMVQGAHYILGPFGQDSDLRRWGLKLAERGGKNAKKRAVIAVARKLAVLLHKLWVSGEVYEPLRNHHQVVSAVA

SEQ ID NO: 256078 - protein, 480 aa, unidentified
MIKSVGIDLAGTGEHKVRCLDEGAQLCDGLSFQTTPEGLAKLEERIFGDGSNPVIVFEPTGLAWLIVTIYLKARHPDCRLVRVQARKVVALRKYLRRSSKSDKIDAITLAKMPFIDPEQLEEIYLAPAKMYAIQRLARQRKRLESEIGSRKKRIGAIVDGYFPGMRQAFSDPWSAHARAFLRSRLNPLAMVHAGEKSLHTFLTKARLRGKGDAVESHLVYLACQDAATLYKLSSSVGTIDEDFFAALQEEISRELRLMEVEEAESEAIAKRLEQLYHELHPSDNLRTIPGVGEHTAPIFLAVVGDPARFRSQSAFANYSGVVPAAKQSADAEAKGLRMTKAGPAVMKWALYQSSQIGRRCDPQLARVYYREMVHYGKNHKQAMGAVMSHVGARVLAVLREDKPYELRDIDGRPITREEARRLILLNYQVPEEIKRERRRRKQVAGKAAKSGRRNREMAVHRTNEAATAPQPVVATAISHN

SEQ ID NO: 256079 - protein, 347 aa, unidentified
MRFYAKQHNHYCGIDLHARTMYLCILDSTGQVVLHKNMKADPKALAKAIKPFQDDLCIAVECMFTWYWVADFCEDNNLPFVLGHALYMKAIHGGKAKNDKIDSYKIASLLRGGTFPMAYVYPRAMRSTRDLLRRRNHLMRKRAELLAHIHNTNSQYNLPEIGKNLRYKSNRSLVEDRFDDKSVQRSVDMDVELINFYDEKLSSVEWYIKKHAKIHDYHSYVLLKSFPGIGAIISLVILYEIDDINRFPKVQDFASYARLVKCKAESAGKSYGTSGAKIGNAHLKWAFSEAAVLFLRCNPKGKAYVEKLAKKHGKGKALSILARKIGRAVYFILKRKEPYNADRFLAA

SEQ ID NO: 256080 - protein, 341 aa, unidentified
MEQATTIGLDIAKHVFQLHGADAAGHVLFRKRITRVRLLSFLAAQTRCVVAMEACAGAHYWAREIAKLGHHVRLIAPAYVKPFIKRQKNDAADAEAICEAAQRPSMRFVPVKTEEQQANGIVFRARDLLVRQRTQCVNALRGHLMEYGYVFPKGITHVETLVALVEDLQSSLPDSVRVILKLLVDTFAALEAQIAVLDAEINQRSKSDPTARRLMTIPGVGPIASTAITALVPAAEGFPAGRDFAAWLGLTPLQKSTGGKQKLGAVSKRGERTIRRLLIIGASAVVQQASRRGAPKGSWLAQMLARKPKMLVTVALANKTARIIWALLVKGGTYRAPVAAA

SEQ ID NO: 256081 - protein, 392 aa, unidentified
MYIVGIDIGKNHHEASIVSPEGKQIGRSLRFATTHKGADSLMSFIFKNIGNSPCVFGMEATGHYWYPIYSFLKAKGYTIYVINPIQSDSLRKMYIRQTKNDSIDSFLIAEVIRFGQFGTTSMADENILAMRQLCRYRDSVISSRTEIKLRIGTIMEQIFPEYEKQFSSLWVSTSMGILEKYLTPENIENAPIDELFEIIKDKSHNRLTRAKAISIKEAAADTFGIKIAQDAFSFQLKQLIDRMNFLDKQIEALDCQILEYYEKFDCYLHTIPGIGMIAAATILAEIGDINRFKSSSALVAFAGIDPTVRQSGEFSSTHNHMSKRGSPYLRHAIFLAATARSFHNSPLNAYYKKKRDQGKHHLTATGAVARKLTSVIYAVLRDSKPYEPKSFC

SEQ ID NO: 256082 - protein, 320 aa, unidentified
MTYIGIDVSKDSFVAAYPKKSGYSTKTFLNTTSGVRQFISSLPEDCHCVMEATGNYSMLLLYLLQQANITVSMENPQKIKHFARAMLSTTKTDEIDAKLIALYGEKMNPAPYKIPSESIILLKQKRTVLRQLKKQLTAILNLQHALSALPKQDPTSKVTVEKTISFLRKQISKMEEEITNLSNNEFNRQMTLLTSIKGISNTIASALITATGGFSYFSSAKQISRFLGLCPTYQQSGTSINVKGHINRNGDTYLRSQLYIAACASLRCNTACRETYERLRAKGKSGKGAIIAIANKLIRQAFAIVTNNRPYIDGYVSTFA

SEQ ID NO: 256083 - protein, 409 aa, unidentified
MDIMYERCCGLDVHKKTVVACVLVPGSGRQPTKEIRTFGTMTADLLELGDWLAEKGVTHVALESTGVYWHPVWNLLEGNVELLLVNAQHIKQVPGRKTDVRDCEWIANLLRHGLLRASFVPERPQRELRELTRYRTSLIRERAAEINRIQKTLEGANIKLGDVASDILGVSARRMLEALIGGTTDPAELADLAKDKLRKKLPQLERALKGQFRAHHRFLLAQQLAHLDGLDELIDSLGSEIAERVRPVEQVVERVDGIPGFGRRTAEIVVAEIGTDLSRFPSYKHLASWVGLCPGNNESAGKRMSGKTRKGDVWLRSALIEAAHAASRTKDTYLAAYYHRVAARRGKKKAIVALAHTLLTIIYYLLTRDCDYEDLGPEYLNEHDREQTERRLIRRLQGFGYTVTRETAA

SEQ ID NO: 256084 - protein, 359 aa, unidentified
MLYLGIDQHSKQITVNVRDDSGNVVLRKQVSTRGTATRDFLTQLAQQSGADGYYAIVEVCGFNDWLLDLLPQCGCREIVLIHPGNPGKRKTDKRDANQLCELLWLNRQRLANGRRVQGLRRVNIPSEQERNDRRLAAARHRIGRELTRTINRVHTILKRRNLQHDCPTKTIQAKAARKWLKELSLSRLERLELNQLLARWELLEEQRRVLEEELKQRAAQSEDAQLLLSLPSAGAFMAVALAAHVGDVRRFSRPRSLANYWGLTPSCANSGDRTQRLGSISKEGSTLARFLLGQLVMHVLKQDGRLRSWYLGIKQRRGAKIGRVAVMRRLTTIIWHMLTKRETYRRGATPPPKKLQSSA

SEQ ID NO: 256085 - protein, 352 aa, unidentified
MKYVGLDWAYRQAQWCALTGGGEVAGEGRFAADRDGLARLVLELGDEVTACLEMMSGALWARDELVACGWQVQVADARKVKTVAPLAAKTDKVDARLLAELSRRQLVPALWLPSLDDRELRERLRRRMHLVRLRTSAKGRIFGLQTQWGIRISLRRLRRADGMTLLERAGMPAVWRHSISECLALIDFLDARIVPLDAELRPFAQADPRAVLLDTIPGVAELLALTIAVEIGEISRFAGPQKLVSYGRLAPRVRQSGEGRPHTGPLNKSGSRLLGWAAVEAAQQAWRESNPWHQLYLDVSRRSRNHNSAKAAVARKILIAAWHMLSRNEPFKPAPRTGATSVPASSRLALAA

SEQ ID NO: 256086 - protein, 357 aa, unidentified
MQLQGNTHNPKIYIGLDVHKKSWSVSIQTDLFFHKTYSMPAKPNDLFDYVNKTFPGHDVQMVYEAGGCGFHTARFFLNLGWEVLVVNPADIKKGDKERYQKTDAIDSKNLSNFLKRGDLKGIYIPTEEQEQFLSLARHRSQVTKKLRQTKCHIKSMLLYHGVEIPEEFDKPNWTIAFLDWLNTIKFSTSSGTLSLQGKLRMYNFVKAEYLEIANQMRLYCRKEHKKDYNLLRSIPGIGGYLASVIIAECGDIRRFNTEGQFASFIGLVPGVYNSGGTESCLGITPRSRGQLRSYLIEAAWVAIRKDPEMQAYYRKHQGKNVKNIIVKVAHKMSRRILSVVKTETPYQVNKNIVLEQN

SEQ ID NO: 256087 - protein, 340 aa, unidentified
MKLYGAIDLHSTNSVLVVIDEEDKIVYQKRLPNELAVILQQLSVYQSRLEGIVVESTYNWYWLVDGLMEQGYKVHLANTAAIQQYEGLKYSNDDSDARWLAHVLRLGILPQGYIYPREERPVRDLLRKRSQLVRQRTMNLLSIQNLMTRNTGLSMTANQIKGLDKAQVDGLLPDADLSLAVKANWSVMCSADEQVERLEQRVTERVKLRAQFSFLKTVPGIGQILALTIMLETGDIGRFATVGNYASYCRCVGSQKLSNGKRKGSGNTKNGNKYLAWAFVEAANFAIRFNSKIKSFYQRKKAKTKAVVAIKAVAHKLCRACYHIMKDRVAFDVTKAFGQK

SEQ ID NO: 256088 - protein, 410 aa, unidentified
MALKIVYPICCGIDVHKSFVVAVIAHTNSEGITEYIRHRFSTFTNGLKDLALWLEYHSCFDVCMESTGKYWIPVYNILESSSNICLAHPKYVKAIRGKKTDKKDAQWIADLYKHDLVSGSFIPPLKIRQLRDLFRYQMKLTNLQTSEKNRYQNSLTWSNLQISSVVSDVFGKSAQAIITSILESPDELPNIEELMHKRMKATVEDLTLATDCDITPEQADKLRVIKAHFDAITFCKENLDQLITELGKEFQEEQKLLQTVPGFKNPMTALRVLSEIGVDMNQFPTAGKLCSWAGVVPANNESAGKKFSTRISKGGQYLKPLLVQVANSVVRSEKHPEIRNKYLQLKKRRGHKKAIMAICHRLLVAIYHVLKKHEGYNPELYQRIEYVTPDKTITIQEASRYAQSHGFTVI

SEQ ID NO: 256089 - protein, 478 aa, unidentified
MQDRRLVGIDLGITSAHTVRVLSGDGTIVCRRKAVPTLASLVEVEQAALVGAMPGVCLEVVVEPTGPSWLPIAVFFGARGHTVYRVSSAKAHDLRRVLSRHAKSNGIDADTLARLPLVDPAGLHPLQLPDAPRAALDRRVRACDRLTQAAAGHKRRIKDLVRQLLPMTPLAGELGQADLAVLERYADPHTLLAAGRARLTRVIVKASRGQQGAARAEQWLGAARAALELYADHPAVAFQDLAAEVTTELRLLAATQAELDRHATQREFCYRWVDPAGLARSLPGLAEIGGPALVATMGPATRFATAAKFRSFTGLAPKASETGQTDRKGQPISKAGNRLLRTTLYRAADNARRVDPQLARIYYLQMVERGKDHLGAVCVVAARLAERAWVTLDRGMPYVICDTDGTPVTAEQAKAIIAERFTVPEEVRRRRRSKKGKAPQQVLQGHVTGAQSATRRPSPSPSSLGRRPTPVKQALPRT

SEQ ID NO: 256090 - protein, 315 aa, unidentified
MIVGIDVSKQSFDIAWVVEGQGHHQQFEYSDEGIQALLEQTPQDAHYVMEATGVYHTRLALKLYQSGRRVSVVNPLVIKRFAQMQLSRVKSDKADAELIRCYGEQHELLPWSPASPEIIELQQAHGWLDDLIRERTRLKNRQEAHAHQAKASPFVVKQMSTQLRHLDKQIKACEQHLEVVVKKSFAELYARLRSIPSIGPKTAIELIVVTGGFSRFDDVKALCAYVGVSPTTFRSGTSVNGKGTIAKMGQGRMRQLLYLCSWTAKRCNPSCCALYPRMKAAGQPPKVINIAIAHKLLRQAFAVATKGVKYSGNYA

SEQ ID NO: 256091 - protein, 404 aa, unidentified
MAPRAHNFSAPEAPSRKRLTAPSNVEMDSSWMAVRHRCAKLSLCSSANTYQKESEMNATTVAVDLAKNVFELAVADAEWHIVQRHRLNRVRFSRFFVHRPPCRVVMEACGSAHHWARRLVAEGHAVRLLPAHYVKPYVGRSKTDRADAAALIEAARSSRIRAVPIKTLEQQQLQSLHRLRSQWMSTRQRYLSTLRGILREFGIMIPLGPSVAKVHVGLALAQADSDIPEGLRPALAEMLREIAPLEEKILSVERQLTSLTRADERAQQLREIPGVGLLTSTALLSTVGDIQRFPSGRHFACWLGLTPSERSSAERRRLGKISKQGDVYCRTLLVHGARSALLAAHRAQRAGKPLDRLRHWALNCERERGHNKATVALANRLARIVWATWKYQRAFDGNWGNQTA

SEQ ID NO: 256092 - protein, 434 aa, unidentified
MKLPKHLRNINQHAAGIDIGSRSHFVAVPEGADEQPVREFSTFTGDLERLAEWLGSCGVTTVAMESTGVYWIPVFEMLESHGFEVRLVNARHVKNVPGRKSDVLDCQWLQQLHTYGLLRGAFRPVEQVCTLRAYVRQRGTLVRTSSSYIQRMQKALAQMNLQLHNVVADITGLTGMRIIKAILAGERNPDVLAAMRDKRCKNSESTIARSLKGHYRPEHLFSLRQAVEIYEFHQEKIADCDRQILKQLQCFDSQDVPNDAPPANVGEALQRMSGVDLTGIDGIDTNTALKIVSETGFDMSRWKSAKHFASWLGLSPGTKVSGGKVLSSATKPVANKAAAAFRMAAFTLFNSRSALGAYLRRQRARLGAPKAITATAHKLARLVYTMLTHGTSYVDAGQEYYEERYRSRVVQNLKRKAHEMGFELVSMQEVPASA

SEQ ID NO: 256093 - protein, 412 aa, unidentified
MNPVVGLDVSKGESQVQAFLDKSQPYRKSFSVKHTLDGLGGLLEFLKEVERLADGKQPSVILESTGQYHIPVIQFLEEQQYVYIIVNPLVSHRARSTNLRKVKTDAIDAYHLCELYYKEELEPYKKRGIQLLNLRNLTRQQETISSTAAQTKLQLQSILDQVFPEYRGVFGNLYSKISLQILSLFPTSEEVLNVSKCDLTDKIAELCTTRSEKWAKEKAQKLREAALRNPFQNNLYQSHIFNLKMFINIVLQYQEHLSKLAAEIDALAKEIEEYDIIQSIPGIGEKIAATIISEIGEIERFNHPKKLVAFAGIDPSVYSSGRFTASINRITKRGSSRLRQALFMAVQCGIRDARKQKTSDEILPRNKKLREFYDKKREEGKPFRVAIIACANKLLHWIYALLKRKVAFQNGD

SEQ ID NO: 256094 - protein, 350 aa, unidentified
MTVKRIGIDLAKRVFEVCGVDEREQVVLRKTLRRGKVLEFFAQLPPCLMGMEACGSAHYWARELGRLGHEVRLMAPQFVAPYRKNDKNDANDAEAICEAVGRPSMRFVPVKSEQQQAVLALHRARELLVRQRTALANHVRGLLAEFGIVVSGKGPARVCSALPGILEDGENGLPGLMREVLSDAYRRLGELDREVKAYDRKVARLARDDEVACRLMEVEGVGPLTATAVVASVGDPRMFKNGRQFAAWLGLVPRQHSSGGRSRQGRITKRGDVYLRTLLVHGARAVIRRLEKRDDARGWWVKPLLERRGFNKTTVALAAKNARILWVLMARGEHYQRGHVAPSFTEATAA

SEQ ID NO: 256095 - protein, 352 aa, unidentified
MQQFIGCDAHKRYSIFSSVTEKGRMGRAVRVSHDREAFRGYLEQLPACSPIAVESSGHWYWLVDEIERAGHEPHLVNAGEAKRRMGRPNKTDKLDAEGLAILLRNGTLPEVWIPPIVLRDQRELLRLRMFLVALRTDIKNRIHGALGRYNIQIGVTDLFGIEGRQKLEQRMGELLIETRESVKQQLITHDFLELQVEQIEKRLQKMMGDVPGADLLKTLPTVGPILSAVLALEIGDVSRFPSAEHLASYAGLVPRVNSSGGRTRMGQVGGNVNRMLKWAFVEAANLVVLQQRRMSHTHALRLYQRIRSRKNHQKAVVAVGRHFAEAAYWVLRKQEAYREPTTRSLAVSPTHG

SEQ ID NO: 256096 - protein, 374 aa, unidentified
MSSQNNTIHVAIDLSNSLWLVGARLPGAERSRMRRITSGDTVALLALISDLRSRHSGGRDRSIEVACCFEAGRDGFWLHRLLTAEGIPTYVVEPASILVNRRAKRAKTDRLDAEGLLRVLAAHLAGDEQVCSMVQVPTPEEEDGKRPHRERQHLVQERTRFENRILALLATQGVRGRPSLRTWQRDLATLETGDGRKLPQHLRAELDRLRRRLVLTMELIRELDREREETLAAAPDELTSRKVVALRSIRGIGENFAAVLAREVFYRSFGNRKQLASYVGLTPMPHQSGGMDRDRRIGRAGNARARTTLVQLAWLWLRYQPDSALATWFRERVGTLQGRTRRIAIVAMARKLLITLWRFTETGEIPDGVVIKAA

SEQ ID NO: 256097 - protein, 293 aa, unidentified
MNRRFPNTPEGRQALLAALAHHRPTWVALEPTGAYHLPLLQLLAEKGLQVALVNPYHLAAFRRATGERHKTDRQDALLLARYAQVCGESLRAYTLPPKALQELKALVGYREDLAQRERAILNQLEAARWAGSEEILVLLQRELACVEGLLGEVEARIQALLAALPEAEVLMGLPGVGPQVAAAVLALLPPHLWGRAKAAAAYAGLIPEREESGKSVERSRLSRKGPPLLRRKLFMGALVAVRHDPEMGAFYHRLLSRGKRKKQALVAVAHKLLRRMMGRLRAYYAGQSLQGVA

SEQ ID NO: 256098 - protein, 413 aa, unidentified
MEQLIERCCGLDVHKATVSVCVRVTQRPGGELKQEVRTFATTTPELLALREWLSEQRVTHVAMEATGVYWKPIYYVLEDGFELLLVNPAHFKQVPGRKTDVADCAWLAQLLEHGLLRSSFVPPAPLRELRDLTRYRKSLTEERTRAANRLHKVLQDAGIKLSSVATDMLGVSGRSMLMALVAGTTDPTMLADLARGQLRKKLPQLRQALTGRFGPHHRFMLSRLLADIDYVEEASAELSRRIEELLAPFAAAVERLITIPGVQRRTAEVMVAEIGADMSRFPSAAHLSSWAGMCPGNHESAGKRRSGKTRRGNRWIRTALVEAGGAAGRTKRTALGARYRRLRGHVGHGRAVLAVGRNILEIAYHLLSEQTIYRELGIDYFDRYRAERLKRRSLAQLQRLGYQVTLTPLPTAA

SEQ ID NO: 256099 - protein, 420 aa, unidentified
MPFKILKNNCCGLDVHKTWIFACIGITDPFQRTVYKHARFSSFTKGLQELCDWLAKYNCDDVCMESTGKYWIPVYNVLEKNSIFVTLSHPKYTKPQKGNKTDRKDARWICDLYMCGMIKPSFIPPADIRELRDLVRYRFKLNCMIASEKNRALNCLTVSNLKLDDVFSNVFGKSSRSITEYILQHPGETFDVAPFVHGRCKTPIAEIQAAVDGAVSAGQAAKLRQCLDHMDELEKHKENIEWEILRLSEKYEQALNLIRTVPGFDKNPMTAIQVLSEIGGDMSVFPTAKNLVSWAGCCPRNDSSNYKIKSNRISHAGSYFKPVLVQIATSLSRSKKHPEITNRYRRLKARRGHKKAIIAICRMFLTAIWHILTDLKPYTPEGYLDPNPVKKEKKILTTSQALNLLKRRGYIIKDDAAPAF

SEQ ID NO: 256100 - protein, 316 aa, unidentified
MHNTHWVGIDVAKDSLEVFIGLSRRFAVENTSESLAQLVKELCALKGAHVIFEATGGFEVMLADALARAKIKFTRVNPRQVRDFAKALNRLAKTDRIDAEVLAEFGKRLEPLPTVLPDDVSRLLHDLVSRRRQLVDMRSMEQTRLKQARTKRLVQSLERTIAFLSKQIDSLDDDIDKTCKTLPEFKVRDEALRTIKGVGPVTRSTLYALVPELGHLSGKQVASLIGVAPFNDDSGKGERRRRIRGGRGDVREVLYMAAMSARLHEPAIRTFYDRLLAAGKIHKVAIVACMRKLAVILNARVRDALRLAPQISASGG

SEQ ID NO: 256101 - protein, 374 aa, unidentified
MENTVTYVAMDTHKKQHKIALHYPCQEEIVEFTINNTVHDINKMVKKIAKEAPRKVEFCYEAGVCGFTLKRRIEQHDCHCSVIAPSLIPRKPGERVKTDRRDAKKLLMLSKAGLLTEVHAPDEHQESARELTRQRETAKENLKRIRHQLLKFLTRHGYVYSNGHHWTQKHIDWLRTIEFTESMLKSVFENYFSEMIYCIGRLENLDKEVELLANSAEYKEVVGHLRCLHGIDTLTAITIITEIFNFGRFESPRHLMSYLGLTPSENSSGDQQKKGAITKTGNKRIRRLLNEASWHYRHMYVPSAILKKRRQGQPQWAIDIADAAGRRLSKRYRHLINNGKMPCKANIAVARELAGFIWFLVTQYQTRKNAKDAA

SEQ ID NO: 256102 - protein, 375 aa, unidentified
MREKVRFLGLDVHAETIAVAIAEPEGEVRSLGTIPNREDSLRKMIKKLGSTDKLRVCYEAGPTGYVIYWQLAELGVKCEVIAPTLVPVKAGDRVKTDRRDAEKLARCYRAGDLTAVWVPDEGSEALRDLVRAREAAKQDQLRARHRLSKFLLRSGQRPQSGMRSWTRPYLIWVAQLRFTQMAQEATRMDYLHEVEHMRERVERLEQAITEAVKLAPPALQQVINDLQALRGIADISAVTIAAELGQVSRFDSARQLMGYCGAVPSESSSGKRTHRGSITKTGNAHLRRIVVEAAWSYHRPPGIWYGLRKRQESISEEAKEIAWKAQHRLHKRYMRLAAAGKDKRKITTAVARELLGFIWAIGTRAETVVRQRMAA

SEQ ID NO: 256103 - protein, 338 aa, unidentified
MEAYAGIDLHSNNSFVGVIDGDDRRLYKKRLPNDLDTILSALAPFRKDLVGVVVESTYNWYWLVDGLQEDGYKVHLANPAAIKQYEGLKHTDDEWDSFWLAHMRRLNILPEGYIYPKNERPLRDLLRRRLLFVRHRTAHILSLQSMISRNLGTRMSGRAIKKLTEADANDLFDSPQLVFAAKSNMVVISHLTEIIKGIEKEVMSQVKLRREFKLLLTMPGIGNILALTIMLEAGDINRFAKVGNYSSYCRCVKSERLSNGKKKGENNRKNGNRYLSWAYVEAANFAIRFCPKAQRFYQRKKAKTNGIVAIKALSNKLARASYYVMRDQVPYDVSKLFG

SEQ ID NO: 256104 - protein, 426 aa, unidentified
MDVVNQVCAGLDVHKKSVSACVRKVDASGKVSSMVREFSTMTEGILELGDWMAIQSVKRVAMESTGVYWKPIWNLLEDRFELMLCNARDVKNVPGRKTDAKDCQWLAQLLQYGLLSGSFIPPRPQRELRDLTRHRAQLSGEHTRVANRIAKTLEDANIKLGSVASDILGKSGRLMLEALIAGQTDPEQLADLAQRKMRGKIPELKKALLGHVNEHHRFMLQMLFDHLTYLENGIDDLEHRIQQVMSSDSLNKVPKENDALPFDQAVALLSTIPGVDECTATAVLAETGTDMKQFPSSGHLASWAGVCPGNNESAGKRKSGKTTHGNRWLKRALSQAAWAASHTKNTYLNAQYHRIARRRGKKRAVVALSHTLLTIIYHMLDQQVAYCELGHDYLDTIDPKNRLRYHTKQIEKLGFKVTLETPDMAA

SEQ ID NO: 256105 - protein, 370 aa, unidentified
MLDTTTFVGLDVHARSIKAVSLDVMTGEVRCATFGYDAGAVAEWVRSMDPRARCVYESGVTGFDLQKRLSGLGVDCVVGAVSKMIKPSADRRRKNDRNDAEFLARMLSVGNVVEVWVPDDECEAARDLTRALEDARDDLSRSKQRLSKFLLRHGLVFDERTPTGRRKGNWTRAHWSWIESIRFAEGADNDVLAYYVDAVRRAAEEKARLEGLVEAEARKPRWRKRVDSLRCLKGVDTASAADLVFEAGEFSRFRNARSFAAWVGLTPSEHSSGESDRRGAITKAGNKHLRKTLVEAAWHYLTCSGRPKDLARGQAPDRGARRHAAKGVRRLVERREALLARGVHGNKANVATARELACWVWAVGLMAEEA

SEQ ID NO: 256106 - protein, 462 aa, unidentified
MKGKRQARTRRSRRREQQILEKIHLHAAGIDIGSESHWVSVPEDRDEQPVREFKSFTHELVALADWLEACGIDTVAMESTGIYWIPLYEILEERGIEVLLVNARHVKGVPGRKTDILDCQWIQQLHTFGLLRGSFRPDAPITALRSLVRHRDQLVEAAASYVQRMQKALVLMNLQLHNVISDVTGVTGIAILRDIVAGETDPTVLARHRHPRCKASEEEIAASLTGHYRDEHLFVLRQAIELYDLYQEKILACDEQIEARIRALEASCESPDRLLPKPRRTRRPSGNEPHFEIRSPLFALCGGVDLTKLPGIGPYGALKLISEIGLDMSRWPTENHFASWLTVAPHNRITGGKLLSSRTQPSANRAAKILRMAAMSLGRSDHALGAFYRRMSARVDKPKAITATARKLAILVYRMLRDKINYQEPSAADYHQQQRSRILRGLRRRAHSLGLEIVDTSTGLVM

SEQ ID NO: 256107 - protein, 442 aa, unidentified
MDNYAGVDWATEKHDVRVSDAAGEELFAGAFAHDEAGLRSLCGTLVRFEVRLVAIERPDGLVVERLLDAGLRVLPLHPNQVAAARPRFRAAGGKSDRFDAFVLCELARTDHHRFRVLEPDSDQTKALRALSRAREDLVQAKVALCNQLRSELERFWPGPIGLFRDLDNHISLTFLERYPSPADARGLGEQRLHAFLKRAHYSGSKKPAELLAKLRRAPQAPIGEAELHARRQLVLGLVRTLQMLSAQIKELDRQIATALRAHPDGQIFRSLFRGPDSVICAATLLAEIGDCRERYPTGEALAGDAGHAAIAIESGKRKTACFRWACNKRLRAAFATLADTTRQWHPWAHALYAAARARGHDHPRAIRTLGRAWCRIVWACWQKRTPYDPDRHRALQQHITVTIPTPAGPVVDHAATQRMSAGLVATNPPTTRPATNKVTAAL

SEQ ID NO: 256108 - protein, 351 aa, unidentified
MEQDHITVGLDLGDRFSNFCVLDAQGEIVEEGRVATTKEALTKKYSEMAPCRIALEVCTYSPWVSRLLKGMGHEVLVAQSSKVALIYMNHRKGDRVDAQLLAKLARVDPGLLSPVEHRGEKAQEDLQVVRSRNILVETRTKLINHVRSSAKVFGMRLGYCSAECFHKKIPALLPEQLCKTLGRVLETIGELTAQINAYEKEMAALCRAHPATELLQMVPGVGPVTALSFVLTIDRPERFRHSRDIGPYLGLVPKRDQSGETDKHLRISKAGDSFLRKLLVTCAHYVMGPKGPDCALRRWAVARLGAGGANAKKRTVVAVARKLAVLLHRLWVTGECYEPFPQGLPEGPLAD

SEQ ID NO: 256109 - protein, 323 aa, unidentified
MKRIYFVGIDVGKAKLDVAVKVTDAPGTSGPAKRAHQEWTSPNTDAGVDQLVKRLQDIGPQKIALEATGGYEQRVFRALREAGLPAVIIKPISAREFAKAMGRQAKTDKIDALVLAYFAEVRQPEVLPLATPNQERIAGLRGLRADLLGTRVAYNNRLENCAPEIRALIEKFLVGVEADIAAVTALLAEAVQSTPEDAAKAALVQTVPGVGPVTAATLVGELPELGRLDKRRLSALVGVAPMNRDSGHHRGKRATVGGRSAVRRVLYMAALSAKLHNPVFKAFAQRLAEAGKPFKVIMTACMRKLLVVLNAMVVTGTPWSLSP

SEQ ID NO: 256110 - protein, 369 aa, unidentified
MADRITYVGLDVHKESIVVAVAEGGLRGEVREYGRIANTATALDRLLRKLGSDGMTLRFCYEAGPCGYGIQRRLSAQGHECAVVAPSLIPKRAGDRVKTDRRDAASLAKLHRAGELTAVWVPDARHEAMRDLVRARLDAVHSLRRARQQLSGFLLRQGCHYGRPAWTKLHRRWLAGLKFEQAVHHLVLEDYITTVDLAAARRDRLTAQIEAMLPDWTLAPVVAALQTMRGMAMVNAATLIAELGDLSRFADPRQLMAYLGLTPSEYSSGSSVRRGGITKAGNGAARRLLIEAAWSYRFPARLSRELLLRQESQPKPIRDIAWKGQVRLCARYRRLARTGKPANVVTTAIARELTGFVWAIARQVTVTPG

SEQ ID NO: 256111 - protein, 420 aa, unidentified
MSFKIFRKNCCGLDVHKTWIYACIGITDTNGRTDYKQTRFSSFSKGLKELSDWLAKYHCTEVCMESTGKYWIPVFNVLEKEDVSVILSHPKYTKPQKGNKTDRKDAKWICDLFMCDMVKPSFIPPADIRHLRDLVRYRFKLICMITGEKNRAQNCLTVSNLKLDDVFSDVFGKSSRSITEYILKHPGDLFDVTPFVDRRCKTPIEEIQAAVDGAISPEQAVKLRQCLNHIDELEKHLEEIEQEILRLSDKYQAALDLIRTVPGFDKNPMTAIQVLSEIGGDMSVFPSAKHLVSWAGCCPRNDQSNKKIKSTRISRAGSYFKPVLVQVANGLLRSKKHLEITDRYKRIKARRGHKKAIIAICRMLLTAIWHILSDLKPYTAEGFRESRPVNESKVLTTSQALNLLKQRGYIIKDDLAPAMN

SEQ ID NO: 256112 - protein, 317 aa, unidentified
MEVSLIFVGIDVSKAQLDVVIRPTGEKESFANDKVGIKALVKRLAKIEPSLIVLEATGGYERQVTRALVSAELSVYVVNPRQVRDFAKATGQLAKTDSIDAGVLAHFAEAVRPQMRPLPDVVTLELRALTTRRRQILEMIGAENNRLAMTSKAVRKRIDAHIRWLEQELDRANQDLDRSIEQSPMWKENEDLLRSVPSIGPVTSRTLLAELPELGALDRKQISALAGVAPFSRDSGTLKGRRSIWGGRAPVRSALYMAALVATRHNSVIREFYKRLTAKGKLFKVALVACMRKLLTILNSMIKHKTHWSETFLHSTT

SEQ ID NO: 256113 - protein, 310 aa, unidentified
MNSIAVGIDVSKATFVVSIDKAKPFELVNTQAKCLELAQRLPKGAIIHLEATGGYERWVRHTLEAKGFVVHLHNPLNARRMSQARSVKAKTDPIDAIQLAESGPMLPQRKPKSLEHEHLADHSRTIDTFVKMVASLKKNLNRPCLDEIAAQGLALAIEDLEHRIQELEASFAKRIRSSSFGAHYTLSQSIPGVGPVTARRVLAELPANYLEATGSQLASYAGMVPLDYESGKFKGKAHIGRGNSRLKGSTYMAALSLLASDPSFKAHYHRLRERGSCHQQAIVPLMRKLLIRIVAVLQRGTPWTKEAPTA

SEQ ID NO: 256114 - protein, 341 aa, unidentified
MRYIGLDVHKDNITACVLTSTGKPKFEKNFVKDSESWNLSELMEYGDKEGFCVMMESGTYAYQPFRFFSDQGVETHVVHAQALKVITQSDKKTDKKDAQTIARMLRLWKKGDIDLQMAFMPTREQCELKDICRYREEISRKISDETRRIKSHMSRNCEYLPDDFDNFQAQRARNYVRFNFSSDITLMNRMAVLEGLFKERDSVKSEVESRLPDSKEVDLLMTVPGVARQTAVQIMSMIVDIDRFDDAEKLCAYFGMVPRVRDSGGKEHHGRMTKSGDKMMRAIMERVTESHVRNCDSSVTQYYKRKCSEMGTKKALITASRKMLSVIFAMLKSGSDFRLAA

SEQ ID NO: 256115 - protein, 332 aa, unidentified
MNMHPQGGVASSEERPNAGIDVSKQHLDACVGSDVCRVPNDAQGWDELTAKLQAAKVDLVVIEATGGYERGLVCALQSAGLAVARVNPRQAREFAKSMGVLAKTDQVDARTLRAFADVLARHEQREHYITPMLEEARAQLAELMTRRRQLVDMRVAENNRLEHAGAVAARSIRSVIKLLDRQLAALDAGIDDHMNRHFGRQRELLDSVKGVGPVTILTMTAALPELGHLKRRQIGKLVGVAPLANDSGKRHGKRRIWGGRAEVRSVLYMAATVAMRHNPVIRAFYERLLAAGKPKKVAIVACMRKLLTILNAMLRDQAMWDAARHVAPVRSA

SEQ ID NO: 256116 - protein, 391 aa, unidentified
MPEDAPQPAQAAIRTDLGAIFVSMELSRRTWLITSLSPGAGEKMSKHSVPASDVPGLLHRFAELKRKAAARSGRDFPIIVIQEAGLDGFWIHRVLQSEGIESHVVDPASILTSRRARRAKTDRIDGETLVRTLMAFKRGEPRVCSMARAPTPQEEDRRRVCRERRILVGERVRHVNRIKGLLFAQGIFGYEPLRKCRRERLEDLRTGDGRPLPVHLKAQIIRELDRLELVLAQLKAVAAERDTLLKTASDEMPAPPAMLVQLKGIGPEIAAVLWSEGLFRRFDNRRQVAAYAGLAPTPWQSGSIDHEQGVSKAGNPRLRTTMVELAWLWLRNQPTSALSLWFHERVQSLSGRMRKTIIVALARKLLVALWRYMTAGVVIEGAVMKPASATI

SEQ ID NO: 256117 - protein, 398 aa, unidentified
MKDSGKRYIGLDVHKHYLIALGVDEDLNIVLPARRVEFSYLETWMKKTLTQQDAVVLEMTTNTWQLYDELVVYAGSVMVVHPPHVALITRSQVMNDKIAASILARLLAKRLLVGIWVPPQEIRELRGLVAQRKKMTNMATQAKNRLHAVLQRHHLLLPEGNPFGASNTEWWQSLSIGKLEKLNLQSDLETLQFAEQQVNRMTEIMEGMTAEQEAIGRLLHLAGFGVVTAVTVWAAIGDIHRFAEPRYLVGYAGLGTRVHNSGMSTRSGQITKAGRRDLRTVLIEAANVVANSHPHWKVEFARLEPRLGHNKAIVAIARKLLVAVWYILSQNKTDRFAQPQAIAQKLLGFAYRVGKENRPAGQSAAQFVRERLDTLHLGASPFIIQLFSPLLHNMRKCW

SEQ ID NO: 256118 - protein, 388 aa, unidentified
MFFLGIDIGKNTHVASLLDEKAKVIFKAYSFANTLDAAEALLVKLEPYKDSLEIGMEATGHYWLSLYSFLTEHNFIVHVINPIQTDGWRKGIEIRKRKTDVIDSVLIADLIRYGDFLETSLADEDILSLRNLTRFRAYLVNSVSDLKRKAIAVLDQIFPEYASVFSNVFGQTSKELLKSLSLPSDYENLSATKIEEVLSNITHKKKASETISTLSDKASRSFGISFCKDSFAFQLKLIIEQICFIEEQIASVELEIEQLMSKLGTNIKTIPGVGNVIGAVILGEIGDIERFDNPSKLVAYAGLDASVSQSGEYEASSGKLSKRGSPYLRKALYMAAQRAEFCDPVFQAYYEKKRNEGKHHLVATNAVARKLCHTIYAILKKDIPYEIQ

SEQ ID NO: 256119 - protein, 341 aa, unidentified
MKNKSFIGIDISKNVIDVSIFCEGTPIKDFPHDVFNNSRKGFGEMYTWLKKNHVVLSNCLFGMEFTGSYSMELEKFLNARNYQFCMLSTHVVKHYPMGPKDKSDKIDSAKIADFLYRYNGTECVKPYNMPDKTMQRLKALMNERKFLVEQRTCFMNRRQLCITKEDAQLYDGYIKKFSRDIENIELEEQKLLATDDSLLSTYKNLLTIPGIGFVNAINVIVITRNFTAFETARQYASYVGVAPHFRTSGTSVKWRPRPSARCDGQAKADLSMAATVVVQYDAELQSFYNRKLGGKQDSDTKRKALNAVKFKLVLRMFAIGKQNRKWEPLDSKSSNEKLAIS

SEQ ID NO: 256120 - protein, 436 aa, unidentified
MDIRIIGVDLAVKAQHTAAIYDPATQKFITKRRRFRSRPQDIDGVLAKAKQGASDDVKIIVILEATNMSWLEVGQYFHRLGAEVYRVNGRHTKAMRQIDTPHAHSDKLDGMALVKLYLVKKDKLVRWTPPGGELLALQRMSRELQRIVKQQTAIQQRLLDLTQWTWGGWRGVAPKAYQEWIMRHAYDPWTATALGAEWVQMRLLDDMPKAQTDWIAPWLQRAEERKRLYVTPETVGFPYITEFIERELDELNHLAKRRKTLTKDHLLPLYRQLYPNDVLTSLYGVGQRSAAIYHGFILSIHRFPNARRFGQWTGMVPRSFQSGTAENKHMRLSKQGPNLIKATLYQNADVARRWDIQLAYVYYTQMVTQGKHHTQAVCAVASHLANRIYALLRDQRPYQLLDLKGEPISADQSRAYIQKYLRVPEKIRKQRKRRQS

SEQ ID NO: 256121 - protein, 405 aa, unidentified
MFVGIDWASQTHAVCVLDDAGTKHANFQVGHTADGLDQLIARLGRLGDPATLPVAIERPDGRLVDRLLEAGHPVVAVQPNAIKAWRDAEILSGAKNDPGDAHLLAEYLRLRRHRLRVLAPFSAETRALRAVVRTRGDLVDQRVATANQLGACLEAFWPGAKGIFADLATPIALDFLARYPTPESAANLGERRMAAFLTKHGYCGRRPPAQLLTRLRAAPPGLCGTVEVEARRDAVLALVGVLRALLAGIKDLDRSVVAHLGEHPDAEIFTSLPRSGQINAAQVLAEWGDCRPAYADAEAVACLAGATPVTKQSGKHTAVSFRWACNKRFRQAICTFADNSRHASPWAAKVYADALARGHDHPHAVRVLARAWIRVIWRCWIDQTPYDPAKHGAAHKLTEMATSAA

SEQ ID NO: 256122 - protein, 325 aa, unidentified
MNYLGIDVSKDKIDCCLLINDISKKGKAKIFPNNESGFNKLVTWLNQKNIQYSDLLVTLEATGIYHENLCYFLNDLKIKIAISNPMRTRRFAQGISILNKTDKVDSEVLAKYGALAPIKFWQPDSINFRELRDLMTRRDALSTDLVRENNRLEKSMFTTTSKQVVSMIKDNMQYIQDCIDQIDNLIDQLVESDSELSQKMKLLTSIPAIGQRTALQMLNLFHGKDFENAGSAAAYVGLVPVQKQSGTSVRGATRISKAGSSRIRSALYMAGIVAIRFNPHTKILYDRLLKNGKSKMSALCAVMRKLVYLCYGVLKHKTPYQADYI

SEQ ID NO: 256123 - protein, 415 aa, unidentified
MDAIHYIGFDVHKKSVSFCVKQSDGAVIAEGRLPAEREDLRRWAASQSEPWCGAMEATLFSAWIYDTLKPYALRLEMGHPALMKAIGASKKKSDRLDARRIADLVRCDLLPACYVAPPAVRELRRLLRYRNLVVQQSVRMQNKIAGLLMECGATYNKARLHGSKYFQALLGQIEEVPDSVKQMLRLSRGALDMFQSVQRQLLKRLHEDAGLHARVERLCSIRGIGEVTALTWALEIADPHRFGSISQAVSYCGLTAAFRSSADKQQRGPISKQRNAHLQTVLIEAAKLAPRWNPELAAVHARELERGHRNRATLAVARKLVAYLLAVDKSGKPFLPQLPNNDQDNTALSSPAGMVAFPTPPPVVAQTAERSSRARVRSAAPKPGAPLPAPGRSAQTTLATGGSGGNATLPGRATS

SEQ ID NO: 256124 - protein, 389 aa, unidentified
MPTVADRPEAQTAIQTNLAAIFISLELSRSIWLITSLSPGGGEKMSKHSVPAGDIAALLARFSELKQKALARTGKSFPIVTIQEAGLDGFWLHRVLQSEGIESHVVDPASIATSRRRRRAKTDRIDGEALLRALLAFKRGEPRVCAMVRAPTPEEEDRRRLCRERKVLIAERVKHVNRVKGLLFSQGVSGYEPLRRDRRQRLDELTTGDGRPLPTHLKTQISRELDRLELLLDQIKTAEAERDALLAAQQAATPAPAGRMLLDLKGIGPEFAANLWLEGLFRHFDNRRQLASYAGLAPTPWQSGSVDREQGVSKAGNPRLRTTLIQLAWLWLRHQPQSALAQWFKERVSRNGGRLKKTTIVALARKLLVALWKYVTAGVVIEGAVMKAA

SEQ ID NO: 256125 - protein, 371 aa, unidentified
MEHTRFVGLDIHKERISIAVAESGRSGAVEYLGEISNDPVAIGKLCERLGRPGKMLAFCYEAGPCGYGVHRQLTSLGHRCDVVAPSLIPTKPGDRVKTNRRDATMLARLHRAGELTPVWVPDADHEAMRDLIRLRSVVRQIVTRARQHLQGFLLRHGRKHGRGTAWRMAYRRWLSTLAFEHPAQQIAFQDYTDAVMDAERRLKRVEEQISGLLPEWNLRPVVDALQAMRGIALINAVVLVAEVGDFTRFSKPRQLMAYFGLVPGERSSGETIRRGGITKTGNTHARRALVEGAWAYRMKARIGRHKVDRIEALPKIIRDIGWKAQVRLCTRYRRLRARGKTANVVNVAIAREMVGFIWSIACTVQSTPKTA

SEQ ID NO: 256126 - protein, 452 aa, unidentified
MDKANGVSRGDRNRNARLAKLREHVPIGNAIVGIDLADKKQMVVVTDHDSKVLARRTFRCKAWDLGSALDWASEKAAAKGFAGVTISCEPTGHRWRVLSQLAENRSMPFVCVQPTQTFHARRAEDLTLDKTDEKDAVLIARLTAQLRCYVPEPVDESTTTWARLRHLGARREQLITTTVGEVQQIRDLLECVWPAAITTAAQPFKSRTWAAAMHVVLDRDAGDLDRTQKLGWTRFETAVRREITRRGGQKPCLRIARKLFAALTDEAGVLAHRRGALERVGLVLEDWVVDQHRLAETERRMEAVLDELGLTSLVTSIHGISAVGAAAILAETGDPHRFATARSMVKHAGLAPREKKSGTFTGKTKLTGQGRPRLRVAAWRATWGALQTNTVYATRYRHLTTREQNKLTATQAQAAIAATLLRQLHAVITTGQAWDPAIAAGGTKRTQVTLAA

SEQ ID NO: 256127 - protein, 430 aa, unidentified
MTKLSSTPADAVLVAIDMSKHRQEVLIERPEGGRRRRMTVMATKTDYDRLASVLADIGRPIVVGFEATGNYHRTLAHRLLTAGFELRLISSVALARTREALHNGWDKNDSKDAQVILHMLRIGATQRYVDPLAAGINDLQEMSKTHEAISKAKTQTWHRILTHYLPLYFPEIERFAGNSRSDWFLALLERFPTPGSMTALGQEAFTREAWSLVGRKVSKARLINDIYETACASVALPVDEDSVAIAMFRMVIAQARSLIRQRDEIERAAHAMLSENRDYQLLRMIPGIGPINALTILAEAGDLRRFAHHRQFLKFCGLDLATCQSGTFRGRTKLSKYGNARLRRTFWMAAQVAARQRDNSFRDKLGRYMEGHANDPDRRRKAMTALTAKMARVAHAVIKTGTEYRPFLERADTRWKDPSLLCREGATATL

SEQ ID NO: 256128 - protein, 417 aa, unidentified
MTKKINKYAAFVGVDWADQKHDVSVASPTGSTPVHQVVSHTPEALNEWLMKLRRQYPDGQIAICLEQSKGALIFHLLGYDFLTILPVNPKNFASFREAFTSSGAKSDFTDADLLREFVTVHHDRLRPWKPDDEQTRTISFLAEGRRKAVQERTRLTNRLRSTLKMYFPQAIELVGEKLNSSMALDFLHKWPQLHDIKRAQSKTVENFYIAHNSRSSALIKERLQLINSTIPLTSDKAVIKSCLITIKMLIGQISQLNSAIDEFELEIKSLYDKHPDKDIFDSFPGSGEALGPRLVAAWGTDRDRYDSADSMQKYSGTAPVTKASGKSKVIVRRLACPKFLLQTFHEFANCSRNSSIWAQAYYEMLREHGKSHHTAIRSLAFKWIRIMFRCWQNRTKYDEIKYLKALKKSNSPLLKFV

SEQ ID NO: 256129 - protein, 337 aa, unidentified
MEQHQQYVGIDLHRRRSVIVRRNEVGETLEKVRIDNDPVALAAELAKAGEHPEVILEATYGWYWAADVIKECGGSVHLAHPLGNNWGHRRVKNDERDATDLVDLLRMGRLAEAWVAPPPQRELREYIRYRAKLVNLRSNLKAQVHAVLAKEGVHVPMSDLFGVAGQLLLDKVQLADAYRIRVESLRDLIDHLDREIAMIEEQVAPIFAGDLGYHVVQAIPGVGPVLAAVFVAEIGDIERFKSARHLCSWAGLTPSHKESDEKVQRGHITKQGSRLVRWAAVEAVVRQRGATPLRRHHHQVGERRGARIGRVAAARKLLILVYYGLRDGEIRCLSETG

SEQ ID NO: 256130 - protein, 421 aa, unidentified
MQVLYERCAAVDIGKDVIAVAVRLPADGPDGRATHKRTFKTFYGVLRQAARWLNSLGVTHVAMEATGIYSMPVYHALIEHGKFDQVLVCNAGHVKNVPGRKTDLADAEWLVHLLECGLLRGSFIPPAEIKAARDVIRYRTKVVQSRTSEVQRLGNVLPDAGIKIDSVASSIATKSGRAMIEALIDGERRPGVLADLAKGKMRVKIPDLTLALEGRFGEHHALMCRLHLDHIGHLDAMIARLDTQTETMMAPFHTERDLLTTIPGIGMLAAAAVLSEIGANVTEYFPGAAHLASWAGLCPGNHESAGRRHSGKRRHGNQHLQHILVEATWAAVRHDGYLKAPYHRHVMKWGGYRSPTAKKKAIIVAAHAILVIIWHVLAAGKPYDELGTDFFTRRLDPERETRRLIAKLEALGHQVSLQPAA

SEQ ID NO: 256131 - protein, 349 aa, unidentified
MNIYVGMDLHSDNVMLGWMDAEGKRLKHQRLPNDIDLILSCLKPHMDQIVQIGVEVTYNWYWLVDALLEAQYPVVLAHAAGMQQYSGLKYTNDVSDAFWVTELMRLKLLPTGHIYDAKLRPYRDLLRRRQLLVHQRTSLLLSVKSLYSRTTGAKLSQGEAKALEPETVAEWFDHPADQLIAGHEAKLIREYNESIRALEQEVEAVAGQLPCYQYIQQLPGIGRILGLTISMETGPIARFPEDGRYASYCRCVPTDRESNGKSKGENNGKCGNQYLAWAYLEASHFARRYDPPSQRFYEHKKAKTNTMVATKALASKLSKAGWHVMSKNEPYDPQRVFPFLRKPAGKKTN

SEQ ID NO: 256132 - protein, 353 aa, unidentified
MTDIVTHNDRIATIGMDLGKRSFHLIGMDARGKVIMRQQLSRGRLERHMANLQPCLVGIEACAGAHHIGRRLSAFGHNVRLIPGQYVKPFRKGQKNDYRDAEAIAEAVQRPTMRFVPIKSAEQLDLQALHRIRSRLVGHRTAVINQLRSFLLECGVIVPQGPARLREILPSVLSQRTDVLSPRMIRLIEELADDWRRLDDRVDAVTSEVQALARQDECCRRLTSVPGIGALTASAVVATIGNGAAFSKGRDFGAWLGLVPKQLSTGDRTILGRLSKRGNKYVRTLFIIGARAVLAKPGSWAKFGLQRWLAAAAKRLHHNVLAAALANKLARIAWSVLYHGRSFARDFEPQSVS

SEQ ID NO: 256133 - protein, 451 aa, unidentified
MTKKKMELDIINPNCAGIDIGSKSHFVAVGQSLEDVKEFGVYADDLTAICVHLKEYGITSVAMESTGNYWQNLYVELEKHGVEVTLCNGKFTKHAKGKKTDVKDCRWIQKLHALGLLTGSFLPDETTEQLRTYCRQRTNWVDLAAEASHKMKKYLRLLNFRLDVVVKDICGLTGLAIIADICSGNLDPEKLSEHRHGNCRKSQEEIAKTLKGNNRTDFLFGLKQEYDSYLFFQKKIAACDTQINAFLKIQINSNPDKKKLKTDSKLHKRVNKNSLKGIDLNQAAYQYFGGVDLIKIEGLSHSTILTIMSEVGPEGFTKFESSKQFTSWLRLAPNNKISGGKILSNKIPKGSNRLKIALRHAANAIGNLKDTHLVDFFKRVAYRKGRATAVSATARKLAVIIWNMVSKRVEYKAPTEYIFLDQKRKLRLVQNIKKNIAKFEIKTDDLGIVTA

SEQ ID NO: 256134 - protein, 462 aa, unidentified
MARSKPKASRTAAPVPAFPPPLAAANLHAAGIDIGAEAHFVAVPPSDDPQPVRGFGASTADLNAIADWLATCGITTVALESTGVSWIPLFALLETRGFEVLLVDPQQVQKSKGRPKSDVHDCQWIQRLHTFGLLASAFRPTDQVCVLRSDLRQRAMLLTYAAQHIQHMQKALTQMNLKLQHVISDITGVTGLAILRAILGGERDPEKLAQLRDDRCKYDEATIARALQGNGRDEHLFALAQAVALYDVYHQKIIACDRHIEAYLQTFADRSEGQPLPPPPRPRKRGGNQPAFAVRAPLHRITGGDLTQIEGLDETTSLVILSEIGLDMQRWPTVTHFTSWLGLCPHHRVSGGKILRRRTKPCATRAATALRLAAACLHHSQSALGAFFRRMKARMGAPKAITATAHKLARLIYTMLKHGTAYVRQGMDEYAQQYRDRMVKNMTRRAKALGYTLVKTPEGNPA

SEQ ID NO: 256135 - protein, 383 aa, unidentified
MKKTQETLRIKDSIKEAILYIAFELSNSKWKLAFCDGSKIRYKTITAGNLAQLQVEMELAKQKFKITEEVRVVSCYEAGRDGFWIHRYLESQGIENLVVDSASLEVNRRKRRAKTDRIDAGKLMRMLMRYWGGEKQVWSVVRVPSEQDEDARHLHRSLENLKGERTRHRNRIKGLLVQQGIKVSNPSQKKFLEVLEKVRTWNGQAVAPGLKSQVVREYERLQVVEDQIKAWEKEKKERLKNPDTVSLQKVAKLASLYGIGSVSSWTFVMEFFGWRQFQNRREVGALAGLTPTPYDSGKSMREQGISKAGNQRVRALAVEIAWSWLRFQPQSKLSQWYMKRFGGGGKRMRRIGIVAVARRLLIDLWRYLEYDKIPEGARLRSSA

SEQ ID NO: 256136 - protein, 424 aa, unidentified
MKVTYPTCCGVDVHKSFLVATIIKTNGGIEPSYQKKRFSTFNNSILDFKSWLLENECHDICMESTGKYWVPVFNLLEDQINVTIANPKWVKAVKGNKDDTKDSKWIGDLFRLGLVKGSYIPCKSIRILREYTRYRYKLVSCRSSEKNRYQNALTVCNVALDSVVSDIFGKSSSSIIDYLLEQSGTTINHEEIASKLLKRLKSKEDAVIESIEGYQMTDSQKYRMRLVRAHIDYITAEIDDVDKQIESLISSVPDYVKAIRFLTTIPGVKRDSAITIISEIGIDMSQFCNSKRLCCWAGLTPGNNESAGKKKSVRITCAGVYLKPALVQCAHAAVKSDKSPYYKKKYESLVKRRGKKRAIIAIARMILTAIYQMLSTGEVWNPSDLYKIDMPAPLVERQKAKAIKQAKKLLQKEGLLPPDEPLAS

SEQ ID NO: 256137 - protein, 419 aa, unidentified
MNYVGFDWASRAHDVTVLDEAGGVLDRWAFPHSETGWVTTLDRLARHGSAAELPVIIERTTGLIVDRLLAAGHPVVPVHPTAFYAARPRWGASGAKSDPGDSYKLADYLRTDGHRLRRLTPTDPGLHELQALVRLRDDQVRARTAATNQLTAILDNYWPGPKQLFMSLASQIALAFLTDYPTPTSAAHLGEARMAAFCRRHAYRGGKSPAELLSRLRAAPVAPVGLPPATLAAMVTAQVTLLKTLQTVISDVERLIAVRVVAHPRSNLFENLPGVGMINLAQLLAEVGPILDRVDSAEQAATECGAAPVTRSSGQTRGVYFRWAANTRARKAITSFAHNARMQDDWAAALYADARARGKRNPHATRIVARAWLRVIWACWTSGQPYNPDRHHSSRFLHRCHPAGAQARSRWSPPPEERS

SEQ ID NO: 256138 - protein, 345 aa, unidentified
MYNMLTGVDLAKKEIQVCVAKSNKIVRNMPMTPTAFSNWLATQKPMTVVFEACATSNYWYQCAREYGHDARLISAKLVSNIRQNQKTDKNDAEAVLQASQLSNVNFISGKSKEQQELQSLVRMHQLSVKHKVAYGNQLCSLLLEFNIKLSPTDAGLNSAIQSILEDAENGFSAIFREALHTAWHQYLKSIELVKHYEKSVARASRASEACKNLMKIEGVGPTNAVNLYLALGCCELGVFKKARDAAACIGLTPIQHSSGGKVRLGSIGKNIRNSSLRANLVAGAMSAVNQAVKRDSRTKKDEWIKGLVERRGKRCAAVALANKTDRTAFSLRRNGTDYKAELLSA

SEQ ID NO: 256139 - protein, 384 aa, unidentified
MPDVSSNAPGEVRMRAALDVHKRTIVCASQPEDPRAGELRLQEIPNTERALRGLVRRLGGPEGLVVCYEAGPCGYDPYRLLAAIGAACDIVAPALVPVAPGARVKTDRRDAKRLLVLHRAGALKFVAPPTVAQEGLRDLVRCREDLVCARRAARHRVAKQLLRHGRVFREGKKSWTKIHQAWVRRQRLEDALAQSALEHMLCHLDAVDAQIAAIDHQLDEIAGREPWSDPVRWLCCFRGITTLTALGLLAELGDFRRFSSARELMGFLGLTPSEYSSSEQRHRGHITLAGNTHARRLLIEAAWHYQHAPRVSQRIAAVHPHVPPDVAASAYNAQVRLHHRHRALTARGKRSTVANVAVARELAGFIWAAMTRQPIREQEVPTAA

SEQ ID NO: 256140 - protein, 415 aa, unidentified
MEVLYPRCAGLDVHKGTVVACVRIAADGAVRSDVRTFDTTTPGLLALADWLAEQGCTHVAMEATGVYWKPVWHVLSDGDLTLILANAAHVKNVPGRKTDVADASWLADLLAHGLIRASFVPEADTQAMRALLRTRKQLVREQAGHIQRLQKTLEDANLKLSSVLTNIMGLTGRAILEALISGQDDVDHLLTLIDRRVKAPPEKLRAALQGRINDRHRFLLRLHLRQIDALAEAVAEIDQEVDRDLARFRDAVRQLRTIHGVSDLSAQVIVSEIGIDMSRFPTAGHLVSWAGLCPRNDESAGKRRSNRLRKGAPWLKTTLVQCAWAGARTKGSYLQAQFRRLSHRRGPKKAICAVAASILTAVYHMLKDGTFYRDLGANHFQTTSPEAQAKKLASRIAKLGFTCTLTPHAEGLVSV

SEQ ID NO: 256141 - protein, 341 aa, unidentified
MKVSTLGIDLAKNVFQLHGVDHEGHTILRKKLTRAKFVQFVIQLEPCLIGMEACSSSHYFARLFTRYGHEVKLIPPQYVKPYVKTNKTDAADAEAICEAVTRPNMRFVQIKTEEQQAVLALHTERGILIRERIACANSLRATLAEFGITIAAGQSHLTRELPAILEDSENGLSPFVRTSIYRQSKHIRELEEQVKQVEEALASWYRTQEACQRMAKIPGVGMLTATYVVAAVGNARQFSTAKQFASWLGLTPKEHSSGGKQQLGGISKRGDGYFRYLLVHGARALTAWVNRNGAVEENSWLQGLLERKHYNVAVVAMAAKTARIMWSMLSHNTEYQPRQLA

SEQ ID NO: 256142 - protein, 341 aa, unidentified
MKVTTLGIDLAKTCFQLHGTDDAGRAVIKRKINREELALFTAQLEPCLIAMEACGGAHYWARKFKSQGHSIKLIPARHVKKFKESQQKNDARDAFAINEAAQRPKMPLVAPKELWQQDVQALHRTRQQLVKMRTATVNQCRGLMMEYGVVVDKSIEKFFIQMPSAIEDANNELTLVMRDLAAFLVASAKDLSQKIEEVEKKILTLSEAQPDYRRLLQVPGIGPMGASMFISSVGDAKVFKNGRHVAAWLGLVPRQESSGGKSRLLGITKTGDNHLRSVLIHGARSLILSAMRKHKRDPVSQWILDLQERKGWNVTAVAIANRNARIMWHLMNYKEEYKSAV

SEQ ID NO: 256143 - protein, 350 aa, unidentified
MTTTVYCGVDFHARVQTVAYCGSADGEIHLHELNHRQDDVRGFYSQFSGEVVVGLEASGYSPWFEQMLEELGHKVWLGHAAEIRRLANRRQKNDRRDAELILDLLVTGGFPVIHRPSAQSIEILRMLRYRHRMVKMRTMIVNNLQALAIGSGLSLQSRLLTRSGRLRLLATQMSPVMSRQREEWMSLLDNLNERIASVVKWLEQQATTDSEVQLLRTHPGLGLLTSLGLVHSMEPVTRFANQRKVAAYFGMDPMERSSAEKKRYIGISKAGSRLVRFLLVEAAQTAARNDQELKRFYHRLVARRGRPKALVAVGRKLLTRSYIMLRDGIDYAEFLRRGVEARPARETHRP

SEQ ID NO: 256144 - protein, 319 aa, unidentified
MAQNDLVVAGIDVAKDKVDVCIRSPSLKRTFVNAIEDRRELTSWLRRNKVGKAVMEASGGYERAWAKVLRNAKIEVRIVDPKRVRSFAQSAGRLAKNDTIDAEMIAWFAETFGEVPGQTYDAAREQLHQMVHARQALKDMQSKLTSQGEHAAPAAVQRIHARIVKTIAVELVKIEAEITALIQATPHFAELAEIIESVPGIGRVTSAALIAAMPELGKASDKIIAALLGVAPYDDDSGRRRGGRQIRGGRRRTRNVFYMACLGAATQHNPVLKAFYDRLVAKGKLKKVALTACMRKLISILNVMIARREKWDAKRYAVN

SEQ ID NO: 256145 - protein, 393 aa, unidentified
MDMIYVGIDVAKNKHDCCILGNSGTVLREAFTLSNDRKGFQELYAAIQEALHQEGTDQIKAGLEATGHYSENLVAFLRSSGIQPIVFNPLQVNLFRKSQSLRRTKTDKVDAKCIAQLLMSAESTPVPASYQIQELKTLTRHRSRLVSQRTKLKQCISRLVDILFPELPSVCCSATQASMRTLLLELPSARQIAACRIDRLTNLLYAASKGRYSREKALEIKQLAQQSIGANSPASELELRLTLQQLDFLLDQLKQLEKAIQTLVAAIHSPILSIPGIGPTLAAIILAEIGDIHRFSSPDKLLAFAGLDPSTYQSGKFTAGHTPMVKHGSTYLRWALMQAARLASVYCDTFRHYMDTKLAQGKHYFVALGHVSKKLVRVIFRILTTNEAFVPQA

SEQ ID NO: 256146 - protein, 459 aa, unidentified
MARKKKLEMEIINPDAAGIDIGSRSHYAAVGQSLEDIKEFGVYAQDNTELCEWLLSYGITSVAMESTGDYWQNLYSELLKHDISVVLCNGKFTKHAKGKKTDVKDCRWIQKLHSLGLLTSSFLPDETTEKLRTYCRQRTNMINLSATSSRKMQKYLKFLNFRLDVVVKDVCGLTGLKIIDDICNGNLDPFSLAEHRHYNCRKSKDEIAKALHGNNREDFLFGLRQEYQSYKFFQKQINQCDKEIDKFIKEVLTKSPEKKALSTNNKPYKRINKNAPAMKDFNQIAFKYFGGVDLMAIEGVSHSTILTIMSEIGPEGFKKFKTSKEFVSWLRVAPNNKISGGKILSHRIPKGSNRLKIALRQSANAIGNLNDTHLSDFFKRIAFRKGRQAAVSATARKLGVIIWTMVTKRVPYSPPKEYLFLDQKRKLKMVSRIKKNIVKFGLNIEDFNIDNMQLINNII

SEQ ID NO: 256147 - protein, 427 aa, unidentified
MPYKIAGIDVHKRMLHVVVSDVQVDGEYDFTRRVFGSLPEALRSLAAWLVEQQVEEVVMESTAQYWKPVWGTLERYWKRICQTREGALATSGTLHLALALSNRGRRGRKKDFRDAERLVKRLVAHELTLSFVPDVEQRLWRTVVRTKYQLTRNRVQLQNRLEALLEEAHIKLSSLVSDLLGASARRMLEAIADEETNRETLAALADRGLRATQEQLQDALGVCQELNPVYRRLIKMVLGEVASIDKRIDQLNQEMANLLSPHEDQVKRLAEVPGLGVDSAQQVIAEVGATAATFPSEKHLSSWVGACPGNEESAEVNYSRRSPQGNRHMRRILNQAANAAAKHKGSIFQILYGRYVPRLGHNQTIGIIAHKLCRLVWKILHRGIRYEERGPEVSKASKQKRTRKMIRQLSRLGYRIEPSPSQSAITA

SEQ ID NO: 256148 - protein, 438 aa, unidentified
MPDGQSLSACNYKSQEVIFLAFKIFRKNCCGLDVHKTWIYACIGITDTNGRTEYKQARFSSFSKGLKELADWLAKYRCFEVCMESSGKYWIPVFNILEKAGLFVTLAHPKYTKPQKGNKTDRKDAKWICDLFMCDMIKPSFIPPADIRHLRDLVRYRFKLTCMITGEKNRAQNCLTVSNLKLDDVFSDVFGKSSRSITEQILAHPGETFDVAPFVDRRCKTPIGEIQAAIDGAVSPEQAVKLRQCLDHIDELEMHIEKVQQEILRLSDKYQAALDLVRTVPGFDKNPMTAIQILSEIGGDMSVFPTAKHLVSWAGCCPRNDQSAGKIKSTRISRAGSYFKPVLVQVASALTRSKDHPEITNRYRRIKARRGHKKAIIAVCRMLLTAIWHILSDLKPYTPDGFVEPRPAEKSKVLTTAQALSLLKQRGYVISDSAPVLN

SEQ ID NO: 256149 - protein, 404 aa, unidentified
MYNAVGIDVSKGKSTIAVLQPGGTVIRKPFDVSHTSQSLIELAHYLGSLEGSTKIVMECTGRYHEPMLKALYEAGLFVSVVNPHLIKNFGNNSLRRVKSDPADARRIARYTLDNWAELRQYSGMDNTRTQLKTLNSQFSFFMKQKVAAKANLIALLDNTYPGVNKRFDSPPREDGSEKWVDYAYSFWHVDCVRRIGLKTFTERYRAFCRKHHYIFQPDKPEKLFHASKELVAVFPKEKTYKLLIQQSIQQLNLASGHVERLRQEMNALASTLPEYSTVMGIYGVGKTYGPQLIAEIGDVSRFTHREALTAFAGVDPGVDESGQHKSKSNRASKVGSARLRKTLFQIMTTLLQNAPEDDPVYRFLDKKRAQGKPYYVYMTAGANKFLRIYYGKVKECLRNLEQAE

SEQ ID NO: 256150 - protein, 424 aa, unidentified
MSLEFVFCTRFYEISAVDITLHILRKECMIMILVGIDIGKNQHTFSIIDKNTGEILSNPSCFPNNREGFLFLIKKLNTYSKSDLLIGMEDTGHYHFALLKHLLDSRYTVALINPTTTDLTRKLQGGITKNDPLDSLTICDVIGSNQHNKPYRITKVNRFDLYEQKQLTRHHHNLKEELNTYKNRLQKCIDIVFPEFNSLFRSKYGIVYMNVLKTFSSAEKIANSDIRTIRKCFEYNKRGKRISLSAEQLKAAAKTSIGMPSVAEEIQIRHLVCQIEMIEEQLSEIDKKIEEFSLQNNSPILSIPGISHFSGTSILAELGDICNYTKAAQIIKFAGVAPYHYESSQFNAQHTAITKKGSRYLRKTLYQIIFPVIYHNKVFNVYYNKKLAEGKGHRCAQGHCVRKLLRIIYHLLSTGQTFDPALLR

SEQ ID NO: 256151 - protein, 263 aa, unidentified
MSEANQTGRVSLGIDVAKAKFDVALLLPGKLARRTFAMDATGFAALATWVRQQGAEQVHACLEATGAYGAALALFLYEAGYQVSLVNPARISAYAKSRLARTKTDKADAALIAHFCQTQQPLPWTPPAAEVRELQALVRRVEMRQEMAQQEVNRQQSGIHSPAVRASIEATLTFLRAEVAKTHRLIQEQLERSAELKQQLLLLRSIPGVGSWTAARVLAEIDEVRSAVDARQLAAYAGLTPRERTSGSSVHRPPRLAKTGTSR

SEQ ID NO: 256152 - protein, 322 aa, unidentified
MKYCGIDLHSNNSVVIVSDDEDRIVLQRRLTNDLGQIRGVLEPYREELVGVVVESTYNWYWVVDGLMDAGYRVHLAHPSAIRKYEGLKHSGDVADAAYLAQLLRLGLLAEGYIYPREQRGVRDLARKRMQLVRYRTAQILAIENILIRQTGARMKGEAVKRLTAEQVDTLALAPDVALAMEANRAVSQALGQQIEALERRLKERVSLRPEYRLLQSVPGIGEILATTIMLETGCIDRFAQVGNFSSYCRCVDSLRESNGRKKGEGNAKNGNKRTSPCAAVRKPRASMSARRARPTASWRSRLWHTSWHAPATTFCATRSPSM

SEQ ID NO: 256153 - protein, 412 aa, unidentified
MNAVGIDVSKGKSMVAVLRPLGAVVAKPFEVLHTAAELKKLTDFLKSLDGETKVVMEHTGRYYEPVAHTIHHQGLAVSAVNPLLIREYGGNSLRRVKTDKADARKIARYTLDNWADLREYTPMDTIRYQLKTLNRQFHLASKNRTSCSNNLIALLDMSFPGARAWFDSPVRKDGSQKWVDFVLAFWHVDCVRSLSHTAFSQRYRNWCKRQGYQFSAGKAEQIHREAREMIALVPKSPTTKLLIREAALQLTSLSRTVEVLRAEMNRLAAELPEYPVVMAMYGVGESLGPQLIAEIGDIRRFAGKQSLVAFAGVDPMPNQSGAKETRSNRSSKRGSPYLRKTLFNVMKVLIQKSPPDVAVYQFLDRKRAEGKPYYVYMTASSNKFLRIYFGKVRDHLAALDAHPNDTSSANPL

SEQ ID NO: 256154 - protein, 355 aa, unidentified
MIGIDPHKRSNTALVLDGRETVLARRRFANDSCGYLDLKAFARAWKHRTWAVEGARGVGLSLAQRLAMEGEHVLDVRAVLSARVRALGGGSGRKTDEADAYAVAVAGLRGHGLQVVKPEDEGALLKMLSDRRQQLVEQRIAAVNRPHDMLQDLLPCGASTRLTAAKALEILAALSLSDPVGQARKQLVVEHADDVAALDVKIKTLAKRITEALTRQPSAVTAIKGIGDIGTALILGEVGDVRRFRSKHHFASYIGTAPIDVSSGDQNRHRLNRGGNRRLNYALHIAALVQIRFPGPARTTTPANAPRAKSPRGHALPQAAAVQRRVPRPPARPAGAARDGGPGRTLGGDCSIQRV

SEQ ID NO: 256155 - protein, 388 aa, unidentified
MQDVADQSAAPTTIGADLCAIFVSLELSRSTWLATSLSPGRGEKMSKHSVSAGDIAALLARFSELRRKACARTGKSFPIVVIQEAGLDGFWIHRVLLSEGIESHVVDAASIATSRRRRRAKTDRIDGETLLRALLAHKRGEPRVCSMVRAPTPEDEDRRRICRERKVLIMERVQHVNRIKGLLFSQGASGYEPLRRDRRVRLDALQTGDGRRLPQHLKAQVCRELDRLELLLQQIKAVEAERDALLDAEQAKASAPPPMLLGVHGVGPEFASVLWSEGLSRHFDNRRQVAAYAGLAPTPWQSGSVNREQGISQSGNRRLRTTMIQLAWLWLRHQPRSALTLWFNDRMERNGGRRRKTTIVALARKLLVALWKYVSAGVVIEGALIRPA

SEQ ID NO: 256156 - protein, 418 aa, unidentified
MKRVEDTSGQEKRYIGLDVHKHYITVGGMNARQELVLRLRNVEMERFKRWAEENLRQTDEVVLETTTNTWDIYDTVAPLVERVVVANPAEVKQIANARVKTDNQDVVRLLRLLIAGMIPEVWVPPVEVRELRALISYRWRLVKMATAIQNRMHSLLHRHNIQAPDGKIDTGENREWWEQVQLSGLERLRLNQELKTLRLVREHIEEVEKELGRLSTSERWAKQAVHIMQLPGVGIVVTMTILSAIGEIQRFPSAKKLVGYAGFGAGVEDSGEKHYEKGITKSGRKELRWALVEAAWQAIRSNARLRAAYDQLCKRKHPNQAIVAIARKLLVILWCLLNRQESYNPATDEDLAYKMLTWAWHMDQSAKRGMTNQQFAKYGLLQLGRGEHLTRIVKGGRPRRIAPKEEVLALMPELSSKE

SEQ ID NO: 256157 - protein, 423 aa, unidentified
MKYALVRVLPEVPPGGVCAGIDWASADHAVCVAVLAGQVADRFAAAHDRAGIAGLIARLRGRGAAEVAIERGDGVLVDALLAAGLTVVVIGSRQVKNLRSRYGSSGAKDDRSGAFVLADTLRTDRARLRPLVPDSPATLALRAAVRARRDLVAHRVSACNQLRAHLQVAFPGAVGLFSELDSPLSLAFLAAFPGQQAAARLDEQALAAWLATIPRRGNTAPAGVLAARLAAAPRGAAGADAAQAAVTTQLAAATAGLAGRVRALEAEIAAQLAAHPDQHIFTSLPRAGTLRAARLLAETGDCRARYPDPWSLAGLAGVAPVTRRSGTYISHEFRWNVNRQLRDAICDFADGSRHASPWAATVYAAARDRGKDHPHAVRITARAWVLIIWRCWQDGTSYDPAKHRALQDVLTRQAAAGTPQPHR

SEQ ID NO: 256158 - protein, 458 aa, unidentified
MSRNKSTDRVRRTMAVVHPNAAAIDVGATMHMAAVNADRTTEPVRSFGTFTTDLHRLVDWFAECGVDTVVMESTSVYWIPIFELLDARGFAVFLVNARDAKHVPGRKTDVSDAQWLQRLHSFGLLRASFRPKGQIAELRAYLRQRERLLEYGASHIQHMQKALTEMNVQLHHVVTDITGATGLRIIRAILGGERNPAVLARMRDRRCHATVETIEKALAGNYRAEHLFALEQALALYDTYQQKAYACDARIEAVLKELSARRGREAGPLPSPRQNRSRQQNSLLFDVRTALFALLGKDLTQINGLGPYLALKLIAECGDDLSAWPSAKHFTSWLCLAPSNKISGGKVLSSRTRRSGSRAASLLRLAAATVGRTDTALGAFYRRLSARIGKVKAVTATARKIAVLFYNALRHGMDYVDPGASSYEIRYRARVIDNLHRRAKAFGFMLQPMAPTPGMAVS

SEQ ID NO: 256159 - protein, 347 aa, unidentified
MSITRIGLDTAKSIFQVHGVDETGKVIMKRKLQRCEMLRFFERLEPCTIYLEACGAGHYWARVLIGLGHDVKLIAPEAVKPFVKKGKKNDPADAAALCEAGGRPNIKFVPVKTVEQQAILAVHSVRALLVKQQTMLSNAMRGLAAEFGLIVPKGIDKLVELMALIDSDESVPKQARQAGKELLDQREAVGERIETLEAEIVAHTRQNKAARRLATIPGVGPITASLIAATIADFGVFKRARDFAAWLGLVPRQHSTGGKTRLGRITKTGNREIRKCLVLGAQSMTFRARQWKSAAGVWTDSLLQRRPFRLVTVALANKIARIAWALMTRDEVYHAKGRVVAAAEVVA

SEQ ID NO: 256160 - protein, 288 aa, unidentified
MQITTIGLDLAKNVFQVHGIDQEGKVGVRRSLRRSEVVEYFAKLPPCLVGIEACATAHHWAREIGRFGHTVRLMPPAYVKPYVKRNKNDIADAEAIWEAVTRPNMRFVAVKTAAQQSVLMLHRCRVLLVRQRTMLANAIRAHLEEFGIAMPQGIRTLLTALNVPKNEMNNLPDLVRIALTPMTASLIELGQRIKALEIEIAREHRGNETSRRLETIPGFGVITSTAMAATVADPTAFKSGREFAAWLGLTPRERGPPRRRGSVSSWRKSLRRSWRLRSPTRWRALPGR

SEQ ID NO: 256161 - protein, 312 aa, unidentified
MKTPKPKSSPAYAGVDIGKASLDLSLAGQPPCRHANNAALIKVLKKLPVPVQVICEPSGGYERDLLQALWAGGLAVSLVHAARVRAFARAQGLLAKTDPIDALVLREFGELLQPGTLAAPSPQRERLAALVQRREQLVNLLSTEVQRLAQTHDVVVRKLGCHLLKTLERQVEQLAEMIAAQIAADATLKAQSERLQQVKSIGPVTASTLLAELPELGTLSRNESGALAGVAPYNRDSGLHCGRRTIRGGRVRVRRVLYMAADVAARFNPIHKAFYERLLLAGKPKKLTLTAVMRKLVVLLNHLLKNPHFKLA

SEQ ID NO: 256162 - protein, 345 aa, unidentified
MVIGVDPHKHNHTAVAVDGNGRKLGQITVGTTAADIVRLLDWGLQWDQDRQWAVEDCRHVAGALVRALVGAGQAVVMVAPKLMSQTRSSARTRGKSDPIDALAVARAALREPDLPEAHLDDQALEVRLLLDHREDLIAERTRMINRLRWHLHDLDILLPAGQALNSLKALDMLREQLESLPNGIRVEIALELFERITTVTRRISQIKRRIEAQIETLAPQLLEIPGCAGLTAAKLLAETAGAARFRSSAAFAMHAGTAPIPVWTGNRTRFRLNRGGNRQLNAALHRIAVTQLRTHPPARALVERRTARGNSKTEALRVLKRHLADVVYHRLQQTKPHTTCHEAAA

SEQ ID NO: 256163 - protein, 415 aa, unidentified
MEVMHPRCAGIDVSKRDAKVCIRIQGSSGRRTSSTVTTWGAMTNQILALRDHLAAQQVTVVIMEATGDYWRPFYYVLETDFEVLLVNARSVKNVPGRKSDVSDAAWLADLGAHGLVRASFVPPEPIRQLRDLTRTRTHITAERTREVQRLEKLLESAGIKLSSVATDITGVSGRLMLQALIDSNGTADPAVMADLAKRRMRSKIPVLTEALNGRFTAHHAFLARLFLDRIDAHTRDIAALSERIDGLMTPLLPARELLESIPGFSQIIAEIFIAETGGDMTQFPTPEQLASWAGVSPGSHESAGRVKSTKTRPGNRYLKGALGVAALNQAKSKNTYFSARYRRLASTRGPMKALVAVEHAMIIAAWHMLSNAEFYRDPGADYYTRQDPAKTRARAVRQLEALGYQVTIQPAQQAS

SEQ ID NO: 256164 - protein, 420 aa, unidentified
MSFKIFKFNCCGLDVHKTWIYACIGITDSNNRTEYKQARFSSFTKGLNELCDWLAKYNCKDVCMESTGKYWIPVFNILEKHNLWVTLSHPKYTKPQTGNKTDRKDAKWICDLYMCGMVKPSFIPPADIRQLRDLVRYRFKLTCMITGEKNRAHNCLTVSNLKLDDVFSDIFGKSSRSITEQILQHPGEFFDVTPFVDDRCKTPIEEIQAAVDGAISPEQAVKLRQCLEHIDELEKHKSEIEREIFRLSDKYEVALNLIRTVPGFDKNPLTAIQVLSEIGSDMSVFPTAKNLVSWAGCCPRNDKSDRKIKSTRISRAGTYFKPVLVQIANALIKSKKHPEFTNRYRRIKARRGHKKAIIAICRMILTAIWHILTDLKPYTPEGFLESRPVNEAKVLTASQALNLMRQRGYIIKDDMSPVMN

SEQ ID NO: 256165 - protein, 349 aa, unidentified
MTNLPRCVTGGVDTHLDVHVAAALDERGTLLGVENFPTTAEGYKKLLGWLSDFGPVELVGVEGTGSYGAGLTRHLQAEHVRVVEVDRPNRQRRRRKGKSDPQDAIAAAHAAQSGDALGEAKTRDGNVESMRVLRVARSSARKGRTQALNQMRSLISTAPEIIRTELRGLNVYRLLERTSTYRPGAKRDIVSLTKFSLRMLARRAIELEEEITEIDAILKPLVKETAPELVAALGIGTDAASALLVAAGDNPERLRNEAAFAHLCGVSPLEASSGKNQRHRLNRSGDRQANSALWHIVITRMVYDAQTSEYIDRRTKEGKTKKEAVRCLKRYVAREVYSLLPHDKLGSPD

SEQ ID NO: 256166 - protein, 437 aa, unidentified
MLTTLHPHAAGIDAGSTKFFVATPDGVVAVFESFTLELYRLREHLRARGVTTVAIEATGVYGLVLFDVLEAAGIEVCVVNGAHVRNVPGRKSDVQDCQWLQQLHAHGLLRKSFVPPERIRALRSYTRLRDDHIRQSAMHVHLMQKALDQLNVKLHAVISQLQGASGLAVGRASLAGERDPAKLAGWCDERILKTKRPAVERSLQGVWKAEHLFALGQALAGWEFCERQIAECDAQIAAQLRELTQDLPPPPPDAAAPKSGRHHVPQVPGLPGQLLSLSGGHDAARLPGFTPGNWLKLLSEVGTDLSRWPNEKAFTAWLGLAPGKHQSGKTARRARRRPQTPAGQIFRLAAHSIAKSRYLALGGFYRRLKARTCAAIAIVATARKLAVLYYQAMRQGLAYVEQGLNRYEQRYRERQHRYLQKRAAELGLTLVPTSPVP

SEQ ID NO: 256167 - protein, 330 aa, unidentified
MELHTIGIDLGKTVFHLVGLNLRGEVVVRKKFSRIQLLRFTANIHVELIGMEACGGAHFLGRALREQGHEVRLIPAQYVKPYVKTNKSDYIDAEAIAEAVARPTMRFVPIKTDDQLDLQSLHRVRERWVMRRTAVINQIRGLLLERGITLRKGRHHVHAALPLILEDADAKLSGAARMLLAQLNLDLDQLAVRIDEADAVIQKTAYENEACRRLVAIPGIGPVTATALIAAIGNGGAFHKGREFAAWMGVVPGEHTTGGQQKLLGISKRGNSYLRRLFVQGARAVMQQRTKQSSGLSAWLAQLTSRTHRNVVAVALANNRPSVLADVAAA

SEQ ID NO: 256168 - protein, 351 aa, unidentified
MTMVGGFDVHRKQITFDYVDDDGLVRVGEIRPATRTTLRHWLGEHCPAGDAEFALEGCTGWRYVVDELATAGVVAHLGDPAEIATLRGPKKRAKTDRADARLLRTLLLEGRFPESWIPPAHVVEVRTLGRLYCTLMDERRAWQQRIHAQLFHQGCPPIRALLSVAGRDALAQAELSAAGRQYVDTALRRIDELTVEIGPVRGQLVSFARRQVACQALQARQYGVGWLCAAIMWAEIGDARRFSSSDQLVRFAGLDVTVYSSAGKRSPGHLSRQGSPELRWATFEAAKCAARHGSPEHAYYQRLATKHDGHNGKNPTLAVERKILRRSYHTLRELGDAALAMPVPEEQGVAA

SEQ ID NO: 256169 - protein, 338 aa, unidentified
MIAVGVDTHKDQHHAVALDRLGQLLAEIVITTDLAGYTQFASWISDLGGQVLVGIEGAGSYGAGLCEYLQGEGIEVFEVERPRRQERRKGKSDRLDALLAAKKVLAGDGLSTPRGSGKRAALQMLLVAHRSLVSERSRLYNTMQALQISAPNALRERIGQVKGGAKLAERLTGMRTRPTASLQENTTLEVLRDMANRARALDTQAKTYALEIETLARSLAPKLLEESGVGPICAGKLLVFNPARFTSEAAFARANGTAPQPASSGKTIRHRLSRGGDRQINTAIYTIALSRSVHHAPSRAYIQRRVSEGKTKREAMRSLKRYLSRHLYNQLANTPLTT

SEQ ID NO: 256170 - protein, 330 aa, unidentified
MRYIGIDISKDSFTVAFSSVKGSKTQSYKNTPKDIQKFIKTLDKEQDHCVMEATGNYTFKLLYLLIEQGYKASLVNPKQTKYFAKTMLSVTKTDPQDACLLACYGEKMTPPVYKMPSEKIILLKQKRTVIRQLRKQLTALKNLEKSLEVLPRKDKNAFNCLNNTISYTEKQTEKLEKELIDDITEDFDKQLDLLTSIKGIGDKLAASLIIVTGGFSFFENPKQISRFLGICPTYQQSGSSINIKGSINRNGDSHLRGMLFLASLAAIRFNTACKELFSNFKAKGKPVKVALIAVANKLIRQAFAVVKSGISYIDGYISKPPITTVKIISN

SEQ ID NO: 256171 - protein, 323 aa, unidentified
MQNTLNYIGVDISKLTFDVALKDGDNYRHHKFDNNQAGFSDFLKVLPSDSVVVMEASGPYYLRLACFLAQKGIAVSVVNPLIIRRFCQMRMTRVKTDKKDACMIAAYGCTENPPLWQPPKEHEIALGQMEGLVSNLQKEYVAVNNQLESFNSTGKLNKSLEVMIKKELRHKQTLIDQLTLQIEEIAKEYYSTLLASLESIPGIGKKTAIMLTTVSGGFSRFSNHRQLSSYMGLCPRIFESGTSVKGRAKICKLGMSRARGILYVCAWSAKRYNKACHNLYERLVAKGKAKKLALIAVVNKLLKQAFAIATKHTVYNENYVANA

SEQ ID NO: 256172 - protein, 349 aa, unidentified
MKKIIIGIDVSKEKIDASAIDVRNSQLGVLKLDYQTFENRPMGFRRMLVWARRLLKGVTLEEILFCCETTGGYDRSLCDYIYAKGLDIWRESSLQIKKSSGLRKGKDDKADSLTIAEYAMRHIDKAVSYISPSETVRELKALLLYRRKLEQEKTSKKVRVAELKSTAAKSRSVSFILRDAQKSIRVLEKSIKDCEKQILALYDSDEELKKSYDHLISIRGIGIVNATAMIAYSNNFKNITSSRKLASYYGIAPFRERSGTTIDKKAMVKCYSSSMLRAYLTQAAENTIREHGIYHDYYTRLSARGKCHGIALNNVKNKLLHLSLSLITNDMDYEENHEVLRAIRKVQAG

SEQ ID NO: 256173 - protein, 411 aa, unidentified
METVVERPAALDVHKEQVTACVRVPGKAGRREEHLAEFRTTVQGLLGLRDWLKAYGVTHVAMEASGVYWKPPWAILEDEFECLLVNARHVKQVPGRKTDVSDAAWLCQLLEAGLLNASFVPPKPIRTLRNLTRYRKTQIQERQREANRLHKILEDTGIKLDCVVTDILGASGRAMLDALVAGTTDPAVLAELAKGKLRQKLPALREALEGRFDAEHGIVVSAILAHIDFLDEQIDRLCEAIEEQLRPFAAAVELLCSIPGVQRRTAEVIVAETGAEMSVFPSAAHLASWAGLCPGNDESAGKRRSGRTRKGSKWLSIALTEAAQANTRSRDTYLSAHYRRIRARRGHKKAIGAVKHSIIVACWHMLTTGELYHDLGGDYFPRRDPEKTTKRLVAQLERLGHTVTLQEATAA

SEQ ID NO: 256174 - protein, 342 aa, unidentified
MTTIKYFVGIDIASRTFTASVGGTPWRVVLKAYRFENTENGYQAFLDWLASHQILAKQSIVCMEATGVYSEGLAYFLFAKNYLVAVQSPLEVKRTFKPNGPKTDAVDSLQIAEYACRHMDKLSFWQPRNETLEQIKALLATREQFVSQNVAHKNALQAIQRKTVRTPFAEQAHSQMIEQFKKQILALDHEIRRLIESDPTFKEMLLLLLSVPGVGLLLATHMILLTQLSLNHKELAAYLGIAPHEHSSGTSLFRHATSRHFGPAPVRKLLYLASCSVRTHQPQFKLYFARKTKEGKPAKVVLNNIANKLIKIICAVLLTKTAFIKNYHSVQPLALHQTLTGS

SEQ ID NO: 256175 - protein, 369 aa, unidentified
MAKSNTYVGLDVHKDTIAVALAEAGLRGEVRQHGKILNTPAALKALTVKLTLSGRDLWFCYEAGPCGYGIQRQLTGMGHDCAVVAPSLIPRKPGERIKTDRRDATNLAKLHRAGELTPVWVPDQAHEAIRDLVRARQAAVRTLRQGRQQLSGFLLRQGYHYHRPAWTQLHRRWLASLKFEQAVHHIVLEDCIAAVEAATARRDRLEAHIEAALPEWSLASVVQALQALRGVGLVAAATLVAELGDITRFANPRQLMAFLGLVPSEHSSGGTRRQGGITKAGNGAARRMLIEAAWSYRFAARISREQLLRQERLAKPIRDIAWKAQERLCRRYRRLARAGKLPTVITAAIARELAGFIWAIAKQAQPTTP

SEQ ID NO: 256176 - protein, 387 aa, unidentified
MPHPNDLSRSLVALEQDATLIAVIEMGQSSWLIAGIVPGLERQPLKKLAADPDTLLQLLHRWRNEAMQAGRSIKRIALAYEAGRDGFWLARWLRAHQIEAYVIHPASIPVSREHRRAKTDRLDAELLKRAFLGWLRGEPKHCTMAAIPTREDEDARRPSRERESLVGECTRIVNRVKATLARLGIRGFRLTLARASEHLKSLRTPEGAAVPPNTLAELRRDLARLNFVKQQVKEIEAARTERLEATPGGGRNAMVHLLARVVGVGVESADMLVQEVFSRKLRDRKALARYAGLTGAPDESGRRRRERGLAKAGNARVRRGMIQLAWGHLLHQKESALAEWYRGRTADARGGTRKTMIVALARKLLIVLWRLATTGEAPAGLRLRPAA

SEQ ID NO: 256177 - protein, 427 aa, unidentified
MKYTQNEKILQVNEKALVIGADIASEIHYARAFDNRGIELGKLFKFSNDAEGFRTLTTWLVELKQKNQKQKIIVGMEPTGHYWFTLAQYLQEHGIKIVLVNPFHVKRSKEMDDNNPTKNDRKDPKTIAMLVKDGRYMEPYIPTGIYRELRTAMDTRWQIIKQLNTIRNRVKRWISIYFPEFPTVFGDWEGKAALIMLNEFPTPEQILEKGIEGIVARWHRDKIRAVGRKRATKLYEAAKNTVGIKEGLIAAKNDIAVLLEDYGQKMRQYEKTMALVEQLVLQIPGITEILKIKGVGLVMTAGFIAEVGDISRFNHSRQIQKLAGLNLKENSSGKHKGKTTITKRGRRRLRALLFQGILPLVATNREFRELHHYYTTRAQNPLKKKQSLILLCCKIIRIFYALLTKRVAYDPQKMMNDIQRITLPKAS

SEQ ID NO: 256178 - protein, 392 aa, unidentified
MLYIGIDVAKRKHDCFITNAEGEALTDVFTIQNTKEGFQELLRQINRYEPYPSPENTKVGLEATGHYSDNIVGFLRKIGLPPVILNPLHVNLYRKGQSLRKTKTDKFDARFIARMIIAEDFMPHLQPSYHAEELKSLTRHRHRLVWMRSTLKVSYDRLLTIIFPELETFVSNTFGVTETMLLLELPTTEAIANCHLTHLVGLVEKHSHGRHGKEWAIRLRELAKNSIGSNSKAKAMELQQIIRQIKSFSAEIELVDAEIKMRVVESGTSLMTIPGISYTLAAIILAEIGDITRFATPDKLQAFAGLDPSTYQSGQFTGKRDTMVKRGSSYLRWALLTAARTVSRYDKTFSEYLDRKLGEGKHYNSAIGHVAKKLIRVIFKLMNTGEAYQMQV

SEQ ID NO: 256179 - protein, 389 aa, unidentified
MLCVGIDVAKRKHDCCIIDSDALKTVESFTFPNSREGFDMLLSKIFELGIPKDKIRAGLEATGHYSSNLAHFISEHDLPLNIFNPLLTNRYKQGFSLRKTKTDKVDACAIAQMIVSGKASQTYSPLLYHNEELKSLSRYRSQTIQKCSKLKISVSRLVTILFPELEGLTSSIHLASIYALLKAYPGHEQIAHCSMKRLTRLLSDASQGRFDKSKALEIHQAACRSIGTVSLSASMELVHAITDIEVLKQHVAEIDEKIKEMVDQEESSIIDIPGIGYTLCASILGEIGDFKRFPDVDKLLAYAGMSPSKYESGGFHSNHNKMEKRGSPYLRKTLFVAVRLVAQNVPKFKEYLEKKLSEHKPYKVALSHVAKKLIRLIYRLGVSRCPYLA

SEQ ID NO: 256180 - protein, 426 aa, unidentified
MVECLTVAAGISLAARETICNDPQVCRIVDLPVYYELKTNNGNRDYRIQIGGHYMNYNTVYVGMDVHKESFTLCSCKYEDEKASHYQRTPASYKNVLRYLAFLRTIYGEDTRFVCGYEAGCLGYSLYHQLENFNVECVILAPTTMLEQRSKRRIKTDKRDAEIIARSLAQHNYSPVHIPTETDNQTKEFIRMRDDHKAELKKIKQQILSFCLRQGYQYDGSGNWTAKHVKWLRSLKPAGLYKEILDEYLLTYTILTDKLNRLDQRIEELASKEEYKESVSKLTCFLGIKTHTALSVIVEVGDFQRFVSARKFAGYLGLVPGQHSSGDDRNGLGITKAGNTHVRRLLVESAQSYTRGKIGYKSRVLRSRQAGNSPQVINYADRANERLRRRYYKMVLKDGKKYNIAKTAIARELACFIWGMMTDNIY

SEQ ID NO: 256181 - protein, 343 aa, unidentified
MQAITTIGLDIAKSVFQVHGVDAEGHVVIRRQLKRRYVLAFLQKLPPCLVGIEACASSHHWSRELQALGHNVRLMPPAYVKPYVKRQKNDTTDAEAICEAVTRPTMRFVATKTPEQQSCLMLHRTRHLFIRQQTAVINAIRAHLAEFGIVAPVGRNGVEQLLGVVADSNDKRLPEVARACVAALGAQLRMQKAQILEFDRMIRAWHRSSEASRRLDEIPGVGPVLATALVGSVADPKAFRSGRDFSAWIGLVPKQHSSGGKDKLGSISKQGDRYLRSLFTAGALAVIRYAKIHGTKHRPWLTALLARRPTKVVAIALANKIARMAWAMMARGERYKEPVALAA

SEQ ID NO: 256182 - protein, 402 aa, unidentified
MAEGPSRFFGLDIHKEYFVAVGVNPQREVVFGPQRVSNYQLDEWVARVLTTQDAVALEMTTNTYLFYDTLEPQVHSVIAVHPPNVTLVTGAQVKTDKKAALALAQLHAAGMLEGVWIPPHPVRDLRALIARREKMVHLSTMAKNRLHAALHRNHLIVPEKPFAPEQRSWWEALSLSATEQFLVRSDLDTLAFAQKQVEQAEECLKKASAEDERIPLLVQLPGVAMLTAITILAAIGDVTRFPNAKKLVGYAGLGTRVHDSGKSHNSGRITKTGRRDLRRSMVNAANHAIEHHPHWKKEFERLEPHLGRSKAVVAIARKLLVAVWHVLSEKAADRFADPANVARSFFTYAYRVGVRNLPEGRSALSFTREQLDRLGIGQDLLEIPWGSKPHKLPASKLLPENK

SEQ ID NO: 256183 - protein, 496 aa, unidentified
MGCCALEGGDAVSAIPIRNLMNCAAQPFRWRQQEELEMNPKRSKSRHGRKMPMVHPNAAAIDVGATMHMAAVRADRTPEPVRSFGTFTADLHRLVDWFTQCGVESVVMESTSVYWIPVFELLDARGFTVFLVNARDAKHVPGRKTDVSDAQWLQRLHSYGLLRASFRPKGQIAELRSYVRQRERLLEYAASHIQHMQKALTEMNLQLHHVVADITGATGLRIIRAILAGERDPEALAALRHYSCHSSAETIAKALTGSYRAEHLFALEQALALYTAYREKASACDMRIEAVLKELSIHRGRDHGAVPPPRRRHRTDQVNALAFDVRAALFALLGKDITAIDGLGAYLSLKLIAECGDDLSSWPSAKHFTSWLGLAPSNKISGGKMLSSRTRRSGGRAAALLRLAAVAVGRTDTALGAFYRRLSSRIGKAKAVTATARKVAVLFYNAVRHGMEYVDPGASSYETRYRTRVVNNLHRRAKAFGFVLQPLEPKAGAAVS

SEQ ID NO: 256184 - protein, 315 aa, unidentified
MEFTSEIERGCGIDVHKETVVATINGKGLKKQTREFSTYTSSLTSLCKWLIENGVTHAAIESTGIYWKPVFNILGEDVKLILVNARHIKNVPGRKTDIKDSEWICKLLLSGLLKASFIPPKEIRDLRDLTRYQLKLTQQVASEKNRIIRELEDANIKLSSVLQNVSGVTGTKIINAIIEGETNPNDLIRFYHGKIKVGRGEFKEALQGTLTDHHRFMLKQMKQHMISLEKQMEEIEQEIDKRVAPYEADISLLREIPGVDRKGAVGIISEIGTDMSVFPNEHHLASWCGLSPGNNESAGKKKVEEPPKEINTSNH

SEQ ID NO: 256185 - protein, 349 aa, unidentified
MNRTTYGLDIAKNVMQLHWVDGETGEIGRKKLGRAKLSEFFAQRQPARVAMEACGSAHHWARELGGLGHQVELLPARQVRAFVRGNKDDAADARAIWLAAQHSDIRRAPVKTVEQQAAMSLHRARSHWVSVRTATVNMLRGLLYEFGVVLPGGKMAGLKTIGAKRAEIDDKLPPLMRGLVDLELEALKGVELSIDQLEAEIAGQQRQLDKARTLREVPGIGVLGATALAATLGDASGWRSGREFAASLGLVPAHTGTGGKTRIGHLTKRGDPYLRTLLIHGARAVITQAKVKPAWLEELLRRRPLNVAAVALANKMARTAWALVAHGRAYRPEWKSTPPSGCGARARAA

SEQ ID NO: 256186 - protein, 375 aa, unidentified
MKNKVRFLGLDVHAETIAVAIAEPDGEVRSLGTIANRAESVRKLVKKLGPAEHLKACYEAGPTGYVLYWQLAELGVACEVIAPTLVPMKAGDRVKTDRRDAERLARSYRSGDLTAVWVPDEGSEALRDLVRAREAAKQDQLRARHRLGKFLLRMGQRPAMGMKAWTAPYMAWVRQVHFTQLAREATMLDYLYEVDHMGERVKRLEQSITEAVKLATPAVQEVVKGLQALRGIAEISAVTIVAELGSITRFENARQLMGYSGAVPSEDSSGQRTRRGSITKTGNAHLRRIVVEAAWSYRHRPALGPRLRKRQEGVPEPIKEIAWKAQVRLTKRYARLAAAGKDQRKIVTAVGRELLGFIWAIGIKAEAAGKLRLAT

SEQ ID NO: 256187 - protein, 356 aa, unidentified
MNHLNRLDFSGQKIYIGMDIHKKGWSVSIFTEQFEHKTFTQPPKVEVLVNYLRRNFPGAAYNSVYEAGYCGFWIHDKLKEQGINCMVVNPADVPTKDKERAGKTDRVDCRKLARSLRSGEIEGIYVPPRLKVEDRSLIRTRHSMVEKQTRCKNQIKSILYFYGIHIPEKLTHGRWSKKFINWIEQISMEKASGNLSLKAHLDELKHIRQIIADLNRGIRALSQSEEYMTNVRLLKTVPGISTLSAMTLLTELYDINRFKSLDKLSSFVGLIPNTNSSGEKDHKTSMTGRHNSILRSLLIESSWVAVRKDPALIMAFDRLCKKTIKTKAIVSIARKLLNRIRYVLKNQKEYVPAVIE

SEQ ID NO: 256188 - protein, 508 aa, unidentified
MDIEKMATEMVASRKTGVQNSLSWPDPEPSMEDAMAIQTAAFEKFGSPSVGWKVGATNKAAQDTFGLDAPFYGPMAQAGVLEDGAELRKTPCVMACEPEYAFKMARDFPENGEEMTADNAADAVDTVHIAIEVIGRTIGNTDGVDGSCTIGVVMRHIAVVTNCLRGATQMHVTTIGLDLAKNVFQIHGICEDGEVAFNRALRRAQVLTFFESLEPCLVGIEACGTSHHWAREISKLGHKVKLIPPVYVKPYVKRGKSDAVDAAAICEAVTRPTMRFVEVKTPEQQAILAVHRTRDLIIRQRTQTINMLRAQLAEFGIVLAKGIYHALQFAKQCLNGEQPDLPEVAGDVIFELCDQLRFLHSKILRCTRQMNKIARCEKRVALLRTIPGVGPITASAIVATVGSGKQFNNGREFAAWLGLTPLNRSSGGKERLGHISKMGDQYIRRLLVLGMTSRIRSIRTEPEKFDPWFADILERKPSRVAAVAMANKTARIMWAVLTRNEPYKVRSI

SEQ ID NO: 256189 - protein, 432 aa, unidentified
MMTMRKDLLAQNQPSEPAEAFAALIGVDWGDQSHALALLDVARGQVEASTLEHRPEAIQAWLQQLEQRFGGRPVALALEAGQGPLVQALVPVAWLTLYPIHTATSARYRTAFRPSGAKDDQPDAQVLLDLLCHHRDKLTPLRPQDEATRALDGLCQARRAAVELRTQLSNQLTSTLKGYFPQALDWTGQTLTAPVALDFLEKWPDLLTLKAARPATVRNFFYAHNVRRPQTITERLTAIAAARALTTDPAVVEVRVRVVRMLVGQLRVLAKHLQQFDQAIRQAFAAHPEADLFRDLPGAGPALAPRLLTVFGTDRTRYPHADNLLKYSGLAPVKEQSGGRQWIHWRWNAPRFARQTLIEWAGQTVIFCDWARAYYQRQRRKGVGHWAALRSLAFRWVRVLWRCWMDRTPYQEARYVAALRDRGVNVTPEVAA

SEQ ID NO: 256190 - protein, 409 aa, unidentified
MKLFVGIDVSSQDMKACVMNFEGEALTALTVDNNLTGASYLKDQIVKIAQSNSISEIQIGMEATSVYSWHPAMFFHEDESLKEFKTTVFTINPKLIKKFKESYVDLDKTDQVDAWIIADRLRFGRLPLTAVMQEQFIALQRLTRMRYHLVHNLTREKQYFLQHLFYKCSSFTTEVDSSVFGNAMLELFLEQYSLDEISSMDLQELANYLQDKGKNRFTDAECVAKSIQKAARSSYRLSKCVEDSIDLLLGTSIESIRSITKQIKELDKAIQKLLEGIPNTLQTIPGIGPVYTAGILAEIGQIDRFDNQASIAKYSGLTWSKHQSGKFQAEETKMIRSGNRFLRYYLVEAANSVQRNEPEFRAYYLKKYREVPKHQHKRALVLTARKLVRLVDALLRNDQVYTPRRKVNN

SEQ ID NO: 256191 - protein, 468 aa, unidentified
MKRRPKAVSKKKSRRIRRKREAKFLERVHLNAAGVDIGSASHWVAVPEDRDDQPVREFKSFTPDLHALVDWLDVCGVETVAMESTGVYWVPLFEILQERGFEVLLVNARHVKGVPGRKTDVVDCQWLQQLHTFGLLRASFRPDPEITAIRTLVRHRSILVEECAAHIQRMQKSMTLMNLQLHNVITDVTGITGMAILRDIVAGQTDPTVLARHRDHRCKAPEQDFIASLTGHYRPELVFALRQSIELFDFYQDKLRACDEQIEVLILALEAQCPTPDREPAARPRTKSRSKNEPHFDIRSPLFTIAGGVDITEVPGIGPYGALQLVSEIGLDMSRWPSPGHFTSWLTLSPHNKISGGKLLGSATQPSANRAAKTLRIAAMSCVRSDHALGAFYRRLAGRIGKAKAITATARKLAIIIYFMLRDATPYREQPAAVYDAHHRKRALNSLRKRAQSLGFDLVQVDTGLVLA

SEQ ID NO: 256192 - protein, 337 aa, unidentified
MESRLFMGCDISQDSFNYCLRNASGIILNGKVENTATHIRKWISALKKEHGLDLSQVIFCMEHTGIYGLILIRVLHERSHHVCVESAANIKLSLGLQRGKNDKVDAQRIAEYAMRYTDRLKQWKPKRAVIEKLQLLNGMRARLLKSRNILSSHTNEVKRFMGKAEYEILKKGTQASLNGIEKNIKDIDKQIQALIKSDENLTRLTRYVTSVKGVGMVTCSAMLVRTNEFKDYPDAKKFACTAGLAPFDHSSGKSIRGKSRVSHKAHKDLKTLLHMCAVNCIGKKGELKDYYDRKVAEGKNKMLIINAVRNKLVHRIFAVVRDEVMYQKNYQYNLVMS

SEQ ID NO: 256193 - protein, 336 aa, unidentified
MSEFKTFIGIDVSKKTFDAALLRSSPELTTVHQCFDQNIQGYRAFTQWLKTNDVILGDKDVLICLEHTGIYITGIVNFLLSFTASIWVEMALKIKKRIGLQRGTDDKIASVNIALYAYRYQDEVRLWQPMDSTLQQLKNLVAQRDRIVQCITQLGVPVNELEETGNKQQAAELRKLQSKAVKGLRDSLTAIEKTIDVSIEQDEIIRHKINQASSVKGVGKQTAIALLVYTRGFSVFESGKQLACYCGVVPFNKQSGTSVRYKPGVSPFANKKLKKLLHLCALAALRFDPGLKAYYERKIAEGKNKMSIINAIRNKLVLRIFAVIRDNRNYVDNYAY

SEQ ID NO: 256194 - protein, 409 aa, unidentified
MSYKVSGIDVHKRVLVVVVADAAQEELQYECRRFGTTTSELRQLKTWLEQQGVTEVVMESTAQYWKPVWLELEPHFRLHLAQAQSNRAPRGRKHDFGDAQRLLRRLLAAELILSYVPDPQQRAWRTMTRSKVQLVRDRVRLHNQVECLLEEARIKLSSVISDLLGVSGRRILHALASGETDPVQLAQLGHQRLKCSAEQLQDALTGAAEPMHRQLLQLYLERLELIDAQMDRLDQMIAGALREHQDAVVRLAEVPGFGADSAQQVIAEVGPRAAAFGSAANLASWVGVCPGRQESAGHNQSGRSAKGNPYLRRLLTQAAQAAVHKKGSRMQAVFRRLLPRLGYQQAIWAIAHRLCRLVWKILHDQVRFREQGLVENLQNQKRRVQKMLQALRKLGYTAQLTPLTPGLTT

SEQ ID NO: 256195 - protein, 404 aa, unidentified
MGKTINSANGKKQDLTKQETKIEIGRQQRSAVVRLQQKLEAAKQAPKPKAAGEIPVEYYIGIDIGDKRSYYCFLDANTNIVVADSLATTTTDFALHFKAIPRSRIVIEVGTHSPWIGALLEELGHEVYVANPRKTEGGKRKNRRKNDRLDAETLARQVKSDPKLLYPIRHRGEKTRNALVLLRARQAVVNARTKLICGVRGLVKSAGHRLPSCSADSFHKMDRTHVPEALRDTLEPLFEEIGLLTARIKKYDIEVKRMCKNAYPETALLQQVNGVGVITALAFILTLDDPGRFAKSRDVGPYLGLVPKQYDSGDSRPQMRITKTGDRMMRQLLVQSAHYILGPFGKDSDLRRHGLKIAARGGKNAKKRAAVAVARKLAVLLHRLWVTAEVYEPLRNSVPREKVA

SEQ ID NO: 256196 - protein, 347 aa, unidentified
MRFYTKQHRYYCGIDLHARTMYLCVLNQQGEILLHRNMPCSPDFFLKAIAPYREDMAVAVECIFTWYWLADLCAQENIVFVLGHALYMKAIHGGKAKNDKIDAHKIAALLRGGMLPMAYVYPALMRSTRDLLRRRMHLMHKRSELLTHIQNTNSQYCLPQFGKKIAYKKNRQGVAEHFADSSVRKSIEMDLSLIDHYDKLLTEVELYITQNAKIHDVNAFNRLRSVHGIGKILALVILYEIHEIDRFPTVQDFVSYARLVKCAKESAGKRHGSSGAKIGNVHLKWAFSEASVLFLRANPAGQRYADKLTSKHGKAKALSILAHKLGRAVYYMLKRDKAFDMNKFLNS

SEQ ID NO: 256197 - protein, 344 aa, unidentified
MQIASIGIDLGKTTFHLVALGERNKVLARKKFSRAQLLAYTAKIPSALIGIEACAGSHFMGAKLREQGHEVRLIPAQFVKPYRKSNKNDFQDAEAIAEAVRKENMRFVPIKTQEQLDIQGMHRVRDRLVQRRTALINEIRGFLLDRGITFAADPKHLRKNLPAVIEDAEQNLTPRLRWLLDRMWQEWKQLELDIETMSDELERISEENELCRRLRKIPGFGPLVSTATVAAIGNGAAFGCGRDFAAWVGVVPRQYSTGGKQKLLGISKRGNRYLRRMLIHGARAVLFRVKYDTGGFGEWFRRLAQRAPRNKVVVAIANKLARMAWAVLSSGKEYQHQPLQMTAA

SEQ ID NO: 256198 - protein, 342 aa, unidentified
MDHYAGIDVSLECSSVCVVDASGKIVREGKVLSEPDALISWFGSLGLKLSRIGLEAGPLSQWLYAAMKQVGLVVELLETRHVRKAFEAMPVKSDRNDARGIAQLMRLGWFRPVHCKSIGAQETRAVLTARKLVQSKLQDVENHLRGILRGFGLKVGKTTKLSFARRIRELAANHASLEMIAEALLSVHAVLLREFKAFEKQVRSMARQDAKARLLMSMPAVGPIVALTYASAIDDPGRFKSSKRAGAHFGLTPKKYQSGQTDYTGRISKIGDASVRTALYEAAHIMLTKPLKDCSQLKSWAMRVARRAGMSKAKVALARRLAVIMHRMLSDGTAFNAAAAAA

SEQ ID NO: 256199 - protein, 354 aa, unidentified
MKTYYVGMDVHRASISIVVLNGAGKLVMQSVIETGAERVRGYLKQLRGKVYVTFEEGTQANWLHDIVRPLVTEVVVCDPRHNKLLNSGNKNDRVDAQKLAELLRNGALKAVYHGDNGMRTLKELVRNYDCLVGDTTRVMLRLKAIFRGRAIPCAGHDIYRSDRRAQWLEQLREPGARQRAGFLYAQLAALKPLRHDAKLVMVKEARRQAAYPWLMSVPQLGSVSVTQLMAVVGTPHRFRTKRQFWPYVGLAVVTRTSADHEVVNGVLRRSRRPIATRGLNRNHNHLLKKVFKSAATSACHSGPFKAGYDARVAQGMDPSLARLTIARQLAAITLAVWKRGEKFNTQMMKPQIAA

SEQ ID NO: 256200 - protein, 316 aa, unidentified
MSDGPWAGVDVAKATLDLAVADHRRTYPNDEQGWAAIVRAVQPAGATVILEATGAYELGLAAYLEAHGVPFAIVNPRRVRDFARASGLEAKTDRLDAPLLQRFGATFAPPRTVLPDADHEALREWLARRTQLVEMRTMERQRVARTRLVDLRAHIQGHITWLTAEIAGLDADVHSRLRAHPRWQAALALLVSVPGIGWLTAGRLLARLPELGTVPTPQLAALVGLAPFACDSGPHRGRRHIRGGRADVRAALYMAALSATLRRGPTNVLRTYHHALRARGKAPKVALVATMRKLLTIVNAILHQQTAWRALSANTT

SEQ ID NO: 256201 - protein, 368 aa, unidentified
MSEAITSFVGLDVHHDSIAVGSAPEGREEPRFLGTVVPQWAALSKTLSRLGPPKALKIVYEAGPCGYTLARQLRAHGYACEVIAPAKIARAPGDRIKTDRRDALLLARAARAGELVSVTIPDERDEALRDLSRSREDAVRARLKARQQLKALLLRHGHRYSGKSSWTQAHERYLAQVSFSQPAQDIAFAEYRSAVRDAHERVERLTDSLRSQLEAWRMRPVVEALMSLRGIELIAAMTLVAEIGDYTRFARPRELMGFLGLIPSEHTSGTHRRQGRITKTGNSHARRVLVEAAWNYRFPARISPALEARQQGQPKVVREIAWRAQLRLAQRYRKLAARQLPFNKICIAIARELSGFVWDIACQVKPST

SEQ ID NO: 256202 - protein, 342 aa, unidentified
MSWGPTAFFVNPNSCKGQAPAHKEGTEEMVVQTVQDIGIDVAKRWLDVAVFQTQEQAHFDNDKDGWAKLVRWLRGRPVRAIGMEPSGGYERGVAKALRSVDLPARNVNPHKLRHYARALGRLAKNDRIDALLIARYTAELPTRPVRCDPIAEQLADLVVARRQLSDDKVSLANQLEQLREPMVKRIFTQRLRRIEFDIALLAKRMAELVASQPALAAKDRLIQSFHGAGPVLSHTILALAPEIGQASRREIAALAGLAPYDFDTGTFKGRRIIWGGRHALRRVVYMAALTASRSNPVLKAFHQRLVAKGKEPKVALVAVARKIMTILSAMLRHKQPWNPHKA

SEQ ID NO: 256203 - protein, 426 aa, unidentified
MLKYSNFAIVGIDVSSEFHIASAIAPDGSKLFSNFRFNNLPDDINSFVQKINELKLSYPEIVCGIESTGSFHSTLLKSINSSNIETVLINPSITNNTRKKTVRKVKNDKFDSFGIINAIKTQEFLPSYVPTQHILELRQFVRDYYSFTDSAVKYKLKLKSLLNNYWIGYLNVFGSPYSVTSLALLAKYPSPSSILNAKKSSIIKILMFARKGPSYANSTYDALIKSCKDSLSVFPNSNYDTSILFYVDTISKLEASANMLEQHVIQFVNSDACDSQFRINYNLLLSIPAVGDFTAIAILAELGNFYNFKSAKSIIAYFGMDPKIVQSGKFAANGLRITKAGSSVARRAIFSIAIRSVSSTRNGKLINPILREDYLAKCKSKAKLVALGHIMHKVVKIIFSVLKNQKKFKLITKDEHIKLFKLTKSA

SEQ ID NO: 256204 - protein, 425 aa, unidentified
MNYKQNEKINQVKESTLVVGIDIGSTTQYARAFDWRGIELGKVFTFSNSREGFEAFKAWMQHLQDKYRKSDVIVGIEPTGHYWFDLGAYLEDEGIRLVMVNPYAVKQTKELDDNSQSKNDRKDPKVIAKLVTEGRYSAPYTPDGVYADLRIMVANRKRLIREMTQIKNRFARWFAIYFPEYTDVFGDYEAQSSMLLLKKVCTPEAIVELGAEKINQIWRDARLRAVGMKRATTLCETAKRSIGLKKGSSAARYEMKLLLEDYEYKKAQLDAVMEEIEKLCRKIPESEQMLAIKGIGVITVAGFLAEVGDVRRFESPRQIQKLAGLSLRENSSGKHKGQTTISKRGRSKLRAVLFNAAIPLIAKNPEFKSLHEYYTTRANNPLKKKQSVIAISCKLIRVFYAILANGVTYDSQKLLSDIHRQPQVA

SEQ ID NO: 256205 - protein, 353 aa, unidentified
MNNIKYVGMDVHKSITVIAVLNELGQFESRSQVKTKSENICDFFRGISGKVEVVFEEGTHSAWLYKLLKPLVASVTVCDPRHNKLIEDGNKSDDEDAETLAHLLRLGAVKAIYKGDDQQQQLKEICRAYDNLIEDSTRVRNRLKAIYRGRGISCSGHDLYRADQRSDWLAKLGEDAARFRAASLLDQLESLSQLRKQAKQRLLAQARAHADYQILIKLPGFGPIRVAQLIAAVGTPHRFRTKRQFWPYCGYAVVTRSSADYQILEGKIVKQRKKVSTRGLNRNHNPQLKQVFKGAALAALRHEAIKTYYQRLIDHGTRPELARVSVARKLASIALTVWQRREEFNVKKAFAQD

SEQ ID NO: 256206 - protein, 397 aa, unidentified
MNKNITHHGTTHVGLDVHQKTIAVAVLLPGRDNPVQWQIDNTPKARRTLARKLKLLWPGEMVCVYEAGPTGFSTQRQLAKLGLACRVAAPSRIPIIPGLQRKKSDKRDAFKLARLLRGEQLDFVVPPTPEEEAVRDLCRAYRLAVKDQTRHRNRVGKLLLKLGVVYVDGKNWTQRHLHWLRGLKLEDALHQTVLGDQLLALEQLAGRIAALVESIAGQAREDRYREKAGWLRCYAGIDTATAMLILTELHGIERFGTATQLMSYCGLTPSEHSSGQKERRFGIDKAGNAHLRWALIETAWHYRHPVRVSRSLRLRRQGQPAWVIARADKARQRGRLRFTKFMAKDKPSAKAVVAVARELAGFLWDTLQGPAAQRASPAAPPKPQAQHRQKTAKQHAA

SEQ ID NO: 256207 - protein, 418 aa, unidentified
MNAGENARSSQRYVALDIHKYYCVIAAVDREGRVVLAPVRVEHADLEVWQAKNLCASDYVVIESTTNAWHVYDLLIQYAERVVVANPIKVKQIASARVKTDVRDTLILARLLAANLVPEVWVPPVHVRQMRQLLSQRRQLVETHTQIVNRMHSVAHRHHLKHERGKRFNEANTAWQKDKRLTEIEQLQLEVEMENRAYIEKQIGRLGKEVAKLSHKKPWADSMAYVMQLPGFGVITAMTVLAAIGEIERFESPRHLASYSGLTPGLEQSGTKNRSKGITKEGRKELRWALVEVAQRAVKSDPLLKRRFQELQKRKHRNQAIVAIARYLLELVWYVLTRRQPYRGFSQERIAYKYLTWAWQMNDEARDGLTRQQFARYYLMRLGIGQDLMRVALNPKYPRKLASEAEVLALRPELRQIR

SEQ ID NO: 256208 - protein, 341 aa, unidentified
MKKKLFIGIDFSKETFDVSYFEIEKEEEVKYSRFENNKEGFTTMLKWIKSLSEVSVSDWLFCGEHTGLYSIELASFLVKKKFFIWLENPLQIKMSSGIKREKSDKADSLDIAWYAYRFQDKAKEYRLPDKCFLALQNLLAFRERLVKNKVSLQVSANETRRVHQRDKTARYIYEHSIQEIERLDKEIQNAEKQMLEIIEENEKLAENYYLVKSVKGIGMINTVSILIHTQNFTTFENSRQFSSYTGMAPFDDSSGTTRQRGKHIKKLGTNREMKALLTQAAKSAVVHDEELRGYYQRKLAEGKPMKMVINNVRNKLLHRIFAVVAKKQPFQKDYRNPLKVA

SEQ ID NO: 256209 - protein, 312 aa, unidentified
MDANSVVVGIDVSKDRLDVHVSPSGEAFAVARDGEGLAELVARLTALQPSLVAVEATGGFETTVAAAVAGAGLPLVVVNPAQVRSFAQALGRRAKTDPIDAEVIARFAQAVNPQVRPLPDAAERLLADLVARRRQIVQMIGAEKQRQMRQAEPRLKRSIARLLTALQKELTELDRQIDDEIRSSPAWRKTEDLLKSVPGVGPVVSRTLVAELPELGQLDRRQIAALAGLAPWTRQSGKWKGKSFIGGGRASVRTALFMAALVAARHNPTLKAFHQRLIAAGKPKLVAITAVARKLLTILNAMVKTNQPWRTA

SEQ ID NO: 256210 - protein, 449 aa, unidentified
MDQPAKGISLDCIELNAAGIDVGATEVFVAVPPDRDRQPVRRFKTFTEDLRQMAAWLIECRITAVAMESTGVYWLPPYELLEEAGIGVCLVNSKHVRHVPGRKSDVSDCQWLQYLHSVGLLKASFRPDSQICAIRSLSRHRASLIESAAVHIQHMQKSLTQMNLQIHHVLSDITGLSGMAIVQSIVDGERDPVRLAALCQKGVRSDQQTVIKSLVGNYRSEHLFTLKQSLVAYRHYQQLMAECDREIEQLMQRLNGKIDPRQNGPMPPAGRGKQKHRKNQFYFEMAPELHRIFGVDLTAIPGISALTAHTLLAEIGPQLNRFPNAAAFASWLALCPANNKSGGKVISSKTRQTNSRASRALRLAAQTLDRSRPHLGNFYRRMRAQLGAPQAITATAHKLARIIYHLLSTGHSYDETIFRDEDRKQTQRHEKRLRKQANAIGFQLVPIAA

SEQ ID NO: 256211 - protein, 383 aa, unidentified
MKAVCGLDVHKDSIFLCILHSDGKLFEQVFGVLTFQLEEMRKLLQKHHVFEVCMESTSIYWIPIWRVLSPHFTLRLVNPYFIKQLPGHKSDVKDAQWIAECTMKELVRGSFVPPEIIQQLRQYDRRIFDLNAEIVRKVSKVDGVLQRCNIRLSNYVSNIECKSYRDVVRRLSEGVTNPNELMKLVHGRIVNRHGVETILASLTGVVSQAEIDVLRQLHEEIDIAESHRNECQQRMLEICEKHFPEELERLQKIPGIKERATTSLIAEIGTDMSKFETANHLASWSGLRPRNDESNKKIKSRKITHGNVYLRNTIIQCAWAASRQKDSFFSRFSYHQTIVRRKNKMKVIVAVARKLLIAVWHVLHDKTDYVDFKPDREESANNG

SEQ ID NO: 256212 - protein, 320 aa, unidentified
MKHILGVDVAKAKLDVALRLVDGKYRSKVVDNSPAGLAQLLHWLQKHEVVALHICMEATGTYWEAAAEYLADTGFVVSVVNPAQIKAYGTAGMVRTKTDKVDARLIADFCLTQQPAAWQPPSPALRELRALVARRDALVQMRTQESNRLLVARAAVQDGIQAHLDYLEKAIATIEATLRQKIDDDPGLKGQRQLLDSIPGLGEKTIPVLLSYFGGPQRFGQAKAAAAFAGLDPRHHESGTSVRGKPRLSKIGHAALRKALYMPAMVAITKTAWGRAFCKRLAAAGKPPMLIIGAMMRKLVHVVYGVLKSRKPFDPSLHSA

SEQ ID NO: 256213 - protein, 372 aa, unidentified
MAQSSTLYVGMDVHKDSIAVAYVAHAYGAEVVSLSTIGTRQCDIDKLIRQLQSKSKQLVFVYEAGPCGYWLYRYLTKKGYVCWVVAPSLIPKKAGDRVKTDRRDAMQLARLMRSGDLTPVYVPAVDDEAIRALSRAREDTLRDLKAAKLRLKAFLLRHDLRYTGRANWSPAHLRWLSEVVCPTPAQQIVFQEYVQTVTEQTERLGRLELALHEQGQTWRLYPVVEALQALRGVQFTVAVTTVAELGDLTRFENPRQLMNYLGLTPSEYSSGGRRQQGSITKTGNTHARRALVEGAWAYRYPAKVSRHLQLRLEKLPTAIQAISWKAQVRLCKRYRQLMAKGKNANQVVVAIARELSAFMWAIAKHIAVTPKA

SEQ ID NO: 256214 - protein, 355 aa, unidentified
MIIIGADYHPGFQQIAFVDTDSGEFQERRLEHREEAEKFYRDLAIQGMRVRVGMEASGHARWFERLLGELQFELWIGDAAEIRTKRVRKQKTDRQDARLILQLLIEDRFPRIWVPSCENRDLRQLLWHRHRMVQARTRIMNQLQAVALNEGLRRKKRLWRDAGREQLESFALAPWASRRRRDLLELLDRLTPTIAELTQAIEGEVEKCPAAQRLQTHPGVGALTALAFVLIIGRAERFQCGKQIASYLGLVPLEDSSGQRRRLGHITKQGNSLLRFLLVEAAQVTVRSDQEWRSKYFHLAMRRGRKIAKVAMARRLAVRLYWMWRKGWNYGQLKKFGSQGRKSASHAGVPTASTR

SEQ ID NO: 256215 - protein, 360 aa, unidentified
MKIVGVDLHAKQQSIAMLDNETGELTERVIRHEGNAVREFYATLEGPVVVGLEATGSMQWFLELLDELGIQYRVGHPAKIRAAEPRKQKHDRRDARLILELLTAKRFPDIWMPSTEQRDLRTLLRDRHQWVKMRARLQHTLQSMALNHALRKGTSLWTAAGQDTLRRLPLPPYTCQRRNQLLSLYAELQKRIQELDRQVEEQARQRPQARRLLTHPGVGPVTALATEVFLGDPSRFPNAKQVASYIGMIPREYSSGQRQRLGAMTKQGNSLLRYLWTEAAMHTVRKDPELKRFYRRKLIQKGMGKARIAAARKLGIRLWILLRDQIDYEEFCRRGKLRQNGEAHAGMPDFNSGPATAVTG

SEQ ID NO: 256216 - protein, 339 aa, unidentified
MQVTTIGLDLAKNIFQVHGITEDGTVAFNRSLRRAQMMSFFEKLEPCLVGMEACGSSHYWARELSKLGHEVKLIAPIYVKPYVKRGKSDAADAEAICEAVTRPTMRFVEMKSPEQQAILSLHRARDLIVRQRTQTINMMRGLLAEFGVIFAQGVGHAVKFAKRVTEGHSPELPQAACDVITDLSEQLLALHLRVNWYGRRMTAAAKSEPRIALLQTIPGIGPITASAIVATVGSGEQFRSGRDLSAWLGLTPINKSTGGKERLGRISKMGDRYIRRLMVVGMTSRIKQIKNAPERFDPWFADILQRKPAKLAAIAMANKTARIIWAVLTRNEPYEIRTV

SEQ ID NO: 256217 - protein, 400 aa, unidentified
MLSIGIDVSKGKSTVCGMKPGGEIVYTPFEVQHTREGMSELVSLLRSSGEEVRAVLESTGSYHCPVVAALLENGIFVSVVNSLRMKRFCSQSIRKVKTDRIDAMQIALYGLAYWQELQPTRLPEDTYRELQLLARQYYQMTSLLIKAKVDFNALCDQVLPGMQELMSDHAGRHKLSDFVLRYRHTTHILEMGETRFRKDYCKWAEKKGYRNCERMAALIFATAQNGIPVLPNAPSTQIVITEAIRVLHTVEASRDAILTQMQALAKTLPEYSLVREMPCIGDTLAPRLIAEIGDVRRFHSKRALIAYAGIDAPPYQSGKFRANNRHISKRGNRYLRKTGYEVMQSYVMHKPANDPIFTFIEKKRGEGKSGKLAMVAGLNKFLRVYYGKVTELYRSLPAIE

SEQ ID NO: 256218 - protein, 355 aa, unidentified
MKNQAIHYLAMDVHQGTVVTSVRNEQGTILMKATVPTEANPIVAVVRAWGPRVYVAFEEGTQAQWLHDLVQPHAERVIVCNVRGKSEVANKSDRIDADDLSEKLRLGSLKAVYHGTPSVLTLKELVRNYNSLVEDGTRVMLRIKALFRARAIRTPGTSVYRAARRKEWLDQLTTPGARVRAECLLEQLDLLLKLRPKAKAAMVAEARKQSGWKSLRSIPFLGDVRTAQLMAIMATPHRFRTKRNLWPYAGLAVVTRSSADQEFVGGKLRRRAKPPRTRGLNRNHNPMLKSILKGAATAAAAKPGPLQEIYEACIARGTKPEMALLTLTRKIAAIALHLWKKGELWDPAKLTMQTT

SEQ ID NO: 256219 - protein, 338 aa, unidentified
MASVKGDIIMYYVGIDISKRFVDVCLLADGMKGKRKTKTLPNGPNAVQALAEWLTRQKCDPGQAHIIMEATGVYHEHLAYGLHQSGIAVSVINPHRLREFARGMGILTKTDKVDAYVLACYGGLRQPEGWSPPSPEIRKLKALLQHRDSLLSDKQRIENRLSTLASTQAPEEVVASLDSMVRHVKSELERIERLIEDHIDKHPGLKNDLKLLKSIDGVGDQIGWNMLATIRSGHFRSAEQVAAYLGVIPVERRSGTSVRGRARLSKIGPPAMRAKLYMGAIAAISHNRHVKAQYERLLLKGKAKMLAVGAAMRKLVHLCYGVLHTQQRYDKNYGLVVS

SEQ ID NO: 256220 - protein, 344 aa, unidentified
MNEVITIGVDLAKNIFQVHGIDAEGTVIFRRQLRRSQVLPFFKKQPPCLVGMEACATAHFWARQLIELGHEVKLMPPHYVKPYVKRNKNDMADAEAICEAATRPTMRFVSVKNMEQQSILMLHRSRDLLVRQRTMLINAIRGHMAEFGIVAPGGVPQVKKLLRIIADTDDDRLPPIARTCLESLARQFLSLHDEIHTAEKHIHAWHQSNEVSRRLETIPGIGPIIASALTASITDPEVFKNGRELAAWIGLVPRQNSTGGKQRLGKISKQGDQYLRWLLVAGAMSVILHAKRRGTTNLPWLADIIARKPAKVAAVALANKNARIVWALLRQNKTYQKPATTLAA

SEQ ID NO: 256221 - protein, 414 aa, unidentified
MLKIVYRICCGMDIHKSFVVACIAPTNEQGVTTYKSKRFSTFTGDLRRCADWLSENNCKDVCMESTGKYWIPVYNILEPTCNIVLAHPKYVKAIRGKKTDKRDAKWIADIFKHDLVSGSFIPPADIRQLRDLFRYRWKLTNFTTGEKNRAQNCLTVSNFKLDDVFSDVFGKAASAITAWILEHPTEKITDISAFRTKGMKATDERVLSAVDGEMCEEQAEKLRIIRSHMSSLQLCKLNLESLILSTAEKYLPQLNLVMTAPGIQSFAAIGIISEIGVDMSVFPTSKHLCSWAGLTPQNNESAGKKKTTRISRAGAYIKPLLVQCALSAIRAKQFPEVRNRYLALKKRRGHKKAIIAIARMLLTAIYNMLKKNEPYNSELYRKSDRPPVHREVSVAEAIFILQRQGYLVAAPPTV

SEQ ID NO: 256222 - protein, 400 aa, unidentified
MTNESGVGVYLGLDVGKGEHHAVAVNRAGKKVFDKPLPNSEPRLRELFDKLRAKHGTVLMVVDQPASIGALPLAVARGAGCQVAYLPGLTMRRIADLYPGEAKTDARDAFVIADAARAMPHTLRAVDPADETVAELAMIAGFDDDLAGESTRIANRLRGLLTQIHPSLERVLGPRIQHPAVLRLLEQFGSPAQIRKAGRRRLVTLIRPKAPRMAERLVEGIFTALDEQTVVVPGTDAAALIVPSLASSLTSVLDQRKLLAARIEELLEAHPLSPVLISMPGIGVRTAARILIDIGDGSSFATAGHLAAYADLAPVTRSSGSSIRGEHPSRRGNKQLKRAFYLAAFASLSQPESRAYYDRKRREGKHHVAALIALARRRIDVLFAMLRDGTFYQLPTPATA

SEQ ID NO: 256223 - protein, 352 aa, unidentified
MAKIKIDELMSIGIDIGKDTFHIVAFGPDGQLVLRKHIKRLALVATFEKLPRCVVGMEACLSAHFVSRMLRKLGFEPRIIPAIYVKPFIKGQKNDYNDAEAIAEAALRPNLPIVPEKSQEQLDLQALHRVRSRLVSRRTATINQIRAFLIEQGITARKGLRALKNSFETILEERKDEISPRMRMILIGLYGDWLWLDDRIETVSKEIEQISRTEENGVNVMTIPGIGPMISTAMVAAIGTGEAFGRGRDFAAWVGLVPRQYSTGGRTVLGRITKRGSRYLRMLFVQAAKVILMRTNRWPDFSFGDWLTKAAERMNRNKLAVDLANKLARMAWSILRNKTAFDAIRDEVATGI

SEQ ID NO: 256224 - protein, 420 aa, unidentified
MCTRLPPAGEGGRRRSRVEEVPATARGILDLGARLLGDGVELVVMESTSDYWRIWYYLLESLGLAVQLVNPSHARQLAGRPKTDRLDCQWIARLAEMGLLRPSFVPPPEIRALRDLTRARLQLVRDRTREWQRLEKLLEGALVKLSSVVSSLAAVKSARVILEAIADGERDPRALAALAHGGVKGGRAAVEAALEGMRLGSHHPMLIRLHLDRITDLDRKAARLEDEIRDALAEIPGAWGVTAGGEPSPDPGPGAAALAAAQRLAEIPGVTPELAAMIIAETGLDMTVFPTAGHLASWAGLAPVSRQSGPRTRKPKKGQGNDYLRGYCTQAAMGAARTATFLGERYRRLARRLGGVRAQCAVGRSILVIIWHLLSDPAARFTDLGPDWNARKGDRDRKVQSHLRQLRALGVEVTITPAAA

SEQ ID NO: 256225 - protein, 313 aa, unidentified
MSEEIYVGIDVSKDHVDVHVIPLEQTRQFNRDSRGIDSLVKFLKKNPPMLIVLESTGGYELIVAGALLASGLPAVVINPRQGRDFAKAIGKIAKTDSIDALVLARFAQSVRPPVRPIATQQQQFLKDLTSRRAQLVKIRTAEKNRLSRVSSSVVRETIEDVIALLNRQIKDIDRQLRDLIKANPDWHEAEQLLKSAPGVAEKTSANLIAQMPELGHVSRREVSSLVGVAPMNRDSGTLRGRRMICGGRARVRTALYMATLSAVRWNKTIRVFYDRLLDAGKTKKVALIACARKLLTILNAILRTKKPFQELHA

SEQ ID NO: 256226 - protein, 326 aa, unidentified
MQGKEASEQETKIKSNVGIDVSKDWLDVHVLPNEQRLRVPNAGEGIRQLKRWLIRLEVALVVIEATGKWHRQVQRSLAASAIPAAVVDPFRVRMFAKAQGVLAKTDRLDARVLALFASVMTPTVRPPTPQALAELAELVTARLTAVEAQTSLKNQRAAATVKFLQHQLSRRIERAERDIEALDAAILKRIKADEGLARRYVILTSIPSFGFVSAAILIACLAELGSISAKQAGMLAGLAPIADQSGRREAARVVFGGRPRVRRILYLAALTATRLNPGMRAFYQRLRANGKPPKAALIAVARKLVVLANTLISQDRTWQHHPPQHA

SEQ ID NO: 256227 - protein, 448 aa, unidentified
MEPQEIDDEEHEQVLERVAAVDVAKASGMVCTRVPHQSRPGKRRTRVWPVDATTNAVLELADHLVAEGVEKVTLESTSDYWRIWFYLLESAGLDVQLVRAQDVKQAPGRPKSDKLDAVWLAKLTERGMLRPSFVPPAEIRRLRDYTRLRADLTCERTRHYSRLEKLLEDALIKVSAVASSLAAKSVRDMLEALIGGERDPKILASLARGRMRAKHDRLVQALAGRFDDHHGELARLLLDQIDTLSAQIGRLTTRTGELIAAIPPAQGIDADGTTGPAAGHGKNAPVLPAVDRLDEVTGIGRGGAQAIIAEIGLHMSVFPTAAHLVSWAKISPQTIQSGTRSRAGHTGKGNPYLRGLLGEAAAAAGKTDTFLGERYRRLVKRRGKLKALVAIARSILVIVWHLLDDPAARYHDLGAGYYASRVDKNRKMRNHVRQLEALGYTVTLTQAA

SEQ ID NO: 256228 - protein, 413 aa, unidentified
MQTLVERGCGLDVHQATVVACLLIVRKDGKVQKQMRTFGTITRELLSLREWLLSEGCTHVAMESTGVYWKPVYALLEGGEGGLEIVVANAQHVKKVPGRKTDVKDAEWIADLLCHGLLRSSFVPPKPIRELRDLTRYRRKLVESQSAERHRLLKLLETANIKLASVATDVFGVSGRLMLEALVEGKATPQEMAELAKGRLRQKIDELGPALEGKLEEHHRFLLRLQLDRLEAAEKDLAILEHRLQEKLKPYEAQLTLLDEIPGVDWTLAAVIIAEMGVDMSVFGSVSQLASWAGVCPGNNESAGKRKSSRIPKGNVYLKTALVEAANAAAKAKGTYLRDKFYRLKARRGYKRAAVAVAHKILVAIYHMFSHQVCYNELGDAYLDKRNKHHLTRNLVHRLERLGYTVTLEQKAA

SEQ ID NO: 256229 - protein, 413 aa, unidentified
MDWVACVGIDWGDKQHACTIQTREGSKQATTLGSSPEDVHRWVRELRERFPNGTIVAGVEQAQWSLIYELMAYEFLALVPINPRASKAYRTSLRLSGASDDAADAVLICDFVLKHLDELRVWRPDDVRTRKMRLLCEQRRSLVDQRTALTHALSATLKEYFPQVLQWFGETSRHLRAFLIHWPTLDQARQAVVADLTSVLKASGRRKASAAAQELIEKIRLAVPLTHDTAIIESHSLYALSVAALIDPLDQQVAKYDQAIAAAWALHPDRKTFGSLPGAGAVMAPRLAVAFGLDRSRYDDAREVQQYSGIAPVIERSGRQCWTHARWGFPTFLHQTFHEFAAASLPHCQWARAFYHQQRERGAGHHQAIRALAFRWIRILFRLWKTGEEYDENRLIEALKKKHSPLISRLAAA

SEQ ID NO: 256230 - protein, 412 aa, unidentified
MRRIRDKVAGLDVHRDTVVACCRVVDPDGEVEVSKQSFATTRRGLGELAVFLCDAAVETVAMEATGVYWKTVYYALEGMFDDLWLCNAQHVKNVPGRKSDLSDAEWLADVAAHGMVRPSFVPPPEIRELREVTRYRKTQVDARGKEIQRLEKVLQDAGIKLTSVASAVWSVSSREIIEALIAGTRDPAVLAQMAKGRMRSKIDRLEEALSGHFGQHHAIVCRQIIDHIDFLDRSIGALTDEVTTRLVPFEAAVAILTSVPGISRRTAEVIVAETGADMSRFPTPGQLCAWAGVAPASYESAGKRRPAGTRHGSQWLRRALIESARAAARTKNSYYSAQYARIARRRGANKAAVAVANSMLSTIWHLLSNGQLFEDPGADYFERRHDPAVEAKRLARRIEALGFDVNLTERAA

SEQ ID NO: 256231 - protein, 424 aa, unidentified
MKVTYQTCCGVDVHKSFLVATIVKTTGGIEPSYQKKRFSTFNNSILEFKQWLLDNDCRDVCMESTGKYRVPVFNLLEDEINVVIANPKWVKAVKGNKDDTKDSKWIGDLFRLGLVKGSYIPCKIVRILREYTRYRYKLVSCRSSEKNRYQNTLTVCNVALDSVVSDIFGKSSTSIIDYLLEQSGTSINHEEIASKLLRSLKSKEDAVIESIEGYQMTDAQKYRMRLVRAHMDYITAEINDVDKMIENMISSNSDFENAVQLLCTIPGFKHDSAITIISEIGTDMSQFSSSKRLCCWAGLTPGSNESAGKKKSVRITRAGVYLKPALVQCAHAAVKSDKFPYYKKKYESLVKRRGKKRAIIAIARMILTAIYQMLSTGEQWNPSDLYKVDMPVALVEKQKAKAIRQAKKLLQREGMLPPDEPLAS

SEQ ID NO: 256232 - protein, 428 aa, unidentified
MKYNTQNAKIASITEKALIVGIDVGSETHFARAFDWRNYEYSKKPLEFSNSKSGFETFKAWVEDIAEEHGKDVVIPGMEPTGHYWFNLGAYLQDNGMRPVHVNPHHVKKSKELDDNNPNKNDRKDPKTIAALVNEGRFLYPYIPTGIYAEIRSLSNLRLQAQEEITRIKNRIARWFSIYFPEIKDVYKKPDSVSGLMVLKEAPLPQDIVKLGADGINKIWRDAKLRAAGPKRAKTLLTAAEQSIGSQEAPDSARIELKNLLNDYEIYRKREEELMKLIEEKLTEIPYIDKLLEIKGIGLKTVSGFIAEAGDITRFDNPKQLQKLAGYAIVECSSGKHKGESHISYRGRKRLRYVLYEASISLIARNEEFKEVHRYYRTRKKNPLKKMQSVIAVACKALRVFYMILRKGVSYDGAKMLQDIKRPQMAAA

SEQ ID NO: 256233 - protein, 411 aa, unidentified
MRILHEYCAGLDVHKETVAACALWIGEAGECREEVATFGTMTRDLVALSDWLVARKVTHVAMEATGVFWKPVFNVLEGRFEVVLVNARHIKQVPGRKTDVKDCQWIAELLQAGLLKASFIPDRAQRDLRDLTRQRAQLTGEQTRAANRVQKVLEDANIKLASVASDVLGVSGRRMIEAILAGQTDPQQTADLALGRLKNKREALSAALEGHVTNHHRFLLREHWDHLQYLEKAIGRIDERIEELMRPFVREIQLLDEIPGVDVVVAHAMIAEIGADMRPFPSAAQLASWAGLCPGNNESAGKRKSGRIRKGSRWLRRCVSQAAWAASHTKETYLSAQFRQIARRRGKKRAIIAIAHSILVSVYYMLRDKVSYKDLGANHFDRLNPERLKRYHLKRLRALGCQVTIVEDVAA

SEQ ID NO: 256234 - protein, 419 aa, unidentified
MLYACCCGIDVHAKLLVACLVKAGRKEVRTFSTMTEDLLRLLDWLTQEGCTHVAIESTGVYWRPVFNILEGAMEVILTTARDAKGYKARKTDVIDAEWLADLLRHGLLKPSFIPPLPIRELRDLTRYRESLVREQTALANRIQKLIESANIKLGQVASDALGVSGKLMLRALPACAHRAGKAAGETDAEQMSHLAQRTLKRKQPQLQQALEGRFTSAQRWILGQLLDQYDHVEAALQSVAERIRQEVETSADPFVAEAVQLLDTIPGVGETVAQIIVAEIGVDMERFPTANHLASWAGVCPGNNESAGKRKSGKTTKGSRYVRAALVQAAWAASHQKGTYLAAQYKRLVKRMGKKKALVAVGHSILVIAYHVLQNRTPYQDLGGDYFERRNVDKQRKRLIRQLESLGMKVTVEEVKEAA

SEQ ID NO: 256235 - protein, 343 aa, unidentified
MQTVTTIGLDIAKSVFQVHGVDAEGNVLIRRQLKRRYVLAFFQKLSPCLVGIEACATSHHWSRELKALGHNVRLMPPAYVKPYVKRQKNDATDAEAICEAVTRANMRFVETKTPEQQSCLMLHRTRQLFIRQQTSVINAIRAHLAEFGIVAPVGRKGVEHLLAIGTDGSDQRVPEVTQACLAALGAQLRMLKAQILEFDRRILAWHRSNETSRRLDAIPGIGPALATALVASVADPNAFRSGRNFSAWIGLVPKQHSSGGKDKLGSISKQGDRYLRSLFTAGALAVIRYAKIHGTQHRPWLTALLARKPTKVAAIALANKIARMAWALMAKGERYNEPVALGA

SEQ ID NO: 256236 - protein, 329 aa, unidentified
MQFTSILGIDVSKKTLDCFLHVQQKGIPPVSNDSKGFKTLLRWLKKELKTTDGLLVVMEYTGIYTYGIERYLEHCQIKFVKRPALDIKRSLGMIRGKSDRADARFISKYGWLRREELQPMKPQSDRQVALQQLMGHRDKLVADMASYKSKLKELSLQMGEKLNEKIASSMRFVMDVLQQEIRETETAIDLLIKEDNVLKTNYSLIQSVVGIGFATAVHLLIATENFTRFADARKFTCYCGVAPFEHSSGTSIRGKTRTSHLANKKIKSLLTMAATSAIQHDPELKSKYRQKVEEGKPKMSALNIIRAKLLQRVFAVVRNQQPYEIRIAA

SEQ ID NO: 256237 - protein, 343 aa, unidentified
MSEITVIGLDLAKHVYQVHGADPDGRPVLRKRLRRGQVLEFFASLSPCLIGMEACAGSHYWGRELQALGHEVRLIPPQYVKPYVKTNKNDATDAEAISEALTRPTMRFTAVKSAEQQSVLMLHRTRELLVRQRTMLVNALRGHCGEFGIVAAQGLSRAGDLIKRIEDPADTALPDLARQALQCLTSQIRAIQEQIALIEKKLLAWHCSCEASRRLAEIPGVGLITATAVVASVGNATQFRSARQFAAWLGLVPQQHSSGGKERLGHISKRGDGYIRRLLVHGARAHLSWSRRKKQIRSAWLTGLLARRPTNVVLLAMANKTARIAWAMLSRGERYQEMIAAAA

SEQ ID NO: 256238 - protein, 332 aa, unidentified
MVAGTQGSLNKAGSTKMTQISRTAGIDTSKAKLDIAVHGGLDRWQVDDTPAGWRRLAADFTGAEVMRVGIEASGGYEQGVVGYLRDKGFTVLVLQPIQVKAYARLHLRRAKNDKLDAVLIAACAATIEQVRIEPDRRLTKLAQHLTFVEQIEEDIARFKVRLEHIDDPRLRRVVMADIARLKARRSAELLRIVTALRAHDDLARRLDLVLSVPGLGERTALALIIRMPELGRVSREHAAALAGLAPFDDDSGKHKGERHIAGGRRRLRRSLFAAALPAAFRWNKALIELYSRLTKRGKAHNEALIACARKLLIYANTVVHRGTPWTERPLAA

SEQ ID NO: 256239 - protein, 343 aa, unidentified
MKLIRVGIDLAKNVYQLHGVDCFGETVLKRRLKRHQWLNVLLDKTETDCVIGMEACGGAHHWARELQARGYTVKLIPPQFVKPYVKSNKNDANDAEAICEAMSRPNMRFVTVKSVAQQDIQATHRVRAECMAHRTAKGNQIRGLVSEYGLVAPQQSAALRAAIPCWLEDAENGLTSRFRALLHGLWEDLLRLDERVAILDADIALIAKTDPVAKRLQQLRGVGPLIATALIASVGSGEQYAKGRQMAAALGLTPKQHSSGGKDRLLGISKRGDGYLRGLLIHGARSTLWHARHKQDRLSRWMNDLSARRHPNIAAVALANKTVRMAWAMMRNESDYDPEFATA

SEQ ID NO: 256240 - protein, 490 aa, unidentified
MTASVYAKPQPELRNLFDRAGDPRKVLCAPIDYAKRKHIVLFCNGVGDILKQAFSVDNSPTGLTDLLAQLNATCRHHHLERTSAFFGGEDVPAWAENFIAALRVKGFPVARVNAWEAKKQRENFQASSDTLDLLGIAQCLLKQRGKFNPPVADAYRHLRDLCRERHGFVTAATALTNRLHNYGDRLFPQFLNPNKSGIPPFTPACWWLLQDRFSAPQVAQRRTASLIKGLQRQGLPDAPTAAATLQALAREVLPPCPQYVATWQQLVKALADEGQSLQQIIAGLDHQIAPLLAKTPGAVLTSIAGIGVTLAAGIAGELGPPDQLPNLDLLCSYAGIVPATKQSGGPDQAPVVLGVRHRCNHHLKNYLVQAANKMGQMGPPELQQRYRDVQARNSHADFVVAKDLLGLGKSLMQRQTLYLPPDLYAPESCASARAAYYLDLWPKLLIKWQPKAPLAQVFAADTPLGKWRAMVQDIYSISLPLPQRSRSAKA

SEQ ID NO: 256241 - protein, 324 aa, unidentified
MIDGVLGIDVSKNTLDASMSSCNKVRARSFANSPDGWRHLLDWLITQRVRRVHACLESTGRYSLGIAGALNEAGHVVSIVNPAQIRDFARTKLGRNKTDGVDASHIREYCELFKPKPWAPPSAAHRRLGELQTIRAGIITGLTEWKNRKNSGMIDAVAQSLADVTISHFTSQLSTVDEAITQTIDNDSVLRRKRDLLLSISGVGETLAGVVLAELPGPDVLHSSAEVVAYVGLNPRQHQSGTSIDRVTRISKIGNAVLRAALYMPAMSAMRYNPAIVALVARLKSQGRLKPKQIVVAAMRKLLVLCFGVLKTGKPFDPAIAMGC

SEQ ID NO: 256242 - protein, 350 aa, unidentified
MNVTTYGLDLAKRVFQVHWVEPETGELKRKTLARAEVCAFFVRRAPGVVAMEACGSAHYWGRVLSGLGHQVRLIAAQFVRPFVKTNKTDAADAEAIWEAVQRPGMRFVALKSEEQQAVLSLHRMRAQLVKIRTMQAYQVRSLSYEFGVVAPKSWRALLAQVAPLLADPTRSPVPELVRGELLSQLEGLRTLTTRIDELERQIAGWQRREVECQRLAGIPGVGRLTATAVVATVADARSFRSGREFAAFLGLVPRQSGTGGRVKLLGISKRGDPYLRTLLIHGARSVLLSQSRADRVMDPWLRGVLSRRPKNVAIVALANKMARTIWALMAHGRTFDPSWGRTAMAVPTEQ

SEQ ID NO: 256243 - protein, 416 aa, unidentified
MTFKVVRFICGGMDVHKNLIVATIGTTDRQTLITEYIQQSFSTFYSDLIRLKEWFISHDCYDVCMESTGKYWIPIYNVLETELNICLTHPKYVKAIKGKKTDKRDSKWICDLYKCDLVKHSFIPKKEIREMREITRYRCKLVYMRSSERNRYQNCLTVSNISLASAVSDPFGKTATNIMKELMQSEVIEDDKILKLIHKNCKDKDKILDSLQGYHIESDQRFKMDTVMNHIEYLDKQIQACEAELIKRAYPLRDYFQHITHIKGISALSAILIVSEIGTDMNQFESDKQLVNWAGLSPANNESANKKKSVRISKAGQYLKPLLVQCALSSIKDKNSYFGIKYCRIKKRRGHKKAIIAIARMMLVCIYHMILTGEEFNPCDYESLTNPKPKKEPIMTVESALQFLKDSNFDFSSIQL

SEQ ID NO: 256244 - protein, 321 aa, unidentified
MSIVPVFVGLDYHDEGIEVNVMAAQGEVLATRHCPNDWRAVMAVVPAHCRVVGAAIEACCGAADFAEELIQKAGWSVDLAHPGFVARMKQNPDKHDFGDARMLADLERVGYLPRVWLAPQELRQLRRLVRYRQQLAGERRNLKLRIQASLREDRVPRPEARPWTQAWLHWLTEEADLGEQSRWVIERQLRRLEQTNQELMLTERRLARTTAKDQVVRKLMEQKGVGLITAVTLRAEIGRFDRFRTGKQLARFCGVTPRNASSGKRQADAGLIKAGNPQLRVVLIETAHRLMRFDARWVVLGASLRHRTRSGSIAAAAVANR

SEQ ID NO: 256245 - protein, 394 aa, unidentified
MKLVGIDIGKNSHHFCVMDKETGELNVTPSSFSNNKEGFDFLINSLKPYSKKSILLGMEDTGHYHVALLKFLLSNGYTVALINPKTTDLTRKMEGGITKNDKLDTITICNVLDTPERKKQYRITKVDRFDLYEQRQLTRHHHNLKEELNIYCNRLQKSIDLVFPEFNTLFSSKYGVIYMNLLKTFGSAEAIASTDIRTIRKCFEIKGRGGRISLTAEKLKECAKNSIGIYSEVETIQIKHLVSQITLIKEQIAEIDKKIEEFSIKNNSPILSIPGISHFSGTSILAELGDIGNYSKPSQIIKFAGVAPYHYESSQYNAQHTGITKKGSKYLRKTLYQIILPVINNNPVFKKYYRLKISQGKGHRCAQGHCIRKLLRIIYHLLETGQSFDPALLR

SEQ ID NO: 256246 - protein, 332 aa, unidentified
MNAVSTLGIDLAKNSFSVHGVDATGIVTVRRTVSRGKLAELMARLPPCLIGMEACSGAHEWARRFGAAGHTVRLMAPKFVAPYRKSGKNDGNDAEAICEAVCRPNMRFVPIKSVQQQADLSVHRVRQGFVEERTATFNRVRGLIAEFGYVLPNGVEQLRRQVPQLIDRLPAQVARCVRDLLEHAERLRGKVLEYEREIRISVRDNELARRAHTRPGIGPITASALVATVGNGHDFKNGRQFSAWLGLVPRQYSTGGKTRLGHITKRGDPYLRTLLVIGARSVLQRAYRESDPLSRWALALQQRRGYHRACVAVAAKNARVAWALLAKGDSAA

SEQ ID NO: 256247 - protein, 325 aa, unidentified
MDEPMNAVVGIDVSKKKFDLALLHNDKCKHKVFSNDHSGHTSVVTWLHKQDVQSAHICLESTNIYGEALAEVLHDAGYVVSIVNPARIKGFALSELARTKTDKTDASLIARFCQAMAPAAWIPDPHEIRELKALVRRLEGLNEMRQQEVNRLHVAPDIIKDDIEHHIAFLDKEIKETKKRIRDHIDNRPELKQKKTLLESIPGIGEATIGIILSEFSQIDSFTNAKALAAFIGVAPRERQSGTSVRSRSKMSKTGRSQLRKAFFMPAMVALRYNPILIAMKTRLTDAGKSKMTIVGAAMRKLVHLIYGVLKSGLPFDPNYVNRKG

SEQ ID NO: 256248 - protein, 408 aa, unidentified
MSTHHGKLFAGIDWASKTHAICVVDEHGAIKLRIDIANTGKTFAGLIKRLTKLDVEGVAIERCDGPLVEALLDADHQVFVITPRQVKGLRSRYSGSGAKSDAGDAYLLADVLRTDGHRLTPLTQDSDATQVLRSLSRTRKQLVEARVGLVNQLRAELERCFPGAIGLFSRLDSDVTIAFLRRYPTQHAASNGTTRLTQARFAAFLRRIAYCGRKPIEDLYARVAGAPPAGLSTEEASGHAVCVLALLKAIETVRNQERELEAEIIERLDAHADAHIFTSLPKAGHGVRAAALLAEIGDVRARFPDEESLAALAGVAPVTRASGKHHAVGFRWAADKKLRNALIDFADDSRHASPWAAKVYNDAISRGKRHPHAVRILARAWIRVIWRCWQDNLPYNPQQHGGAMQIAA

SEQ ID NO: 256249 - protein, 310 aa, unidentified
MDAIVVGIDVSKDRLDVHVHPSGEAFGVARNAEGLEELTARLAPLGVWAVAVEATGGFESVVAASLGGSGLPVIVVNPAQVRAFAKALGKRAKTDPIDAAVIARFVEATKPQIRPLPDADTQLLAELVTRRRQIIQMIVAERQREKQMANRRLKKSVARLILALSKELNELDAGIDEAVRGSPAWREKEDLLKSVPGVGPIVSRTLIAEMPELGQLDRRQVASLAGLAPWTRQSGKWRGKSFTGGGRRTVRTVIFMAAMVAKRCNPVLKDFHQRLINAGKPKMVASIAVARKLLTILNAILRDKKPWQPA

SEQ ID NO: 256250 - protein, 369 aa, unidentified
MKKTVKYIGMDVHKNSISIAIADQGRDCEVRYYGKIAHDMDQLAKIIRKFISQGAELRCVYEAGGCGYHLYRYLTSNGIDCAVVAPSKIPRKSGDRQKNDKRDCLALARLHRSGELTAVYVPSEEDEALRDLVRARSDAQNAHKKAKQQLAAFLLRYHIVFSGKSKWSKAYFNWLADISMPHSAQQITIQEYIDAVKTCSNRVDRLTEQIRQLSEQSRLNELIKALQSMRGISLIVAATLASELGDFSRFERPGQLMAFLGLIPSEHSSGDRQRKGSITKTGNGHVRKALVEAAQAYRLPARKSRAIQKRQEGVPKEICDISWKAQCRLCGRYKKLIGRGKKTNVVKTAIARELAGFAWAIAIELPHAA

SEQ ID NO: 256251 - protein, 376 aa, unidentified
MNIIGIDLGKTVFHLIAMDQHGAITGKKRLSRPQLLTFLANTPPSLVAMEASCGAHHLGRRLVRQGHEVRLIPAQFVRPFVKCQKNDYVDAEAIAEAVQRPTMRFVPIKTEDQLDLQALHRVRDRLIERRTSVINQLRAFLLERGIVLRTGRTHLRKMMPALLADAEQHLTPRIFRLLCVVAEEWRQVEDEIQHLDREIEAVASSDAACQRLLTVPGIGPLIATAMVAAIGNGSAFSKGRDFAAWLGLIPKQCSTGGKAKLLGISKHGNEYLRRLFIHGGRSVQHRVARDQHAFGQWLSQLESRANANVVGVAMANKLARIAWVVLSCQEDYRRGPARSPLSTEEAGFGLQIVHEPVSAAHQGSSMNSLRSALTGA

SEQ ID NO: 256252 - protein, 403 aa, unidentified
MNNVAGIDVSKGKSMVSVLRPFGEVVAKPFSIGHTGSELKELADYLKSLDGETRVVMEHTGRYYEPVARFLHDEGVFVSAVNPKLIKDYGNNTLRKVKTDKADSRKIARYGLDNWAELRQHTPMDTIRMQLKTLNRQQSLYTKTKTMMKNNLIALLDQTYPGVNALFDSPVREDGSQKWVDFATAFWHVDCVRNMSLTAFAERYRKWCKRHGYNFSQSKAVEVHAGAQDLIAMLPKDALTKTMVRQAIDALNAVSASLERLKAEMQALAAQLPEYPVVMAMHGVGDSLGPQLMAELGDVTRFTHRNAITAFAGVDPGADQSGTHEAKSTRVSKSGPPELRRALFLVMDCLLKTQPQDDPVYRFMDKKRAEGKPYLVYMTAGANKFLRIYYGRVKEYLASLEEN

SEQ ID NO: 256253 - protein, 418 aa, unidentified
MLYAGIDIAKHGHVVGAVDERGRALSKPMAFKNSSSGFERCAAYLAGIADDKSQVVVGMEATGHYWLPCFCFLTGKGYSVVVINPMRTDAMRRFKNLGKVKTDAIDCALIAETLRCGDFEPSRLADEKLVSLRQLTRLHQSMVESAADLKRQVIVALDQVFPEYSGLFSDMFGESSKAFLKRCPTPDEVAAIDIRTLTSLLDRASRGKLGREKAAEIKAAAKGSCGVTVAADAFSFQIKLLAQQIEFVEGQADEVAKRVRGLLDEVEPLIVTIPGISHKLGAQIVAEIGDVGRFKNAAAIVKYAGINPSRNQSGTFEGEANHITKQGSPYLRRALYLAATAQLKCKTPLYDYYLRKRGEGKAHREATVAVARKLVHVIYAVLSKQEPYDPAYAAQLPASRSERIDMKVSKCDSNNSLR

SEQ ID NO: 256254 - protein, 388 aa, unidentified
MQTAADHPEAPTAIRHDLGAIFISLELSRSTWLITSLSPGGGEKMSKHSVRGGDVAGLLERFAQLQEKARARTGRTFPIIVIQEAGLDGFWIHRVLQNEGIESHVVDPASVATSRRRRRAKTDRIDGEALLRTLLAYKRGEPRVCAMVKAPTPEEEDRRRLCRERKVLTNERVQHVNRIKGLLFGQGVSGYEPLRRNRRQQLNELRTGDGRPLPKHLKTQISRELDRLELLLEQIKAVETERDALLAAQKVALPGPAAMLLDFNGIGPEFTAVLWSEGLFRHFDNRRQVASYAGLAPTPWQSGSVDHEQGVSKAGNPRLRTTLIQLAWLWLRHQPQSALALWFKERVARNGGRHKKTTVVALARKLLVALWKYVTAGVVIEGAVMKTA

SEQ ID NO: 256255 - protein, 397 aa, unidentified
MYIVGIDIAKRKHEAAVIDGEGAVIIKPFSFTNNCSGYNRLLAMLAKAKLPLDEVSFAMEATGHYWLALFTRLQKEGFRVQVINPVQTNSIRSFYIRQAKTDPRDALLIAEVIRFGHFSESTLHPENIYELRELCRGRHAIVSMQADVKRKVVALLDQVFPEYETAFTNLFGDTSMAILQTCPTPKELSEMPLEELCYLIEVSSHKRFRMAKAQELQALARGSFGFAMAGDVFSTMIRLYAKHLVFLKQQVREMDRKIAEIMDTLDTPITTITGIGPTLGAYILSEIGDISRFSSAAKLAAYAGIDPTMRQSGEYNGVRNRMSKRGSPYLRHAIWLAASSAVLHDPALKLYFQKKRDEGKPYMASVGHACRKMVSIIYAVMRDNKAYTPCIPNEISA

SEQ ID NO: 256256 - protein, 309 aa, unidentified
MDKITVGIDVSKDRLDVAVRPSGEVFVVARNAAGLEELVERLCSLGPHLVALEATGGFETVAAAALAAAGLPVVIVNPAQVRAFAKAIGQRAKTDPIDARVIAHFAEATQPEPRPLPDEATRLLADLVARRRQIIDMIGAERQREKRAPARLKKSIVRLVKALEKELTSVDGDIDDAVRGSPAWRETEDLLASVPGVGSTIARTLIAELPELGRLDRKQIAALAGLAPHTRQSGQWKGRSFIGGGRANVRTALFMGAMVAKKHNPVLKAFFDRLVAAGKPKMVALIAVARKLLVIINAMIRDKKPWQFA

SEQ ID NO: 256257 - protein, 362 aa, unidentified
MNETYYIGFDVHKKSVSYCVKTASGEIVQEGQFTARREVLRMWAAAQPGPWQGAMEATLFSAWIYDTLKPYAQQLHMGHPARMKAISAGKKKSDRLDARTLADLLRCNLFPDCYVLSPEMRDLRRLLRYRHLVVRESVRMQNKMAGLLMETGTPFVKAKLHGKRYFTQLLQTLEEVPESVKDLLKMSRGALEMFEATQKRLVKHLLADPVLQARVERLCTIPAVGAITALTWALEIVDPFRFPSIGDAVSYCGLTGPFRSSADQVQRAPLSKQRNAWLQSTLIEAAKLAPRWNPPLAVLHQKELERGHRNRATLQVARKLVAYLLAVDKSGQPFQMRSSPAPARVLSTNKGLKAARATLQPV

SEQ ID NO: 256258 - protein, 340 aa, unidentified
MNIKRIGLDLAKNVFQIHGVDHHEKVVLRKNLRRAHMMTFFSGLSPCLIGIEACGSSHYWARELTRMGHTVRIIPPKLVKPYLKGNKNDANDAAAICEAISRPGMRFVALKSEAQQTLQAEHRVRARIIRERTALCNEIRGLLSEFGLVLPVGINHVRKALPEILSQQEQWNDRFIRLLCELSEELQMLDERISRHDRRLQQAARDDIRIKRLMEIEGFGPIVASALVAAVGDAKHFKNGREMSAFIGLVPRQHSSGGKERLGHISKRGDSYLRTLIIHGARAVLRFSAGKTDRRSLWLQSVAERRNNNIAVVALANKNIRIAWAILSRSEEYRGVENAA

SEQ ID NO: 256259 - protein, 376 aa, unidentified
MNEIAEIYVGLDVHKETTSAAIAEAGRQGEVRFWGQFDSNPAALTRLFTKLRSRHARIAVCYEAGPCGYWIYRWCIQHQIHCDVIAPSNIGKRPNEQRMKNDHRDAMMLARLYRSGELTRVWVPDEIHEAMRDLVRVRETASEDRRRARQRIRSFLLKYQYHYGAKCWTKRHRIWLSDRSFPITAQQIAFQNHLNALEQVEARITEIEQQILELLPHWSLGCQVEALQALRGVALVVAVNFVCEVGDIHRFERPHQLMAFLGLVPGEHSSGGSHRPTGITKVGNTHLRSILFEAAWNYTKNPRVGQYQLKHRNDALPQHARDIAWKAQVRLTKRYRYLMARGKRSTVAITAVARELVGFMWAIAIEVTPPPIATET

SEQ ID NO: 256260 - protein, 312 aa, unidentified
MEKLSYGGIDVSKDCLDVVVLPEGWFFSVSNDTAGWAELVARLRPLAVCAIGLEPSGGYERGIIRALLAAGLSVRRINPNKLRQFARARGVLAKNDRLDARLIAEYVAIMPTRVVQRNDAVERLAEIVTMRRQLCDEHVAVENQAVHLEDAMLRRLSKRRLIRLEADIRLLDKRLAEMVATNAAFAQLYELLTSMPGVGPVLAFTLIALLPELGKMSRKQIAALVGLAPYDFDSGKLRGHRSIYGGRMPIRNVLYMAALSASRHNPALKAFSNRLADANKKSKVIIVAVMRKMITTLNAMLRDNAAWQPQSA

SEQ ID NO: 256261 - protein, 334 aa, unidentified
MAFLHYIGVDVSKNTLDMAVFKGKDFVFHKVIDNKKIAICNFLKELEMIRGVGLSESVFCMEHTGIYNNPLLVCLHKKRGNVCLEVASQIRYSLGNIRGKSDKIDAIRIGEYVYKNREEIKLWVPKREIVVKLERLSVLRDRLLMTKKQLSVPLKEQKNYIKESFSNLEKRLCQRTLNSLNADLKKVDKQIEKVLREDEHILRLFEIITSVSSVGTQTAVSIITCTNEFKDIRDPKKFACYSGVVPFTRESGLFKGRGRLSHMANKKMKTLLHMCAIVAIGSNKELKAYYLRKVGEGKNKMSVINAVRNKLIHRIFACLRENRKYENNYIKTVA

SEQ ID NO: 256262 - protein, 410 aa, unidentified
MLFIGVDLSDKYFDSCVTDSDGNVISRNQFEFDHDGFHSFVWAIQKHETDRQDCILGLENPRSRLVDFLIQMGYTVMPTHPESIARYRESRFPSRAKSDPADARLIADYVREHHKNLRPISMPDETTRELSILLEDRNRLVDQKVQFSNQLTSTLKEYFPQALEAFGSITNKSALKFLAQFDTHEQVISMSSQEIESALKECQCFRKDSQERFHKAMGKTSSYIPSGVMKAKIRLKNALVGHLLLLLNQIGDYEKYIKNIMDETPHGDIFRSLPGADYILGASLLVLYSSREFESASEAQAFWGTCPYTVRSGQSTSVRFRKGCNKFGRNTFHQLAFCSLQKSLWAKKLNQKKRKEGKNSNHALRCVANKWVKVSFAMWQNKTNYDESKHMASVAKHMMNQHAFILSLTS

SEQ ID NO: 256263 - protein, 344 aa, unidentified
MDHFGGLDVSVKETSICIVDDTGRIVKEVKVASEPAALLKVLGNPTYRFKRIGLEAGPLSQWLFSALAESELPVICVETRHMQAVLKAQINKTDRNDARGIAQMIRVGLYRPVHVKTLRSQKLRMLLTHRKLLQSKAIAIENDLRGTLRNFGLKVGMVGKVRFEARIQELVENIPDLAVLVEPLLIVRRVLREQIVILHRRLLAIVREDEVCRRLMTTPGVGPVVALTYRATVDVPARFRKSKSVGAVFGLTCSRYQSGEIDWSGKISRCGDEMMRTMLYEAAQSMMHSKKWSWLKAWAMQIARRRGMKKAIVALARRLAVIMHRIWVDGTEFRWTREKAEAAA

SEQ ID NO: 256264 - protein, 338 aa, unidentified
MKTSKKHVAGIDVSAETLDLVIRKKGKNYKVKKFQNTPDGHTSLVDWMVKHNVSHVCMEATGVYHLDLAVTLDLVNALEVMVLNPRIARRFAEATMTRGKTDAIDAGILAQYADCMEFVIWKAPKPKVLKIRAYSRRLAALGKFKVQAKNQLHALQATVHTPVQVLEDARLMIEQLENQIENLESNAIALIHSDNELKNIIMLLISIKGIAEKTAIQLIGELLVLPVDMTSRQWVAYAGLDPRVVESGKSISKKRRISKAGNRYLRKALYMPALCATRHEANVKAYYQHLVNDNGLTKLQSVCAVMRKLLHAVHGMLRSGKPFDGNRFYVIPIQGQIN

SEQ ID NO: 256265 - protein, 335 aa, unidentified
MKNLSQKDNDLKDHNENFFVGIDVAKDELVIHILPTNQQLTVPNSKDGIKELITLFKEIKPKQIVLEATGGLERELLTNLAAKDFIVIAINPRQARDLAKGLGELAKTDAVDAKILAQFAQLQILTPRPVPSRKIQEMNDLVTRRQQLIQMRTMETNRSQQTNQKDIVESIEKIVNALNKQIDEIDVRIQKMIDDNPDWSEKDKLLQSVPGGGAKTSQVLIAALPELGTLNRQQVAALVGVAPFCRDSGKKSGERHIKGGRADVRSALYMATFAAIRWNEKLRTFFDRLIAAGKKYKVALVATMRKLITILNVMVRTKTHWKQPEGLTEKGGKND

SEQ ID NO: 256266 - protein, 336 aa, unidentified
MKKYIGLDAHSSTCSFCVMDVKGEIIDTATLATNGRLLVGYLRSISGEKKLTFEECELSGWLHEILRREVDELIVCNPVENKAYKKAKTDKLDAKKLADLLRGNYLKEVYHDGSDREKFRDLMSGYQDLVDDAVRIKNRYKSLFRKEGKRVTGTALYSDENFLKGLERKDFKFIGEHIYRQLRVMEESRSTYVIEIKKCCRKFKEIKYLRTLPGIADIQAAKIVAQVIDPVRFRDKYKYFSYCGLVRHRQISGDRVYGDKKIWGNRILKCVYKMAAKSALTGDNSLRKYYDYLRSKGTGHKNAKNAVSRKIAAISLALWKRSEKYRDDVITNDLIK

SEQ ID NO: 256267 - protein, 363 aa, unidentified
MSQSSWLAAGVVPGIERQPLKKLETSEQALMQLLQRWRAEAVKAGRTIARIVIAFEAGRDGFWLARWLGSQGIEAYVIHPTSVAISREHKRAKTDRLDTAMLLRVLLGWLRGERGHCSMVAVPTIDEEDAKRPSRERESLVGERTRIINRMKSALVRLGIRGFKPELRRAPQRLQELRTPGGHPIPPNTLDEFRRDLARLALIREQIEEIERARLERIEQAPPTGPHAMVRLLASSVGVGVETADMLVQEILSRNLRDRRAVARYAGLTGSPDESGAKRREKGLAKSGNARVRRGLIQLAWRFLLFQKDSALAQWYRARTEGPTGRRKTTIIVALARKLLIALWRLVTVGEIPQGVTLRSVAA

SEQ ID NO: 256268 - protein, 422 aa, unidentified
MKTYILRDPQTVEPQTPLPQFVSEDPVLSATVEAICGRPAPPSPAPGGRILFTGLDVHNDTIAVSLAPSDSTEVRRYGIIGGQHDDVLRLLKKLSGAHPGVALKFCYEAGPRGYPLCRFIRRQGAECLVVAPSKVPRQPGDRVKTDRRDADQLARLLRAGELSGIYVPDPQDEAVRDLIRARYQVQRQQHRARQQLKMFLLRQNIRYAGTKPWTAAHLRFLATVKVAFAEQQFVFQEMVNVISEAGQRLERYEKQIASVVAGWRWQPVVAALMSLRGVALLTAATLVAELGDLHRFASAPQLMSYLGLCPSEHTTGNDRQQGGITKLGNGIARKAMIEAAWNNSRPARVSRTVLARQEGLPKAVTEAAWNAQTRLQQRYKHLTGVGRKKSQVAAAALGRELAGFVWAIGRMVKPRATPEAAK

SEQ ID NO: 256269 - protein, 341 aa, unidentified
MRKTLFCGVDLHSNNAMYVIADGRDKQLLAKRLPNQLPTILETLKPFRPRLKVVAVESTYNWYWLVDGLMDHGYPVVLANPSEMEQYDGIKEADDLTDAAFLAKLARLEVLPTGYIYPKKDRPVRDLLRRRMLLVQQRTGIVLSLQNLAMRQSGHSLPWRDLRKLDATERAQLLGSHECLTFVAEEQIDLIEQLNEKIRRFEKKILEHAQLKPQYERLQTMPGVGVILALTIMLETGDIERFATVGDYTSYCRCVRATHSSNGKKKADNNSKNGNAYLAWAFVEAVHHAIRVCPKAKSFYDKKRAKRNGALATKALAAKWSKAAYYMMKRQEPFDLSRVFG

SEQ ID NO: 256270 - protein, 342 aa, unidentified
MYYIGLDVHKKTISYCVKDASGQVHQEGKVGATRRELDSWIKTLPQPRTMAMEATIFTGWIYDHLLPHAQQVKVAHPLMLRAIAAAKKKNDRIDAGKIADCLRCDFLPECHMASTQIRDRRRTLRYRHLLVRQMVQMKNRISGLLMETGVSYNKQRLHKVGYFRELLSTNEDVHESIRPLLKLSRDIVVRLQKTEYALVSSLQRDPLLADRVKRLRTVPGVGPITALAWALEIGDVARFRSIRQAISYCGLCGEEKSSADKVMRTPLSKQRNKHIQRVLVEAAKLAPRQDHDLALVYETEKQKGNANRATLAVARKIVAYLLAVDREERDFVPAENYQRAAA

SEQ ID NO: 256271 - protein, 413 aa, unidentified
MTVFCGIDWAEDHHDIALVDQHGTLLAKRRIGDDAAGFATLLQLLAEAGDSADAPIPVAIETSHGLLVASLRATGRPVFPINPMSVSRYRDRHSVARRKSDAGDALVLANILRTDLAAHRALPADSELVQAIAVLARAQQDAVWARTDAHNKLRSLLREFYPAILQAFASKRGGLLRPEARALLAAAPTPRAAARLTVAQLRALLRRAGLQRGIDAEAARLQQVLRGDYLHHPSLVEEAFGQQTLALLRQLDTAYANAEQLAAATAERFAQHPDAAIITSMPGLAELTGARILAEIGDDRARFADARGLKAYAGSAPVTRASGKSTAVLHRRVKNQRLASVGYVWAFAALTASPGARAHYDRRKAAGDRHVAAQRNLFNRLLGCLHHCLHTGQTYNEATAFPTPSNTTQARAA

SEQ ID NO: 256272 - protein, 410 aa, unidentified
MQTLVERGCGMDVHQATVVACLLVVLKDGKVQKQIRTFGTTTRELLTLREWLLSEGCTHVAMESTGVYWKPIYAILEGAFQIVVANAQHVKKVPGRKTDVKDAEWIADLLCHGLLRSSFVPPQPIRELRELTRYRRKLVESRSAERNRLLKLLETANIKLASVATDVFGVSGRLMLQALVQATATSQQMADLAKGLLRKKIPELKLALEGKFEEHHRFLLGVQLRRLQAVEEDLRLLEQRIQEKLKPYAMQLALLQEIPGVDWTLAAVIISELGVDMSVFGNVSQLASWAGICPGNNESAGKRKSSRIPKGNVYLKTALVEAANAAAKAKGTYLRDKFYRLKARRGYKRAAVAVAHKILVAIYHMFSHQVCYHELGDLYLDKLNQHHVTRNLVRRLQRLGYSVTLEKKAA

SEQ ID NO: 256273 - protein, 389 aa, unidentified
MKIFVGIDIAKLNHFAAAISSDGEILLEPFKFTNDADGFQLLVSKLESFDKNSIIIGLESTAHYGDNLVRYLVAEFYQVCVLNPIKTCQMRKNNVRKTKTDKVDTFVIVKTLMMQDDLRFITFFDLDMMDLKALGRFRQKTIKQRTRLKIQLTTYVDQVFPEIQYFFKSGLHQHAVYALLKEAPSPKEIASMHMTHLANLLKVNSHGHFTKELAKELRVLAQKSVGANDSAISIQITQTIQQIELLDSQLDKIEAEMTDIMKFNDSVIMTIPGIGYINGGMILGEIGDIHRFSNPNKLLAFAGLDPSVYQSGNFQAKTTRMSKRGSRVLRYALVNAAWNVVRNNATFKAYYDAKRAEGRSHYNALGHCAGKLVRVIWKMLTDEVEFNLE

SEQ ID NO: 256274 - protein, 371 aa, unidentified
MKDTTIRQEIQQTVIADNRSIEAVVGLDLGDKNSWMTRLELDGSESLSCSIRTSPSALTKYFSQQKRLRVVIEAGSHSNWIAQLLERLGHEVIVAHPRQLKLISESLSKNDRRDAGLLAELGLTSPKLLAPTQPRWRQTLTGRCPLVSRQVLVGARTKLINSVRGQMKIFGLRVSRGDAPAFAARARAELPKDWTTALGPLLTIIGQLSGQIQRMEKRVKRLAETRYPETQWMRQIQGVGPTTSLAFALALDNDPARLRKSRDAGAFVGLRPKQRESGSRSPELGISRIGDRALRCLLVQCAHYVLGRHGEDSALRRWGLKLAGRGGKNAKKRAIVAVARKLAVLMHLLWSRGEVYDPFYGVERPAAQAAA

SEQ ID NO: 256275 - protein, 393 aa, unidentified
MGVVIGIDPHKGSHTAVAIDGCEQQLGRIQVRSGAGQLEQLLGWAVEFEERVWAVESAGGLGYLLAQQLVGAGEVVLDVPATLASRVRVLATSKSQKTDRHDALSIAIAALRARDLQLVQRADHAVVLRLLAKRHRDLGRARNRSACRLHALLIELVAGGISKEITVNAVQELLDRIEPSDPVAQIRHDLACEHLDDLRHLDAQMRASKRRLEAAVRASGTTVTDIFGVGPVVAAMVIGHTRNVDRFANRDHFAAYAGTAPIEFESGGRSIRRLSLRGNRQLNHAIHIAAVTQIRHRHSPGRAFYDRKVAQGKTKKEALRALKRRMTDTLYRQLRADATRKHAGPGGQAGTTHQSSVTGFEPRTPALRKNHSRTQPNVRTRPARTPPTITTAT

SEQ ID NO: 256276 - protein, 405 aa, unidentified
MPYILALDVSMGHSYSVLYKDDTCLFEDEIEHTQRGFHALLEEIQHLPERPLIVFEATGIYSRPVEKFFQDHHFSYCLLNPLEAKKQMEESTLRSWKTDKSDAHRLAQTHLKNQRQPKEVQSNFYLEMRDLARFYQEIEKKITRLRMDLHNCLQLTFPELEQFFSNRLTPYALTLIRLFPHPDFVLASTRTKIKNKLINETRKKISANRAEQKADQIIHYAQCAYPAVEKDSIHCQKTIYYAELLQDLLEQKEALATQMIKKAEGSPCFLLYQTFPGIGALTAALLLGELGDITRFKTHKQLNAFVGIDIRRYQSGKYTGQDRINKRGNPKARKIIFFTIRNMIRQQCAAPNHIVDYYYKLKKQPIPKKDKVATVACMNKLLKCMHAMVRAHTEYDYAYAVSVDH

SEQ ID NO: 256277 - protein, 418 aa, unidentified
MSKKLFLGIDVASKENHFALTDSEGHAVAKDFRLPNSLPGAEALVEKLLEIHAQNPFEELAIGTEATGFYDWHLLEFLVQSPLKEQIKLTFYRLNARQLHHFKKSFPDKGKDDRQDAYVIAERLRFGKLPHAYQPCNPYLPLQRLTRFRVHLVETLVKETVVFLQNLFLKFSSFQTLKPFSRPLGRAGARTVLEFKSPEEIIQTPLPELVSFLMKEGRGRFPHPEKVAHVLKRAAKESYRLRPGLGPTVDLILSTTWNNLQALQKSLKEVDRGIQEAFQAFPCTLASIPGFGPVFSAGILAEIQDIHRFPSHPQLAQFAGITWTRHESGDFKAEETRLTKRGNKYLRYYLIEAAGSVRVHASEFRSFYQRKYQEATKHRHKRALVLTARKLIRLVHALLREGRLYQPVQEVISSSKSV

SEQ ID NO: 256278 - protein, 426 aa, unidentified
MIPAVVERCAGIDVHKKFVTVCVLIGAAHMEPEPQRRRFGTCNAELRQLRDWLLAAKCQKVAMESTGPYWRPVFNVLEEAGFAVVLANPQQVKNLRGHKTDMKDCWWLAHLLRHGMIRPSYIPPRTIRELRDLTRRRKQLIRNGATERNRVQKVLEEANVKIGSVLSDVFGASGQDMLLALVEGQATAKEIAQLAKRQARKKIPELEAAIEGHRMTETQQQLIRQCMSHMAFLEQQIEEVDKQIQDKIGAFQFNEAYGLLQTVTGIKAEAAATVLAEVGDTVAAFPSAAKLSSWAGVCPGNNESGGKRKSTRTTKGNPYLRDALLECAWAASRRNNSQMQHLYRRLQHRLGHKRAIVAVAHALAQAIYQVLSTRRSYIDTAEPPRSTPKVKRLIRHHTRRLRKLGCWLQYTTQQAQRSTEQYQRIT

SEQ ID NO: 256279 - protein, 316 aa, unidentified
MSAQPFVGIDVCKATLDIALRPTDEIWTVHNDDRGITQVTTYLRAMKPALVVMEATGGLELPVATALAAAGLPVAVVNPRQVRDFAKATGRLAKTDTLDARVLAHFAQAVRPEPRPLPDEQLRQLSAFVTRRRQIVKMITAESNRLGSARSKPIRDRIKAHIAWLEQDLRDADDDLRGSIRQTPIWRDNDQILRSVPGVGPVLSLTLLAELPELGYLGRKQISALVGVAPLNRDSGVFRGRRAIWGGRAQIRPVLYMAALSASRSNPVIREFYQRLLAAGKVKKVALTACMHKLLIILNAMTKNRTLWQYPYAPTP

SEQ ID NO: 256280 - protein, 369 aa, unidentified
MEKSVLYVGLDVHKMSVDVAIAEPGTGETRYYGRIGGDLDSLDRVTRKLKAKGAKLRFAYEAGPCGYQVYRHLTAQGYSCLVAAPALIPRRPGDRLKNDRRDALALARLLRAGELTPIKVPDPDDEAMRDLTRAREDAISVERRAKQRTAAFLLRHGRVYPGKTTWGRGHWGWLLQQVMDHPAQQIVLQEYLDAVREASARVLRLTGQIRELIPQWRRAPLVAAYQALRGVSLIVAVTVVAEVGDLSRFNNPKELMAYLGLVPSEHSSGASVRRGHITKTGNGHARRVLVEAAWAYRLRARVTRPLLQRQEGLPESLRQLAWKAQLRLCARYRRFLARGKAKQTIVTAIARELAAFIWAIGQAVEPVTT

SEQ ID NO: 256281 - protein, 356 aa, unidentified
MQTQVTKKIDFTGKDIFIGLDVHKKSWSVTIIVDGMEHRTFTQPPDPGALNNYLQRMFPGGIYNSAYEAGFCGYGIHRELNSLGIRNIVINAADIPTSQKDKLQKRDPVDSRKIARSLEKGSLHGIHIFDRELEELRSLNRTRFYLMRDLRRSKTRIKSFLQYYGETIPVEYDNNQWTLKFVSWLKQVKMQTKSGQDAFSNLISSYEYHRSQLLILSRQIRERIREYDRELYTLLKSISGIGPLTASALITELGDINRFKNIDQLGSYIGLIPRIRESGEITYTGGITFRCNSFLRTLLIESSWQAIRMDPALMQYYHLHLVNNKGHKVVIKVARKLLNRIRYVMKNRQPYKTGVA

SEQ ID NO: 256282 - protein, 347 aa, unidentified
MSHKTAATVAHTIGIDTGKNTLHLIGLDDKGAIVLREKIARGRITARLANVPGCLIGIEAGMATHYVARELSALGHNVKQVPPAYAKPFRQGHKNDFRDAHAIAEAVQRPSTRCVPVKTDDQLDLQALHRVRSRLVGQRTAVINQIRGFLLEHGIAVRQGLRFLRQQLPDIMAKRSDVLSPRMIRIIGDLSADWRRLDERIEHVTEEIEVLAHGSEGCRQLMTVPGIGPLIASAMVAAIGNGVAFAKGRDFAAWLGLVPKQMSTGDRTILGRISKRGNRYLRTMIIQGARVILLRPANWAKHSFGPWLTAAANRLHHNVLATALANKLARIAWTVLMQARSYEARVN

SEQ ID NO: 256283 - protein, 461 aa, unidentified
MRQKKPTGQPKRSVERKVDWKALAIVHPDAAGIDVGSSEHWVAISPDRDAEPVRRFRCFTADLREMGRWLLEKGVRSVAMQSTGVYWMPVFEVLERQGLEVYLVNAQHTKNVPGRKSDVQECQWLLKLHAFGLLNNSFQPSDEIRIARTLWRHRGNLVAEASSVIQRMQKVLTEMNVQLGDVLSDLSGVSGMNIIQAIWKGERDPWQLAALVMPGVKATQEDIAKSLEGNWREELLFVLRQHVELYQIYQKKIQDCDLQLREHLQLLGSKLDPQTQPLGPRPKGKKSSQNAPAFDLRSELYRITGIDWSQVNGIDVLTAQTVIAEAGADLSAFPSEKQFTSWLGLCPTNQQSGKKILNRRTRKVVNRATVAFRNAASTLLRSQSYLGAQYRRLRTRLGAPKAITAMARKLACLFYRLIKHGQPYVDKGTEYYEARYREQQIRSLTKRAQKLGLQLVIPKPA

SEQ ID NO: 256284 - protein, 340 aa, unidentified
MKRTMMGVDLAKNVFEVYVEDESGQVVKRHRLSRKKMLPWFANRPPAVVGMEACGGAHYWGRELTKLGHEVRLIAPQYVKPWVQTNKSDQADARAICRAVQEPGMRFVGIATEAPQDVQTFHRVRRRLIGNRTALVNQIRGILLEYGVAVPQGVGALRKALPTLLADERWSLLMRQFLTEQQTALTAYDTQIAAVMAGITRESATHPVCHRLEQVRGIGPLGASALGVKLAGGSYQNGRHVAAALGLVPKHTGTGGKVRLGGISKRGDRYIRQLLIHGARAVVAQLGEQADPLSCWLRRLVARRGMNKTVVALANKNARVAFALVSGGQTYDVRQMCQAA

SEQ ID NO: 256285 - protein, 381 aa, unidentified
MHRKHDAGLPPLTCNGKLLLPLTVIVFQSKRRHSMKFYNQQHKYYCGIDLHARKMYVCILNHKGKVVVHENIKTDPELFFELIFPFLEDVVVGVECVFCWYWLADLCSDQKIDFVLGHALYMKAIHGGKTKNDKIDSYKIAMLLKGGNFPTAYPYPAKWRATRDLLRRRMYISRRCSELVAHITNTNTQYNLPASKKKLSRKYNHDGVAERFDDPEVRKSIEVDLEMISAMNHTLKKLEWHIEKTARQHDYHTLYLLRSIPGVGLILALVILYEVHDIKRFSRVQDFSSYASLVRPVKESDGKWAGHTNKKIGNHHLKWAIKEAAILMLRDSPEAKYFVAKLERKYNKGKALGIFTHKLGRAIYFMLKNKEAFDMKRFFDQ

SEQ ID NO: 256286 - protein, 326 aa, unidentified
MTESMIGIDVAKATFDVAAPLEPKGKYRTKAKLPNTPAGFTLLSDWLDRHVPGAAVCMEATGVYHEALATFLVERGVTVYVANPAQVAAYAKSELSRTKTDHADAKLIARFAMAQLQVGTTLRPWVPPTPAQRKLRALIHRLNDLEGMRQMERNRLDVSDQAVRGSIADVMETLDAQIAELKKEIDNHIDSDPDLRRDAGLLTSIPGIGELTAAFMLGCAGDLRRFDDPRKLDAFAGMNPAIRESGKWVGQSRLSKLGHALLRAKLYMPAMTAIRHNVAVRALFDRLVARGKPSKLALGAAMRKLLHLAWGVIRSGKNFDPSIALA

SEQ ID NO: 256287 - protein, 414 aa, unidentified
MKSARNTLPMEPVNGVTCGIDWARDDHAVSIVDARGHEKVRCTIDHDAAGLRELLAVLDRAGAREVAIERPDGPVVDTLLDAGVTVVVISPNQVKNLRGRYGSAGNKDDRFDAFVLADTLRTDRARLRPLLPDTPATTALRQTCRARKDLVAHRVAVANQLRAHLKIVFPGAVGLFADLDSPISLAFLARFDCQDRADWLSVKRLAAWLASVGYSGRTHPRELYRRLSTAPRATTGTDGTATTRAFVAVLGSLGAEIKTLDADIAEQLSRHADAQIFTSLPRSGTFRAARLLSEIGDCRARFPTPEALACLAGVAPSTRQSGQVKHVGFRWAADKQLRDAVCDFAGDSRRANPWAADLYNRARARGHDHPHAVRILARAWLYVIWHCWQDNTTYDPANHRALQYLLNRPQPGPA

SEQ ID NO: 256288 - protein, 360 aa, unidentified
MNTTTVAVDLAKSVFQLAVADLNWRVIEQHRLTRTQFERWFINRNVSLVIMEACGSAHHWARSLNALGIEVKLLPAAYIRAYVKRNKTDAADACALLEAARCADIRPVKIKSIEQQALQGLHRTRSLWMATRTSRINALRGFCREFGISVATGSRNGIEQISRVLADPNTAVPQLIRGTLKLLIEEIHLLEARVAHLEKELTQLAKQSAACTTLLSIPGIGLLTATAMVAATSGSVAHFKDARHFASWFGLTPKEYSSGNTRYLGHISKRGDRYLRMLLTHGARSVLRAASVSFSAGRHLDDLRSWALKVQGRTNHNKAACALANKLARICYATLRDGEDYGTVQRMNKKLERTSYAMPA

SEQ ID NO: 256289 - protein, 371 aa, unidentified
MSIVMGVDQHRAQVTAEWIDLSTGEISRARVSPADRVGVRRFLERFAGEQLEVALEATTGWRFLVEELRAVGAVVHLAEPAETAARRGPKRRAKTDRADARHHRELLLAGRLPESWIPPDHILDLRAQVRLRHTLIEQHSEWQQRIQAVLYHHGCPQRRQLMKRDGRDWLASLALPAVACQQLTVSLQMTDALDVLLAPLTKELRDYARRQTGCRALVDRYYGIGELCAVTILAELGDCRRFQNSRDAVRYGGMDITVFQSDRRRAPGRLSRQGPPALRWALYEAAHAARRPGSPDRDYYVQAAERLGGNRACLALARKLLKRCYHTLRELGDDALAEPSAGSGAARRASSSSTSRAEGATNLERADALAA

SEQ ID NO: 256290 - protein, 378 aa, unidentified
MSEGSWVGLDVHARSVVAGVIDQGSGEVRSLRVPPGNDGTVAWLKTLPTPVRVVYEAGPTGYRLARACAGAGISCVVAAPSRIRPAADRVKTDRRDAERLARLLRLGEITPVRVPEPEEEAARDLVRAREDARGDLMRARHRLSKLLLRHGMVYDATAWTRAHDAWLRRQRFQSGPLAIVFDECYGRMLDAKTRRDALDRAITELAGAPPYVDVVERLVCLRGVSTLTAFALTVELGDWNRFRPTSLGPFLGLTPSENSSGERRRQGVITKAGNSHARRLLVEAAWHQRRPPRLSVTLERRRTGKSLAGRAQADRSPPASRTLARARGPRQAPHDRGSRRRPRTRRTLLGTRHDGVAATINDSARGAHRRNDARSDPR

SEQ ID NO: 256291 - protein, 347 aa, unidentified
MNFYTKQHKFYCGIDLHTQRMFVCILDAGGNVRIHQNIHTDQEAFLRIIAPFREDIVVAVECMFTWYWIADLCIQENISFVLGHALYMKAIHGGKAKNDKIDSLKIATLLRGGMLPQAYVYPARMRATRDLLRRRNHLMRKRAELFAHIQNTRSQYNLPDPLGCIAKPKNREGIVERFDDPSVQKSMAVDLEMIEAYDHILTQLERDIIACAKEHDLRSYALLQTIPGVGRILALVLLYEIESIERFPQVQDFVSYCRLIKSIKESNGKKYGSSGKKIGNAHLKWAFSEAAVLFLKGNEPGKKYLQRLAHKHGKAKALSILAHKLGRAAYFMLKNKEAFNQKKFLGL

SEQ ID NO: 256292 - protein, 348 aa, unidentified
MRGAVHMQISTIGLDIAKNVFQVHGIDATERVVVRKQLRRSQVLAFFKALQPCLVGMEACATAHYWARELTKLGHRVRLMPAKDVKAYVKRNKNDAADAEAICEAVRRPTMRFVQVKSVEQQGQLMLHRTRDLLMRQRTQVINALRAHMAELGITAAQGREGIKELLKIIAREQDARLPVDAHASLVVLAAELQAVQTMIGSIEKRIIVQHRSNEASKRLKTIPGIGILGATAIAATVADPKVFRSGRDFAAWIGIVPREDSTGGKQKLGPISKQGDRYLRRILVIGAHAVLKQVRQRPEKYPWLTELLARKPFKVVAVALANKMARIAWALLAKGGTYRAPALTVAA

SEQ ID NO: 256293 - protein, 343 aa, unidentified
MNLHMLGIDIAKSTFQLYGADSAGKEVLKKRLPRHKLAAYITNLPACIIVMESCGGANYWARVFQRSGHTVKLISPQFVKPFVKTNKNDANDALAIAEAASRPSMNFVPIKQVEQQDIQSIHRIRTRVVKNRTALINEIRGLCQEYGIVVTPGAARVKSSMCIIIADSANELTPTFRESMQDLYEELVWIEARLKKLDAKIRQLCRLDENCKRILKVPGVGELTATAIVAAVPNPKEFRNGRHLSAWLGLVPRQSSSGDKQVLLGISKRGDRYLRTLLIHGARAVLSHHKDAANDYSRWVARKKSTLSHNKAAVALANKNARIIWSMLNTGEEFSYEIQEGAA

SEQ ID NO: 256294 - protein, 410 aa, unidentified
MNLVYERCCGLDIHQKTIAACRITPGPDGTAQKEIKSFQTMTDDVLALGKWLSEGGVTHVAMESTGIYWQPIYNLLEDQFTLLLVNARHVKAVPGRKTDIRDCEWLADLLQHGLLKASFVPNREQRELRQLTRYRTTLADTRSAEVKRLQKTLEASNIKLRSVASDILGKSGREMLNELSNGTTDAAKLANLAKGTLRNKIPELQRALDGRFGAHQRFMVAEHLAQIDALEAQIERFDQEVATRTEPFKEELAKLDQMPGFGIRAAENVVAEIGVDMTRFPTAHHLASWARLCPGSNESAGKQRSAPTGRGNPWLRRTLVQTAHAAGHTKSYFGAQYRRLRRRRGAQKATIAVSHSQLVTVYHLLRVPGAHFTDLGPDYFDEHDRTALEHRHVNALEKLGYNVQLQPRAA

SEQ ID NO: 256295 - protein, 377 aa, unidentified
MEKNSRFVGLDVHAETIAVAVAEPGGEVRSLGTIPNTPEAVRRLAKKLGPPETLRVCYEAGPTGYVLYRQLTALGVPCAVIAPTLVPVKAGDRVKTDRRDAEKLARSHRSGDLTPVWVPDADHEALRDLVRARAAAKKDQLRARHRLGKFLLRQGRRAPTGIKAWGVKHRAWLQTIRFAHPAQDVTLLDYRTEIDHAAERIGRLERAIAAAVDVAPVPVRAVIAGLQALRGIAQLSAVSIVTEVGALSRFAKPRQLMGYSGAVASEHSSGPHTRRGGITKTGNAHLRRIVIEAGWAYRHRPAIGATLRTRQAGLSEEIKAIAWKAQHRLHARYTRLIGKGKAPTQVVTAIGRELLGFIWAIGVHVERHTPGGTPAAA

SEQ ID NO: 256296 - protein, 436 aa, unidentified
MFLAERTTGRMKLEEKELEKQICAWIGIDWADERHDVSLYDVGTGKQEAWIIRQSPEALQEWLGQLRSRYEGGYVAVVLEQGRGGLLNALMGCEFLVLYIINPKSLSSFRDAFYGSGATSDPVDAALMRDMVRQNPSRFRAWRPDDVMTRSLRLLTEGRRHLVNQSTAFTNQLTALLKGYYPQALSWVGALDTPWACDFLEQWPTLQSLQASSRRQILRFYEKHPRASLDLTEQLKQIQDARALTQDAAVLESSALMVQALVCQLRPLLASIAEFDRKIATIFRKHPDRPIFESFPGAGAALAPRLTAAFGTDRDRFQAATEMQELAGIAPVTEKSGKKSFVHWRYACPKFMRQTFQEFADHSRRWCQWAKAHYELLRQRGKSHNAAVRALAYKWIRILFRCWKDRKPYQDEFYTKSLLKHGSPLSSLLAKPVENP

SEQ ID NO: 256297 - protein, 386 aa, unidentified
MSRPSNILVRAINYDHTLVLAVELSNKSWVLAAQAPGLPRTKAQRTIEPNKNALLAAIDGYRARAVAVGYTIDRVITTYEAGWSGFWLARWLVAQGVEVHVVQPSSVPVDRRLRRAKSDGIDAELLLRTLLAWLRGEPRVCSMVPIPDEADEDARRCVRERTELLSDRVGLTNRIGAVLATLGVNDYNPLLQSRRRRLAELRTGLDEPIPPNALAKIERLLARLELVLAQIAELERERDEVAAADAPDRAGKMIQQLASLRGIGVQSATVLVREAFVRHFPNGKALGSYAGLTSTPYSSGGIDREQGIGKAGNRRLRTVMVELAWLWQRYQPGAAQVAWFRDRVGSTGRRIRKVMVVALARKLLIALWRFVIDGVMPEGAVMKPSI

SEQ ID NO: 256298 - protein, 418 aa, unidentified
MKKHSKSLQRSEPSLKRTKARGPVQRDAKEVLAEVLGKLTGKLDARAVSTSAKENRKGNTVGPNRDRLTVGVDRGDRWSQYCILGLEGETLAEGQLRTTQEDVREFFQALTVARVVIEVGTHSAWVQDVITEWGHEVLVANPRLMEGSKRRKRKSDRIDANKLARLGRVDPQSLYPIRHRSREVRQDLVVLRARDALVSVRTELINTTRGLVKSMGTRLPRCSSPSFADKVKDAIPVEVREALLPLVQLTETVNDCIARYDQKIEELGREKYGHTTLLRQVKGVGPITSLAYVLTLEDAQRFASSREVGPYLGLVPKQEDSGDSQPQLGISKAGDRMLRRLLVGSSQYMLGAFGPDTDLRRYGLRLCERGGKNAKKRAVVAVARKLAVLLHHLWVTGDVYEPLHHTGVETRTAQATAA

SEQ ID NO: 256299 - protein, 423 aa, unidentified
MQIVYQRCCGMDVHKNSVTACLLLIDDDGEYHAEKRQFGTMTRDLGEMTEWLHAQSVQRIAMEATGVYWKPVWNILESRQEFELLLVNAQHIKNVPGRKTDQKDSEWIADLLQHGLLRGSFVPPTEIRQLRDLTRLRASLRQDHSALANRLHKVLEDANIKLASVASDVLGVSGRHILKAMLRGRRDPQKLADLALGRLREKLGALELALEGHFTDHHRFQLRRLMDLLQFTEAQIVKTEGEILRRIAQAPAVEGGQTLQNAVDLWKTIPGIDETTACVLAAEIGTRMEQFPSAAHLASWAGLCPGNNESAGKRRSGKTRKGSVWLRRALCQAAWAASRTKNTYLSALYRRLIARKGKKKTIVAVAHTILVIAYHMLRAGRPYQDLGADYFDRLDQQALTRRLVRRLNGLGYEVALRPSAQTI

SEQ ID NO: 256300 - protein, 317 aa, unidentified
MSKHSIACAGIDTGKRKLDAALDGRAEWLQVDNTPDGQRRLSVWLRQHRIKRIGIEASGGYEQAVVCQLRRDGFVVIVFQPAQVRAYAKFHLQRAKNDKIDAALIAACTAATKTIHAPPDPRLAPFAEHLTLIEQITEDIAHIKTRRASCRDPRIRHFWNEEIARFKCRLRTELKELVVAIRQHPDLAARLDLINSVDGVGLRTAVAILVRMPEIGRITREHAAALAGLAAYDDDSGEHVGVRHIAGGRERLRKSLYTAALAAAFHWNPQLIAIYRRLIAAGKPHKVALIACARKLLIFVNTVVARGAPWTERPGLI

SEQ ID NO: 256301 - protein, 351 aa, unidentified
MVVVGADVHKRTHTFVAVDAVGRQVGQRTVSATSEGHARALAWARSEFGLDLRWAIEDCRHLSARLEHHLLSAGQQVVRVPPKMMAEQRRVARTRGKSDPIDALAVARAFLREPSLPVASHNAVSREAKVLVDRRESLVATRTRTINSLLWRVHELDPVHAPKERSLHLVTHQQALRAWLVTLSGVVAEMALDELDDIIALTVRIKEFDRRIGALARREVPALLALPGCGELSAAKLLGESAGITRFHSEAAFARHAGIAPIPVWSGHTAGRVRMTRSGNRQINCAIHRIAITQARIPGTLGKIYYEKKLAEGKSKTEALRCLKRRLARVVFNLLTTDHNNRQTTALPAAA

SEQ ID NO: 256302 - protein, 344 aa, unidentified
MDHFAGLDVSVKETSVCIVDETGKIVREVKLASEPDALVAVLKNPSYHFKRIGLEAGPLSQWLYGALAEAELPVICVETRHMRAVLKAQINKTDRNDARGMAQMMRVGLYRPVHVKTLRSQKLRMLLTHRQLLLSKAIALDNDLRGTLRNFGLKVGMVGKVKFEARIRELVENLPDLAVLVEPMLIVRRVLREQIVILHRRLLAIVRDDEVCQRLMTTPGVGPVVSLTYRATVDIPARFRKSKSVGAVFGLTCAKYQSGEVDWDGRISRCGDEMMRTMLYEAAQAMMRSKKWSWLKAWAMQIARRRGMKKAIVALARRLAVIMHRIWVDGTEFRWTREQAAVAA

SEQ ID NO: 256303 - protein, 352 aa, unidentified
MNKILRNLDKEEDIFIGLDIHKKRWHLTIRTTDVELFSGSIPGKWNALKSQLEKLNNWPIKAVYEAGYSGFWLHDNLIEYGVDCIVTPPSLIPLEYGNKVKTDRRDSGKLALLLAKGLLKRIHVPSQEECYHRQVVRRRRQLVRDRVRIQNRIKAELQLYGIDLPQPTGKWSKVYLENLSRIRFGDYWMQQSFNTLLEQYLFYDNLISRQTALVKELSEKSQYKEKVKILCSIPGVGILAAMEVLLELLDVSRFQRADQIAAYVGLTPSQYSSSDKIRMGRITCIGKNSLRALLVQSSWQLIRKDGAMRAKYEKLKARSGGKRAIVAIARTLLIRIRRVLLDNIPYAVGVVR

SEQ ID NO: 256304 - protein, 400 aa, unidentified
MISVDIDVSKGKSTVCILKPYGEIVASPFEVRHTESELKNLIQMIQRLDGEIRIIMEATGIYHLPMLSSLQDQNLFVAVINPFEMKEYASRGLRRVKTDKQDSITIANYGIDNWYRLENHQGSDDVYSELKLLGRQYCHYMELHVKALLELTHMLDYTMPGVKKMFSSWSESNGKDKLSDFVERYWHFDNITAMTKDEFIEDYVSWAAEKKYHQNRSKAAELYDLASDGISTLPANTPSTKMLVLEAVRVLREIDSTLLKIITRMKELAKTLPEYETVRAMGGVGDVLAPKLIAEIGDIRRFHSGKALIAFAGIDAPPYESGQFVGTNRKISKRGSKVLRKIGYETMRVLKTHKAPEDDAVYRFILKKEAEGKSKRQAKIAGLNKFLRIYYARVSEVYKA

SEQ ID NO: 256305 - protein, 402 aa, unidentified
MRYYLGVDWADQEHAVWVEDEMGAPVAAQTLPHTAAGFADCGRQLDEWRHAGIELWAGIERPEGRVVEFLVDHGVVVVPLNPKVVARTREQFRPSAAKSDPLDARVCAYCVRTRAHEVAPLRPSSEAMQELKLLTRDHQCLQRQHTRLLNQATLALKEYYPVVLEVFGDFGSVAAQNFVRAYPTPNAAAGMRRPTWEKFARRYRLRAELWEQLHAPALAVPAHVVRAKARLVQNLLEQPAVGRRQLSRSQQEIERFFARVPVARQVAPLPGSRSGVTLPSVWAEIGDAVQRWRSAEHLQAVGGTAPVTQQSGKMRVVHFRFACNKHLRHHGQLFAQTTLLHCEWARRYYRRQRDRGHSHQRALRALAGKWLKIFYVLLSRNVAYDEGLHLKTIGQQTIRQAA

SEQ ID NO: 256306 - protein, 402 aa, unidentified
MDGAHYATIGMDVSDRKAQVCVMAEDGKSPKIAMETVVPTTKEGLAKFLSTQDRPAPVAFETGMHCRWTNEAAEGPGFKVYAANPCRLRMTTESKTKNGVDDARMPARLALSDPGLLHPVKLRGPGHRRMPNLHEMRNLPVKRRTGVIVQMRAIARAMGFRIPKCPTGRFLRLDTSPWPREFRDIAWPTMKNLGQPAVTIKTYERQIRGLAQTPAFKAQVGRPMEIRYVGLHVATGFVAVTGGDVDRFGKPRDVGPWPGLTPRQDQSGDIDRQCHITKAGSPSMRRHPVESAQMILRDGPADTGLKARGRRMCARGAKMAKRRAATAVARAPAVLMAAMPKRPDAPYVPPSGRCEKEPPAMGATAWAADSGGNPGRRFREQEAEPRRRPQPNPETPERPVRG

SEQ ID NO: 256307 - protein, 357 aa, unidentified
MEKASSQVGKINTQVERFTMTQFSFFVGVDIASASFMACVGTAPWKLTVKPTKFDNNEDGFVSFLGWLKEHNLKPEQTVVCMEATGVYSEGLAYFLHASGYGVAVEPPLNIQRKFPVNASKTDELDCQYIGEYACRYEDKLSFWKPRAEILEQVKVLLTTRQHFSVQVTGHKNALHAVNRKKVSSELAKQVHQNMIEQIAKHIKAIDQEIRRLIDSDPTFKQTLLLLLSVPGIGLQLAAHLLIAMQETLDPKVLAAFIGICPIKHESGTSVFSAPTSRHYGPSVLRKLLYLAACSVRTHKKQFQQYFFRKAAEGKHNKLILNNIQNKILKIACAVVRSKQPYISNYVSVNPLVLKNA

SEQ ID NO: 256308 - protein, 329 aa, unidentified
MQGWARRTPNPLQRRERLSTFIGIDVSKKDLVVASTAESECWTVTNDSPGVSQLVSRVQMLDPELVVLEATGGYELMAVAALAAADLPVIAVNPREVHDFARAMKQLAKTDRLDARILAIYAERVQPELRPVPDSATQELRAMVTRRRQLVEMLTAERNRLPLSSAAVRPSIEVVIATLERSLTEIDHDIDQVIRSSTIWRAKDHLLRSVPGVGPVVSCTLLAQLPELGTLNRKAIAALVGLAPFNRDSGLFRGRRTVWGGRAPVRAVLYMSTLVAVRHNPVLRSFHDRLRAAGKPPKAALVACMRKLLTILNAIARQGLPWQPAPIHP

SEQ ID NO: 256309 - protein, 354 aa, unidentified
MITIGVDAHKTVHAAIAVDEAGQEIGQWRGPNSVSGWHRLLAWAGEQGASRQWGIEGAWSYGRGLAQHLVDMGEMVYEVNARWTAMGRRAARRTGKTDRLDARAVALFVRQEAPDLPVVFAEDESAVLDLLTGEREAALSEGVRLRNQIHALLMHIDPEYKDHLPSLDSQAGMRALENYSAPRPGILHEERAASVRRLAKRLRLAMDQAADLGRQIASRTEEAGFSPLTNLYGVNLLTAGTLAGILGPGQRFNSDARLAAHAGVAPLEASSAGVVRHRLNRGGNRRLNGVLHRIAITQLRGWQPAQDYIARRISEGKSKREAIRALKRYLVRAVWHLWRQCAAGQLHIRPSTAA

SEQ ID NO: 256310 - protein, 452 aa, unidentified
MRKTKPQIIDDEEHERVHERVAAVDVAKDSGMVCTRLPHPSRPGARQSTVWTVRARMAAIRTLGRQLARDGIEVVTLESTSDYWRIWFFVLEACGLAVQLVSASQAKNLPGRPKTDKLDAQWLARLTEMGLLRPSFVPPKPIRDLRDYTRMRTRLIQERTRCFQRLEKLLEGALVKLSSVASKLTTISAQDMIRAMIAGQRDPAVLASLARTAMKAKREELAEALDGMFDDHHGELAGLLLDHVAFLDQRIAALSTRARQLAAAMPAAWGINGDGTTGPDARTGPDATVLPAVARLAEIPGVSPDLARAIIAETGLDMSRFPTPAHLVSRAGLCPSARQSGPRTRTGKKGQGNTWLRSALGQAANGAARTQTFPGERYHRIARRRGKTKAQVAVARSILVIIWQMLKNPEARFIDLGPGYYQARTDKDKKIKNHIRQIEALLGHPVTITKAA

SEQ ID NO: 256311 - protein, 338 aa, unidentified
MQDGFGHGNLLHLHVFKIYEPMNTIGIDISKEWVDCLCSARRLAGQFPNSPTGWKQLREWKEGDPRVIMEASGPYYLGLASYLYDKGVKVSVVNPLVIRRYGQMKLTRTKTDAKDAALLAQYGIDQQPELWRPPSKARQALKKLMSMREGLLRQKAILTGQAEAFSQNKDVEPMVNELNRKMQTEIQEHITRIDKRMEALAEEHYEEVMEALLTIPGIGKKTAIELVTVTDGFRRFDSARKLASYVGICPRIWESGSSVKGRGSISKLGCPQLRKLLYMCSWSAKRSNPACKNMYDRLKKRGKPEKVIKVAIAHKLLRQAFAVGKRCEAFNEKKALVA

SEQ ID NO: 256312 - protein, 332 aa, unidentified
MKLTTIGIDLAKTVFQVHGVTAGGEVVRKRLSRVKLLRYMARREPCLVGLEACGGAHHWARELGKLGHEVRLMSPQYVKPYVKTNKNDGADAEAICEAVGRPNMRFVPIKTRAQQDVQALHRVRAGLIKARTALSNQARGLAAEYGVVLPRGLGRLRAGLPGVVEDAHNALTEVARELLWSCYQRLRELDGQIQAYEARLEGLHRTDEASRRLSAIEGIGPLTATALRAAVGDAREFRNGRHLAAWLGLVPRQHSSGPRQVLLGISKRGDRYLRSLLIHGARAVLSRSAGKSDRRSRWLEALKARRGFNRESVALANRNARIAWALLARGQH

SEQ ID NO: 256313 - protein, 343 aa, unidentified
MKHAVIAVDLAKSVFEVAVSTTAGVVSERKRLGRKKFSQFMAQLQPAVVVMEACGTSYFWGRRFQELGHKVELLPPQHVRSYVIGNKTDRTDVKGLLEAHRNEDIHRVPVKSVEQQMISTLHRVRSGWVADRTARVNALRGHLREFGYSIQQGRWHVVPRVRELTGDADSRIPDGLREVLWVLCEEIDGLSEKIRNVELQLKALSKQLPEVKQLLSIPGVGLLTSTALFAFVGDVQRFPSGRHLASYLGLTPRERSSGAKRWLGGISKRGDAYLRTLLIHGARSVLYRARSKGPKSHLQEWALRVEHARGRNKATVALANKLARIVWALLKKGETFQIQPQAA

SEQ ID NO: 256314 - protein, 376 aa, unidentified
MNYNTVYVGMDVQMDVHKESFTLCSCKYEDEKASHYQRTPASYKNVLRYLAFLRTIYGEDTRFVCGYEAGCLGYSLYHQLENFNVECVILAPTTMLEQRSKRRIKTDKRDAEIIARSLAQHNYSPVHIPTETDNQTKEFIRMRDDHKAELKKIKQQILSFCLRQGYQYDGSGNWTAKHVKWLRSLKPAGLYKEILDEYLLTYTILTDKLNRLDQRIEELASKEEYKESVSKLTCFLGIKTHTALSVIVEVGDFQRFVSARKFAGYLGLVPGQHSSGDDRNGLGITKAGNTHVRRLLVESAQSYTRGKIGYKSRVLRSRQAGNSPQVINYADRANERLRRRYYKMVLKDGKKYNIAKTAIARELACFIWGMMTDNIY

SEQ ID NO: 256315 - protein, 340 aa, unidentified
MDNIGLDLHKRESQLCILTEAGEILERRIHTSRERFTAVLGGRPRARILLEASTESEWVARHLETLGHEVIVADPNFAPMYATRRRGVKTDRRDARTLAEACRLGAYRRAHRASDAQRHVRAELAVRDALIRTRTRTVALAKALVRRDGLRLPSGGPAHTEAKLAVLPLSPALAAELAPLRALWEPVNTQIAAADARLAHVAAGDPVVAQLMTTPGIGPVTAVAFVATLDVVTRFASAHQVEAYLGLTPREYSSGEQQRRGRISKTGNVRMRYLLVEAAWRVLRTKDPAAAPLRAWADGIAQRRGRSIAAVALARRLAGILYAMWRDGKDYRSAQPAAVA

SEQ ID NO: 256316 - protein, 400 aa, unidentified
MLSIGIDVSKGKSTVCGMKPGGEIVYAPFEVQHTREGMSELVSLLRSSGEEVRAVLESTGSYHCPVVAALLENGIFISVVNSLRMKRFCSQSIRKVKTDRIDAMQIALYGLAYWQELQPTRLPEDTYRELQLLARQYYQMTSMLIKAKVDFNALCDQVLPGMQELMNDHAGRHKLSDFVLRYHHTTHILEMGETRFRKDYCKWAEKKGYRNCERMAVLIFATAQNGIPVLPNAPSTQIVITEAIRVLHTVEASRDAILTQMQALAKTLPEYSLVREMPCIGDTLAPRLIAEIGDVRRFHSKRALIAYAGIDAPPYQSGKFCANNRHISKRGNRYLRKTGYEVMQSYVMHKPANDPIFMFIEKKRSEGKCGKLAMVAGLNKFLRVYYGKVTELYRSLPAIE

SEQ ID NO: 256317 - protein, 338 aa, unidentified
MKVHILGIDLAKNVFQLHGVDRKGRSVLVRRVRGEQLLKVLGELEPCLIGIEASTGAFYWQRQFEKLGHTVKIMAPQYVKPFVRRQKNDSNDAEAICTAVQQPNMRFVPKKTLEQQDIQALHRARQRLVNHRTALISQMRGLLLDRGIAIAVSATRARRLIPKILATPGDELTEMLREIVSSLYAFMLQIDERIKAFDRKIDAIFKASDVCQRIAKIRGIGPKTATAMIAAIGNGSDFKNGRHLAAWLGLVPRQHSSGDRRVMMGITKRGSQHLRTLLVHGARAVVRTAVRKTDSRSMWVNELRQRRGYNRATVAVANKNARVIWAVLTSGEPYRAAA

SEQ ID NO: 256318 - protein, 357 aa, unidentified
MASRSMAQPDHGVLVGVDTHGDGHVAAAFTSDLGRPLGHLNIATTPAGYRSLLAWARSLGSDPRFGVEGTGSYGAGLARFLAAAGCTVIEVNRPNRQTRYARGKSDPVDAEAAARAVLSGEATGLAKVDTDHIGMIRALRVARRSAMKMRTQSFQQMKALIVTAPAELREQWRSLSRDRLVDTAACLRPGSVTTVAAAVKLALRCLAQRHQMLTAELATLDLDLDRLVAAAAPTLCALKGVGTDVAGAVLVAAGDNPERLRSEGAFANLCGVAPLPASSGKTTGRHRLNRGGDRHANCALWRVVIVRLATHQPTKNYMARRTQEGMSKPEIIRCLKRYVAREIYRELVPRAALAGAA

SEQ ID NO: 256319 - protein, 345 aa, unidentified
MENMYYIGLDVHKKTISYCVKDGSGRIYAEAEIPATRLDLDMWMKTLPQPWTAAMEATIFTAWIYDHLKPHAAAVKVAHPLMLRAIAAAKKKNDRIDAHKIADCLRCDFLPECYMASTEIRERRRTLRYRNLLVRQAVQMKNKIAVLLMEAGVSYNKQKLHKVGYFRELLATNQDIDEGLKPLLRLCRETVVRLGKTESALVRSLQRDSLLMERVERLMTIPAVGPITALTWALEVGDVQRFSSIKKAISYCGLCGAENSSANIIKRTPLSKQRNKHLQTVLIEAAKMAPRNSPDLAMIYDREKQKDNANRATLAVARKLVAYLVAVDRRQKEFLTVERENRTAA

SEQ ID NO: 256320 - protein, 408 aa, unidentified
MEAIIERCCGLDVHKETVVACMLIGPPEGRARKEIRAYGTTTTQLEELRDWLRQMGCTHVGMESTGVYWVPVYAVLEEHFELIVGNAAHMKNVPGRKTDVKDAQWIAELIRCGLVRKSFVPPKWQRALRDLTRYRRKLVEAQASERNRLQRLLETCNVKLASVATDVFGKSGREMLRALIKGEESPEQMAQRARGRLRKKLEQLVLALHGKVESHHRFMLEMQLGRVEDIEANIAIVDSKIDEAIAPHRVVMEHLMTIPGVDRVVAVTVIAELGVDMNVFPTPAHAAAWGGVCPGNNESAGKRMGQQKRRGNVHLATALVQAAMAASKTKDTYLKARFWKVAGRAGKKRAAVAVAHTILNAIYHMLKGSVDYKDLGGDYLDRFLNRRAEQRLVQRLRSMGYEVRPKTA

SEQ ID NO: 256321 - protein, 426 aa, unidentified
MQPHYTCVCGVDVHKEFLQVCILLREEDPKVFRVFNNFSGVQELKKRVEEEGCECIACESTGVYWYRLYLAFEGQTRVIVGNAYQIKSIPGRKTDVRDAQWIAELAMNGLINPSRVFPKNDRELRELTRSRESTVKSRTQIKNRIHRIFDSAGIALGKGVRDIFGKSGVHLIWGLLKRADTEDIISTLPSARVKKKADLLREILSGSLSDLQIILIKKNLDMMVHINEHIQTLDEQIIARMMEQDRIRDIEIACSIPGVSVTTAVTVLAEIGDYRDFENAEKLASWAGLVPSVYQSAGKNCSGKITKHGSEHLRWILVQAAKAAGRTVNTTFRKFFNRIAYRKGGNTATVALARKILCILWHLLINKELYIDPSKNTKSIKPPVVQKFAKNSSSDVQQAIDFIIECGFRVIHPDFTLDRKFRGVSQ

SEQ ID NO: 256322 - protein, 335 aa, unidentified
MNQEKYIGMDVHAATISVAVMNAQGKVLMECVLESKAVTILEFIQGLRGTLALTFEEGTMAAWLHDLLKPHVSRLVVCDPRKNALLRDGSQNDRADARNLAELLRTNQVHAVYHGQHGTRALKELGRSYLTLTQDSTRVMNRIKSVYRSWAIPCAGTSVYSRRHRAEWLAQLVEPGVRIRAEHLYQQLDSLQPVRQAARRELLRESGKHAAVKLLRQIPSIGPIRSALLVALLQTPHRFRTKRQLWAYSGFAVQTYDSGEFRFVRGKLQRNRERITVRGLNHNHNHDLKNLLKGAAISAIAPPGRCRIFMRPWWRKGCGPVWPVSPWHGRLPPSL

SEQ ID NO: 256323 - protein, 348 aa, unidentified
MMVTLGVDAHKRTHTIVAADEAGAQLDAITVAATTAGHLKAVRWAGQFDDRRWALEDCRHLSRRLEAELLGAGEMVVRVPPKMMAGVRRLARTRGKSDPIDALAVARAAIREPDLPVARLEGPAREVRLSVDYREGLVRERTGLQNRLRWRLHELDPTLDPPTGSLDRHVILGGLIEALEAHTGLVAQLARREITRIRDLTTEINQFTADIAVRVAEISPSLLEIPGCGPLSAAKLVGEAADITRFHSRDAYAMWAGVAPIPVWSGNTERFRLNRGGNRQTNAALHRIAITQMRIHPDARRLITKHLTAGKTKKEALRVLKRRLADVVYRTMINDTKQLSQTAPARAA

SEQ ID NO: 256324 - protein, 359 aa, unidentified
MASKVKKNKINFKGKTVNIGIDMHKISWRITARVEGDTILAITLARPTYDSFKKILSRFKGNHVRIVYEAGPGGFDLYDRLTDDGIECIVTPPSLIPTESGNKVKTDKKDSLKLARLLESNMLKAVWVLSPEERAHRQLVRTRRQILYHRSDVMRQIKSLLLFNSIEIPFKSTQHWTGVFMNWLLKLDLGHETLNRSLKAQVDLFNYLNAEKKILTKDVLKLAKDEKYAQRVALLRTTPGIGPLSAIEILVELQDITRFKTADELAAYLGLTPSQYSSGEHIRMGHITHAGNSRVRTTLVECCWTLIGKDPEMGRKYEKIKNKRGGKRAIVAVARNLSGRIRRILLDQVPYQLDFQKAA

SEQ ID NO: 256325 - protein, 357 aa, unidentified
MGKSIRNLTSVTRVGLDLAKRVFQVHAVDANGEIVVARKLARAQLIPFFAALPPCVVAMEACASAHHWGRALMELGHEVRLLPPAHVKPYVRRNKSDQVDAAAIYEAMSRPGQRFVPVRSIENQAALMRHRARELLAGQRTAALNALRGHLAEIGLVAPQGAQHAYGLKRMAVDGFDENGEVVVPDCVRGALGSLVGQIDALDEAIGAIDKELAASVKADETAKRLMTIPGVGPVTASAIVATIQDAGEFASGREFAAFLGLTPRQNSTGGKTRLGRITKMGDRYLRKLLVVGACATLRHRKGHNDALRLWASGMLERKTVKYKFNLTAVALANKVARIVFVLMTRGGQYDDRPVAA

SEQ ID NO: 256326 - protein, 404 aa, unidentified
MNAVGIDVSKGTSTVAVIGSSGEIVKAPFDVKHTIKELGELADFILSLDGESRVVLENTGKYSEPVVEALHKAGIFVCPVNAKLLHDYGGNTIRRANTDKIASLKIANYCLDKWTRLTQYTPEGELRKMLKTYNRQLGEYTKLKTTLKNNLISLLDQLFPEANKFFTSSARESDGHEKWIDFVSEFWHCECVSSLSQKVFSAHYEKWCHKNGYNFSSAKADKIYLSASNHFGVLPKNDFTKTLILQAVTQLNGLCETVRALKTEMNKIASLLPEYETVLDMHGVGKSLAPQLIAEIGDINRYPKRSSLACFAGIEPPENQSGTYNQHSRRISKQGSPHLRRALFQVMCCVLLLRHSDEPTFQFIDRKRAEGKPYKVYMIAGANKFLRIYYARVKECINKLKTSE

SEQ ID NO: 256327 - protein, 364 aa, unidentified
MTSLSQRSLIHLGMDVHKDSISIGILRPDDSMDVERIFHDEESVRRFIARMGEPQQLVACYEAGPTGYELQRLLQRLQVPCHVVAPSLIPKAPGDRVKTDRRDCRRLARLHRAGELVAIRVPSPEEEAVRDLARARGDVVIDLDRARRRLGAFLLRHGQVWRGGSNWTNRHESWLLGLRFDDAALASTFAHYRSIVEERRLRLAALEADLLPYCEKDPYTEGVARLCCYRGVDTIGALTLVSEVCDWRRFPKASSFMGFVGLVASESSSGERTYRGHITKAGNVHLRTQLVESAWAYQRGPHVGARIRRAQEACPPATRERAWAAQVRLCGRFKRLAARKNVKSVVATAVARELAGFLWGEMTA

SEQ ID NO: 256328 - protein, 350 aa, unidentified
MAKDIIETIGCDLGDKQSELCILSADGGLERPVPIKTTRRAFTKFFTRPRAHVVIEVGTHSRWVSEVLSTLGHKVTVANPRRVKLISQSSLKRDAKDAEWLARLGKADEALLAPVQHRGGEAQADLAVAKARDALVRTRTKLVNHARGLVKSFGERLPACTAESFHRKARTAVPAALEPALGPLFCVLERLEEQIDAYDEQLKQLAKKYPDVEVIAQPKGVGTLTALVFLLTLENKARFSNSRKVGAFIGFNPRRDQSGDCDKQLGIAKTGDAFMRRLAVGSANYVLGPFGEDSDLRRWGLELAKRGGRNAKKRATVAVARKLVVLMHRLWVTGEVYEPVGYKARKSAAA

SEQ ID NO: 256329 - protein, 337 aa, unidentified
MKLTTYGVDIAKRVFQIHWVVPETGEIQRKKLKRADVMAFFRLQAPGRVVMEACGAAQHWARQWQPLGHTVQLIHPKFVRPFVMTNKNDAADAQAIWTAAQQPGMRFVLIKSEAAQAVLALHRIRSQLVKFRTMQMNQLRGLLGKFGIELPGGREAGLAALRDIDWERVPALLHAALQMQMQRLRELDEQMALIERQLAQWLRPDDTCSRVAEIPGVGLLTATAMIAAMGDAHHYRSGRAFAASLGLVPRHSGTGGHVQLGGISKRGDRYLRTLLMHGARSVILHQGKDKASPWLRDLLARRPFNVAVAALANKMARTIWALVAHQRRYESGYGIVA

SEQ ID NO: 256330 - protein, 361 aa, unidentified
MKRVQSNTLDFTGQNIYIGIDVHLKSWSVAILSEYTNLKKFSQNPDPEALHKYLASNYPGANYYSVYEAGFCGFWIHEKLTDLGINNIVVNPADVPTMSKEKLRKTDAVDCNKLARELRSGSLEGIYVPGTETLEMRSLIRLRNLIVKDSTRAKNRIKSLLRFHGVEIPEEFIRCSIGCWSKRFLNWLRSLELSTEYGKKTLELHLEQFIRLRKMLLQETRAIREISRKEPFEKPIRLLTSVPGIGVTTAATLMVEIDDIVRFGNADHLASFIGLVPMCHSSGDNDAVGDITVRRHFILRCLLVEAAWIAIRKDPAMTMAYNEYRKRMNPQKSIIKIARRLVNRVYFVLKHEKEYVPCVVQ

SEQ ID NO: 256331 - protein, 359 aa, unidentified
MSTVPVFVGLDYHQSTVQVCAMNASGQVLLNRACENRWQALVTAVGSVGKPVRVAIEACTGASDLAQELVDQAGWSVDLAHTTYVARMKRQPDKTDYSDARMLADLTRVGYLPQVWLPPLYIRDLRRLASLRATLVDQRRNLKLRLTSLLRDHRVTLPHNRWTRPWLKGVLAPGTLPPVGHLIAVEILDQLQDVLARIDRIHEQMDLFTQGDPIIAFLRTVPCVGPITSWTLRAYIGDITRFKNGKQLAHYCGLSPGNASSGQRVADSGLVNSGNHLLRTALIELAQRLARTQPRWKTFRTHLKARGKHHCVIMAAIANRFIRAAYYPWKQTQLANTASPVTPAGCVFDTATGEVLRSR

SEQ ID NO: 256332 - protein, 400 aa, unidentified
MMTPDDIDVWVGLDVGKSAHHAHALDHDGNTLYDKPLKQDEKAIRTMLGKLSKHGRVLLVVDQPNTIGSLPLTVARNMGIAVAYLPGTAMRRTAQLLPGDAKTDRRDAHVIAWAALKLPETLRDAGPDDETLAALKLLAGHDEDLAHESTRHVNRLRSLLLQTHPAFERALKGERITRDATLALLERYGGPMGVKRAGIEDVKDWAKSNGLRAGRIIDDMFKAIGEQTVTVPDTLMAETIIPSIAHDIKTIRDRRREVGRQVEKLLEDHPLLTVLTSMPGIGVRTASNILLGIGGDIANFKSSAHLAAYAGISPVTGQSGTSIKGERPSRRGNKRLKNALWQTAFVASTKHPPSVAYYKRKREQGKHHNAAIICLARRRCDVIYSMLKNGTLYQEPALVA

SEQ ID NO: 256333 - protein, 371 aa, unidentified
MEGSAFCRSAQCTAIAVADVGREAPRFVGTVGARLSELSKALGKLGEPSTLLIVYEAGPCGYALVRELRVKGYRCEVVAPSLIARKPGERIKTDRRDALKLAAQARSGDLTTVSVPDECDEAIRDLCRARVDAVRARLKARQQLKAMLLRHGRRYTGKTSWTAAHERYLAELGFAHPAQDIAFTEYRHAISEADARVRRLTEALAQQIENWRMLAVVRALMTLRGLDLVAAATVVAELGDMRRFAHPRDLMGYLGLVPSEHSSGTTRRLGAITKTGNGHARRVLVEAAWNYRFPARISRILQVRQQDQPAAVRAIAWRAQLRLCQRYRRLSLRGMQPNKVCVAIARELAGFVWDLGRQVPPQAPAPATQQR

SEQ ID NO: 256334 - protein, 340 aa, unidentified
MEVIIGIDPHKASHTAVALADTEVELARLQLSSSRSQIDRLLAWAKPFPQRRWAIEGAEGLGFLLAQQLVAADEVVVDVPATLAARTRLLGNGRTNKNDPNDALSVAVTALRHRELRTVTTAGYSELLRLLAKRHIDLSNQRTRLVARLHALATELSPGGIAKKLNSTDAAKFLATVTPTDAVAQLRWDLIAELADDIARLEAQTKQSERRLRDAVAASGSTVTNIYGIGPIIAAMLIGNTGDIARFANRDRYAAYNGTAPVEFSSSGRIVHRVSQRANRTLNHALHLAAMCQLRQRHSDGRAYFERRVADGKTNKEAIRALKRQISNNVYRHLVADAAS

SEQ ID NO: 256335 - protein, 363 aa, unidentified
MTSMTTTTADVTGGVDTHGQTHHAAALDPVGRHLGDREFPTTPAGYRALLSWLQTYGHLERVGVEGTGTYGAGLTRQLRAAGVTVLEVDRPDRKARRAKGKSDPLDAYSAARAALAGTATGVPKARDGRIEAIRALRVARSSAVKARSQATNQLKALLVTAPVDLREQLRHLTTTTLVAACAQLRPGADIADPEQATKTALRRLARRYQHLSEEITGADTDLRTLVAAAAPRLLALPGVGTEVAGQILVTAGDNPDRLRSEAAFAHLCGVAPIPASSGRTHRHRLNRGGDRGANNALYIVVLGRLRYDSRTRAYAQRRTTEGLSKPEIIRCLKRYVAREIFTALTSRTADNQSRRVAATSTAA

SEQ ID NO: 256336 - protein, 423 aa, unidentified
MKLAAEQPFTALVGIDWSDKKHDFCLQGADSRQREFGVVAHRPEAIDSWAKALHQRFGGSIAVCLEIAKGPLVHALQRYPFMVLFPVNPATVAKYREAFVPSHAKDDPTDAEIALELLLRHRDKLQVLKPQSAAMRALTTLVEQRRNLIGDKTRITNRLCSTLKEYFPQALDWFEDRDTALFCDFLQRWPSLKHVKRARQATLRSFFCEHNMRRTELIEERIRGIRSARALTEDVAVIGPHQLLVLALIAQLRVTLQAIDQFDVEIADVAKRLPDYALFAALPGAGAILAPRLLVAFGEHRERYASAAQLQQYAGVAPVLERSGNKCWVHWRIACPTFLRQTFVEWAGSTIPRSFWASAYYQRQRDKGCSHQAALRALAYKWIRIVYRCWQTRTPYDESTYLHALKRRGSPLIAALSVALQSP

SEQ ID NO: 256337 - protein, 348 aa, unidentified
MIIIGVDFHPEFQQIASVETETGEFQEKRLAHREEAEAFYRALAGQKVCIGMEASGQARWFERLVAELQLELRIGDAAKIQTKRVRKQKTDRQDAQLILGLLLEDRFPQIWVPSWENRDLRQLLWHRHRMVQARTRIMNQLQAVALNEGLRCKKRLWRKHGRQQLESFRLAPWASRRRRDLLELLDRLNPTIAELSQAIEQEAEKFPEARCLMTHPGVGALTALAFVLIIGRADRFQCGKRIASYLGLVPLEDSSGSRRRLGHITKQGSSMLRFLLVEAAQVTARSIPEWRSKYFHLMMRRGRKIAKVAMARRLAIGLYWMWRKGWDYEQVKKFGSHAGQLGTGGGVQ

SEQ ID NO: 256338 - protein, 453 aa, unidentified
MPESKKTRGRSSGRLSTINPEAAGIDVGSTFHVVAVPGDRDDNPVRTFRTFSGDLHRLADWLEETGIKTVAMESTGVYWIPVFEILEARGFEVLLVNARDVKNVPGRKTDVNDAQWLQQLHQHGLLRGSFRPRDGVVRLRAYLRHRERMVDYAAAHIQHMQKALMQMNVQLHHVVSDITGVTGMRIIRAIVSGIQAPETLAEFRDVRCAASEETIREALTGNYRPEHVFALRQALELYDFHQLKIAECDTEIEAVLHTLNEERTTPEQPLPSVRHAKGRNEPGFDARPVLYTLLGGDLTQIHGFGPYTVLRLVAECGDDMRKWPTAKHFTSWLCLAPGNKISGGRLLSSKTRRSSNRAAALLRIVAVNVGKTQTALGAFYRRLAARTGKAKAVTATARKLAILFYKALRFGMTYVDAGASYYEERYRQRVIQNLHRRARDLGFTLVTDSAANG

SEQ ID NO: 256339 - protein, 342 aa, unidentified
MDHFAGMDVSVKETSVCIVDDAGKIVREVKIASEPEVLRAVLGNPAYHFKRIGLEAGPLSQWLYSALADAGLPVICVETRHMRAVLKAQINKTDRNDARGMAQMMRAGLYRAVHVKTLRSQKLRMLLTHRKLLQSKAIAIENDLRGTLRNFGLKVGVVGKLKFEARIRELVESYPDLAVFIEPLLVIRRVLREQLGILHRRLLAIVRDDEVCRRLMTTPGVGPVVALTYRATVDVPARFRKSKSVGAVFGLTCAKYQSGESERSGRISRCGDEMMRVMLYEAAQAMLHSKRWSWLKAWAMKIARHRGMKKAIVALARRLAVIMHRIWVDGTEFQWTRETAVA

SEQ ID NO: 256340 - protein, 370 aa, unidentified
MAHTSTLFVGLDVHKETIAVAYVAEEREAEVVSLGTIGTRQCDIDKLIRKLQAKGKQLHLVYEAGPCGYWLYRYLTKKNLKCWVVAPSQIPKKAGDQVKTDRRDAVQLARLLRSGDLTPVYVPAVADEAIRDLVRAREDSLKDGKAAKARLKAFLLRQDIRYEGRANWGPAHLRWLAKVVCPTPAQQIVFQEYVRAVSEHTERLQRLEAELQTQVQTWRWLPVVEAVQALRGVQFTAAVILIAELGDLTRFENPKQLMSYLGLTPSEHSSGERRRQGAITKTGNSHARRALIEGAWAYRYPAKVSRHLQLRLEKVPTAIQDISWKAQVRLCKRYRRLIARGKNANQVVVAIAREMAAFVWAIARTVEVTP

SEQ ID NO: 256341 - protein, 437 aa, unidentified
MSSTFSHLVDPVLEDPGDPFRHYDSRNEPLADRLYLPCGIDPHEHVCGVAFLHPFPQSQDVLEARVIHNHHWEDFAWLIATGQCLAAPFQAQPIYVFEATGPFWQPYRHALHQAGLATATVCGRQTKHARATQTRKTKTDVQDAANVARVFKNGDSHASRIPPEPMASLREYSRLHLFFVEQSVAIQNRMYALRYQIHPDFDDLISDPGIATALALMQAELVHPQKILTCDDQDLTTLIQRASRGKLGTPLARALVQSAQTTFRFDYAADALSFNLRLLAEAQLHIQHQLLPRLRQCIEDLLIQVPFEHHLDELPMFGPIVIGSFLGELGCPTWFHSVDSVVAWFGLEPSVSESAAKTTGRSHLTKRGSVYGRRTLWLAARNWSQYTTEGRTLLRKEMHQHHLAYDGAVCALAARLARIAFAMLRDGSHFDPNALNL

SEQ ID NO: 256342 - protein, 408 aa, unidentified
MKTLHKRCAGLDVHKAEVVACVRLISKRKVEREVRRFPTTTQGLLALAEWLESAGCTDVAMEATGVYWKPVWHILEGRFALILANAAHVRNVPGRKSDVNDATWLADLLAHGLIRSSFVPPPAIQELRDLTRTRRQLTREIVQHVQRIQAVLEEANIKLCSVITDIMGASGRRMLKAMIAGETDAEKLAALGHERLGCTRAELVEVLTGRVREHHRFLLGQHLRTIEQLEDSVAAFDARIEAALSPFHDIVERLEEVPGLAATSTETVIAEIGTDMSLFPTAGHLLSWAGFAPRLDESAGKHRSTRIRKGAPCLKPVLVQAAWGAARKKNSYFQAQFLRLKARHGAKKAAIAVAASILTTVYHMLRDGTCYQDLGPEYFTRRNPAQAAARLANRIRNLGYHVEIRAAA

SEQ ID NO: 256343 - protein, 455 aa, unidentified
MEKVFFGIDIGGKTHCVHFIDEKKRPLCKDLVIDDDIVGYHQVIEAIRRLKEKHPGASFHGGAEATGIYWRNLFFFFQNELPDVPLSLINPLQTKKFKDLELDRVKTDATDARSIARYTATFEPEAAPSVPEYLADLQELCRYRKAKLKEQSKYTNLLHNYLKQAFPELCGKVKRKAGLRTLAMLSRFPTARDVREVNASEIASIRYGKRNFRVGAEVASEMKNLAESSVASRTGPGMGFAVRSVAANILRIRGELAALEEKIAELYSACPATYLITIPGIGPLSAAVIESEIKNISRFNTAKKLNGYIGAYPELKESGEFKLMKPRMTKCGNRYLNHAVYMCVLAAISPKAPDNPIKHMYWRQVAQGKERMVAIGSCMRKMNHIIFGILMSGKPFEATYESPEDSFEVRFVDRETGCVVPEELAASCETVVAVRWKRAAAPKPKRRKKEVARPS

SEQ ID NO: 256344 - protein, 388 aa, unidentified
MTTLTTSAVGPILGIDLGKYKSVGCTHGGAGGEIAFTTFETTRAELQRLIGRDRPAVVIIEACLLAGWVHDLCGEVGVPCVVANTASEAWKFKHLKRKTDRDDALRLAQLYWLGQLPTVNLPPSRVRQWRSLIATRQNLVGRRVAVQNRIRAIFVAQGLPAPRGAKAWSATGLAGMMLQAKPIAACGPDELWRGLLDLALTEYRQIGELVTQAEERLDALGRHNAEVKLLQTAPGLGPRTAEVVAAYLHEPQRFHKAKQVSAYSGLVPRQHQSGEMDRRGRISKRGPALLRKLLVECAWCMVRYNAWARGFYLRLTGGGQRRKKQAIVALARKILVRSWAMLRDGKSWHDPQMPPKPALPPSKQRRAAEAARRRQEKARAATATAGCS

SEQ ID NO: 256345 - protein, 375 aa, unidentified
MKEKVRFLGLDVHAETIAVAVAEPDGEVRSLGTIANREESIRKLVKKLGAPEHLRACYEAGPTGYVLYWQLTQLGVECAVVAPTLVPTKAGDRVKTDRRDALKLARSHRSDDLTAVWVPDGDSEALRDVVRAREAAKQDQLRARHRLSKFLLRTGQRPAVGMKAWTEPYMAWVRQVRFEQSAQQATLLDYLHEVDHMAARVKRLEQAITEAVKLASPQVQEVVKGLKALRGIAEISAVTIVAELGNIARFDTPRQLMGYSGAVPSEDSSGKRKQRGSITKTGNAHLRRIVVEAAWSYRHRPAIGPRLRKRQEGVAEPIKEIAWKAQVRLSKRYARLAAAGKDQRKIITAVGRELLGFIWAIGVKVETASRQPMAA

SEQ ID NO: 256346 - protein, 399 aa, unidentified
MLKGYDEVAVFLGLDVGKEGHHAVAQDRSGKKLLDRALPNDEAKLRELYGRMKAHGPVLLVVDQPATIGALPVAVALDEGVTVAYLPGLAMRRIADLHPGSAKTDARDAAVIANAARTMPHTLRALQLDDETIAELTVLSGFDDDLAGQITATSNRIRGLLTQIHPALERVLGPRLDHPAVLDLVETWPTPATLAAAGKTRVRTRLLKKAPRLGGRLTEEIFAALAAQTVVVTGTNAAGVVLPRLAAQLAALRQQRTEVAEKVEELVAAHPLSKVLMTMPGVGVRTCARILTEVVGKDFPTAGHLASYAGLAPVTRRSGISIRGEHPPRGGNKVLKRSLFLSAFAALSDPVSRAYYDRKRAQQKKHNEALIALARRRTDVLYVMLRDNKPYANPTPVAA

SEQ ID NO: 256347 - protein, 347 aa, unidentified
MRFYNNSHPYYCGIDLHARLLYVCILDSKGKVVKHKKIPASKDDLLHILEPYIGNVIVGVECMHCWYWVSDWCAELGIDFVLGHALYMKAIHGGKTKNDKVDSFKIASLLRGGNFPIAYDYPSEMRAARDLLRRRMKIVRHGAMLKGHVVNTNSQYNLPATELNLKHISARQKLREQYQDPIVQRNIDMDMAILDFYAKELAQVEWFIEKQAKNHNPVYLELLKTVPGIGKILSLTILYEIGDIARFESVQKFASYSRLVKCKAESAGKTYGTQGNKIGNAHLKWAFSEAAVLYLRGNDKARNYLNRLQKRMSKAKALSALAHKLGRCVYFMLKNKTVFDEQRFLKG

SEQ ID NO: 256348 - protein, 340 aa, unidentified
MDTIGLDLHKRESQLCVLTEAGEIVERRIVTSRERFTVVLGGRPPARILLEASTESEWVARHLETLGHEVIVADPNFAPMYATRRRGVKTDRRDARTLAEACRLGAYRRAHRASDEQRHVRAELAVRDALIRTRTRTVALAKTLIRRDGLRLPSGGPAHTEAKLAALPLPPALAAELAPLRALWAPVNTQIAAADARLAHVAAADPVVAQLMTTPGIGPVTAVAFVATLDVVTRFASAHQVEAYLGLTPREYSSGEQQRRGRISKTGNARMRYLLVEAAWRVLRTKDPAAAALRAWAEGIAQRRGRSIAAVALARRLAGILYAMWRDGKDYRAPQPAVVA

SEQ ID NO: 256349 - protein, 355 aa, unidentified
MTASYNYHIGVDYHKSYSHLVVQDSSGKTLRSGRVKNDRQSLGGFLERYRENSHAVIEATRNWMVMYDWLDDICDDVVLAHPLKVKAIADAKIKTDKIDATVLAHLLRADLVPEAWAPSEKSRDLRVALRERMFYVRLRTMTKNRIVTVFDRYPEQTAQLKKLGDLFGKTGRVQLAQVNVSEIDRIQIDRGLDFIGDIDVRIKQSEETIRAMTKANANVKLLKTIPGIGEFFARLIDAEIDDISRFRNPKKLAAYAGLVPSTYSSGGKTFHGKIIKQGNKWLRWAFVEAVTPAIASDAQLRARYEHLKIRGVNKARVAIARKLLTIAFQILRDQRAYERRGESTMEGTSTISRLS

SEQ ID NO: 256350 - protein, 354 aa, unidentified
MLHYKNTPIDFRGQSIYIGIDVHKKSWQVSIYTKDFEHKTFSSPPQTEAVISYLRRTFPGGSYFCVYEAGYSGYWIRQKFEQEGVNCIIVNPADIPIKDKEKRIKNDRVDSRKLARSLRSGDLEGIYIPSEQKIEDRSLMRMRHLTVRKLTRTKNQIKAYISFYGLVPGVKPNWSNKFIGWLETIKFCYSNGNMALKILLDEYKYQKQVISDLNNQIRLLSQTDSYREDVNNLITIPGISTLSAMIILTEIDNINRFKGLDQLNSYVGLIPGEYSSGENEHTTGIVHRGNTLLRRILVEVSWIAVKKDPSLLMAFNTYSKTMAKNKAIIKIARKVLNRIRFILLNKQNYVTGVV

SEQ ID NO: 256351 - protein, 316 aa, unidentified
MNKENPTEINIGIDTSQSQLDIYVRPIGEYFCVDNTPQGTREAAKRIKTYQPARVLIEATGRLEMLFVCAAHEARLPVVVCNPGQVRQFAKATGRLAKTDRLDAQDIAHFGEAVRPALSELKPEKLRQISDLITVRSQCLDMSTMQKNRLQRMPTSVHKPLQRILKAIQKEIERIDQQIDKFVEAIPQWKSQRDLLMSAKGVGKVVAYTLMSELPELGKLNRKEIAALVGVAPINRDSGSFRGKRRIHGGRRKVRTVLYMSTLSAVQHDPKIKSMYERLVAAGKPKKVALVACLRKQLTILNTMMKNGTHWDEKLA

SEQ ID NO: 256352 - protein, 428 aa, unidentified
MDETNGNRVERFRQFKREIRGSEEYLLVGIDIAKEKHHAFFGTATGKTLLKRLIFDNSRDGFERLLIQVEALKVHHGLKRVVMGMEPTANYHKPLGEYLIRKGYEVVLVGGVAVKKNRELLDNRWDKHDTKGAANVADLISQGKCLFYEYPTLALRELRDLLSLKRRLKKQEHGYQVRIRNHLLAQYFPEMDPYYEQSKVGSLGIVKWCLSPLKISEMGLDEFVRLVSCRRVGIVQERRFRGIWEKARESIGCEAGETVAFGASLMVDGLRQMREALKAIERKIEEVCKGFSEYECLLSIPGFGPDISSKMLGAIGDPFRFNNGKQVLKLSGFDLSADRSGKDSEEGLPVISKKGKSDLRYALYQAALIASVKNRDVMIYYTNKLRGRERERGIHIKMRVKLAAKLLLVAWTLMKKKEKFDPAYLNID

SEQ ID NO: 256353 - protein, 346 aa, unidentified
MEYYVGLDVSLKEISICVVDRDGKTVARGVCPADPGGVAGWFRNRELTPRRIVHESGMLSIWLQRGLAGLGLPATCIDARKAHKSLSARLNKSDAADAEGLAQLARTGWFTPVHIRSEEADRLRSLVGARERLIRLRKDLEGHIRGVLKTFGIRMIGIGQGRQRQAFRDQLAAAGETDQVLRVIADAFIATHAKLCQVADDLDKVVRKTAKVHPVARRLMTIPGVGPVNALSFIALVDDPGRFNRTSDVGAFLGLTPKRHQSGEMDWSGRVSKCGDGAMRGLLFEAASSVIHQVKRFSRLKSWAVRLAGRRGFRKAAVATARKIAVLMLTLWKNGTDYQWTKEATA

SEQ ID NO: 256354 - protein, 327 aa, unidentified
MVNALGIDVSKDKLDVVLLNEQQHSHSGVFANHTQGFEQLQRWLSKRCEGNVQACLEATGQYGEAIAEFLYQAGHTVSVVNPARIKAFAASRLSRQKTDQSDARLIAQFCQSQHPEAWTPPAPEQRALRAMVRHLADLKAMRQQENNRLTSGVAADAVLHALQVHIAFLDQQIADLERQIHDHLNQFPHLKQQRDLLDSIPGLGQLTIANVLAEVPNILAFETAAQLAAFAGVTPRQFRSGSSVHRPTHISKCGNARLRAALYFPAMVALRHNPIIRAFGDRLKATGHTGKSIVVAAMRKLLHLIYGVLKSGLPFDPNYSAKSLLIA

SEQ ID NO: 256355 - protein, 427 aa, unidentified
MNQAKNNQPNSTDYAAFLAMDWADREHAWSLQVAGQDNKETGKLKQQPEVLGPWLAQLRERFGNRPVAVALEQSRGALIHALLSYDFLVIYPLHPTTVAKFREAFKSSGAKSDPLDTDQILEILTKHLKQLKPLRPDTEETRLLARLVEDRRKLVDLRTSHIQAAQACLKEYYPQALELCSGNLTSRLARDLIKKWPALEAFQQAKPSTIKRFFYGHNVRRPQAIERAVEISTRGTALTTDPAIVQSGGSLARTYLELIQTLQPRIKEYERRIEKLFETHPETALFTKLPGAGDALAPRLLSFFGTDRSRYRSANSAQSFCGIAPVTKSSGKSKVVYLRRACPKFARQTFHEFARLSVVKSQWARNYVDYYLGKGKSYHTTIRALAFKWIRILYRCWQSRTPYNEDRYMETLAKRWSIFATLHLKAS

SEQ ID NO: 256356 - protein, 391 aa, unidentified
MSMYFIGIDISKYKHDCCIISAADQKVVSKVTIKNNKAGFNELLTIIHSLANPADIRIGFESTAHYALNLELFLENSLLTFMEVNPVLISEYKKSKTLRRTKTDSVDCESIARWLMTVEYKPHSKGFYHAYSLKSLTRLRDKLIRQRSFYLVKITNVLDHTFPEFKPFFNERLSKTALYLLENYGSAEKMARMNSASYEKLRSVSRGKFSPQQFLQLKELAANTVGVNNSIFDVELNSLLSLYKSLVKEIATIEKEINKLIEEVHPHYMSVPGIGPLSAAVIYSEYGDISNFTNPGQMLAFAGIEPGINESGTESHGGKMVKRGSSQLRYTLINCCLPLIRFDMTFATYYAKKRGEGKPHRVAITHVAKKLIRVIYALESQDIDFNAQKLR

SEQ ID NO: 256357 - protein, 317 aa, unidentified
MQEKIFVGVDCHKETIACYVKGQFKEFKTTLQGFKQAINWAPKDCYWAIEGAYHYGLTFATFLLEKGFKVYEFNALATAKARKALSISGEKNDWGDAKVVSTFASQMNLQEVSVKTIDLSRLITQRKLFVKQRIELMNNLKAKFIQRGYEKLPYRNMTTKKAINWLLNNEDIEISLIGKLLKELENSISILNKEIEKLTPEKAMKLTKLTGISTLTASTIYAQTKGKKMTKAQFASYCGVAPVQNSSGLTDRYRNNKRGDRTLNSILYSISHMQAKYDDIGSVYFLKKLKEGKTKRHAKKCLSRQVCNQIWKILNKD

SEQ ID NO: 256358 - protein, 412 aa, unidentified
METIVERPAALDVHKAQVTACVRVPNQSGEREERIAEFSTTVRGLLALRDWLSTHRAGQVVMEATGVYWKAPWAILEDEFECLLVNARHVKQVPGRTTDVSDAAWLCRLAEAGLLKASFVPPKPIRQLRNLTRYRKTQIQERSREVNRLHKALEDAGIKLDCVAADVMGKSGRDMLDALVAGESDPGVLAELARRQMRKKIPALREALAGHFDEHHRLWIGAILAHIDFLDAQIAQLTEAIEEQLRPFAPAVELLCTVVGIQRRGAQTIPAEIGADMTRFASARHLASWAGQCPGNDQSAGKRRSGRTRDGSKWLDFALEEAAMAAIRVKANYPAAQYQRRKPRRGHKRALGAVKHSLLGAIWHMLATGETYRDLGADYFTQRDPERQTKRLVKQLERLGHTVTLAEDAAAP

SEQ ID NO: 256359 - protein, 402 aa, unidentified
MIFINCLGIDIGKSESVVAHYKDEVLVKEMVIQNNQNGYRYLKNYIKHLDSLFILFDSTGIYSRGMKRFCEIHKIDYLEMNPLEAKFKTSSLRSWKTDKSDAHKLALLAFRMKDSKVQRQSEEIYFELRERARFHLEMEINQNRLKVELVETLHQTFPGLEKLFTNRYSKIALNIAKAFPHPDFVSTLTHDELVEKVLHSTDKGISVNKAHKYVQKLIEIKNNSFPNVDKSSFLLQKVQYLCDKLLIGIEEMKEFDQEMIDLAENTTEFENIISIPGIGELTAALLIGELGNIREFKTNKQLNAFVGIDIKRYQSGTSKSRDTINKRGNKKARRLLYLIIMNIIRGRNHYQSHIVDYYYKLREQPHGKTHKTAVIASINRLLKTIHYLIVNNKLYDYQKAPH

SEQ ID NO: 256360 - protein, 357 aa, unidentified
MEQRNKISFKGQNIYIGLDVHLKSWSVKILSETSVLKKYSQDASPEALHKTLTMRYPDAEYYSVYEAGFCGFWIHDRLTELGIHNIVVNPADVPTKSSEKLRKTDAVDSKKLAVCLRARQLRGIYTPDAEALEIRSLIRLKNSITKDTTRQKNRIKSQLRYLGIDIPKEYLEPNSNWSKRFIAWLKDVQMKTTSGRQTLDLQIRQLEDLRRQKLEITRALRKLSHSEKFEDTLRLLMTVPGIGQTTGLALMAEIVDVTRFANAEQLAAYVGMIPMCHSSGEHEGVGDITLRKHAILRSNIIEAAWVAIRKDESMQLCYLNNCKKMVPSKAIVKVARKLVNRIYFVLKRRQPYVNAVA

SEQ ID NO: 256361 - protein, 347 aa, unidentified
MNFYTKQHKFYCGIDLHTQRMFVCIIDAGGTVRVHQNIHTDPEAFLRIIGPFREDIVVAVECMFTWYWIADFCIQENISFVLGHALYMKAIHGGKAKNDKIDSLKVATLLRGGMLPQAYVYPARMRATRDLLRRRNHFMRKRAELFAHIQNTRSQYNLPDPLGCIAKPQNREGIVDRFNDPSVQKSIAVDLEVIEAYDRLLTQLERDIIACAKEHDLRSYALLQTIPGVGRILALVILYEIESIERFPRVQDFVSYCRLVKCIKESNGKKYGSSGKKIGNAHLKWAFSEAAVLFLKGNEPAKKYLERLARKHGKVKALSILAHKLGRAAYFILKNKEAFNQKKFLGL

SEQ ID NO: 256362 - protein, 350 aa, unidentified
MEKYAGIDVSLELSSVCIVDAQGTIVKEAKVASEPEALVGFFEALGFAVKRVGLEAGPLSQWLHARLKQAGFETVLLETRHVKAALSAMTVKTDRKDARGIAQLIRMGWFRPVHAKSIGAQEVRALLVARKQLLGRLIDVELSIRGILRGFGLKVGPVTRKNFEARIRELVAGQATLERVATAMLSARLALKAEYGRLHKAVLAIVRDDAVCRRLMTVPGVGPLVAITYRSAIDDPHRIVKSKAAGALFGLTPKKYQSGEKDVTGGITLAGDEIVRTVLYEAANVLLSRITRFSKLKRWGMDVAKRRGSKRAKVALARKLAVILHRIWVDGTTYRWAEGVHGSVGHVEEI

SEQ ID NO: 256363 - protein, 422 aa, unidentified
MLTRTHDDEQIIERVAALDIGKAELMCCVRVPDEDHPGKRLQEVASYSAMTRSLLGMSDRLACLGVTRVVMEATADYWKPVFYLLEAAGFDTWLVNAKDVKHLPGRPKTDKLDCIWLCKVAERQMLRPSFVPPPPIRRLRDLTRYRADLVAARTAEKQRAEKLLEDACIKLSAVITDIFGVSGRDMLAALVAGERNPKVLAQLARRSMRAKITVLEEAFTGHFTDHHAFLLGAMLARVDAITADIATLDAAIAAQAAPLADLVARLDEIPGISLAAAHVILAEIGTDMTRFPTAGHLVSWARLAPGIKESAGKKKGKGSTGHGNAYLAAILGNAAAGAAKTDTFLGERYRRIARRRGSKRAIVAIGRSILVITWHLLSDPAARFHDLGPGYYAARIAPERRKRNHIRQLEALGYTATLKPPA

SEQ ID NO: 256364 - protein, 371 aa, unidentified
MQQNRTQKFVGLDVHKDSITAAVSEGGPLEAARDLGRFAHDLTRLLKLLARVGAAEDLHVCYEAGPTGYGLCRALRAHGIDCIVVAPSKTPQPVGGRIKTDRRDAQLLAHYLRTNSLVAVDVPSEHQEALRDFVRLREDAVWALQKARQQLGGFLLRHGRIYPGKSAWTLKHVTWIRSQRFDLELARRTLDQYLAEMIRLKERLDELTEQLELHLKAAPQSELFQNLQALRGVHTVVAATIVAEIGDLRRFASASRFMSYVGLTPSERSSGNEVRRGRITKAGNPHVRRVLVEAAWCARYRPARSHHMQLRMARTPLDVQDIAWRSQLRLNQRYRRMLMRGKNLQHTIVAIARELAGFVWAIGQRPTHPAA

SEQ ID NO: 256365 - protein, 354 aa, unidentified
MNTTQVFEKRKIAVAIGIDLAKDHCDVVAYNADNKICFTKSNWAFPQLIEWLANAQPAVVLMESCKGSMVRARDIADLGHDSRLVKGADVKALRNVTQKNDIRDADYIARLFYVPGTKYVFVKNQRQQSLQFLQNEYKSLQELRIRVGNQIHAGLEEFGCPGSKSKKFIQSRMMAHLEKNAELIPDEVMASFLRRRDMWLNLFEQEEQAKTRMEEIAMTDDDAKRIMTVPGVGAQTAVGMLVHIGGDIGRFKNSGQFAASIGLVPKQNSTGGNITLNGITKCGPKRLRANLVQCGQVILMYADKLKGNFGDWVRKLRDSGKKRGVIACAIAAKIAKIIYRLMKDKVDYTPVPSR

SEQ ID NO: 256366 - protein, 341 aa, unidentified
MKDIRAVVGVDIAKHVFQLHEVSKETGEITSVRLKRKTFLAHFANRPTCPIGMEACGGAQHWARKLVALGHEVRLLPALQVKAFVSGNKNDMADARAIWMAVQQPGVRTAAIKTEAQHAVLAMHRIRQQLVKFRTAQINALRGLLTEYGEVMPLGRSGIARRLPGILANLADRLPAVLVDTLREQFARIGRLDEEVVEIERRLRDWYRQDDACRRLAEVPGVGLLTATAVVAAVGDARTFRSGREFAAWLGLVPRQTGTGGRVKLLGISKRGDTYLRTLLIHGARSVLTHSKSPPEWIVKLVKRRPINVAIVAMANKTARTLWAILAHGQLYQREHNSSPA

SEQ ID NO: 256367 - protein, 352 aa, unidentified
MIVLGADTHKRSHTIAAVSAATGELLGEKTVAVGAAGFGSLVVWARGLEGERVWALEDCRHVSGSFERFLLARGERIVRVLTKLMAEARKGGRQRGKSDSIDSIAVARAALREGLDSLPAARLDGPELDLRLLVDHRERLVRQRVGLNNTLQWHLHDLWPELELPGSALMSKKWGSRIARRLARAEQTMRVRITRDELRRLREHTQTINDLEAEIARLVAQIAPQLLTEPGFGPLTAAKLVGEIAGVDRFDSDAKLARAAGVALIPVSSGKPNRHRLDRGGNRQINAAIHRVAVTRARCHPETRDYIARKRAEGKTTREAIRCLKRHLARRIWHLLQTPAPITDQTVTPSIS

SEQ ID NO: 256368 - protein, 418 aa, unidentified
MAFKIFRKNCCGLDVHKTWIFACIGITDANGRTEYFEKRFSSFSRGLRELSEWLAKHHCVDVCMESTGKYWIPVFNILETTCNVVLAHPKYTKPQKGNKTDRKDAKWICDLFMCDMVKPSFIPPADIRHLRDLVRYRFKLNCMITGEKNRAQNCLTVSNLKLDDVFSDVFGKSSRSITEYILGHPGEIFDVSPFVDCRCKHPIEEIQAAVDGAISKEQAVKLRQCLDHIDELEKHKTEIEREIFCLSDSYSDALDLIRTVPGFDKNPFTAIQILSEIGGDMSVFPSDMHLVSWAGCCPRNDQSNFKIKSTRISRAGNYLKPVLVQVANALIKSKKHPEITERYRRIKSHRGHKKAIIAICRMLLTAIWHILTDLKPYSADGYLIVKPVAEKKTLTTAQALNLLKSRGYVITDDIVTAT

SEQ ID NO: 256369 - protein, 340 aa, unidentified
MVLIGVDPHKASHTAVAIDGDERPIAQLRVTADRTQLQRLLAWAEPLGDDRTWAVESAAGLGRLLAQQLVAAGETVVDVPATLAARVRLLGSSKAAKNDPNDALSTAIAGLRHRELRPVVADDHAAVLRLLADRHHDLVALRTQTACRLHVVLRELVAGGAPLRLKADRATALLRSVRPTNAVDTERKRLAHELLADVRRLDRDIAAVKTRIAEAVAMAETTLLEIYGVGPIVAAIILGQVGDPRRFPTRDRFAAYNGSAPIEASSGPRARHRLNPRGNRQLNHALHLIAVTQVSHDTAGRAYYDRKLAEGKTTKEALRALKRRISDAVWRQLHTDVHQR

SEQ ID NO: 256370 - protein, 374 aa, unidentified
MIYVGIDIAKLNHFASAISSDGEELIKPFKFTNDNDGFQLLISKLDPLDKDSLIIGLESTAHYGDNLVRYLVAKNYKVCVLNPIKTSTMRKNNIRKTKTDKVDTYIICKTLMMQESLRFVTFYDLDLMDLKTLGRFRQKTIKQRTRLKIQLTSYVDEIFPELQYFFKSGLHQKSVYALLKEAPTPEAIASMHMTHLAHLLKVNSHGRFDKEIAQQLRVLAQKSVGASDSSLSIQVTHTIQQIELLDSQLERVEAEMTEIMKFNDSVIMTIPGIGYINGGMILGEIGDIHRFSSPNKLLAYAGLDLSVYQSGNFQAKKTRMSNHNVVKNNATFKAYYEAKMAEGRTHYNALEHCAGKLVIIIWKMMTDNVEFNLD

SEQ ID NO: 256371 - protein, 348 aa, unidentified
MHFYKGAHTFHCGVDLHARTMFTHVLDHAGVTVFARDLPARPDAFLHAIGPYRPGLVVGCECMFAWYWLADLCEDESIPFTLGHALYMKAIHGGKAKNDRIDAAKIAGLLKGGMFPMAYVYPRQKRATRDLLRRRCCFVKERSQLIAHIVNTNSQYNHPPLTAKLCYARNRTEGIAERFTDAATRVSIHADLKLIDHFDEQIDEIERVVLKTAKIDDPVTLGFLRTVPGIGKILSLVMLYEIDQVKRFPEVGNFLSYSRLVRPEHESAGKKKGSGNKKIGNAHLKWAFSEAACLMLRAWPDAKKWLARQERKRGKRKALSVLEARIGRTVYHLCRKQRPFDPKRFFSS

SEQ ID NO: 256372 - protein, 370 aa, unidentified
MNNATTFVGLDVHARSIKACAFVPATGEIERKSLGYEPGELASWMKSLPQPAKCVYESGVTGFHLCRELRAVGVDCVIGAVSKMHRPAADRGRKTDRRDAHFLAVQLALGVVTEVHVPDPECEGARDLTRALADARDDAVRAKQRLSKFLLRHGYVYDERNAAGQRKGRWTRDFWAWVGRIDLGDPSAMAALDHYCERVRRADEEKAALEAKVKSLAQAPRWKPTCDALRCLKGIDAVTAASIACEADGFSRFERASGFAAWIGLVPSEHSSGEFQCRGGITKAGNKHLRKLLVEAAWHYKCASRAPKKAAAGQSVPPDARRHANAGVRRLVDRRRAMDAAGKQSSVANVAIARELACWCWAVGRMAEEA

SEQ ID NO: 256373 - protein, 400 aa, unidentified
MRTVFGIDVSKANSEVAILVNGEKVHGYTMPNNAVGFARLSNDLKTVHNPEIIFEATGVYPRRLQAFLEDNGYVYTRLNPLEAKKQLDSLRVRKTDKIDAEKLAQSQFVLNRKPTYVQEEVYQNLRDLSRFYQNLTEDIVRTKNRLHKVLQVTFPEIEHILSAPTGEQYWNLVMAFPCKESVLRLTQSHLMEVIRQSTSTRISEKRVVYLTDKLTELAKQSYCAVKKTSPMMEEVRYYAQELLRLSERRRAVLDEMVILAQPLPEYNILLSIPDIAETTATSIIGELGDIRRFQSANQINAFIGIDLRHYESGNFLTKEHITKRGNPYARKILFKGIHNIASASHTNPCHIADFYEKRKRQSQIASSKPHTIASIHRLIQTMYYLITHNKLYDYDSTQNQ

SEQ ID NO: 256374 - protein, 330 aa, unidentified
MQKVQHIIGADLSKKTIDLFYHLKETHLKIDNILQGFKTLLKWIRQQQINPSELIIVMEHTGLYSFCFEEFLHRHQISFTKVSALAIKHSIGLVRGKSDKIDASRIAAYGYEKKDKLSAEPPTSKELQRLQLLYATRERLVKQKVGLINAVKEYSNIGLLQNDPVLQCQQRLIKNYEKEIAKLEVQLDNVFKSNPSLQKNHLLLQSIKGVGKVLATATIIKTRNFTRFTNARKFACFCGTAPFEHTSGTSIKGRTRVSHLADKQMKTLLDLSAKTAIQHDKELREYYLTRTQAGKPKMSTINVVRNKILYRMFAVIKRQTPFIENYLQAA

SEQ ID NO: 256375 - protein, 459 aa, unidentified
MAQSKKRKGKGTGGTRMLPVLHPDAAGIDVGAEEVFVSVPPDRAAEPVRSFQTFTRDLYELADWLQFCRVRSVAMESTSVYWIPLFQILETRGFEVFLVNAQHVKNVPGRKSDVSDCQWIQYLHSVGLLKASFRPPDQICVVRSLWRHRESLVQMAAEHTMHMQKALTQMNLQLHHVLSDITGLSGMRILDAILSGERDPVKLAALCHGRVRSPRETVAKSLEGDYRAEHLFALRQSLVGFHFYQQLIRAVDQELEGAMRQLPRAEGAPEQMPPRTKKCFYQKAGNEPAFDLKAELFRISGVDLTDVPGISAITAHTILIEVGPDLSRFRNASAFASWLGLCPDRKVSGGKVLYTGSRKVKNRIAIALRLGAQCLYHANNYLGEYYRKMKWRLGAPQALTATAHKLARIVFHMLVTKQPYNESILVKWDQQANMRAELRIRTQAAKLGFDLTPAAKPHT

SEQ ID NO: 256376 - protein, 320 aa, unidentified
MSGMLVVVGIDVAKAHVDVAVLGRAWPAQRFANDIDGHSALAAAMQPLAVSLVVMEATGGYEAPVACALQATGLPVAVVNPKQARDFAKGIGRLAKTDRIDAEVLAELAAVLVRRDDLARFLRPLPDAQQQELAALVTRRRQLLTMLGSERLRLPLAVPKVRPSIEAMITAIRNQLDDVEGQMQTQVHEHYAELDALLRSTKGIGPIASATLIAALPELGRLNRREISALVGVAPMANDSGTVRGTRRIHGGRFDVRNVLYMAALSARTCNPAIRAHYERLRAAGKLPKVALVACMRKLLTILNAMVRTRTPWTNNLHSA

SEQ ID NO: 256377 - protein, 461 aa, unidentified
MGRTEREKSKGQHGRLPVVHRCAAGIDVGSTFHVVAVPASMDPKPVRTFKSFTGDLHNLADWLVGVGITTVAMESTGIYWVPIFEILEARGLEVLLVNARNVRNVPGRKTDVNDAQWLQRLHEHGLVRGSFRPRKNLAALRAYLRQRESLVRYSSSHVQHMQKALMQMNLQLQHVVSDITGVTGLAILRSIVAGERDPVVLAKHRNRRCKATSAEIVSALTGHYQEEHLFALQQAIELYDTYQLKIVACDAKIESMLKQLALFAEHDAKALPPKQRKMRVQRNEPRFNVRGALFAFLGTDLTQIDGFGPHAALALVGECGDDMKRWPTHKHFVSWLSLSPGSKISGGKILSSKTRASSNRAAAIFRMCAVSVGRSDTALGAFYRRLAARIGKAKAVTATARKLAILFYISLSKGIHYQDPGVDHYEERYRQRVLRGLKKRAQTLGYTLVEAQLQVSAESVS

SEQ ID NO: 256378 - protein, 404 aa, unidentified
MLLIGIDQSSQKHDICITDLQGRQLAYKEVNHTLPGFEWIHKQCQRLGVIPQDCLVALESAHSLLVDYLLDQGYQVHVVPGRVVNRYRDRYRQSRSCSDQGDAAVLTNVLRNDRDHYVPLTADQPLTRQICSQVRLLSTMKGNVARVSNQLRQLLWRYFPLAAELFSKLDQPLTCAFIQAYPTPQKAQGLSKSAFETFCHQHRYWNKRYIARRYGQLQAMQTFASAPIANAYAQQAQSLARVLGFLVKERDAAQKALTQSFEQHPDAHIYASLPGAGEFLAPALLSKFRDCRARFPTAAVAQAIAGTCPVTRKSGKRRHQVLFRRACDREFRFIATQFARCSTADSGWAAAYFETIRPRVGKATHAYRCLANRWIAIIWRLWTDRVEYDEAVHLRNRFANRTRS

SEQ ID NO: 256379 - protein, 379 aa, unidentified
MPDVSSTAPAQVRTWIALDAHKHSLVAGVLPAAGGAPEVTRLENTERAVRRFVDRLGGPDGLAVAYEAGPCGYDLLRLLARIGVACDVIAPSLVPVRAGDRVKTDRRDAKKLVRLYRAGELSFVEPPSPEHEGLRDLVRCRDDLRRARTAARHRVAKALLRHGHIYREGKKAWTKQHAAWLHRQRLADPLADRALAHMRSHLEAIDAQLAAIDSELEQVATSEPWCDPVRWLSSFRGIGLHTALGLVAEIGDFRRFAHPRELMSYLGLTPSEYSSGDQQHRGHITKTGNRHARRLLVEAAWHYQHAPRRSERARALEPHVPEAVITRAWRAQVRLNHRHRTLTEHGKRSTVANVAVARELCGFVWAAMTDQPLKENLAA

SEQ ID NO: 256380 - protein, 351 aa, unidentified
MAEVADGDWVIGVDTHRDTHTAVICDATGRAGAQLQIPATPAGYAQLLAWARQAAGGGRLAWAVEGTRHYGLGLARHLAAAGEQASEIDGSHHLGKRRSGKSDEIDAVRAARELLARPHPAQMRADGDREALRLLMLDRDHAVQSAKTARNALAAVLVTAPAPLREQLRHLPAARRPAACATLPCPEQADRLTRITCQTLARLGQRITALAAEAADLQTQIAALTEAMAPGLTATEPGVGALTLAQILLSFSHPGRIRSEAAFAMLSGTAPLPASSGRTDRHRLNRLGDRQLNRALHTITVTRMRCHPQTRGYVARRRAEGKTDREIRRCLKRYLARHLYRALNSHCHQTT

SEQ ID NO: 256381 - protein, 314 aa, unidentified
MNAQALVVGIDVSKDWLDVAMGSESLRMANDAEGITELVSRVRDAGAQLVVMEATGGYEMQAATAIAGAGLRLAVVNPRQVRDFAKATGRLAKSDRIDAHVIAAFGQAVDPQIVRLPDEQTLELQGLIARRSQLVGMRVQESNRLTLMKGAMRKQIKAHIAWLDKAIGEVNTDLTARLRTSAAWREKDELYRSMKGVGPVTSGTLMASLPELGTLDRRSIAALVGVAPFNRDSGTFRGRRTIWGGRAQVRHIVYMAATAAVRSNPVIKDFYERLIARGKPHKVAMVACMRKMITILNAMARTNTPWTPAFHGGN

SEQ ID NO: 256382 - protein, 321 aa, unidentified
MTKVNKIIGIDIAKEKFDVCFSFQECEYSHRGYVYDTKSINCFMKEVPQDCLCIMEATGIYHLKLAYALHERGIMVSVVNPLSVKNFSRAIMCRTKTDKVDSRILVDYARKMDVEIWEPTSDTYIRIQQIYRTIELFQRNITQTINQLEAIESSPIQDKILSRMLHNHIRQLEHKIAHLENQVEILIEEVDSEVIKNICTIPGVGKKTAIGLLTATKGLHGFVDYRQLSSYLGLCPRIYDSGKSVHGKAHICKMGMGWIRKLLYLCALSARRCNKSCVAQYERLREQGKAAKVALIAVANKLLRQIFAIVKNNCAYNENYA

SEQ ID NO: 256383 - protein, 366 aa, unidentified
MTSVPLAAELIHLGMDTSVNEIVVAVLRPGEEIPVVERIPGGEESVRRLVGRFPDRRLLSACYEAGPGGYELYRLLASMGVACEVVAPSLVPKGGSDRVKTDRRDSVRLVLPHRAGLLAPVRVPSPAEEAVRDLVRARGDLLDDRKRMQQRLNAMLLRHGRVWRGGTKWTYAHRVWVDKQESGEPALEEALALYRGALEAREAELAAAETGLSAWAQREPLAEPVARLGGYRGIAQLTGLTLAAEVVDWRRFASARAFMGFAGLIPTEYSSGSRTRRGHITKAGPEGVRTALIEAAWACRHRPAIGAVLRRRQAGLPPETLARSWKAQQRLHAKYKKMTARGKPSGVAVTAVARELAGFVWAEMTS

SEQ ID NO: 256384 - protein, 310 aa, unidentified
MKNSNTIGVDLAKNVIQVSVVSKNNKELINRELTRKKFAELLAKQKPSLVAFEACATAHYWSRVAIRHGHEAKIIPAKAITPFRQGHKTDKNDALAVAEAAKRPNIKVAPRKEIEQQGLQAIQRSRELLIHERTALSNHMRGILMEFGEVIPQGFAALTRRIPEILEDGENELAYIYRPTLSRLFERFHQLQDDIKFIDEQIKFYVKENNSCYRLTAMEGVGPISAILLFATLGTGEAFKNGREFSAYIGLTPKQYSSGGKANIIGISKYVANRRLRAVLIQGARAYVYKLKEAKSTKAIPVGFPLQCVK

SEQ ID NO: 256385 - protein, 349 aa, unidentified
MEVTTIGIDIAKRIFQVHGVDERGKTVLKKKLMRDQVLIFMANLPKCLVGIEACGGANYWARELGKLGHEVKLMAPQFVKPYVKTNKNDEADAEAICEAVARPNMRFVPIKSIEQQDILSIHRVRQRLVKNRTALANEIRGLLHEFGFIIPQGINKIMTKLTEILDNESLSEISHQTFSELKEEFLENDKKIDELEKRLKIIASSMDKYKQLIEIPGIGLITATALIASIGSISSFKNGRQLSAWLGLVPRQSSSGGKDKLLSISKRGDVYLRTLLIQGARAVLNAKLRFTTEKQKVQKDYSKFTEWMFNLSERNGHNKTIVAVANKLARIVFAVMRSGNDYTESKVCG

SEQ ID NO: 256386 - protein, 311 aa, unidentified
MNFYNNMHPYYCGIDLHARLLYVCIIDNTGLILVHKKIKDEPEALLKLLKPYIGDIVVGVECMHCWYWVADFCKENTIDFILGHALYMKAIHGGKAKNDKIDSYKIAKLIRGGNFPLAYVYDKDMRATRDLLRRRTKIVRHGADLKAHVANTASQYNLPAHNVNLKNVCDREKMRYYFPDPVVQRSINLNMAILDCYHNELKPLEHYIEQMAKQHNPVHLNILQTINGIGRILALTIIYEIGDINRFSSVQKFASYSRLVKCKAESAGKTYGTQAIKLAMHISNGLFPKPLHCYCVIIITPINTLKNYKSE

SEQ ID NO: 256387 - protein, 319 aa, unidentified
MQVSSVFIGVDVASKWLDICLSDTSEPLRIDNTPQAITAWLKTLPKHSIIGMEVTSHYHKLLAQQAYGILKNVYVLNPRDVKHYALGVGRRAKTDQIDAQIIRRFISREHQLLRPWKPATATQDQITSLFHRRANLIKQKQAIRQSCKALQASLHQLEPAIAGIKTLIEEMDTLLFKALALTPDTYSGYKAMETIPGVGRLTAAYLANLFARTDFKKKDQVISFLGLDLLFNDSGKKRGKRWLSKRGPSEARRLLYNAAMSAARGVFKVMYDSYRERLCYTQAIVALMRKLAKIAFGIWKSGEKFALDTFNSPLMVENT

SEQ ID NO: 256388 - protein, 335 aa, unidentified
MTKVMGPVFVGIDVSACTLVVALERDHQPGRQRREFPNTPAGHQVLIQWLSKSATAVQVCIEATGLYSLDLALALDRAEGIEVMVANPRAIADFAKALLQRSKTDQLDAEVMLEFVRRMPFVPWQPPKPHRLDLRALLRRITGLKLASQQEKNRLHSVSQAAEITPLVRKDIQSHLVQLERHIEKLEQQAEAIVQADPELAQQFRHLVSVRGIARVSALHILAELVVLAPDMTARQWVAHAGLDPRHHDSGTSIHKPARISRAGNRYLRAALFMPALVATQHDPNIRAFYQKLVDRGKTKMQAIVAVMRKLLHALHGMLRTDSDFVGEKFYVIPS

SEQ ID NO: 256389 - protein, 391 aa, unidentified
MIYVGIDIAKDKHDCFIVNSDGEILFDVFTIQNNMDGFEDLLFKIKSVEKNPDKVKVGLEATGHYSCNILGFLKNKGLTTIVINPLYTSLSRKSISLRKTKTDKVDARTIASMIMSDVSLKPYSDKLYHNEDLKSLTRYRFDKVMQRAKLKQSVSRLVNILFPELETLVSTLHGKAVYELLLEFPSAQHIASANLKHITHLLNTSSKGRFKRVTADEIREAARKSISSYLPAKSLELKHTIKLIRELTSEIAEIEAEIKKIMDAIDSPILSIPGIGQNLGAMIIAEIGDFSRFDNPDKILAFAGCSPTTYQSGQLYSSHAKMEKRGSRYLRWALLNAAAYVCNWEPTFAAYLQKKRAEGKHYYVALSHAAKKLVRLLYHLEITGEVYQATA

SEQ ID NO: 256390 - protein, 377 aa, unidentified
MSKLRFVGLDVHADTIAVAIAEFGGEVRSLGIIPNRLESIRKMVGKLAPIGTLKCCYEAGPTGYVLYWQLTQLGVACEVIAPSLIPTKAGDRVKTDRRDAEKLARCYRAGELTPVWVPDAAHEALRDLVRAREAAKKDQLRHRHRLGKFLLRHGKRPSEAGKAWTQKYMNWIRIHVRFDQPALDATLSHYLEEVDHVAERLAKLEQVIDEAVKQAPAEVRAVIEALQALRGVALTTAATAVCELGSLARFESPRQLMGYSGLVPREYSSGNRVQRGAISKTGNAHLRRVLMEAAWTYRHRPNLQGRLLRRQKSLALSDEVKRISWKAQQRLYKRFTALTARGKNHNQAVTAVARELLGFMWAIAVHTEAQHKQAKAA

SEQ ID NO: 256391 - protein, 461 aa, unidentified
MKRKRITTGRKKFTSGRAVKIARKDAALSRINEHAAGIDIGAQSHFVAVPPASCATPVREFGVFTRDLYAIADWLKECGVRSVAMESTGVYWVPLYEVLEERGFEVKLVDARKVKNVSGRKNDVLDCQWLQELESYGLLAGAFRPADEIVILRGYMRQRQMLVKTAAIHIQHMQKALQQMNLRLDNVVADITGQTGMRILKALLAGERDVNKLADMRDPNCKATHEVIAKSLIGNYRQEHLFSLKQAVELFEFYQQKIRECEQEIEAYLKTLPHKRDDQPPPVEGRAKRSRVSFNVRDEAYKLLGVDLFRIKGLNAETVLRLLSEVGLDLGPFPTEKHFSSWLSLSPNNKVSGGRVLSSKTKASSNRAATAFRQAAISTQASDSDLGAYYRRMKARLGGPKAVTATAHKLARLYYRLVKHGEEYLEAGARVYEEKHRERVIRSLQKRARGLGFELVATAPM

SEQ ID NO: 256392 - protein, 344 aa, unidentified
MMTHFVGLDVSQKMTAICVVDNAGRRLWRGQCPTAPEQIAAMVRRHAGDNSRIGIETGAMTPWLVHELRALGLEVICLDARHARAALKMQINKTDQNDAEGLAQIVRTGWFRSVHVKSFDSHRARALLGARAQLVGMTTRLSNHIRGVLKTFGLLPGAMRGLRFDRKVEVLLEDRSDVAPIVRPMLVAWRQLREQISAFDKAIRVLVRSNSPCRLLMSVPGIGVLSALAYVSTVEDPARFSQSRSVGAHLGLTPRQYQSGDVDRSGRVSKCGDTLARTLLYEAAVVIMTRVKKASELKDWALAIAKRSGIGKARVALARKLSVILHSVWRSGKPFRWTEQAITG

SEQ ID NO: 256393 - protein, 328 aa, unidentified
MIVKQYIGVDMAKSTFDACFADDRPVKTYPNTISGINALFRAIEAKKDTSLSDRIDKNIQVNIGVESTSHYHMLLCMRASKRGYSPILINPLITNKYSQRNIRKTKTDKIDARIIRYCTIQGEGYLWQETTETLTLKHLVRERDYLANIRNVLLLRKESIDSKSLAAGQILPTVNNDICDCVEQKMKQLEKELRQYKKEEQKLLQTIPGIGPLTSAACISEIKDITRFKKSKQLIAFIGIDPRVHQSGSSIDKQRHITKRGNKILRTRLYNACSVAVLHNNQFKTYFQTKKDQGKPYRVALVATMNKMARVIHAVWTTNTPYRDGRNE

SEQ ID NO: 256394 - protein, 388 aa, unidentified
MKLSWIARGLAAGRATHGGGPALENNVTHLGLDVHKESIAVAVLRPGQLEPDQRVIANTPEALRKLINARSDRSSLVVCYEAGPTGYEVHRLLTSLGVACEVIAPSLIPRRSGDRVKTDRLDARNLARLHRAGELTPIRVPTNQEEAVRDLVRVREDLKDDRRRIQHRTKSFLLRHGRRCPDHRLGWSRRYLLWVCAQRFDDEAMQRAFDHLVTALRSATVQLDTIDRDLADAASRPPLADGVARLRTLRGIDTLSALTIASEVCDFRRFPAASSFMGFTGLVPSEHSSGLRERRGSITKTGNAHLRRVLVEAAWSYRHKPNVGAAMRKRCEGQPPQVLAYSWRAQLRLHERFKTVAVRKNRNVAAVAVARELAGFIWGLMNERIDAV

SEQ ID NO: 256395 - protein, 385 aa, unidentified
MGSQTFIPRDYDVFAGLDVDKRSISVTFTDHQGSLKSMRMPYSVDHLVNHVRKHYGERKVVFAYEAGPTGYGLYDGLVVQQYPCLIASPAMIPKAPGQRVKTNRLDSVRLAENLRAGQLKGIHVPTTLYRELRHLTQLRDALVSEVVAMKQRIKSLLLMEGLEFPPAPAGSQWSFLVKDKLRKLPCSSVVRFKLDQLLDNLEFGEKQVLKTTREIRRFCQNDPELSQCIEYLKSVPGIGWIVASQMMARIGDWRQIKNIRELPAFLGLVPTERSTGERTTRGSITHSGDPRLRSKLIQASWSAIRQDGELLKFFRTVAKKHPRHLGPRVAIVAVAHKLCVRAAVVLMKQRPYEVREKVPSAPLTQEETVPQGTTRRRAVPGEQTS

SEQ ID NO: 256396 - protein, 352 aa, unidentified
MREYIAFDSHKRYSLVEREDVASGKIVQQVRLTHGPGAVRRYLARCTPGTAVALEATGNWYWIVEEIEQAGLQPRLVHPRKAKLMMGLINKTDKVDVHGLNRLQRNGTLPTVWIPPRPLRDLRELTRTRLVLVEQRTRLKNRLTATLAKYGVPPSEYSDAYGKSARAELEARIEPMPEQTRWVCKQLLAQIDFLVRQIRQLEQRLKDLVEVTPEMERLMTLPGIAEILAATIALEIGDIGRFPDAPHLASYAGTTPRVHASGGRVRYGRLRADVNRYLKWAFVEAANSVAVNHRRCPERHVSQLYDRLRQRKGHHKAIGAVARHLAEAAFHVLRRQEAYRDPVLERGCTGEV

SEQ ID NO: 256397 - protein, 370 aa, unidentified
MKKNNTCPQSRKRTSARQAGRMTIGMDLGDKTSRYCVMNSNGGVVKEGSVATGKKALAQMFGAMRHCRIAIEAGTHSAWVSRVLSGLGHEVIVANARQVKLISHSSRKDDRVDAQTLARLARVDPELLRPIRHRSEQAQEHLTVIRVRAALLESRTALVNAARGLVKVFGERLPACDADQMRVERMEDLPAGLRRTLQPLIEEVESLTEKIKASDRSIEQIAREHYPETELLRQVTGVGNLIALTFVLTVEDPWRFHKSRDVGCYVGLRPRRSQSGQSQPQLRITKEGDRYLRALLVQGAHYILGWRGPDTDLRRWGLKLAERGGKSARKRALVAVARKLAVLLHKLWTTGEVYEPLRNSHARQPRPAAA

SEQ ID NO: 256398 - protein, 353 aa, unidentified
MLYIGLDVHALTFAMAVVNGRGKIMFEGNWSTSCESLREAVGAVGGRKRVVFEESTLASWVYRVLKPYADEVVVAEPWHNRLIGKDEKLDDREAARKLAGLLRGGQIHPVHHTDELERQVFKELVLMHHDAVAETTRCRNRLKAKFAQHGVRCFNRELYRAESREAWRSQLPSAGSHAQVDWLWEALDQAQERRAQLRARLLRQARTFEPIRRFVAVPGIGWVRAATFYAIVDTPHRFASRSKLWTYCGIGVVQRRSGEKSEPPHLTRRGNPRLKNVAKGAAVTAIGAGDNAFAAQYERLMADRLAPEKARLTVARSIVSTLWALWREGTAYHPRQEGDPLPWPTVPPRRSAA

SEQ ID NO: 256399 - protein, 407 aa, unidentified
MITVGIDIGKEKHAVAAIGAAGEVLLQPRFFDQTAEGFAALLALLGKLGKPAEIRIGMEATGRYWIPLRHALAGKGYRVESVNPLITSAEIAKDVRWRKTDKADALAIATALLRNRHNPAPAENAATDALKSLTRHRTFLVRQRSNAKRCLHAALDVTFPEAGKVFGQLFGATALAVLEAFPSARLLARANLRTLTALASKTSRGRLAADYARHVRAAARASVSTSIVNQGDEAALVSLIEQIRFADSQIDSAEEKIRAMPAPTTAKLLASVKGLGTLLPRVIACEIGDIERFRHPPSGKAPRDMDKRILAFAGCEPRLRESGKWKGRTKISKRGSPALRTALWQASAMCRLHNPLFAAVYDRQTTRGKPHSVALFYVARKLVEVLCGMYKTGMPFSLQAAGVPCCQ

SEQ ID NO: 256400 - protein, 406 aa, unidentified
MELVALHKRVIGLDVHQAQITACAIIEDSDGMTRVEQRQFGAFKRDRRELAEWAAALRPDEVVMESTGIYWKSPYAALEDKGIRALVVNARHVKNVPGRKTDVGDAQWLATLARAGLLRGSFIPPARLRELRLISRQRQKLVGQLASEKNRLHKVLTDGGVRLGVVVSDLHGQSARAMVKAIVAGKPSHEVLDCASKRLKASREELFDAVQGELTDSHRFVLDELMRHVEEIEARIARFDARLLEGLADEHNALTLLQTLPGVDLIGAAMLLVEIGSDMEAFGSADRLASWVGICPGNNESAGKRKSGRVRKGNLYVRRLLCEFAHAASRTASVFKSKFQALNIRRGHKRSIVALAHKILRTMFFMLKRGEHYRDSATDYEALSVQRNAPRWIKMLKRFGFIPDVA

SEQ ID NO: 256401 - protein, 356 aa, unidentified
MPTTIIGVDPHKRSHTAVVLDAAEQIDSQVHVLADRRQVDRLLAWANPWPQRIWAIENVHGMGKLLSQQLLRRGEQVVDVPTTLSHRTRKLSGQSGRKTDAHDARSVAIAAANPARLRSAVLEDVTDTLGLLVARRWQLVSHRHQIVCRVHALLSDLCPSGVKRGISADDAARKLRNIGPVTLIDLERRRSVIELIEEWRWIDRRIPAVEDRIRDSLQVHGTTLTDIFGIGDIGAATIIAGVGDVHRFPTRGHFAAFNGTAPIDASSGDIHRHRLSRRGNRRLNAVLHIAAVSQMRWDTPGQAYYRRKLAEHKTPGEARRALKRQLSNVVYRHLLADAHAREAVRGGQVGTELASA

SEQ ID NO: 256402 - protein, 342 aa, unidentified
MTLYIGVDIHARQQTLSYLDTEDGTTGQVVLDHEVDDVPGFYRKFQGEVIIGIEACGYTNWFEELVERLGHKLLVGDAAEIRRLARRRQKNDRRDADLLLELLVHDEFPALYRYCKESREVLRQLRYRHKLVKLRTMVANTLHALALNAGLRLRAKLLTKGGRKQLSALTLSAISQQQRNELLSLADELTRRIQMVEQWLEVQAASDGRVQRLQTHPGVGLLTSLCVVHTLGDVQRFSSTRKVAAYVGFDPMEDSSADRKAYGGISKAGSRLLRYLLIEAGQTAAKDDAQLKQFYRRLLPRRGKARAKVAVGRKLLIRCFIMWRAEIDYAEFLRRGQKEETE

SEQ ID NO: 256403 - protein, 301 aa, unidentified
MKDTMIGVDLAKSVFVLHGASMRGQVKFRKKLSRSQFLTFMADQSPAIVVMESCGSANYWARQMMELGHTVRLIAPQYVRPFVKRQKNDAADAEAIVIAAQRPEMRFVEPKSELQQAKAVLFRARERLVHQRTELVNALRAVLYEYGHTIPQGIAHLKRIEALLDESNSDLPGLVREECRDLLAQICEKTARIEAKMKRIKVVAAETDATRRLQTMPGVGPITALAVEAFAPAMASFKRGRDFAAWLGRKSIPEGSWLARMLGRKPKMLVAIALANKMARAIWAMLTKKEDYRDPALATAA

SEQ ID NO: 256404 - protein, 343 aa, unidentified
MGDVITIGLDIAKSVFQIHGVDADGTVVIRKRVSRAKVLEFFAAVPRCLVGIEACPSAHYWSRKLEVLGHTVKLMPPSYVKAYLKRGKNDANDAAAICEAVTRPSMRFVSTKSEQQQSGLMLHHSRRLLVRQRTMLSNAIRGHMAELGIISAKGRNGTAELLELIANAKDNCIPAAARFSLEVLARQYIAIATEIGVLEKRIHAWHRSCEESRRLEEIPGVGPIVATALIAEVGDWKAFASARSLAAWIGLVPKQHSTGGKERLGGISKQGNRYLRWLLVAGAMAVIRYARRHGTKRLWLTRIMERRPIKVAAVALANKIARMAWAIIVRGERFREPRLLLAA

SEQ ID NO: 256405 - protein, 429 aa, unidentified
MNYTQKRRINQVDEETLVVGIDVSKERNVARAQNFRGIEYGKAIKFLNRTNGFERFKKWAFELMTKEDKKKIIIGLEPTGHYWLPLFKYLTASGCKTVTVNPHHVEKSKELDDNNPTKNDVKDARVIAQLVKDGRYSEPNLPEGKYADLRVAINHRERLNKDLTRAKSRIQRWLDIYFPEFNDVFKSFEGKAALSTLKNIPLPGEVSLKEPEEIVALWRKDGIKQGVGIKKARRIKKKSISSVGVETGLELARREIKQLLEQYKLLEEQLEKLEKQIEDLLEELPGAKEMLSIPGVGKITVAGFLAECGDLNNYNHPRQIIKLAGLNLKEHSSGKHKGETKITKRGRPKLRALLYRVSLPLVRCNEEFREIHEYYTKRDKNPLKKTQSLIAICCKLIRILYTLGTREIEYDGAKLRNDIKRPEDYERAA

SEQ ID NO: 256406 - protein, 342 aa, unidentified
MKAPSTRPGAVLGLDVGKSSHWACLIDRGGEVLASAPVRNREAELDALFASAPAGTLVVVDQFRNIGSLAVRRARAAGLAVAHLPGLAASRAAGLFAGEAKTDERDAEVIARTALGVPDSLSGVPGRGEALEAAVDLSDRRWLELLAGFGGAWGIARSGAGGPRAEAAGEAAAAPTAPPPALVEAENRQVRFLAARISEALDEAGALEAETAALLEGDETYACLLTVPGIGPRTAAQLAVSVDIGRFPDHDHLASYCGIAPRVRSSGTSVRSVRASRRGDARLKSLLIFSCNSLVRSSGRYGEYYRACRARGMGHGRALKAVARKRLRAIYAVMRDRVPYRE

SEQ ID NO: 256407 - protein, 402 aa, unidentified
MYNAVGIDVSKGKSTVDVLQPAGVIIRKPFNVNHTSSELDELAKYIGSLEGETRVVLECTGRYHEPVVKTLSEAGLFVSAVNPHLIKNFGNNSIRKVKSDPADAKKIARYTLDNWIELRQYSSMDNTRTQLKTLNSQFSFFMKQKVAAKANLIALLDNTYPGVNKLFDSPVRDDGSEKWVDYAYSFWHVDCVRKIGLKTFTERYQAFCKKHHYNFQPAKPAELFLASKDLIAVFPKEASYKLLIQQSIQQLNLASSHVEELRSKMNELASTLPEYATVMGMYGVGKTFGPQLIAEIGDISNFSHREALTAFAGVDPGVDQSGTHNSKSNKASKCGSNRLRKTLFQIMSTLLQTAPEDDKVYQFLVKKRAEGKPYYVYMTAGANKFLRIYYGKVKECIRNLEQ

SEQ ID NO: 256408 - protein, 391 aa, unidentified
MVCVGIDVAKDKHDCCILDSDGTIRADCITIPNNMDGFKQLLQTIRDCTKKSDKIKVGLEATGHYSYNILGFLLDNDLAVYVMNPLHTNLYRKSLSLRKTKTDRVDARTIATMLLSDVDLKSYTDTAYHNEELKSLTRYRFDKVRERAKLKQSVSRLVTILFPELEKLVPSLHIASVYALLSEYPGAKQISEIHLTKLTNLLATASKGRYGKDKAIQIRDAARTSIGSVMPAKFLELKHTIKLIRELTSEIDEIEVSIQKIMDELNPPILSILGVGIQSAAMILAEIGDFSNFESPDKILAYAGCSPSTYQSGKLTNCYAHMEKRGSRYLRYALYNATKYVCHWNPVFAEYLAKKRAEGKHYNVALSHATKKLVRLIYALQKSGKAYLVAA

SEQ ID NO: 256409 - protein, 356 aa, unidentified
MEIHKVQNFVVKGKEVFVGLEDSKKTWKIAVRCDKMLIHRVSMPAQHQILIRYLRNKFPECTINLIYEAGFRGFNLFDRLTEEGIECIVIPPHLVTEPKVNRVKTDKRDANRLAIMLENQDFKDPCFVPDRERREDRQISRTLWGIQKDIIRTRNRIRKFLDFNGIEVPFPDRWGKEEFQALKELPLGDSLKRSLMTLITLLEQLWMHKDSLQEALRHLCLKERYKKAFEIAMSLPGIGWATAIRFVVELGEDLSRFTSGKKIASFVGLTCREHSTGEAERKGRITGMGSGFIRATLVENSWMAIRKDPALLAKFTRIWKGRGSKKKAIVAVARMLIVRLRACLISGTPYAIGTVK

SEQ ID NO: 256410 - protein, 341 aa, unidentified
MFIIGCDYHPSVQQIAWVDKESGECGELRLKHIEAAEQFYRELNRKGVSVRVGMEATGHSRWFERLLGELNYELWVGDPAEIRAKRVRKQRNDRFDAQHILKLMLENNFPRIWVPTPENRDVRQLVLHRHRLVGMRTRVMNQLQAIAMNEGVRRKRGLWSEKGRAQLESLRLPPWTTRRRQELLELLDRFDPSIDQLSQAIEQEAERVPEVQRLQTHPGVGPITALAFVLVLGTPDRFRCGKQVASYLGLIPCEDSSSDSWRLGHISKQGNAVLRFLLGQAAQSVARCDEQWRRQYAHIAMRRNKAIAKVAMARKLAVRLFWMWRQGQDYQQLKKFGSYVG

SEQ ID NO: 256411 - protein, 310 aa, unidentified
MCGLKHQKEKRSMDYFAGLDVSVKETSVCVVDDAGKIVRETRVASEPEALLQVLTSTIYRFKRVGLEAGPLSQWLYSVLAEAGLPVICVETRHMRAVLKAQINKTDRNDGRGIAQMMRVGLYRPVHVKTLGSQKLRVLLTHRKLLQSKAIAIENDLRATLRNFGLKVGVLAIVRDDDVCRRLMTIPGVGPVVALTYRVTVDVPARFRNSKAVGAVFGLTPAKYQSGENERTGAISRCGDEMMRMMLYEAAQSMLVRSTKWSWLKAWAMKIARHRGMKKAIVALARRLAVIMHRMWVDGTEFRWSREVAAA

SEQ ID NO: 256412 - protein, 338 aa, unidentified
MGLYCGVDLHSTNSYLAVMDEQLQTVLSRRVPNRLEAVLEALEPFREQIQGIAVESTFNWYWLVDGLMEAGYRVQLVNTSAVRQYEGLKYVDDRHDARWLARLLHLGILPTGYIYPKQERPLRDLLRRRAFLVRQRTSNLLSIKNLFSRNTGAQVPANKLKRLSAEQVTEQFADPYLALAITSSLAIIHALNEEIAGIEKAVLQEAKVRPEFKLLESIPGVGVTLALTIMLETGSIARFADAGHFCSYCRCVPSQHLSNGKVKGSGNVRNGNPYLSWAFTEAAHFAIRFEPLAKSFYERKRAKTNELVALRTISHKLARASFHILHDQVPFRAEHAFG

SEQ ID NO: 256413 - protein, 392 aa, unidentified
MRSIAVVPMDIHKKFSMATPMTGEGEVVNKIKIQHGDKDEMREFFRQFAEGTDVVMEATFNWPWIADLAKEAGLTPHLAHCGRVREMAKGMAKSDRKDAIFQGRLWLAGGDVFPEVYLAPPQVRDMRAVFRARLLLVKMRAMVKNNLHGQLFRLGVLIEEEEEVSDLFSQKGRRILKGLELPERERYLLDEKLGVIDDLGRHITELEHQIKKDLKYDARAEILESLPGVGEILAHTILGEIGEVERFANGRALAAYAGVLPLENQSADKDFGKKTSKMSNRFLRLAAIEAVTGAIRKSARMKSLHSRVKARNKKKAGKARVAVAREIMELVYLLLTRKEKYKEERPQRPGSKKHGKRNDELIKEFLSREAHRPLRASPDCLYAGSRSESQAD

SEQ ID NO: 256414 - protein, 440 aa, unidentified
MARKNPRRLKIIHPDCAGIDIGGSRHYVAVDPERSDEPVRSFGSFTDELEAMGTWLHECAVKVVAMESTGVYWIPVYEVLERMGFEVHLVNPRATKQVSGRKSDVLDCQWLWQLMSYGLLKGAFRPPEAVCELRSYVRQRARLARDRARAVQHIQKALTEMNVQLANVLSDVTGKTGMRILRAIVAGERDGAKLASLRDGRVKANEQTIARSLQGTWRAEHVFALGQALARHDFYVQQSAQCERCILSTSASLSLNAEAAPILARSSWVKCMRAALRQMLGVNLTAIPTIGIETTLAIASEVGPDLSRFPSCAHFCSWLTLAPGTRISGGKPLPGRGPSAANRLGQALRVAAATARTSDSFIGAAHRARLARLDKPRAIKATAHQLARLIYAMLTRGEEYVEKGIAHYEALRRNKHLRALQRRASRLGFALVEQPIQSTT

SEQ ID NO: 256415 - protein, 420 aa, unidentified
MTKIEHTSDTRVLVGIDISKHRHEVLISVPGKTRRRRMTITNSTDDFMRLIAILREYGLPVRIGFEATGNYHRVLMYHLGVAGFDLKLVSSVALARTREALHNSWDKNDPKDAQVILHMLQIGAVQIFQDPMVAGTNDIQELSKTHDAVSRSKTELWHRILTHYLPLYFPEADRFHRSSRTDWFLAFLEMFPSPHMISALTKEEFTKAAWEVVGRKVEKSLMLSDIYETAKVSVGLPVAPDSDAIHMFRLMLAEGRSLIRQRNAIEDRAVELLGDQPDYQLLRTIPGIGPINALTILAETGDLRRFHHHRQFLKFCGMDLATVQSGMFRGRSKISKYGNARLRRTLWLAGQTAVLKKANSFRDKFERYIAQDRHNSDLRRKAYTAIAAKMARTIHAVIKSGEPYRPFFEGASPGGRTSLS

SEQ ID NO: 256416 - protein, 369 aa, unidentified
MADYREAFVRIDVAKLKNAIAIAEAGREGEVRFFGEVDASATSMRRVIGRMASRFDYVHFCYEAGPTGYGLYRLIRSLGHECTVVAPSLIPRKPGDRVKTNRRDAISLARLLRAGELTAVWVPDEGHESIRDLVRARAGAVETLRVHRQQVSAFMLKHGRSYPRKKSWTMRYLRWLQEQRFDHAAHQIALQEMVEAVRVSKERVERLERVIEEFVPAWSLAPIVWALQTLRGVDLIVAVTFVIEVGDASRFESPRQLMGYLGLVPGERSTGETVRRGGITKAGNGRVRHMLVESAWTYRHPPKVGKAKLYRLEQASPKVREIAWKAQSRLTARYRMLSARGKRTTVVCTAIARELVGFMWAVAREARVT

SEQ ID NO: 256417 - protein, 351 aa, unidentified
MVTVGLDLHKRYITACALDALGTVLAEHRRLEPSLDALCRWLEALGQPVLVAMEATLYWHWLERQLTARGFKVLVAHPYQVKLIWQARTKTDPIDARKLAELARVNLLPAIWIPDPATRALRQLLRGRVFLVRQRTVMRNRIHAYLTAENLRCPELDLYSQAGQAWLAAVELPTVVRAQVTLVLANHALLTSQIQVLDRHIKTTVRRDETARRLQTIPGIGPFGALLLQAEIGPISRFGSAQELAAYAGLVPSTRSSGDKTRHGSVGRGNPWLKWLLIEALQTLKLAPGPVGDHYRKLLRAKGKPKATVAAARKFCTYLYWMLKEEWSYTEWLRQHDRSEVRPMQPLGSAA

SEQ ID NO: 256418 - protein, 344 aa, unidentified
MNVSTVGLDLAKNVFQVHAVDDGGEVIVRRALRRRQMLPFFAKLEPCLVGMEACGTSHYWARELSGLGHRVKLMPPAYVKPYVKRGKTDAGDAEAIAEAVTRPTMRFVAIKSPEQQSILALHRTRDLLTGQRTQLVNMIRAQLAEFGIVLPKGIQHALKLVDRLLVGEVPDIPTLACKVVIILAEQIRDLELRLGELEKGLTASSRGNEMVKRLRTIPGIGPITASALAATVTDPHQFRSGRQFAAWLGLTPRANSSGGKERMGRISKMGDQYLRRLLVIGMTSQLQAARRKPDAHPWITSLLTKKPHKLVAVAMANKTARIAWVIMTRDEIYRAAMPATEDTA

SEQ ID NO: 256419 - protein, 324 aa, unidentified
MSKIKEFFGIDISKDVFDVVDASDKHHQFKNDPSGFKEFSKLLSEKSHCVMEATGSYYQGLATWLYDSSIIVSVVNPLSVKRFIQMRLKTSKTDKLDAQMIRMYGESEQPKLWNPPSKLIIEATELHKLIELLVRQRAGLKNRLHALESKGITRSLVLTSVRRQIRNLSNEIGDLELKLESVIKEYEPDLLTRLCSIPGVGKRTAIYLIVLTQGFEKFESSRQLISYFGLNPIIRESGSSVRGKSRISKTGDNQVRKLLFMCAFTACEHNKTCREIYQRLTAKGKSKKLALIAVANKLLKQSLAIAKSGLYYDENYRSVNVYLG

SEQ ID NO: 256420 - protein, 391 aa, unidentified
MDEAWAGVDAGKEFHWAHVLDASGTELLSRKVQNDEADILRLIDEVLSLAEEVLWAVDQPGGGAALLLALLWERDQKILYFPGLSVDRACQTYRGESKTDARDARVIADQSRMRSDLGELAPSEQELSELQLLLGRRRDLITDQSRTITRLREALLSLFPALERALDVNGKGPLTLLTHYQTPAQLRRAGHKRVAAHLRNRSVKGSDKVARKALGAATSQSVTLPAQEVASRIVAELAAEVLTFKERIESIDEEIGQRFFARPEARVLNSLPGMEPILGAEFLVCVGDIRTFDSADHLAAYAGLVPAARDSGKRVGNRRRMRGGNKTLKRVFYQSAFASLRGSAESRAFYDRKRAEGKRHTQALIALARRRVNVVWAMLRDGTTFEIRPAA

SEQ ID NO: 256421 - protein, 324 aa, unidentified
MSDSVTVGIDVSKLTLDVHVSPAHLRQTVSNSDSGFAELKTLLSLQQFSLVLLESTGGYEDAVVCFLQSLGYDVSVINPRQARDFARSMGRLAKTDRIDAELLAQLASVIDSRPDRERFVKKVTDDRRRKLACMVTRRRQVVNMISTEQQRKSAASVYSTDSINKVLSFLRSELKNIDADISLHVRSHFADISGLLASFKGIGPATIGVLLGEVPELGRLNRRQISALIGVAPFNRDSGVMRGRRTVWGGRTMVRNALYMPTLSAVRFNPAIREFYTRLISQGKPRKLAQVAAMRKLLCIINAMLSSGTMFNPALHLHSVQEAQ

SEQ ID NO: 256422 - protein, 376 aa, unidentified
MSNVRFIGLDVHAETIAVAVAEPHGEVRSLGVIPNRPESIRKLVKKLGPPAQLRVCYEAGPTGYVVYWQLTALEVACQVVAPTLVPVKAGDRVKTDRRDALKLARSYRAGDLTAVWVPDAEHEALRDLVRAREAAKKDQLRARHRLGKFLLRQGRRPSTPMAAWTQRHLTWVKTVHFAHAAQEATLLDYLHEVEHVADRIARLEHAIDEAVKAAPERLRAVIDALQALRGIALVSAATIMSEVGELSRFTKPRQLMGYSGAVASEDSSGPRTRRGGITKAGNAHLRRIVVEAAWAYRHRPAVGPALRKRQAPVAPEVKEIAWKAQHRLHARYRALTARGKCTQQVMTALGRELLGFIWAIGVHVEAETGRATPIAA

SEQ ID NO: 256423 - protein, 351 aa, unidentified
MWIIGVDYHPSVQQIAWVDTETGEIEEQRLKHSGGEAERFYRDLKEKGFSVRVGMEATGHARWFERLLRELGFELWVGDAARIRAKQVKKQKNDRQDAQHLLKLLLKDDFPRIWVPTPENRDRRQLLLHRHRLVQMRTRVMNQLQAVAMNEGIRRKRGLWTRQGRAELEALSLPTWTSRRRQELLEQVDQLDPSIDQLSQAIEQEAEQQPEVQRLMTHPGVGPITALAFVLVLGTPQRFSCGKQVASYLGLVPSEDSSGNRRRLGHITKQGNTLLRHLLGQAAQSVANSDEEWRRQYAQLAMRRNRSIAKVAMARKLAVRLYWMWRQGYDYQQWASSVRTWGKLEIAHGVK

SEQ ID NO: 256424 - protein, 399 aa, unidentified
MKTGCPARTAVQSAADYGVILAEPQFSQEGNPMTRYTVGLDVHSKQSVFAIQDAEGRFTARGSVPTTPEGFESLRTKHELPPGTRVGLETGTVAFYAARLLLGLGLEPVVIDAHEVRLKAYRPTQKSDRRDAEEICEGLRRGIYRSIVHIPPPQITALRDTLSRRRHFVRLKTAEMNAVKRLLRSAGLGRQARSLRTLAGWEKLLAALAQHIDLLEHVKRHQAVWRCADEQVVALDAQLAVQEVPFAEDVRRLQTVPGVGPIVALTTLAVLSDISRFPSTKHAASYAGLVPSTHQSGDRDAHGRITKRGSAELRAMLCEAAHHASRPAHPLNPYFMSLCVRRGYKMAVVAVAHRLCRILFTMLRRRTDFDIKKLGIEVGPFEKTQVKLYRLRKAQAVQA

SEQ ID NO: 256425 - protein, 473 aa, unidentified
MPRVDDECEDVLLLSLKGLVSHNSEEDVVIQGSGLSRGDKRRNARFARIRELVPVENAILGIDLADVKQAVVVTDHDSRVLARRRVLAKAWDLGPVLDWARRVAHEQGFGDVTVGCEPTGHRWRVLDQLAAQRDMALVCVQPMLVGRARESEDYTRDKSDDKDAVLIARLVAQLNCYVPERADETWARLRQLGARRERLVTEATACVQQLHDLLECAWPGVLGAAASPFESTNWCAALAVVLDRCDGQPERLSRGGLARFEAAVRRELPRWGGSRRRRAIIEAVFVALVDPTGVWAQRRGALERARWVLADWRAAKTRLAEVQTRMVEVLDALELTVLITSIPGVSVVGAAAILAETGDPARFDSPRALVKHAGLCPRDNASGTFSGRSRISRRGRPRLRLAAWRAVWGALPHNPVMAARYRYLTTRQDNPLTDGQARAAIAAALLRWLHVITTRRVSWDATLAGAEVMPLAA

SEQ ID NO: 256426 - protein, 405 aa, unidentified
MNEHLLVGIDVGCHSHQVAIAESNGTLLKEFGISHTASGFQSLFSEINHYESTLKCPVVIGMEGFNGYARPLDQLIQQKGYTLYNINNLKLARFKELFSGPAKTDAIDARKIVEFMRIAPSFQEQRRAITEMKPGNRVNQTLKRLTRRRRQLVNEKICIQNRMQADLQSVAPGLVDLVKNIDSRWYLHFLTCRPSLRQLATMRKESLLKIKGVGKKYAAVIASWQKEAHFSTDVDLVSSMIIADARRILELMEAIATIENELEPLCEQSDLARTIGSIPGFGPISSAELAGEIDDLSRFPSEKSLALYLGMAPLDNSSGKKEGCKIALSVNTRTKAAMMVAVAHHSWKVEESKRYYEKKRLEGKKHNQAIRSLGRHLVRVIWSLIKENRYYEIREENERNILKMA

SEQ ID NO: 256427 - protein, 388 aa, unidentified
MPAAETPVAYLGIDVGKSSHSACALDAGGGVAFRAELANRPDDIDRLLERAGSGALVVVDQKRNIGALVLARAHAHGNPCAYLPGYAEKQARGMFPGIAKTDAIDAEVIARTALGVPRALRPAPEEPEGTASLRILSSQREFASSARTRAKNRLRATLLEADPALEGAVDPSSRWQVSMLAEFGGAAGCSAAGWRRFSSAARRAGAPAAGARRLWEALLASSRSGRRLPAGEDVAVRILAREIASLDADIEELDSLVADSLAGDEVYECLLTVPGIGPKTAAALVTSIDISAFRGHDELASYCGVAPSDRRSGSSIRSTSPQHGGNRQLKNLLIFSCNSLIGTDNRFGRYYGECRARGMRHSKALKAVARKRLKVIYAIMRDAVPYAA

SEQ ID NO: 256428 - protein, 418 aa, unidentified
MADVMIGIDPHKSSHTAVAIGLSEEPLGELQVPACPSQVDQLLAWAAAWPERAWAVEGAAGLGQLLAQQLVAAGEQVLDVPPKLAARVRLLQAGDTNKNDPNDAFSVAVAALRSPAPRPVLAEDHAVVLKVWAKRHRDLARLRNQACCRLHAVLCDLVPGGVRKEISAAQAARILEQVRPSDAVAGARCELACEFLDDMRRLDAKLRDTKRKLAAAVRASGTSLTGLFGVGPVIAGTVIGDVRQVFRFGSRDHFAAYNGTAPVEVSSGGRQVYRLSLRGNRRLNHAIHMAAVTQLRHKHSQGRAYYDKKLAEGKTHKEALRCLKRRISDAIYAALVADARQAAAACPEGLGGQPGNHSVSRAASSHPKRRLFGQATPGPATTLRPATTEGLAPSQRNRALRHRAKNSLADLKKPATTT

SEQ ID NO: 256429 - protein, 385 aa, unidentified
MMLIGIDPHKSTHTATAIAPDTNQEAASIRIDATLGEYRRMLTWARQWPQRRWAVENAEGLGRHLTSWLLARGEDVVDVPTTATARVRQLSRGGGRKNDRIDAGAAACVAALQGDARPLEAESYVDAMAVLDERRVNLAQSRVRAVNQLHALLRALIAGGAPRDLSATTAAALLRTVRPNGAVEQARKAVAKDLVTEIRTLDTQLKANAQAIARLVAATGSTLTEVVGVGPIMAGRLISRTGRASRFLTASAFANYAGAAPVEIASAEKSRHRLPRHGDRQLNSALHTIAITQIRIPSSRGHRYYNSKIAEGKTPREAARCLKRRLADHLWRTMINDERRAVSPGGQLGTTLQSSVAGPTPTTNSSDKSLPGPATHDSTTAKPAA

SEQ ID NO: 256430 - protein, 355 aa, unidentified
MNQEKYIGMDVHQATISVAVMDSSGKLIMECILETKAATILEVIAGLRGTLSFTFEEGTSAAWLHDLLKPHVSHLVVCDPRRNGLLKDGSKSDRIDARKLVELLHANKLHAVYHGEHGIRTLKELGRSYLTITKDLTRVMSRIKALYRSWAIPCSGATVYAPRHRDEWLAKIPHPGVRLRAERLYQQLDVLQPVRQGARRDLLVESHKHRAVKLLRQIPSIGPIRAALLVALLQTPHRFRTKRQLWAYSGFAVEIHDSGEYRFVRGKLQRNRERITVRGLNHNHNHDLKNLFNGAAIIAAHKPGPFREFYAALLAKGIRPEMARLTLARKIAAITLHIWKKGVGFDAQYLKPQAA

SEQ ID NO: 256431 - protein, 503 aa, unidentified
MAAIPFGRMQIKGLRKPVDWAVELLATLSKAMKAKRSKALTQGQRIRPSRSMPIINSHAAGIDISPNGHAVCVPEDSVKAGESPVREFGAFTRQLDEMVEWLRSCGVQTVAMESTGKYWIAPFERLEAAGFEVILVNAHDLKHVPGRKSDILDCQWIQLLHSYGLLSGSFRPPEDIRRMRTLLRHRSNLVVECGQAVQHMQGALDEMNIHLHRVVSDLDGETGFRILDAILAGERDPDKLVELRDERIRKSTVPEMKDALRGFWQDEQLFVLRQARETYRWVQRQIEECDEQLQKVVQRVKSNPASIPPRPAPPNPEGQVRSKKKKAAGGHAPKPDFTAELTRICGVDLTQVIGLNVLSVLMLISEIGVDMNRWRSAKAFASWLGLCPGSKISGGKRLSSRTRPVANRVSILLRSLAPTIGRTDTWMGQFHRRMKARLGPAGANTATGHKLATIIYHLLKYKEGYIDVDCLVYAAKFQRSRLVHLRKQAEELGFHLVEATQVT

SEQ ID NO: 256432 - protein, 413 aa, unidentified
MDSHQELTHFAGFDWAKDHHDVVIVDGGGRIVEEFQLAHSAASWRQWQEKVAAYPKLGVAIETSFGGIVEQLLASDVTVYPVNPLNAKRYRERKISSGNKTDHHDGWALADALRLDGQGWRPLAAQDPIVAELRILCRDEVALIEERTALINQLQQALQEYYPSALEAFEDWTSPGAWAFVESFPSAAVLSKAGKRKWEKFLHSHRLYRPQTYAARMAAFARAGEWNTSAALVAAKSLYAVARCKQLRVLEAQLQEYRRRIEALFLSHPDSSTFGSLPGAGPKLAPRLLSEIGSDRTLYPDPQGLQCLAGTAPVSYQSGKIHKVSLRRACNRNLRSAMHLFADKSRAQCAWAATYYRVLRERGKTHAQALRCLGQRWLKIIWKMWQTRTAYDSELHLRNQLAHGSWVLQIKPA

SEQ ID NO: 256433 - protein, 351 aa, unidentified
MKECSTVSFKGQVIYCGIDVHKKSWHVTIRHCCHQIENFSMNPDPVELANHLKRNYPEAEYRSVYEAGFSGYEAHRMLCSLGVKNIVINPADVPTSGKEREYKNDSADSRKLARELENGSLEGIYIPEPENLELRNLTRRETKLTGNIVRIKNRIHSHLFFLGLKFRSWSGRSLKIMELDAVKRHDYALLSDLRELRFLREEKIRVIRDERECLKRLNRDKIQENLQSIPGIGFRTAVVLQAELWDLLRFPNKDSLNSYVGLAPHTVGSGEHEKIKFGGNRKKKQLHYLLIEASWRAVRFNLEYRARYGAMLAKGACPQRAISIIAKKLLLSIRAVWIQNRLFVELLPRTK

SEQ ID NO: 256434 - protein, 429 aa, unidentified
MRTESTPGARGPVFCGVDTHADSHWLCVLDWRGRKVLSRQFPADAAGYEALAGAIAAAGEPACVAMEGTSSYGAGLTRHLASLGMPVREALSPARMQRRRPGQGKCDEADAERAARAAMSGSRLGTPKSQDGWVDGVRCMLAARSGAVKARTSAINTARSLLTTAPEGLRSRFRGMGGPRLMEELPSVRAEGALGAALGALADLWAAARDAALDMERAIEASLEENCPALLAMYGCGPVSAAKLAVAAGDNPGRLRSEASFAAICGACPIPASSGKTVRHRLNRGGDRQANSALHEIARQRVMRDPETAEYAERARARGKSDREVMRCLKRYVAREAYRALMRPHEIRRPEDASELVAARRAAKVSQVRAASILGTSEKYISMLERGQRELKPIRRAYEAWVEAGLPLDWDRQAFEAERKMDSKKHLAK

SEQ ID NO: 256435 - protein, 317 aa, unidentified
MTAKNNELFVGIDVAKATLDIAIHGETTVTQQPNDDDGILAVVDCLNDLNPTLVVVEASGGWEINLVAALGAAGLPVALVNPTRVRYFAKAMGQYAKTDKLDARMLACFAERVRPEVRPLKQGDQALLSQVISRRQQMVKMLTMEKNRRSTTLGEMRTQLDSHIQWLKAEIAELNDKMRQLIDACPQWQAREKVLLSVPGVGPITMLTLLADLPELGDLNRQKMAALVGLAPINKDSGTKRGKRRIFGGRASVRCVLYMAALSASKTNPVIRAFYERLLAKGKAKKVALTACMRKLLVILNAMIRDMQPWQLEAKIA

SEQ ID NO: 256436 - protein, 346 aa, unidentified
MTIVEERPAVTGGVDTHSEVHVAAALDPVGGLLGTREFPATAAGYAGLLGWLGKFGDVALVGVEGTGSYGAGLARYLAARGIRVVEVDRADRQERHRNGKSDPLDAVSAARAALSGRASGAPKGRDGAVEAIRALMVAKRSARAERTQAINQARALLVTGPDDLRARFAGLTAAALAEAIAALRPRPGDAAQYAVRIALRELGRRVEFLDGQLDRLDDLIIPLVTARAPGLLSLYGVGPDTAALLLVAAGDHPERLRSEAAWAHLCGVAPIPASSGKVRRHRLNRGGNREANHALWRIVITRMSAHPATRAYIERRTKEGLSKKEIIRCLKRYVAREVYHHLRAGG

SEQ ID NO: 256437 - protein, 411 aa, unidentified
MLGWVADGQEVGFTIRNLTLRIKMSKLNLTDTSAAAEYATVYVAFELSKARWKVGVMLPGSQRVSRFTIDGGDLTALSAWLAKWRARAEAIGKPVRIISCYEAGYDGHWLHRWLTSQGVINYVIDPASIQVNRRARRAKTDNIDLEQLMRTLLAYLRGEPGVCSMVRVPSPEDEDRRRTSRERDRLLKERSSHSNRITGLLHAQGIRDAMPFKRGFIASLDTVRTGDGRALPARLKAEIVREHERLCLVHKQIIALEAKSKAEVRAAVRGSVEEKIKDLIDLKGLGVVSAQKLMHEVFYRSFDNRRQVGSYFGLTNSAYDSGDSHRDQGISKAGNRRGRTLAVELAWLWLRFQPGSELSRWFNERVGSIKGRIRRITIVALARKLMIALWRYVTTGVVPTGAVLRQSRQSI

SEQ ID NO: 256438 - protein, 361 aa, unidentified
MPTIADAVRLVTGGVDTHAEVHVAGMVDQVGRVLGTEEFPATMAGFRAALAWMRGHGELVKVGVEGTGSYGAGLARYLAAAGVEVTEVIRPNRQARRRHGKSDPADAVAAALAALNGDASGTPKSGDGAAESIRALQVARRGSVKARTQAANQLRDLIVTAPEVLRARLAGLAAPQRVELAARFRPGDLTSPAEGAKAAMAAVARRHQALTAEITQLDASLEALLEHAAPAGFLTKKGVGPVVAAALLVTAGDNPGRLRTEASFAALCGASPVDASSGKQRRHRLNRGGDRQANSALWRIVFTRMACDPRTQAYVARRTAEGKTSKEIMRCLKRYVAREIYKALVTQARTPAASVPLTPAA

SEQ ID NO: 256439 - protein, 338 aa, unidentified
MTIVMGLDQHRAQITAEWLDTETGEIMRSRITPAHRDGVRRFCEKFRGQELEVALEATTGWRFVADELANVGAVVHLAEPAETAARRGNKKRAKSDRADARHIRELMMIGRLPESWIAPAHLLDLRALVRLRHTLSHQRGEWQQRIQSVLYHHGCPQHGELLTLAGREWLTAQDLPAAAREQITVALSIIDALDIQLAPMDQRLRTFARRQPGCKALLGQFGVGELTAVTILAELGDARRFSSSSDAVRFAGLDITVHQSDQRRAPGRLSRQGPPALRWALFEASMCAARRCSPDHDYYAQAAERLGSNRARLSVARKILKRSYHLLRELGDEAIAPI

SEQ ID NO: 256440 - protein, 421 aa, unidentified
MKGLRTKRIRTVREGALMATVDIGMASNTGYCITADGRDTKPFKFSNTREGLDKFWDMITISKKRFCCNEVIVGYESTGPYAEPLLHYMMSKPVKIVQVNPMHTKRMKEVNDNSPLKTDDKDPRVIADIIRLGHALTVVVPEGDAAYLRRLNNARERHIGERTALFNQLQQLVFLIFPELKTVMKNIKVKTAIHVLKKYTTPDTLGKLSIEALGEEMRKKSYGKFGIKDAEALINHAKNTVGIKEGIAGLVLDIRHILMQLEMIDGFIAEIEAEMVAILLRIPYSARLLSIKGLGTVSVAGIIGEVGDFMKFGTQSEIMKLAGLDLYEISSGKRRGERRISKRGRSLLRKILYYASIQTIRKNGIMCEYYAHLISRGMKRMMALVAIARKLLRIIYAVVRDGSEYIADYGLLTRKVIKKAA

SEQ ID NO: 256441 - protein, 360 aa, unidentified
MSDGSKGRPKITAGLDIGDRYSYLCLLDSESGEVIEEGRLRTTPEAFRRRFASELPMRIAIEAGTHSPWVSRVLEECAHEVLVANARKIRLIYANKRKTDEIDAENLARLARVDPKLLYPLKHRGEDSQAHIAIIRSREALVGSRTQLVNHVRGAVKSFGNRLPKCPASGFHNKAPEHIPEALWPALGPILEQIGSLTERIRQYDRKLQKISKEHYPETGHLRQVEGVGPLTALTFVLTLEDPYRFEKSRSVGAYLGLVPARDQSGDRDPQKRISKEGDQMLRKLLVSGAHYILGPFGSDSDLRRHGQKMATRGAKNSKKRAAVAVARKLCVLLHSLWVSGEVYEPLRNTHRREQREEAA

SEQ ID NO: 256442 - protein, 469 aa, unidentified
MQDNRNPIARQWEIEGLPVVRREVAGIDLGSQRHWVCAPTMDGTAREVADFGATTPELIRMAKWLRERKVKSVAMESTGVYWIAPHEVLEAEGLEVILVDTRQLAQVPGRNKKTDPVDCEWIQRLHSCGLLRGSFRPKEDVCMLRTLVRDKGNLVAEAGDWLRRMQKSLDQMNVRVHRAVSDIDGVTGMAIVRAIVAGERDARQLAKLRDPHCRKSEEEIAEQLSGHWREDHLFSLRQAVKMYDAIQERIAEYEKEILRQLGEMEREQCRGQAAPKVNNPEKARAIRKRGQEPMREALYRMSGVDLTEIDAIGVETVQVVLTEYGPDLSRFPTEKQFVSHTTLAPRRPMSGGKPVRKKKRNSASTRVAAALRMAALSQRHSETALGAYYRKIARRIGGDVAVFATARKLATFIYRLLRWGHRYTDEGAEAFERRFQENRLKTLAAKAKELGYQLAPAPLHTDSPEAVTG

SEQ ID NO: 256443 - protein, 315 aa, unidentified
MAKQLPLVNVGVDVSKDQLDVYLLERDLLFSIPNDEQPIAALIQRLARYRLERIVIEATGRLEHAFVSAAIAKGLPVVVVAPLKVRRFAQAAGQLAKTDAIDARLIARFAAALKPATRPPINANSQIIKDLVVRRRQLTSLRTTEKNRRSVMPEALTPSIDRIIESLDREIASLEQLIQNAVEQHVTWRHKRDLLTSMPGIGPSVASTLIGDLPELGSLSRRQIASLIGVAPFNRDSGNFHGKRRIRGGRAHSRTVLFLSAMVAIRYNPDIKRFYQRLLQTGKHKKVALTACIRKIVTALNAMLRDNKPWHSSFA

SEQ ID NO: 256444 - protein, 316 aa, unidentified
MNQSVGIDVGKRELVASIRDTDGKTAIAAPFPNTSIGLRKLAVHLAKSNVGADDPVLLESTGPYHWLPARTLTDRGFFVKVANPLHTKQIARHSIRKRKTDKVDASHLAFLASQGYGYRFVETAELAKKKALVRHYWKLRSTATSYLLHERYLKEYRGVSKHGIFPLLEKRCEAMQEAIVEEWNEGNDLKYLDSIPGVSPFIAATILAELAPLNRFERMEQIVAFAGLDPSVKQSGGVRGTHGPISKRGSPFLRHALYLAVFGSFSHRPMNAVYKRYKERGLHHNAIMCVLSRKVLRIAIALLRKRRTFDPKFLNA

SEQ ID NO: 256445 - protein, 318 aa, unidentified
MEDVFVGIDVSKDRLDGCVRGGATFGHDNSPAGIRRVTALLRRRPVRLVVVEATGGLEVPLVRALQRAEVPVAVANPRQVRDFAKACGVLAKTDRLDAAVLAHFAEAVRPPARPLPDERTLLLDALLTRRHQLIDMRTMERNRLGQCPDPAVRDGIEEHLAWLQERIDEADRGLGEAVAADPDWQARDALQRSVPGVGPVVSRTLLAGLPELGRLGGKQLAALAGLAPFADDSGRHRGRRRVCGGRSEVRAMLYMAALTASRTGSPLGELFRRLRARGKEFKVAVVAVARKLLTIVNAVVRSGRAYDANGMQAACAAG

SEQ ID NO: 256446 - protein, 344 aa, unidentified
MKIAVLGIDLGKNVCSVVGLDSSGAVVLRRRVRRDTLIDLVAKLPSCIVGMEACCGAHHLGRLFAAQGHDVRLMSPEYVRPYVKAQKNDDRDAEGIAEAATRPTMRFVEMKTEDQLDMQTLHRSRERLVGERTALINQLRAILLDRGIVVPQGKRKLEQYLVMLMNEHDGERLSARMRMLVADIRAQWQELDRRIGEFDAEFVRWAKENEDARRLVTIPGVGVTISTALIAAVGKAEAFEHGRDLAAWLGLVPRQSTTGGKPRLMGISKRGNKYLRKLLIHGARAALPYVAEKDTALGRWAKSLLSRVHQNVAVVAFANKLARICWAVLRSGQKFAAQGAPLVV

SEQ ID NO: 256447 - protein, 472 aa, unidentified
MSKGSGSGMTRGDRRRNARRERLRALLPRGGAVVGIDLAEEKQALAVIDHDVRVLARKTVRVKAFGLGEALDWAVGQARAKGFDRVTVACEPTGPRWMQVQRLCAERGLPLVCIQPLISHIAREQQDYTTHKTDESDCVMIARLAVELHCYIPEELDETWAHLRHLGRRRQQLITAQTASGQRIMDFLSVAWPAVTETCADPVESRTWLAALEVVTARCGADPGTLAAMGREGFTALIRGAVAGWGITRAHGPICARVFAALTDTEGAVTWSRRGLLRRVADELGDLKRTRAQLRRAEADMVAVLDELGLSRLADIPGLTAVGAAAILAETGDPHRYDSSSSLVKHAGMSPSDNASGAFSGQAHISRRGRPGLRLVVWRAVWPMLRYNPVMAAKYQAMTRAADAAATGAGPRQGTAAQAAARARRAKARVACAASLLRWIYCMVVHDTSWDPAVASGAASRHDTARTQAEAA

SEQ ID NO: 256448 - protein, 362 aa, unidentified
MLFIGKCNKNQNRKEATVKKVMAGIDLHSNNLVIGLLDLEGRRLGHRKLDCELEKVLGFLEPYKERLETIAVESTYNWYWLVDGLQAAGYPVVLANPAGMAQYSGLKHSDDTSDAFFLAELLRLNILPTGYIYDPELRPVRDLLRRRLGLVHQRTALMLSFKSLFARTTGQEMSLSRLKGLSAEEVKKLYEHPANELIAQVQHRHIGALDESIAQIERGVLKVARHLPSYRRLQSLPGVGIILGLTITMETGEISRFAGPGEYASYCRTVDAQRLSNNKRKANNNQKCGNKYLSWAWVEAANFARRYYENCRKWFDRKAARTNKVIATKALACKLAKAGWHVMTNDTPYDEKRVFPELAMKR

SEQ ID NO: 256449 - protein, 339 aa, unidentified
MKLYVGDDLHGNNNFLAIVDLEGKRVSQKKLPNDLFVIGDFLKPYQKDIIGIAVESTFNWYWLVDGLMDSGYKVHLANPSAIQQYSGLKHSDDKHDAFWLAQMLRLGILPEGYIYPKEDRPIRDLLRKRRHLVKLRTSLMVSLQNIISRNCGVKFRANEIKRLKEDRVTPLLESNQDLALAGLTSKEMIDQLTRQIQKVEAFIVQRVQLREAYRYLPTLPGVGKILGLTIMLETGPIGRFAEVGNYASYCRKVPSRWTSNEKTKGKGNQKNGNKYLAWAFSEAAEFARRYDDQARSYYTRKMRKTNFMVAHSALAHKLARAAYYLMKDQVPFRPEKLFS

SEQ ID NO: 256450 - protein, 312 aa, unidentified
MEGMVVGIDVSKDRLDVAVRPTGEGLVFKRTAAGILDLVGWLKTLSPVLVAIEATGGFETVVAAGLASACLPVVVVNPAQVRAFAMALGKRAKTDPIDAAVIAHFAEATKPQLRQLPDAMTRRLADLVARRRQIVEMIAAEGQRARRISDHRLSRSIARLRKALEKELAELDRLISDHMRGSTVWVEKEKLLASVPGVGKTIARTLIAELPELGSLDRRRIAALVGLAPWTRRSGQWRGKSFIGGGRKSVRSSLFIGAMVAARYNPQLKQFRDKLVAAGKPKVLALVAVARKLITILNAILRDRRPWQTLPA

SEQ ID NO: 256451 - protein, 430 aa, unidentified
MKSNTQNAKIEAITEKTLVLGIDVGSETHYARAFDYRGIEYSKKPFKFSNTEVGFATFKEWILDLKERHEKDKVVPGMEPTGHYWFNLGKFLQDNEMKPVLVNPHHVKKSKELDDNNPTKNDRKDPKVIAGLVREGRYMIPYLPDGVYADLRTASNIRFQLQAELTRIQNRISRWFNIYFPEYKTVYGKPDAKSGMLILKAAPLPEDILTLGIDGVNQIWRDAKLRAVGKARAKTLIEAAEHSIGSKEGTMSARMEIRMLLEDYESKNMRLQEVMVLIEELVKEIPMAEKLLEIKGVGIRTVSGFLAEVGDISRFNNPKELQKLAGLALVENSSGKHKGKTTISRRGRKRLRYLLFEVAMSLVAKNPEFRELHNYYTARRLNPLKKMQSLMAIAAKLIRVFYAMLTKGVDYDPKKMISDIKRPTVYLQAA

SEQ ID NO: 256452 - protein, 453 aa, unidentified
MVNGGMVEIDAEAGEEQLVERVAAIDVAKASAVVCVRVAHASIAGRRVTRVWEGRSTTNAIIALAEQLARERIERVVVESTSDYWRPFVYLLEAQGLTVWLVNASQVKQVPGRPKTDKLDAVWLAKLNERGMLRPSFVPPAEIRRLRDYTRLRVDLIADRTRQAQRLEKLLEDALIKLSTVVSDLLGVSGRAMLDALIAGERDPQALAELARGRMRGKRAALVEALTGRFDDHHAELAQMLLDEIDALTLKAETLTLRIEQLITEIPAAQAPAPAADPGGHPHDPGSRPLPVVARLDEITGIGPNAAHVIVAEVGLAMTQFPTPGHLVSWTKLCPRTIQSGAKSRSGKAGKGNPYLRRVLGEAAIAASKTDTFLGERYRRLVRRRGKLKALVAVARSILVIVWHLLADPSTRYRDLGADFYTNHIDRQRKTRQLIRQLEALGHSVTLDAAIAA

SEQ ID NO: 256453 - protein, 360 aa, unidentified
MDSKHERATNAVIGGVDTHKDLHVAAVVDHQDHLISTRSFASTRQGYRQMLAWMRSFGDLQRIGVESTGSYGAGLLRFMQQAGVTVLEVTAPDRQDRRKRGKNDDLDAQNAAHAAFSGQRTVTPRSRDGMIEALRVLVACRKTAVTARRIALQMIHNTIVAAPDSLREQLRIMTRMQLVRTLAAWRPDLTAYRDVEAAYRISLKSLGRRYLELHDEIADLDVMIAAIVEELAPNLIARNSISYVGAAQLLLTAGGNPERLQSEASFAALCGVSPVPASSGKTIRHRLNRGGDRAANSALHIIAIGRLRTDQRTKEFVARRITEGHSKLDAIRALKRYIAREVFNLIRQRQREINASRIAA

SEQ ID NO: 256454 - protein, 412 aa, unidentified
MDEIAVGQIVSWVGLDVGKHEHHATVLSATGEPRFERTVRNDEAQIEQLLDRAEECGPCALVIDQPGSIGSLAVCVARRRGMAVAYVPGLVMRRASELYPGEAKTDRRDSFVLADTARAHARRLHWLEVSDETLERLRVLGGYDDDLAHDVNRTANRLRDMLLATSPALERVLGPRLDHPVARALLGRYPTPSALRAAGRRRLTPLAKRHAPRLGGRLVEEIQAALEAQTVTVPAEETSGRVIRELAQELDRLAERRDRLAKEIEETFTSHPAAPVLLSIPGIGARTGARILTEIGDVNRFPTAAHLAAYAGLAPVTRQSGTSLKGETRSRRGNHRLKNAMWLSAFCSLHHDRSRTYYARKRAQGKQHNAAIICLARRRCDVIHAMLRNGTTYDDQPRPARPAPQPEIPIAA

SEQ ID NO: 256455 - protein, 334 aa, unidentified
MNNVSLIGIDLGKNSFHVHCQDAAGNALTRKKFTRPKLFQFLANCPSATVVMEACAGAHYIVRKVFDMGHKPKLISPQFVRPFVKSNKNDFVDAEAICEAASRPSMRFVAPRTESQQEILALHRVRESLVRDKVKTTNQMHAFLLEFGISMPKGLAVIRRLSVVLAENELPPYLAKLLVKLQGHYLYLVEQIRDIEHELELAAKQDDTTQRLMSIPSVGPITASVLMANLGNGQQYKQSRDFAAATGLVPRQYSTGGRPTLLGISKRGNKNLRRLLVQCARVYILHLEHQSGYLAEWVRNQLSKKHSCVVACALANKLARIAWAITTKQSVYMA

SEQ ID NO: 256456 - protein, 432 aa, unidentified
MSQFLNDFVVGIDVSSEFSIVAMLAPTGELIRKPFRIDHNPVGFHKLLDILKKEEERLKRKPIYFVESTGIFHLPLFFFLKSNDLKGFVLNPLCVHSTKNFDLRKVKNDNKDSEAIARLAKYQDVKVSMMPEPQILVLRMMTREYYAVSDMLTMMKNRLCTDLYLLFPGFLNVFSGPFGKTALAVLKSYPSPRAIRDADTDVLTLLIAKTSRKGSEWASNKVALLRDCAQLASSMPSEFSMLDTKIKIHIDGIQHMQASLNGIEAQVKTMIKSKEFPAQAKRNIELLDEIPGIGFFTAATLIAEIGDFNLFNSPKALTAFFGLDPSVNQSGKFNGDRNKISKRGTRIGRRILFTVAMASIRRTRNGKVINPVLRDFYAAKCVSKKKKVALVAVMHKLLHYIFAVLRDQKPFEFRKPEDHQSWRNTKLQPAAA

SEQ ID NO: 256457 - protein, 338 aa, unidentified
MIVIGVDVHKQSVTAVAIDQVGQMLDEKTVPVGSDELVGWASAHGGERRWAVEDCRQLTRWLERQLLGRGEDVVRVPPKLMAPERRAGRARGKSDPIDALAVARAALRESELSRPRPDEAVFRDLKLLVDHRDDLVDERRRIQQRLRWHLHQLDPTFAVPLRMLGRASHLERVGRWLARQEQELQVRLARELVNRIRSLTRAITELDRELEQRAAQTAPALLELPGCGAVTAAKLLAEIGPIDRFKSDAQLARHSGVAPLEASSGRIQRHRLDRGGNRQLNSALYRIAITQARYHPGARAYLERKQAEGKSRREAIRCLKRLLVRVVFNTLKTSPALT

SEQ ID NO: 256458 - protein, 345 aa, unidentified
MKITRIGLDIAKQVFQVHAVDERGNTRTRKQLPRAKVLEFFAQLPSCLIGMEACASAHHWGRELTKLGHTVKLIAAQHVIPYRKRGKNDANDAEAICEAVGRPNMRFVAIKTEEQQAVLMVHRARTLVVAHRTAQVNQIRGLLGEFGLVVPKGVARLRRELPGILEDAKNGLPDLAREVLAGLREQFRELDARVAAYDQQIRTLAAASEPARRLMQIEAIGPQTATALVASMGDPHVFINGRSYAASLGVTPRQNSTGGKERLGQITHQGDRYLRTLLVHGARAYLRVVDKKNRCQERLGTAAQGTTTRECRRRRARRQACTHRLGDTRPRHRVSTRGPGGRGLT

SEQ ID NO: 256459 - protein, 372 aa, unidentified
MTSIIYVGMDVHTTNYTLCCYSMEDDRFFAEVQVEPDAKNILKYLARIEKQQSRDCRIVCGYEAGCLGYSLYHQLHAHGIDCVILAPTTMMTKPGKRIKTDRRDARLISKCLAFHTYSPVYIPTEVDDAVKEYIRMRDDANSALARVKQQIIAFCIRHGKIHDGKSYWTNKHLEWLSSLDLGNKILSEVLQEYLIRYYQLQEQVDMYDMRINELAQAEPYRQKVEKLGCFRGIAAHTALSFCVEVGDFRRFATAQQFASYLGLVPGECSSGDKQQYTGITKAGNSHLRKLLVETAQVFGRNATKSGKSVALKERQAKCDSLTVAYADKANARLKKKYFKIAMRSKVNIAKTAVAREMACFIWGMMTDNISCA

SEQ ID NO: 256460 - protein, 385 aa, unidentified
MKKVDYTLYFITNSDGEALFKSFTIPNNRKGFETLFQKVQSVSDDLTKVKVGLEATGHYSYNLLGFLLDKGLPTYVINPLHTNLYRKSLSLRKTKTDKVDAHTIASMIMSDVDLKSYSDTSYHNEELKSLTRYRFDKVQERAKLKTSVSRLICILFPELEKLVPTIHMASVYTLLSEFPSAHAVASAHLTRLTNLLSESSHGRYGKDTAVMFREAARNSIGSNMPAKSLELKHTIKLIQELTSEIDEIETEIKSIMDEVNSPILSIPGINYRMGAMIIAEIGDFSRFDSPDKILAYAGMSPSTYQSGQLDNCYSHMEKRGSRYLRYALYNATKYVCHWDESFGTYLAKKRAEGKHYNVALSHATKKLVRTIYAMEKTGQSYSSAS

SEQ ID NO: 256461 - protein, 341 aa, unidentified
MKSTTIAVDVAKEVLEVAVSVQPGQVSEQRRLSRAAFMKFCADQPPATILLEACGSAHYWGRRLDTLGHRVVLLPPHATRPYVFRNKTDRADTRGLLEAFRNEDIHPVPVKSVAQQALTALHRLRSTWLATRTARINTVRGLLREFGCTIPLGAHHVLARTSHLLADADSGLPDALRPALAAACTEIRDIENRIRIVEDQLQALADQTPAVARLRSIPGIGLITATALVAFVGDVQRFHSGRHFASYLGLTPRERSSGLVRRLGSISKRGDVYLRMLLVHGARAVLWAASKRRSPDRLRTWALHLQHLRGHNKAAVALANKLARIVWAVWKHNVDFREMAA

SEQ ID NO: 256462 - protein, 345 aa, unidentified
MKDVISRVQSSKSMNTLYCGLDVHKETTYATIINIFGEVQTQKRMKNEEIPDFLEPYQVEKVAMEASTYIMPLHRKLTDQGYQITVSHPRKTKLIAESRTKNDKVDSKVLAELLRLNALPESYIPPRDVAVIREKVRRRAFLVRQVSKLKVKIRDIMAYEGVKPPEGYGLFTKKGTEWLKCLGLEPVDCYLRLMGPFNQEILVLNRELRALARDDPDVRLLESIPGIGYYIGLLIKAEVGDVGRFKSKDHLASYAGLVPSSKSSAGVQRHGRITREGSAWLRWALVEAAMVHIRYDTPVTRLYHRVAERRGKKKALVAAGRELLTVCYSVLKHQRPYFNPLYTQA

SEQ ID NO: 256463 - protein, 339 aa, unidentified
MLYVGIDVAKNKHDVTALNVQGKTVLKPLTFSNNKAGFELLDLSFRQLNQDCLIALEDTGHYAFNLLNFLHEQGYKVYTYNPLLIKKFAKSLSLRKTKTDKKDAHGIALKLLSDPNREQFQHNNRQVELKILTRHIHRLKKKQSDWKVQYTRCLDIIFPELDKIVGKHSEYTYQLLTRYPNPQKRIEAGFDKLIEIKRLTASKIQDILSVAPRSIGTTSPAREFEIIKHYKRLIDKAETCVNDLMAEFNSVITTVTGIGNRLEAVMLAEIRNIHAFDNPAQLQAFAGLDSSIYQSGQIDLAGRMIKRGSPHLRWALIQAAKACARFSPAFKAYLKTKLE

SEQ ID NO: 256464 - protein, 423 aa, unidentified
MEVMHERVAGLDVHKAMIVACVRIMAGGKISRECRTFETSTAGLEALLGWLTQSGCTHVAMEATGVYWKPVWNILSDGEFELIVANAAHIKNVPGRKTDVNDAMRIADLVACGLIKASFVPEQEIQELRSLLRARKQLTREQTSHIQRIQKTLEEANIKLDSVISDILGVSGRRMIEAMIAGVRSPLRLAELADRRLKVSPKALYDALHGRLTDHHRFMLELYLGQHDALSGAIARLDQAVEALIARMDEEVAAGQATFLSLIMLLCTIPGVSILSATVILSEIGRDMSRFATAGHLLAWAGLCPGQNESAGKRKSSRLRKGAPWLKTMLVQCAWAASRRKDSYYKAQFNRLRSKRGPKKAICAVAASMLTAIYHMLKDGTLHQDLGADHFDRRSTEVKAKRLVAQLTKLGFQVELQPLPQAA

SEQ ID NO: 256465 - protein, 338 aa, unidentified
MKTYAAIDLHSNNGVLVVTDETDRVLRQKKLANKLELFVAELEPFRATLQGVAVESTFNWYWLVDGLLKHGFPMMLVNTAAIQQYEGLKYTDDPYDARWLAHMLRLGILPTGHIYPREERAVRDLLRKRSSLVQQRTANILSVQNLEQRNRGTKISSREVKKLTEESIGELYDNEDLGLALTTTIKVIEALTEQICCLEKAVLKKARLRDEFKLLLTVWGIGDILGLTIMYEAGDMSRFADAGPFASYCRCVQAQRLSNGKKKGENNRKNGNRYLAWAFVEAAHYAIRYYPEAKRFYDRKAARTLPVVAIKAIAHKLARASYHVLRDQKPFDPKKVFS

SEQ ID NO: 256466 - protein, 419 aa, unidentified
MNYVGFDWASRAHDVTVLDEAGGVLDRWAFPHSETGWVTTLDRLARHGSAAEVPVIIERTSGLIVDRLLAAGHPVVPVHPTAFYAARPRWGASGAKSDPGDSYKLADYLRTDGHRLRRLTPTDPGLHELQALVRLRDDQVRARTAATNQLTAILDTYWPGPKQLFMSLASQIALAFLTDYPTPTSAAHLGEARMAAFCRRHAYRGGKSPAELLSRLRAAPVAPVGLPPATLAAMVTAQVTVLKTLQTVISDVERLIAVRVVAHPRSNLFENLPGVGMINLAQLLAEVGPILDRVDSAEQAATECGAAPVTRSSGQTRGVYFRWAANTRARKAITSFAHNARMQDDWAAALYADARARGKRNPHATRIVARAWLRVIWACWTSGQPYNPDRHHSSRFLHRCHPAGAQARSRWSPPPEERS

SEQ ID NO: 256467 - protein, 377 aa, unidentified
MTAPETALQGKDTAIARDLYMSLELSDKQWKLTFGDGRRGPSRCSVAAGDQAAVLERIRKAKARFGLDPRSKVHACYEAGRDGWWLHRWLVEQGIDNLVVDSASIEVNRRARRAKTDRLDGDKLLAMLLRYHGGETRVWSVLHEPTLEQEDARRLHRELARLSHERTAHTNRIGSLLVLHNLRAHLIGGRDWSQWWDSHCAQVPPALRAEIERECARLALVKQQMRTLQAAQRKEVDDGAQPQVAQLAKLRSIGTGSAWVLVKELFGWRSFANRREVAACLGLAPTPYASGDSQIERGINKAGNKRSRTLLVELAWSWLRYQPDSALSQWFNRRFATAGKRMRRVGIVAVARRLAVALWRYLEHGEIPAGATLKPAV

SEQ ID NO: 256468 - protein, 324 aa, unidentified
MDNFPAVVLGLDVAKAKVDCALLASGKLRSKVIANTPAGFATLDAWLAKHAPAATLHACCEATGPYSEALATHLADAGHVVSVVNPATLAAFARTRLVRAKTDRQDARLIAQFCAQHRPPPWQPLPRPQRRLLALVRDLHDLQTMRVAEANRLPAAYPDVQPRIQRHLHFLDAEIERLRKSLAEHIDQHDDLRGRRDLLDSVPGLGDTTIAWLLAYLGDGQRFACAKQAAAFAGLTPRLHESGSSVRAHACIDKQGHADLRRALYMPAVSAYARCAAYAPFVQRLRDKGKAPKLIITALMRKLITIAQAILKSGKPFDPTLHLG

SEQ ID NO: 256469 - protein, 400 aa, unidentified
MRAVFGIDVSKASSAVAILVNGEKVHGYTMSNDAIGFARLLGDLRTVHKPEIIFEATGVYSRRLQTFLEDNGYAYTRLNPLEAKKQLDSLRVRKTDQIDAEKLAQSQFVLNRKPTYVQEEVYQELRDLSRFYQNLTEDIVRAKNRLHKVLQVTFPEIETVLSKPTGEQYWNLVTAFPYKDFVLDLSKDELLESIRQSTSKRISDKRVAYLAEKLIALANQSYCAVKKTSPMLEEVRYYTKELLRLSGQRQAVLDEMVELAQPLPEYDILLSIPGIAETTATSIIGELGDIRRFQSANQINAFIGIDLRHYESGNFLAKEHITKRGNPYARKILFKCIHNIASASHTNPCHIADFYEKRKRQSQTTSTKPHTIASIHRLIRTMYYLIMHNKLYDYASTQNR

SEQ ID NO: 256470 - protein, 430 aa, unidentified
MSKQKYLSVGIDVGSAFSFMSIVDPDENLILKPFKITHNNLDSLNRALVAIKNAEEANSMKSRIFMESTGIYHFPLFCYLIESGFEAFVINPLITHSIKNIGIRKVKNDKLDSIGIAKLGLKSDLQVSVMPAKLVLELRSLTRNYYSLVDTRSAYVNQLKTHLHTVFPQYLDIFCDVTGSTSIMILENYPTPDKLLRAHKDCLIQKISKTSRKGLGKATEKYDKLIQAAKAAKVFGCDLDSVYFNISTTLTLIKSMDEAIASTMDKVRHLVKENNPEKFVQQIYWLNSITGIGFLSAVTIMCEIGDFSVFKSPKQLFAYFGMDPEVKQSGKFNATEVHMSKRGSRIARRAIFAAALACIRTKRNGEAINPYLHDYYQQKTAAKPKMVALGAVMHKISNYIFAVLRDESDFCLRSPKEHCQAYWAFEPLAA

SEQ ID NO: 256471 - protein, 340 aa, unidentified
MNVTTIGIDLAKSVFQLHGIDAAGEVIFRKKLRRSAALDFLRDLPSCRIGLEACATAHFWAREIGALGHDVQLIPPAYVKPYVKRQKNDAADAEAICEAVSRPNMRFVPVKSAERQSVLMLHRTRDLLMRQRTMTLNAVRAHLAEFGIITAQGPHKILTLIRAIQAGEVPGLPQIAAAALESLAAQLDHLAGEIRRLERQLMVWHRADETSQRLETIPGVGIITATALSASVPDPAVFKTGRQFAAFLGLVPRQNSSGGKDRLGRISKMGDGYLRRLLVVGATSVVRRAGGNTSATGVWLRSLLERKPARLATVAVANKTARIAWAVLARGETYRAPKAA

SEQ ID NO: 256472 - protein, 379 aa, unidentified
MNNTILAIDLGKYKSVVCIHDADSGEFAFTSFSTSQAELGHLLARHRPTVVIIEACLLAGWVHDHCSELGVRCLVANTASEAWKFKHLKRKTDKDDALRLAQLYLLEQLPTVTLPTAAVRQWRSLLATRQHLLGRRVATQNRIRALFVAQGLPAPRGAKAWSTSGLAGLAAHAKPLADCDPEQLWRGLLDLALVEYRQVNELIGQTETRLDALGKANAAVKLLQTAPGLGPRTAEVIAAYLQDPHRFQTGKQVSAYSGLVPRQHQSGEMDRRGRISKRGPALLRKLLVECAWCMVRYNAWARGFYLRLTGGGQRRKKQAIVALARKILVRAWAMLRDGKAWHDPQAGPKAALPPSKQKRQAEAQRRREAKAVVAAPTGT

SEQ ID NO: 256473 - protein, 366 aa, unidentified
MEKKIAYVGIDYHLNSLSIAVMVEGEKDFHHSIRLPNEDKVIFKYMKKLSREFKIKACYEASGSGYVFQRKMAARGYECDVIAPSLIPRKRGDRRKNDFRDARNLAQNYAHGMLSVVHPPTEQEESVRCLIRCRLAFKDAEKRVKLQINSFLLSRGVHWGGNKWTSQHRIWLYRLRLEDPYLQQILNEYLEHMHYLRSRIMNLDEQIEEIAQSSIYAPAVKKLRAFKGIGTLSAMLLIAEITDFRRFATPRALMAFLGLIPSEDSSGDRQKGGCITKAGNRRCRTQLIESVQHYVRKPCIGPQMEYDLAQVDAKSANIALKCMERLHKRYWALTLKGKVRQVAITAIAREFVGFIWAMMQPEAVAG

SEQ ID NO: 256474 - protein, 346 aa, unidentified
MKKFFVGIDFSKRKMDVSIVEKDFPERTIAYKQFINNAEGAKKMCKWVEYTTNTSTKLEGEVLFCCEHTGSYCLVVCDYLSENGKYIWLGNPLDIKRSMGLVRGKDDISDSRRIATFAAEKHHKAILYMRPEDSTRALKYLLSIRNTLVGHKKALACQIKENSPKLHNITLLCNIEEKLKQMLDSIIKEIKKIEKMMLDIILSNKEYKNTFDILTSMKGVALINAAAIIVFTDNFKRFSFNSRKICTYWGISPFRNESGDSIRRGTHTSPIRNNWLKAILSEAVLCAIRYEKRMKEYYSRLMAKGKHRNVALNNTKNKLLKTLVAMVRDGKKFDENYVSIPQAYAV

SEQ ID NO: 256475 - protein, 323 aa, unidentified
MTRIICGVDISSASLAARIGRDGATGSFPNTAEGIVALASFCHAHVVELVAMEATGGYEQQPFALLWEQGLPVTILNPRAVRRFAEGMGLLEKTDSLDAGVIAWFAEVKRSQPQSLSSASRQQLRALVTRLCQLTAIRTAQRNQSRLVTASAVLASFTELLALVARQIRELEIAIAALISEDPLWHQLDQVFRSIKGVADRTVARLMAEMPEIGTLSNKAISKLAGVAPLARDSGKQQGKRAVRGGRPQVREILFVVAGVAGRYEPDFIAFQQRLRAAGKPGKVIRIALAHKLLVRLNAKAREVRQHMATEMPDLRAPIAVTN

SEQ ID NO: 256476 - protein, 347 aa, unidentified
MKILALDLGKYKTVGCDYDRDSGQHRFKGSFTTPTALHQLVKEVKPDRVVIEVCNIAGWVCDLLRGMGIEVQVANTSDDAWRWRKVKKKNDRCDALKAAQLSAVNQLREVHIPTIEVRQWRALIAFRQQLVKRRGKVKNHIRDLLVTEGLILPRGATCWTKLGVGYLEAMAKPLSEVGMNELWRGQLQIELRQLREVQAEIALAEEKLDAIAAADPRIALLRTIPGVGPRLSEAIVALIDRPERFHKASEVSAYIGMVPKQFDSGESERHGRITRHGSRVVRSLLVEVAWAGMRYNPWVRQTYQRISGGKKSRKKIAIVAVGRRLLVRCWAMLRDGTSWRAPMTKAA

SEQ ID NO: 256477 - protein, 425 aa, unidentified
MREHDTRAEAGTVNTPWKGAMFEIEGVGVFLGLDVGKSNHHGHGLTPAGKKVFDKPLPNSEPKLRAVLDKLTAKFGTVLVIVDQPASIGALPLTVARDAGCQVAYLPGLAMRRIADLNPGEAKTDAKDAAVIADAARTMPHALRSLDLTDEITAELTVLVGFDQDLAAEATRTSKWIRGLLTQFHPSLERVLGPRLDHQAVTWLLERHGSPAALRKAGRRRLVELIRPKAPRMAQRLIDDIFEALDEQTVVVPGTGTLDIVVPSLAASLAAVHTQRRAMEAQINTLLEAHPLSPVLTSMPGVGVRTAAVLLVTVGDGTSFPTAAHLASYAGLAPTTKQSGTSIHGEHAPRGGNRQLKRAMFLSAFACMNADPVSRAYYDRQRARGKTHTQALLRLARQRISVLFAMLRDGTFYQSRTPKDVELAA

SEQ ID NO: 256478 - protein, 475 aa, unidentified
MKRHQKTRKTKPKPTASKPLHEPLPDAAGIDLGATEIWVAVGPDRCQMPVRRFGTFTQDLLTIVEWLLECGIRTVAMEATGIYWVPLHQHLSEAGIEVCLVNARHVKNVPGRKSDVRDCQWLQYLHSVGLLRASFRPAQAICNARTIYRFRQDLLGQSTQHLQHMQAALDQMNIKLHYVIDDLSGQTGQRIIEAILNGERDPLRLAKLRNRRVKASEETIAKSLEGDWRDEQLFVLRTAWENGKQIKEQILKCDQKLLEYTQQLEATTVLAQPMGSLQSRSLTATGPAVAPILTPLKTQPKTSKNEPAGPWRQELTRLFGVDLSLIPGISILTSITLLSELGNDLSAFRSAQHFSSWLCLCPDNETSSGRVLHRRTRRSQSRVRLALRMAASSLHHEKSFLGEKYRRLRTKLGAPKAITAMAHQLARIIWHLITHKVSFEMSIFAALEKAHQRRRLNRLHAAARQMGFQLTQIAP

SEQ ID NO: 256479 - protein, 358 aa, unidentified
MQRNKISFKGQKIFIGIDVHKKNWDVAIAPEVGNVKRHTQKASAKVLFDFLKKHYPDGDYLAVYESGFSGFSTYYALKEVGIDCIVIHAADVPTTQYEEVMKTDRVDSVKLVRSLKAGLLKGIYIREKENIDDRSVVRIRKTIQKQLSGYKARVKHMLHCNGVQLPERFEKPGSHWSKAFIKWLKEDVALLSSTRNSLDLLILQVETIRVTLLEATKMMRFLSQTERYKHKFDLLMTVPGIGVAVSMCILTEVYDVKRFHNEKEFAAYLGLIPTSHSSGDKVAHGEMTFRGNKQLGPMIIEAAWITICKDAGLGSLYLRYKERMKPQEAIVRIARKLSNIIFAILKNEKEYVPYHTGK

SEQ ID NO: 256480 - protein, 423 aa, unidentified
MSQNQPEIQYAAFLAIDWADQKHVWSLQEANSSTRLRGEVDHMPEAVETWVAQMSQRFAGRPIAVAVEQSRGALVFLLSKYEQLHIFPVPPAMTANLRKAFYSSGAKNDPSDADLLLDLLQRHREKLRRLSPDTEATRRIQNLVEERRKLVDEKTAQSNRLEAHLKIYFPQIPRWFGDVDIPLVCALLERWPTLEALQKARPDTLRSFFRKQHSRKEELIESRIKAIGEAMPALKDRAVVEAKVAVVKVLVQLIQVLHEGIEGLNRQIQEAAEAHPDFFIFDSLPGAGAVMAPRLLAAFGSQRERYQNAAEVQIFSGIAPVSESSGKSSWVHFRFACSKFLRQSFHEWAALSITQSQWARAYYELQRRRGKKHHAAVRALAFKWIRIIYRCWKEQVAYDENVYLAALAKHNSPLVAATNAVAL

SEQ ID NO: 256481 - protein, 362 aa, unidentified
MTINAGVDLHKTQFTVFVKQSGNQFEQYSTEEDGYKKFLTRIQRWKKNGMTVRIGVESTGNTRYFKNRMEQAGAEVVVINTLKFKVVNESVKKTDRHDAATIAEFLEKDMLPESRLCSEESEQLRRLLKVRTTLVRTMVTVKNQIHALLTGLGMKDSRATLQSKRGRQKILDALRKADSELVVQPLFETIEQLEKSVKSIESELEKLTEGDRTVELLMTIPGCGKIGAWTIRAFTDDINRFASAKKYSAYAGLVPWVQNSNETVRHGKITKRGPEELRTALVQLVMGMRRCRSTVSWRLMERYTEMKRNKGSGKSIIATARKLSTIIWCMLSTGQEFDPSLMIDRQLIRKADSMRTNASQSA

SEQ ID NO: 256482 - protein, 477 aa, unidentified
MNKKQGDNLQPPKAKSKRRRRNKGMCLEDRPVLEPNAAGVDVGAREMFVAVPPGRDENPVRVFATFTEDLERLTDWLEQCGVTTVALESTGVYWIPLFEILEQRGIRPCLVNARHMKNVPGRRTDWHECQWLQFLHSVGLLRAAFRPGQDVCAVRTILRHRNELVGAASQHVQHRHKALTPMNLQIHHVISDITGLTGRAIVDAILAGQRDGAELAKLRDPRIKADTETIRKSLEGNWRPEHLFTLGQSRDLYRIYQQPIVNCDLEIEKMLQGFAPRIDPGERPLPTDRKRNRAGSTRRRKNGHPHPEFDLRTEAYKLFGVDISQIPGVEENALPRFSEVGRDMSRWPTAGNFISWLALCPDNDISGGKLLWRGTRRVKNRAGHLFRMAAYALHRSLTPLGNYLRRMKAKLGPQAATMATAHKIAVIFYTMVKNQVEYDETLWATRDAQREKRLEAKLKRQAKRLGYELVPIEPKAA

SEQ ID NO: 256483 - protein, 294 aa, unidentified
MAAYVGIDVAKAKLDVAVRPSGQQWVVEQTEAAMADLVRRMQTEHPALIVLEAIGGYEMVVVAALATAGLPVAVVNPRQVRAFARAVGQLAKTDTLDAQMLARFAEVVQPPVRPLPDAQQQQLSALVSRRRQLVQMVTAERQHQATALPPVRQRIQVHIDWLEQELHLLDADLLRSVPGVGPQTALVLLAELPELGQLDRKAIAALVGVAPFSCESGSLRGRRMIWAGRATVRCALYLAALVAARGNPVIRQRLLAAGKPKKVALVACMHKLLLILNAMVRHRTRWQGAALATP

SEQ ID NO: 256484 - protein, 443 aa, unidentified
MSKNDSAHLRGERGQAFANLVRGIPPEQILCVSLDISKYFHVVMIHNGLGEIVIPTFEIDIYQSGFDQLCQMIDAAQEHTKARLVLVGMEPTSHYFENLARHLLARSQPVKLINSFSVKQNREQQLMRREKTDQIDVAAIGDLLRRGEGTLYKPPTSIYLQLQQIDRVRLGKLKIANMLKNQILGHLDRIFPGLVLISQTAQERYTPLFNVDFWQCHTLQALIRICPNPYQLVDMSPDQLVQAFHAQKHRMGPAMAAKIIAQAHKTLLPDLELAAIRCELLQHDLALLEAVQAHITSLEQRLSNLVAQTPYQVWTKLKGISAVQAASLAAAIGDPANYTEAAQVFRRSGLVSGRNDSGNHQRKGKGNPILKTGDVYLRHSLMNAVATLILHQPVLYRYYKQLSFTKPSGVARVATARKTIGILWAAQRDQSSNTLINCKGAAM

SEQ ID NO: 256485 - protein, 354 aa, unidentified
MDERITADCGLTIGLDLGDRFTEGRVLDETGEVVEAFRVRTTEPALSSRLASFPPSRVVLEVGTHSPWVSRVVARSGHEGIVANPRRVRLIAENDAKSDGVDAELLARLGRVDPSLLRPIVHRGAEAQRDRMLIQVRDGFVRARTQLVNQVRGFAKALGTRMPPSSTEAFPKRVRATTPQDLFPGLETLLGTIEQLTATIRAIDREVERLCRERYPETELLRQVPGVGAITALYYVLTLEDPSRFPRSRSVGAYVGLRPKRRDSGEQSPQLRITKAGDRLLRSLLVRCAHYILGPFGPDTDLRRAGLRMAERGGPAGKKRAIVATARRLAVLLHRLWVTGEVYEPLRSESAVAA

SEQ ID NO: 256486 - protein, 367 aa, unidentified
MKKVSTAAALTTKNFSQPKLTIGLDLGDRSSWYCVLDERGEVVLEQKLGTTPKAMREVFGSMPRCRIALETGMHSPWVSRVLSELGHEVIVAHARNVRLIGESRKKDDRLDARTLARLARIDPQLLCPVKHRSAKAQADLTVIRARAGLVRARTALVNTARGLAKSYGERLRGCNVRNMNPEKAEGLSPELQAALEPLLRGLESLSQQIREYNERIEKLAQESYPQVALLKQVKGVGTLIALTYMLTLEDPHRFRKSRDVGCYLGLQPGRRNSGQSQPQMHISKEGDPYLRTLLVQGAQHILGPFGADSDLRRWGLKLAERGGRNGKKRAIIATARKLAVLLHRLWVSGEAYEPLRNNNQRAMPAAA

SEQ ID NO: 256487 - protein, 428 aa, unidentified
MTDRDCTSATDFLQFKKEIRGSATHLIVGIDIAKDDHRAFFGTAYGKTLLRRFTFKNDIEGFRNLLEHVNLVKQEHGLREVVLGMEPTANYHKPLGDYLIGCGYRVVLVSGVAVKRNRELLDGRWDKNDTKDSANIADLISQGKCLFYDYPPVLIRDLRNLLSLKRRLKKQEHGLRTRIRNGLLAQYFPELDRYYSKWEPDILSVVRWCLDPSVIAGLEYDQFSGLVYPGNKPLRRQGRLEWIWKKAVDSIGCTAGEAVEFEAQVLVEELRHIREVIKETDAKIKDVCKRCLEYDYLLTIPGFGPDVSSKVLAAIGDPFRFHSASQVLKMAGMDLNAERSGKSSDTAVPIISKKGSGHLRYALYQAAFIASCRHKQFKKYYVNTLTGREKEKGIKTKMRVKLAAKLLVVAWTLMKKREPFDPEYLQIG

SEQ ID NO: 256488 - protein, 344 aa, unidentified
MDITTIGLDLAKSVFQVHGVNASGAVAVRKTLRRSQVLPFFAKLPPCLVGMEACGTSHHWARELIRLGHEVRLMPPAYVRPYVKRGKTDANDAEAICEAVTRPTMRFVAVKSPQQQAALALHRTRELLVKQRTQLVNMMRGLLAEFGIDIPRGLERALAMARRVADGEMLDVPDDTATCILALCEQALAIHERLRSIDRVMLASHRANDVAMRLATIPGIGPIGASALAASVADPHQFKSGREFAAWLGLTPLQNSSGGKERQGRMSKMGDRYLRKLLIVGMTSLVRRARYKPESVDPYVADLLARKPTRVATVAMANKAARVAWAIMTRGGTYRAPAPRLLAA

SEQ ID NO: 256489 - protein, 331 aa, unidentified
MSVCVGVDIGSRTSIAGVRKDGRPVGQWDIAQTPAGRKAAVKKLQALKPKTIVMEATGIYYLDLALELHAADLPVSVINPKSFHNFAKLMLVNSKTDAIDAQLLAEYGERMTPRLWTPPSPVQLELRALGRHINRLVGHRTRAKNELHALQATATTISILIEDQEEAIATLDTRIERFRKAGRELIAQCPTLTQQYKQLLAGPGIGEVTALAALAELTTLPELLKSSQVARHAGLDVRQTQSGTSIDKPGRLGKSGNAYLRAAMYMPALTAVRCDPYAKAFYESLIGRGKKKMQAIAAVMRKYLTGIWACMRGDVPFDTAKLFSSEHLRKA

SEQ ID NO: 256490 - protein, 411 aa, unidentified
MHEKQKHLYVGVDLHKHHHVAMIINCWNEKLDEIKFENKPSSFPRFLLDIDKRMEEGLTPVFGLEDVGGYGRALAQFLTEHGQVVKEVNPALSYAERKSHMTTQKSDSWDAECVARVLVNKLDQLPDAKPHDLYWSIQHLVTRRNAIVKAQGAFKNQLHIQLSHHYPSYKTFFSEVDGKTALAFWERYPSPSCLDGVSVKQLTTFLLEVSHNTCSVKKANEILKLVKEDGNTTKEFQETRDFLVRSLVRDISFKKKEMSYVERELKELMSLLDTQLDSMPGIELVTASALIAEIGDVRRFPNANKLARFAGIALVYFGSGGKGKEQKSKQGNRALHALFYNLAAQQVQVAKGSKLPRNPVFHAYYQRKLKEGKTKEQALVCIMRRLVNIIYGMMKYKTAYELPVVQEKEVV

SEQ ID NO: 256491 - protein, 473 aa, unidentified
MFTALISNPQVRLGSLTNTQGAPHNRLSILSSQNPCMHVHICNLPLVEAIMNTQSTTSFMAFVGIDWADRKHDFCLQAAASEQREFGTLDHSPESIAKWAYSLRDRFGGPIAVCLELAKGPIVYALQRYEFIVIFPVHPSTLAQYRKAFVPSGAKDDPTDAEMALDILLLHPDKLKPIKLQSVAMRTLSTLVEERRCLVNDVTGITNRMTSTLKQYYPQVLDWFEDRDTVIFCDFLSRWPTLKQVKRARRSTLESFFHQHNGRRAHLVEERIQGIRAATALTEDESVIRPNSLVVQTLVEQLRILLQSIDRFDAEIDAVTKKLPDYELFAALPGAGHIQAPRLLVAFGEDRDRYANAAEIQRYSGVAPVVERSGNKCWVHWRLACPTFLRQTFVEWAGSTIPRSYWAGAYYQQQRKKGCSHRVAVRALAFKWIRIIYRCWKTRTPYDESVYLKALKNRGSPLLTNFSESANLT

SEQ ID NO: 256492 - protein, 344 aa, unidentified
MYFIGVDHHEQASLMTVLDKEGREVKGGRVANERERVKEFLKDCHPFVAVLEAGRSSYVMVDMLREMGGEVKLANAFQVKAIAHARIKTDKRDSRILAHLLRAGLIPEVYQREAWNRRAQRVMRMRAYWVAKRTELKNKIRALLAQQGEEIRLGVKRRGKGLFSGRGLKFLAGLPMTGPDKEVLDDLIVGYEEVREHVKRTDGLTEALHGEIEEAARIDTVPGFAATLSVLTAVEIGDIARFARPADLHSYAGVIPSTYASGERTYHGHITKQGNAWLRWAALEAVHPAIRKDLELRALYSRLAKRKGKNVAKIAVARRLLTIIYRMLAEKRDYIPEMRKRSAA

SEQ ID NO: 256493 - protein, 445 aa, unidentified
MHYKRLLTWIDGSSSYLSVGLDVGADFTWMSIALPNGAFIGKPFKIVHSDPRSRDLAVTKIKEAQETYSLKSRCFLESTGIYHIPLLCFLRDKGFDCSVINPIITKNSTNINIRKLHNDKFDSKKVALVGLNVSLKTSIIPEDSIVDLRNLVRDYYYFKDLQSAVALKLTAELKMSFPAYAKVFSKVTTQSSLKLLSSYPLAGDMLEASKDDIVETIRSTARFGEAYALRKYDAVIAAAQDASVFGRALPSNAVRIRLYIDTYQEYQKHLDALLKALHETVERLQDTLIYDQICLLQSLRGIGFLSAVVLIAEMGDFKLFPSPKKLYAYFGLDPAVKQSGKLNGDKVHMSKRGSSLARRVLHMVALNNVKVDKGSGTPVNPVIYDYYTRKCSGKKKPVAMGAVMHKICNIIFAMLRDNKPFEIITPEEHCQRFAAEYPDKIRKAA

SEQ ID NO: 256494 - protein, 418 aa, unidentified
MAFKIFRKNCCGLDVHKTWIYACIGITDSNRRTEYKQARFSSFSKGLKELADWLAKYSCTEVCMESAGKYWIPVFNILEKTCFVTLAHPQYTKPQKGNKTDRKDAKWICDLFMCDMIKPSFIPSPEIRHLRDLMRYRFKLTNMLSSEKNRAQNCLTVSNLKLDDVFSDVFGKSARSITAYMLDHPGEAFDVAPFVDKRCKTPVSEIQAAVDGAVSPEQAVKLRQCLAHIDELEAHRKEIEQETLLIAEPFSAILDFLYTLPGLDKNPMTAIAILSEIGPDMSVFPSSKHLVSWAGCCPRNDQSNGKVKSTRISRAGCYLKPLLVQLANALINSKKHPEFKERYQRIKSHRGHKKAIIAVCKMLLTAIWNMLSKLEPYNPDGFFEHRPVNESKVLTKAQALELLRKRGYTITDDTAVTA

SEQ ID NO: 256495 - protein, 351 aa, unidentified
MNTQQTAFPKLYIGIDIHKRSWKVHCATDLFAGKSFSMSPDPKQLHIYVSKHFKEYEVTVAYEAGCCGYHAHRCFESYGWRSLVVNPADIHRKGKEKHTKTDKIDAQLIARELKDNRLQSIIVPDRKREELRSLFRRRNDLVKDFRRVKSYIKMQLLYFGIREPEEFDNDHWSHKYRNWLDDIMFEYPTAKATLESRMRFFRFVDQELRDVSTQLRKYCKVHYKKDYLLLRSIPGIGGIVACGILCELGDLRRFNNIKHLAGYIGLAPSMYQSGNSQRTMGMTPRANRLLRSYFVEASWQAIRADPVMQAYYRKHQGKNVKSIIVKVARKLLSRTLAVIKTEVPYTIGVIE

SEQ ID NO: 256496 - protein, 343 aa, unidentified
MNVFIGLDVSLASTAICVLGPQGRIVEELQAESEPEALVRAIASLSYSIDAIGLEAGPLSQWLSKGMEEAGFDVVMMETRLVKAALKAMPIKTDRRDAQGIARLLQMGWYRPVHRKSVSSQEIRALLTARKSVQQAIINLELSMRGVLRNFGLKLGHVTRIRYEARVRELVEQNEILSASTEALLRARAQLRAELAELDATIADLAKQDDVCRLMMTMPGVGRIVALTVKSAIDDPTRFARSKDVGPWVGLTPRRTQSGEMDIVGQITRAGDRALRTALYQAAMILMHRGSPNWLQAWALRVAHRRGSKRALIALARRIGVVLHRMWRDGTPFRHVQSSPATV

SEQ ID NO: 256497 - protein, 410 aa, unidentified
MERVIERCCGLDVHKKTVVACVRVPGRTSAREQQVRTFGTTTAELLALRDWLAGYGVTHVAMESTGVYWKPIFYVLEDAFTCVLANAAQIAQVPGRKTDVKDCAWIAQLLEHGLVRGSFVPPVPIRELRDLTRYRAALIGEHTRETNRLQKVLEDAGIKLASVASDVLGVSGRAMLDALTQGTHDPDVLADLARGALRRKLPALRQALTGRFRPHHAFLVSQVLAHLDYLDEVIEALSTHLDEVMAPFAEEVSRLDTIPGVNKRTAEVLIAEIGVDMGVFPTAGHLASWAGLCPGNNESAGKHRSGKIRKGNRWLRGALIQAALAGGTRATKGAFAARYRRVMRHRGHKKAVVAVAHAMLVAAYHLLARHTTYQEPGADYYERRHAERVRQRAVQLLERQGYRVTLEPAA

SEQ ID NO: 256498 - protein, 391 aa, unidentified
MILVGVDVAKDKHDCYIMTSEGEVLFKSFTIANNMEGFNQLYEKILSVIDNFDNVKIGLEATGHYSYNILGYLLDKGLTPYVINPLHSNLYRKSLSLRKTKTDKVDSRIIASMLMSDVSLKPYSNTLYHNEELKSLTRYRFTKVQERAKLKISISRLVTILFPELEKLVPTLQMNSIYALLYEFPSAHAISKAHLTRLTNLLNTTSKGHYTKDKAVLIREAAKNSIGSNMPAKSLELKHTIKLIKELTSEINEIEEEIKIIMNKINSPILTIPGICLSTGAQILAEIGDFKNFSSPDKLLAFAGLSPSTYQSGNMYSSNAKMEKRGSKYLRFALFNAAIYVSYWEPTFSQYLKKKRVEGKHYYVAISHVVKKLVRLIFHLEKTNERYSTVV

SEQ ID NO: 256499 - protein, 402 aa, unidentified
MHYLGIDVSKASHQCIVLDTSGEALGKSFTVQSSKDDFIKLAKKLSELNIPKADLTIGLEATGNLWENLYSFLKEQNFNVILLNPYQTNKFHEAMLKKAKTDSIDALVIAGLLRSGCASSSYIPDEDIQSLRDIVRLKDSYLKDVKNYKRKAYSLLNLVFPEFLNLVKDPFNIVSTDILLKYQTASDFKNLRPKDLIKIFRHRQGNNYDDSWALKVINSAKDSIYSGKAHKARGLVLKSLVQNIKYLKEQIELLDNEIQLLLKPDDKSQNSDVDNLLTIPGVGPKTIAVFLAEVGNIQRFLSCKDFIGFVGFYPKIEQSGSSLNRAKLTNKGSSILKHALYMASVASLIHNPYLKSVYHDKVSQGKCPKQALIVVARKLACIMYSMLKNNSVYNPERAAIAI

SEQ ID NO: 256500 - protein, 311 aa, unidentified
MATSSETYIGIDVSKDRLDVAVLGEERGWQVDNTPNGIAKLVQQMENLQPELIVVEATGGYQRAVVEGLFLAGLAVAVVNPARVRQFARACGLLAKTDKLDAQMLAVFGQRVQPKRYEGKSEAEKHLAALLVRRRQLEEMLKAEQNRLRTISQSLKDSVERSIAFLKEEKKRLDEHIQQFLAEQAAWQEQTKILGSAPGVGMVTTATLLADLPELGKMDRKKIAALVGVAPMNYDSGKKRGYRKTKGGRTNVRSVLYMSTLVATRYNPLIRSQYQHLLKRGKLKKVALTACMRKFLTILNAMLRDQQPFRV

SEQ ID NO: 256501 - protein, 391 aa, unidentified
MDKAIIVGRDLHDATLLIKIGVNRNDPMQRTYENNSSGRLAMCRFVEKLAKAEGGAKIYFAYEAGSQGFGLYDELDARGWQVSVLAPTRIERSPKQRKQKMDPRDAERLLEILRGHVLAGNKLPTVWVPDPQTRDDRELVRARLDVAKKARVLKVQMGSLLKRASVRKPEEAGNNWTRKHKAWLRGLTQAGSPLSTGARYTLASLLRQLEALQDELASLDKSIAQLAQEPRYAAQVAALTSELGVAVLSAMVFLTEMGDLSRFQNRRQVGAYLGLTPACFESGEASKERKGHITHQGPARVRMILCQCVWARLGCDAATIKAHARISDGKKQRRKIATVALMRQLGIRLWRLGLAAQRQAAGAETAPASDSPEQSAPTPRRFRMTNRTRRG

SEQ ID NO: 256502 - protein, 408 aa, unidentified
MEIVGIDWGRKKHYCYLLHQGKKLVLKNKEEDFAKLLKIKEAVYVIEDGNNRIVDYLLRNNRQVYILPSRRSSEARSFFVIEGKSDFIDSKVIAMTYEHNPEWCLQVKREGIAFELDVLVEENAVINVSMMQDIGRLDAYLERYWPEVKEVFSGTSARKLAFISICPTAKDFLSMSDKEILQKLKEMGFLINSNLKSKLKELRKIALERYVPASIRTLIIAFSRYAMEKKVMKEEIGKQMKEIIEESEFSVLLTLPGVGAIIASQLIVAYLTHKFSSYRDLQRYAGTTPTYYGSGNKNTTKMRSNCNHYLRGTLHIASLAATNSSKWMKRFYDNKKSEGKSSAHALRALANTILKIAFAMLRDLTPYSEEKFFKRNPLSDYTPSKKEGEQKPEYSLKVSSVATCRSTA

SEQ ID NO: 256503 - protein, 346 aa, unidentified
MTIVEASRTVTGGIDTHGETHVAAVLDEVGGLLGTESFEANPDGYSALLSWLAGFGAVGKVGVEGTGAYGAGLARFLARAGVEVIEVDRPNRQDRRRTGKSDPIDAVEAARAALSGRAHGHAKSRDGAVEAIRVLVVAKRSARQARVKALTQMRQLTFTAPDQLQCRLKGLPVPQFIAAAQGLRPTRSADPVMTATKASLSSLAHRIGELDEEIHQLDTMITPLLQAHAPDLLGIYGVGIDTAATLLVTAGDNPERLRSEAAWAHLCGVSPLQASSGKVTRHRLNRGGDRQANRALWTIVITRLASDPKTQAYMERRVKEGRSKREVIRILKRYVAREVYRSLPRG

SEQ ID NO: 256504 - protein, 413 aa, unidentified
METLFPRCAGLDVHKADVVACLRTIGPGGGPTRQVRTFSTMTRSLRELADWLSAGAVTHVAMESTGVSWKPVFNILEDQFTVWLVNAAHIKQVPGRKTDVKDREWIAQLLQHGLLRPSFVPPRPVRERRDLTRPRARLVSDKTSVANRIAKVLEDANIKLGAVATDILGVSGRLMIDALIGGQEDPAVMASMARGRLRKKVPALEQALDGAVSEPHRDQLRRLRDQLHSLEGLIDRLDERIVERMDRPTLAAIGRLRTIPGIERGTAEVLVAELGTDMSVFPTAAHLSSWAGICPGHNRSGGKARSGRTTKGDRWLRRALTQAAWAASPTKETYLSAQYRRLAARRGKKRAPVAVGHTILVIAYHVLKDRTSYRELGAEYRDRLEPERQTRQLVRRLEKLGHKVTLEPRQEVA

SEQ ID NO: 256505 - protein, 359 aa, unidentified
MRIIGCDLHARQQTLAMLDSTTGEIVNLTLTHEGDNVREFYSNLPRPVRVGIEATGSMQWFLNLMEELGIECQVGHPANIRAAEPRKQKHDRRDADLILKLLVEKRFPSIWLPSKELLDLRGLLLHRHQWVRMRTRVQNALQAIALANGLRRGPSLWSHAGQDKLASLSLAPHTAHRRSELQALYAKFDMEIEKLNQRVEEQAWERPTALRLMTHPGVGPITALATDVFLGDATRFVDGKALASYVGIIPREYSSGGRQRLGGLTKQGNPLLRFLWCEAAIHAVRKDPELQRFYLRKLFQKGLGKARVAAARKLGIRLWILLRDQIDYNEFCRRGQMRQKNGSTCAGMPARVIAQTVAD

SEQ ID NO: 256506 - protein, 404 aa, unidentified
MIFVGVDWAESHHDVCVLDETGSVLSTKRIPDALEGVRTLHEVLARHAEEPSDVIVGIEKDRGLIVTAMLGANYRVYALNPMSVARYRERHVTSGSKSDSGDAKVLADLVRTDRHNHREVAGDSDQAEAIKILARAHQSATWSRQRETNALRNALKDYYPGALNAFGTDLDGTDALEVLAIAPTPASGRALSLATITAALRRGGRQRNLDRVAQRIQVALREEQLSERPRVEAAFGAITSAHVAMIRAYGATIAELETAIAADFEQHPDAKVILSLPGLGTILGARVLGEFGDDPNRYADAKSRRNYAGTSPVTKASGKSKVVLARHARNVRIAAAADQWAFCSLKQSPGARRYYDELRSRGKTHRQSIRQLANRWVGILHVCLEQHVHYEENLAWKHRMDTAA

SEQ ID NO: 256507 - protein, 451 aa, unidentified
MSKRKGSKIASLPLVEPNAAGADIGATQIFVAVPPDRDAEPVRCFDTFTADLERLADWLEQCQIRTLAMESTGVYWIPLFQVLEQRKIEACLVNAQHLKNVPGRKTDVEDCQWIQHLHSVGLLRGSFRPAQEICAIRSLWRHRDNLIQLATVHLQHMQKALDQMNLQIHHVISDLAGTTGLAIVDAILAGERDLAKLAKLRDWRIRASEETIIKSLVGDYREEHLFTLRQSLESYRHYQKLIQDVDAQVKQMMQRLPAKIDSGEKPIPKEKNPRKTPWRNEPPHLREDLYRAFGVDLTQIPGINTLTAQMLLTEVGPDLSRFTTVAAFCSWLRLCPEPKISGGKVLSSKTRPTKNRAALALRMAAQGLHRSQTFLGDYFRRMKARLGTPKAMTAAAHKLARIVYHMITTHQEYDTTIFQELERRVQDRKRMKLRAQARELGFDLVAREAVP

SEQ ID NO: 256508 - protein, 325 aa, unidentified
MDPDDKHGTAEKMSDNLPQTIGIDISKASLDCHVHPVGAERQFANTAKGHKALIAWARQWPVERIAYEATATYHRALEAALADWPCVKLNPERARRFAQATGTLAKTDRIDAMLLARMAATLQPPVRPARSAQQAQMAELINARDGLVRDRTACLNREKNLTIALLKRQCRQRIKQIEQHIKALDTEIATFIAADAELARRHQILTSIAGIGDLTANQLIATMPELGTLDGKQAASLAGLAPVARQSGQWKGKSFIRGGRANVRQALYMPALVAARFNPDLKAKYQQLVTAGKPAKIAITAVMRKLVITANALLKANRLWQQSPA

SEQ ID NO: 256509 - protein, 349 aa, unidentified
MNRTTYGLDIAKNVIQLHWVDNETGEIGRKKLGRAKLSDFFARLQPSRVVMEACGSAHHWARVLGALGHQVELLPARQVRPFVRSNKDDAADARAIWLAAQQSDIRRVPQKSVEQQAALALHRTRQHWVSVRTATINALRGALYEFGVTLPGGKRVGLKALATHRAEIDAKVPATIQRLIDGQLATLKDIGCRIDKLEAEIGMQLEQLDNAATLREVPGIGLLGATAFAATLGDGKAWKSGREFSASLGLVPAHRGTGGKARVGHLSKRGDSYLRTLLIHGARSVIAHAKNKPKWLEQLLARRPMNVAVVALANKMARTAWALVAHGRDYEREWKSTAPKGCTAQASAA

SEQ ID NO: 256510 - protein, 321 aa, unidentified
MSSKKAKPFIGIDVSKNTLEVAAHEQEKYFRCSNQTSAFPELIAELITLRPALIVLEATGGWEIPVTQALHQAGLPVVVVNPRQVRNFAKAVGQLAKTDRLDARVLAHFAAAVKPPVRPIKSEQAQQLDALLDRRRQLVEMLAAEKNRRRAAAISPTVREEIEEHIDWLEDRIEALDQQLKRQIKQSAIWERKHQILLSVPGIGSLVALACIAQLPELGQLNRQQISKLVGVAPLNCDSGDRRGTRHIYGGRAHIRNLMYMAALSGIRHNPVLRDFYHRLRANHKPFKVALVACMRRLLSIINVMVRDNTFWVHEAAEASS

SEQ ID NO: 256511 - protein, 482 aa, unidentified
MKAKPQEKNKRATNHPTQHHWHEMNRKQRQETMRKIQSQDLSLEVVHPDAAGIDIGNESHYAAVPPSRDSQPVRCFGCTTAELKAMAAWLQQCRIRTVAMQSTGVYWVAVYDILEQAGLEVYLVNARDTKNLPGHKSDVQESQWLMKLHTYGLLRNSFRPSQEIRTMRTYWRQRNDLVQSASRHILRIQKALTQMNLQLANVLSDISGVTGQAIIKAILAGERNPHKLAEFRDPRVQASEEQIAHYLEGNWQPDLLFVLKQEQDGYEFCQQQMAECDRQLEQYLQSTEDRSQGAPLPEEKRKGRLTKKKGNKPQFDLRKGLFRMSGTDLTRIDGIDVMTVTTVISEAGYDMSKWKTEDHFVSWLRLCPDNRISGNRIIGKGRLPTNNPVSIALKMAATTLRQSKTYLGAQFRRLRTKLGAPVAIKAMAAKLARLVYRMLRYGMKYLDQGAAVYEIKHRELQVHQLKWKAAQLGYQIVQPPAA

SEQ ID NO: 256512 - protein, 368 aa, unidentified
MDEGITSFVGLDVHKDTIAVAVAEAGREAPRFIGTTTPATPRVLKVLASLGEPDALQIVYEAGPSGYTLARELRTRGYRCEVIAASKNLRPATDRIKTDRRDALTLARLARSGDLVSVVVPDERDEAIRDLSRAREDALGARLKARQQLKALLLRHGHRYTGRTFWSATHERTLASISFSHSAQTVAFAEYRLAVRDAQDRLDRITQALRDECEHWRMKDVVAGLVTLRGIDFVAAVTLVAEIGDFRRFAHPRDLMGFLGLVPSEFSTGESRHRGSITKTGNGHARRVLIEAAWNYRHPARISRKMQTRQEGQPKAVRDIAWRAQLRLGQRYRRLSSRKLHQNKICVAIARELAGFVWAIAAQITVAA

SEQ ID NO: 256513 - protein, 422 aa, unidentified
MNEMYGKRQEQQRCWAGLDWGSETHAVSVVNDAREEVGRFKVEASLKGLEQLVKRLGGFGTVAGIAVEATRNPVVNYLASAGFTVYPINPKLSKNWRACNSVAGVKNDERDGLVLAVELAGRHASLRALEREDPTVAELAGLCEKLRDLVDERTALLQRLKATLGQYYPGVLGFFTDWTSPVAWRFLQQFPRPEALAHARKDTLIRFLKANRIGIKPLWLERIEGRGEVTHWPRPGDQVALEAMTLAIIAQLQALQPHIDKMDRLIAESARHLPHAHLLKSLPGAGKRLAPVLAAITAPVASGETEIEGIRCVSGVAPVEDQSGKRRRVGIRRRCNKHWRDVMHLFAYSSTHWCCWAKAFYDMHREQGDRHASALRKLADKWLKIINRMLETGEPYDDQRYVEALRRNGSPLYLRLAEKTCG

SEQ ID NO: 256514 - protein, 420 aa, unidentified
MKIFVPVAGVDVSKRFSDLCVLSPDNNVLLRQKIYHDMVSMKLAEKKLHEIELECGARPVVVMESTSHYHLILFQFFTDAGFEVVVVNPIQSGALKNINVRKVKNDRVDAYRIAMLYRLKVLRPSQIPTNSLRGLRLLTRQRSELKGDVARFKNRLTAYLDQIFPGYGEVFSDVGGSASRAVLHMCPTPEKLLNADGSLLAKVICEAGNKGPKFGAEKAAKLREAAGSAQVIGVRSASNASLIKNVLDIIEGLLAAIQRIEREIKELVTQDTRLDEDVKLLCSIPGIGFSSAVVIVAEMGNISLFRKPKQLATYFGLDPGERQSGTFKGRKNKLSKRGSLQVRAALHMAAVSSVSRNRDGTYRNPVLAEYYERKCAEKPCKVARVAVMRKLSNIIYAVLRDRRPFELRTPQEHMALLAAA

SEQ ID NO: 256515 - protein, 335 aa, unidentified
MDTGELQERRLQHREEAEKFYRDLGAQGASVRVGMEASGHARWFERLLSELHFELWIGDAAEIRTKRVRKQKTDRQDAQLILRLLLEDRFPQIWVPNWENRDLRQLLWHRHRMVQARTRIMNQLQAVALNEGLRCKKRLWRDAGREQLESFRLAPWASRRRRDLLELLDRLTPTIAELTQAIEQEVEKCPAAQRLQMHPGVGALTALAFVLILGRADRFQCGKQIASYLGLVPLEDSSGQRRRLGHITKQGNSLLRFLLVEAAQVTVRSDPEWRSKYFHLAMRRGRKIAKVAMARRLAVRLYWMWRKGWDYGQLTKFSSHAGQLGHRDGVQSNTE

SEQ ID NO: 256516 - protein, 315 aa, unidentified
MVEQVVIGIDVSKAKLDVAILPSGEQFTVSNDRHGIAELLRRVSPLAPSRVVLEATGKLEQLAVSELAAAGLPVVVINPAQVRHYAKARGKWAKTDPIDARLIAEFARDLEPELRPLPDAETQALAALCQRRNQLLEMEQMEKSRLQRAPRANQKSIKAMLRFVRRQVEQVEKQIEHSIRHSPLWQAKRELLESMPAIGKVNSSTLLARLPELGQFPRQKICALVGVAPYNDDSGQWHGRRHIAGGRGGVRQVLYMATLSAVRCNPALRDYYQRLLGRGVEPKAALIAVLRKMLTILNAMVRDNTPWRPPCPTPA

SEQ ID NO: 256517 - protein, 418 aa, unidentified
MEVMYARCAGLDVHKETVVACVRIVEGGEVSRSVRTFATTTASLIELGEWLEVNGCTHVAMEATGVYWKPVWQVLVDSSLELVLANAAQVKNVPGRKSDVNDATWVSELLAHGLVRASFVPEPAIQQLRGLLRTRKQLVREKASHVQRLQKTLEEANIKLETVLSDVMGRSGRAMIQALIDGESDPAKLAALAHWKVRASAATLREALHGRIKRHHRFLLRLHLQQVDALDAAIAEIDREADAGLACFRDAVKQLSTIPGVSELSAQVILSEIGTDMGRFASAAHLRSWAGLCRATTKVPASAGRLACAGESPGSRPCSFNALGLPRAPKLPTYTRNLCDCAVDAGRRKRSALLLPPSSRPRITCSKTARSMKISEPFTSIVGGPRRKRAASSNASPNSAFPSNSSPWPPSHEQSVSL

SEQ ID NO: 256518 - protein, 451 aa, unidentified
MSASKKPRRKRDISPTHPNAAAIDIGATMHVAAVGPDQDPDPVRSFGTFTGDLHRLADWFEQCGVRTVAMESTGVYWIPVFEILDQRGFEVILVNARDAKHVPGRKSDISDAQWLQRLHEYGLLRASFRLKGEVATMRAYLRQRERLLDYAASHIQHMQKALMQMNLQLHHVVTDITGATGMAIIRAIVAGERDPAVLAAHRDPRCHASAETISQALVGNDREEHIFALTQALELYDVYQAKVALCDVRIEAVLKRLRKASSVPVGKPPPVRTIKKQANDPAFDVRTALHGLLGCDVTQIHGLGPHLALKLVGECGTDLSAWPNAKHFTSWLCLSPSNKISGGKVLSSRTRRSGSRAAALLRLAAVAVGRTETALGAFYRRLSARVGKAKAVTATARKIAVLFYNTLRHGMEYSDPGASHYEERYRRRVITNLERRAKSLGYVLQAAPTPG

SEQ ID NO: 256519 - protein, 284 aa, unidentified
MEYYAGLDVSLRSVSICVIDGEGKIVFERSVACEVDVIVSTLAQASLPITRLGFEAGTMSLPLFYGLKEQHGFDVVCMEARQVHAALSAMRNKTDKNDARGIAQVLRSGWYSPVHMKSHRSHAMRTLMSSRKACLRKCIDLANEVRGLLKVYGLRLPERIKHTHFDATVRPCIEANPDLSLALVPRLALLQTYQELDKRVKHAASTNSVCLRLMEIPGVGPITALSFVAAMDDPARFRSSRTVAAHFGLTPRRFQSGELIILAGSLKQETWRSALPFIRLLMQC

SEQ ID NO: 256520 - protein, 409 aa, unidentified
MDVVIERCAGLDVHKRTVVATIRTPDGAGKRRSRTQSFVTTTAGLHALKTWLTDAAVSHVAMESTGVYWRPIYAVLEDTLEVWLVNPRAVKHVPGRKTDVRDSEWLAQLLECGLLKASFIPPPLIRDLRDLTRYRKVLIRERAHHVNRVEKTLEVAQIKLGSVVTDLMGKTGRAILAALVAGETDATRLADLAQGLLKKKRLALQEAVQGGLRPHYAFLLRQQLETIDHLGQQIAALDAQVTHTLAPIADVCGRLCSAPGVAARAAEAILAEIGTDMTRFATPGHLASWARVCPGTHESAGKRHATTTGKANNWLRATLNEAAWAASRTKRSYYHALYHRMKPRQGPKKAIGAVQHALLRAIWHMLTRHVPHQDLGAEYLAGGDPARLKRHHVHRLEQLGYRVVVEPAA

SEQ ID NO: 256521 - protein, 345 aa, unidentified
MMVIGIDAHKRSHTAVSVDEMGRQGFVKTVGTTTQDHLRLLKWALGLAEERLWAIEDCRHLTRRLERDLIAAGESVVRVSPKLMAHVRDSARSYGKSDPIDALAVARAALREPDLPTARLDGVERELRLLVDHREDLVAERTRIISRLRWHLHELDPGWTAPTKLQRGSAFDKVQAHLSGRNDGTIVRRLALRLVEHLRLLTDEIDELTAEITARVTTIAPSLLAIVGCGALTAAKIVGETAHAGRFRSKDAFARHNGTAPLPVWSSNKQRHRLSRTGNRQLNAALHRIALTQARCYPPARELLERRTNSGNGGMEALRILKRRLSDVAYRAMLADQTDPPTVAA

SEQ ID NO: 256522 - protein, 405 aa, unidentified
MDIHKKFVIACIRITDAQTGQVREEVRRFDTMTDDLRKLRGWLVAEQIADVARESTGVFWKPVWNVLEGAVRLTLANAQELKQVPGRKSDVKDSQWIADLLACGLITPSFVPQQAQRDLRNLTRSRTTLLQERTRVSNRIQKVLEDTNLKLAWVASDVLGKSGRDMLAALAEAQADPQRLAELARGRLREKLDLLKRALEGHVRPHHRFLLRQLLDHLAHLEEQIAACDQQIRQALRPFLTPTTEARLDKVVGVKRATIEVLVAEIGSDMSHFPTDGNLCSWAGICPGNEESAGKRQRSRIEPGNKWLESALIEAARAAARSKDCYFRAQYARLAARRGRNPAAVAVAHSLLTVIYHLLKNPESEYQDLGVAYSDQRNPTRQVKHLVQRLETLGYHVTLTPHAVA

SEQ ID NO: 256523 - protein, 386 aa, unidentified
MQKLNDLSRSLTALEPDGTLIAVIEMSLSSWLVAGMVPGVERQPLKKLAVDESALLKLLHRWREEAEKAGRRIDRIAVAFEAGRDGFWLARWLKARGIEAYVIHASSVAVSREHRRAKTDRLDTELLKRSFLGWLRGERDHCKMVEIPTMKDEDAKRPNREHDSLIGERSRIVNRMKAALVRLGIRGFNPKLKRATTRLDGLRTPEGEPIPPNALAELRRDMERRRLVNNQIRQIEEERLKRIEQAPCDGPHVMVRLLARVMGVGIETADMLVHEVLSRNMRDRRAVARYAGLTGSPDESGRKRREKGLARSGNVRVRRGMIQLAWRFLLHQKNSALTKWFRSRTENARGTRKPMIVALARKLLIALWRLVREGIVPDGVVLRAAQ

SEQ ID NO: 256524 - protein, 370 aa, unidentified
MNTNITHAAMDTHKKEHVVALAYADTGEIEVFSVHNTVKEIKKMVKRIQRKAPGPVQFCYEAGVCGFVLKRQIEALGSDCMVIAPSLVPVKQGDRIKTDRRDARKLLGQFIAGQLTEVYPPNPEQEAAREITRCREAAREDLTRARHQLVKFLTRHGYIYTDGNHWTGKHKTWLRSLQFDVSDLEDIFNSYHTQLEHCQQRLVTQTKEVEALAARPAYREAVGRLRCLRGVDTLTAITLLTELFEFGRFDSPRRLMAYLGLVPSEFSSGEKRRPGAITKTGNRRVRRMLIESAWHYRHRSTVSKTLKRRRDGQPQWAIDVADRAMQRLHKRYRRLSERGKMPQKVVVAVARELAGFIWALLRGQPLASGT

SEQ ID NO: 256525 - protein, 334 aa, unidentified
MQNVALIGIDLGKHSFHIHCQDQSGKALLRKKFTRTKLMQFLATCPSSVVVMEACAGAHFMARRISDIGHEAKLISLQFVRPVVKSNKNDFVDAEAICEAASRPSMRFVQPRTEVQQAMRALHRVRESLIRDKVKTINQIHGFLLEFGISLPIGDAVIKRLSLVLAEHEIPEYLSHLLMKSHAHYLYLVEQITELESELNQSIKADAAAQRIMTIPGVGPITASLLSSQLGDGKQFSCSRDFAASAGLVPRQYSTGGKSTLLGISKRGGKNLRRLLVQCARSFMMQLEHQQGRLAEWVRKQLDNKHSNIVACALANKLARIAWAMTINQKEYQV

SEQ ID NO: 256526 - protein, 348 aa, unidentified
MHANTVAIDLAKEVFELAFADAQGRVIERKRLSRKNFARVMEQRPPLRILMEACGSAHYWGRRFQGQGHTVRLIPARDVRPYVRRNKTDRHDVAGMLEADRCADIAQVPVKTPEQQGIQSLHRLREHLKVERTATINLLRGTLREFGIVLPLGTTKLPSKVGEALEDGTNELPMALRHSLHQQLQRLNGLQADMAQIERQLEEFAARDVAVQRYRDVPGVGLLTATALRASAGDLSRFRNGRQFSAWLGLTPREHSSGQQRRLGRLTKRGDVYLRTLLIHGARAVLQGARMRQRRGQTLNPLQAWALSVQLRQGHNKAACALANKLARRLWATHHHLMTQRFLHRLGH

SEQ ID NO: 256527 - protein, 325 aa, unidentified
MTFYLGCDVSKNKVDVALVDGTGIQQWVDQVPNITLDLATCVATVAGNYPDNELCCVVESTGCYHHPFTEAAAALGIPCRILNPIVTKQQIKATIRGKKTDRTDAVMIARLGLRGEGRLATPEPYLSTKYYARSCQKFSNLAGSLKKHSRHITELLDADLSVATTTAFLDVQGALEQAKRQLYKDLAASAQGEVFTLLQTIPGVGPYVSASLIGEIQDMKRFGTAKALTAYAGLDPKIRQSGHTLNNTGKLTKRGSSYLRRSLFIAASVSRQYDPNMKAFYDKKRGEGKSYTVATCAAARKLLMVVRAVWLSGNKYDPTFNNMNQ

SEQ ID NO: 256528 - protein, 281 aa, unidentified
MQPMYYIGLDVHKKKISYCVKDGCGKVHSEGAVPATRLDLDLWMKRLPQPWTAAMEATLFTGWVYDHLKPHATALKVAHPLMLRAIAAAKKKNDRIDAKKICDCLRCDFLPECYMAPTALRECRRTLRYRNLLVRQMVQMKNKISVLLMEAGVIYNKEKLHKVGYFRELLASNPDINDGLRSLLRLCRETVVRLGKTESALVRTLQRDPLLVERVERLMTIPAVGPITALTWALEVGEVKRFSSIKKAVSYCGLCGDERSSADTVQHTPISLGSVRWWAQN

SEQ ID NO: 256529 - protein, 482 aa, unidentified
MKQNIYSNNNKVLKETLAMYKPTEILFAPIEIGKFNHKSCITNFFGDVITKPFEFPNNSHGLNFFIDKFKSAVATASAKKVILGCESTGHYHLNLVHHLKLLNLPVEIINPRDSKNENPNKNSKTDIIDLNAIARVLIHNKGSRQIVSEGVYYNLQRATRTRVKFVQRRTSSSNIITGLVDRIFPGLWDKDNSIFSKRFSKASLLILQHFPHPVQIIKLGVKRLANFLSKHNTKLGIETAQKIVSAAKVALYKPIDELNQDIFALQSHIQCYTLYNQLIDDLERQIALLLIQTPGTYLLSVDGISVIHAANFTAEVADINRFAFANQIISFAGTCSRKFQTAEYEAQNLHISRKGSKFLRSSLNQTALSLNTWSPKFHDYYTKKYLEKPDKPGRARIATGNKFVKLAFALMKHEQLFRPMNVLLDEKTYYSDLWYKIIRKLDKFNLSDTFTLENNYLVKIKKQLELKYGLSLTTEIKDGKGY

SEQ ID NO: 256530 - protein, 419 aa, unidentified
MAFKIFRKNCCGLDVHKTWIYACIGITDTNGRTEYKQARFSSFSKGLTELADWLAKYSCTEVCMESTGKYWIPVFNILEKSCFVTLAHPKYTKPQKGNKTDRKDAKWICDLFMCDMIKPSFIPPADIRQLRDLVRYRTKLTNILTGEKNRALNCLTVSNLKLDDVFSDVFGKSSRSIISYILEHPGQSFDVTPFVDKHCKKPIEEIQAAVDGAISREQAAKLKECLRHIDEIRAHKQNIELEIQRLAEPYAYALELLRTIPGLNSVPITAISVISEIGADMSVFPTSKHLVSWAGCCPRNDKSDSKVKSTRISRAGTYLKPLLVQVSNALIRSDKNPEFKERYRRLKARRGHRKAVIAICRMLLTAIWNILSKLEPYSPNGYLKDKITEHSVLISKAEGLALLRKRGYIFKDEVAASSS

SEQ ID NO: 256531 - protein, 347 aa, unidentified
MLIIGCDFHPGFQQIAIFDNRTGEMEEKRLQHRAEAEQFYRSLAGQEVRVGMEACGHYPWFERLLQELGFELWFGDAAQVRASVVRRQKTDRRDAEHLMHLLIEDRFPRIWVPSLEVRDVRQLLVHRHKQVQARTRTKNQLQAMALSHGVQKKYKLWTQAGRAELEQLPLLPYAAQRRQKLLGELDAGEAEIGELDRRVAEEARQRPEAVRLMTHPGVGPVTALAMVLTLGPAERFESAKQVGSYFGLIPSEESSGGKQRLGKISKQGSSFLRFLLVEAGQTAARYDPQLKRFYRRLASRKNRGVAKVAVARKLATRMYLMLREGWTYAQLNQAVMSVSPSHSVAGE

SEQ ID NO: 256532 - protein, 343 aa, unidentified
MDQFAGLDVSVKDTSVCIVDETGKIVREVKVASEPDALLTVLKNRTYHFKRIGLEAGPLSQWLYSALAEAELPVVCVETRHMQAVLKAQINKTDRNDARGIAQMMRVGLYRPVHVKTLRSQKLRMLLTHRKLMLSKAIAIENDLRGTLRNFGLKVGMVGTVKFEARIKELIENLPDLAVLVEPLLVVRRVLREQIGILHRRLLVIVRDDAVCRRLMTVPGVGPVVALTYRATVDVPARFRNSKAVGAVFGLTPSKYQSGEINRTGAISKCGDEMMRVMLYEAAQVMLTRTNKWSWLKAWAMKIARHRGMRKAIVALARRLAVILHRIWVDGTDFRWTREVAAA

SEQ ID NO: 256533 - protein, 321 aa, unidentified
MWVLGIDVSQKELVVRFQNESQEFREGTFANNSKGFKKLKKWLKPAEMAEIRVCMEATNVYWEEVAEYLHQEGLQVSVVNPMRIKGFAQSQLKRNKTDKVDARVIAKFCEVNPDLALWTPPSPQQKKLRALVRHREALVKTRTQQSNRLKTVRQTEVTASLQAVIDTLNEQIEQTSEQIKELIDQDPDLKQEYDLLRTIKGIGQKTAELILAEMYDLASYQSARTAAADAGLTPAQHESGSSVRRKPRLSKVGKTSVRAALFFPALSAMRHNPIVRDLADRLEKRGKHRMVIIGAAMRKLLHLAFGVLKNRTPFDPNYLSI

SEQ ID NO: 256534 - protein, 397 aa, unidentified
MIAVGIDVSKSKSTVAILNGDGSIRAKPFNVRHTADELLALVNYIKGTSEVPTILMEPTSHYHYPLLKAFREANLPVCLINPYQMKKYGDTALRKAKTDKRDSLRIAQYALEKSYSLIPYTPSDQKYEDLRFLSRQYSQRISTLTGNKVQLLDLLDQTMPGITSLLPLKSRDPDNCVLLRFVKRFKSFDMIRKMGKTRFLESFQILVRKTKDRHAGTKGLRIYELALNSVTTRGDNPLTAMTQEQCVDLISTAQKAADEINLQMRIIAETLPEYKVLHSMAGVGDRLGPIILAEIGDIRRFHSGKALNAYAGNDAPPYQSGQFESRNRHISKRGNPALRKACFEVMQALKLTKPQDDPVYLFLVKKEQEGKPYNVAKMAAVNKFLRIYYARVMELYK

SEQ ID NO: 256535 - protein, 333 aa, unidentified
MKILKQSIGIDVSKNDFKVCLGVIDEHLETKNAYEHVYINDKKGIKQFINDITKKTDQLIPVYFVMEATGVYHQELAYALADKQFSVVILLPNKAKSFSKSINIRVKSDVIDAKLLCQMGLERKLTTWQPPETIFATLKVLTREREALVLQRSKLKNQLHAYQTAFVKAEKTISRIKGHIVYLTKQIRDTQADMKALIKQSQPVADKVKKITKVKGLSFLSVVTILAETEGFNIILNQKQLIGYSGLDVRVDQSGEKNAKGRITKKGNSHLRKALYMPALSACRTNKTMKLFYTQLNERQRSKKQGVIAVQRKLLLLTYSLWKTGQDYLEKCA

SEQ ID NO: 256536 - protein, 358 aa, unidentified
MNRKTGMNAGQILGTIDGLQVVGLDIAKQVFQMHTVDMVTGEIVNVQIKRAKVLEHFANRAPCLVGIEACGGAHHWARELSALGHTVRLLHAKAVRPFVSGNKTDAADARAIWLAVQQPGTKCVGVKALAQQATLTLHRQRELLMKMRTMQTNALRGLLYEFGAVFAKGTRVMLGEVEAALESLSNKLPQMVADSLREQVQRIKTLGEDIAAIDKRLALQLRQDADMQRIAEIPGVGVLTATAAIATMGDPRAFRSAREFCAWLGLVPKQWGTGGKVRLQGISKRGDSYLRTLLIHGARSVLSHAKEPGPWLEQIQARRPANVVIVAQAAKMARAIWAVTAKQQEYHRGYRSVRPQAA

SEQ ID NO: 256537 - protein, 368 aa, unidentified
MEKTAYVGIDYHISKLTIAVMIEGEKDFNSTIHLENKTKVIANYLKKLSEQFQLKICYEASGSGYHFQRLLQSWSYHCDVIAPSLIPKKAGDRRKNDFRDARELARNYASGQLTVVHPPTQYEEAVRSVVRCRLDFKENEKRTKQHINSLLISQGQHWQKSKWTLQHRKWIQQQSFSEPLLQQVLQENLAHLEYLETCTARLDQQIEKIAATDTYAPSVKKLRALKGLGTLSAMLLIAEITDFRRFASPRALMSFLGLIPSEDSSGVKSRFGSITKAGNRRCRTQLIESVRHYIKQPRMSRQMKADCAQVDPVSAGIVQKCMQRLHKRYWALTMKGKIRNVALVAIAREFVGFIWALMTHDDTAAQAA

SEQ ID NO: 256538 - protein, 367 aa, unidentified
MKKNSTTTQRGKRARAGTEATVIGMDLGDKTSRYCELDQDGKEREEGSVATTKQALTQRFAGKKRCRIALEVGTHSPWVSRLLKNLGHEVIVANARQVRLIGHSSRKNDRLDARTLARLARADPRLLSPIQHRGEQAQQHLAMIRVRAALVEARTKLVNAARGFSKAQGERLPACDAAAIGVKEMAELPAGLKAVLRPLLEQVESLTGQIKKADVELEQIARTQYPETALLRQVKGVGVLIALTFVLTLDDAERFQKSRDAGCYVGLRPRQRESGASQPQLRITKEGDRYLRTLLVQGAHHILGWRGPDTDLRRWGLKLASRGGKNGKKRAIVAVARKLAVLLHHLWVTGEVYEPLRNSGAATTQAA

SEQ ID NO: 256539 - protein, 357 aa, unidentified
MKIIGVDLHTRQQSIAMLDDQTGELVEKELPHEGDQVRNFYAGLAKPVLVGIEATGSMHWFLRLLEELEIEFRVGHPAKIRAADPRKQKNDRRDARLLLTLLVENRFPAIWMPSAEQRDLQSLLRHRDQFVRIRTRVQLSLQALALSHGLRRGHTLWTRGGQHTLRTLPLAAHASEQRDTLLALQPQLQSPIDALDREVEKQAQQRPQSQRLMTHPGVGPITALATEVFLGNPRRFADGKAVASYVGMIPSEHSSGGRQRFGRISKQGNSLLRFLWGEAAIHAVRRDSELRRFYRRKLVQKGMGKARVAAARKLGIRLWIMLRDEIDYAEFCRRGRQRRQGSGAACAGMPAAGQWSN

SEQ ID NO: 256540 - protein, 351 aa, unidentified
MDEYIAFDSHKRYTWVDRREVATGRVRQYRVEHAPGAIRQALAGCAPGTAVAIEATANWYWITDEIEQAHCVPRLVHPRKAKLMTGQINKTDRLDAQGLNLLQRNGTLPTVWIPPGPLRELRELTRTRVVLVAQRTRWKNRITATLAKWGLPASEYSDAYGKAAREELDQRLERLPEQTRWATRQMLAQLDTLSEQIRQFEKRLEELVKVTAEMQRLETLPGVGVILAATIALEIGEVRRFGSAERLASYSGAVPRVHASGGRAYYGRTRPDVNRYLKWAFAEAANSVAVHHRRHPERHVSQLYRRLRARKGHAKAVGAVARHLAEAAFHVLSRQEEYRDPAAQQGRTREV

SEQ ID NO: 256541 - protein, 384 aa, unidentified
MQKPVYYIGLDVHKESVAIAYSKLNSRSEAIYHGTCGGSNPAVEKALRKLAKQLKVKFQDLNICYEAGPTGFVLGRRLIQLGLDCVLCAPSKTERKPGDKIKTDKRDALKLAQMFKNGDITTVRIPPELDEALRDVCRARTDAVDDLCRGKQRLGSFLLRHGFRYSESTRWSAAHMRYLRELTMPTDPQKIVLEFYIQTIDLYESRVAQLKQKLIELLQDWEWKPVVDALMGCKGFQEVAAATIISELGDLRRFKNPRKLMAFVGLVPTEHTSGGTRRQGSITKCGNSHARWMLVECAQHFRKAPKIGAALTTRQQGLSAEVKELSWRMQNRLHKRYIKLKARGKHENKCMVAIARELVAFIWELQNKCNLPMPDPSEVTPQSH

SEQ ID NO: 256542 - protein, 462 aa, unidentified
MARHDPKARPPSARKAVAAMPIVNPNAAAIDVHSDNHVVCVPADRATPNVRTFGANSSDLLEIAAWLRQCGITTVAIESTGVYWIPLFELLEVQGFEVCLIEPGQASRCGARPKSDVLDAQWVQRLHSHGLLRGSFRPPDEVIALRAYLRQRQMLISSASTHIQHMQTALEQMNVKLTEVVSQITGLTGMLIIAAILEGQRDPVVLAKFRQAGCQRDEAAIARALEGTWRPEHLFELKQAYDLYRTYQMKVTECDRQIEQALARLPDRSAGVKLEPKERKSGRKPNTMRFDGTHPVFRALGVDLTAIEGIEVPTALMILGEIGADVSKFPSEKHFASWLGLCPNHQESNGKRKSRRVRKGKNRVAIALRLAARSLHRSHSALGAFFRRMNSRLGYKGAITATAHKLARYVYAMLKHGQAYVSQGLEEYEAAMRQRIERTLRKKARALGYDLVPRPETSAAVP

SEQ ID NO: 256543 - protein, 342 aa, unidentified
MQMTTIGLDIAKNVFQVHGIDGEEKVVVRKQVRRRQVLEFFKAQPPCLVGMEACATAHYWARELTKLGHLVRLMPAKDVKAYVKRNKNDAADAEAICEAVRRPTMRFVQIKSAEQQARLMLHRTRDLLMRQRTQTINALRAHLAEFGIVAAQGREGIKELLKIIASDKDERLPVDAHASLVVLAAKLQAIQTMIGSIEKRIMVQHRSNEASQRLETIPGIGVIGATAIAATVPDPKVFRTGRDFAAWIGIVPREDSTGGKQKLGPISKRGDRYLRRILVVGACAVLRYARQHPEKYPRLTQLLARKPFKVVAVALANRMARIAWALLAKGGTYRAPALAAAA

SEQ ID NO: 256544 - protein, 354 aa, unidentified
MSLVADHYTAVVGVDTHAATHTYALIEAPSGKLLDQKTFPTTPAGLSRATAWIGRRAGSNTESVLVSAEGTGSYGAIMARRLTEVGYRVVEAPTPSAKRLRGRGKTDSLDAITAARSTLIMDIEKLRDRRAGEVQTALKLLTVGREQMNADRLRTLNALIALIRAHDLDLDARRALTPKQIATISSWRHRDEPLGSTFARSEAVRAAKRILTLDADLKTNRAQITDLVNEHAPALIAMPGIGAVTAAMIMTVWSHPARIRSEGALAQIAGTCPIPASSGKTTRHRLNCGGDRQLNRAINTIALTRMRTDFATREYVLKRLAEGRTKREIMRCLKRYITRQIYRTLAAAASSPTA

SEQ ID NO: 256545 - protein, 443 aa, unidentified
MSEEVRHTSEPEFAALVAIDWADKKHVWRLEVIGTGQRERGELEHTPEAIEAWASHLAERFSGRAIAVGLEQSRGSLLYTLTKYAHLVLYPIHPTTLARFRAALFPSGAKDDPMDADLLLELLLHHRGFLRPLQPDTLETRRLQFLVEQRRQLVNEKTRQTNRLTARLKMYYPQILQWFEEVDSPMVSALLLRWPTLQKLQRARPDTLRKFFHQHNCRGTQRIEQRLEQIGQAIPATHDAAVVETCVVAVQLLARLIATLRRGIAELDRRIEKVAASHPDFALFDSLPGAGKVMAPRLIVAFGTQRERYSSAKEIHAYSGIAPVLERSGKSTWTHFRWTCPKFLRQTFHEWAGHSLSKSHWARLYYQQQRAKGKAHHAVIRALAFKWIRIVFRCWQNRTPYDEQIYLRALQQRRSPLAVTESPTVNLQWIKSGGFWKLSTDPS

SEQ ID NO: 256546 - protein, 322 aa, unidentified
MSQPNQLCVGIDVSKATLDIAASSDIAQFTVSNDSDGFDTILDALRKHSVALVLMEATGGLEAAVACSLQAEGFSVAVVNPRQARDFARAMGYLAKTDRIDAKVLAQMAEVINRHPERERFIRALPDEDRQVLTAMVVRRRQLIAMLVAERNRLYLSHPQNRKSLSIIIKALEDELARVDTSMNTHIQKHFKEVSERLNSTKGIGTMTIAALLAEVPELGSLSRREISALVGVAPINRDSGTMRGRRTIFGGRAGVRTALYMAALVAARFNPVIKTFYQRLLAAGKAKKVALVACMRKLLTILNAMLRKNEEWDESYHHVAP

SEQ ID NO: 256547 - protein, 412 aa, unidentified
MRFYTQQHQHYCGIDLHARTMYVCILDATGNVLVHKDMAAGPEAFLKVIAPYRKDIVVAVECIFTWYWLADLCAREHIAFVLGHALYMKAIHGGKAKNDKIDAHKTAVLLRGGMIPTAYVYPRAMRSTRDLLRRRYRFARHRAGLLAHIQNTTSQYNLPPLPQRISYKANRSTVPDHFPDPRVRKSIEADLCLIDHYDERLNDLELYLVRTAKIDDADTFYRLRSVPGIGKILALVMLYEIHDIARFPTVQDFLSYARLVKCAKESAGKHYGYGGAKIGSVYLKWAFSEAATLFLRHNGLGQACFARLECTHGNAKARSVLAQKLGRAVYCMLSHRTAFDLKKFVGNATPQPRRARQAPADDTASMDAPHLAAESAGAACPTSPPRSARALASPARRKTTAPTAPGATIAKR

SEQ ID NO: 256548 - protein, 325 aa, unidentified
MEKLYGGIDIHKEKLAGCIMDENGEIFREHIFPFSREAIERFLYGIPNSGIEIVIEACGIWRGAYKVLADLGYEVKLANPKKTHDIACKKKTDRVDARILADLLRTNYLPEVWIPDEQVLKLRDLTRHKSNLTRMRVKVQVKLKGYLLRKGTKYGKLWNERALSELAEEDPDLRNLIRVYWSLKAEEKEVMGRIRKTARSMKKANLLMSMTGIGELSSLMILAEVGDIKRFKTPKELVSYAGLCPGIYQSGDTERNVRNNAVNKWLKWILYECSGRAAMLDPRIQEYFYKVKQRKGFKTARRAVARKMLTIIWYMLTNEEPYRAS

SEQ ID NO: 256549 - protein, 316 aa, unidentified
MSASPLFVGIDVAKAELVVALGPSRDLVAVPNDESGIRQVLEHLQAASPALVVLEATGGYETAVVAALAAAGLPVVVANPRQVRAFAKAMGILAKTDNIDAHVLALFAERVRPPIRPLPDEALRVLDALLTRRRQLIEMLVAERNRLAHALPPVEKSLKQHIRWLERRLADVDSDMDQTVQQSPVWRAKEDLLRSVPGVGPVVSRTLLADLPELGALNRKQIAALVGVAPLAKDSGTLRGKRMAWGGRAPVRAVLYMGALIASRHNPVIRDFYQRLVSAGKPKKVALTACMRKLLVILNTMVRNNTRWGERYALSA

SEQ ID NO: 256550 - protein, 340 aa, unidentified
MFYVGLDIHTKRIAFCVLSEKGQLVQRGQVRGLEEVLRILKALPGRFEVCYEASCGYGHYHDLLRPLAARVLVAHPGQLRLIFRSKNKNDRNDVERLAKLLYLGETPTVHVPSLEVRTWRELINCRSQVIAKRTRAKNTVRALLRSAGITPPNHPGLWTKKGLAWLRQLDLPTPSQQLRRDLLLEEIETLLRQVRRIEQQLNRQAQQTSAVAQLRSIPGVGIRTAEAVAAFVDDPNRLRNAKAVGRYFGLVPCQDQSGDKNRLGHITREGAPVVRQLVAEAAWQALRRSPTVRAYFERVQRGDPQRKKIALVATAHHLVRVMWAMLKRGTLWEEKRAQAS

SEQ ID NO: 256551 - protein, 320 aa, unidentified
MMAQDDLVVVGIDVAKDKVDACIRRLKLRQTFPNTLQGHRKLVAWLRKYQVGKAVMEASGGYERQWRNVLYNADIEVRIVDPKRVRNFALSAGRLAKNDPIDAEMIAWFAETFSQAPGQISDAAREELAALAKARKALVDVNVRLQAQNEHAAPEPARKAHARVLKSLRAEIDKLEAAISAKVKATPEFAERAEIIESVPGLAQASSAVLIAGMPELGQVSDEVAAALIGLAPYDDDSGKRRGERHIKGGRRWVRNAIYMPCLGAATQNNPVLKAFYQRLIAKGKEPKVALVACMRKLIIILNTMLARHQKWNPGRHAVA

SEQ ID NO: 256552 - protein, 374 aa, unidentified
MTSTPPPAPVSISVIGGVDTHKHTHYAAAVDDQGRLLGHAEFPANDAGYRQLLTWLRRHGHVQSIGVESTGSFGATLTRALTSAGERVVEVNRPNRLARRMDGKSDRLDAEQIARAVLGQTSTAIPKAKSGMVEVIRTLRVTRASAVKARTSAFNTLWGVMISAPSPLRDELVVLTKRTLVNRCLGLRPETTDLITLAEDPDRLLMAAIKTSLRDLARRWKILDAEIKTLNKQIATLVTTAAPDLVELHGVGIEIAGQFLVTAGDNTERIHNEAAFAKLCGVAPQPASSGRTSGRHRLSRGGDRAANSALYIVTIVRMRHHQPTRDYVERRTAEGLSKREIIRCLKRYIAREVFNNLPRPASTESEHEITQTAA

SEQ ID NO: 256553 - protein, 316 aa, unidentified
MNSQVFVGLDVSKHQLDVAVRPQGRHFVTPNDDRGIKQLVKRLAALKPQLIVLEASGGYEFLVTAALAEAQLPVALVNPQSVRKFAGATGKLAKTDKIDAQVLAHFAEALRPEPRPLPDQAQQMLKAALQRRLQVVKMIGQEKNRLEKTFIPAVRQDIQAHLTWLSQRLEQLDRDLSDQIRQSPLWRDRDRLLRTIPGIGPIVSRAVIAQLPEAGTLPGKKAVALVGVAPYNRDSGRFRGKRMIRGGRSYLRRMLYMAAVVASRWNPVIRAFYQRLLAAGKPKKLALTACMRKLVLILNAMVKNNQPWNQFINQVP

SEQ ID NO: 256554 - protein, 458 aa, unidentified
MRTIGIELAVAGAHKAIVADDQGHFVTRLLSFFPWAGDLNDLLARARHGAISPELQAVMEPTGMAWFPIAVYLNRQQVPVYLVNGQQVTDLRRFYKKHAKCDRVDARILATLPRVNPDGLHRLRLPDAPTLACQRGCRELDRLTSQITAISNRLQAMDRFAWPGLHDLVFPDHLSPAARWFREHWYDPQQVLAAGAATIRQQWLHSRDDPRDAGNWVEPLVCLAHQVVALYGSDGTALDFALLQTEICRQQAELAVLERHHRTVRLKVVHRLYRQIHPSRNLETLKGVAQDSAAVYASLIGDPERFPSTALFRGWTGLVPDSKQSSGSEAKGLHITKAGPDLIKKYAYLDADVARRWDPQIAAIYYDQMVHKGKHHTQAVCACATHLMDRVFAVLRDGQPYELRDVDGTPVEWQEALTIIAERYTVPEEVRRRTTKGARRARADRQAEREQKREGSPR

SEQ ID NO: 256555 - protein, 340 aa, unidentified
MPNPAVIGLDIAKNVFQVHGADAEGRCVLRRRLRRAEVITFFARLPKALVGIEACPSGHHWARELRSLGHDVRLIPPQYLRPFVKTNKNDAADAEGICEAVVRPNMRFVPIKSVAQQAAMMLHRTRALLLRQRTQLINAVRGHLAEFGLVARRGARNIRELAELVRDTGSDKLPDAARAMLVLLLEQIREVQLRVQKTEHALEAWAKQSDACRRLMTIPGVGIMSATAIVLAMDDPKRFRSGRHFAAWLGLVPRQSSSGERQVLGGISKRGDGYVRTLLIHGARSLTRWRRESWRWLAGLLMRRPTNIAAVAIANKTARTAWAILAYGHQFQPTRRAEAA

SEQ ID NO: 256556 - protein, 345 aa, unidentified
MKITTVGIDLAKNVFQVHGIDERGKTVLRKQLRRAQVAVFFGNLPPCLIGMEACASAHYWGRTLRHYGHDVRLIAAQFVKPYVKTNKNDAADAEAICEAVGRPNMRFVPIKSVEQQAILSVHRVRQGFVKARTAQANQIRGLLGEFGLVIPQGIYNVAKRVPELLEDASNELPVPFRQLIDRLTEHLKELDRQVKDFEKQIIAWHRGCELSRKLENIPGIGPLAASALVASIADAHSFDNGRQVSAWLGLVPRQHSSGGKPTLLGMSKRGDAYLRTLLIHGARSAILAAQHKVDNTNGWLTNLLTRRHPNIAAVALANKNVRTVWALLAHGREFKADYVPVRMAA

SEQ ID NO: 256557 - protein, 315 aa, unidentified
MATSSGTYVGIDVSKDRLDVAVLEGKQEKQVNNTLEGIHELVKWTVELDPELIVVEATGGYQRAVVEALFQAGLAVALVNPARVRQFARACGLLAKTDKLDAQVLAEFGQRVQPRRYESKSEAGRQLGALLVRRRQLDEMLKAEQNRLRTISPSVRGSLERIMACLKEEKKLLDMQIQQFMTEQKGWQEQTEILGSAPGVGMVTTATLLAELPELGKMDRKKIAALVGVAPMNYDSGRKRGYRKTKGGRGDVRSVLYMSTLVATRYNPVIQAQYQHLLKRGKEKKVALTACMRKFLTILNAMLRDRQPFRSASIA

SEQ ID NO: 256558 - protein, 412 aa, unidentified
MRRVIGMDLHRTFAEVVIWEEGRLRHHGRIDMTRTALEGFAKSLQPTDEVVIEATGNCMAVSRVLSPFVAQVIIANPLQVKAIAHAHVKTDKIDAGVLASLQAAGFLPSIWTPPPEVERMRRLVARRNQVVRHRTRIKNEVHAILHAHLIPRCPHADLFSRVGRQWLQRQPLPSDEILAIERHVREFDRLGEDLDLLDREIAQDALGDPAVKRLMTITGVNLTVAVGLVAAIGDIRRFSSPQKLVSYVGLNPRVRQSGLGLAQHGRISKVGRSHARAMLVEAAWAAAKSPGPLHAFFVRIRAKRGHQIAAVAVARKLVILCWHLLTKEVDYLWARPALVATKVRAMELQAGQPARKGNKRGPAYSYNVKELRDREMKAAEQAERAYERFVAQWQPRRPRSKVRERLNPTRLE

SEQ ID NO: 256559 - protein, 404 aa, unidentified
MAIIGMDIHRSFAQAAFWQDGQIKQERRVDLIHDRLVKFARTLSGEDEVVIEATGNSAAVERILRPFVKRVIVANPRMVRAIAYARVKTDKIDAVILAKLHAGGFLPEVWVADDNTQRRRRQTAERTGVLEQMVRTKGRIHSILHANLIPKYSGHLFGRAGKDWLSSLPLPDEEKRIVGRLIDELERNSEQLAILDKTIVREALDDPRAVRLMTIPGVGPIVAATVLASIGDISRFPTPEKLSCYFGLTPKIRQSGDRPARHGRISKQGNIHARKMLVEAAWSAKLAPGPLRAFFERIRRTRGAPAAAVATARKLAVMIWHVLTDETEYTYARPAFTAMKLRKAALKAGAPREYGKAGPGHDYWIKEIRERENAYVARAEQAYEHMVAAWKTKPVRPQEVPKRS

SEQ ID NO: 256560 - protein, 339 aa, unidentified
MQCTTIGIDIAKSVFQLSVANQAGKIIERNRLTRGQFERYLYKQSQSKLVMEACGTAHHWARTAVEAGHEVVLLHPGYVKPYVRRNKTDSADADALVQASRDPELKPVPTKSIDQQAMQSVHRVRQQMIDTRKQRINLARSLFAEFGVPLPTGTKDITARLRAHEGRLPELLTHALDPVIEEISALKVRIDALDAQLKAFANDHPVVQQLMTIPGIGVTTATAMFGSVPDIHQFKRARQFSSWLGLTPREFSSGNKRVLGRISKRGDKYLRMLLIHGARAALLAAHRKRANSKPVTRLQQWATDLQQQKHHNIATVALANKMARIIWAMWTKGDEYRAS

SEQ ID NO: 256561 - protein, 300 aa, unidentified
MDKVSTIGLDIAKSVFQVHGVDAAGAVVIRKRVSRAKVLEYFGELPPCLVGIEACPSAHHWGRELQGLGHTVRLIPPSYVKAYLKRGKNDANDAAAICEAVTRPSMRFVPIKTKEQQTALMLHRARQLLVRQRTMLSNALRGHLAELGIVSAKGRNGTAELLRIIADGRVSPAVCGILTVLARQYGAIGTEIASIDKSIMALHRGCEASRRLAEIPGIGPIGATALVAEIGDWKTFSSGRSVAAWIGLVPKQHTTGGKDRLGSITKQGIDICGGYWWSGQWPLSATRASTERRSVPGSAD

SEQ ID NO: 256562 - protein, 346 aa, unidentified
MTGLTIGIDIAKRVFQVHAIDNETGEVSSTKLARRDFLAHFEKLSPSLIGMETCGSAHHWARELGAMGHEVRMMNPMYVKPYVKRGKNDAVDAEAICEALTRPTMRFVAVKSVEQQSVLAIHRTRALLVRQRTMLVNALRGHLAEFGIVAPVGIERIPELIERVLASDESEGGVTALVQTVVTIFGEQLDNIQAQIAKLERQLRLWHRSNEVSRRVASVPGVGPITATAIVAAMPDPSIFASGRGFAAWMGLTPRSNSSGGKERNGRITKAGDRQLRVLLVLGATSVLRRVRAGQPTPLYGWVKKLLDRKPPRLATVALANKMARMAWAVMARKMNYQPELAAAVA

SEQ ID NO: 256563 - protein, 391 aa, unidentified
MINIGIDVGKFKHCATVLDDSTGEVLIKPFFLTNDRKGFDLLYSKTKQFIHRKHSVGMEDTGHYMINLTNYLLDKKFTVKYINPRATCLRRKELGVSAKNDRKDALLIAEMLSEKRFWRSISSRTIENSKFRDITRLYHQLQEQQNQDMNRLQRALDIVFPEVNSLSWTRYSKAYMKFLSTYPSASSIAFEDIRNLRKALKTEGKGRQCKVTAEEIRELAKNSVGEDNISIDLEVTSIIAIINTREEQIRMLEKKIEEFSHKLNSPIISIPGISHISGMTILAEIGDINQFQNTGNLISFAGMDPLVYQSGKYDAAHMPISKHGSRYMRKALYQAVFTVCKYSPTFHAYYTKKRNQGKSHRCAQGHCARKLLRVIYKLLSTNSLYDQNHIQ

SEQ ID NO: 256564 - protein, 404 aa, unidentified
MMTAPERCVTGGVDTHADVHVAAVLDSATGRSLGVESFPADTAGYAALQDWLASHGSVDAVGVESTGAWGAGLARHLSGAGMRVIEVDRPDRKARRQEGKSDPLDAEAAARAVLSGRATGAPKSGDGPVEAIRSLEVVCHGAVRDRTRATNQFKALLVTAPADLRERMSALSFSRQLELARRFRDHDDPLETQLRFSLKTLARKIAFLDEQITELEARMNTLTGQAAPALAGTFGVGPHVAAQLLATVGDNSDRITNEAAFAKLCAACPIPASSGKTQRHRLNRGGDRRANKALYTIVLVRMRHHAPTRAYVARRTTEGKTRAEIMRCLKRFVAREIYNVITNPPAVPSGHDIRQRRLHNDITLTALATALDVAPIRLSRVERCLDFNNDLAQRAHDWLTQNAP

SEQ ID NO: 256565 - protein, 346 aa, unidentified
MHYIGMDCHITTLDFAVVNEAGRLVKAHSVATSVNGFMGFVKTVPPPRTIYMEEGTLAAWALETSVRFREKLVITDAKKNHWIGSSGQKDDSIDALKLAQLARGGYIKEIHHPVGQRRRFRELMIAYHDTVRSTTRIKNKIKAKFRQNGIQCTGITVYSETHREEWQGKLPQETTLLLILDGLWRQLEQSEQTEKELLAAARAQAKHYPEIKHFEALPGIGFISAATISAMLETPYRFADKKKVWMYAGLGIMTRSSGGKTYSEKLSTDYNRLLKYTLKQTAEAAIQAKDNPFRRKYLDMTLLHGIAPHRAKLTIARDMLATMWAMWRKGEKYNPEIREKAACKRG

SEQ ID NO: 256566 - protein, 368 aa, unidentified
MKQQTSAATETKIKGRNIIDFTGKTIYVGIDVHEKDYQVAKVFDGICLGNHRMAASHQMLIDHLNSRYPGATFKCVYESCAWGFTLQRALSRAGIECIVVHAADVSSSDKEKKRKTDKVDALKLARNLASGDLTGIHVPDEDLQKERNLIRFRKKLVGDLNRSKNRLKSLLKYQGIKIPEHLGKKNNWSYNFMNWVEQEANKDVLLKDTLLLMLEEIKFLRQLLLKTERALRKLMKERHNEKATLLMTAPGIGRTIAMQFVLEVGDIKRFHSFDALNDLIGFCPDTDSSGDMQRDRGITSRRHKQLRSALIEAAWTAIRIDPALMDAYQKLTKRMQGKYAIIRIARKLLRRMRTMLLTGQPYQIGVAA

SEQ ID NO: 256567 - protein, 427 aa, unidentified
MKKIKIDYLSTLFVGIDIGSRTNVISAINFDQDFLVRMVPVANAQGGAEQMEEMVAQVLSQHHEFRAVIIGLESTGFYGVHIANYLSTSEKLAPFSTKVYCLNPNEVKQYKKSFNSLDKNDGIDSFVIADFARVGRIHTEPWRGAQYLALQRLTRHRLHITECIAREKTYMLNNIFLKFSEFAMLNKDEHPFSDKYGATAEAVLTDYLSTEDIVDASVDELVAFISSKSRGRIADPERTTYLLQKAAQDSYRLDQCLYEPLTVSIGCSFNCISAFEKELKAINAAIQRAVKGLNPTEYQILTSVPGIGPVYASGILAELGTIKCFKSNDALAKYCGIVWKENQSGEFEAEDTPMNKAGNRYLRYYMIEAAGSVMQHCPEYKAFYDKKFAEVRTHQHKRALALTSRKLIRMLFGLLANGKLYSVEKSR

SEQ ID NO: 256568 - protein, 530 aa, unidentified
MVTRSKKRKSTGAKKRFIGKPTGQIQERVQAAGPEHFGIVAVDCAKRRSKWMLCNFYGQVIVEPTTVEHTTGGLRAMTQLVAAACQAEGLHDTIVAVEMTGIYHKPVQRAFRQAKFDTRIVHPFASNHYRRPLHPDDKTDDHDLEAIFQAAVNGYGLATLPVSEVYQSLQAISRHRHNLVKQRSRLMVQMRRLLHQTMPGFADLFEDDKLFHKSIALPVALNFSSAATIRDAGVAGIARHLANTNVRFQTRTIERMVAWAGAAAESSELAPMYTRQWQQLNEVRRLFEEQIAAAERESAGFLVKTPYVLLLSVTGINVVSAARLAGEAGPIEHYASARAINGRAGLYPSRYQSDEVDHADGALVRQCNRKLRGAAMLVAENLIKCHPHYRGLSALWAQQKVDPRDRRCRIANRAMRMVYQLVGGRQVWRGRGVDCEYLLAKLQEFHRLHHTPTSQTMGDLNEAFAWLPKSAYAAEAKPLAALARQKQRGPQRLGDLLIPLLLRLGISREELGVPSEEKVESNTSEARSSS

SEQ ID NO: 256569 - protein, 344 aa, unidentified
MANHAITAVDIAKNIFELAVSIQPGRVKERERLPRKSFLRFFATRPQTTVVMEACGSAHYWAREIEKMGHQVVLLPPSLVAPYRKRNKTDRADAKALLEAYRDEDIHPVPIKSVYQQTLTSLHRARSKWMQARTATINTVRGLLRELGVFIPVGARNVVPSTHAYIGDAESDCPDALRPVLLNMCEEIRALEASIRRTEGQLEALAKEIPIVAQLRTIPGIGLITATALVAFVGDAKRFKNGRRFASYLGLTPKENSSGGRRRLGRISKEGNPYLRHLLIHCARSMMRAAGTKTELDRLRSWALDKAASRGPHKGAAAVANKLARTAWAIWAKNTTYCPLPAPA

SEQ ID NO: 256570 - protein, 369 aa, unidentified
MKKLYIGIDAHKNTNSIALAFNDMKTPEFYGKISADLDRTLTALRKVLKKYELEKSEVKICYEAGPTGFVLARRLIGLNFDCEVIAPSLIPKKSGERKKTDKRDARKLAGLSRAGELTAVHIPDVEDEVIRDVCRGRSDAVQALARTKKQLKSFLLRNGYHYSGKANWSEPHMRYLRELVMPAPAQKMILEEYIQRMDALSGQIKRIEDQMRQLLETWKRRPLVEGLMGMRGFQMVAAMVIVSEIGHFGRFKHPKQLMAYLGLVPSEESSGDTRRMGSITKSGNAHARWMLIESAGHYDMPPKISKALSKRQEGLSKEVKAVSWHAQNRLNKRWCKLAFRGVHRNKICTAIARELSSYIWDMIAHASGV

SEQ ID NO: 256571 - protein, 483 aa, unidentified
MSQNKSPESPSRKMHRKIRNAQQRVKKVSAKATAAAATGAKLVPAPEVKNPHAAAIDVHSDNHVVCVGPDQVQTFGAYTVDLHALADHLKQYGVTTVVLESTGVYWVPLFELLESRGFEVFLIEPSQARHCGARPKTDVADCQWLQRLHTYGLLRPSFRPPESVLALRGYWRQRQMQVRYAASHVQHIQKALEQMNVKLTEVAADIMGLTGRRIIEAILRGERDARLLASLRDPTCKKSEEEYAKALQGTWRPEHLFALKQAYALYRFHHEQITECDQRVAEELARLPNRAADKPFQPRPRRCGRKSNEVRFAATEPLFQALGVDLTLIDGIEINTALMILAEIGVDVSRFPTEKHFASWLRLCPQLEESNHTRKKRSPRRGKNRLAQALRMAAQAVSRTKTPLAVFYHRIKGRLGGKGAITATAHKLAVLVYRLLKHGADYVRQSMEEYAAKLKEQMERSLRRKAAQLGYDLVPKTPAAQPS

SEQ ID NO: 256572 - protein, 338 aa, unidentified
MNIVFLGIDLAKNVFQLCGLNQAGKPVYTKRTGRKELLQTLANIPACLIGIEASTGAFYWQREFEKLGHKVKVISPQYVKPFVRGQKNDGNNAQAIAVALMQPTMQFVPPKSPEQQDIQALHRARQRIINHRTATVCQIRGLLLDRGIPIGSAVSRARRAIPLILEDAENGLRSRMRRTIAELYDLFNDLERRIHFFDKEIETVFRQSEACQRIARVKGIDPKTATAVVAAIGKGTEFKNGRHFAAWLGLVPRQHSSGDRQVLMNMTKKGDKHLRTLFIHGARAVVRVATNNNDGHMNQWVNQLKERCGFNKTTVAVANKNARIIWSMLRNETEYQVV

SEQ ID NO: 256573 - protein, 397 aa, unidentified
MFYLGIDIAKHKHYASIIDQTGKPITKPFPFQNHKEGGQALLNWMYRYIESPTEIMIGMEATGHYWLAIYSFLLDHGFSVVVLNPIQTNAWRKGTEIRKRKTDAIDATMIADIIRFGRFVETPLVDEKMFALKQMSRFRNALVSNMSDLKRKALVVLDQTFPEYQSIFSDVFGKTSSQILLEYSSPSDYEQISIDDLTQIIEQTSRNRLGKKTANKLMELASNSFGVTFCKNAFSFQLKMLMEQIRFIEDQIKECEEEMSQLLIDLDTPIMTIPGVGPILGATILSEIGDIHRFDKPSKLVAYAGIDASVSQSGQFESSGTSISKRGSSHLRRALFQAAITAHKHDPVLKAFYEKKRKQGKHYYVCIGAVARKLCYIIYAILKSNKPYEIPPHTTET

SEQ ID NO: 256574 - protein, 343 aa, unidentified
MTVLFYLGVDVSKSSLAVTLIDQQEKIIWSNKNIPNSQGGFKKLVEQVLKHAIKKSDGQDFVIAAGMEATGVYGEQLAYFLHDNNPGRIIPYVLNPAVVRSYAKACMEANKNDPTDARVIASFLSVALTRGQVSPWKVPGVEERTLRALSRRRQELVHLLTSEKNRLEKLNNMAFPPDEVVKSVEEHIQYLEAALTNIAGDIRDHIDTYPTLQRNAELLRSIPGIGEVSVATVLGEAGDISKFDGVKQFTSFVGIAPVEYTSGSSVNKRSKISKRGNARIRHCLYMATMIAVRVNPVLREFYKRLLERGKGKKVALIASMRKLLHLIWGVLKSQSIFEPQYSN

SEQ ID NO: 256575 - protein, 418 aa, unidentified
MTKSKSQKIKSVNKETMIVTLDIGKGSHYGYFRASDGQDVEPFVFYNTHDSFHSFWKKLSRFKKAHGCKQVVVGFESTGPYAEPITHFLKQRPVTLVQINPMHSKRVRELTGNSPNKTDRKDPRVIADVIMLGHSLRVVIPHGSSAHLRRLTQARERAIRDRTAMLNQLQHLLFVIFPEFLKVIKNISCKTGLYLLRHYPSRQAIAALGEEKLGRIIKQVSRAKLGQGHARELFQSAQRSVGINEGQESIVEEIGHLVDTIGRENDFIERLECQMRSHLEQIPYSSCLLSLPGVGLITVAGLIGEVGDFRQYSTVAEITKLAGLDLFEVSSGKHKGRRRISKRGRPLMRKLLYFAAINAVKSTGTMHRPYTRMVERGMPKTKALVAISRKLLRVMYALARDQSMYMENFASHRYQCAA

SEQ ID NO: 256576 - protein, 429 aa, unidentified
MARVRGADPAACLVVAVDVGKWSAMALVADHHGEIVVAPFEFRLDEPGVRCLLSVIERQVTEHEAVLCRVGVESAGHYHRTVVARLWAAGVEVVELNPAQVKEARAQQLFRRLKSDERDLGAMAELLIRGAGRLPQVRDDAMATQVAWVGHRRRKVAAHVALSNQIQGHLDLVFPGLGACFGGILATKAGRVLVRDIADPDRMRRLGVEGLVGFVARRGVQLRRPKAEQLLEAARVALRLPASERAPVAALLAADVALLDALDTEIDRAEAALAGVLGETPAGVLTSLPGVGIVRASAYGAAIGDPDRFPNAAAAYRASGLVPAEYSSAGRSRGGQHISREGSVELRTAIIELGRGLAGHEADFAAYRRRLRSDGKRPMVAAVAVGHRAHRLAFAMLRTQEPYDPHRWAAAVADGPVMAKTGGRPTRTT

SEQ ID NO: 256577 - protein, 374 aa, unidentified
MTMMQHRQIRYIGLDVHKVSITVAIAEESGAPTSYGSIANDPSAIRKLMTRLGGPEVELRVAYEAGPTGYALYRQLAKMAIDCIVVAPSLIPKQPGNKVKTDRRDALKLARLLRSGDLTPVWVPDEAHEALRSLVRARADAKADQLRAKHRLSKLLLRQGCRPPSGVRTWSQRHVQWLRQLEFEHLPDRVVFADYLAEVTAAGERIKRLEAALYQCAQSSSQVAVIRALEAFRGIGFLSAVTLVAEAGDLRRFRTAPQFMAYAGLVPSESSSGGKQHRGSITKTGNSLLRHVLGETAHHARHAPRVSSKLKQRQADVPREIVELAWRAQLRLHARYRHLSSRIGSLKALTAIARELAGFIWAAGQVLQEVPTAA

SEQ ID NO: 256578 - protein, 342 aa, unidentified
MFYIGDDVSEKSSYIYVTDRGGKKIEGQEIPTDKDGYRQYFKKWVGKQVKVAVEAGGHSRWIHDTLKKLGISVYIVNPNKVKLIAKNKKKTDKVDAKFLAKLLRIDELPERVYVAEGESRELRDLLGSRHQLVTSTTGIMNHLRGMLRQEGIKLKAKAFTDESTFSRLLLNKSVPKHLHPIITSYEKTIAELRKQREALDDVIAEYGNKDIELLKSVPGIGEVASKTAYAAISTIKRFKRAKQLTSYCGLVPSVFSSGERAAYGHITREGRSEMRHVAVQSVRAILRSTNSESKPLRKWYERLARRRGSKTAVVALARKLIEIIFYVLRDRRPYDAQLLYVH

SEQ ID NO: 256579 - protein, 454 aa, unidentified
MEVIYERCAGLDVHKKTVVGCRVHSRGGGHDERQTRSFGTTTRELLELMDWLTEWGCTHVAMESTGEYWKPVYNILEGHLEILLVNAWHIKAVPGRKTDVADAEWIAELLRHGLLRASFVPPRPQRELRDLTRQRSTLVRERASVFNRVQKVLEGANIKLASVTSTMTGTSVRDMLAAMVAGESDPVVLAELARGRLRAKRPALEQALTGRMNAHYRFLLDSHLRHIDFLSEQVERYSAEIAACMEQLNAHAEPPDGPASGSPSGTGEMLPQPPNAGMRKGDALTAAQAVALLDTIPGIDRWQAEVILAEIGLDMGRFPTAAHLASWAGLAPGNNESAGKRRSGKTRPGNPTLSKTLVLAAHAAARGKNTYLAAQYHRLAARRGKNRAIVAVAHSILVIVYHLLSRQEPFCELGGNYFDERKRESVTNRLVRRLEKLGYDVALASKPSSASAAA

SEQ ID NO: 256580 - protein, 345 aa, unidentified
MQTMYYIGLDVHKRTISYCVKDASGRVYAEGSVPATRCDLDRWMKTLPQPWTAAMEATMFTGWIYDYLQPHAAALKVAHPLMLRAIAAAKKKNDRIDANKICDCLRCDFLPECYMASTAIRERRRTLRYRNLLVRQMVQMKNKTGMLLMEAGVSYNKQRLHQAGYFRELLATNPDINEGLSSLLRLCRETMVRLQKTESALVRSLERDSLLMDRVERLMTIPAVGPITSLTWALEVGDVQRFSSIKKAISYCGLCGAEKSSANTVQRTPLSKQRNKHLQTTLIEAAKMAPRNSSTLAMLYDKEKQKGNANRATLAVARKLVAYLMAVDRGQRNFQATETMNCVAA

SEQ ID NO: 256581 - protein, 342 aa, unidentified
MTNFNTKYQSVCGIDIAKNVIQIYQVNQDGECKNFQVKRKEFLQLFENREPSLIGMEACGGSQYWARELQKLGHTVTLMAPSAVKPYVSGFKSDRKDAIGIFNAMLAGVRKVAVKTEAVTDLATLLGIRARRIRARTAKVNMVRGYLMEYGIVMARGLRQFKNSIADSLLQLERAQASNMVKEEFKFLVDEVDKETEAILRLDREINSLAKQCKNFDHFLTAPGVGLITAATMCVKLADPQVFKNGRQFAAYIGLVPQHYGSGGKNVNTTIPIKCNKELRGLLVQCAQSIRRTKNKSSWVTQIEDRKPNSVATIAVANRLARRLWAIASKGEDWKRMDINFG

SEQ ID NO: 256582 - protein, 415 aa, unidentified
MEVLYPRCAGLDVHKDSVVAGTRLADGGPARTEARTFDTTTPGLLALSAWLAEQGCTHVAMEATGVYWKPVWHVLSDGEFTLILANAAHVRNVPGRKTDVADALWLADLLAHGLIRPSFVPEAPTQELRALLRTRKQLVREQASHVQRIQKTLEDANLKLGSVLTQIMGVSGRAILQALIGGEVDPDKLLTLVQRGVKASPEKLRAALQGRITERHRFLLRLHLRQVDALDAAIAEIDAEVDHDLDPFRDAVRLLRGIPGVSDLTAQVIVSEIGIDMARFPTAGHLISWAGLCPRNDESAGKRRSTRLRKGAPWLKTTLVQCAWAAARKKESYLQAQFRRLRHRRGPKKAICAVAASILTAAYHMLRDGTLYHELGADHFRRASPQDQAIRLARQIAKLGFTCTLAPLEETAVSV

SEQ ID NO: 256583 - protein, 371 aa, unidentified
MLLPRQRLKLARGAKDEEHVMSQQINARVAVVGIDIGKNSFHVVGQDTRGEIVLRQKWSRSQVEARFANMSPCLIGMEACVGAHHLSRRLKALGHNARLMPAKYVRPYSKGQKNDFRDAEAIAEAVQRPTMKFVAMKTADQLDLQALHRVRERLVSQRTGTIDQIRAFLLERGIAVRQGQHSLRAELPRILATPSDTLSPRIVRVIEALALDLRLFDQRIEGLSSEIEELAKQDVGCQRLISVPGIGPIISSAMVAAIGTGDAFAKGRDFAAWLGLVPKQISTGDRTILGKISKRGNRYLRVLFVQAAWVVLVKVKPARWESHGLKSWIEAAKKRLQRNVLAIALANKLARIAWSVLARGRAFEASKLQAA

SEQ ID NO: 256584 - protein, 337 aa, unidentified
MKYIGLDVHKINTTACVIAAGGKVVKSLEVRSSESGLQLIHDYMKTAEYCVLMESSTYSCRTYRFFESLGVETYVVHAKSLKIVTQSDKKTDKKDAEAIGRYLRLWKRGEVELSMSYIPTQEECTLKDICRYKEEISSKLGDEVRRIRSHMARNLEELPGQYANLSTEKARGYIRKTWPKDLALMRRLNQYTSLLGESESVKREIMSKLPGDRNVELLETIPGIARQTGVQIMSMIIDISRFGSPGELCSYFGMVPRVRDSGGKEKHGRMTKNGDKMMRSIMERVTLSHMQYCDSSVKEFYLRKEKEMGKKKALISASRKMLAVIWSVLTNDRPFHA

SEQ ID NO: 256585 - protein, 356 aa, unidentified
MSVYVGIDVHRKRSQVAVINEVGEVLANRNVPNGVQPILSVLGGLPPGTPAAFEAAFGWGWLVEMLEDYGFDPHLVHPLQCKAIASARLKNDKVDAAILAQLLRADLLPEAWIAPLPVRQLRALLRHRAQLVRLRTLLRNRIHAVLADHGHDRAGGCWSGPGRAWLASLPLPAISREVIEDDLALIDALQVPIDRLDVEVRQRARAEPAVKILTQLPGVGPFTALVILAEVGDISRFGSARKLAAWAGLTPTVRGSDRTVRHGHISKQGSAWLRWILCEAAQTAKRHPGFATTYQAIARRRGKKIATTAIARRLLTRAYHLLTDAASGVTPTSREESPAPGEPANPHETATPRSMT

SEQ ID NO: 256586 - protein, 453 aa, unidentified
MTKRRTGGHPDLKMVNPNAAAIDIGSTMHMAAVNPDTDIRPVRAFGTFTQDLHDLAAWFRSCGVTSVAMESTGVYWIPAFEILEAHGFEVILVNARYAKNVPGRKTDVSDAGWLRQLHSYGLLRGSFRPEAEIATLRAYMRQRERLTEYAAAHIQHMQKALMEMNLQLHHVVSDITGATGMRIIRAIVGGERDPEVLAAFRDVRCKSSRDTIKAALVGNDREEHVFALTQSLELYDFYKAQIAACDRRLEAAIAVLTVRADGDLAPLPKARIKGKQHNAPSFDVRAALYGVLGTDLTQIHGLGPSLALKLVAECGTDLHAWKSAKHFTSWLCLAPGNKISGGKLLSSRTRRSSSRAAALLRLAAVTIGKSDTALGAFYRRLSSRIGKQKAVTATARKIAVLFYNAIRHGMTYQDQGAAAYDERHRQRVLSNLQRRAKTMGYALAPIPEAAGVS

SEQ ID NO: 256587 - protein, 297 aa, unidentified
MRFYNQQHKFYCGIDLQGKTKVHQNLKTDPELLFDIVFPFLEDVVICVECMFSWYWVADFCVEHMFPFVLGHALYMKAIHGGKTKNDKIDSYKIAKLLRGGTLPMAYPYPAEMRATRDLLRRRTYMVRQCGLLLGHIQNTNTQYNLPAFGKKICRKYNRDGVSERFDEPAVKASVDADLAMIDAFNKQIKQLEWQIEKAARQHNYHDLYLLRSIPGVGQVLALVILYEVQDIKRFSSVQRFSSYSRLIRPKKESDGKWAGKSNKGKALGIFTHKLGRTVYFMLKNKKAFDMKQFFSH

SEQ ID NO: 256588 - protein, 408 aa, unidentified
MVVQAVPVTPTTVVVAVDVGKTEFAFSVTDAARTALLKPRTGCPMTGPSLAQVIVDIGKVLPAGAVVKVGIEAAGHYHRPLLNAAWPVGWEVLELNPGHVTEQRRVLGKRTIKTDVIDLQAMTELLLAGRGQPVRDRSLVLGELTAWSAHRTGRVVLRTATKNQLLGHLDRTFPGLTLALPDVLATKVGRLVAAEFADPARLAALGSTRFVRFGATRGLQIRRPVADRLVQAARDALPTADAAVARAVLAADLTLLGDLDAQVDQATDRLARLLPGSPYAPLLTVPGWAAVRAGNYGGALGDPARFDNHRQVYRTAGLNPIQYESAGKRRDSVISREGSVELRRALIDLGVGLWLNDPAAKAYGAQLRARGKKGLVIGCAMAHRANRIAFALVRDQSAYDPSRWIRED

SEQ ID NO: 256589 - protein, 337 aa, unidentified
MTLYCGIDLHANNSVISVIDDHDNVVFEKRHPNDLPPIRDVLEPFRDALLACVVESTYNWYWLVDGLMDAGFEVRLAHTGAIPQYAGIKHSNDQTDARHLAHLLRLGILPQGHIQPREQRAVRDLLRRRLLLVRQKMLYHLSLQSLIVRHTGERLSANQVKALDTDTIADKLADPIRLGGQLTHLARCWHERAIAMLEEEVLKQLKPRRDYQLLSSIPGVGKILASTIALETGSIERFPGPGHYASYARCVNTERVSNGKLKGRGNKRNGNKYLAWAFMEAAHYAAIWSPEIKRFYQKRQAKRHLLVAKKTVANKLAKASYHMLTRQEPFDVTRAFG

SEQ ID NO: 256590 - protein, 347 aa, unidentified
MTEAYDGRQVVGMDLHRRRSVLVRMTGDGRKLETVRIENSPRALRAVLARAGKNPRVVIEATYGWYWAVDVLEESGAEVHLAHPLGVKAYSYRRVKNDERDASDLADLLRMGRLPEAWIAPPEIRELREVTRYRHQLVKARTSVKDQVHGVLAKLGIPVTCTDIFGVHGQAWLDELPMPQPYAGKVASLRQLAGTLTGEITLLDKVTADLLAGHEGYAAIQQLPGIGPVLAAVIVAEIGDIRRFPGPGQLASWAGLTPRHYESDTKVIRGHVTKQGSRVLRWAVVEAIQRQPDGTRPRQVKDAIIARRGKEARNIAKVAAARELLTLVFYGMRDGHVRRALQRGQAA

SEQ ID NO: 256591 - protein, 403 aa, unidentified
MNNVAGIDVSKGKSMVSVLRPFGEVVAKPFSIGHTGSELKELADYLKSLDGETRVVMEHTGRYYEPVARFLHDEGVFVSAVNPKLIKDYGNNTLRKVKTDKADSRKIARYGIDNWAELRQHTPMDTIRMQLKTLNRQQSLYTKTKTMMKNNLIALLDQTYPGVNALFDSPVREDGSQKWVDFATTFWHVDCVRNMSLTAFAERYRKWCKRHGYNFSQSKAVEVHTGAQDLIAMLPKDALTKTMVRQAIDALNAVSASLERLKAEMQALAAQLPEYPVVMAMHGVGDSLGPQLMAELGDVARFTHRNAITAFAGVDPGADQSGTHEAKSTRVSKSGPPELRRALFLVMDCLLKTQPQDDPVYRFMDKKRAEGKPYLVYMTAGANKFLRIYYGRVKEYLASLEGN

SEQ ID NO: 256592 - protein, 352 aa, unidentified
MPMLEGMIDHVIGVDTHRDTHAAAVLHPNGGVRAHVEVTADQPGHARLLAIATRRAPGRRVWALEGTGSYGAGLATFLSAQGEWVVEIDRPKRSRGRTGAKSDPLDAIRAGREALARDQLASPRQRGQREALRVLHTTRSQILQVGADARRHLKALIVTAPDPLRQALRGRPWLQQARACAALQAAPTDSIEVRATVQAMRLTAQRLLGAYAEAADLKQQLHTLITTMAPGLLDQPGVGPISAAQVLLAWSHPGRVRSEAAFAMLAGAAPIEASSGQVVRHRLNRGGDRQLNRALHTIVMIRQLQHPATRAYTARRTGQGKSPREIRRCLKRMIARQLFRLLERTATNQIAA

SEQ ID NO: 256593 - protein, 397 aa, unidentified
MYIVGIDIAKRKHEAAVIDGEGTVIIKPFSFTNNCSGYNRLLAMLAKAKLPLDEVSFAMEATGHYWLALFTRLQKEGFRVQVINPVQTNSIRSFYIRQAKTDPRDALLIAEVIRFGHFSESTLHPENIYELRELCRGRHAIVSMQADVKRKVVALLDQVFPEYETAFTNMFSDTSMAILQTCPTPKELSEMPLEELCHLIEVPSHKRFRMAKAQELQALARNSFGFAMAGDVFSTMIRLYAKHLVFLKQQVQEMDRKIAEIMDTLDTLITTITGIGPTLGAYILSEIGDISRFSSAAKLAAYAGIDPTMRQSGEYNGVRNRMSKRGSPYLRHAIWLAASSAVLHDPALKLYFQKKRDEGKPYMASVGHACRKMVSIIYAVMRDNKAYTPCIPNEISA

SEQ ID NO: 256594 - protein, 318 aa, unidentified
MPPAASAFVGVDVAKTELVIAIRPSGDRWTVANDDDGVRTLLKRLRQHSAALVVLEATGGYERAVVAALAAARLPVVVANPRQVRDFARATGQLAKTDRIDADMLALFGERVRPEPRALPDEAALAFDALLTRRRQILGMIVAERNRLEHALPAVRRGITQHIHWLERQLQDVDRDLDTTIKASPVWRAKDDLLRSAPGVGPILSRTLIGELPELGTLPRKQIAALVGVAPLARDSGTLKGKRLVWGGRAPVRAALFMAALVGTRCNPVIRVFYARLRAAGKPPKVALTACMRKLLTILNAMVRTNTTWRHLAPPETP

SEQ ID NO: 256595 - protein, 353 aa, unidentified
MDKYIGLDMDCKKTVGYTIVPGQSESSATFGPDIESIRRYFRQERKGGYQLHAAFEISGQAGFLYDALLDEVDSLHVANPTKMTWIYRTAKKNDRIDARKMAVLLSINELPEVYMPSREVRQWRQTILHRQKVVQKVGQVKNRLRAALKSEGYGKPAHRGSWWKHANRVWMEQLCDDCVDIGSLWRLQVQNLLDELSLLETQRDRITKYLDGYLDKQSAAKLLMSIPGVGPRTAEAVLAYTDGIERFSNYKKYCAYFGVTPKLDESGSFRRLGHISKQGPAVVRWLLCESGWKVVRHCPGLRAFYERVMAGQTSRKKIAIIALTRKLLCIMRAMLMTGELFNEKLVFDVLKAA

SEQ ID NO: 256596 - protein, 346 aa, unidentified
MVVLGIDAHKRTHTVVAVDEAGRQLGVRVTQSTSTAAHLELVRWADRFGPGRRWAVEDCRHLSRRLEADLLAAGEQIVRVPPKLMAHARDAARGYGKSDPIDALAVARAALREPGLPVARLDGPERELRLLADHREDLVGERTRAICRLRWHLHELDPDWDPAPRSLKRRKHLTAAAARLAGLDGMVARIAADLTARITALTADIDALEKEITTRVQVLAPSLLTLPGAAELTAAKIVAQTAGVDRFRSKDAYARHNGTAPLPAWSGNRVRHRLARTGNRQLNCAIHRIAVTQKRCHPDAQAYLKNRAAAGDTPTEALRALKRRISDAVYRRLKADAADTPSSQAT

SEQ ID NO: 256597 - protein, 439 aa, unidentified
MAKETTFETVHENVAGIDIGAEQIFVSPDGQEVVTFETFTSSYYACAIYLREKGIKKVAMEATGVYWIALYFLLEELGMLVCLVNPKETKQAKGRKTDVRDCQWIQKLFAAGILRHSFIPQGKFMELRHLVRERLDIISMGSTYVNKMQKCLELMNIKLPEVLSQIHGTSGINMIKAILSGSRDAAYLLSLCDDRIQKYKGEKVIKALEGRYNDTYLFMLEQNLKLWEIHQQQIKTIDKEIAHLLDELSEDKEEVAAGKAKPIRHHAPKIKGLHATMARLYGVDLTSIPGINDYTALRLIGETGTDMSRFATAKNFVNWASLSPKSHRSGKTKKNVRGMPCNVAGQIFKQCAQSLLKSKDSAIGSFMRKLRGRKDSGIAIKAGARKLAIAYYNTLTKGTAYVEEGTRRYEEQLKKREMASLKRLAKKHNLQLIENQNAA

SEQ ID NO: 256598 - protein, 387 aa, unidentified
MEVRIENTPSARTNNDPVHCFVAIELSKSSWVVGFQTPLSKQTSRYQVKACDAEPLLELIERIRTRVAREVGRPVEVTSCYEAGYDGFWLHRVLEAHGIHNHVLDPASLQVSRRARRPKTDRIDADRMVRALIRHLRGEPEACSVVRVPSPEQEDARRLHRERRRLITERVGHVNRIKGLCATQGIYNYEPLRSDRLERLDKLRTGDGRALPARFKSEIVREIKRLEVVLEMISTVEAERDAILKDKKSTHLNADKIKMLAKLKAIGAEFSTTLVGEVFYREFANRRQLGSYVGLASSPFCSGSLDRDQGISKAGNSKARAMMIELAWTWLRYQPDSALSRWFQARVGNLKGRPRRIAIVAMARKLLVALWRYLQTGVIPTGAELKA

SEQ ID NO: 256599 - protein, 339 aa, unidentified
MRLYAGIDLHANSHYLGIIDEQGKVVFKHKMVNDLRQTLSVLETFRSELKGVVVESTFNWYWLVDGLMDHGYRVHLANPAAIQQYAGLKHLDDERDAIWLANLLRLRILPEGYIYPKRERSLRDLLRKRLQLVRHRTSHILSIQNIVSRSLGTRMRGNEVKGLDEEQVAELFKEEHLYLAVRSSVGVMRYLGEKIKEIEGVVKGWVKLRQEFEKLLTLPGVGQILGLTIMLEVGDIGRFPEVGNYASYCRCVRSTRISNGKLKGEGNRKNGNKYLAWAYVEAAHFAIRDYLEVHRYYHRKVSETNGVVAIKALSHKLARASYYIMRDQVAYDPNKLFHY

SEQ ID NO: 256600 - protein, 328 aa, unidentified
MQAILHNCCGLDVHKDTIVACIIKTRNPLFYESGAEDMTKEMRAFKTFQDDLAQLRNWLELNNCCHVAMESTGVYWCPVYDMLENACNGKMELIVTNARHMRNVPGKKTDIKDAEWIASLLRAGLLRGSFIPPLEVRELRQLTRYRKNVVEDISAQKNRIEKSLQQAGFKLSTFLTDVFGVSGRNLIDILIHKGKLTHTDVEHATRVSAAKKAEIKLAINGQLSGHQRQFLQLQIKHLDELLAHLSTVEQSITQLSSPFEDEIARLDTIPGIGKTSATAIIAEIGTDMSKFPTAEHFCSWAGVVPGDNMSAGKKKVPVSPLATPTSKA

SEQ ID NO: 256601 - protein, 343 aa, unidentified
MDKNTMIGVDLAKNIFQRHIATMTGKVLSKKKLSRDRLKEFMKSHEPAIVVLEACGSAHYWAETLGDMGHDVKLIAPQYVKPFVKRQKNDAADAEAIVVAAQRPEMRFVAAKTKEQRAKGVLFRSRERLVHQRTEQVNALRAVLYEYGYVIPQGIASISRIEDILARPNCDLPDLVCDECRHLLEQISSNTKLINAKTDLIKQLAKQTNMARQLQTIPGVGPMTAMAIDAFAPPMDLFKNGRGLSAWLGLVPRQYSSGGKERLGRVSKAGQADIRRLLIIGAMSRLTWLGRKSIPQGSWLARMLARKPRMVVAIALANKMARTIWAMLTKETDYRDPMISATA

SEQ ID NO: 256602 - protein, 280 aa, unidentified
MPLQPCFVGIDVSQASLDMAVRPTAEAWQVSNDEAGITTLVPQLQALAPTLIVLEATGGYHGLVTAALATASLPVVVVNPRQVRAFAQAGGILAKTDRIDARVIAHFAEAVRPTPRPLPDAATQELRALVLRRRQVSAMLTAERNRLGTAPVRIQPAIQQHIAWLEGQLAALNDDLTATIEGSAVWQAKADVLRSIPGVGPVLSRTMLAQVPELGTVGHKQVAALIGGAPFHRDSGTRRGRRTVSGGRGEVRAVLYMGTLVATKHNPVIKAFYTRLARRR

SEQ ID NO: 256603 - protein, 343 aa, unidentified
MDHFAGLDVSVKETSICIVDDTGKIVREVKAASEPQALLKVLGNPTYRFKRIGLEAGPLSQWLFSGLAEAGLPVVCVETRHMQAVLKAQINKTDRNDARGIAQMIRAGLYRPVHVKTLRSQKLRMLLTHRKLLQSKAIAIENDLRGTLRNFGLKVGMVGKVRFEARIKELVESLPDLAELVEPLLIVRRTLREQIVILHRRLLAIVRDDEVCQRLMTTPGVGPVVALTYRATVDVPARFRKSKAVGAVFGLTCARYQSGEIDWSGRISRCGDEMMRVMLYEAAQSMMRSKKWSWLKAWAMQIARRRGMKKAIVALARRLAVIMHRIWVDGTEFRWTREHAAAA

SEQ ID NO: 256604 - protein, 412 aa, unidentified
MPAYVGLDIGKQSHMVCAVSDQADACPSGQEETVLHPFSVENSLSGVELFTTKVKALAPLDQILVGMEATGHYWQCFFLQLQASGFSVCLINPYQTNHFAKTNLKRAKTDKVDALTIARFLAKAKPSPTQLPEELIMVQRELSRLRDSLVKNRSALSNQFQGVLDRAFPEFVRIIKDPTSETALAILQRYPSASALKKAKLGKIQNITYGKKRHRIGPALASALKNQAKQSIATDYAHTAYEIEIHSLIAQIRLLNEQILEVEKKLKEQFSGLNLDNLLSIGGLGIISVTSLVAEIGDIHKFSSPKKLVAHLGVCPKESQSGKYRNPNPRMSKMGNSRVRAVLYRACISAIRFNPVIREFYLRLLAKGKPKKLAICACMRKMIHLFWAIWKYQRTFDANFAQMCTCEASIRK

SEQ ID NO: 256605 - protein, 310 aa, unidentified
MDQRFVGIDVSQDQLEVHVRPTAESWRVAADDAGVAALLDRLRPLGATLIVLEATGGYETMAAVALAEAGLPLAIVNPRQIRDFARATGQLAKTDALDARIIAAFAEAVRPPVRPVPDEQARTLGELVARRRQLVEMLGAELNRRRATRQPALRKQLDRHVAWLQAAVTQLDQDLQRLIRSTPVWRETEDLLRSVPGVGNVTACTLIAELPELGLLNRRAIAALVGVAPFARDSGTLRGRRMIVGGRAAVRRTLYMATLTAIRRNPVMTAFYSRLRGTGRPAKVAQTAAMRKLIVMLNAILRDRRPWQPA

SEQ ID NO: 256606 - protein, 375 aa, unidentified
MQAAQMTAYEAKPVLYMAMELSHRNWKLAFSNGQRMRRKSIEARDCRSLLAQISLAKQKLKLAADAAVVCCFEAGRDGHWLYRYLESEGIEALEVDSSSIETARGRKHVKTDRVDVEKLLDLLLRERLGFRRSFRVVRVPDEAAEAGQRLHREDEYLLRQRTRIHNRLKSLLVAQGLVKVSLQGDFGDRLERLRLWHGGGLSDALKAELRRLHAQYVLFDTQIREVAAAYEAELASASPVGRQRCQLERLKAVGPKSSRVLSAEVFAWRRFANTKQVGAMSGLTPTPSQSGDRQTEQGISKAGNRRVRRVMIELAWLWVRWQPNSALTQWFERRFAHGGRRTRRIGIVAVARKLLIALWRYVEHGVIPEGAILKA

SEQ ID NO: 256607 - protein, 343 aa, unidentified
MSTYYYIGLDIHKKTISYCMKAIDGSLIGQGKIEADRKSLGEWVKGLPGPWVGAMEATIFTGWVYDFLKPHAIALKVAHPEMLKAITAAKKKNDRADAEKITDLLRVNLLPECHMLSEEIRELRRILRYRNHIVRTAVNMQNKISGLLMEVGVSYSKKRLHGKKYFRELLERVEEIPPSVKELLKLSRSSYEMFRSFQQRLVETLRTNNLIGDRVHRLMTIPGVGELTALTWVLEIGDSGRFTSSRKAVSYCGLCSAQRESAGKEQRGPISKKRNKHLQTMLIEAAKIAPRWNEQLAMVHERELKKGNRNRATLAVARRLVAYMLAVDKKQADFKLPAEMQAA

SEQ ID NO: 256608 - protein, 335 aa, unidentified
MSLYCGIDLHSNNQVIVVIDDNDKRLLERRVPNELCATLSALEPFREDLLAVAVESTYNWYWLVDGLLDHGYSPRLVNTAAVQQYSGLKYSDDRHDAFWLAHLMRLGILPTGYICPREIRDVRDLLRKRLGLVRERARNLTSVQNILARELGHRVATAKVRGILDGDAKFRPAVRTAIAANLAVIETLDTVISGIQDQALEVIKPTSRHQRLKTISGLGDVLAPTIMLETGEIERFKSVGNYSSYCRVVDSRRESNERKKGEGNKKCGNRYLAWAFSEAAHFAVRYNDRARRFFDRKAARRNRMVAIRAVAHKLARAAFFVQRDRVPFDAARLFG

SEQ ID NO: 256609 - protein, 316 aa, unidentified
MTTAAGYIGIDVAKATLAVGTSTHFLCEVKNTPIGHQELIKRLSTLTVTGVVLEATGVYGQAITEALMLAGYAVAVVQPGCVRHFALSENLHAKTDAIDAMVIARFAESRKLRFAKKTPDILVQLRALIDRRDQIILMRVSEENHLEANRNTAVQKEIKTNIKRLEKQEKEYTKKIAATMAADQTLTAKRQILENESGIGTHTAAVLLAHLPELGTVNRQEIAALVGLAPYNRDSGTMRGKRTIYGGRKRLRRALYMAALSAVRWSDWLKDMYAQLLKRGKCKSVARVACARKLIIRLNSLLAAAYKTTTETTQPA

SEQ ID NO: 256610 - protein, 317 aa, unidentified
MSRIFIGIDVSKDTLEVCVRPTGLRRRFANTATGIADLVAWALPQTPERILLESTGPYQKAAVGALLAEGLPAVVVNARQVRDFAKGLGQLAKTDAVDAAVIAHFGEVVPTTVRPLAAQDLRELRDLYDRRGQLVRMLAAEKNHRHAATGSSPKVLKNIDKHIAYLEVQIADLEDRMDRLVEASAAFKAQNELLQSITGIGPQVSRTLIAYLPELGHRTRQSIAALVGLAPFNDDSGYHVGPRHIRGGRSKVRIGLYQAAIAAIRHCPRMKAFYASLKARGKASKVAIVAVARKILVLANALLRDQVPYSESANSVC

SEQ ID NO: 256611 - protein, 436 aa, unidentified
MRGCRCSMIMGFTKPIEHFNLQRKKVITMNTLYVGIDVSSKSNVIYLMLPNGDKHSNFSVANSHEGSTQLVKRILSALTSHSLDTVLIGLEATSVYGDNLVYFLREDATLAPFNRKIHVLNPKQVKKFHDTYNDLPKNDYVDSFVIADCLRFGRINKEVYMGDYRYKALQNLTRARFFAVQNLVKEKQRFMNVLFKKYSTMTQEKVFSDAFSTTALAVYDEFESAEALANMDLHELTDFIIEKGKNRFPDPDAVAKAIQKAARSSYRLPKTVNDSVNQVLSISITSMKALESQIKEFDKAIIALMELLPNVLISIPGIGPVYSAGIMAEIGDINRFDNQASLAKYAGLAWKQHQSGGFEAEVTRLIPSGNRFLKYYLCEAAFSLVRCDKEYSDFYHLKYKEVNRCQHKRALALTARKFVRLVFRLLKDNRLYCPAK

SEQ ID NO: 256612 - protein, 362 aa, unidentified
MRIIGCDLHARQQTLAMLDTTTGEVVEVTLKHEGDNVREFYSSLPRPVRVGIEATGSMQWFLNLMEELGIECLVGHPAQIRAAAPRKQKNDRRDAELILKMLVEGRFPAIWLPSKELQDLRALLRHRHQWVRMRTRIQNALQSIALANGLRRGTALWSHDGQSRIASLPLAPHTAYRRSELQAMYEKFEAEIEKLNQRVEEQACKRPGARLLMSHPGVGPITALATEVFLGDPTRFADSKALASYVGMIPREYSSGGRQRLGGLSKQGNPLLRFLWGEAGAHAVRKDPELQRFYRRKLVQKGLGKASVAVARKLGIRLWIMLRDQIEYNEFCRRGQKQQKSSDACVGMPETRYGAKSHRPID

SEQ ID NO: 256613 - protein, 339 aa, unidentified
MKQEIVTVGLDLAKSVFQVHAIGSDGAVLIRRKLRRTEVIGFFTDLPSCLVGMEACASAHHWARELIALGHEVRLMPPAYVKPYVKRGKTDAAEAEAICEAVTRPTMRFVAVKTVEQQAVLMLHKSRDLMVRQRTMLINALRGHLAEYGIVTGIGAGGVTAMLKALHERQEELPADARSALHGLAAQLRALTSEIDRLEAQILAWHRADETSRRLATIPGIGPITASAISAAVPDASLFRIGRQFAAWLGLTPRANSSGGKERLGGITKQGDGYLRRLLVVGATAVMRMTRKNADRQPWMAQLLERKPAKIATVALANKTARIAWAVMSRKEVYAAATA

SEQ ID NO: 256614 - protein, 313 aa, unidentified
MSETFVGIDVSKASLDVAVRPSGESWVATNDEAGIGALVARLMKLGTTLVVVEATGGLEIALVAELAAAMPVAVVNPRQVRDFAKATGQLAKTDQIEAAVLARFGEAIRPEPRPLKDEETRHLAALVSRRRQLQSMIVAESNRLAAATKKLHKGIQKHIDWLRRELRLLERDLDDTIKSSPVWREKEDLMRGVKGIGSVSAATMLAEVPELGTLNRKQIAALVGVAPINRDSGTLRGKRAIWGGRATARAVLYMASLSALRSNPAFRAFYRRLLAAGKPKKVAITAVMRKLLVVLNAIVRDRRPWDPQRAVQA

SEQ ID NO: 256615 - protein, 389 aa, unidentified
MIVIGVDTHKRTHALAAVDDGTGRVRSSREIKADEPGHLAAVRWARALDEERVWAIEDCRHVSGRLEQALLAAGERVIRVPPKMMGASRRGERERGKSDEIDALAVARAVVKDGVERFPTAYLDEQAMEIRLLFDHREDLVKERTRMQNRLRWHLLELCPELEAKLPRGSLSNLRELDRLDRRLRRIGSRARVRVAREEVGHIRSLTRQADELERQLLELIRAYRPRLLAEQGCGTLTAALLIGRTAGAERFRSDACFGRQSGTAPIPCSSGQRTKHRLDRGGDRQLNRALHTIAITRAQHDPATKEYLARKQAEGKTTKGALRCLKRYLARRFWRLLTEPPLEPEQPTPVEHAAEPAEPEPIAIRPRPAPRREVHRTITAPIPMTCIT

SEQ ID NO: 256616 - protein, 338 aa, unidentified
MKVYAGIDLHSSNNYIGIIDEQDHRLYQKRLPNNLENILMALEPFKESLEGVVVESTYNWYWMVDGLQEDGYKVHLANPSAIKQYEGLKHTDDKWDSFWLAHMKRLNILPEGYIYPKEERPVRDALRRRLLYVRHRTSHILSLQSAITRNLGYKMSGRDIKKLNESDADELFNEPFLILSAANSISTIHFLGKKIKEIEKAVKSHVKLKPEFKHLLTMPGVGDILGLTIMLEAGDISRFSTVGKYSSYCRCVKSERFSNKKKKGEGNRKNGNKYLSWAYVEAANFAIRFYPEFQSFYKRKKAKTNGIVAIKALSNKLARASYYVMRDQVPYDASKLFR

SEQ ID NO: 256617 - protein, 365 aa, unidentified
MWYTGIDRHREFCVLTTYGPEGPRVKQARVASAALALAPYFAEFPGPHKAVVESTGGWYWLADALAPLDVELALAHATRLQAISAAKVKTDQVDSDVLALLLRADLIPVAHMIGAAQRGPRDLMRARLRLVANCVSAQNSVDRLLETFNLTTVADLGDFYQLQASCHAAQIQLLTQQITTLERALHPHLIPNADVQRLLWIPGLGKVNAFTMYTEIDGIARFPSVRQFFSYSRLVPGADNSGGRTRHRSGSKAGNRYLKLAFSHAGIRAVQYYPEIRAFFKAKARKKPVRIARTLVALELARIVYHVLTKQEAFNGQFKARPLSRQKRAKWPRRASPSVSLAPRGAHALDWEARRRANKASGIVW

SEQ ID NO: 256618 - protein, 349 aa, unidentified
MRFYTKQHRFYCGIDLHARTMYVCIMDHGGQIRLHRNMPATTQALADALGPYRQDLVLAVECIFTWYWVADLCNRIGVEFVLGHALYMKAIHGGKVKNDKIDSQKIAALLRSGMLPMAYVYPQPMRSTRDLLRRRLYLSRQHAQLQTHIQNTNTQYNLPPFEKRIDRRSNRTSIADRFTDPMVRTTVEADIALMDALHEQILTIERQINAQIPEHDPVAVHLLRSIPGVGKILALVIFYEIHDINRFPRVGNFISYARLVKCSHESAGKRKTGKNSKIGNVHLKWAFSEAACLFLRRNERAKLYHKKLVSKYGNAKALSIIAQKLGRSVYSMLKRRTPFDPKRFFETIG

SEQ ID NO: 256619 - protein, 352 aa, unidentified
MKRYSQREGKSKLLFVGIDLHRLRWHITIRVEDVELFSGSIPGQWEALQRLLSRYRGYKIQAVYEAGYFGFWLRDHLVRYGARCVVTPPSLLPQEYGNRVKTDRRDSRKLAHLLAKGLLKEVWVPSEEERYQRQVIRRRRQLIGDRVRTQNRIKAELRFFGIEIPEPTGKWSCAYVTNLHRLQFHDRWIQESFHRLLEQYTFLTEQIKKQTKVLEELAEIPHYKDRVAILRSVPGIGLIAAMELLLELQDVARFRRADQLAAYVGLTPSQYSSADKVRMGRITAIGKNELRGTLVEVAWRLIGKDRAMRKKYERIKTRSGSKRAIIAIARMTLLRTRRMLLDGTPYILGRAA

SEQ ID NO: 256620 - protein, 376 aa, unidentified
MENDSTVYVGLDVHKDSITVAYAPGAGEVELLGKIGTTKTDIDRLCKRLQSKARHLRVVYEAGPCGYGLYRQLLQKGFDCMVCAPSLIPRKPGERVKTDRRDAVKLVRSLRAGDLSEVHVPTVEDEAFRDLARAWMTAKDDLRQARQRLKSFLLTHDVRYVGHADWGPAHRRWVSQYAFVSEWQQFAFEELRRTIEDRLAQCQRVEAALREAVTTWRFYPAVLGLQAMRGVQFTTAVGMLAELGDLSRFDHPRQLMAWLGVTPSEHSSGDKRRRGSITKTGNGYARKLLVEAAWSYRHPARVSADIQRRHEGIPKAIIDRAWDAQIRLCRRYRRLAARGKNANTTVVAIARELSGFIWDIGRLAMSLALPRTTEAT

SEQ ID NO: 256621 - protein, 350 aa, unidentified
MLIIGCDYHPSFQQIAFVDTDTGELQERRLEHREEAEKFYRDLAAQGIEVRVGMEASGHARWFERLLAQLNFELWIGDATEIARKRERKQKTDRQDAQHILKLLLKDDFPKIWVPSWENRDLRQLLWHRHRMVQARTRIMNQLQAVALNEGLRCKKRLWREHGRQQLESFRLAPWASRRRRDLLELLDRLNPTIAELSQAIEHEAEKVPEARCLMTHPGVGPLTALAFVLIIGSADRFQCGKQIAAYLGLVPLEDSSGNRRRLGHITKQGSSMLRFLLVEAAQVTVRSLPEWRSKYFHLMMRRGRKIAKVAMARRLAIRLYWMWRKGWDYEQVKKFGSHAGTLGTGRGVQ

SEQ ID NO: 256622 - protein, 392 aa, unidentified
MRVAIGIDVGKEVHWVSAVDDQGEIRIDRKLDNTPAAIAALIAELKTLEGEITIGLDVVGGIAGLAEAMLAAAGLRLVHVPGLAVNRARQGTRGGESKSDPRDARVIADQVRMRRDLRVIEAESELDLDMRLLVGRRRDLVDEQTRRIGRLRDLLVSIFPSLERAFDYTTKGPLWLVSKYVTPAELRQAGRARIIRHLQHAGSLRNIEALADRALDAARGQTISVPGERMSATLIRELAVEALSIRKRIAELDKELETLVARHPDSALIRSLPGMGAVLTAELIAEAGNLQRFRSADALAAAAGLAPVLRQSGKVRFLKRPTGGNKTLKRVFYQSAFCSLHTADSRTFYDRKRREGKRHHQALIALARRRINVLWAMLQNRQPFQADFKKAA

SEQ ID NO: 256623 - protein, 399 aa, unidentified
MLAVGIDISKSKSVAAILNQDGSMHTSPFEFHHTQPELDAFIKYILNSNQSATILMENTGHYHYPVLKAFREAGLPVCMVNAYQIKKFGDMDLRKAKTDKKDAVRIARYALEKSYSLVPYTSMEQKYEDLKFLARQYNQRMLTLKTNKVFLLNLLDETMPGITNILPLTTRTPETSLSVLFINRFKSYDRIKKMGKSRFLDAFEKIARKSRNRQTKTYGLVIYEAALRNITTRGENEYTLAAQDQCLELVCESQKAADSIIPKMQTLAETLPEYAVLRSMAGVGDRLGPLILAEIGDIRRFHSGKALNAYAGNDAPPYQSGTFESHNRHISKRGNAALRKYCFEVMQALKLTRPQNDPVYLFLLKKEQEGKPYNVAKMAGVNKFLRIYYARAMETLKQQ

SEQ ID NO: 256624 - protein, 343 aa, unidentified
MYYIGLDVHKKTISFCVKDAAGCVHREGKIGSTRHELDAWIRTLPQPRMIAMEATIFTGWIYDHLLPHAEKVKVAHPLMLRAIAAAKRKNDRIDAVKIADCLRCDFLPECHMASTEIRNRRRILRYRGLVLRQAVQMKNRVSGLLMETGVSYNKLRLHRMGYFAELMTTNEEVSESIRPLLKLCREHIDRSIRLDTTLLRSLEQDPLLADRLRRLRTIPGVGPITALTWALEVGDTSRFRSSKQAISYCGLCSAEKSSADKVMRTPISKQRNKHIRQVLVEAARLAPRYSDELALLYEKERQRGNGNRATLAVARKMVALMLAVERRNTDFVPAAEFRRTAAA

SEQ ID NO: 256625 - protein, 402 aa, unidentified
MNAVGIDVSKGKSMVAIMRPFGEIVYIPFEIKHTTSDINSLVELINSVEGESRIVMEHTGRYYEVLAHQLSEANLFVSTINPKLIKDFDNDSLRKVKSDKADAVKIARYALDKWQNLKQYSVMDELRNQLKTMNRQFGFYIKHKTAMKNNLIGILDQTYPGVNTYFDSPARSDGSQKWVDFASTYWHVDCVRKLSLNAFIDHYQNWCKRKKYNFSQSKAEEIYGKAKELVPVLPKDAITKLIIKQAVDQLNSVSTTVESLRTLMNETASKLPEYPVVMAMKGVGTSLGPQLMAEIGDVSRFTHKSAITAFAGVDPGVNESGTYEQKSVPTSKRGSADLRKTLFQVMDVLIKTHPQDDPVYQFLDKKRTQGKPYYVYMTAGANKFLRIYYGRVKEYLSSLPES

SEQ ID NO: 256626 - protein, 355 aa, unidentified
MNSEKYIGLDVHQATISVAVLDFRGKLVMESILETQAATILEFFAGLRGTLWVTFEEGTWAAWLYDLLKPHVAKLVVCNPRKNALLKDGNKSDRIDARKLAELLRLDNLKPVYHGETGVRMLRELARSYLTLVKDLTRVMNRLKALYRSWAVPCAGRDVYYTRHRAEWLGKIREAGVRRRAEQLYQQLDMLQHLRQQARRELLAESRKHAITARLRQIPSLGPIRSALAVALIQTPHRFRTKRQLWAYSGLALETRTSGEHRYVRGQLRRSKKQISIRGLNKEHNHDLKGLFKAAATRASVQPGPFQEFYQRSLAKGIKPTMVRLTLARKIAAITLTLWKKGENFDAEKLKSQAA

SEQ ID NO: 256627 - protein, 353 aa, unidentified
MTSTKYIGLDVHKESISIAVRNDAGKIVMECVIETKASVILDFIHGLRGELHVTFEEGTWATWLYDLLKPHVTKLVVCDPRNNSRQGNKNDRIDARELADRLYMNKLSSVYHGGAGVRTLKELARSYLTISKDLARVMSRVKAIYRSWGIPCAGKQVYAPRHRAEWLGKITEPGVRRRAEFYYQQLDALRSLRHEVRRDLLAESKKHKATKLLCQIPSIGPIRAALLIALIQTPHRFRTKRPLWKYSGFAIETHSSADYRSVKGQLQKSKKQVSVRGLNRDCNHDLKNLFKSAATIASVKPGPFQEFYAALLAKGMRPEMARLTLARKIATIVLIVWKRGVSFDAQYLKPQTA

SEQ ID NO: 256628 - protein, 355 aa, unidentified
MTSTKYIGMDVHKESISIAVRNAAGKIVMECVIETKASMILQFIDGLRGDLQVTFEEGTSAAWLYDLLKPHVSKLVVCDPRKNKSMREGNQNDKIDARRLAELLRLDHLTPVYHGEHGLRTLKELVRSYLTITKDLARVKSRVKAIYRSWAIPCTGKQVYARRHRGEWLGKINEPGVHRRAEFYYQQLDALRVLRQEARRDLLAESKKHKAWKRLCEIPSIGPIRAAVLLGILQTPHRFRTKRPLWNYGGLAIEMHSSADHRSVHGQLERSTKNVLVRGLNRNCNHDLKNLFKGAAAVASSKPGPFQEFYTALVAKGMRPEMARLTLARKIATIVLIVWKRGVCFDAQYLKPQTA

SEQ ID NO: 256629 - protein, 343 aa, unidentified
MEHVAIDLGATASQVCVRSERGEVLEERRMETNRLSGWLQKRPTARVVMESCAEAFAVADGAKAAGHEVRVVPSTLSKTLGVGRRGVKNDVKDARVLSEASCALAELPSVHVPTEWTRHLKAMLKARKSLVDARTQLINSVRGYLRTKLVTLRKGNTKGFPEAVRKRLAMAPEGLPRFIEAELDIIATLTEKIKQADTELTEVAKAHAVCTRLMTVPGTGALTALAFVAAIEDVGRFRHAHAVEAYLGLVPGERSSGEKERRTGITKAGTGSCRTLLVQAAWCFWRHRKQHPAVQWTERVASRRGRFIAIVALARKLAGILFALWRDGTSYDPTYLETRSVMT

SEQ ID NO: 256630 - protein, 348 aa, unidentified
MEHIGIDVHKRESQIYILAEEGEIIERRIRTEPERFAAVLGSRPRARMLIEASTDSEWVARCLEALGHEVIVADPNFAPMYATRSRKVKTDRRDARTLAEACLLGAYRPAHRLSDPQRHVRGRLGVRDALVHTRTRYISVIRALLRQQGYRVPSGSADSFIDRVRRLPLPGRLLSVVAPLLAVMCPLNQQLAYSDATIEHLAGQDPRVPRLRSVPGVGPVTAAAFLAAVDDAQRFRHAHQLEAYLGLVPREYSSGETQRRGPITKAGHSRVRWLLIQAARSILRCRPPAAEALWTWALRIAARRGTHVAVVALARRLAGVLYALLRDGTVYAPRRPAAPLDPVAALHA

SEQ ID NO: 256631 - protein, 361 aa, unidentified
MDKITRVVVQPEGRQIVRVGVDLAKRVIQVHAVDAQGRVVTSRALARDKFVAWCAQLPAGCLVVMEVSSSAHHWSRKLRELGLDARIVAAQLASPYRAEGATGKNDANDAAAICEAASRPHMRFVPVKSIEQQSMLSVHRLREGIKEDRNACVNRIRGLLLEFGVAIPVGTRALKAQLDDVLEDATNEMNGLARMALRRAQMQWQQLDEHLAWCDERVADHGRNNADVKRAGELMGIGPVGASAAIATVGDFKQFKSGSQFGAWIGLTPKQRSSGGKSNLGTITKRGDPYLRTLLVQGAKSVVNTAHTRSDPISKWVLALKLRAGWQKAVVALANKNARILWAIMTKEQRFDRQHLSVKPA

SEQ ID NO: 256632 - protein, 420 aa, unidentified
MEIDHGEQHLIARVAAIDIGKAEMVCCVRVPGTGRARAQEVRTYSTMTPSVLEMADWLTGLGVTRVVMEATSDYWKPVFYLLEEQVPETWLVNARDVKHLPGRPKTDRLDAVWLCKVAERQMLRASFVPPPAIRRLRDLMRYRTDLVAVRTAEKQRVEKLLEDAGVKLSVVASDIFGVSGRAMMAALIAGERDPARLADMALGRMRVKTALLEKAFVARFSEHHAFLLATMLRRVDTANDDIAAIDTQVAAVLDEELHDAAARLMTIPGIGAVTAVAIIAEIGLDMTRFPTAAHLCSWAKFTPLTSESAGRTKGRQSTGHGNRYLARTLGEVAVMAGRSHTFLGARYHRIARRRGKPRAIVAVGRSVLVVIWHLLSQPGATFTDLGADYYETRVNHQRTARTHIKALEGLGYQVTLAPAS

SEQ ID NO: 256633 - protein, 364 aa, unidentified
MKRKVYVGMDVHKETIQIAYLTGNSKEILKEQQIKHNEVQIKKFIKKLKTEWNEIYCCYEAGVTGYPLYRYLKSLGVNCILVAPGKIPRQNTDKIKTDKRDAIKLARLMRSGELESIHVPSEEDEAVRDYLRSRDSLRLDLGRNRQRLMKFLLRKDIKYSTTKYWTVSHYKWLNNLHFNNEILQETFNDYYSRVRVQEENLKSMDKKIQEIAESEPYREKGGILRCFRGVDYLTAMFLLCEVNDFKRFKTAGSFMSFLGLVPGEYSSGSKRKQTGITKTGSPRLRRILTEAAWQHRFPGTGSKIITARRSGQPALVVALAEKASLRLHKKFRNLQLRGKTPQVMITAVSRELSGFLWAAMNLVA

SEQ ID NO: 256634 - protein, 400 aa, unidentified
MGRTSASCIGRRVVRKTITHVGLDVHKDTIVLSLADAGLRGNLGEVREYGKIANTPAALEKLARKLAVKGSELRFCYEAGPCGYGIQRQLSGMGYQCDVVAPSLIPRKPGERIKTDRRDATKLAKLHRAGELTAVWVPDQTHEAIRDLVRARLAATRQLRRARQQLSNFLLRNGHAYHRTPWTASHRHWLAGLKFDQPMHYLVLEDAIAAVEAAQERRQRLEGQIEAALPVWSLAPVVGALQALRGIALVGAATLAAELGDVTRFDNPRQLMAYLGLVPSEHSSGRTRRQGGITKAGNSTARRMLIEAAWSYRFPARISRWQLLQQEALAKPIRDIAWKAQDRLCRRYRTLARSGKLTTVICTAIARELAGFVWAIAREVGRSASGKSASNLAVRRVAVP

SEQ ID NO: 256635 - protein, 343 aa, unidentified
MRIVGVTGGVDTHADTHVAAAVDHNGGLLGVEPFPADQAGYEELLGWLVGFGPVSRIGVEGTGSWGVGLTRFLGDHDVMVVEVDRPNRQTRRRVGKSDPTDAVSAARAALSGVATVTPKSRDGAVEEMRVLLVARRSGREQRIQTLNQLRHLVFCAPEEIRVRFKDRPKRGLVTEAANMRPRKGSDPVTYRTNLVIRGLARRIKHLDAEMRTIDQTLRLLIEDTAPSLFELHGVGVDTAASLLVTAGDNPDRLKSERSWAHLCGVTPIPASSGKVTRHRLNRGGDRQANTALHRIVLTRMSSHPETRIYVTKRRAEGLSTPEIMRCLKRYVARQTYKHLPHMI

SEQ ID NO: 256636 - protein, 363 aa, unidentified
MLIIGCDYHPAFQQIAFVDTETGELQERRLQHREEAEKFYRNLAGQGMKVRVGMEASGHARWFERLLAELNFELWIGDAAEIRTKRVRKQKTDRQDAQLILKLMLKDDFPRIWVPSWENRDLRQLLWHRHRMVQARTRVMNQLQAVALNEGLRCKKRLWREAGREQLEAIRLAPWASRRRRDLLELLDRLTPTITELTQTIEQEAEKCPEARRLRTHPGVGSLTALAFVLIIGRAERFQCGKQIASYLGLVPLEESSGNRRRLGHITKQGNALLRFLLVEAAQVSVRSIPEWRHKYFHLAMRRGRKIAKVAMARRLAVQMFWMWRKGWDYEQVRKFGSHAGQPGNRDGVQFNTEKLMGRPAPQ

SEQ ID NO: 256637 - protein, 347 aa, unidentified
MTDEKQRVVAGVDAHTDEHHVAVLDAQGRLLGTAAFPTTADGYARLVGWVRGHGTIDRIGVESTGAFAAALVRKLLASGITVVEVNRPHPHARQRLGKSDPIDAELAARAVLSGTATAVAKDTRGIVEAIRQLTVTRSGALKARTAALQQLDDLIITAPQQLRSELRRGRTLRARAALCLKLRPNTNTLHEPAQAAKLALRSLARRIRALDREIDELDRQLEPLVQTAAPRTIRLFGVGTQGASQLLVTAGQNIGRFRSEAAFAKICGAAPIQASSGRTTRHRLDFGGDRQANRALHLIAVCRLRHCDRTRAYATKRSSDGLNRREILRCLKRYIAPRDIPRPTRRS

SEQ ID NO: 256638 - protein, 363 aa, unidentified
MIYSLGADISKDDFSACLQSYDLHSQSHQVISRKTFKNKPSGFKACMSWLARHTGKKPAPVRMNMEATGVYYEPLALFVREHHSQIHLSVVLPSQSKRYIESRGLRSKTDKIDAYGLALMGAERKLAAWKGIDPFWRKLRVYTRTRAELLNQRTQLGNQLHALGHSGMETPKADHALRECIQTISGQIDELTKLIGKQLRSRKDLRAQIACLRSIPGIGTLTIACILAETNGFAEFHRISQLISFSGYDVKIKESGKWAGKPKLSKQGSKYIRRAMYMPATVITRGNGGPIYEFYQGLLATHNIKMKAHVAVQKKLLTYMYILWNKQEYFDPEVIRNQRKEYQKKIAPPKSEATVDTPLVLSQ

SEQ ID NO: 256639 - protein, 428 aa, unidentified
MMKNNLTSTLFVGIDVSSKTNVVCALDFEGNKLLKLSVGNNLPGADLIAKGIISCVNDNKLLHVVVALESTSFYGLHIANFLSSHEELLFFSPLVYCLNPKSIANYRKSFVDIDKTDPLDAFIIADFARVGRIQSKPWRGSQHLALQRLSRHRLHLIEAMTREKTYMVSNIYLKFSELAVLDKSERPFSNTFGVTSAAILMEYMSLEEITYASIEELVEFISLKGKNRFNDPLATAKVLQKAARDSYRLDKSLYEPLSTSIASSFNVIEAYSKEIKVIDKAIVKAVKGLNTNEYQSLVSIPGIGPVLASGILAEIGSITVFSSQDALAKYAGLTWRQNQSGNFKSDTTRMTKTGNKYLRYYLIEAANSVRNHVPEYSAFYQKKYGEVTTHNHKRALALTSRKLVRLIFGLLTKNQLYSNNIVGVQKTE

SEQ ID NO: 256640 - protein, 338 aa, unidentified
MVLIGIDPHKASHTAVVIDRDEQELARVTVRASRGQVGELLAFAAPFTERRWAIESAGGLGFLLAQQLVRAGEDVVDVPATLAAKARLLGSGRGSKNDPNDALSTAVAALRDLRLRAVVVEDPVMVLRLLADRHQDLTSLRTQAVCRLHALLAALTPGGVQKRLSATAAAAFLARVHPDSVATATRRQMATDLVADIRRLDKAIADIKARTAVAVTASGTTVTDLYGVGPVVAALLIGHTGDVRRFPNPGTYASYNGTAPIEASSGPKVRHRLNPRGNRQLNHALHMIAVTQIRGDNPGRDYYRKKITDGKTTREARRALKRKISDAVYRQLKADTTG

SEQ ID NO: 256641 - protein, 515 aa, unidentified
MVAGRAHAAERIGPVRNLATPEVISWPTVIPDSECLVPPFVVVAAVGNTNDSKGTTMNIRVGIDIACRSPHHAACADETGRLLWSGHRFRTDATDLEALWARLPDEVDEVMVVMEPTRNAWVPLAAWLRRRGAVVVLVPSEQSADLRAYFSKHTKTDRLDAELLARLPVLHPEGLHLAEALGPGDPLKRAVKIRAGLVHRRSTAMARLDSLLEILGPGWTDALGTRMTRTTFKFLASYANPHQVKRLGAARLARWFQHHTRKAWGPERAAAIIAAADATLGLWGNDGLDFEALAADIAAEASIALEVCEQIALLDRRINDLYTEADPDGIVRSAPGVGDILAGQILGRLGDPTRFTSLAAARSFSGLVPRRNASGLTDHAGGPTKQGDACLRAALFQAADRARKVDPQLATRYQRLVCDTGRHHNSATCTIAAVLLTRITSCLRNGTHYELRDVDGTPITAEQGRAIVTERYQIPDEVRAARRTISKVVSATRRDERVKKGVAKRSKTPLVPTPG

SEQ ID NO: 256642 - protein, 317 aa, unidentified
MDHLNTLVVGIDVSKKKLDVAGLHPSRVQTLEYSRAGLNQLLASLKEIQPRLVCLEATGGLERPLVEALHRQQVPVAVVNPRQIRDFARARNQLAKTDQIDAKVIAQFGELLQPRTTPSLTKTQQKLRDLTTRARQVNKLLIQEKNRLGTTADKDIQKLIRQAIRLYEKQLQTVRAAQQKFIDQDEQAQATARIMASIPGLGPASVAVLISELPELGTLNRQQIARLVGVAPTNRDSGTLRGKRTTGGGRVEIRNALYMPTIVAKQYNSKIKTFYDRLLENGKPKMVALIASMRKLLTILNVMIREGKTWNEQPKTT

SEQ ID NO: 256643 - protein, 421 aa, unidentified
MSESQRVVGFDCGEDEHSAVLLDVAGEFKERFGVANERSQIQELFAELLLAVPRDERLVVVVESKRSHGRIVSDVAVELGCDLRQVNTVALNHYRDLEGQPRKDDEWDAYLAARMVFFKMGGCREATEVTEEERALSRLTRTHKRVVDERRKHIARLRAVLLELAPEMLHSSWEGPQPGRKAMLYLLERWPGFEGLERAQLRSIEKILLQCRYGSRATRVAKLIREMARGISIVGEERQAFTLELDLLVRQIRFCDESMSRLRAEIVDRVEHHPIGQKLLGMDGIGPVITGVLVSELLPVARISTEPKSATYAGVTPLSRKSGKSLDSDKLTQGVNQRILHALYTSSVVAIKHSAIDRAYYEKKLRGYKGHPKPHVAAFIALSRQRHKVIYKLMTTESSYDKEVLIAAHLARIEQKQTAAA

SEQ ID NO: 256644 - protein, 404 aa, unidentified
MIFVGDDWAEDHHDVHLMDADGARLASRRLPEGLVGISGFHELVAAHAKEPAQVVVGIETDRGLWVEALSAAGYQVFAVNPLAVARYRDRHQVSGAKSDAGDAKVLADLVRTDRHNHRLIAGDSSTVEAIKVLARGHQNLIWARTRQTNALRSALREYYPAALEAFEDLADRDAVAILGRAPTPADARRLSLSKIRSALKAAGRQRNIDTRASQIQDMLRREQLAAPATVTAAFGATTRAAVGIIAELNRQIADLEATLADHFETHPDADIYRSLPGLGVILGARVLGEFGDDPNRYTDAKSRKNYAGTSPLTIASGKKHAVLARHIRNRRLYDAIDQWAFCALTTSPGARVFYDQHRAAGDLHHQALRALGNRLVGILHGCLRHHTHYDEHKAWAHRQTAAAA

SEQ ID NO: 256645 - protein, 357 aa, unidentified
MPYVAGVDAHKNTHSVVFLDSVGRVVKSLKISTNAAGYEEALALARSLDGEVVWGLESTGCYASALARVLIASGAVVYEVPGSFTKRHRQRSSRTGKSDPLDAQAIAEAVLREAHRLPRFEEAEEREALRLRYDQRDRLVQQRTEVINRLRSTALRLDRGDLPQDLLSAPGIRAIQDIIESAQASADTVIQALVDDLRFAIEDIVRINVRIKALEALLRPMVRRLAPELLELRGVSTIVAAGLIGHAGNLRNCRNADAFAMRAGTAPVECSSGRSTAVRVNRGGNRQLNRLLHVIALVQLSRPDHAGRRYYDRKRAEGKTARAALRALKRKLTVVVYYRIIAAAERFAVSAGQQSAA

SEQ ID NO: 256646 - protein, 358 aa, unidentified
MRIIGVDLHARQQTIAMLDTETGELIEKTLEHEGDEVRKFYSAVPGQVLVGIEATGSMQWFLQLMEELGMECRVGHPAKIRKTETRKQKHDRRDARLLMNLLAENRFPTIWMPSTEQRDLRTLLRHRHQWVRMRCRVQHTLQSMALTNGLRRGHSLWSQRGQHELQALPLAPHANQRRTALLTLYPQLQESIDELDQRVKEQAQQHPQARRLMTHPGVGPVTALATEVFLGNPMRFSDSKTLASYIGMIPSEHSSGGRQRLGAMSKQGNSLLRYLWCEAAMHAVGRDPELQRFYRRKLVQKGLGKAKIAAARKLGIRLWIMLRDKIDYEEFCRRGKQRQRFGSARAGMPDFNSGPAAQ

SEQ ID NO: 256647 - protein, 424 aa, unidentified
MDTKDQNSWDQHRYYMGLDWAKQEHAIAVVDGDGRIMVETTIEHTAEGWHRLREKLVALAGPDLFLVAATIETNRGPVVERLLELGCTVYPINPNAAQCYRSRKAPSGSKTDRLDALSFADALRTDGHGWRPLNPEDPKTQELRLLCRDEMSLIEQRTTLVNQLQQALHEYYPAALEAFDDWTSPSSWAFLERFPTPQALKKSGKRHWEKFLHTHRLYRPETYQKRLEIFAGATEFCGSHAVTNAKSMLAVSLAKQLRLLEQQLKAYREHIDKLFQEHPDYTIFDSLPGIGEKLGPRLLSECGEDRDRFEDHEALQCYAGTAPVSFQSGQINRVRFRYACNKNLRTAVHLWANLSRKKCAWAQVYYHQKRLEGKSHACALRCLGQRWLKILWKMWQTKTPYDEQMHTRNQIKHGSWVLALTASK

SEQ ID NO: 256648 - protein, 344 aa, unidentified
MVEVSTIGLDIAKSVFQVHGVDDAGAVMIRKRISRSKMLEFFTELPPCLVGIEACPSAHHWGRELQVLGHTVKLMPPSYVKAYLKRSKNDANDAAAICEAVTRPSMRFVPIKTKEQQTALMLHRTRQLLVRQRTMLSNALRGHLAELGIVSAQGRNGTGELLRIIADGADHRVPAAVRGILDVLARQYGAIGTEIGAIDKRILALHRSCEASRRLAEIPGIGPIVATALVAEIGDWKAFSSGRSLAAWIGLVPKQHTTGGKDRLGSITKQGNRYLRWLLVVGAMAVIRYARKYGSKNRPWLARLMERRPTKVAAVALADKIARMAWAIMVHGERYKEPELLLAA

SEQ ID NO: 256649 - protein, 338 aa, unidentified
MSIKVLGIDLAKNVFQLHGIDQKGHTILQKKLSRRNLSEFIATLPECTIFMEACSSANYWSRRFESFGHTVKLISPQYVKPYVKYHKNDKNDAAAIVEAGTRPSMNFVPRKSIEQQDIQCLHRIRSRLVKNRTSLINQIRGLLSEYGIIAAQGLCNIRRRLPEILEDASNELTPIGQALFTDLYDQLVHIDKKITDYEERLNHIFKHNETCQRLAQIEGIGLLTATAIVSTVGDAKVFKNGRHFAAFLGLVPRQHSSGNQHRLLGISKHGDTYLRTLLVHGARSALRVAHKKMDARNRWAVDIRARRGENIACVALANKQARTVWALLAKGESYRRVA

SEQ ID NO: 256650 - protein, 349 aa, unidentified
MVADELDYVIGVDTHLDEHVLAILAAPSGAVVAQRSIQASARGYAAALRFAADEANGARVWAIEGTGSYGAGLARFLAGRGETVLEISRTPRAERRLRGKDDSLDATRTARAALASETLALPRSGERREALRLLLVARRSAVDVRREALGQLRGVIVTAPDKLREELRGLPVGRLLERCSRLRRSSAISADELATRLVLRSLARRIEAATLEAAELERELLGHLRAVAPALLDEPGVGPIVAAQLIVAWSHRGRVRSEAAFARLAGVAPVPASSGKTTRHRLSRGGDRQLNRALHTIVLHRSQHDPATRDYIAKRIAEGKSRRDATRLLKRYLARRLFRLLQNEELLMT

SEQ ID NO: 256651 - protein, 370 aa, unidentified
MSVRRILAKTIDTDLEYEAIGIDLAKNCVSAALLTTDGEVVCIDRLDYSELEKSAQVLCPTTFAMEPCTEMNYLVQKLEAWGHRCLVIGGKNVQNYVENHFSGQKTDLNDAQALAFLAQDTQLRTIKAKDVEQQKYASLTTLREQYIKQYRQTIVSLKGICQAWGLNISKGISGKARLKDLIENHAAFPEELKESLVDMVTHAQTAQKALNKITKTLEELAKSDKVCQLIQTIPGLGSICICRLRATVGDIKRFKSPKDFPAYYGLVPRSIATGHNEKKGRIPHRGDRTMRSLMVQAAGSLVNMATKGKLKSKQLTKWILKKQKEKMPWGKLVCAVAAKLLRIVRAVLISNKPYNSKIAGVAKCSLPKGS

SEQ ID NO: 256652 - protein, 347 aa, unidentified
MQFYQPHTEFYCGVDLHTRNMYPTVLNRRSEVVCHRNMKNDPVLLLRMLKDYRSSLVVSCESTSNWYWLADLCQDEGIEFVLGHALYMRAIHGSKTKNDRIDSEKIAKLTAAGLLPRAYVYPRAHRSLRDLLRRRLRLVRQRAELQTHIRTVNAQFNLPPLGTKVRSKASRGALESQFEDRTARRSVEADLELIDHYTPLIGSIERYVETEADEVYRKERTILESITGVGKIISLTILLEIDRIQRFPSRQKFCSYARLVYPRSESDGKQYGSQGRKHGNPYLKWAFTEAAVYSAQWCEPIKGYLSRLERKYGAGKGKTILAHKLGRAVYYMLLRDKVFDLDKFLKS

SEQ ID NO: 256653 - protein, 349 aa, unidentified
MKGTTIGLDIAKQVFQAHSVGSADGEVRRIKLKRAEVRQHFAQLQPSLIVMEACGASQHWAREFIKLGHQVKLVAPQFVRPFVKTNKNDMADAQAIWTAAQQPEMRSVAIKTEEQQAVLALHAIRERLKKSRTAAINQLHGLMGEFGVELPRGWRTMLPKAAAALDPSRSAVPALLQPQLRCQIEEVRSLAEQMLQVERQIMCWKRRQEECERIAAIPGVGLLTATAAVATIGDARVFRSGRQFAAYLGLVPRQTGTGGRVKLLGISKRGDKYLRTLLIHGARSVLVHAGSKAKPNTWLARMLQRRPHNVATVALANKMARQIWAILAHGRIYEPSYGLPQNLDSAAPV

SEQ ID NO: 256654 - protein, 408 aa, unidentified
MNAVGIDVSKGKSMVAALRPMGEVALLPQEFLHTEVGLEQMAYAILALGENTRVIMEATGRYHEPVAAALHAYGIYVCVLNPLFIKQSGGGSIRKVKTDKADAMKIAKYGLDNWVDLREYTPMDTVRQQLKLCSRQYNLYMKTVVSLQNNLISLTDKTFPGVNELFSSPERADGHQKWVDFVITFWHCDCICYVSAKAFTERYQKWCKRKGYHFSAEKALDIHAGSCDHFTTLPKNDNTKLLISTAAQQLLAGKVTLAALRAEMTRLSKQLPEYDTVRAMYGVGETTAAQLVAEIGDVRRFPRRSSIIGFAGVDPGIDESGKHSAKSVPTTKRGSPHLRKTLYQIVCTYLRKAPADEPVYQFLDKKRSEGKAYFVYMTAAQNKFLRIYYARVKECLEAFDTQQSSTQS

SEQ ID NO: 256655 - protein, 408 aa, unidentified
MRVVGLDVSRTVAEVAYLERGAIRAGGQVELQRPSLNAFAKQLRPSDEVVLEATGNTHAIVAALKAHVAKVVIANPLQVRLIAEAKVKTDKIDAAVLAQLYASGFLPQVWNPDEDTLALRRQVARRAQIVRQRTRLKNQIHAVLAAHLIPKCPVTDLFGKRGRAWLAEQPLPLDERTAVEQRLRELDRLAEDVQVVERQTGAAVLDDARVHQLLTISGVNATSAIALLAAIGDITRFRTPEKLVSYFGLNPCVYQSGLQPAKHGHISKRGRSHARAMLVEAAWACAKAPGPLRAFFLRIRERRGQQIAAVATARKLAVIVWHVLADRKDYLWSRPALVAVKRRALELQAGWPATRGHRGAAADYNIKELRDRERALAERAEHVYARSVAHWQPKPKKSTGAASSTRTR

SEQ ID NO: 256656 - protein, 368 aa, unidentified
MEEVCAFVGLDVHKATITVAVADAGRGGEVRHFGTIENTPTTIGKLARNLARRHGVVEFVYEAGSCGYNVQRQLAGMGLTCRVCAPSLTPRKPGERIKNDRRDAIALARLHRAGELTYVWVPDALHEALRDLVRARHAACQDVRRDRIRIQAFLLRCDFRFEGKPWSTRHRRWLCNRQFIHPAQQVAFQTYINALEHDEARKVEVEAQIRDLLAGSPWAKQMQALQALKGVGPIVAATIIAEVGDFSRFAHPRQLVAYFGLAPGEHSSGGTVRPRGITKAGSSIARTVLCEAAWNYRTTPKVGQWMKERCPPVPRDIVALAWKAQLRLHRTYSRLTARGKRSVVATAAVARELLGFVWSIGQRVPLGA

SEQ ID NO: 256657 - protein, 340 aa, unidentified
MEKRYIGIDLHRNRFTCCIRLENERTYLTEWKLEDLGKFVKKLRPTDEVAVEITGNTRLFHDGIREHVARVVVVNTNQFRVIRQSVKKTDPNDARTLALYLSKNLLPEVRMKDKQHGQLASLTQTRDTLVKLRTALKNKINNILSARGLNLPKEALSSEKKLAEVLELPFDGIVRIELRVIVEQIRSLNKSIAELEKTIGEEGSKLEGHKGLSSIKGIGKITGAILLSVIGDVNDFADEGHLASYFGIVPRVSNSNETEHSGRIHKRGTKLGRTALVQSALIAANYSPYLKRFYEQVKARRGAGKAIIALAKKFLGIIYRTLKNKWVFEDFPNFVLAEES

SEQ ID NO: 256658 - protein, 371 aa, unidentified
MLHSDYTIGCDAHKHFSLFVVLGGSGDLVQRTRVGHVPGAIGAFLSQFAEGTPVALETVGNWYWIVDEIEEAGCIPLLAHAAKAKVMMGNVHKTDKLDAQGLATLLYLGKLPSVWIPPAEVRDERELPRTRMTFAKHRTMMKNRIHSTLAKYALSLDTASDIFAPKWRPELEATLQQLPDETGRCALQQLQILDALTDHIKQLEDRILFRIQTTPTIHLVQTVPGPAKVLAILIDREVGSIDRFSAAKHFTSYCGLVPKLSASAGRAHYGRMVKQCNTYLKWAFIEAANVIVAHRDHPNWRRKYVVHLYDSTRRRKGHSVAVGATARYLAESTYWVLKKSEPYREPPHWAPAGKRSPVSLSQEQARAQHGS

SEQ ID NO: 256659 - protein, 355 aa, unidentified
MHSVKYVGFDVHQSTISVAVLDAQGKLVMESILATHAAAILDFIHGLRGIIHVTFEEGTHSAWLHDLLVREVGRVVVCNPRKNALLKAGNKNDRIDARKLAELLRAGLLSPVYHGETSMTTVKELGRSYSALTQDAARVMSRLKALYRGHAIPTTGKKAYGRRHRAEWLTQLRGAGLEVRARRLYQELDALQALRREARHDLMAECRKHQAAKWLRSVPYLGPIRAALLIGRVQTPHRFRTKRQFWAYCGLALETRSSADYRFVNGQLERTKKPIWIRGLNLNHNHDLKNVFKSAATTSSSRPGPFQTFYEGLLAKGMLPAMARLTLARKIAAITLSVWKKGEKFDAEQLKPQAA

SEQ ID NO: 256660 - protein, 453 aa, unidentified
MAKRREKRERISVVLEPDAAGIDIGAEEIYVAVPPDRDEESTRRFSSFTCDLHALADWLGRCRIQSVAMESTGVYWIPLFQILEERGFKVYLVNAHYLKSVPGRKSDVTDCQWIQYLHSVGLLRASFRPPDAICALRTLWRHRGSLLEMAAEHILHMQKALSQMNLQLHHVLSDITGTSGQAILDAILSGQRDPVALAQLCHRRVQSPRDKVAQALVGDYRPEHLFTLRQSLEGYRYYQNLILELDLETARLMQALPSATEDPIPPRTKPTAYHRKGNDPRFDLRSELYRIAGVDLTDIPGISAATAQVMLTEVGTDVSRFRHASAFASWLGLCPEKRISGGKVLSCKTRQVKHRAATALRMGANSLCRAKGYFGEFFRRMRAKLGTAQAITATAHKIARILYHVLLTKEPYTETVFHRCDEQAQHRAEMRLRKQAARLGFQILPSQQQENDS

SEQ ID NO: 256661 - protein, 309 aa, unidentified
MAITVGIDVSKKRLDVYVHPSGVMLSLDNDEASLIGLVEQLGALKPDCIGMEATGGYEKLAAACLAEAGLPVVVINPAQIRHYAKAVGTRAKTDAIDARIIALFVAATEPVPHRLKGEDTAVLAELMARRRQLVGMLVAEKNRLGRLPPGKVRLSVVRIIAVLNAELAKLDKDLGGLIEQSPLWREKQDLLASVPGIGDKIARSLLADLPELGQLDRRAIAALAGLAPFTRQSGQWRGKSFIAGGRTAPRAALFMGAMVASRHNSVLRTFYERLISAGKPKRLALIAAARKLLTILNAIIRDKRPWQNA

SEQ ID NO: 256662 - protein, 343 aa, unidentified
MQVTTIGLDLAKHWFQVHGVDATGAIAIRRKLRRSEVMNFFQSLPPCLVGIEACATAHYWARELISLGHEVKLMPPAYVKAYVKRNKNDAADAEAICEAVTRPSMRFVPVKDTEQQSVLLLHRARNLLVRQRTMLVNALRAHMAEFGMVAPQGLRNVELLTQIVAHEKERLPELARQILQVIVDQLHDTIVRVHEIELRLTRWHRQSQLSRLLATVPGVGIMGASAIAATVTDPSLFRSGREFAAWLGMTPRQNSSGGKERLGRTSKRGDKYIRSLLTAGAVAVLRHARNRPTRDGVWVRALMDRKPTKVAAVALANKTARILWAVMTRGDGYRAKQVLGQPA

SEQ ID NO: 256663 - protein, 431 aa, unidentified
MEEAGDEPLFCERAAGIDIGKQVVSVTIRVPSDTRRGGRQQETREFGTTRRQLLEMADWLRCWQVERAGMEATSDYWKPVYFLLEREGLDCLLYQASQVKALPGRPKTDRLDSAWLARITEQGSLAGSFVPPEDIRRLRTHTRYRRRLIQARTAEKARCEKLLEDAHLKLSSVISDIHGVSGRDMLRAIIAGERDPEALAQKARTRMRRKIAQLREALDCSFFTPDHAFVLQMMLVNIDHYTAQIGVLDERIAVLCQPYERQVAQLDGIPGFGVTSAQDLIGEIGVDMAAFPTAGHLCSWARLAPRVRESAGRRKGKNATGRGNPYIGGTLGEAAAGAGRTQTFLSAKYRRLCTRMPKKKAQGAIMRDQLVITHALLSDPEAEYRDLGAGYYEQRADIRRRPTTMSAAWNDLATRSPSSPSHPRPTPKPAS

SEQ ID NO: 256664 - protein, 409 aa, unidentified
MEVVHEVCCGLDVHKKSVTACVLWASGKRRQTREFGTFTRELLEMTDWLRSCGVTHVALESTGVYWKPVWNLLEGQFEVLLVNAQHIKAVPGRKTDQKDSEWIADLLRHGLLRASFVPPTPIRELRDLTRYRASLAQEINRIANRVQKVLEDANIKLASVATNALGASGRAMLEAIIHGEQDSQQLAEMSRGLLRNKIPELQQALQGRVTAHHRFLLRELLDHLYFVESKMRRIEQEIEERLGPFQNEVARLCTIPGVDRVTAWGLLAEIGLNMSQFSDAQHLTSWAGLCPGSHESAGKRKSGKIRKGSLWLRRCLCQAAWAVSTKKNNYLSALYRRLAARRGSKRATIAIAHNLLVIAYYILRDQTCYRDLGPDYFDRLNPEGLRRRLTKRLEGLGFKVTVEPLAEVA

SEQ ID NO: 256665 - protein, 313 aa, unidentified
MIIPLRCVGIDVSKHFLDIFDEAIGASERIANATQAITQLVARWRCDALVVFEATGVYDLELREALRQAGVRFARINPARARDFARASGQLAKTDPIDARMLAAFARAMQPATEQIATPARDALARLAKRRDQLVLMRAQEKNRRSEADDRAMAERIGRFIEVLDGEVEEIEADIRALIKAEQEISDDAQLMRSLPGIGPVACMQLIAQMPELGQVGPKQIAALAGLAPFNVDSGTYRGKRKIGGGRKRVRDALYMAALNAVRRADPFKAFYTRLRQAGKPAKLALIAVARKLLTVLNAMMRDRKPYKLAPAT

SEQ ID NO: 256666 - protein, 383 aa, unidentified
MRWTQPHNLKRPLKGQDGKLDHPNRGSEEGPVMKVTTIGIDLAKDVFGLHGVDGEGRVTFKRRLVRSRLLEFLSQLPRCLVGLEACSSAHYWAREIERLGHRVRLMSPRFVKPYRKSDKNDANDAEAICEAVTRASMRFVPIKSEAQHEVQALHRVREQLLKSRTALVNQVRGLLAEHGVVAPHGIARARRLLLGILADPERHGLSGLFRETLQEMAERLRFFDERVGAYDDRIERVFKEDERCRRLAKVEGVGPLVATAVVAAVGNASEFKSGRELSAWLGLVPRQHSSGNRSQLLGISKRGDRYLRTILIHGARAALRRADHKRDQRSRWAMRIKLARGYNKAAVALANKNARIIWALLTRGENYRPAAISVASAGSVESV

SEQ ID NO: 256667 - protein, 403 aa, unidentified
MIVGIDVAKERHHAFLGTAAGKTLVKKLIFENSASGFSELLARVEAVRAQNGLSDIVFGLEPTSNYHKPLGRYLISKGCHVVLVGGKAVKNNRELLDERWDKHDTKDAANIADLVSRGKCFYYDMPSREIEELRDLHSLRTRLKKEEHSLNLRIRNNLLAKHFPELDSFYSACEKETLAIVRWFLNPQQIAAMPFDEFFKRVAPNARGIGQKLRLQKIHRLSHESIGCPVDSAVQLQAGLLVEKIKQVREQIVQVEQVIQQLCVQFPSYEYLLSIPGFGPYVASKVLATIADPRRFDTAKQVIRTAGYDLCADRSGKSSDQAVPVISKKGNSQLRYALYQAAMVASSRHRFFMAYFARMLQGRERERGIRTKMRVKLAAKMLVIAWTLMKRGESFNPEYLNVR

SEQ ID NO: 256668 - protein, 312 aa, unidentified
MPIQDSLQFLGVDVAKLALAIQFPDQLWSTANTAQGHAAFLAKLKTLGPVHVICEATGGYERALVLELQQAGFAVSVINPRQIRDFARACGRLAKTDAIDASVLRDYGVKLRPPADPPPAPGGDEFAEMVRARQELVALITDEINRREHARLPALVKLSRARQKQLEKQLTELDRLLDAHTASRPELTAKAQRLQQVSGVGRVSALTVLALLPELGRIGDAQAAALVGVAPLNHDSGQFRGQRHIHGGRAAVRRVLYMAALAAIRHNGILKAFYTRLREKGKPAKVALTAVMRKLTVLLNRLLKNPHFNLVS

SEQ ID NO: 256669 - protein, 394 aa, unidentified
MEAKKNKVETALGFTNDAEGFEKLITWISKQKRKHEKREVVVGLEPTGHYWFNLSEYLKKEKIKLVLVNPFHVKRSKELDDNLQSKTDLKDPKTIAKLVIEGRYLEPYVPEGIYAELRTLCNFRNKLQKEIISVKNHLNRWLNIYFPEYKKVFSDITAKSSIAVLKKTPLPCDMKESGAEGINQIWRELKLRAVGKKKAESLYEAAEQTVGVTEGLKSARLTLTMLLTEYEIKMSNLEIIEEQIIALCRKVPAVKRIEKIKGVGIMTIASFLAEVGDVNRFESSKQIQKLAGLALRECSSGKHKGKTTISKRGRPRLRQLLFQASMPLVAKNDEFAQLHKYYTTRESNPLKKKQSIIAISCKLIRILFTMFKKEIEYDPQKLVSDIKRTNLQVA

SEQ ID NO: 256670 - protein, 407 aa, unidentified
MAGQEFEWFVGIDWASAEHEVRLLDARGTDRGRRSVPHTGPALGELGDWLEDVSGRHPERVAVAIELVRGAIVEALLARGFAVFGINPKQLDRFRDRYTVAGAKDDRLDAFVLADTLRTDRARYRALQLDDPKIIGLRGVVEAHEELTQELRRLCNRLRAQLERFYPQVLRLCPAADEPWLWALLVLAPTPAHAARLRGARVDRLLRGYRIRRLERTEVMTALREKALPVAPGTVEASSAQVALLLARLRLAHAQHAHCEQQIDAALEDLAGDDGESDAALLRSLPGVGRVVAARLLVDATPLLAARDYGALRSQAGIAPVTRQSGKRRVVTMRRACSGRLRQAMYHWAFASVQRDPRSREIYAAARTRGQTHGRALRGLADRLLRVLVAMLNSRTPYDPDRIRRAA

SEQ ID NO: 256671 - protein, 315 aa, unidentified
MSTSGFYAADVSKSELVIACEAGDAEIVRVANRAAAIDAWLDRLPAGSLIGMEATGTYHRLLAARASARGFTVYVVNPRDFHFYARSVGARGKTDPLDARLLARYIAHEHTHLHRYVPPSALCEQLCALLERRAVLVRTRQTLVQSLADLPTLQPHTQVALRALDDLVAALDSQLATLNASDPATASLVRRLRTICGVGPLVSTLLAALLQRFAFRHADALVAYVGLDPRPDESGSRRGRRRLSKRGHPEWRRLLVAAAMSAARTRVWGDYVLGHKNKGLPSTAVHVILARKMLRVAFALYKSGNDFFAPEIKPT

SEQ ID NO: 256672 - protein, 307 aa, unidentified
MRAAGIDVGKANLDLATDGESGVARFANNRAGIAKLVKRLVAMGAERIVVEATGGYEEPLLEACCDAGLWIARVNPRQARDFARATGELAKTDAIDARLLALMARMFGARLRRHVAPPVWQRELRDWLRRRGQVVVLIQAQKQQAAMAPAAVRKLVARTTAALTRELVAIEREMKALIQKHSSPALRSSKGLGPVFQATMLALLPELGHLNRRQIAKLTGVAPMNRDSGQGQGKRRIRGGRSPVRVALYMATLSAVRWDPLMKAHYQQLRARGKLGKVALVACMRKLLGIVNAKRRDELRAEASAVA

SEQ ID NO: 256673 - protein, 385 aa, unidentified
MGTQTFIPRDYDVFAGLDVDKKSISVTFSDHQGLLKSMRMPFNVEYLVNHVRKHYGDKKVAFGYEAGPTGYGLYDGLEAHAYKCLIASPSMIPKAPGQRVKTNRLDSVGISENLRGGQLKGIHVPTALYRELRHLTQLRDAMVSEMVGMKQRIKSLLLLEGLEFPPAPAGSQWSFLVKAKLRKLACSSVVRFKLDQLLDSLEFDEKQVLKASREIRRFCQNDPELSQCINYLTTLPGIGWIVASQLMARIGDWRQIKNIRQLPAFLGLVPTESSTGERTERGSITHTGDGRLRSKLIQASWSAIRQDDELREFFRAVAKRHPRHCASRVAIVAVAHKLCVRAAVVLMEQRPYEIRQTVQAAPLTQEETVPQGTTRRLAVPGETNS

SEQ ID NO: 256674 - protein, 363 aa, unidentified
MDNSIRYVGLDVHRDSISVAVLDREGKVVKQTVIETKAAAVLRLLQELRGTLHVVLEEGTWSTWLYELLQGRVARVVVCDARKITRMGNKSDRLDARELADLLRCNRVSAVFHQDTGLRRLRELARTFVVLTKEQTRTMNRIKALYRSWAIPCSGQSCYGPKQRSRWLEKLPYAAVRERAKIYYQQLESVQQLRHKVRQAMLAQARKHPAYRNLVNIPQIGPVRSALLIAFIQVPERFRTKRQFWAYCGFALETESSGDYCWVEGKPQRSKKAPLVRGLNRNHHPGLKWIFKSAATRLCSGEGPFPRFYGALLEQGIRPEMARLTASAQTGRHHAGGVEERRRFRRPTTNHTSSLSAGAGLSA

SEQ ID NO: 256675 - protein, 442 aa, unidentified
MPIMRPHAAGMDIGAEEIYVAVSSDHSEEPVRCFSTFTFDLHALADWLQQCGIDTVAMESTGVYWIPIFQILESRGLEVFLVNAHYLKSVPGRKSDVSDCQWIQYLHSVGLLQGSFRPPDKICAVRTLWRHRQSVLQMAAEHILHMQKALSLMNVQIHHVLSDITGLSGLAILDAILAGERDCLKLAQLCHPSIKSPRDKIAQALEGDYRQEHLFVLKQSLAGYRYYQDRIVELDREIQTLMKEVGDPTRCEEALPTRTKRTKYQRQVNDPAFDLRHELYRIAGVDLTDIPGVSTLTAQVILTEIGPDVSRFRNASAFASWLGLCPEKRVSGGKILSCKTRKVKSRAAIALRLGAHSLCRAKDYFGEFFRRLRARLGAPQATTATAHKLARIIYHVLRTKTPYNESIFYECDEQARQRNESRLRKKAAEMGFHLVPNATQAS

SEQ ID NO: 256676 - protein, 343 aa, unidentified
MGEVSTIGLDIAKSVFQIHGVDVDGAVVIRKRISRAKLLEFFATLPACLVGIEACPTAHYWSRRLQALGHTVRLLPPSYVKAYLKRSKNDANDAAAICEAVTRPSMRFVATKSEEQQSGLMLHRSRQLLVCQRTMLSNAIRGHMAELGIISAKGRNGTAELLKIITDEQDDRIPAAARFSLDVLARQYAVVRAEIVAIEKRIHAWHRSSEESRRLEEIPGVGPIVATALVAEVGDWKTFSSGRSLAAWIGLVPRQHSTGGKERLGSISKQGNRHLRWLLVAGAMAVIRYARQHGTKRPWLARLMERRPIKVAAVALANKIARMAWAMMVRGERFKEPRLLPAA

SEQ ID NO: 256677 - protein, 332 aa, unidentified
MSVYVGIDVHRKRSQVAVIDEVGEVLANRNVPNGVRPILSVIGELPAGTPAAFEAAFGWGWLLELLEGYGFEPHMVHPLQCKAIASARLKNDKVDAATLAQLLRADLLPEAWIAPPEVRQLRALLRHRAQLVRLRTLLRNRIHAVLADYGHGRPAGCWSGPGRAWLASLELPAVSREVIDDDLALIGALQLPIDRLDLEVRQRAKADPRVKVLTQLPGVGQFTALVLLAEIGDITRFSSARKLASWAGLTPTVRGSDRTVHHGHISKQGPAWVRWVTCEAAQTAKRHPDFAPGYEATARRRGKKIATTAVARKLITRAYHLLTDAASGGAPR

SEQ ID NO: 256678 - protein, 415 aa, unidentified
MEVIVDRCAGLDVHKRTVVACVRSPGSGRQKRCSEVRTFGTFEVELLALRAWLVEQGVTQVAMEATGVFWKPVWSVLDDGAVFEAVLLVNPAHIKNVPGRKTDVNDAMWIGQLLECGLLRGSFVPPMELRELREITRYRRQLTEERGREVLRLQKLLEDANVKLSSVVTDTVGVTARMILEALCRGERDPEVLAGMAQRRLQAKTDLLRQCVPGRFNQFHAVMTRELLDHIDYLELAITRLDDQIDRLMIPFQQARDRLDTIPGIAKRNAEIIIAEIGVDMNRFPTPAHLASWAGVCPGNNESAGKHKTTKTRSGNPWLASALVEAAWSASRSKGCYLGVRFWRIAKRRGQQRALMAVAHTILIICWHLLADNTTYDELGTDYLAGRDQPDRRRKLLVAQLEKLGYTVELTTAAA

SEQ ID NO: 256679 - protein, 394 aa, unidentified
MKLVGIDVGKNSHHFCVMDKETGELNLTPSSFPNNKEGFDFLINSLKPYSKKSILIGMEDTGHYHVALLKFLLSNGYTVALINPKTTDLTRKMEGGITKNDKLDTITICDVLDTPERKKQYRITKVDRFDLYEQRQLTRHHHNLKEELNIYCNRLQKSIDLVFPEFNTLFGSKYGVVYMNLLKTFGSAEAIASTDIRTIRKCFEIKGRGGRISLTAEKLKECAKNSIGISSEVETIQIKHLVSQIMLIKEQIAEIDKKIEEFSITNNSPILSIPGISHFSGTSILAELGDIGNYSKPSRIIKFAGVAPYHYESSQYNAQHTAITKKGSKYLRKTLYQVILPVINNNPVFKKYYRLKISQGKGHRCAQGHCIRKLLRVIYHLLETGQSFDPALLR

SEQ ID NO: 256680 - protein, 331 aa, unidentified
MADAKRFVGIDVAKAQLDVALGPKGERFAVANDERGISALLKRLEPADVVIIEATGGLEAPVASALATAGIAVAVVNPRQVRDFARATGQLAKTDALDAQVLVRFGEAVKPRVRALPDAQAQALEALVNRRRQLVEMLTAEKNRRANSPKVIHKSIDEHIRWLEKRLAGFDDELAALIRATPIWRERDELLRSVPGVGKVLATTLLAHLPELGALNRKQIAALAGLAPFNRDSGSLRGSRCIWGGRAQVRRVLYMAAVSAVRSNPVIKNFYAQLRARGKYPKSALTACMRKLLVILNAVLHNKTHWHATALTSSSSALYPLADAVSEHGCC

SEQ ID NO: 256681 - protein, 424 aa, unidentified
MKQSILCVGADVHLKEIVLRAVDKLTSDEVIAPFHVTNNLPGAEAAVIQLVEVATSQHYHCIQIGYEATGMLWIPFHRFLKTSQLLEPFDLQQVCFNPKLVADFKGALVLRNPKNDDRDTFDIAARVQFGHWPASYVPDDFWQGLRRLTRYRFQLSRTLSREKMRFQSYAFLKCSDWKRIKPFADVFGATSAALLTEFTATGLREMPHTQLADLIAHRGRGRFYDPDATARTVQQALDSSYPIEPQMDDMITATLATGWEHIRTVKRLMKRLDQQITRCIEPIPNPIITVKGLGPVITAGLLAEIVDIHRFPEHKHLAQYCGISWSKRASGGFISQNTRLSKVGNPYARYYFVLGADRLRQFNLEYKAYYWRKYQEVSKYQHKRALVLSARKLVRLVHALLTKNVPYVRPQTLINPGEDQDLLQ

SEQ ID NO: 256682 - protein, 349 aa, unidentified
MTDQRLSYCGRIVYVGIDVHKETYTVTCVCNKQIVKTATVQADPAALAASLPRWFPGATLYSVYEAGFSAFVLHRVLTKAGITNLIVNPASVAVAANDKVKTDRRDSKKLAIDLADGRLRGIYVPTEAEELARLLPRTRTQIVKHRATIARQIKAKLHQFGLIAPSSRRLISSRYLREIAAWSLPPELSVSLTLLAEQWRFATRQLIEMRRLLRDQAKAQEAIEKVYRSVPGIGEVVARTLATELGDMTRFANERALFSYTGLTPSEYSSGASVRRGHMSRQGSSRVRHLLVETAWRALPRDGVLKEMFDRIAATRGKKRAIVAIARRLTGRIRACFRQGTTYAVGTYA

SEQ ID NO: 256683 - protein, 313 aa, unidentified
MMPQDRIVVGIDVDSRELEVRELGASKGCRMPNRPSGWARLARRWVGRGVVVGVEPSGGYEQGLVRTLTEAGVEVRWADPSRVRALATALGAPAKTDAIDAAMIALYVAETGGRAVEHDPERQALRELLAARQAAMETAERLTCQAQMLAPGAGRAALEELVTLARAAEKALTRQVLETLRSSHRLSAAWLLLQTAPGVGKLVAAELLAAMPELGRVNGKAIAKLAGLAPFIRQSGLWRGKATCSGGRPRPRRALYLAAMASLRAHNGLRPVYERLVASGKPRMVALVACMRRLLVALNAMMAEQTPWRGPTA

SEQ ID NO: 256684 - protein, 403 aa, unidentified
MESVIGVDISKNFSVASAYSGRNERMEPPLIFEHTNAGFTEFMQLVKRLEQQSNSKPNIVLEPTGHYHLTVTDLLEKQGYQVIMINPLISKRERNSSSLRKVKTDETDAEHLAKMYYRMDLTPARLCHDELAQVRYCTRLHETMSTMLTSIKIKSKAVIDLTFPYFGEVFAKSFTKRYIQCLSEYPTARSVINASRESIVSFIAVSLGYSEDCKTVQNIANKLINAALKCPIEKEVYDSQIHTLLILLRTIEESQNNLDSLIQYTTETLSHRRDFQILKSIPGIGDVLAASILCEIGGISNFGSHKKLIAFAGIEPSVYQSGQFKAQDNKISKRGSHYLRRALYIAVACQIRGKYKLPIMRDYYDLKRSEGKPRGVAMVACMNKLIRIIFALLSKNQMYQLYI

SEQ ID NO: 256685 - protein, 312 aa, unidentified
MYYIGIDVSKKDLSVFDGKKDLKFINKEGLKSFKKYLKKKVNFSDLVIIFEPTGVYSFYLKEFCAENRIKAYIVNPKKSHNFTRALGKRSKTDKIDARILYQFHKLIEAKDIQVPKVDQQAKALAGYLVSYEFALRQRVALSNHLESLRDKELITLLKKDLKRAKKLEDRLFNDILEYVSKNQNLKEDYQRLLTISGVGDKAAIALLTLFKTYQGTNRAQITALFGLDPTRRESGTSVKGKVKISKNGKGIYRKILFLPTVCATVHNQKIRVFYQRLLAHHKTKKLAIIASMRKILLIAHAMYRDKTEYIAV

SEQ ID NO: 256686 - protein, 357 aa, unidentified
MNKSKQLDFKGQDIFIGLDTHLKNWMVSIMVNESPFKTFSQDPRPETLRNYLAKNFPNANYHSAYEASFCGFKIHRDLLNLGIKNIVVNPADIPTTDKERKQKEDSRDSRKIAKQLSQKDLTAIYVPEIEIEGDRSFIRYRKTLTKEIARTKHRIKSQLYYFGIEIPTKFSEKSYWSKNFTSWLQEIDLPTESARMTLNGHLEMAEMLRKKQLSTNKEIKKLSEKKIYKENYNLLISVPGIGGLTAMIILTEIGDINRFKNLDKLCSFIGLVPMTNSTGENEKTGDITVRKNKILRKALVESSWIAIRNDPALILAYQKLIKRMEPQKAIIRIAKKLANRILYVLKNKKIYVQAIVK

SEQ ID NO: 256687 - protein, 317 aa, unidentified
MTKRVAKRTYGVDVAKAWLDIHSAEDNEVVRIDNDVGAIERWLRSLCGPVRLSVEATNTFHELFIAHAYQQGHHVYVVDALKLSRYRDAVGCRAKTDQHDAALLARYLCREYQQLKLWKPLDLRQTAFWRMLKRRATVVHTSTRLRQSLTDLGMLDSASKALIEHCQQLIRQLERELMASARELGWVEELKYSRSIPGIGPLSAMGLVAAFHRGTFRSADAFIAFLGLDVRVRDSGRFRGRRKLTKKGEPEIRRLLYNAAMAACRDPYWKPYYLSLRNRGFSGTAALVALSRKLARVAFALLSQQTSFTPKPRTGLA

SEQ ID NO: 256688 - protein, 385 aa, unidentified
MTNQLQETTLIPRDYDIFGGLDVDKKSMAVTFRDHGTMRKSLKLPYSASQLLNYTRKNFPGQRVAFVYEAGPTGFGLHDELTAASHPCLVVSPSMVPTVQRKRVKTNRLDSNKLSEGLRGGQLRGIHVPAPAYRELRHLVQLRDTQVAQLRASKCRIKSLLLYEGIPFPAANGKWSVPALRQLEALPCNATVRFKLDQLIDALQFHFLAAAKVQKQIRYFCQNDPELRRCISFLVSLPGVGTITATHALARLGDWRQIKDVRQIAGFLGLVSSEHSTGDKENRGEITRIGDSRLRNKLIQCAWTAIRKDPELRAFYRRIYERQPKKVAARKAIVAVARKLTTRMYAVLKEQRPFVIRPGSSIAPLTAEETGGPRERLDAAQNEQP

SEQ ID NO: 256689 - protein, 458 aa, unidentified
MDVLYSHVAGIDVHKKQVTVTARTPDPRRPIRWEKTRTFRTFYADLLVMGSWLVELGVTRVAMESTGPYWWPVYAALREVGGPGLAIDVVNAAHVKAVPGRKTDVKDSQWLAQLLEVGLLRGSFLPPDDIREIRDLTRYQTKLTEERSREKQRLLKVLEAAGIKLDVVASDTFGVSGRAMLDALTAGERDPQVLAGLARGVLRNKSDDLRLALSGRFTTHHGQMIGFHLARLDHLDQMISQVREKIGHPGSPGTGRRAASGPSGLVAPFTEQIRLLTSIPGIGDRAATVIISEIGVDMSRFPSAKHLAAWAGLAPGNNESAGRRRRARHRKGNTHVQSILIEAALAASRTRTRLGARFHRLHRRFGGRANKTAGKKAAFAVAHTLIKVIWTVLSTGRLYTDLGHDYYTRSVDPQSHTRRLIAQLETLSGKKIILVDHDDRGSPDDGSPPDGLSRETAA

SEQ ID NO: 256690 - protein, 449 aa, unidentified
MQELRLGIDVASAEHHRAALADETGRLIWSNRRFVTTSAHLESLWTAVRAAGDVPVLVVMEPTRNAWVPLAAWLRARGATVRMVPPEQSSDLRKYYNKHAKTDRLDCELLARLPLLHPDGLVATPGLGPGEALRRAVGHRAGLVARRTAGVQRLDALLELLGPWWTASLGTDPGKAALTVLERYADPHALQRLGRARLTRLLIRASRGAWREEKADELLAAAAETLRLWPVDAIDFAELSEDIATEARLVRQLTTEIEALDDRIAPLYADADPAGIIASVPGVGPTLAPAILGRLGDAKRFRDLAAVRNYTGLVPKVEQSGASDKRPGITKSGDHLLRQALFLAADHARKVDPTLAARYQRLRDAGKHHNSALCTLAAVLATRIAACWRNGQPYDLQDLDGRPITEAEGRTICATLKPAKGTDRRSKESPRAPSTGPSTHQAKNLRKTA

SEQ ID NO: 256691 - protein, 364 aa, unidentified
MRKTSTTAAASNMNLQAKLTIGLDLGDRSNWYCVLDETGEVVSEQKVSTTPKAMREAFAAMPRSRVALETGTHSPWVSRLLQELGHEVIVAHARNVRLIGESRRKDDRLDARTLARLARIDPELLSPVKHRSRQAQADLMVIRARASLVRARTGLVNVARGLTKSYGERIRGCNPRNLDMEKAQALSPELQAALGPLLAGLEALSERIAEYNQQIESMAQQRYPQTALLKQVKGVGTLIALTYMLTLEDPHRFRKSRDAGCYAGLQPGRRNSGDSEPQMRISKEGNPYLRTLLVQGAHHILGPFGADSDLRRWGLKLAERGGKNGKKRAVIATARKLAVLLHRLWVSGEVYEPLRGVNRMAAVA

SEQ ID NO: 256692 - protein, 377 aa, unidentified
MEDDITLFIGLDVHKDSIAVAAADTGRSAPRFIGTCAPNMKELGKTLAHLGTPSHALLAYEAGPTGFALARELAAHGWRCQVIAVSKTPRRPGERIKTDRRDALSLAGYLRSGELTPVTIPDARDEAVRDLSRAREDAVRARLKARQQLKAMLLRHGKPYTGKTSWGPTHDKFLSRIAFEHPAQQIAWAEYRSAVLEADQRVDRITQALREQVLHWRLGKVVQALMCFKGIDFVAAVTLVSELGDLHRFEHPKQLMAYLGLVPSEFSSGASRSQGSITKTGNSHVRRMLVEAAWCYRYSARMSRPVTERQQGQPRSVCEVAWRAQLRLCTRYRRLSARGMHANKICVAVARELAAFLWEAGRLVDYPAREEKALTSK

SEQ ID NO: 256693 - protein, 408 aa, unidentified
MLTPIVKRCAGLDVHKMVVVATVLLEQEDGSLREETRQFGTFRKHRRQMVRWLDGLGVELAVMESTGIFWKSIFACLEEAGIATYVVNARHVKKVPGRKTDVSDSQWLATLGRLGLLKPGFIPPKDLRELRLITRQRIKLRGMLAAETNRLHKVLDDAGIRLGGVVSDINGLSARALIRGLIEGKAPEDMVPHVHGRLKEKIPQLLEALNEPLSQRHRFLLHSLEEHIGYLEKEMATLDHYLFAAMSPYKRQWEILQTIPGIDAISAAMLLVEIGIEMQCFGSAHRLASWAGMCPGNNESAGKQKGGRTRKGNHVVRQVLCEISNAASKSKSQFKGQYQGLVIRRGHKRAIIAVGHKVLRVVYAMLKSLQPYRDPEIDYTRLVVQRNAPRWLAALKRYGFLPAVGAAA

SEQ ID NO: 256694 - protein, 355 aa, unidentified
MSSYFTGMDLHSNNTCSGIIDETGKKIFKAKFTNDLPEILKSLEPYGKDIVGIVVESTYNWYWLVDGLMDAGYRVHLANPSAMKQYEGLKYVSDYTDAFHLANLLRLGILPEGYIYPKAERPIRDLLRKRTMLVQQRTAHILSFESFFTRVSGKRIKSDEVKGFDIKKLDETFKTEFEVLAAKANISVIKYLTEKIKEIEKVVLTAIKLTPQFQKLLTVRGIGNILALTIALETGNIGRFKDVGNYASYCRCVQSIKKSNGKKKGENNRKNGNKFLAWAFVEAANKAKRYCPNASRFFQRKAAKTNNIVATKALAHKIARLSYHIMKDQSEYDPVRAFGRLKKGLQQLSSSGVGL

SEQ ID NO: 256695 - protein, 391 aa, unidentified
MVCVGIDVAKDKHDCCILDSDGMVRADCFTIPNNMDGFKQLLQTIRNCTKKSDKIKVGLEATGHYSYNILGFLLDNGLPTYVINPLHTNLYRKSLSLRKTKTDRVDARTIATMLLSDVDLKSYTDTAYHNEELKSLTRYRFDKVRERAKLKQSVSRLVTILFPELEKLVPSLHIASVYALLSEYPGAKQISEIHLTKLTNLLATASKGRYGKDKAIQIRDAARTSIGSVMPAKFLELKHTIKLIRELTSEIDEIEVSIQKIMDELNPPILSIPGVGIQSAAMILAEIGDFSNFESPDKILAYAGCSPSTYQSGKLTNCYAHMEKRGSRYLRYALYNATKYVCHWNPVLAEYLAKKRAEGKHYNVALSHATKKLVRLIYALQKSGKAYLVAA

SEQ ID NO: 256696 - protein, 339 aa, unidentified
MKLYCGMDLHSTNTYTAIMDENRKRVIDCKLANQPKVILGFLEPYRTDLEGIVIESTYNWYWLVDMLQENGYRVHLANPSAIQQYSGLKYVDDRHDAYWLADLLRLGLLREGYIYPKEIRPIRDLLRKRAHLGRLRTSLLLSAQNIVLRNHAVKVASEDIKKLTTDLLTPHLQESEGLFLTGKISKDLIDAFTRQIKAIETWVMKRLQPEKLFLNLLTIPGVGEILAMTILLETGCIARFPKVGNYVSYCRLVASQRLSNDKVKGKGNDRNGNKYLAWAFSEAAEHARRHYPMCRSFYNRKLNQKNATVAHCALARKLSRAAYYIQKDQVAFDETRLFS

SEQ ID NO: 256697 - protein, 369 aa, unidentified
MNDITYVGLDVHKATVCVAIAESGRGGELREVGVFENRPDVLRKMVARIGKHRRRLNFCYEAGPCGYGLHRLLTGLGHECVVVAPSLIPMKVGDRVKTDRRDALMLAKLHRAGELTPIWIPDASHEAMRDLVRARATAVRALSKARQHLQSFLLRHDRIYHGARAWTLAYRRWLTTVRFDHPAQQIVLQDYIHAVEDAESRRDRLTRQIEELMPSWSMAPVAAALQAMRGVALVAAVTVVAEVGDFRRFTNARQLMAYLGLVPSEHSSGSTVRRAGITKAGNALARRVLIEGAWTYRMSARVSRKLHDRLEPLSAAIRDIAWKAQVRLCARYRRLVAIGKPKVVVTTAIAREMVGFIWAIARVAQPELI

SEQ ID NO: 256698 - protein, 351 aa, unidentified
MDRYIGLDAHASSCTVAVLGPSGRKLQCQVLETNAKALISFLQTIPRNRRLIFEEGTHSNWLYEVLAPHVQETVVVAVRQSRGPKDDERDAFGLAEDLRIGNVKVKVYKKQGKFATLSHLARAHGTLVVDTVRCQNRIKSLLRSRGIATGGKQVYSVNGRSQCLSQLPNQACGQANFLYEQYDALSKIRKQAEKQMLVEARKHPVYKVIKTCPGMGKIRTAQIMPIVVTPYRFANKRQFWAYCGLGIVMRSSSDWVRTQNGEWIKAPIQKTRGLNRNFNRSLKHVFKGAATTVIGRANKDDPLYRHYQQLLDGGTKPNLAKLTISRQIASIVLSVWRSQEVYDPRKLSPKT

SEQ ID NO: 256699 - protein, 392 aa, unidentified
MLFVGIDIAKRNHEASVIAQDGHVVRKAMRFANSQAGYNKFMDMVRSLSEPVVFGMEATGHYWLTLYTHLRNDGFTVHVINPTQSDALRGMYIRKTKTDSVDSVIIADVIRFGRYCETSVDPGDLQAMRELCRQRFYIIDMASDLKRKVIALLDQVFPEYEKLFSDSFGLSSMELLSQYTTPEEMLSVSSQQLAEVLKKASRGRLGAEKAVEIQDAAKNSFGIVMASSSFSLIIRQYIEQIRSLEASVDVFDAEIARLLSGFDTQLTTITGIGSTLAAVILSEIGGDIRRFSSPAKLAAYAGVDPTVKQSGDFSGTRIKMSKRGSPYLRRAIWLASTVAAFKDPVIHALYERKRAEGKDHMTVIGHVCRKMISIIFAVLRDNTPYVPAGISD

SEQ ID NO: 256700 - protein, 400 aa, unidentified
MRVVFGIDVSKASSEVAILINGEKVHGYTIPNDAIGFNRLLGDLKTVHQPEIVFEATGVYSRRLQAFFEDNSYAYTRLNPLESKKQLDSLRVRKTDKIDAEKLATSQFILNRKPSYVQEALYQELRDLSRFYQNLTEDIVCAKNRLHKVLQVTFPELENILSAPTGEQYWNLVMTFPCNSFVLELDDAALRAIIRQSTSKRISEKRVTYLVDKLTKLANQSYCAVKKTSPMMEEVKYYAGELLRLSEYRQSVLEEMVTLAQPLPEYEILLSIPGIAETTATSIIGELGDIRRFHSANQINAFIGIDLRHYESGDFLAKEHITKRGNPYARKILFKCIHNIASASHTNPCHIADFYEKRKRQSQVTSTKPHTIASIHRLIRTMYYLITHNKLYDYTSTQNR

SEQ ID NO: 256701 - protein, 340 aa, unidentified
MQVSIVGVDLGKNSCSLVGLDAAGKVALRRRLRRDGVVALLAKLSKCVVAMEACCGAHHLGRALAEAGHEVRLMSPEYVRPYVKAQKNDDRDAEAIAEAATRPTMRFVALKSEAQLDMQSLHRVRDRLVGERTALMNQIRGLLLERGLVVPQGKSRLAVALSDLLDGEANALAPRMRVLMRDLREQWRALDERISAFDAEFAETAKADEDARRLLSIPGIGALNATALVAAVGDATAFARGRDLAAWLGLVPRQISTGGKPKLVGITKRGSKYLRKMLIQGARAALPTLRASDTRIGAWLRGLLARAHGNTAVVALAGKMARIAWALLRRGQIYSTAPVA

SEQ ID NO: 256702 - protein, 385 aa, unidentified
MTIQIQVPRFIPRDYDVFAGLDVDKKSMAVTFADHAGSQRALRMAHQVTPLLNYVRKHFAGQRVAFAYEAGPTGFGLHDELVRRAYTCVVVAPSKVPRAPGERVKTNRLDSRKLAESLRGGQLHSIHVPSGVYRNLRHLVQMRDTHVRQLTSSKLRIKSLLLFEGIAFPEEHEKWTARAMRELQTLPCSETVRFKLDDLLDTLHFHFQAAARATKQIRQYCLDDPELQQSIDLLLSLPGIGWIVGSHLVARLGNPREIKNGRQIAGFLGIVSSEHSTGDKQNRGEITRSGDSRLRNKLIQSAWTAIKRDPELRAFYRRIYQRHPKKVAARKAIVAVARKLTNRIYVVLKEQRPYVIRPDSSIAPLTVEETVGPRERLDAAQNDQS

SEQ ID NO: 256703 - protein, 438 aa, unidentified
MKVMHERVAGIDVHKKMIKVAIRSPGDKPWTRKTEILTFRTFYGVLREMARELRARGVTHVVMEASGVYTEPVYYALLEEDFTEVLVVSPAHVKALKGHKTDAKDCARLAELLECGLLQGSYIPAAELKEVRDLTRYRSKTVQARTSEIQRLDKTLESAGIKLGSVASDITGKGPAAMIEALIDGERRGKVMADLAKGRARAAGKLADLSMALEGRFTEHHALMCRLILDRIRVHDTAIGGLDKQIAGLAAVWQREIDLLKTIPGFGDVVAWTWIAEIGPAPHQWFGSHEKLASWVSLAPGNYISAGKRKHSRTGDAGTYIKPVLVQAAWAAIRVRGRLQARYNRLVRRFGGPKNPAAKKKAIVAIAHTLLKIAYSVLKSGTPYQDLGEDFYTRRETPAQRQAWLERQIQKLHPGCTVTITISPPPGHAPEAALTPGA

SEQ ID NO: 256704 - protein, 436 aa, unidentified
MKQKYNKCAGIDIGSTQIFIAVENENNFTSYGTTTSDFHLAASMLANKDIKNIAMEATGVYWMGLYDILESRGFKVTLVKAGDAKNLPGRDKTDGEDCQWICKLFSHGLLRASVIPEDKIRQLRVFIRMRQDHISIAAQHKQHIQKAFVMMNVRLPETISDITGTSGRKMIEAILNGERDAKQLLSLCHSTIRNKKEEQILKALTGIYKEEYVFALEQAYQCWKFYQSKIEQCDEKINEWLKVIVPENAIDKKVKVKKSVGVNKLNIEDIEYKLIALHGGIDVTKLPGIGCNTAMQLISELGLDLSKWGSDKRFVSYLGLCGQKNYSGKMKKHKKKKMPIAGQIFREAAQTLMQSTKTGLGTFARRLKARKGPYVAIKATARKLAILYYNLFTKGINFVEKGVKDYEDKIKQTEIYRLAKLAKKHGYVLANAQLHQ

SEQ ID NO: 256705 - protein, 355 aa, unidentified
MNDRKYIGLDVHQATISVAVLDSAGKLVMEAILETKTETILQFIHGLRGSLHATFEEGTCAAWLHDLLKPHVAHVLVCDPRKNALIKVGNKSDRIDARKLADLLYLDKLHPVFHGEVGNRALKELARSYLTLTRDTTRVMNRLKALYRSWAIPCAGQRVYAQRYRSEWLAKITPAGVHRRAEIYYQQLDALRSLREQVRRDLLAEGRKHSAMNLLRRIPSIGPIRAVLLIALMQTPHRFRTKRQLWAYCGLALKTSSSGEYQIVEGRLKRSRKFLAIRGLNTNHNHDLKNIFKGAATRAAAVPGPFQDFHAGLVARGMKPTMARLTLARKIAAITLIVWKKGVDFDAEHLKQQAA

SEQ ID NO: 256706 - protein, 343 aa, unidentified
MEESQGLVVGVDTHKESHSAALVDELGAVLGSTDVEANQRGYVQLLQWARGRSSHRTWVVEGTGSYGAGLASFLVRCGEVVYEGDRPQRRKPGASGKSDQLDAIKVAREALAREHHALPRQRGNREAIRVLLSTREGAVSASRQALNQLYALVVTAPEPIHERLVRLKGEQLVAACVRLRCTSAVIETSVTTRALRQVAGRIRTLQAEAAAYDAQLERLVAQTVPALLAEPGVGTITAAQLLVSWSHAGRIRNENAFAAMAGVAPVPASSGRVVRHRLNRQGDRRLNRALHVVAICRSRLDAKTKLYIARRTAEGKSSREIRRCLKRYLARRFFRLLQGLDNT

SEQ ID NO: 256707 - protein, 336 aa, unidentified
MKGPIVSIDVSKGKSDYQAFKEMNVKYTGSRSIKHTKEEFDEIVSLVREMEKKLETEVCVVYEATGVYHRVLKKVLEDNNIKQFIINPLLSAKTRKNDSLRSPKTDKLDPKSIAKTYYSHSLHNSHKPETIYHELRELSRYYEDILVHLRKDKVAFRAQLDVVFPGYDTLYDDLYGPVALAVIEKYPHPEMLQKKKINTVSKVIQSKTCHRQAMSDTMADKAIEYSKTIYSGCDKDDIEVLILQRFIKKLKEDMAEAERTIGEMIKLAQELPDFSIIKSIPGIGDNLAARIIAELGDMTRFKKKNELVAFAGLDPRISESGQNDGDHMHITKKGNK

SEQ ID NO: 256708 - protein, 353 aa, unidentified
MNTPHYIGFDVHKKTVNYCIKTADGQIVEEGKLAAARAKLREWAAARTCPWQGAMEATLFSAWIYDTLQPYAERLLMGHPARMKAITAGKKKSDRLDARTIADLLRCNLLPACYVLSPEMRDLRRLLRYRNLVVQESVRMQNKIAGLLMESGTPFVKEKLHGKKYFASLIQTLEEVPESVKDLLAMSRGAMEMFQSTQKRLVRCLLADRKLGPRVERLATIPGVGPITALTWALEIADPQRFSSNGDAMSYCGLTSALRSSAGKQQRGPISKQRNAWLQTALIEAAKLAPRWNPQLAAVHARELERGHRNRATLAVARKLVAYLLAVDKSGQPFQVRTLPPAVATTALAARAG

SEQ ID NO: 256709 - protein, 406 aa, unidentified
MRLFIGDDWAEDHHDVEVMDAGGRVLAKKRLPEGAAGMARLHELIGIQLGEDAQDAEVLVGIETDRGPWVAALVAAGYVVFPVNPLQASRYRERRGVSGAKSDGADAHMLADMVRTDWHQLRPAAGDSAEAGAIKALARMHKTLIWDRTRQLQRLRHQLREYFPGALEAFDDLAAPDALELLAKAPDPARAARLTRAQVSAALKRARRRNIADKTTAIITALRSAQLGQPPALTGAYAAAVRSLIAVITALDEQVTVLQVQVEAHFGQHPDAEIYLSQPGLGSLLGARVLAEFGDDPHRYASSKARKNYAGTSPITRASGKKKTVMARYIRNDRLIDALMAQAFTALNVSPGARAFYDQQRAGGAGHNDALRRLANRLVGILHGCLKTQTLYNEATAWSHRRKLAA

SEQ ID NO: 256710 - protein, 338 aa, unidentified
MAMLSFGGIDVSKDRLDITVLPDEQCSSVSNDAAGWAELIEQLRGSSITAIGVEASGGYERGVVRALLAEASGGYERGVVRALLAAGMSVRQINPFKLRQFAKASGILAKNDRLDARMIASFVAIMPTRPAQRQTPMIEQLAAMLTVRRQLSDHKVATENASRLLEDAMLQRLSRRRVAGLTADIDLLDQRLVEIVTADPALAHRFWLLTSMPGVGAVLACTLIALLPELGQMSRKQVAALVGLAPYDFDSGKLKGRRCIWGGRARVRHVLYMAALSASNWNPALKAFHDRLAATGKKPKVVIVAVMRKMITTLNAMLRDGTTWVDRYSGRRSAATAR

SEQ ID NO: 256711 - protein, 347 aa, unidentified
MRFYTNQHQFYCGIDLHARSMYVCILSHDGEILLHRNMKAAPEAFLKAIAPYRDGLVVAVECIFTWYWLADLCAQQGIPFVLGHALYMKAIHGGKAKNDKIDSQKIAALLRGGMLPQAYVYPAQMRATRDLLRRRTHLMRKRAELLAHVHNTNSQYNLPEIGKKIAYKANREGVAERFEEGSVQKTIEVDLALITYYDELLKDLELFILKTAKHHDANTLYLLQTVPGIGKILSLVLLYEIHQIDRFASVQDFASYCRLVKCSKESGGKRLGTSGKKIGNAHLKWAFSEAATLFLRNNLQGQKLLSRLEKTHGKGKALSILAHKLGRAVYFMLKRKVAFDLDRFLQT

SEQ ID NO: 256712 - protein, 333 aa, unidentified
MQNFYFIGIDVSKKKLDICVMSNSKVLKEEQVSNHPQAIATVIACIKEELSMSNDSFIICAEHTGQYTYPLICACRSAECKLWLENASQIKYCSGVTRGKNDKVDARRIAEYAMRFLDKAKPYNRPTEELMRLKQLEAERSLYLTDLAKYKAQLSDQEGFMEDKIFKRKARRLKAMIKSLEKTLKEIAAEMADVIDSSEELSRQMKLLKSVEGVGPVVAMNMIIATEAFTRFDNPRQFNCYVGVAPFAYTSGSSQHSRNRVSQRAVKYIKCLLHMAAVAIAHKKTGDLKTYFERKVAEGKNKMTVLNAVRAKLVARMFAVIRNNQVYQPILSV

SEQ ID NO: 256713 - protein, 410 aa, unidentified
MLSKGGEKTQNREGRGRSNTLEANKPGGEQDRRATTKPAESPNSRWGHKVEPELRKAGSGPKSKWVKVMSQYAELYVGIDVAKRTLEVALSSGELLSVVNDDAGIADLVQDLVKRAPALVVLEATGGYERKVWLALLEAGIPTARVNPRDTHHFAQAHRQLAKTDRLDARGLMLFAAQMRPRPDVAPAAADERLKELVGRRQQLTTMLAAEHNRHQQAISPANRRSIQTVIRFLERQRKALDQAIEKHLSKTAQAQELNELLQTAKGVGRVVSATLIARLPELGTLTRRQIAALVGVAPYDRKSGDWDGRSHIFGGRADVRCALYMATLSAVRRDPHLRAFYRRLREQGKAKKVAPLPASANWLSPSMRWSKTALLGGPHVQLSPDHQTSRSCHFCWPSSGCPQVHRRVS

SEQ ID NO: 256714 - protein, 387 aa, unidentified
MRVAAHRAEAPSAIYVDLGAIFVSLELSRSKWLITSLSPGGGEKMSKHMVAGGDVAGMLSCFAELKRKAQARTGRCLPIIVIQEAGLDGFWIHRVLQADGIESHVVDPASIATSRRRRRAKTDKLDGEALLRALLAYKRGEPRVCAMLRAPTPEEEDRRRIVRERKALTNERIRHVNRVKGLLFGQGVSGYEPLRSDRRKRLEELKTGDGRSLSPNLKAQISRELDRIELLLTHIKDVEEARDTMLESAQAVAPAPKLLLNLKGIGPEFAAVLWSEGLSRHFDNRRQVAAYAGLAPTPWQSGIVDHEQGVSKSGNPRLRSTLIELSWLWVRHQPQSALTIWFKERMKQNGGRFKKSTIVALARKLLIAIWKYVNAGVVIEGAALKAA

SEQ ID NO: 256715 - protein, 433 aa, unidentified
MLKINYMSTLFVGIDVSSKTNAVYAMDFEENKYISSSFGNNQPGADQLVDMIAECMQKHQNLDTLLIVLESTSVYSVHISNFLSTSEVLMPYKPYVFCVNPKATSNYRKSYIGMEKTDPTDAYLIADFGRVGRTKKLEPWRGGQFIALKRLTRHRMHLSECITREKTYMVSNLYLKFSELQLLEGDDKPFGSLYGATSSAVLTEFLSPQEIIDMPEEDLLAFLAEKSRNRISDISKTSELLRKAARDSYRLDKCMYEPLNISLASSFNCIHAYQKEIRLIEQAIEKCINGMNPNALIILRSIPGIGPVWASGILSEIGDITAFHSSDALAKYAGLYWPKGDSGNFTSEDNSMSKAGNPYLRYYLGEAANSVRKHIPEYADFYARKYAEVTKHQHKRALALTSRKFVRLVFGLLVKNQLYTGEKLDTEYNTESN

SEQ ID NO: 256716 - protein, 355 aa, unidentified
MSIVADTHPFVVGVDTHARNHVYTILTATGVLVDAAEFPNTTAGINRAIGWVARRTEADADVLWVIEGAASYGTALTAAVTAAGYPVAEAPRMDAKHRYGIGKSDTLDSHQIAAATLPIPVEKLRRPRLNYGIRQAVRILVTARNAIAQDLNRTIKALTGLVRSNELGLDARAALTKAQLAQIAAWRRRNEELSQSVARAEAIRLAKHALELETQLADNHRQLAELIQLSEAAPLVEEPGIGVITAAKCLTVWSHHGRIRTEAEFAALAGVNPIPASSGNTTRHRLNRGGDRSLNKALHMVAISKMTYDPETRKYVAKRRAEGKTDREIRRCLKRYIARRIFKILNTQATLNQPA

SEQ ID NO: 256717 - protein, 459 aa, unidentified
MGKAKACKGGKNQLQVIHPRAAGIDVGSKFHVVAVSAEYDPDPVRKFNSFTTDLHRLADWLKAVGVTTIAMESTGVYWIPVFEILESRGFDVILVNAREAKRVPGRKTDIKDAQWLQQLHQYGLLSASFRPGEKIASLRSYLRHRERLTEYAAAHIQHMQKALMQMNLQLQHVVSDITGDTGMRIIRAIIEGERSATKLASYRDPHCKQSEKTISAALTGNYRPEHVFSLKEAVALYDFYQKQIKECDQEIEKALAALNSDKNPPSEPLPKARRTQKQKNEPGVPIREMLYTLTGVDSTQINGIGPYTTLRLVAECGTDMAKWPTSKHFTSWLTLSPGNKISGGKVLSSRSRRTKNRATTLLRIAAVNIGKTQTALGAFYRRLAARVGKAKAVTATARKLAVLFYTLMRYGKAYVEPGADYYERQYRERVLLALSRKAAALGYRLAQKQETSPVTGNVS

SEQ ID NO: 256718 - protein, 412 aa, unidentified
MQTIVERPAALDVHKAQVTACARVPGRRGGRERHVAEFPSTVRGLLALRDWLAGQAVTQVVMEATGVYWKAPWAILEDEFECLLVNARHVKQVPGRKTDVSDAAWLCQLAEAGLLKANFVPPKPIRQLRNLTRYRKTQIQERAREVNRLHKALEDAGIKLDTVAADILGKSGRDMLDALVAGETDPAVLAELARRQMRKKIPALREALAGHFDAHHRLWVGAILRHIDFLDEQIEQLTGMIEEQIRPFAPAVELVCTMTGIQRRGAECIIGEIGTDMSCFATARHLASWAGRCPGNDKSAGKRRSGKTRNGSKWLDFALEEAAMAAIRVKGHYLEAQYRRLKPRRGHKRALGAVKHTMICAIWHILATGETYRDLGGDYFTNRDPERQTRRLVAQLERLGHHVTLTEEAAAA

SEQ ID NO: 256719 - protein, 313 aa, unidentified
MSQNNTSILYVGLDVAKLSLQLHLAGRFHSLANDTKGHARLLKLLRGHPGAHVICEATGGYEQPVVRALQAADIPVTIVEAGRVRYFARAQGQRAKTDPIDSAVLTHYGQTFQPAPTPALSAQQQRLADVAQRRRQLIHSRTMESNRAEHYTDPLCVRQTRQLQKTLEKQIDQCDQLLTALIAEDAQLAQKAARLQTIPGVGPVVAATVLAEMPELGKLNPQTAAALAGVAPYNRDSGDHTGGRHISGGRRPVRCALYMAALSAVRYDRILKNFYQRLRATGKKPLVALTACMRKLVVLMNHLLKNDKFQLAN

SEQ ID NO: 256720 - protein, 465 aa, unidentified
MATDNKPWRNRKERKEWARRLQAEDPGLDVVHSHAAGIDVGNGAHYVAVRPDCDPQPVRRFECFTADLHRLADWLESCGVKTVAMQSTGVYWIPLYEVLEERGFKVYLVNARHTKNLPGRKSDVQESQWLLKLHTYGLLNNSFQPPAEIRILRTYWRQRAEHVRGAATCVQRIQKALTQMNVQLANVISDVSGLTGQTIVRAIVAGERDPVKLAELSQPGIQASREEVAKSLEGNWRPELLFVLQQEIAMYDVYQQRITECDQQLQKQLAGFAGTVPLHAPKAEQKRKRIKPAKNAPRFELRGELQRITGVDLTRIDGIDVMVAQTLVSEVGLDMCQWKTEAHFASWLGLCPDNRTSGDKVLKRGTRRVVNRAATALRMAANSLMRSRTYLGAQYRRLRTKLGAPKAITAMAHRLARLVYRMLKYGQQYVDKGAAYYEQRYRQQQFEFLTKRALKLGFKVIPLQS

SEQ ID NO: 256721 - protein, 325 aa, unidentified
MGIARLLDQQQPDNMNKIPTTALTEEVSKNNGPKGSKTKQIFLGIDAHLRSYQVAIKRDNGAIQAAQRFGLSELLLYAHKQLQWAEEVYAVYEAGPLGYALYRQLKELGIKAYVSAPECLEQGKRKTNKLDARKLCSRLYSYVQGDKEMMRVVRVPSVELEQMRIESRQYDQLVKMRKALSMQARSLVLSQGCGTMNGSWWRPIAWAKWSQLLPPWLVKHLELWQKNLQLLDQQISECKIALIKSLKEALPKGFGAQSMCQLDREIGDYQRFNNRRQIGCFGGLVPQEYSTGAHQRLGSITKVGSPRIRRLSVEMAWRLVRFQPN

SEQ ID NO: 256722 - protein, 472 aa, unidentified
MCKNERTRNNEYCQFIRIIRGSKEHLIVGIDIAKDKHHAFFGTATGKVLLKKLIFQNTHEGIAKLIEYAEALKIRNNMTEVVFGFEPTGNYHKPLGDYLVKSGRMVVLVSGASVKKNREIMDGRWDKNDTRDAANIADLISQGRCLFYEYPPQGIRDLRELLSLRKRFKKEEHRLMMRIRNNLVTRHFPEFDRFFKENEQDSLAITKWCLNPQEIHTKDFDKFFALVTARRRSLAQENRLRAIHFIAGNSIGCDMGETSVFEAGALVDQVKAVRAMIKDIESRMEKTCREFPEYEFLLTIPGFGPFISSVVLATIGDPYRFRNASQVIRLSGYDLSAKRSGRTSDKAVPEISKKGNPDLRYALYQAAMLGSAHHRDMMTYFARKLKGRTREKGIITKMRVKLAVKLLVIAWTLMKKKEPFNPEYLKEPCFEKEGGVNHLLEGEKTEARVLSRVSASSSRRDRRPLRANSSGG

SEQ ID NO: 256723 - protein, 408 aa, unidentified
MTVVGIDVSKSKSMVAAMKPGGKLVAAPYEVRHSDIELSHLALDVLCMEPDTRVVMEATGRYHEPVAAQLHSAGIFVSILNPLLIKQSGAGSLRKVKSDPKDALKIAKYGLDNWSTLREYTPMEAIRQQLKLCARQCDLYNKNIVMLTNNLISLSDKTFPGVNELFSSPEKADGHLKWVDFYRTFWHCDCINRMSPDAFEERYKKWCKRKGYHFSADAADALYAASCGLYTTLPRDNNARLLVTVAADQLIALRENQSKLEAEMLNFCKQLPEYETVMAMYGVGKSTGPHLMAELGDIRRFLHRSSIVAFAGVDPGVVGSGKMQLSSVATSKRGSPQLRKALFQVVSTYVKCKPENEAVYQFYTKKRDEGKPFFVCTTAAANKFLRIYYARVKECLNAAESATQVEEG

SEQ ID NO: 256724 - protein, 346 aa, unidentified
MDKLIRIGMDTSKSVFQLHGVNEAEQPVLRKKLRRNQVLAFFAGLSPLKVGMEACGAAHYWARELRALGHEVLLMPAQHVKPYVQRSKSDAADADATCEAMNRPRMRFVAVKSADQQAAQMLAKLRAQFIDRRTQLSNSIRGFAAEFGLIAPKGLSRLGDLLADIRADATIPDTARDMFETLARDYAHINVEVAALDEKLLTLHRHNEVSRRLAAIPAVGPVGATLLAIKVPDASGFKSGRDFAAWLGLTPKNHSTAGKNRLGVITRAGDEMLRSVLVAGATALIQHMRRGSKRVWPWLAALVARKAPKLAAVALANKLARIAWKLMVSGEQYRPIGATCPAPMQS

SEQ ID NO: 256725 - protein, 412 aa, unidentified
MKDLLEISCGLDVHKEKIVACILTGPLGKPTRSEIREFTTLIPDMIALRDWIVSQNCHHVAMESTGIYWMPIYEILEDAFSGDITLLVVNARHMKNVPGKKTDMRDSEWISTLLRAGLLNGSFIPEKRIREFRDLNRYRKSVIHDITSQKNRIEKFLQSSDFRLSSFISDIFGASGRNIILHLIEHGQIDKTALDSCLKTKTRNRIDEILMSVNGTLSEHQKAFLRILMTHYDSLKKHLAEIETSLEEDMAPFTLQVEQLNSIYGISTTASCAIIAEIGIDMKPFKTAEHICSWAGLCPGNNESAGKRKSTSVTKGNPYIKSMLCEIAWVIAGKRNTYLSAWYWRIKQKKGAKKAIVALARKLLVIIYTMLKQGTLFDESCFETRRKNCEQKQLSRYIRELEKHGYHVEAQS

SEQ ID NO: 256726 - protein, 339 aa, unidentified
MQVYGIDLSKEKFDVNFFDTDGKEKNKTVKNGLASISKFLDKVPEGCVLCAENTGSYGDLLVFLCNQFGVAIALVPGYTVKHSLGILKGKSDPIDAARLREYGERFFDRLTFKEYHSENVSELRQLYSLRSQLVKSRKQLRTGEHAREQMPMQSIRVNRVLQASLHALDEQIKAVEEEMSLIIKSELELSENYELAVSVTGVGPVIATDLIIRTGNFRTIDTARRAASYAGVCPFPNASGNMAGKSRTSPFADKQLKSLLYMGAKSAVKHNKEYRLYYQKKQQEGKPHYLIMNNVMNKLLRTIYSVVNSKTPYNRDYICLDPRERECNKNQNGSEKIVA

SEQ ID NO: 256727 - protein, 401 aa, unidentified
MDPHLSVGIDVGYRAHRVGIAHPDGSILEEFDISHSDAGFQEFFRRVEARRCELSLPVAVAMEGYNGYARPLDRLVREKGYRLFNVNNLKLARFKEVFPGAAKTDPIDTRKILELFRLKDQLPLAKDAIQEVVGAPAVNEKLKRLSRRRRHLVTEKMRVLNRMQADLQAVCPELLASTNDANNLWFLRLLIFRDDLRQLARLRRSTIFQIPGVGQKYARLIRDWQAKAQFSAEVEYVGPMIIQDARRILELRAQIHALDEAMADLAEQSEIARRLSTIPGFGKTSIAELAGEIGTLERFASEASLALYLGMCPLTRQSGQMCTARTPRQVNTRCKAAMMTTIARHIGCVPQSRAYYDRKRAESKTHNQAIRSLGRHLVRVIWAMLRDGRDYEIREDIHPTP

SEQ ID NO: 256728 - protein, 346 aa, unidentified
MEYFIGIDVSLEASSVCVMDQGGAVVKETKVLSEPDALIAFVHGLDHEVSCIGMEAGPLSQWLYKHLTEAGLTIVLMETRQVKGALKAMPIKTDRRDALGIAQLLRMGWFRPVHCKSVSSQEIRALLATRKTLQGGAIAIELSMRGLLRGFGLKVGLVSKGLLDARARELAEGNSTLKALVTSMLRGRAALRAELIRIDKRLRDVARTDDVCRLMMSVPGVGPLVALTVKAEIDDPGRFRSSKMVGPHFGLTPRRDQSGERDVVGGISRAGDAGVRTALYQAATSMLYHSSKNSWLQAWGMRVAQRRGMKRAVVAVARRLGVVLHRMWADGTVFRFSLADHPAKSV

SEQ ID NO: 256729 - protein, 409 aa, unidentified
MRYYLGVDWADQTHAVWVVDEAGQKVTARTVPHTAAGLSEWGRELEEWRAQGVEVWAAIERPEGRVVDFLLDHSVVVYPLNPKALDRARDRFRQSGAKSDPFDARVAADFLRTDHAHLAALQPSSEAAQELKYLTEDCQRLIRQQTRLVNQLTATLKAYYPRALEVAELTTALSRAFLQAFPTPEAASRLTARQWQRWARAHRLSETRTAELWAVLQAAQLPVPAHVVRAKARLMLTLVAALAPVVEAVTAYRQVVADFFGRMPAADWARTLPVGEHGITVPTLWARLGDAPARWTSFRHLQAQAGTVPVTKRSGQQRTVTFRFACDKALRHVVDQLAFLSLRTSEWARAYYDAQRARGHGHRHALRALGAKWLKIVFLMWQRQVPYDESHHLATMARQALRHPERKIA

SEQ ID NO: 256730 - protein, 320 aa, unidentified
MYNLFVGIDVSKDSFSVAALDEKAKTVFSMNPFMNAEGFADFLKILSSHRNDLSTVVVALESTGPYHLNLYSFLLSKGIMSIIVNPLIIANFNKLSLRKTKTDRKDAFTIARYLYLSRDSISNLTSSQIITDLRDLARERESILKMVASIKNDIRRILQTTFPELEHRVDVLCATMLRFLKDFPSARLINQAPSLAVAEGFSQGDGRRRISVPYTQIIELAKNSVATTSPSKELILPGKIDTLFHLKKRTDEITKMLIKLCKSIRQEEFGILTSIRGIAAKTAAPFLAELGDHRKFESYKKMLAFSGLDQPPTSRANWRG

SEQ ID NO: 256731 - protein, 410 aa, unidentified
MNAAGIDVSKGKSMVSVMRPFGEVVAKPFTVRHTGSELKELADYLKSLDGETRIIMEHTGRYYEPVAQFLHDAGLYVSAVNPKLIKDYGNNSLRKVKTDKADSRKIAKYGLDNWVELRQYVSMDKIRYQLKTLNRQCNLYGKTKTMMKNNLIALLDQTYPGVNDLFDSPVREDGTQKWVDFAASFWHLECVKNMSLDAFTGRYRKWCKRNKYNFSSDKAAEIYAGVQDQIAMLPKDALTKLMIRQAINALNAVSATLEKLKAEMLELSSQLPEYPVVMEMRGVGDSLGPQLMAEIGDVMRFARRSAITSFAGVDPGADQSGGHEAKSVPTSKSGPPELRKALFLVMDHLIQTKPLNDPVYQFMDKKRAEGKPYLVYMTAGANKFLRIYYGRVKEYLAKLEQPLAPNPEQH

SEQ ID NO: 256732 - protein, 320 aa, unidentified
MYVGIDVAKAELVVAMGATGPVTTFPNDDVGLTALVGAMREAKPTLIVLEATGGYEIPCTAALAAAPLPVAVINPRSVRSFAKATGTLAKTDRIDARLLAQFGERVQPEPRPLPTAAQQELEALVTRRRQLLEMRTAEQHRLGQALGGPRQRVKQSLRKHLAYLDRELRITETDLRDRMQASPVWRARDDLLQSVPGIGPTVSQTLVAELPELGRLNRREIAKLVGVAPLNRDSGKRRGRRMTLGGRASVRAILYMACLSAIRHNPVLRAFYQRLTRAGKVKKLALVACMRKLLTIVNQMVRTGQHWSPSPSIACQLQPT

SEQ ID NO: 256733 - protein, 439 aa, unidentified
MNKRRDRVCGADVHKDLIVATITGDDVPTIRENFGTTKAELKKFRNWLVANKCEQVAFEATGVYWMPIYDALSQTIDTIIANPLQIKTIPNDKSDSKDSKRIATLCLNGQIKRSRVFAEEDRDLRMMTRARSGYVKTRTQFRNRIHKYLSSSGIKLSSTMDDIFCKSGRYILDGLAEEKPIEEILKGIPSGKIRKKQDLIRAALENALNDTNRMLVRDALEILDNLESKIEKLSHEVLKKVQQKSKDLAIVMSIPGIGFISASVILSEIGNYRDFQTPDQIAKWCGLNPGENESAGKKKKCGITKKGSKHIRVILVQAAQTISNMNKTALSRFFQRLIKKKEHNVAIIAVARKLICLIYHLLINQELYQEDECRKRRSSQDKSCQAPSFKEENLTDRVAAIVDAFYHLKESSRKNALMREIADISGIKVGQKRPSKGGG

SEQ ID NO: 256734 - protein, 396 aa, unidentified
MRPVSRDRQETSLMSTVSTPTMYWFGLDVHKDSVTAAVFRNRDAEPMRVDRLPYDHKRIRRYFERLGKTGVARACYEASGAGYVLQRAMTEWGVDCQLAAPSLIPKRPGEHRKTDRRDAIKIARDFRDDRLALIYIPTAEDERVRDIVRCRETFQREILKSRHYILKFLRRRGFIYREGTHWTGRHFAWIRHILMPGKLAEEDHLVLNEYLALLEYKLQRRDDLDRRIEELALTPRFKPLVDRICCFRGFKTQSAMVIATELGDLRRFESPRQLMAYLGLVPREDSSGERRRLGSITKAGNARVRHVLVQAAWNYRRRPAIGKALKLRQQGQDLAVIAHAWKCQHRLYKLFHRLAEHKPRQVAATAVAREMIGFLWAVLKDLDVAALQKAEVSRAA

SEQ ID NO: 256735 - protein, 349 aa, unidentified
MSILGGLDVHRAQITFDWVDRDSGEARRGRITPATRAGVGAWLGELPGAGGGFAVEGCTGWRFVVEELQAAGLVAHLAEPAETSSLRGPKRRAKTDRTDARLLRELLEQDRLPSSWIPPTWILDLRTTVRLRKTLVDQRTAWQQRIHAALFHHGLPRPTQELLSRASRAWLERVTLPPASRQALAVALRQIDGLDAELDPIDQWLRALARRQPGCRALMSHHYGIGAITAPTILAELGDARRFVGGDQVVRYTGLDITVYASDGKRSPGHLSRQGPEVLRWALFEAAKAAARPSSPDYAYYQQVKGRQGGNRATLAVARKLARRVRQTLASLGDAALAPVEDLAVAEAA

SEQ ID NO: 256736 - protein, 358 aa, unidentified
MFYLAIDQHRKQLTVNLRNEHGDVLIKRQVSTRWEPVRKFFAEIRDLARPDGGFTAIVEVCGFNDWLLEMLRQFECRETVLIQAERRSKRKTDRRDADALGELLWVNRHRLLGGQKPHHLRRVILPSRESRENRQLAALRRRLSQCRTQTINKVRHLLRKHNLDQECPTKGIDTKAARRWLASIALDEIDRLEMNLLLAQWQLFDEQLARVEEKLSERHRCSKDAKLLSTIPGAGIFNSIGLTASIGDIHRFPTPQSLPNYWGIVPGCRNSGEATDRLGSITKQGSSMARFILGQMVMHVLRRDARMRDWYRRIKHRRGSKIARVAVMRRLAMIIWHMLKHERPYVLNGLPPVREPSV

SEQ ID NO: 256737 - protein, 347 aa, unidentified
MEEAMGMFAALDVSQEETAICVVRQDGTQVAEAKVPTCPDAIAGWLAERTEGLERVGMETGPLAVWLWNALTERQVPIICMDARHASGVLKMMPNKTDRHDARGLAQIVRTGWFKAAQIKSHDAYVNRAMLTAREALVGMRVKLENEIRGLLKTFGVMFGKRVGGFKRRAEEIIEGELAVAPELVPIFEALMQARRDILARIAALDSRIRAVAKRHATVRLLMTAPGVGPITAMAVVAAFDDASRFRRSSSAGAYLGLTPRRYESGEISRNGRVSKRGDAFTRKCLFEAANAIFCRNLGGPRLRDWARAIAERTGPRKAKVALARKLAVTLHAMWRTNTPFQEAAMA

SEQ ID NO: 256738 - protein, 472 aa, unidentified
MSEISIVGLDLAKQVFQVHAADEAGRCLLRKQLKRREVLSFFAGLAPCVVAMEACGSAHYFAREIAKLGHEARLVPPAYVKPYVKRGKSDRIDAEAICEAAGRPTMRFVPVKTVEQQSLATLHRCRDLLVKNRTMLVNALRAHLAEFGFVAAKGIGKLPEWIEIVSEAPAEALPEMARAPLSGFLDAIALINRRLDDIEKRLRAWHKGNAQSKRLETIPGVGLIGATALCALVQPKASSPPTATSARANLPRISCTRFNSLRVRPIRGKSRARLRRMGRDFPRGVLVPDPKLFKNGRHFAAWIGITPRLDGTGGKIRLGRISKAGDGVLRRLFVLGATALLHTLKNKATPLALWMQGLLARRSKRAAAVALANKLARIAWAIMASGEAFKPLSGGATRKRGRGKGMSGSGLPNDGAVLSALNIAFRAADRGGLRPMLTAAARGALQSSGRDGETPPSRTKKPHDGAAGGVRR

SEQ ID NO: 256739 - protein, 344 aa, unidentified
MYHYAGIDVSLESSSVCVVDGAGKILREAKVASEPEALIAWFRSLGLTLERIGLEAGPLSQWLYAALREAGFAVELLETRHVRDAFKAMPVKSDRNDARGIAQLMRLGWFRPVHCKSIEAQETRAVLTARKLLQSKLRDLENSLRGVLRGFGLKVGKTTECTFADRIRELVAGHPGLELVAKALLEAHAVLRREFNGLDKQTQKLARSHPQAKLLMTTPSVGPIVALTYASAIDDPKRFASSKATGAHFGLTPKKYQSGQTDYTGRISKIGDASVREALYQAAHVMLTKPIKGCTALKSWAMRIAKRAGMRKAKVALARKLAVILHRMLADAKPFSPAIKTVTT

SEQ ID NO: 256740 - protein, 410 aa, unidentified
MDVFLERCAGLDVHQASVVCCVLIGAPGRKPQKLLGRFGTTTRDLETLRAWLAEHGVTHVGMESTGVYWKPVYAVLEGHVDLTVGNAHHIKNVPGRKTDVKDAEWIAQLVRHGLVAKSFVPPPAIRDLREMVRHRRTLIETRTATRNRVLKLLEGANIKLSGVASDVFGVSGMAMLEALAAGTNNAAEMAGLARGRMRRKHAALEAALDGRMREHQCFLLGMHLRNLKAIDQDLNALDARIETQLEPYRVQHRLLMQIPGVDWVTAASIIAEIGTDMDVFASARRLAAWAGVAPGNYESAGKPKGAGTRRGNVFLKSALFAAASAAVRTKGSYYRDKYNRLRARRGLVRVIMAVAHKLLLAAFHMLSTGEAFRDLGEGYLDQVARKRSTTKLVQRLSNLGYDVMLVPKAA

SEQ ID NO: 256741 - protein, 412 aa, unidentified
MEVMYPRCAGLDVHKETVVACVRIVEGGEVARSVRTFATTTASLIELGEWLEVNGCTHVAMEATGVYWKPVWQVLVDSSLELVLANAAQVKNVPGRKSDVNDATWLSELLAHGLVRASFVPEPAIQQLRGLLRTRKQLVREKASHVQRLQKTLEEANIKIESVLSDVMGRSGRAMIQALIDGESDPAKLAALAHWKVRASAATLREALHGRIKRHHRFLLRLHLQQVDALDAAIAEIDREADAGLACFRDAVKQLSTIPGVSELSAQVILSEIGTDMGRFATAAHLRSWAGLCPRNDESAGKRRSTRLRRGAPWLKAMLVQCAWAAARTKATYLHAQFVRLRARRGPKKAICAVAASILTAAYHMLKDGTFYEDLGAVHFDRRRPETQARRLVKRLAELGFSVELKPAAAVS

SEQ ID NO: 256742 - protein, 428 aa, unidentified
MARGTREDRTMADEIMAEETIRWFAGLDWGSATHQACLLDEAGTVVGERAFAHGGAGLAALCDWLVSLAGDPGSVAVAIEVPHGPVVDALLDRGFAVYAINPKQLDRLRDRISVAGAKDDRRDARVAAAGLRTDPHLFRRVLAGDPSVIELREWSRLAEEVQQERVRLGNRVRQQLWRYYPQLLALSDDVTAEWVLALWNMAPTPAQAARLREATLARLLRQHRIRKLDAPAVLAILRQPAIPVAPGVTEAAVLHLRSLVARLRLANQEFRQAERKLEELCTALSETQPTAQDSGPGDATILRSLPGVGPVTLATLLTEATGPLARRDYPALRTLSGVAPVTKRSGKSCIVVMRYAAQVRLRNAVFHWARVAVLNDRRCRGRYEALRARGHSYGRALRGVGDRLLGVACVLLRRGTLFDPDYGSSASA

SEQ ID NO: 256743 - protein, 368 aa, unidentified
MTKNITVAGKETTRTFAEKKYTVGLDLGDRWSWYCVLDERGEVVFEHKLSTTPKALREVFGAMPQSRVALETGTHSPWISRLMKELGHEVIVAQASKVRLIGESRKKDDRLDARTLARLARVDPELLGPIQHRSARAQADLIMIRARAGLVRARTALINAARGLTKSYGERLQGCNPRNMDADKRKGLSAELQLALEPLLRAIESLSQQILDYNERIEQMARDGYPEVARLRQVKGVGTLIALTYVLTLEDPQRFTKSREAGCYVGLQPGRRNSGSSTPQLHISKEGDPYLRTLLVQGAQHILGPFGGDSDLRRWGLKLAERGGKNGKKRAVIAVARKLAVLLHRLWVSGEAYQPLRNSGAVELQAVA

SEQ ID NO: 256744 - protein, 332 aa, unidentified
MKSLKQSIGIDVAKDTLVCCIGGSDQNEQFSFSKTKTFSNDIKGFAQLMQWVTPSKGNDVVFVMEATGVYYENLAYWLDSKGEKLSVLLPNKVKHYAKSLNLKTKTDGVDAQLLSRIGLERKLTLWTIPSKIMREVKFLSRAYREDKAKLVIVKNQLHAKEHAHGCPASVIKRLKKQIAFLQAQLLETEAELRVTVMSDSLLSDKVTKISTIPGISFMTIISILAETNAFALVENAKQLVSYAGLDIQQNQSGAKEGKTRISKKGNSYIRNALYMPALCASKHNPDMKVFYNRIIEKKPAKKIGITAVARKLLILTYILWKNDTEFELEHAK

SEQ ID NO: 256745 - protein, 338 aa, unidentified
MTITTIGIDLAKNVFELCGLDDSGEIRLRRRVRRETLLRAVAEVPACVIGIEACTGAFYWQRQFEALGHEVRIIAPQHVKPFGRRQKNDRNDAEAIAIAVVQPRMRFVPKKSVAQQDVQTLHRARQRMVNHRTALVSQMRGILLDRGIAFGQSITRARAMIPRIIEDESNELTKLCRETLSSLLALMAEIDKRVREFDRRIDQVYRESEACRRVGKIRGVGPKTATAVVAAIGDGRDFDNGRHMAAWLGLVPRQHSSGNRTVLMGISKRGDQHLRTLLVHGARAVVRTAVGKTDRFSQWVNELRERRGTNRATVAVANKNARIIWALLAKNEEYRPAT

SEQ ID NO: 256746 - protein, 323 aa, unidentified
MSSPSPAINIGIDVSKEKLDVAVHETNTHWTSNHDFSEFSRLVKELRALTPTRIVVEASGGLENLLVSYLAAAGLPVIVVNPRQVRDFGRATGQLAKTDRLDAFVLARFGALLQPAVRQLKSAETQELEALVNRRAQLVEMLTAERLRLQQAQQQRRQAIVRDLKAHISWLKKRLDQCEGDLSQLLLSSPLWRETDQRLQSVPGVGPITSLVLIAELPELGHLPDKQLVALCGLAPHARDSGKWHGKRTTRGGRARVRAALYMAALVATKHNLVIKTFYRRLLSAGKEKKVALTACMRKLLVILSAMFRHQISWQPPRLVSGA

SEQ ID NO: 256747 - protein, 394 aa, unidentified
MATIGIDIGKRQHIAAVHHEGEREARKAILRFNSDRGGFAELARWLQRQGEVSRAVLESSGHYHLNLAAALQRSGVPVAIVNPLESKYFAKRRLQRSKSDPADARTLATLAMVDQPAVRDVLAGAELREAARFAMSLVDELGRIDQRICRLVELGFPELERAYDDPTCVSALAVLRSAPTAAAAARKRTATLAQAARPGGGRRIGAKKAEQIHTLAQDTIAAPELADQIGFQIRLLIAQHDLLEAQIAEAEAHLGTLMDGELVRRLRTIPGAGPAIVATLIAEIGDIARFSDFDKLVAYVGVHPAEKSSGEKGKDPETSWRMSKAGNAYLRTALYRMAIVGIQHNPIIRSHYARKRAQGKSKMNAVGHCMRKALAIVWGVWRSGTDFAAPPSLP

SEQ ID NO: 256748 - protein, 460 aa, unidentified
MNQYFFGIDASKGYSDFVMLNEKKQPVIENFELDDTFEGHARLYELLRSFNQNHPQATIYAAVESTGGYENNWFQSLLKFQGSLPIKTAHLNPLGVSYNQKADLKRNVTDKISAQNVAEYMIAHPEKVSYQHQDALASLRKQWGFITMLTKQSTQLLNQLESLVYNANPEILMYCKDGTPQWVLKLLTAYPTALRLSKAKVKSVARIPYVSKDRAQQLVATAKKSVASASDNVTQQLIVATVKQIVGLNKTIKAQTKILTNECDMAEVELLKTFIGISDYSAIGLMLEIQSIQRFLVSKKLASFFGIHPAYKKSGDGTWKYRMSKKGRKEPRRILFMVAMSAIKSNPLIRSTYQQAVDRGMEKKAAVGLCMHKILRIIYGMLKHNQAFDPEMDRKNRQKKPLRQGKVRQDKDRRYQDFDSKAPISRRQKMKRKERKQSQNVSNVEYGINEASVPVIELTN

SEQ ID NO: 256749 - protein, 349 aa, unidentified
MPKSNIAVVTIGIDPGKNTLHLVGLDARGGIVLREKVARAKIVSRLANVPPCLIGIEAGMGTHYVTRELLALGHDVRQVPPVYAKPFRQTHKNDFRDAQAVAEAVQRPTTRCVPPKTDEQLDLQALHRVRYRLVGQRTAIINQIRCFLLEHGITVRQRLHWLRHALPDILAQRTDVLSPRMVRILEDLAQDWRRLDDRIEAVTDEIDALSKNTEPCRHLMTIPGIGPIISSAVVAAIGNGTAFTRGRDFAAWLGLVPKQISTGDRTILGRITKRGNRYLRMLFLQAARVVLLRPRNWMKHGFGPWLAAAAQRLHHNVLATALANKLARIAWSVLAQHRVYEARLSPAAI

SEQ ID NO: 256750 - protein, 343 aa, unidentified
MQAVKTIGLDIAKSGFQVHGVDADGQVVFRRQLKRRNVLAFFQKVPSCLVGMEACATSHHWSRELQALGHTVRLMPPAYVKPYVKRQKNDATDAEAICEAVTRANMRFVATKTPEQQSGLMLHRTRHLFIRQQTALINAIRAHLAEFGIVAAVGRNGLEQLLNVVADAGDKRLPEVARTCLMALGTQLRALKAKLLELDRMITAWHRSNETSKRLDAIPGVGHVLATALVASIADPKVFRSGRDFSAWIGLVPKQHSSGGKDRLGSISKQGDRYLRSLFTAGALAVIRYAKIYGTKHRPWLTALLARRPTKVAAIALANKLARMAWAMMSRGERYKEPVALAA

SEQ ID NO: 256751 - protein, 340 aa, unidentified
MQATTIGVDLAKNVFQVHGITASEEVVFNKPLRRAQFLPFFAKLDPCLIGMESCSSAHHWARELTALGHEVRLIPPMYVKPYVKRGKSDAIDAEAICEAVTRPTMRFVATKTVEQQSLLSLHRARDLLVRQRTQLINNLRGLVAEFGIFIPKGLARVIGFAEDITLGEVLDLPDIANEVIRNLSEQLMALHKRVRWYEERLKQVAKEDARVRLLRTIPGVGAVTASAIIASIGDGHQFKNGREFAAWLGLTPANKSSGGKEKLGRITKMGDQYLRSLLVVGMTSLVRQTRSHPERASKWLTSLLERKPARVATVAMANKTARIVWAVLTRNEPYSPRTVA

SEQ ID NO: 256752 - protein, 418 aa, unidentified
MNVKTRRTKKQVNVENQAINLLSKEELNKKIEVVEKELRSYTWRELETNGKFAKNDKLSFITDDMLIVGCDIGSENHYIRAIDVRGRELSRGAFEFSNTSEVFENAKAWVLALAAKHDKKQIVLGLESTGHYWFALAAWMISNGISVVQVNPYAVKQSKEIEDNSQLKDDRKDPKLIANLVKDGNYGMPYLPEKVYADMRRLSMFRDQLTEDRIRNINRLHRELKIYFPEYMDAFGKIDGAFTLEVLKVSAIPSDITALGAEGIKNIWHNEKLRGRGYSRANEIVSYAEKSVGLTDGIDAGREAVKWYAEQILKLVACSSGKHKGQTKISHRGRKRLRYWLFQAAKSAVSHADEFKQLHEYYTTRTNNPLKKMQSLVVIACKILRVIYTILKTGTTYDPQKLLEDIKRPTASQTPMAA

SEQ ID NO: 256753 - protein, 348 aa, unidentified
MAHFVGLDVSVKETSVCVVDDAGKVVCERKVPTEPDDIAVLLTSVGGDYVRVGIEAGPLSQWLVNGLSEAGLPVICVETRHMKALLQAQQINKSDRNDARGIAQMMRVGLFKPVHVKTLAAQEQRMLLTSRKLVQRKLIDIESDMRGTLRNFGLKVGVVSTIGYEARIRHLVESFPRLAAIIEPLLTVRRVMRQQLATLHKMLLDTVRHDPVCRRLMTAPGVGPVVALTYRASIDQPQRFVHSRAVGAHVGLTPRRHQSGEIDYDGGISKSGDTMLRTMLYEAAQILMTQSRHWSWLKAWGMKVAQRRGMRRAIVAVARRLAVVLHRMWRDGTDFRWGSEPGTAVPVA

SEQ ID NO: 256754 - protein, 420 aa, unidentified
MKKIRTKNLKTVNGKTLLATVDIGKITNVGYYRCPDGTEAKPFEFFNNGRGFNTFWHRIFQVVKEAHNLDEIVVGFESTGPYGEPLVHFLRKKKVNLVQVNPMHTRRVKDLQNNSPNKTDKKDPKVIADIIELGHALSLVVPEGVAAELRRLTQARERSVARRTALLNQLHDLVFVLFPEFLQVMKGVKGKSAHYLLTHYPTPHDVMRLGLKSLTLILKRVSCGTLGEQRAKALYEAARASGGISEGKKSIFLEIRNILAFIEASDRFIGDIEHRISDYLKNVPSSKFILSMQGIGKITTAGLIGEVGDFSKFNTIAEVEKLAGLDLFEVSSGKHKGKRRISKRGRPLMRKLLYFAAINVVRKGGIMHQEYHKYLERGMVKTKALIAIARKLLRVIFALVRDHSRYINNYSKTRNLKEAA

SEQ ID NO: 256755 - protein, 343 aa, unidentified
MYYIGLDVHKRTISYCVKDAAGHVHQEGKIGSTRRELDAWIKTLPQPRTIAMEATIFTGWIYDHLLPHAEKVKVAHPLMLRAIAAAKRKNDRIDAGKIADCLRCDFLPECHMTSTAIRDRRRTLRYRNLVLKQMVQMKNRISGLLMETGVSYNKQRLHKLGYFTELMSGNEEVDESIRPLLKLSRETIVRSQRLDYALVSSLERDPLLAERLKRLRTIPGVGPITALTWALEVGDVSRFQSVKQAISYCGLCSAERSSADKLVRMPISKQRNKHIQQTLVEAAKLAPRYSHELALVYERERQRGNRNRATLAVARKMVAYMLAVERRKQDFVLTGEFSGTAAA

SEQ ID NO: 256756 - protein, 407 aa, unidentified
MLNAVGIDVSKGRSTVAVLQPGGVVVRKPFDVYHKQSELQELSSFIKSLDGETKAVMECTGSYHRPIVEVLHRAGIFVAAVNPHLIKNFGNNTIRKVKTDPADSKKIARYTLDNWDRLQEYSGMDAKREQLKTMNAQFDFFMKQKTAAKTNLIALLDNTYPGVNDLFDSPVRNDGSEKWVDFAYSFWHVDCVRKLTLNAFRDRYMAFCKRHGYQYSESKADEIYNASKELVAVFPKEEGYKQLIQFSIKQLDLESEHVEKLRADMNELASQLPEYSIVMSMYGVGPTFGPQLMAEIGDIMRFSHREALTAFAGVDPGKDDSGQHNSKSVSASKCGPARLRKTLFQIMSTLIQKMPPDDPVYKFLDKKRSEGKPYYVYMTAGANKFLRIYYGKVKEYMRSLETDQSQS

SEQ ID NO: 256757 - protein, 351 aa, unidentified
MKDQSKEPVVALGIDLAKRSFHLFGVDAHGKPVLSKKLTRGRLSAFMANLPACTVAMEACGSAHHWARQFRRFGHEVRLIAPQFVKPFVKSNKNDAADAEAICEAAQRPNMRFVAVKTVEQQDIQALHRMRSLVVERRTAQVNQVRGLLLEYGIEIAQGRTALMRRLPELLEDAENGLSERLRAELHGLLEELRHLDGRVAHYDAQLELVAQGDTRAQQLMTIPGIGPLVATALLAAVGEGIGLFRNGRELAAWLGLVPRQHSTGGRERLLGISKRGDVYLRQLLIHGARAALRWVERKEDATSRWAAALKRRRHPNVAIVTMANKMARVAYAVLRSGQPYEAGRAALAQG

SEQ ID NO: 256758 - protein, 344 aa, unidentified
MITIGIDPHKSSLTAVAVEPSGQTHPPIRLVVDKNTPAALLAWAMQWPDRQWAVEGATGLGRGIAQQLVTAGETVLDVPAKLAARARLLGSSNARKTDVTDAISVAAVAQHNRRLNRVQLEDHTTILRLLTERRDDLVAEHTRGINRLHVLLRDLHPGGAEVRLDSSEASALLAKIRPATAADRQRKQIARDVVRDLKRHEASIKELEKELRATVTASDTTLTQIQGIGFLTAAKILALTGDIRRFPNQEHYASYAGTAPIDVSSGDQQTHRLSRRGNRQLNAAIHVAAVTQARDPGPGRDHYRRKLTEHKTPKEARRSLKRRLSNTIYRRILADHQRTQIAAA

SEQ ID NO: 256759 - protein, 409 aa, unidentified
MDQMLERVAGLDVHKKTVTVCVRVPGARGARRQEVRTFGTTVPELLALREWLETQGVTHAAMESTGVYWKPVFYILEEAVTCLLANAAHIARVPGRKTDVQDCVWIAQLVEHGLVRGSFVPPAPIRDLRDLTRARKALSHDRTRAANRLHKVLEDAGIKLASVANDVLGVSGRAMLEALVGGTTDPTVLADLARGKLRAKLPALRHALTGRFRSHHAFLVGQLLAQLDFLEEAIAQASAQIDEVIAPFQAELERLDTIPGVNRRTAEVFLAEVGVDMRQFPTAKHLASWAGLCPGNRESAGKHKSGTTRKGDRWLRTALVEAALSASRATDSALAARYRRVMRHRGHKKAVIAVAHAILISAYHVLARQIPYHDLGPDYYDHRHAERVRRRAIAALERQGYRVTLQPAA

SEQ ID NO: 256760 - protein, 353 aa, unidentified
MNNVKYVGMDVHKSITVIVVLNELGQFESRSQIKTKGENICDFFRGISGKVEVVFEEGTHSAWLYKLLKPLVASVTVCDPRHNKLIEDGNKSDDEDAETLAQLLRLGAVKAVYKGDEQQQQLKEICRAYDNLIEDSTRVQNRLKAIYRGRGISCSGHDLYRADQRSDWLAKLGEEAARFRAESLLEQLESISQLRKQAKQRLLAQARTHADYRILIKLPGFGPVRVAQLIATVGTPHRFRTKRQFWPYCGYAVVTRSSADYQFVEGKIVKQRKKVSTCGLNRNHNPQLKQVFKGAALTALRHEAIKAYYQRLIDHGTRPELARVSIARKLASIALTVWQRREEFDVKKAFAQD

SEQ ID NO: 256761 - protein, 444 aa, unidentified
MGKAKITKITIDVVRPNAAGIDIASEVHYVSVPDDRDTPSVRKFGSFTEDLHKMAQWLKQCNIDTVAMESTGIYWIQPYLILEEYGFEVYLVNARHIKNVSGRKTDVQDCQWIRQLHSYGLLNRSFQPESLTRELRAYMRHRKHLVQSTSNQILHMQKAFEQMNIKLHDVISDITGQSGMRMIKAILEGERDANTLAKLASGRIKASKDKIAKSLTGVWREEHLFELKQAFDLYQYLNLKINECDAQINKVMTRLASNENSDNIKRHKRTNKNSLHFDGTKYLKQILGIDVTRIYGISEITATEIISEVGADMSKWSTEKHFVSWLNLAPNNRTSGEKKLKPKKTNKRNKAGQAFMLAASTLKNSEHWLGVFYRRIKARHGAGIAVKATARKLSLIFYKMLKYKIEFDPLSIEAYNQYFREHRLKYVEKQAHALGLKLVPTIVS

SEQ ID NO: 256762 - protein, 402 aa, unidentified
MNCVGIDVSKGKSMIAVMRPFGEVVVSPFEVRHTANELSELAGLLKSLDGETRVVMESTGNYHAPVAWLLHDAGLYVSVVNAMLVHDYGNNSLRRAKTDKKDAVKLANYGLDRWLTLPRYVPEEDTRLMLKTCYRQYQQYSKVQTMLKNNLISLLDTTFPDANRLFTSPPRADGSEKWVDFVATFWHCECVCGRSEKAFTTQYQKWCRKHGYNFSEDKALDIYASACRHFGVIPKTDTAKLLVEQAISQLQTTSSALAALKQEMQSLAASLPEYPVVMGMFGVGPTLGPQLLAEIGDVRRFHSKKALVAFAGIDAPPYQSGQIDVRSRSISKRGSASLRRTLFLVMSVILQCAPIDEPVYQFMDKKRSEGKPYRVYMMASANKFLRIYYASVKAYLESLEHD

SEQ ID NO: 256763 - protein, 356 aa, unidentified
MTKGLMAGIDLHSNNVMIGIVDQSGRRLQHRKLACDLKAVEAFLKPFKPRLRSVAVESTFNWYWLVDGLRASGYPAVLANPVKIEQYSGIKHADDKNDAYFLAELQRLNILPTGYIYDPQLRPVRDLLRRRVGLVHQRTALLLSSKSLYMRTTGQELKSNRLKALKPAEAGELYAHPANQLIASLQKEHIEQLDRGIARIEQAVLSSARQLPYYERLNTLPGVGRILGMTITLEVGDIGRFKTAGNFASYCRAVDARRTSNEQGKGWNNRKCGNKYLSWAFVEAANFARRYDERSRKWFDRKAAKTNRILATKALACKLAKATWHVMAHQVDYEAERVFGRAAGSQGKGLAQSPAD

SEQ ID NO: 256764 - protein, 421 aa, unidentified
MQVLYPRCAAIDVAKKEIAVCVRTPGDEPGGRRSQVRKYKTFYGVLKEMCAWLTECGVTHVAMEATGIYSNPVFHALAEFGDFEVIKVNPAHVKNLSGRKTDAADCCWLAELLECGLLRGSYIPVQKIAELRDLTRYRAKLVGSRTSEIQRLQKTLEDAGIKIDSVASDVLGVSSRDMIRALIDGERRGAALAELARGVLRAKIPDLSMALSGRFNDHHALMCKLHLRHVDELTELIDTVDQQIEVMLVPFRAERELLMTIPGIGPAASAVILSEIGADMSFFPDADHLASWAGLAPANNESGGRQRAAGTRHGCQHLANVLVECAWSASRTRTRPGAQFHRLVRRFGGHRNTRAKKKAAVAVAHTLILITYCVLDRRLPYHELGEDFYTRRQDPERYKDKLIARLASLGYTVTVQPTQAA

SEQ ID NO: 256765 - protein, 417 aa, unidentified
MKEVYRRCCGMDVHKETVVACVLPPDGKPGDPLKKIFGTFRKDLTRMRGWLKLLKVTDIAMESTGVYWRPIWNVLEDQGFERLLLANPVQVKALAGRKSDGRDCQRIAEYMQDRRLDASLVPSRQIRELRHLLRHRLSLLHQRNEAHNQIRDLFETANVKLSSVLSHLLGLSGRRIIEALIAGEDSPDKLSWKVRGRLRKKEQLVKESLKGCFNSFHRTMLETLYQQYQFLSGQIDRFNTLLSEHMAPFSVQIDLLTTIPGVDRIVAWHLIAELGADMTVFPTADHCASWAGMTPGDDESAGKQRSTRCKKGNKFLRRVLVQSAWAASRCKHGYLRALFFRIKARRGWSKAVVAVGHKILVIAYNILRTGTPYFDLGDDYFDRLNPIRTTRRLVHRLERLGLHVQLSAVSPSPESNN

SEQ ID NO: 256766 - protein, 342 aa, unidentified
MKIHTIGIDLGKTTFHILGLNECGEVVVRKQLSRAQLLRFTANRKVHLIGMEACGGSHFLGRALEEQGHEVRLIPAQYGKPYVKTNKTDYIDAEAIAEAVGRPTMRFVSIKSDDQLDLQSLHRVRERWVSRRTAVINQIRGLLLERGITVRKGRRYIEAALPGLLEDADAKLSGALRLLLTQLKLELDQMAKRLEEADALIERTALENEACRRLVKIPGLGPVTATAVIAAIGNGAAFRKGREFAAWMGVVPREHSTGGKQKLLGISKRGNRYLRKLFVQCARAVLQQKTKQTPGLRAWLEKLTARTHRHVAGVALANKLARMAWAVLATGEAYRDPLPAAA

SEQ ID NO: 256767 - protein, 400 aa, unidentified
MQLWAGIDAGKAHHHCVVIDGDGNRLLSQRVPNDEPALLQLLANVLELAAGDAVVWATDLNHGGPALLIALLVGHGQDILYIPGRTVHHASKIYRGEGKTDAKDAAVIADQARMRTDVQPLRAGDEVSIGLRLLTARWADKSADRVRAINRLQAPAAGILPRAGSGLRLQPFQGSPDPADKTPHTGRDPPRGPSQDPCLAQEARYPFVGSSGRSCRGGGEIPAHHRSRPVHGEEIVAALAQEILTLNEELAKLDALISDKVVKHQPTEVLLSMPGFGPVLAAEFLGATGGDLTVFQTADRFAAVVGLAPAPRDSGRITGNHHRPRRYDRRLLRVFYLSGLSALKSCLASRTYYDRKRIEGKTHTQALLSLARRRLNVIWAMLRDGTKYSLATTKDRPVTV

SEQ ID NO: 256768 - protein, 430 aa, unidentified
MTKPHAIPDDVVLVAIDVAKARNEVLIQIRGHARRRRLTVLNTKAEHDRLVTLLVELGRPVACGLEATGNYHRPIAWRLLQAGFDVRLVSSLALARTREALHNGWDKNDPKDAQVILHMLTIGASQRYHDPLAAGINDVQELSKTHEAISRAKTEVLHRILTHYLPLYFPEVDRFRQNSRSDWFFAFLDRFPTPGSITILGKEAFITAAWDIVGRKVAKEVLLGDIYETASCSIGLPIPIDAPAIRMFRLVLAEARSLIRQRDEIERFADELLRESEDYKRLRRIPGIGPINALTILAEAGDLRRFGHHRQFLKFCGLDLATQKSGTFRGQTKLSKYGNARLRRALWIAGQVAIRQRENSFRDKFERYVARDRHNADLRRKALTAITAKMARVVHAVIKTGVDYRPFVEGPVPGGRTPLSSAVRAQLATL

SEQ ID NO: 256769 - protein, 365 aa, unidentified
MTESTITPTIMTIGIDLGDRKSHICVLDTAGEVAEESRIATTPKALRARFEGLVRTRIALEVGGHSAWVSELLKELDHEVIVANARKLRMIFQSDSKNDRLDAEQLARVARMDPRLLYPIEHRDRTARADLAVMRSRDALVTTRTRLVNHIHGVLKSFGYRVKKYAAPGFHRQVTGQIPEELQPALQPLLESLAAIAEQILGLDRELQRLTTKVYPETALLNQVGGVGPITALRYVLTIEDPRRIERSRNVGAYLGLRPRQRQSGQRDPELRITKAGDRDLRRLLVQCAQQILGPFGKDCDLRRWGLGLASRGRATAKKKAVIAVARKLAVLLHRLWLTGEVYEPLRNANRRVAAQKQELAAAAV

SEQ ID NO: 256770 - protein, 409 aa, unidentified
MKQTYILGIDTAKHKVRAALRGAQEERFVFEKDLPVSAAGLRELLGRLKEQVPAAEQLLVLIEATGVLHLTWSAALSKAGYAVAVLNPLMARRLYRIENSIRDNKTDPIDARGLCALGALQGEKLLAHYRFSLQPEQLALQRLQTVRKALRNALTNLKKTYQSLLEVSFPELSQLLEVDGVGLRALLLQAPTPAAIARKRLSTLEKNWMLRPKAAALKTLAADSLADPQLAAASAPALQAILETVGAMEARLRGLDQQIETLARQSIDLKTKALVESMPGFGPITAAKVLAYLPSAILHSGSNRKAAARLQAFMGNDPRLQESGQWKGQTRMSKRGVETLRTAFFQAAFSAAQHDPELKAFYQRKRSENKTHHVALSHLMRILTRRLVAVLRSGKPYQSNSCLPFKNAA

SEQ ID NO: 256771 - protein, 344 aa, unidentified
MTYYVGLDVSLRSVNICVINDEGEIKAETKLDSEVTDIIAYLDGLDLDIASVGLEAGTLCQYLTYGLQSAGFEVVCMEARQVKAALSAMRNKTDKNDARGIAQLLRSGWYSQVHIKSMESHRVRALLSSRKAVLSKCIDLENEIRGLFKVFGIKLPSKLGHGSFDAAVRDIIETDATLSFALLPLLDARLVLYHCFRELDNRTRNLAHADPVCTRLMSAPGVGFITALTYKAGVDDPTRFKHSRTVAAHFGLTPRRFQSGEIDIDGHISRCGDRDVRCTLYTAANALLTRSSKWSPLKAWGMKLAKTRGHRRAVIAVARKLAVILHRMWMDDTQFQWGSEGARS

SEQ ID NO: 256772 - protein, 339 aa, unidentified
MSFTSPASIDPVWAAFAAIDWASQKHSWSLLPAEGGSIESGQLDNTPEAVELWAAELRRRFPQAPIAVALEQKRGSVVYMLSKYQHLVLYPVPPSMSAAYRRAFCPSGAKTDPGDANLLLDLLVHHRQQLSPIATDTAETRLLRFLVEQRRQLVQQKVGLIQQLTDSLQQYFPQIRTWFGSLDTVLVTALLHRWPTLSDLQHAHPGTLRRFFVDHACRNDDLIQQRIQAIYAALSATTDPVVIEAGTRKTAAIGSLLAAAREQIHALDKRIAAVVADHSDAELFASFPGAGAATVPRLIAAFGTDRNAWTSAAALQCFSGIAPVHKSSGNSTVVVMRHA

SEQ ID NO: 256773 - protein, 356 aa, unidentified
MRKGNRKSAKGKGVVVTAADRVFVGLDVHKRQIHAAVRVNGQEVGTHVLPARPAAVAKFLARYGAGLKHVVYEAGPTGYGLARHLRSAGVAVDVIAPSKTPQAPGDGAKSDRLDCRDLARLDEAGLLRPVAVPTEEEEADRQVIRLRDQAVQNRRRVRQRIKSFLLMHSLPEPRGLEHWSAAGVAALGTMEVRNGRLRFCLDVLLEELANADETLAKIDHEMKEMAEEPRHAAAVKALTAHVGVGRTTALQFETEMYRPERFSNERQVSAMLGLAPRVRQSGERRREGPLIKAGRGRLRTLLVEAAWVWIQHDAEARKVYQRLVRNTGSPQKAIVGMARRLGLDLWRGLVKARAAA

SEQ ID NO: 256774 - protein, 380 aa, unidentified
MRRVIGIDIHRTFGEVVIWENGLTRHEGRVDMTRTALEGFGRQLKKTDEVVIEATGNCMAVSWVLSPHVKRVVIANPLQVKAIAHAHVKTDKVDAGTLASLHAAGYLPKIWTPDAATERMRRLVARRYQIVRHRTRIKNEVHAILHAHLIPKCPHADLFNKRGRDWLTRQPVPEDERVAIVRHVREFDRLGEDLAKLDRDIAQGSLDDEAIQRLLTITGVNLTVAAGLMAAIGSIERFKSPQKLVSYFGLNPRVRQSGLGPAHHGRISKAGRSHARAMLVEAAWAAAKAPGPLRAFFIRIRARRGHQIAAVAVARKLATLCWHMLTKGEDYLWARPSLVAHKRRAMELAVVPHRVVYEAARVDFWRSAARGRTGGHRASS

SEQ ID NO: 256775 - protein, 380 aa, unidentified
MEYSTVYVGMDVHKDTFSVCCYTYEDDKCKYKRTFGADYKNVLQYIASMRKQYGEKVKFVTGYEAGCLGYSLYNQLTAHNVECVIMAPTTMAKTANAGKHKTDRLDSEMIAKCLVDRNYHAVHIPTEEDDQVKEYIRMRDDHKLALKKIKQQILSFCLRRGLQYSDSASESKPRHWTQKHLKWLRDQASALKGEYKDALEEYLGTYDYLTNKITRLDQKIEEISQRDTYHENVKHLSCFIGVKTITAMGVLTEVGDFSRFESAEKFASYLGLVPGESSSGGSRTMLSLTKAGNSHVRTLLIESAQSYTRGKIGAKSVDLLKRQEGVEPKYIAYADKANERLRRKFYRLTLQNGKQRNVAVAAVAHELSCFIWGMMTDHVA

SEQ ID NO: 256776 - protein, 391 aa, unidentified
MIYVGIDVAKDKHDCFITNSNGEILFNVFTIPNNADGFHNLYQKISSLTKDFSNVKVGLEATGHYNYNLLGFLMDKGLPTFVINPLHTNLFRKSFSLRQTKTDKVDAHTIALMMMSGVNLQSYSDTSYHNEELKSLTRYRFDKVKERAKLKTSVSRLVNILFPELEKLVPTLHMVSVYALLSELPSSSQIASCHLTHLTKLLESASKGRYSKEKAIEIRDAARISIGSNMPAKSLELKHTIKLIQELTSEINEIEDSIKSIMDSIHSPITSIPGINYRMGAMIIAEIGDFNRFSSPDKILAYAGLSPSTYQSGQLDRGYSHMEKRGSRYLRYALFNATKLVCIWDHTFAAYLAKKRAEGKHYNVAISHAAKKLVRVIYRLEKSQQLYNRAA

SEQ ID NO: 256777 - protein, 353 aa, unidentified
MSSFFGTGKGPVMQKNFYFIGIDIAKETFVASIYHKPDEPVLTKEDIPNNPKGYDQLIIWLGENRINKDNCQICMEATGVYSQGIAYYLLVQGYQVSVESPLKVKRAFHPAGHKTDPVDSRQIAEYAYRFCDQLIPWQPKEELLEKIRQLLSVREQFTKQKVAIKNAMGAYSQQKVQVKLINKAHKETLAQLEKQIARIDKELDKLIREDPDILSKFNKLDSIPGYGMLLSAHLLVMTESFSKISDYKRLAAFIGIVPYKYQSGTSIHRKDSIRHYGPMASRRLLRLAAQSVATHDSSFRQYYLRKLAQGKAKALVLNNIANKLLKVSCAMIRNNAGYIKDHHSVHPMYVKSA

SEQ ID NO: 256778 - protein, 409 aa, unidentified
MDIMYERCCGLDVHKQTVVACVLLPGSGRQPAKEIRTFGTMTADLLELGDWLTANGVQHVALESTGVYWHPVWNLLEGQVELSLVNAQHIKQVPGRKTDVRDCEWIANLLRHGLLRASFVPMRAQRELRELTRYRTSLIRERAAEINRIQKTLEGANIKLGDVASDILGVSARRMLQALIGGATDPVVLADLAKDKLRKKIPQLQRALKGQFGAHHRFLLAQQLAHLDGLDELIDQLGSEIAERVQPVQHVVERVDAIPGFGRRTAEIVIAEIGTDLSRFPSFKHLASWVGLCPGNNESAGKRMSGKTRKGDVWLRSALIEAAHAASRSKDTYLAAYYHRVAARRGKKKAIVALAHTLLTIIYYLLTRDCDYEDLGPEYLNEHDREQTERRLIRRLVAFGYTVTRETAA

SEQ ID NO: 256779 - protein, 319 aa, unidentified
MQSKLTIGMDIGKGEVVVACHESAFAVLKMANAVPVLRRWLATLPAGSRLGLEATGGYHEPVAELAHSLGFTVYILNPKDVHHYARALGARGKTDRLDAQVIAAYVAEHNARLHAFVPLSADEKLLRELARRRATLVNAKSMLQQSLRVLPGFEREGRELLRAMGSFADRLERKLAEIAARSSERAALVKRLQTIDGVGTLTSIRCATLFTRVPLHRSDAAVAFFGLDPRPHDSGQHRGRRRLSKRGPSEDRRLLYNAAMSAIRTPTWRPLYQHLRNRGLASTEAIIIIARRMVRIAFAMYQNHSDFNPRLVPRPSCPA

SEQ ID NO: 256780 - protein, 414 aa, unidentified
MERVHERCCALDVHKAQVTACVHVPDQRGVRSELYAEFSTMTADLLGLRDWLLGLGITHVAMEATGVYWKPVYYLLEDDFELLLVNAQHVKNVPGRKTDVKDAQWLCQLLEHGLLSSSFVPPKPIRELRDLTRYRKSLVWERAREANRLQKVLEDANIKLACIASRPLGASGKAMLKELCEGNNDPVALADLAKGKLRAKLPALRQALEGRFRDHHALLVSHLLAHIEYLDETIGSLFLEVEERMRPFERQRELLCTIPGVAERTAEVIIAELGPDMSRFPTHRHAASWAAICPGHDESAGKRRSGKTRKGDSWLRTALIEAAQSAAGRTKDTYLHSQYLRVRRRRGHKKAIVAVAHSILVAAYYILRDEVPYAELGGDYFIQREDQERLTRRLVRQLERLGQSVTLKPALEVR

SEQ ID NO: 256781 - protein, 356 aa, unidentified
MRFVGVDLHKQTITVVVVDAARKLLFRKRFSNLMSEQIVAFLKSLGEFQLTVEATASYEWFVQLVEPWAKRIVLAHPGKLRVIAESTRKSDKLDAKVLAEMLALDQIPASYRPTPRQRAHRQLVRQRQFWTRKITGVRNKIRRILSDDNLDRRDLFTRKGQEWLKTAAVSDVDRFCLDQLVEEWKGLVKQRGAVELKLREFAKAGSEAEQLDRAIVRTIPGVGEVTSEVILAELADARRFSSLKKVVAYAGLAPGQRESAGKRKNLHIEKTGSPLLRWVLVQAAWQLAKRSPKWRTIYENLKRRIGSKKAIIAVSRRLLTICVTLLKRQDVYREIIPSSSITARDPASAACVGTRT

SEQ ID NO: 256782 - protein, 462 aa, unidentified
MCLLIIMEGYRMNYKKKRLSNLLEQVNLYAAGIDIGSTEHFVAVPEGLDEESVRSFSSFTGDLNCLADWLVRIGVQTVVMESTGIYWIPLFEILEERGLEVLLVNARHVKNVTGRKSDVLDCQWLQQLHTYGLLRGAFRPPEQVLALRSYMRQRDNLVRYCASHIQHMQKALRQMNLLLDNVVSHITGKTGMAIVRTIIEGERDPMVLAQNRDGRCKRSIEEIAKSLEGNYREEHLFSLKQSVALYDFYQQQISECEQAIEQQFKLFDAKEGLPEIPSPSGRKSPQAPAFDVRTDLYEMVGVDLAQIDGISELVALKLISETGPSMERWPSAKHFASWLGLSPDNKISGGKILSSGTVPTANRAAAALRMAAYGLSNSKSYLGGYYRKMRARHGAPKAITAAAHKLARLVYSMIKHGAEYVDQGEAFYEQEHKERIIKNLKRRAKEMGLSLVSEDGATTVTV

SEQ ID NO: 256783 - protein, 415 aa, unidentified
MFFAGVDIAKKQHEVCVLNADGEQVLSMPVTNSVAGTERLLQAIHNRISPDPGLVTFCMEATGHYWLALYSFLTQRGYTVHVVNPIQSDAARDLYIRKSKTDRKDAYILADLMRMNKTQPTSMASEPVLRLQTLSRTRFAFVDQVANLKQRVLGILDRIFPEYPQCFSDVFIKASRELLKTFSTPEELAEVDLSELAEFLTAHSRGRLGAERARQVQSYARSTFGISIAVDAFALELKLLLDQIEFIENQISAIEQAIEEAMAELAAMNQSTDLPEGVYHVIETIPGIGRILAAAIIGETGDIGRFVSARKYVAFAGLDATVRESGQFAGTRNRMSKRGSPYLRRAIWLAAVNARRLNPELRSYYEAKRAQGKHANVATGAVARRLAHLIHAIWRDQRAFDPDFRWTPPGAEPNT

SEQ ID NO: 256784 - protein, 322 aa, unidentified
MSIKRILVNQIDTNLEYEVIGIDLAKNCVSAILLTTDGEIFGIDRLDYQELEKSAQELSPTIFAMEPCTEMNYMVQKLEDWGHQCIVISGKNVKDYGESHFSNQKTDLNDAQALAFLTKDTQLRTVKAKDPEQLKYASLTTLREQYVKQYRQTMVSLKGICQVWGLNISKGISGKARLKDMIENHADFPAELRTALVGMVAHAQAVQKDLKSVTKILEELAKKDKACQLIQTVPGLGTICSCRLRATVGDIKRFKHPKDFPAYYGLVPRSMATGHNEKKGKITHRGDKTMRSLMVQGAGIVINQATKGNLNSKQLTNLKVGE

SEQ ID NO: 256785 - protein, 429 aa, unidentified
MNYTQNEKIAQVTENTLVVGIDVGSESHYARAFDWRGYEYSKKAFQFSNTEAGFAEFKAWMHHIKDEHGKEGLLPGMEPTGHYWFNLGKYLMDNEISPVLVNPHHVKKSKELDDNSQTKTDHKDPRTIAKLICEGRYSHPYLPEGIYADLRTASNLRFQLTSELTRIQNHIQRWFSIYFPEYKDVYGSFDGKGSMMILKKAALPEDIVALGEDAVNQIWRDAKLRAVGIKRAKSLIEAAEHSIGSREGLTSARMEIAILLEDYEAKSAGLEKVMDLIEELCRQIPMAEKLLEIKGVGMKTVSGFLAEVGDIRRFDNPKQLQKLAGLALVEDSSGKHKGQTVISRRGRKRLRYLLFEASMSLVAKNAEFRELHRYYTTREVNPLKKMQSLMAVACKLIRVFYAMLTKGVSYDAEKMLSDIRRPERQPQAA

SEQ ID NO: 256786 - protein, 329 aa, unidentified
MSALVCGLDVHKDSTYATILDSSGKIVSQMRMNNERVLSFLSRFNVGTVAMESSNQVASLYRKLEGRGYSVVVSHPKKTRYIAEAKIKSDRVDSKVIAELARLDALPLAYMPDKEISMLREQVRRRAFLVRERVKLRVKIKSILTYEGIRWPSDHGLFTVKGVEWLHGLRLEPVESYLRVLKPLDDEIRLVSKQLRGLAGKDEDVKLLMTIPGIGYYSALLVKSEIGDVNRFPFGDRLCSYAGLVPSTHASGASVRHGGITKEGSRWLRWVMVEAAQKHVHKYDTSITRLYSRIAERRGKRSAVVAAAHKLLLVCYSVLKNKRPYHDQA

SEQ ID NO: 256787 - protein, 354 aa, unidentified
MSQTQNAAIAVVGIDIGKNSFHIVGHDERGAIVLRQKWSRGQVEARFANMPPCLVGMEACVGAHHLSRKLNSLGHNARLMPAKYVRPYSRGQKNDFRDAEAIAEAVQRPTMKFVATKTAEQLDLQALHRVRERLVSQRTGIINQIRAFLLERGIAVRQGQRFLRAELPRILVMPPDVLSPRMVRIIEDLAGDWRRLDERVESLSNEIETIARQDAGCERLMSVPGIGPIISSAMVAAIGAGDVFTKGRDFAAWLGLVPKQISTGDRTILGKLSRRGNRYLRVLFVQAAWVVLIKPKIWERHGLKPWIEAARKRLHHNVLAIALANKLARIAWSVLARGRAFEARKIDQAANQSA

SEQ ID NO: 256788 - protein, 359 aa, unidentified
MQAQNNILDFKGQNIYVGFDVHIKSWKVTIMTEKLTHKTFSQEPNPNLLYDYLDRNFPGGTYHSAYEAGFCGYWIHNRLKSLGINSIVVNAADIPTTHKEKVQKEDARDSRKIARELRNGNLTPIYVPMLKTLEDRSLVRTRSALVKDLTRNKNRVKSFLHFHGIKLPERYSKSTTSWSNQFVNWLEGIEMEELSGKQALESIVLSSKNLRASVLQTTRHINELSKTERYRSNVQLLRSVPGIGLLTAMMILTELEDINRFKNFDALCGFIGLIPSTHSSGEKEVVGEITSRGHSILRSAIIESAWVAARYDPALIKSYNELCRRMEPNKAIIRIARKLLNRIRYVLKEKKAYECSIVQ

SEQ ID NO: 256789 - protein, 348 aa, unidentified
MTHSTITTVGLDIAKNVIQVHAVDAKGTPIIRKSLKRHQVLPFFANLPPCLIGIEACGGAHDWARRLMALGHTVKLMAPQFVKPYVKANKHDAADAEAICEAVTRPTMRFVPVKTPEQQALLALHRARQGFVTARTAQANQIRGLLAEFGLVMPKGMAALKQRLPDILEDAENGLPDACRELMQTLSAHLNELHRQVEAITQRIAMAHQANPLSRRLAQIPGIGPVIATALLAAIGDIREFASGRQLAAWLGLVPKQSSTGGKTRLLGISKRGDTYLRTLLIHGARSALSAAQRSKEPGATWVTRLADRRHPNIAAVALANKNARIAFALLAHDRDYQPGHSPVRATA

SEQ ID NO: 256790 - protein, 346 aa, unidentified
MEYGAIDLHLRRSQFRIVREDGTIVKEGKFDTTRAELTRIFGGRERLRILLESSTDSEWVAQQLETFGHEVIVADPNYAPMYGTRVRKVKTDGRDTAALTDACRLGIFRRAHRVSAAQRARRQQLRIRRHLVRMRSGSVSLLRAILRQDGWRLPSGAVEALEARLDRLALPTALTAILEPLRTWLVELNRLIATADEEVAQTAKRDAIATQLMTAPGVGPVVALTFQAVVDDPARFGGHAGRASAFLGLVPSEDSSADRRHKGHITKTGPTDLRALLVQASWVIWRGRSAEGAALRRWAHALADRRGRRIAVVALARRLSRILFAMWRDHTDFRGEARSAAMPVTA

SEQ ID NO: 256791 - protein, 477 aa, unidentified
MPLLGRNHNHTNMKSKTPKSKKEKKKISVDQGWEAINPQAAGIDIGAKEHFACVPAKATPQNVRSFGTCTADLNALADWLEECGVTSVAMEATGVYWIPVFQILEERGLAVILVNARQTKNVAGRKSDVQDCQWIQRLHTYGLLQGSFRPEDAYCVLRTYLRYRDELVSARSTQCQHMQKALQQMNVQLVQVLSDVMGVSGMAIIQAILEGERDPVKLANMVDRRVRATPIQIQKALEGDYREEHLFVLRQAFSLYGTYEEKINACDEQIVRETATLSDKVDPEHKPLPPRKEGRPASKDKMQGQDMREVLYRKFGADLTAIEGIGVTTALVVLTEVGPDVSGFKTEKHFCSWLGLCPDNRISGGKVLSSHTRRVINRASDALRMAAVTLERSQSALGGFYRRMKGRLGAAEAITATAHKLARIIYRLIKHGESYVRQGMEDYERKFRERKLHALRKTAISMGFTLIAKQELTSPVS

SEQ ID NO: 256792 - protein, 392 aa, unidentified
MVVSVGIDVSKDKHDCFILSSEGEVLVDVFTIPNTMNGFNCLLQRIQDCTTPQGKMKVGLEATGHYSYNLLGFLLDNGLATYVLNPLRTNLYRKSLSLRKTKTDRVDARTIASMLLSDAGLKPYTDTAYHNEELKSLTRYRFDKVKERAKLKSSVSRLVCILFPEMEKLVSTLHTASVYTLLEEFPGAKQVARAHLTRLKSLLETASKGRYKRDMALEIREAARNSIGSRMPAKSLELQHTIRLIRELDTEIVEIEEQIQSLMDELASPITTIPGMGFRMAAMILAEVGDFTRFDSPDKLLAYAGMSPSTYQSGQLKNCYPHMEKRGSRYLRYALYNATKYVCRWDPTFAAYLAKKRAEGKHYNVALSHAAKKLVRLIFAMEKSRRPYCLAT

SEQ ID NO: 256793 - protein, 347 aa, unidentified
MDHIGMDLGKVKSQVCILADSGELLHRRIPTERERLMEFFGNRPKARILVEASTETEWVARCLEEAGHEVIVGDPNYAPMYSQRSRRVKTDQRDAEALAEACRLGGYRPAHRTSDKQRHVRGLLGVREALVRTRARWIALIRSLLRREGIRVRSGWSKSFVTRVEELALPEHLIEEVAPLLACMAHLNERIELLDRQVTELARKDEVARRLMTTPGVGSVIALSFVATLDGVDRFRGPHQVEAYLGLVPREWSSSEVQRRGHITKAGNTRMRWLLVEAARCVLRGKKKPESATLREWGDRLVQRRGKSVAAVAMARRIAGILYAMWRDGTVYDPTMVRSGVSAVRAA

SEQ ID NO: 256794 - protein, 371 aa, unidentified
MEKSVLYVGLDVHKMSVDIAIAEAGTAGEIRYYGRISGDLDALDRISRKLKAKGAELRFAYEAGPCGYQVYRHLNAQGHSCLVAAPALIPRRPGDRLKNDRRDALTLARLFRAGELTPVKVPDAGDEAMRDLVRAREDAKGVERRAKQHTAAFLLRHGQRFPGKTTWGRGYWRWLRRIAMPYPAQQIVLQEYLDAVQEAEARVQRLTAQIRELLPQWRWHPVVQGLMALRGVSLIVATTVLAEVGDLSRFTNPAELMAYLGLVPSEHSSGSQVRRGAITKTGNGHARRVLVEAAWAYRLKARVSRHLWRRLTGLPKPICDLAWKAQIRLCGRYRRLRARGKHQNTVITAIARELAGFIWAIGQQVEPVTVA

SEQ ID NO: 256795 - protein, 317 aa, unidentified
MAEVSFPSQVLRGCGIDVHLKVVVATIKGEGIRKETRSFDTFTSSLTELKDWLLQNGITHVAMESTGVYWKPVYHVLEDAIPNVWIVNARHIKNVPGHKTDKMDSEWICKLLLAGLLKPSYIPPKEQRQLRDLTRYRNKLIQHVSSEKNRIMRILEDCNIKLSSVVSNTSGTTATKLIDWLCEGKFITLQDVESIYHGKMSATPEELLKACTGFVESHHVYMLQMIRRDIDQTTVLIDELGVKIRDVLSKYDNAIELLKEIPGFSDKVVEDLVAEIGFDMSKFPSEKHLASWAGICPGNNESAGKKKAEGSPTETNK

SEQ ID NO: 256796 - protein, 387 aa, unidentified
MHTVTSTTVVATAARANDNTLFASLELSKSKWVVTINSPGSEKFSKHVIEGGDGAGLLELLSRLRAKAEQRCGAGVKVVVIQEAGLDGFWIHRLLLAAGIESHVVDAASIALPRRHRRAKTDTIDGETLLRTVMAWARGERRVCSMVCAPSPEEEDRRRLTRERDTLLKERIRHTNRVKGLLSSQGVRDYHPLRRDRFERLETLRTGDGRELPPLLKVEIRRELERIGLVTTQLAAVERARDALIRADAEGPNTPAALLLKLKGIGPEFASLLWLEALFRSFVNRRQVAAYGGLAPSPWQSGAIERDQGISKSGNRRLRKTMIELAWLWLRHQPDSALSRWFRARVGPAKGRVRRIAIVALARKLLVALWRYVTQGVVPEGAVLKAA

SEQ ID NO: 256797 - protein, 464 aa, unidentified
MQLRLGIDIACRAAHQVSLADEQGRFIWTGRRFRTTPQDLDRLWAMLPDGTDPVDVVVVMEPTRNAWVPLAAWFRRRGAGVVLVPPERSADLRRYYAKHTKSDRLDSQLLARLPMLHPDGLYAEQGLGPGDALKRAAKLHSTLTHRRSQSLARLDALLEILGPAWHSVIGGDLANRTPLKFLAAGYADPHVVKRLGRTRLARFCYRHSRGAWGEPHADALLAAANQTLELWSGGELDYPDLAEDIALEARLALQLTQEIKDLDERTALLLREADPTGIVTSAPGVAAITAAAILGRLGDPNRFTSLAGARAFTGLVPLLDASGLNERHGGPTKRGDAVLRQALFMAAGQARRTDPTLAAKYHRLMTDAGKHHNSALCHIATTLLTRIIACWRAEQPYQLRDVDGTPLTIDQARAIIAERYAIPKDLRARRRTTDTARTDRRNKESPSAPSTGPSKPNATTPTAA

SEQ ID NO: 256798 - protein, 360 aa, unidentified
MDVLHYIGLDVHKRSISYCIKTVAGQIVQEGKLQASRQELRRWAEELQRWSGAMEATLFSAWIYDTLKPYAERLVMGHPAKMRAVTAGKKKSDTIDARTIADLLRCDLLPECYVMPPQMRDLRRLLRYRSMVVQQSVRMQNKMAGLLMESGTVFHKEKLHGKKYFSALIETLEEVPESVKDLLRMSRSSMELFQSAQKQIAQRLLSEPALEQRIERLMSIPGVGPITALTWALEVGDPYRFSSIGDAVSYCGLTAAFRSSAGKQQRGPISKQRNAWLQTVLIEAAKLAPRWNPQLAALHAKQLELGHRNRATLQLARKLVAYLLAVDKSGQPFRIVTSPPETKDAMKTKTKKQPLLTQAA

SEQ ID NO: 256799 - protein, 343 aa, unidentified
MQTVTTIGLDIAKSIFQVHGVDTAGQVVIRRQLKRRSVLAFFQKLPPCLVGIEACASAHHWSRELQALGHNVRLIPPAYVKPYVKRQKNDAADAEAICEAVTRANMRFVPTKTPEQQSGLVLHRTRHLFIRQQTAVINAIRGHLAEFGIVAPVGRHGVEELLNVLADPKDKRVPEIARACLSAFGAQLRRIKEQVLEFDRLIRAWHQSDEMSMRLDEAPGVGPVLATAVVATVADPRSFRSGRNFSAWIGIVPKQHSSGGKNRLGNISKQGDRYLRGLFVAGALAVIRYAKIHGTKHRPWLTALLARRPTKVAAIALANKLARMVWAMMVKGERYKEPVALAA

SEQ ID NO: 256800 - protein, 371 aa, unidentified
MKKDSRSSARGKRGKRARPGRETIGLDLGDKASCYCVLNEQGEVIGESKVATTKQALVRVMGARKPCRIALEVGTHSPWVSRLLGRLGHEVIVANARQVKLISESSRKDDRLDAEMLARLARVDPQLLRPIRHRGERAQGHLLRIRVRAALVEARVSLVNTARGLTKAQGERLPSCDTDTMGVARLQELPAALAAALEPLLREVESLTEKIKACDAALEQIAREEYPETELLRQVSGVGTLIALTYVLTVEDAGRFAKSRDVGCYVGLRPKRDNSGASQPQLRITKEGDVYLRKMLVQGAHHILSHRGPDTDLRRWGWKLAGRGGKNAKKRAIVAVARKLAVLLHRLWVSGEVYEPLRHSTAPAHRTAVAA

SEQ ID NO: 256801 - protein, 361 aa, unidentified
MTNFIFAGCDLHEETLVNRIAIGQQPSERKTVGNSRAGRELIAGLKRESDKHGGARIIFGYEASGQGFGLHDQMVEAGIECYVLAPTKMESSVKQKRNKNDDRDAERILKRLRAHKLAGEELPSVWVPDLQTRDDRETVRARQDLGDKLSSVKVQLRSLLQRHGIEKPTGVGKPRTKSHQQWLEQLSGDSQLGVGVRTALGSLLRQVRHLEQEIQQLDEAVDQLSRKPHRQAVVDALDQETGIGRLTATAYAVEVADFTRFRRGRQIGAYWGMAPSSDESGEVNDRKGHITRQGSPRIRKLLCQATWYRVQKDPQVRAIYQRLVIRNPKKKKIAVVACMRRLAVRLWHIGRQAQLAMKEAK

SEQ ID NO: 256802 - protein, 348 aa, unidentified
MSQILSTVAVIGIDIGKNSFHVVGLDEDGAIVLRQKWSRGQIEARLANVPPCLIGMEACVGAHHLSRKLKALGHDARLMPAKYVRPYSKGQKNDFRDAEAIAEAVQRPTMKFVATKTADQLDLQALHRVRERLVSQRTGIINQIRAFLLERGVAVRQGLRFLRAELPRILAAPPEVLSPRMVRLVEGLAEDWRRLDERIDCLSGEITALARQDAGCERLVSVPGVGPIISSAVVAAIGTGDAFSKGRDFAAWLGLVPKQISTGDRTILGKISKRGNRYLRVLFVQAAWVVLIKPQSWERHGLKRWIEGAKKRLHRNVLAIALANKLARIAWAVLARGRAFETRPVVSA

SEQ ID NO: 256803 - protein, 322 aa, unidentified
MSLPSPLCVGIDVSKATLEIAASSAIEQFSVANDADGFDSIIAVLRKRTVALVLMEATGGLEAAVACALQAEGFEIAVVNPKQARDFARAMGYLAKTDRIDARALAQMAEVINRHPERDRFIRALPDAERQVLNAMVVRRRQLITMLVAERNRLHPAHPQSRKSINIIIKALEDELARIDEDMNTHIRNHFKELSERLSSIKGVGTMTVATLLAEVPELGRLSRREISALVGVAPVNRDSGTMRGRRTIFGGRAGVRTVLYMAALVATRFNPVIKAFYTRLVAAGKPKKVALVACIRKLLTILNAMLRKNEGWDEPYHHIAP

SEQ ID NO: 256804 - protein, 430 aa, unidentified
MEIIYQKACGVDVHKSFIVAVICDSTSIKPQYSRKRFSTFPNSLIDFRNWLSANDCQNVCMESTGKYYIPVYNALEGYISNVVVSNPKWVRCIKGEKDDNKDAKWIADLFKLGIVRHSFIPSKNIRVLRELTRYLYKLTNMRTSEKNRFTNALTVGNCKLDMVFSDIFGKSSSAIINTIISQNQYSDKDILKNVDKRCKASEEDILNSINGISWVDAQKERMLLIQNHIDYLNSTIKSLKEIIDIVVKPYEDYIKFLCTIPGVDRNSAISIISEIGTDMSQFSSHYRLVSWAGLAPGCNESAGKKKSVKISRAGVYLKPALVEVAHAAVTDKDCDYYAVKYKQISKRRGKKRAIIAIARKILVAIYHMLSTGEVFNPSDLSKVETSDKDRIKYTKNNFMQSAKQLLSLGLTSEEIILLVNSQNSNLTPIT

SEQ ID NO: 256805 - protein, 374 aa, unidentified
MANHNEVFIGIDTSKLRNAVAIAEAGRNGKVSYLGEIDTSEAATKKLVASLACKYRRLTFCYEAGPTGYGLHRHIESLGHSCIVAAPSLVPKKAGDRIKTNRRDAEGLARLLRAGELTAVWVPDARHEAMRELARARDSARQDLTRKRQQVSSMLLRMGLHYPGTRTWSARHRSWLANLKLEHAEHRFVLEELLVAERQAGERIGRLEQAIRDALGNWSLRDIVPALMAMRGIDMISAVTILAEIGDLTRFANPRQLMAYLGLVPSERSTGDAVRRGPITKAGNGRARRVLVEAAWAYRHPARVGFEKQASVAAAPRPAREIAWKAQVRLCKRFRSLTRKGKKSTVAAIAIARELAAFIWAIAHEVEAASAGTS

SEQ ID NO: 256806 - protein, 362 aa, unidentified
MRIIGCDLHARQQTLAILDTATGEVVNETLAHEGDGVREFYSTLPGPVRVGIEATGSMKWFLNLMEELGIDCQVGHPATIRAAEPRRQKHDQRDAELLLKLLVENRFPSIWQPSKELLDLRALLLHRHQWVRLRTRIQNALQAIALANGLRRGSSLWSQRGQQAIRSLPLATHTAHRRSELQAMYERFEAEIEELNERVLEQANRRTTAGLLMTHPGVGPITALATDVFLGDPKRFRDGKALASYIGIIPRENSSGGRQRLGGLTKQGNPLLRFLWCEAAVHAVRRDPELRQFYRRKLVQKGLGKARVAAARKLGIRLWIMLRDQIDYQEFCRRGQKQQRSGDACAGMPGMRYGAKSHRLID

SEQ ID NO: 256807 - protein, 346 aa, unidentified
MDHFAGLDVSVKETSICIVDDAGKIVREVKVASEPEALLAVLKNLAYHFKRIGLEAGPLSQWLFSALAEAGLPVICVETRHMQAVLKAQINKTDRNDARGIAQMMRAGLYRPVHVKTIRSQKLRMLLTHRKLLQSKAIAIENDLRGTLRNFGLKVGMVGKVKFEARIRELVENLPDLAVLVEPMLIVRRTLREQIVILHRRLLTIVRDDEVCRRLMTTPGVGPVVALTYRATVDVPARFRKSKAVGAVFGLTCAKYQSGEVDRNGRISRCGDEMMRVMLYEAAQSMLRSKKWSWLKAWAMQIARRRGMKKAIVALARRLAVIMHRIWVDGTEFRWTREQATAAAAA

SEQ ID NO: 256808 - protein, 338 aa, unidentified
MAILTVGIDLAKNVFAVHGVNEAGKPELLRPSVPRAKLHALLAALPPCTIGMEACSGAHHWARLFAADGHTVKLMAPKLVAPYRMSGKRGKNDGADAAATCEAVQRPNMRFVPIKTEEQQSRLMVHRARQGFIATRTATINRIRGLLSEFGIVLPQKAEIVRREAAAHLEDLPGWSNTVIGDLLSEVHHLDERIKQYDTHIRTMAKDCTLAQRLMQLIGIGETTATAIVAMVGNAAEFDSGRQFAAWLGLVPGQYSSGGKARLGRITKAGDAYLRSLLVLSARAVLNAAANKSDSLSRWAVKLAERRGYWKAVVAIAAKNARMAWAVLTKGEAFKLPH

SEQ ID NO: 256809 - protein, 319 aa, unidentified
MLPHPTPFATHLVGIDVSKDWLDIAFDDTKVERVDNTPAALQRLARRLVKAGLTTAGLEPTGGYERLAVAVLREAGLTVLQVDSWRCRQFAKACGQRAKSDPLDARIIRAFMLHHPCRPFPEPSQAQSDLTAWVREITRAEADIRRLENRKAHPTLAAITARLDAEIAALRETVAAAEQTIEALIAADPAMDAKAKIITSVPGIANKTARVLLAEAPELGQFTPRQAGAIGGCAPYRNDSGKARRPAHIEAGRRALKRACYLAAFAAIHWNPWAKQLYADLKARGKPAKVALIAIARRLLTILNAMIRDNKPWQAPKAA

SEQ ID NO: 256810 - protein, 317 aa, unidentified
MQTVLNVGVDVAKDMVVVASADERWPVQQVRNQRSALRAWLKTLPAGSRIGLESTGSYHELLADLAHASGHTVYLLNPMETRHYAKALGARAKTDRVDAMLLARMVAQEHAGLRAYTPPTPQQRQVDRLIRRRAKLVRLKGALKLTMANLEGLTGEVKAVVRKLDALLAKLDATMATVAAQSALHQQAQQRVETIVGVGPLVGMSLTNTLERVPFRNADAFVAFTGLDPRAKDSGQKTGRRRLSKRGPAELRRLLFMAAMAAIKTKVWKPIYDSYRIQGWSSTATLVIIARKIARAAWSIHRYQTTFNPDRLIRGLT

SEQ ID NO: 256811 - protein, 342 aa, unidentified
MTTIKYSVGIDIASGTFTAAVGEMPWKVVLKPQMFENTEDGYQALLEWFAQHHLSVSETVVCMEATGVYSEGLAYFLHAKDYRVAVQSPLEVKRTFKPYGPKSDAVDSLQIAEYACRHTDKLSFWKPRSEILEQVKALLAVREQFVAQNTAHKNALKAIQRKVVRTPFAEQAYLQLIEQVKKQIKAIDTEVRRLIESDPTFKEMLLLLLSVPGVGLLLAAHFILLAQFSLEYKVLASFLGICPNEHSSGTSVFKHATSRHFGPPAIRKLLYLAACSVCTHRPQFGLYLARKAKEGKPTRLVLNNVENKLVRIMCAVLQSKTAFIENYHSVQPLAFQKTLTAS

SEQ ID NO: 256812 - protein, 425 aa, unidentified
MHSKWNNKINQVTENTLVVGMDIAKRIHYACFVDERGRVIEKAFAVHQSKEGFENLYEKIRQMMKEAKKTEVIIGIEPTGHYWMNLAYFLDQYGIPLVMVNPMHVKRSKELDDNLPTKNDKKDALVIARLLKDGRFSYPRILKEVEAELRIGSTLRLKLTEDLASIKNRIIRWLDRYFPEFTQVFPSFGKMALTALERTPMPQDIQGKTAEELVFFYRQVGGMRAPQLPKAKLLIEKASNSIGLTEGQKMAKHEIATLLRQFRLLETEIEAVNDQLTELAKTTMEYDLLASVPGLGDATIVDLLSEVGSFSLYENPRQLIKLAGLTLRENSSGQHKGQKHISKRGRKRLRHILFKVIVPLIRHNLAFKQLHEYYTTRNQNPLRGKQSMVVLCGKLLKILHGICKKKVYFNEQLMMKDLYCLGEAA

SEQ ID NO: 256813 - protein, 378 aa, unidentified
MSFSVNFWVGLDVHKDSITVAVFRDRDPEPLHVDRLPCDLRKIRRYFQRLQAQGTVRACYEASGAGYVLQRSLTAWGIECHLAAPSLIPRRPGERRKTDRRDAIKIARDFRDDRLVLIHIPTEEDERVRDLVRCRETFQREIVKSRHYILKFMRRRGFVFREANNWTVRHLNWIRQVLAPGTLAEEDHTVLSEYLALLEYKLQRRDELDRRIEALALTPRFKPLVERLCCFRGFKTQAAMVIATELGDLRRFSSPRQLMAYVGLVPSEHSSGPRQRLGAITKAGNSRVRHTLIQAAWQYRKRPAVGAPLRRRQHGQDSGVIRHAWKCQHRLYTLFHRLAVKKPAQVAVTAIAREMVGFLWAVLREVDVSKLQEVSAAA

SEQ ID NO: 256814 - protein, 408 aa, unidentified
MEVLYPRCAGLDVHKDSVVARIRCVSQPLHDEVQTFATTTSALMELNEWLGTHGVTHVAMEATGVYWKPVWHLLEGDFELVLANAQHIRNVPGRKTDVNDAAWIADLLAHGLIRSSFVPPAPIQELRDLTRTRKQLVREISQHSSRIQKVLEDANLKLGSVLSDVLGKSGRAILQALVDGESDPEKLADLALGHARKKRAELIEALHGRIRDHHRGLLRVHLDLVTALHHAMAELDAAVGKALASLHESARLLTTIPGVSDVTAQVIVAEVGVDMTRFASDAHLRSWAGLCPRNDESAGKRRSTRVRKGAPWLKTTLVTAAWAAVRVKDSYLQAQFHRLRARRGAKKAILAVAASMLTAAYHMLKKGVEYQDLGAEHFGRRDRDKMIQRLVRRINDLGCQVQLLPQAA

SEQ ID NO: 256815 - protein, 420 aa, unidentified
MKVVYSTCCGVDVHKTFLVATIIKTTKGVQPSYQKKRFSTFNSDIRRFKQWLLDNSCFDVCMESTGKYWIPVFNLLEDQINVTIANPKWVKAVKGNKDDAKDSKWIGDLFRLGLVPGSFIPCKEIRILREYTRYRFKLTCCKRSEKNRFQNAFTVCNVALDAVVTDMFGKSASSITDYLITSDEFDPETCKSFLQKSLKKKADAVIESIEGYQMTSSQKERMLMVRSHLEFMQQSIDSLDSKLDELTAPYENAVSLLCTIPGVDRASAITIISEIGTDMTQFNSSKRLCCWAGLTPGNNESAGKKKSVRITRAGVYLKPALVQCAHAAVKSTATPYYKNKCERLAKRRGKKRAIIAIERMILTAVYHMLSTRETWNPCDLYKIDMPKEMQDKQKAKAVKQALKLLISQGVISPESAPTAV

SEQ ID NO: 256816 - protein, 313 aa, unidentified
MTEHNIGVDISKSHLDVFRLEDEAARRFENSAAGFRALVKWLGKSAVARIVFEPTGPYHRAFETALSGKFPLVKINPLQARRFAEACGTRTKTDAVDARMLARMGAALALEPDAPVNEKLNELKDLQVARTGLIKERTRLHNRGHVQNNPVLKRQTKARLTLVERQIAELDAEIARQIAQDQPTARKRQILCSVPGLGPIAAALILTFLPEIGTLDRKQAGSLAGLAPHSRESGQWKGKSFISGGRKPLRDALYMPALVAMRFNPDLKAKYTALRHVGKPAKVAIIAIMRKLLETANALVKGDHLWAKKSSCS

SEQ ID NO: 256817 - protein, 352 aa, unidentified
MFYVGLDIHDKRIAICVLNEAGQVARRAQVRTIDEMMRILESLPDRFEVCYEVSCGYGHYHDLLRPIAARVTVAHPGRLRLIFRSKDKNDRKDAERLAKLLYLGEAPAVHVPSADVRTWRELITCRGRVIAKRTRAKNSLRTLLRCAGVVPPGRPALWTKNGLEWLRRLELPTPSQQLRRDLLLEEIEALTRQVRRIEQQLNHEAGRSPAVACLRSIPGVGVRTAEAVAAFVDDPQRFGDAKAVGRYFGLVPSQDQSGDRNRLGHITREGPAVVRQLVAEASWQAVRRSPTIRAYFERIRRDDPQRKKIALVATAHYLVRVMWALLKDGATWEEDRTPVEEPNGATPVFANV

SEQ ID NO: 256818 - protein, 348 aa, unidentified
MQSTASQPVVGMDIAKNVFQLHLVDTETGEIQRHKLRREKVTAFFANRQKSLIAMEACGGAHHWARTLQSLGHEVTLLPAKHVKPFVLRDKTDARDAQAIWVAAQQPHIKPVPVKSEQQQACLALHRLRAQLMKMRIMQTNGLRGLLYEFGIVLPEGHRLLLQRIQGELATAQEQGRLPTVLVESVQEQLRRIDILQHDIDQLDRRLAAMVRQDQHMQALQAIPGIGPLTATALVSTATDLNSFASGRQFAAWLGLTPRQTGTGGKTRQLGISKRGDPYVRTMLMHGARAIITRSTQTSWIQRLLQRRPFSVVVAALANKLARTAWAVLVKGKAFDQVTWNPSEAVAA

SEQ ID NO: 256819 - protein, 402 aa, unidentified
MNAVGIDVSKSKSVVAIMRPFGEIVSTPFEIKHTASDIHSLIELINSVEGESRIVMEHTGRYYEVLAHQLLEANLFVSAINPKLIKDFDNDSLRKVKSDKADAVKIARYALDKWQNLKQYNVMNELRNQLKTMNRQFGFYMKHKTAMKNNLIGILDQTYPGVNTYFDSPARSDGSQKWVDFASTYWHVDCVRKMSLNAFIDHYQNWCKRKKYNFSQSKAEEIYGKAKELVPVLPKDAITKLIIKQAVDQLNSASTTVESLRTLMNETASKLPEYPVVMAMKGVGTSLGPQLMAEIGNVSRFTHKSAITAFAGVDPGVNESGTYEQKSVPTSKRGSADLRKTLFQVMDVLIKTHPQDDPVYQFLDKKRTQGKPYYVYMTAGANKFLRIYYGRVKEYLSSLSES

SEQ ID NO: 256820 - protein, 402 aa, unidentified
MKEFTPAERGIETVSALTVVSRALAAERYAAYVGMDVHKDTIAVAVACPGREAVEYRGEIANKPKSVAKLVRRLSEEFEGGMLLFCYEAGPCGYGLYRQLISTGHECQVVARSLIPRKPGERIKTDRRDALKLAQALRAGDLTAVWVPGEEQEAMRDLTRARADMKGQEQKARQQLSAFVLRHGHGWPANKTRWTQAHFDWLESLKFAHDWQQVVLQEYIDAVKAAGRRVADITEQMLRAVGQWSLAPVVDSLVALRGVDKVAAVTLLAELGDISRFDSPKQLMGYLGLVPSEHSSGRRKRKGAITLTGNAHARRMLIESAWSYRFPARQTMHLKRKAKSATEEAKAIAWQAQKRLCGRYRILIQAGKNQKLVTTAIARELAGFVWAIVCQVMPQVNAAKAA

SEQ ID NO: 256821 - protein, 422 aa, unidentified
MLEETHDTEELIQRIAALDIGKATLVCCVRVPSPDTPGTRLQEVTTYQTMTRALLAMADRLHELGVTRVVMEATADYWRPPFYLLEAQGFEVWLVNARDVKHLPGRPKTDRLDAVWLCKVAERQMLRPSFVPPPPIRRLRDLTRYRADLVAARTAEKNRVEKLLEDAQIKLSVVASDIFGVSGRAMLAALVAGERDPKVLAQLARTRLRAKLGALQEAFVGRFSDHHAFLLQTMLSRIDQASADIAAVEAKIEAEIAPFQAAADRLDEITGVGRAAAQVIIAELGTDMRRFPTPGHLASWARYAPGVKESAGKRKGNATTGHGNPYLARVLGEAAVAAGRTNTFLGERYRRIARRRGAKRANVAVGRSILIIVWHLLADPTARFHDLGPSFYQTRTDTQRRTRNHVRQLEALGYTVTLQPAA

SEQ ID NO: 256822 - protein, 454 aa, unidentified
MKKQDSYDYYVGIDCAQNKHDFAMKNNQDKFLIKRGHFSNTLQGYEKFLNTVLSKCLNKDKILFGMEVTGIYGTNLYERLKSDGYHVVMISPDSVKNYRDYKRLNKTDKIDSGCIAELLLNGDAQIVHVAKNGYTDLKAYIRRRNALKVTCTQETNRFLAKVCLYFPDLLKVFPSGRATLKAIFSIYPTPYSIIEADFDELVSVLQKASKNKFGVDKANELIHAARNSIVVRKSISDGELYNIHSLIDSIDSLESEIRNLEKIIDSKAEEFPAYHVLLTLTRCGKITAATIVAEIGDISRFHKASQIVSLAGLYGDNSKSGSSVNKRGKISKKGSRYLRHAIYMVAEFARRNNPIFKAYFTRKKNGDRTKHTLAVNAVANKLCKVIYSLTKNQSTYIIQYRDLVKLSESTQNEFFQNAETDFSAKTRRKKYLYEDEYGELHEFVFKSIKTALIE

SEQ ID NO: 256823 - protein, 413 aa, unidentified
MQLFAGDDWAEDHHDVELMDTAGRRLAKARLPEGVAGMARLHAMIGEQLGEDADEEDPGQVAIGIETDRGPWVAALVAAGYTVFAINPLQASRYRERHGVSGAKSDAGDAHVLADMVRTGSCQLRTVAGDTAQAAAVKVVTRTHKTLIWERTRHTQRLRHALRDYFPAALEAFEDLDAPDALELLARAPDPASAARLTTAQISAALKRARRRGIPAKAERIQAVLRAAHLGQPAVVTAAYAASVRALVAVLGTLNEQVEALQGQVEAYFGQHPDAEIVLSQPGLGPILGARVLAESGDDPARYASAKARKNYAGTSPITRASGKKKAVTARHIHNDRLIDALMSQAFSALQASPGARAYYDCQRARGSNYNAALRQLANRLTGILHGCLKTRTLYDEATAWPQYAVTPKKAAA

SEQ ID NO: 256824 - protein, 372 aa, unidentified
MLYAGVDVSKDKVSVAVLTSGGTKLTSGEFDITTEGLKLLELTLKHLKDEISMAIEQTGTYSMPVILYLMERVEGLRIYLVDGLNFSRFIKLEGRKKQDKADAVSLAEYLRRGLPARLITDKDIKAYGLKVLISQREHLLKVKNQVENRLRQLVETIFPDSKTLTKPVFWSEIRKGRAILDWKRLTDKAEVLSTILRERKIWLEIVHSLEETEKEINAFLRAHYPTDVEILKSFGFSETTIAYFISVYVDIGRFKDVKAFKSYMGLGLRIYQSGKKEKNVVNSYTNKYIRKLLYMYVVQAVRERSNHVRVKDYYLRQVEKSGSKKKAIIKTASKVIEWVYYCLKHREPFKWEANYETQQEDISKVNSGQAED

SEQ ID NO: 256825 - protein, 339 aa, unidentified
MKTYAGIDLHSSNNFTGVINEQDQRLYRKRLPNRLDAVLSALEPFKDTLEGIVVESTFNWYWLVDGLQEHGYKLHLANPSAIKQYEGLKHTDDQWDSFWLAHMLRLNILPEGYIYPKEERPVRDLLRRRLLFVKHRTAHILSLQSMITRNLGSQMSCRAIKRLEKADAEILFNHPHLVLAAQNNIAVIAFLKQRITGIEREVKSVITLRDQFTYLLTIPGIGDILALTIMLEVGDISRFPKVGDYSSYCRCVKAERLSNGKKKDENNRRNGNRYLSWAYVEAANFANRFCPHAQRFYQRKMAKRGGIVAIKALSNKLARASYYIMRDKVAYDVDKLFRK

SEQ ID NO: 256826 - protein, 355 aa, unidentified
MSATIIGVDPHKRSHTAVVLDEAEQIAAKLRVDAGPGQVDALLGWAPGGERVWAIENVNGLGHLLAQQLIGRGEVVIDVPATLSSRARKLSGHSARKTDEHDARSVVIAAAHNNRLRRVTVENNSVVLGLLLDRRWHLVAQRQRTICQLHALLSELVPAGAARHLTSKKAAALLRRITLASVVELERKLVARELLEDVRWLDKRIPVAKQRLSQALAAYGTTLTDICGIGEIGAATILSIVDGPTRFPDRGHFAAFNGTAPLEASSGDQRRHRLSRRGNRQMNKVIHVAARTQIRSGGPGRVYYDRKLAEGNSKMEALRALKRQLSDVIYRRLLADERARQVVRGGQTGDKPKAA

SEQ ID NO: 256827 - protein, 351 aa, unidentified
MEIKRIGLDLAKYVFEVHAVDNNENVVLRKTLRREAVAQFFAELEPCVVGMEACCGSHYWARVLTDLGHEVRLISPQFVKPYVKSNKNDRNDAEAICEAVGRPSMRFVPPKSPEPLEIQAVHRIRQRVVANRTRLVNQVRGLLGEHGVVVPRDINRIRRTLSEIADGQSGGFGGLFVEMLRDIREELAELDARLAGYNQRIKSLYRSNEMCQRIGQIEGIGPITATALVAAVGDKSCFRNGRQFAVWLGLVPKQHSSGGKARLFGISKRGDRYLRTMLIHGARGTGPLGRKNRYAKPVDQPDAEKTSSECRCSRLGKQERKDRLVASVKRSGIQSRTHGLSQAKKDQVKED

SEQ ID NO: 256828 - protein, 319 aa, unidentified
MMTTNKKQKSRVNVGVDIGKSQLDIAIFEKNVYFVVDNNTQGIRKALGRLARYDLERVVVEATGRYEYGLVEALMDRGWPVVIANPIQVRKFAGAAGQIAKTDKIDAKLIAEYAARMQPPIQRGRCQKARKIKDYLVRRRQLIEMITMEKNRYQIMPKFLKADIQRVIHHLQRQLQKLDQQLETLVDQEDQWQEKKRILLSMPGVGPVVVNTLLGDLPEIGELTNKKIAALTGVAPYNRDSGKLRGKRRIRGGRATVRTTLYMAVLTSIQHNPVIKGYYHHLVSQGKHKKVAITACIRKMIIMLNAMVRDGTVWNTQTT

SEQ ID NO: 256829 - protein, 402 aa, unidentified
MNCVGIDVSKGKSMIAVMRPFGEVVVSPFEVRHTANELSELAGLLKSLDGETRVVMESTGNYHAPVAWLLHGAGFYVSVVNAMLVHDYGNNSLRRGKTDKKDAVKLANYGLDHWLTLPRYVPEEDTRLMLKTCYRQYQQYSKVQTMLKNNLISLLDTAFPDANRLFTSPPRADGSEKWVDFVATFWHCECVCGRSEKAFTTQYQKWCRKHGYNFSEDKALDIYASACRHFGVIPKTDTAKLLVEQAISQLQTTSSALAALKQEMQSLAASLPEYPVVMGMFGVGPTLGPQLLAEIGDVRRFHSKKALVAFAGIDAPPYQSGQIDVRSRSISKRGSASLRRTLFLVMSVILQCAPIDEPVYQFMDKKRSEGKPYRVYMMASANKFLRIYYGRVKEYLASLEEN

SEQ ID NO: 256830 - protein, 330 aa, unidentified
MHSPALLAFDIAAAEHEFAYELDGRCEHGKVENTPPALRQFFQARLKAGPLRLVVEATGVYYLDAALIAAELGIPVMVLNPKAAHHFAKVLMQRSKTDRLDAQALLEYLRRMPFQPWQAPARHLLEFRQFGRYLSQLSEEQTASKNRLHALESSEISPKLLRRDLHKAIKAMQVRIDRITAEAMKLVGANAELRTAFDALDSIVGIAQTSALMLLAEMVVLPRAMNSRACASHAGLDVRLHDSGSSVHKPARISKHGNKYLRRALFMPSLSAVAHDPYARAFRDRLVARGKKKMQAQVAVMRKMLTAAWALFKNPGRYDAAKLYQLQPET

SEQ ID NO: 256831 - protein, 324 aa, unidentified
MEAMIERCAGLDVHQETIVACALFGPLDKKPEKSIQSFSTTTPGLLELNDWLTSLKVTDLVMESTGVYWKPVWNILESDFQLILANANHVKNVPGRKTDVKDAEWLAKLLRSGLIESNFVPPEDIRDLRDLTRYRKKLTHQRTAEQNRIHKILQDANIKLTSVLSNIFGLSGRRILEAIINGEKIEKKNLQEMVHWRTKASLDDIAKAINGRVRRHHRDMLQYHWDHMLYIEGMIQNLEEQIDQSLAPYRKEVDLLDTIPGVDQSGAATFIAEMGVDMSVFKSSKHLASWAGLSPGNNESAGKKKEVKPQKGTRHYRPWRYNVL

SEQ ID NO: 256832 - protein, 384 aa, unidentified
MSKDSIIFIGLDTHKSFIQVAVLQEHRGANPQHLGRIKSNKSALIKLARQLQSKYPKATLHFVYEAGPCGYWTYRLITSLGHCCYVVAPSLIPKKPGDRVKTDKRDAAKLTKLLKAEELTPIYVPEAEDEAIRDLSRARETAMKDLKDAKFQLKGFLLRNNIQATVNDNWSKKHLRWLTDLILPHHSQQIVLQEMIITINERIQRLQRLDNELLHQVKNWRYYPVVKAIQAMRGVRLLVALGTIAELGDLRRFHHPRKLMAYLGLVPTENSSGGKTRRGSLTKCGNSRARRLLVEGAHTYKHKANISVELQLRQEGLPKEIVDIAWQAQQRLCRRYQRLLQKGKHRNVVVVAIAREMIAYIWAIAREVVISDVDPRTRIARLPA

SEQ ID NO: 256833 - protein, 408 aa, unidentified
MKRYYLGVDWADEFHQVWVSDPEGKKIAEMKVVQSTAGLGELGRWLHERKAEEIELWAAIEKPHGRIVDFLLDHGAVVYPVNPKALDRARDRFRMSQSKSDLFDAYVLAEFVRTDHVHLRALEPNSEPAQELKMLTRDHDRLTRQKTRLLNQIEITLKEYYPRPLEVFSDLETHIARDFLKEYPTPQALSKLNRRRWNHFARRDHHLSEARCDELWEKIDKPQLTSPPYVIRAKAKLLLALVVQLEALLPAVESYSEEIKRFFDSMPAAELVKSLPGGKSGTTIPKLWAELGDAKNRWQSFRHLQAEGGGVPVTKSSGKSHVVHFRFACNKYLRHAIYWVSFNSLNRCEWANKYYRDQRAKGHSHPRALRALGAKWLKIIFVMWRDHKPYDENYHLANMARQRMRQTT

SEQ ID NO: 256834 - protein, 434 aa, unidentified
MTDFYPTPSAAILVAIDIAKVRNEVLIEFPDRKRRKRLSVLNTREDHDQFIDNLAAFDRPVIVGFEATGNYHRAIAWRLLDAGFDVRLIPSVGLARTREALHNGWDKNDPKDAQVMLHMLKIGATQHYHDPIAADINDIQELSKTHEMVSRSKTQIWHRLLTHYLPLYFPEAELFKGKSRSEWFLAFLNLFPTPASITAMDKEAFIEAAWDVVGKKVSKRRVIADIYEIASSSIALPVPLDSPAIDMFRMVLTEAQGLIRQRDEIEKHADHILGQHPDYIRLRQIPGIGPINALTILAEAGDVRRFKHHRQFLKFCGLDLATYQSGQFRGQSKLSKFGNARLRRTFWMAGQVAIRQRENAFRDKYERYIARDRNDPHLKRKALSAITAKMARVTHAVIKSGADYRPFFERAMPGGRTSLCSGRGGAPDQTGATS

SEQ ID NO: 256835 - protein, 338 aa, unidentified
MGSYVGIDLHRRRSVIVVLNDDGDRVSWSRIDNTPANLAAEIVAAGGADADVAMEACWGWYWAADVIAECGARLHLAHPLGIAGYENRRVKNDVRDATLLADLLRMGRLPESWVAPPPVRELREMVRYRAKLGRLRAGLKAQVHQTLGKEGVLPELDSIWRAGGKRWLDELSLADVYVDRIESLRDLIEVYDREIGEFDVRIQRRLKGDRGYEAIQALRGVGPVLAAVFVAEIGDVSRFDNPRQLCSWAGLTPRHRESDAHTHRGHITKQGSRLLRWAAVEAVSGAARDPSVTAIKRRVGDRRGRNIGRVAAARHLLTLVYYGLRDGEIRCLANTDAA

SEQ ID NO: 256836 - protein, 343 aa, unidentified
MDHFAGLDVSVKETSICIVDDAGKIVREVKVASEPEALLAVLKNPAYHFKRIGLEAGPLSQWLFSALAEAGLPAICVETRHMRAALKAQINKTDRNDARGIAQMMRAGLYRPVHVKTLRSQKLRMLLTHRKLLQSKAIAIENDLRATLRNFGLKVGGVGTVKFEARIKELVEKAPDLMMLVEPLLVVRRALREQIGILHRRLLAIVRDDDVCRRLMTVPGVGPVVALTYRATVDVPVRFRNSKAVGAVFGLTPSKYQSGEINRTGAISKCGDEMMRAMLYEAAHILLVRSAKWSWLKVWAMQIARRRGLKKAIVALARRLAVIMHRIWVDGTEFRWTREAAAA

SEQ ID NO: 256837 - protein, 317 aa, unidentified
MSKSFIGIDVSKNNLDVHILPEALSFSYRYETKAIKALIKKLKSYTPELVVLEATGGYEISIGIALSDAHLNVAIVNPRQVRNYARALGQLAKTDKIDAYVIARFAQDVKPEARAQMTFKELELKSLVVRRQQLMKMRCAEMNRLSRTSVTQVKNGIQKVIRVLDAQIEAIDHELKNEIKNNPTWSKKLELITSFKGVGDHTAHTLLFGLPELGNLNRQQIAALVGIAPFNRDSGMFRGKRTISGGRANIRKALHMPALSAATRWNQALKEFYCRLIAKGKKHKVALTACMRKMLITLNAMLKNNQTYNPKLGINYC

SEQ ID NO: 256838 - protein, 351 aa, unidentified
MKTQITARPKLFIGIDIHKRSWKIHCSTDISGGKTFSMVPSPAGLKKYVDKYFSDHEVSTAYEAGCCGYHAHRCFESYGWRSLVVNPADVHRKGKEKHTKTDKIDAQLIARELKDGRLDGIHVPDIEREQLRSLFRRRNDLVKDYRRIKSLIKSQLLYFGVIVPEEFDNSHWSHNFRNWLDALEFEYSPARATLDSRMRQFRFVDQDLRDVSTQLRRFCKTYYKKDYTLLRSVPGIGGIVACGILCELGDLRRFRSLKHLSGYVGLAPGIHQSGDHLRTTGMTRRAHKLIRSYFIEASWQAIRTDPVMQSYYRKHQGKNVKSVIVKVAHKLLSRTLAVIKTEVPYTIGIIQ

SEQ ID NO: 256839 - protein, 409 aa, unidentified
MLFLGVDWAEAHHEVLVMDEAGRTLGRARIGDDLEGLGGLHALVGEHQDAQAPHEVVVGIETERGLLVRGLLAAGYTVFALNPLAVSRYRERHAVTGAKSDAADAKVLADLVRTDRHNHRVLVPDSELAQALQVLARAHQGLIWARQRQVATLRSALREYYPAALQAFPELGAPEALAVLSVAPGPAAGRALSRAKIASALERAGRVRRIQERAQQIQQALRERRPEAPDEVADAFAQAALAAIRVAQTLTEQIAALEGQMRERFERHPAAEILTSLPGLGLVLGCRVLAEFGDAPGRYADAKGRKGYAGTAPITKASGRSRVVLARHARNRRLADACMLWAFASLTCSAGARRYYDALRSRGKTHRQALRQLANRWVGILHGCLERGVAYREEVAWPAPEADGLGRAA

SEQ ID NO: 256840 - protein, 344 aa, unidentified
MIYVGLDVHKSYSRMGVFDPANGELHDLGSVSNEPTVLEQRLSAVASPKTVVLEAGRSSYHMAGLLEAMAEQVWIVDPGEVRRLQRTVSKTDRRDATALAWWAAKGVLTRQWRPDAELLDLRELTRGKVSLTRLSTQVRAMIRMLLARHGHECPYRNLLGKSAQQWLDSVKLEGYAAQMLAALRQILIATQAKVDDFERLVDQTAAKHPVAQRLRTIPGIGPFLGLSLAVEIGDIERFPSAPHLRGYSGLVPAVHQSGDKDARGPLTKTGNKWLRHAAVQAAQRTTQMRHPDPRLKRTFLSVAFRHGCNPGKIAVARRLLDMIHHLLKRQKDYQPPVTAAVTEA

SEQ ID NO: 256841 - protein, 391 aa, unidentified
MILVGVDVAKDKHDCYIMTSEGEVLFKSFTIANNMEGFNQLYEKILSVIDNFDNVKIGLEATGHYSYNILGYLLDKGLTPYVINPLHSNLYRKSLSLRKTKTDKVDSRIVASMLMSDVSLKPYSNTLYHNEELKSLTRYRFTKVQERAKLKISISRLVTILFPELEKLVPTLQMNSIYALLYEFPSAHAISKAHLTRLTNLLNTTSKGHYTKDKAVLIREAAKNSIGSNMPAKSLELKHTIKLIKELTSEINEIEEEIKIIMNKINSPILTIPRICLSTGAQILAEIGDFKNFSSPDKLLAFAGLSPSTYQSGNMYSSNAKMEKRGSKYLRFALFNAAIYVSYWEPTFSQYLKKKRVEGKHYYVAISHVVKKLVRLIFHLEKTNERYSTVV

SEQ ID NO: 256842 - protein, 343 aa, unidentified
MEYYVGLDVSLKQTSICVVDQTGAVVREGVVDSDPEAISVYVRSKAPDAVRIGLETGPTSTWLWTELKRLGLPVICIDARHAKAVLKMQINKSDRNDAIGIARIMQTGWFKEVHVKDIDSHTVRALLASRALLVKIKRDLENHVRGLLKNLGLVIGRAKFNVFAVRAEELIEGRPELIAAIRPLLEARNAVEQQVSELDRKVMKLARHDAQVRRFMTVPGVGPITGLAFKATIDDPARFARSRSVGAYVGLTSRRHASGEVDWTGRISKCGDAMLRSYLFEAVGVLLTRVPKWSAVKAWGVKLAKRNGLRKAKVAVARKLAVILHRMWIDGTEFNWSKKEIAA

SEQ ID NO: 256843 - protein, 333 aa, unidentified
MYYSGIDLHSDNSYITTMDDNGTIVKRQRVANDDKRVLEYFHSLPDPHKAVVESTTGWYWLDDLLTDNGIELILAHAKYLKAICYAKVKTDKIDSKTLALLLRLGLIPRAHKISRELRGLRDTMRIRLRLVQQRTACLLRLYSIHAKFNGAVPDPYRFQLAALEHTRDTFSDQILALEKSLHPVLVPNDDIQRLLNIPGIGKISAFTIYLEIDGIERFDSDKHFVSYCRLVPAADNSNRTVHHRSSKDGNKYLKIAFSDTAVHAIQFYPEYKRLFQKLARRSGEATARTVIAKELAKIVYYVLKNKSSYKGLKGQPISRQKSQQWPRLSSPLS

SEQ ID NO: 256844 - protein, 448 aa, unidentified
MRFYTQQHQYYCGIDLHARVMYVYILDSAGNVVFHKNMTAGPEALLRAIAPYRQDIVIGVECIFTWYWLADLCKREGIPFALGHALYMKAIHGGKAKSDKIDSFKIAKILRGGDFPVAYVYPREMRATRDLLRRRCHFSRKRGALLAHIHMTASQYNLPAIERRLSHMSNRSGVPEHFPDPQVRKSIEADLSLIEHYDELLNDLELHIVQTVKVHDPNTFHRLRTVPGIGKILALVVLYEIHDITRFPSVQDFLSYSRLVKCAHESAGKRKGYGGAKMGSVYLKWAFSEAATLFLRKNGLGQAFFDRLEQKYGNSKARTVLAHKLGRAVYFMLTHNTAFDLKKFVGVHRSPTPQPRLGLQALANDSTSSDAPRPAARSAGAADPKTPPRSERALGTRSAPAKAAKGKNDAPGCPRTDALEEVKGVAPPKTRTRRRKVDGTAPSEGAPV

SEQ ID NO: 256845 - protein, 353 aa, unidentified
MEQFIGRDADKNFSLFIAMNEEGGYGRAIRVGHQRERMREFLAALPPGSEIALETSGSYYWLVDEMERAGHRPQLAHALTAKRRMEGRHKTDERDARGLAMLLRNGTLPRVWIPPAELRDQREMLRLRMSLVETRSQGKNRIHAALLRHNVILKAQDIYGVGGRQELASRLTELPEWTRQSVVKQLETVDWLQMQIQDCEQSLETLLEPNAERDLLRTLPGVGKILSGVIALEVGEVSRFGGPERLTSYCGLVPAARESAGKKRKGKCPADCNGYLRWAFIEAANVVAIHRHKWPERHVAQLYERVKHSSKLHGKATVAVARHLAEASYWMLTKQEMYREPSSHRQALSSTHG

SEQ ID NO: 256846 - protein, 336 aa, unidentified
MGQYVGIDLHRRSTTIVRMAEDGEVLGTERFVSQPFELAQAMAAAGPEPEVVLESTYGWYWAADVLQELGAHVHLAHALGNNWGNRRVKNDVRDAQDLAAMLALGRLAEGWIAPPEVRELRELVRYRYSLIRHRTSAKAQIHGVMAKNGILPVVGELWGPTGQAQLDRLELPEAYAMRLDSLRNLLDVYEAAIAELDAHIHAQLKSDPGYQAVMTLPGVGKVIAAIFVAEIGDITRFDSAKKLCSWAGLTPKHRESDEVVRRGAITKQGSPLVRWAAIEAVGNYRAKGNEKLRADYTRIAEHAGKYKARVAVARKLLTLVFYALRDGEVRCLETAA

SEQ ID NO: 256847 - protein, 334 aa, unidentified
MGKLTEAGIDVSKDVLDVAMRCNGAGLETARFDNEAGGHGKLVRWLTKRGHTARVVLEATGPYSLDVALALQRARGIEVMVANPRAIKQFAGALMQRSKTDLTAAVALHEYATRMPFVVWVPPAEPVLHLRAMARRIAALVVERTRERNRLQAHTASAEHLDVVANDIAVNIRHLERRIALLTAQAVALIAADADLQRAYDRLTSVPGIATRSAVQLLPELLVLPADMTVRQWVAHAGLDPRAYQFGTSVHRPARISKVGNAHIRRVLYMPALVAVQREPRVTAFFGQLIARGKKPLQAYVAVMRKLLHAIYGMFTTNKDFVAEKFYAVASETA

SEQ ID NO: 256848 - protein, 316 aa, unidentified
MAMRVSKSIVGVDVAKVELVIYEPNQDLLTSITNEKPAIKRWLKTLPRPIAIAVEATNVYHIDLVELAYEAGLDVYIIDGYQLSNYRKSVGVRSKTDACDARLLARYLKNEGEDLRPWTPPPAVYGKLQSLLRRRASLVQAKTSLTQSWANDASLKAVFATFLKSVERLELLVQKKLKDVLREAGLLEEVARCQAIEGIGFLTATALVMAYSRGDFNSGDSFIAFLGMDLRVSDSGQKNGRRSLSKRGCSEVRRLLHNAAMSASRSIAWKEFYNKHMGSGKATTQVLVMLGRKLARIAFSLMKNQSEYQPKGGILA

SEQ ID NO: 256849 - protein, 353 aa, unidentified
MNTIYIGVDFHARQQTSCYLTTEGGEVVIHQLKHQDKDQVRAFYAQFSGRVIVGLEASGYSPWFEALLEELGCEVWLGDATEIRRRARWRQKNDRRDAELILDLLIHDEFPRLHRPSPQSREILRMLRYRQKLIKIRTMGKNSLQALALQSGLAKRSHLFTKTGQQELRTAQMSPAMQWQREQWFQLLEPLNERLVETMLWLKQQSQDDARIKLLRTHPGIGLLTSLCVVHTLWPVTRFRNQRKVAAYAGLEPMERSSAERKHFLGVSKAGSRVLRYLLVEAAHTAVKKDDDLKRFYQRLATRRGRPKAKTAAARKLLIRTYIMLRDEIDYAEFRRRAAAARLARQSSRPSCL

SEQ ID NO: 256850 - protein, 368 aa, unidentified
MIYSIGTDMSKDEFSACLQSYDLRSQSHQVISRKTFKNKPSGFKACMSWLARHTRKDPAPIRLTMEATGVYYESFALFAGEHHQQIHLSVVLPSQSKRYIESRGLRSKTDKIDAYGLALMGAERKLDAWKGIDPFWRKLRVCTRTRAELLDQRTQLRNQLHALDHSGVQAGQAEQALRECIQTISSQIDELTKLIGKQLRSRNDLRTQIECLRSIPGIGTLTIACILAETNGFAEFHKISQLISFSGYDVKIKQSGKWTGQPKLSKQGSKYIRRAMFMPASAVVRSEQGPMYELYQRLLGKHDIKMKAHVAVQKKLLSYMYFLWNRQETFNPEKIRRDKAIHQARQKQKKVASTNAEATVDTSLVVSQ

SEQ ID NO: 256851 - protein, 353 aa, unidentified
MKYVGVDWAYRTAQWCALAPGGEIAGEGRIAADRDGLARLVFELGDEVKACLEMMSGALWVRDELVACGWQVEVADARKVKTVAPLAAKTDKVDARLLAELSRRELVPGLWLPSLDERALRERLRRRMHLVRLRTSAKGRIFGLQTQWGVRVSLARLRRADGLSLLERAGVPEVWRRSVDECLALIDFLDTRIAPLDAELRPFAQADPRAVLLDTIPGVAELLALTMAVEIGEINRFTRPEKLVSYGRLAPRVRQSGDGRARSGRLSKSGSRLLGWAAVEAAQQAWRESNPWHELYLDVGRRSRHTNAARAAVARKILIAAWHMLSRNEPFKPAPRTTAGTSVPASSRLALAA

SEQ ID NO: 256852 - protein, 392 aa, unidentified
MLYLGVDIGKNSHVASMMDENSKIIFKGFSFSNTTDGGDSLLAKLTEYPVSEIEIGLEATGHYWLSVYSFLLEKGYVVHVINPILTDGWRKGTEIRKRKTDTIDSVLIADLIRYGTFVETHLSDETMMSLRNLCRFRGYLVDSVSDLKRKVICVLDQVFPEYQLVFKNVFGTTSKELLLQFTNPMELEELSVKSLAELLSKLSRQKIGYYKAEKLSAFATKSFGVTFCRDSFTFQLKAMLEQMKFIEQQIADTEKEIKILLGKTGSFITTITGIGIVTGATILGEIGDIHKFDSPNKLVAYAGIDASVRQSGEFEGTQNKMSKRGSPYLRKALFQAALVASNGRNPDLELRDFYLKKISEGKHHLTATGAVARKLCYIIYTILKENRPYIKH

SEQ ID NO: 256853 - protein, 332 aa, unidentified
MVTIGLDISKSWFQIHWITADGEIIRKKLARGKVLDFFSRLPSCLVGLEACGSAHHWARELIKLGHKARLMPARYVRAYVKTNKHDAADAEACWEAVQRPGMRFVPVKTVEQQGILMLHRTRDLLIRQRTGAINALRGHLGELGIVTGKGKANARELMALVDVDERIPQSARSALSILVDQIEDLELHIESHEKMILATAKDNEVCRRLMKVAGIGPFAATALAASVDHPQQFASARHFAAWLGLVPKQHSTGGRERLGGISKRGDGYIRKLLIHGARAAVHRVRIHQVTNTWITELLGRRPFNVVTVALAHKTARIAWAIMANGEEYRAQV

SEQ ID NO: 256854 - protein, 426 aa, unidentified
MGMGKFTKTLCISERKEYSIMEGPIITVDVSKGSCHYQPFIENGHPMRKPKQLSATIDGFQKLGQTIKDLEAKTEREDIPVIFEATGVYHRPLQKYLEDHKIRYYIISPLLSATYRKTDLHSNKTDALDCAHIAKAYYCEKELRQYQAQPQEYKRLYQLSRIYESELVHLRKRKVSLRSMLDIIYPRIDKTFKGNQNLYDPIPMEILKRYPHPSLLLSHREDTIVKTVGHRTGHLKGYTERIVHKIYEKAKECYSGCDIDDIEVINLPRLIENVQEQKKKCDSLLKEMIEIARTCPYFASVVSIVGIGENLAARIIAELGDVNRFDNRAAIVAYAGLNPKIQQSGDIDGLHLKISKKGNKHLRCLLYLGAQCNYRLRKEDPLYEFTKKKRQQTQCPLSSKAAYTASAHKLLVIIYSLCKNGTLYHS

SEQ ID NO: 256855 - protein, 445 aa, unidentified
MIAMSQIPISEKKRNERSLKVQDCILVGIDPACYKHTAVIYTPSRTAIAKVHNINNNRKGFQNFENRLMSIKKLYPNIPIKLAIEASGEYWKPFQHYFRQRGMETIFVPPLFVKRTRDLDDFTPRSNDPKDAVRIANLAFEGRYFIIEEQSDVFENLRHLVRTWDIITDQLTRCQHRIQSYLASYFPEFNLLFSSVVGVTSLAVLEHWPFPQDLCQVTAEQMNEMIKKKMGNGHVDKEKTTQLLALAQESVGISNGIEGARIRIGAMIEQAKFYKKQLAELRKTISHTLNEIYYSENIKSVFGIGAISIAQFLGYLGDLYNYQKVKQILDLAGLSLIATESGTFKSKQQISHRGRKNLRRVLYEMTLHFLRAPGTARLKYLKCRIKGKTHRQAVIACIPILIKIIFAVVKQNRKYIPLAKDDPMILEIKKYEKLVIKAPRKKMAA

SEQ ID NO: 256856 - protein, 318 aa, unidentified
MNVIGLDVSKDTIDATLITTKGSKDYIKISNSTDGFENLINWIKTKRIRKIAISMEATGIYYEQAAEYLSALYTVYVINPLKIKEYAKSQFSHTKTDKADSKLIAEFANRHLDKLTPFRPSENPILYKLVNLLQQLKEQQKETQNRLHTAKDIYIKSTHEAIIELLEEKIDQTSKRIEGMIKQKERLNIEYQNLQTIPAIGKETAVILLRHLTDKNFETANKFVAFAGLSPKIEQSGTSVKKNGRLSRYGHRQLKRALFMPALVAYRMNAFPQLVSNLEAAKKPKMIIIVALMRKLAKIAFYIHKTKKPFDKARHQKV

SEQ ID NO: 256857 - protein, 351 aa, unidentified
MKSMTKQIQGEALFVGIDLHKRRWHVTIRSVDVEIFSSSIAGRWEELKKVLNRYKGCRIHAVYEAGYFGFWLFDDLTQYGVDCIVTPPSLIPQEHGNRVKTDRLDSRKLARLLAKGLLKSIWVPSAEERFHRQVIRRRRQLVGDRVRTQNRIKSELCFYGIDLPTPRSKWSQVYFANLQRIKFNNRWMQQSFNQLLEQYEFLSAQIDKQTQLLKKLAQLPLYHDRVKILCSIPGIGLLTAMEILLELQDFSRFRRAEQLAAYVGLTPSQYSSADKIRMGRITGAGKNTVRSALVESCWLLIRKDKAMRKKYEQIKARAGGKRAIVAVSRKLILCIRRLLLDNRLYIYEPVS

SEQ ID NO: 256858 - protein, 469 aa, unidentified
MGNSINQKRKNKKHRKVDISNLKQLNLNAAGIDIGAELHYVAVPNGRDPEGQDVRHFSTFTADLYKLADWLHQCKIDTVAMESTGVYWIPVFEILDSQGFDVRLVNPRNIKNAPGRKTDVVDCQWIQQLHTYGLLQSSFRPENQICELRAYLRQRTMLVSYASHHIQHMQKALEQMNIKLNQVISDITGVTGMKIIRAIISGERNPVKLASMRHERCNNSESIIAKALEGNWRSEHIFALQQAVELYDFYKKQIIACEFHIQHHLESFDDRSNGTPLEKPPRSSHGSSNQFHFDARDYLHRMTGVDVTRIEGIQAPTALSIISEIGIDMSPWPTEKHFASWLGLCPGSKISGGKVLSSKTKPSSNRAAHAFRLAAYSLQQSKSAIGAFLRRKKAQIGAPKAITATAHKIARIFYNMLKYGSEYVDLGQEYYEQRYQDRVIANLKRKAKQFGFELVDIKEHKLLTELPAS

SEQ ID NO: 256859 - protein, 404 aa, unidentified
MKGPIVSIDVSKGKSDYQAFKDLNVKYTGSRSIKHNKEGFDEIVNLVREMEKKLETEVCVVYEATGVYHRVLKKVLEDNNIKQFIINPLLSAKTRKNDSLRSPKTDKLDPKSIAKTYYSHSLHNSHKQETIYHELRELSRYYEDILVHIRKDKVAFRAQLDIVFPGYDTLYDDLYGPVALAIIEKYPHPEMLQKKKINTVSKVIQNKTCHRQAVSDTMADKAIEYSKTIYSGCDKDDIEVLILQRFIKKLNEDMAEAERTIGEMIKLAQELPDFNIIKSIPGIGDNLAARIIAELGDMTRFKKKNELVAFAGLDPRISESGQNDGDHMHITKKGNKRLRCLLYLAVTCSIRLKRDDNSIKDFYIKKKQQSNSMCSKAAKTACASKLVRIIYSMCKTGELYQYNK

SEQ ID NO: 256860 - protein, 438 aa, unidentified
MPEKKSVKKVLEDLKQEIRSSQNTLIVGIDIGKFRHCACFAASSGKTLRRRFFFINTIDGFNNLIRQSKYYQKKNNLPKVILGMEPSGPYWFHLYEFLELRGKKVVTVSPLAVQRNRETINVSKDKTDPKDAHNIADLVGQGKFYLPIYRDKEIRQLKRLMRLYYRLIRQRASLRCRLRGVVGYVFPELEHYFGDITAKSMILILEKAPFPEKITKMGKSRFVSFLAKKNRYLGRRRAEEIFKLARSSVGIAGEEEATSLEINLLLRELRSIKENVALINVQVGGIVKTREDYGLLLTIPGVGPITAASLIAEIGDATNFSSGKQLIKLAGLDLYGLESGISVHSQRKISKRGRKTLRTVVYQAVVSCIRCNVHLKACYLKLLAHQAGKEKIKPKALVAIASKLLRIVFRMLTEKKAFDAHYDEMLRERFALRARKAA

SEQ ID NO: 256861 - protein, 308 aa, unidentified
MSAFVGIDVAKGSLAVAVIPGNLGFEVSNDAKGHARLVRWLGNQAVTRILLESTGGYESALVEVLASRWAVVRVPPHRARAFATAMGKSAKTDPIDALMLARMAAVTEGPTVTPPTAAQARLQALVRRRGQVVAHRDDERRRLHQANDAFVRQSLQRQIKHLQGEIARLDREIESCVPDCGDERAARLRAVPGVGAVTVATLLAFLPELGQLENRQISALVGLAPYNCDSGKHQGVRRIRGGRGAVRRVLYMAAWSAVRHQPDFKARYEALRAKGKCAKVALVACMRILAIRLNAMIRDQTDWRVHPA

SEQ ID NO: 256862 - protein, 352 aa, unidentified
MIVFGADMHKGSHTVAAVAAATGEVVGDKTIQVGEAGFIAVLDWTRSLGEERVWALEDCRHVSGSFERFLIISGERVVRVATKLMADARRAARDRGKSDLIDALAVARAALREGLDALPSAQLAGVELDIRLLVDHRERLIRSRVAINNDLLWHLHDLWPELKLPGSALSSKKWSTRIARRLAHAEQTARVRIARDELRRLRELTAAANQLQAEIAELVAQVAPQLLDQPGFGPLTAAKLLGEIAGAQRFATEAKLARAAGVAPIPVSSGKTNRHRLDRGGNRQLNAAIHRIALTRARCHPETQDYLARKRSEGKTNLEAMRCLKRHLTRRIWHLLQPPHPSRETAHSPSIS

SEQ ID NO: 256863 - protein, 416 aa, unidentified
MESQKNKACGIDVHKRFLISTILSRDGKKETKRFSINLEDLLKFRDWVMENECEQVAIESTGIYWHPVHAVLEGKVDLIVANAYKIKHTPGRKTDINDSEWIAELCLNGMIEPSRIFPKDDRELRRLTRAREGYVKQMTQEKNKIHYSLDSACIKLASVISDIFGKSGTYILNCILNGRDIDETIQGIPSGRLKKKGDQIKEAIKSNLEVSQIILIRGSLRQMKSIQERIDELDREISARIERRKSDLTIAMSMPGMGFISATAILAEIGNYNDFKNSEQLASWCGLVPSLYQSAEKVVLGGITKQGSKHIRRMLIQVAYAISRTKDSKLRRFFLRIQAKKGSKVAAVALARKVLCILHHLLMNQELYAEDNDKKNKRQKTSVLPSSIDMPIQEMIDCIIRAGYVVTKSECIGGQG

SEQ ID NO: 256864 - protein, 416 aa, unidentified
MASNQNTPVLSIVHPICCGLDVHKRTISACVIETRCDGSVQHHLGEFGTFTDELVRLRQWLLEMDCPIVAMESTGVYWRPVHNVLEGYAEVVLINARHVKNVPGRKTDIEDSRWLAGLLRHGLVRGSFIPPKDVRQWREMVRLRRGYVEALSDFKRRTHKLFECANIKIDSVVSDLFGLTGGNLMQLLVSKETITLDEVKGCARGHLIRKVEELYRSIQGFFEDHHRFLLASLLETVKSLEGQISSLETRLKSLTKDHDTLVERLDEVPGIDQLAARAILAEIGSNLEAFPTVEQLCSWAGVCPGNNESAGKRHSGKSPVQRHPLKTMLVDVAWAAVKKKGSYYRAKYYRLKARRTAKKAIVAIAHRILKAIYAIIKHGARYRELGEQYLDRQTQARKLAKLKIEARQLGYKLVPA

SEQ ID NO: 256865 - protein, 346 aa, unidentified
MEYIALDVHKKYTWARVENTEGEKLYESRLQHAHGSIKNFINRWERQSPVAVETVGNWYWIVDDIEEGGGKPQLVNARLAKLMMGSVNKSDKLDAKGMNRLQRTGTLPTVWIPPSSVRDARELPRTRMVFSRQRTQLKNRVHATLAKYGFVVEEASDAFGKKGRAIVEGILVKLPPYTEQAVRRVLGQLDHVNENLKVIEAQMMEAFAPCAETNLLKSLPGVGDILAVVIWTEIGTMERFARAEQFASYCGLVAREHSSGGKFHYGAVRRDVNVYLKWAFVEAANSSILNRERCGYDHISRLYQRIKSRRGHGKAKVAVARHLSEASFWMLKKGESYREPVSSTQR

SEQ ID NO: 256866 - protein, 391 aa, unidentified
MVCVGIDVAKDKHDCCILDSDGMVRADCFTIPNNMDGFKQLLQTIRNCTKKSDKIKVGLEATGHYSYNILGFLLDNDLAVYVMNPLHTNLYRKSLSLRKTKTDRVDARTIATMLLSDVDLKSYTDIAYHNEELKSLTRYRFDKVQECAKLKQSVSRLATILFPELEGLVSSIHGTSIYALLGEYPGAKQISEVHLTKLTNLLTTASKGRYGKEKAIQIREAARASIGSVMPAKSLELKHTIKLIQELASEINEIEDSIQKIIDELNPPILSIPGMGVNSAAVILAEIGDFSNFSSPDKILAYAGCSPSTYQSGKLTNCYAHMEKRGSRYLRYALYNATKYVCHWNPVFAEYLAKKRAEGKHYNVALSHSMKKLVRLIYALQKSGKTYLAAA

SEQ ID NO: 256867 - protein, 348 aa, unidentified
MKNKSFVGIDISKNVIDVSIFREDTNIKMFPHEVFNNTRKGFGDMCSWLKKSRVVLSQALFGMEFTGCYSLDLEKFLTSKNYSFCMLSTRIVKHHPMGTIDKSDKNDSAKIADFLYRYDGTECAKPYKLPSKAMQQLKQLVNERKFLVEQRTNFMNRMQMFETKEDSAMYESYIKKLNHDIENIDQEECELMSKEEDVFDTFQNLLTIPGIGFVNATNIIAITRNFTAFDTARQYARYVGVAPCSHTSGTSVKWRARPSAHCNGQVKADLSMAALRAVEYDVEMQIFYNRKLGGRKDSDTKRKALNAVKFKLIRRMFAIGKQKRKWEVLNTSDDRKNLHIEKSKASEL

SEQ ID NO: 256868 - protein, 409 aa, unidentified
MEIVIARCGGLDVHKNTVAACVRVQGPSGQITQQVRTFGTTTIQLQALVGWLQEHGVTDVAMEATGVFWKPVWHVLEPHVHLLLVNPRDIRRVPGRKTDVSDAAWIAQLLQCGLLRSSFVPPREIRELRDLTRARATLEQQTTAVANRMHKLLEDANIKLGSVATDILGMSGRAMLRALADGETDPVRLADLAQRKLRAKIPALQEALTGAMTAHHRFLLRRLLTQLAFLEEEIASFDRQIAEATAPFATLLARLDTIPGFARRGAENLLAEVGPDMAPFATAPHLVSWAAICPGQHESAGRSHGGTIRKGNRWLRRTLGQAAWSARNKKHCYPAAQFRHLAARRGKKRAIIAVAHSLLVAAFYIIRDGVEYADLGAAHFDRLAPDKLTRMLVKRLERLGHKVTLEAAA

SEQ ID NO: 256869 - protein, 340 aa, unidentified
MHSNNVMIGVINQDGKRITHRKLGCDLKQVTQFLQPFKPQLQSMAVESTFNWYWLLDGLRDEGYPIDLANPAKIEQYNGIKHADDKDDAFHLADLQRLNILPKAHVYDPELRPVRDLLRRRAGLVHQRTALLLSFKSLYTRTTGKALDLADAKQMEPKEAPKLYEHPANQLIAQVQAEHIQALDKSISRLEKAVLSCAREIPMYEKLLTIPGVGKILGMTITMEVGDIKRFKTDGDFASYCRMVDARRLSNGKCKADNNQKCGNKYLSWAFVEAANFSRRYNEQCRRWYDRKAAKTSKVLATKALGCKLAKAAWHVMAGQCDYDEKRMFPELATKTMKKS

SEQ ID NO: 256870 - protein, 352 aa, unidentified
MEHSPAAVTAVTAVAAVADVDDAVVADVDVAAPTAPAAPTAPAGELLCAGVDVSSRFLDVHVLGVPPLRTRLANGPGGAAELAGVLRSAGVGLVAVEATGGYERDAVDALLDAGVPVALVNPRQVRDFARALNLLEKTDAIDAAVIARFALALRPRTLSAGGADMAELRELVGRRRQLVEQCVANTNQLRRCRVEAVKASVRRTLDHLAGEVAAVEALIQAAVDADAYLTARFTAMCGVVGVGARTARVLVAELPELGAIDRRGLAKLVGVAPVANDSGDRAGGRTIRGGRATVRRALYMAAVTAARCNPVIAPYYQGLRARNKAKKQALVACMRKLVIHLNSLLAKIPKPA

SEQ ID NO: 256871 - protein, 334 aa, unidentified
MKEITTIGLDLAKNVFQVHAIDATGVIVIRRQVRRSQLLLFFSRLSPCLIGMEACAGAHYWARELVKLGHEVRLIPPSYVKPFVKRGKTDAADAEAICTAVMQPTMRFVSVKTEAQQAVLMQHRTRDFLVRQLTQLANAIRAHLGEFGIVVPKGIHNMNRLVAEAEAADLPAAARMPLDLLVGQFTDTKSRIDAITADLHRAAQEDETARRLQGMPGIGPITASVLAATLPDVSGFRSARDLSAWLGLTPKPHSSGGKERLGAISKMGNRYIRRLLYLGAMGVISTRKRTDPGEDWLGCMMEKKPLKVVAIALASRMARQIWAMLRTGEAWRAA

SEQ ID NO: 256872 - protein, 422 aa, unidentified
MLEETQETEEIIQRVAALDVGKAELTCCVRVPGQGSSGRRAQEVRTYKTMTRSLLVMVDRLAELGVTRVVMEATSDYWRGAFYLLEAHGFETWLVNARDVKHLPGRPKTDTLDAVWLCKLAERQMLRPSFVPPRPTRQLRQVTRYRADLVAARTAEKQRVEKLLEDAQIKLSVVASDIFGVSGRAMLTALIAGERDPKRLAQLARARLRAKLSLLEEAFTGFFTDQHAFLLGKMLARVDALDADLAELDAKLQALIAPLAGAVERLDEIPGVGQTAAHLLLAGIGTDMTRFPTAGHLVSWAKFAPGVKESAGKRKGRGSTGHGNPYLARVLGEAAVAASKTDTFLGERYRRIARRRGAKKAIVAVGRSILVIAWHLLSDPEAHFHDLGAGFYDTRIGPERAKRNHIRQLEALGYKVTLQPAA

SEQ ID NO: 256873 - protein, 344 aa, unidentified
MKALKSHVAGIDVHKEMLAITVLIGELDGEPKEYQFESSTFTDDLMALGLKLKEMGVTDVAMESSGIYCKPVFNVFNPLGLKVVVANAAHIKNVPGRKTDMNDSRWIAELHRFGLIRASFIPDGEFQRMRLLSRHRTNLTEDLARVKNRIQKVLEDGNIKLSIVVSDIFGVSGLKVLKQIAGGYTHPNILITEVTTKIKRMEEMKKALTNCLTTEHCFVINVLMKQYEELKNRIEEGENELCKKVEPYAHLVEELDKIPGIDAILAMGIIAEASANMSSFKDERAFAAWSAVASGNNESAGKKKRAKCRKGNPALRKMLIQAAQKATTARNPFIDLNTTNSAFA

SEQ ID NO: 256874 - protein, 342 aa, unidentified
MDEYDGRQFVGIDLHRQRSVIVRQSESGDQLSAVRIVNDPAALRLELERAGTDPEVVLEATYGWYWAVDVLRDCGAQVHLAHPLGVKGFRYRRVKNDVRDAGDLADLLRMGRLPEAWIAPPQTRELRELVRYRAKLVAIRSGLKAQVHAVLAKAGVLITVSDLFGVGGRQRLAKVPLGAAYAERVRSLLELIDVLDGHEARFAGLIANRLCNHRGYQALQQVPGIGPVLAAVFVAEIGDVHRFTSPAHLCSWAGLTPKHRESDTVVHRGHITKQGSKLVRWAAVEAIQRYPTTSKIALDRTRIESRRGKNIAKIAAARKLLTLVYYGLRDGHIRALDRPRAA

SEQ ID NO: 256875 - protein, 365 aa, unidentified
MQKISTMQTTAETIFQGQLTIGLDLGDRSSAYCVLNEAGKIVFEHKLATTPEAMKQVFGSMPRCRIAMETGTHSPWVSRLLTALGHEVIVGHAQKVRLITKSRRKDDRLDARTLARLARIDPELLSPVKHRSAQAQLHLAEIRARAGLVSARTALVNAARGLVKSYGERLPKCHTQQVGREMTGALSMGLREALEPLLREVESLNERIKEYDQRIAKMAKQTYPETALLQQVKGVGDLIATAYVLTVEDPHRFRKSRDAGCFVGLQPGRRNSGDSEPQMHISKEGDEYLRTLLVQGAHYILGPFGEDCDLRRWGQKLSARGGKNAKKRAVVAVARKLAVLLHRLWVSGEVYEPLRNSQKAMSAAA

SEQ ID NO: 256876 - protein, 344 aa, unidentified
MLYVGIDVSCKEFVVYAVNERKQKVFDNKIEPTREGLRKLVKDLGEGPKLMVFEAGNQMKWIAMTLKKMKDVYIHVVHPNEVKWISQSNGKTDKVDAKKLAELARSDMLPRAVHIVDGEIRELRELVSARGRLQSKRVALTNTIRAMMLQEGVRLPVKFFQGMEWREKIEKLKIGGVQRLIVESYMKSVDQLLISEEEITARMLEMKDRRIELLESVPCIGKISSRVLVSAIDNVERFDNKKCVANYGGLTPTIRQSGEVKVMGRINRDGRREVRKVLLQCSHALSRTKSIGAKPLKIFYERIERRRGKKKAIVALARKLLTTAYGVLKNNEYYDPQKLMANAV

SEQ ID NO: 256877 - protein, 363 aa, unidentified
MHSINNTELSSLEGTRGQFNGSKADIKLGIDVHQDFYVVVEQEGGANPKPPQRFRKEAFLYWAAKLARSGAQVHAVYEACGFGFGLQRNLTALSIHCYVVCPQKLDEQNRRVKTDGLDAKALVLKLDRFVQGNRCALALVRVPTEQEEQLRAIHRQREQLVKARKQLEAQGRSLMVNHGVEPVQQWWKRRAFSQLQVPEWMRAMLSNSQPILLALEEKIRALTVQLQSAASPDQPRGLGKMTSVIIDREIGDWHRFNNRRQIASYTGLCPGEYSSGNTRLQSCVTKHGNPRLRAALVELAWRLVRFQPHYKPVVKWRQILAKGALATGAARKKAIVAVARQLAVDLWRVRTGRCKPEVFGLEI

SEQ ID NO: 256878 - protein, 387 aa, unidentified
MIYVGIDIAKLNHFASAISSDGEIMLQPFKFTNDYDGFHLLLHKLDSLDPDSLIIGLGSTAHYGNNLLEFLVKHNYKVCVINPIQTSAMRKNNIRKTKTDKVDTYIIAKTLMMDSHRFFSQHDLSIMHLKELGRFRMKLIKKRTQGKIQLMSYVDQAFPELQYFFKSGIHQKSVYAVLKEAPTTKDIASMHLTHLSHLLEVSSHGHFKKDTATALRILAQKSVGCNDSSISTQITQIIELIELLDSQVHDVESEMELIVNSLDSVIMTIPGIGFINGGMILGEIGDITRFSSPSKVLAFAGLDPTVYQSGNFNASHTKMSKRGSRPLRYALINAAHNVVKNNKTFKDYYDQKMSEGKSHYNALGHCAGKLVRIIYKMLTDNVSFNLD

SEQ ID NO: 256879 - protein, 494 aa, unidentified
MKAKACKAKGKHSNSSKRGVKIAAQRGAEGMEIVNPHASGIDCGAQEHYVAVPPQSVESGEPFVRCFSAFTEGLDALVEWLKACGVTTVAIESTGVYWIALCQKLEAAGIEVFLVNARHVHHVPGRKTDVKDCQWLQRLHSFGLLSASFRPEDAICRLRSLQRHRLNLISTAGAEIQHMQKALQQMNLHLHHVVSDITGVSGLRILDAILAGQRDAGQLAKLRDHRVYKSTLAQMEAALVGDYRPEHLFVLGQSLQAYRFYQARTQECDAEIESHLQQLAQRFESASTLGAELSQPEVLNDAQSQNPQPAKRKVKRKPQANEPKIDLADYLRRICGVDLTQVIGLNVLSVLLIVSEIGVDMSKWRSAKAFCAWLGLCPRNKISGRKVLDTRTCKVISRVATTLRLAAQSVGRTNTALGIFYRRKKAHLGPAKATTATARKLACLVYHLLKYKEQYREPDPATYQLKVQKTILAKIQKQAAALGYKLLPTALVPA

SEQ ID NO: 256880 - protein, 322 aa, unidentified
MNPKNYGGIDVAKKNFVIGIYGQDKTKTGANTPKGHAKAVEYLQKHNVDLVVLESTGGLEVPLANALHAADIRVVIANPQRTHQYAASFSLGKTDHLDAKMLADYAQALDSRKMADDMCYAPPSEEALALEALVKRRSQLVEMRKMEKNRLEQTHASQKASVVAMIKHLGELIAALDKEIDQSNRGGFNGKGEILSEMKGVGRITCATLLSMLPELGKVPHKRAALLVGVVPPPRQSGEKERKSGCVGGRMVVRNALYMAALTATRSEPKIKAFYEKLMSRGKAFKVALNACMHKLLRILNARMRDYLASLKGTEESELQGA

SEQ ID NO: 256881 - protein, 392 aa, unidentified
MRISVGLDVAKAVHWACAIDEGGRTLLDRAVENTSEGIASFAGDLRALGGEPVIGLDVVGSFAHFLGASLLAEGFRLVHAPGIAVNRAGQGFAGGERKSDPRDAHTIADLVRTRDLRPILPDDETVTAIRLKVGRRRDLIEEQTRRLNRLRGLLSSLHPGLERTLDVTCKGPLVLLTRYVTPAEIRQAGKRRIMAHLAKTPHVQGTEALAGHALAAARAQTLVVPGEAAMAELVREMAAEALETRTKVARLDRDLAALLAVHPDGALIQSLPGMGAVLAAEFIACTGDIRRFRSADALASAAGLAPVIRQSGRKADWRRTYGGDKALKRVFYQGAFCAVCQKDPLSKAFYDRKRREGKHHTQALIALARRRVTVLWTMIQRRQSFDPLKNAA

SEQ ID NO: 256882 - protein, 327 aa, unidentified
MIYLGIDISKARLDCTLLDPATDKRKTKAVGNDPKGFETLSVWLDKQGVGPGDVHGVMEATGVYHEQAALWLTDAGMRVSVVNPAQVRDFARGLAMRTKTDGTDSVALARYGALIQPDAWEAPPLEIRELKALITRLEALETDARRELNRREKALVAQAPALVRESLDNHLAALKQEIARLQQAIDDHINRHPGLKADRERLLSIPAVGDKTANRMLAVLHSRKFMSADQVAAFLGLVPVEHQSGSSVQKRPRLAKNGDARTRAVLYMAAIVAAQHNPHVKALYTRLCARGKSKMAALGAAMRKLVHLCFGVVKHQTVYQPNWQPGG

SEQ ID NO: 256883 - protein, 386 aa, unidentified
MQAPTVSTPITDHISTIFIAIELSQKTWLVTMHSPDRDKISRHKVQGGDHAGLLALVDRVRDRVVQRLGAVPAVVSCYEAGYDGFWLHRLLMAAGITNYVFDPSSIAVDQRARRVKTDRIDGEKMLRTLMAYLRGEPRVVRIVRVPTPEQEDVRRQTRERHRLTKEQTAHTNRIKALLRLLGMAVGNPRRQDWLTWLGTQRDWQGQAMPPQMLAEIEHEHARLMLVRKQLDALARMPAAADPAPAVAEVVRRSELLQRLKSLGPAFAKTLTQEVFYKDFRNRREVASYFGLAPSPWQSGGTDRDQGISKAGNPRARCSAIELSWLWLRHQPDSELSRWFRQRTLNAGKRTRRIAIVALARKLVVALWRYLTTGLVPAGAVLKSAKA

SEQ ID NO: 256884 - protein, 334 aa, unidentified
MENIALIGIDLGKNSFHIHCQDRRGKAVYRKKFTRPKLIEFLATCPATTIAMEACGGSHFMARKLEELGHSPKLISPQFVRPFVKSNKNDFVDAEAICEAASRPSMRFVQPRTESQQAMRALHRVRESLVQDKVKTTNQMHAFLLEFGISVPRGAAVISRLSTILEDNSLPLYLSQLLLKLQQHYHYLVEQIKDLESQLKRKLDEDEVGQRLLSIPCVGTLTASTISTEIGDGKQYASSRDFAAATGLVPRQYSTGGRTTLLGISKRGNKKIRTLLVQCARVFIQKLEQQSGKLADWVRDLLCRKSNFVVTCALANKLARIAWALTARQQTYVA

SEQ ID NO: 256885 - protein, 357 aa, unidentified
MKNKIPRITIGTDLGDKSHAICVLDKAGEIIEQRSITNHRDSLRRLSQKFPKARIAMEVGTHSPWISRFWQALGHEVIVANPRKLRAIYTSTRKSDQTDACMIARLARVDPTLLHPIEHSSEEAQRDLLQIKLRDNLVRQRVDIISSVRFTLKSMGLKIASPNTQCFAKRCRQNLAALDPVLLAHCEPSLRVIDALTLSIRELEKQIESLCEKRYPQTEILRKIAGVGPITALTFVLTIGDPRRFRSNRDVAAYLGLVPRRDQSGETDKQLRISKAGDAYLRRLLVSAAHYILGPFGPDCDLKRHGEQLAAKGGRGAKKKAVIAIARKLSVLLLTLWSRGESYEPLRKALPLETRAA

SEQ ID NO: 256886 - protein, 391 aa, unidentified
MLALLDCCCGLDVHKDIIQACILKGSPDEEPLSIRAEFKAIQSDLQVMCSWLLENGCFNVAMESTGVYWRPVYEACEQFLQDYHCLMVVNAHHMRNLPGRKSDVKDAQWIATLFRHGLLEPSFVPNRLIRNLREYSRLHRSLVQERACYSNRLEKFLQAHGFKLSSVLSSILGVSGRRLLTTLAQKGVLSPIDVSDAVDKRVKKSMDEIRTAVTGRLDYSERSYLRILLDKVESIDKEINYIHGLMQHLAEPYKIQLEQLDSIPGIDVAAALAIIAETSASPQDRFDNSKKLISWAGLSPRNDESAGKIKSRKITKGSPYIKAILCQVAWAAVRTRNSSFHHWFWTHQGKLGKKKAIIAVARKILVLIYKLLKSGGFYDPLLAKKPIQSLS

SEQ ID NO: 256887 - protein, 355 aa, unidentified
MDNTKYIGMDVHKETISIAVLNSAGKLVMESVIETKAITIVQFVQGLRGDLQVTLEEGTWAAWLYDLLRPHVNEVLVCDPRKNALLKAGNKSDQIDARKLAELLFLNKLTPVYHGEHGVRVLKELSRSYLTISGDLVRVMTRLKAVYRSWAIPCAGKQVYAPRYRAEWLGKIREAGVRRRAEFYYQQLDELRSLRQQVRRELLVESGKHMASKLLCQIPSIGPIRAAQLIAILQTPHRFRTKRQLWAYGGLAIETHSSADHRYVDGQLQPSKRPASLRGLNRNHNHELKNIFKGAAIIAATKAGPFQEFYAALVAKGMRPEMARLTLARKIAAITLIVWKKGVSFDAQHLKPQTA

SEQ ID NO: 256888 - protein, 419 aa, unidentified
MSKSNISKQLRQVPPGALHVGVDLALEKNVAVVINEKAERLDQFSFTQDRAGYDYFLRRLEGVRQKHDAPCTVVAMEPSNYFWKLLAKELEEQKIAYHLVNAYTVKKHREGNQLDRSKDDRRDAGQIAELSRNGHYTQTRLQKGTYEELRQYAALYHRLVQAIRCERQVLWGLVGQVFPEYFQVFKDLGGETSRACLESCACAAAMRRITEEELIAKVRAVYTGKKLCVSKIRRAYRWAATSIGVAEGLQAIQLTVRLHLAQLQSLQAQMEQVTRAMIACLVSLPETPYLLSVKSLKAVSVALFLAEVGDPSRYQAAAQWVKLAGIQPAANTSGKKQRSQTPMSHQGRSQLRTLLYFTCLRLVRFDPHFAQLYAALQRRPKNPLTKMQALGVLMNKLLHILWALIHNQTFYDPSFASSI

SEQ ID NO: 256889 - protein, 339 aa, unidentified
MDAMYVGIDVSKDRLDVHVRPTGEAFAVARDGEGLADLVGRLKPLAPRLVVVEATGGFEMTVSAAIAGAELPLVVVNPAQVRHYAQALGRRAKTDAVDAEIIARFGEATRPEPRPLPDEATQALADLVTRRRQIIAMMVAERQRAGRLPKRLKRSCERVVRLLEKELAALDQDIDDTVRGSPAWREKEDLLASVPSVGEITARTLIAELPELGTLDRRKIGSLVGIVPFTRQSGRWQGKAFIGGGRPKVRAALFVATMSAVRHNPVIRAFRERLLAKGKPKMVVMSVCVALIQIADQYSPSAATAWLGDGKMKTGISKSRHPSSQTRKNIAVANQGLAA

SEQ ID NO: 256890 - protein, 349 aa, unidentified
MIRNAPKEAAVFGVDLGKNLFHVVGLDDRGSVIQRAKFRRDTVLAFFQRAAPTLVGMEACPGSQWFARKLLAFGHQVRIVPAQFVKPFVKSQKNDTIDAEAIAEAVTRPTMRFTQVRTVEQIDVQALHRMRDQLVSSRTRLINQARAFCLEYGIAMRQGVGTFRVDLPRVLADDSNDLSQAMRQMLAEVLDDIGHVDHRISSVTRQIEALADREDRARRLMTIPGIGPMAATALLAAVGDGRQFRRARELAAWLGLTPREHSTGGKTTLLGISKRGNRYVRKLLVHGARSCITHMNRTKDRIGDWLDALESRMHVNKVTVALAAKMARMAWAIIVRPGAIYDRRDPAVA

SEQ ID NO: 256891 - protein, 378 aa, unidentified
MSQSTTTAASVYAGLDVHKDSIDIALAEAGRDGEVRHLGAVAGGVNAVSKALRRLVSQGHCVHVVYEAGPCGFVLQRHLAAQGYHCEVVAPSSVPKRSGDRVKTDRRDALMLARLARAGELSAVRVPDAVDEAVRDLVRAREDAVREQRNARHRLKALLLRNGVMYAGKSAWTAAHLRWLASLALPHATQQIAFQEYLHAVSESGARIARLEQSLRDALEGWSLAPVVAALQALRGVQLIAAITLVAEIQDFHRFANPRQLMAYLGLVPSEDSSGQRRRQGAITKAGNSAARRMLVEVAHLYRYPARVSAVIAKRQSELPKAVIDIAWTAQLRLCARFRRLAARHVPHNKIVVAIARELSGFVWAIACEVTPPPAAST

SEQ ID NO: 256892 - protein, 385 aa, unidentified
MQKLNDLSRSLTALEPNGTLIAVIEMSLSSWLVAGIVPGVERQPLKKLAVDESALLKLLHRWREEAEKAGRRIERIAVAFEAGRDGFWLARWLKARGIEAYVIHASSVAVSREHRRAKTDRLDTELLKRSFLGWLRGERDHCKMVEIPTMQDEDAKRPNREHDSLIGERSRIVNRMKAALVRLGIRGFNPKLKRATTRLDGLHTPEGEPIPPNALAELRRDMERRRLVNNQIRQIEEERLERIEQAPCDGAHVMVRLLARVMGVGIETADMLVHEVLSRNMRDRRAVARYAGLTGSPDESGRKRREKGLARSGNARVRRGMIQLAWRFLLHQKNSALTKWFRSRTENARGTRKPMIVALARKLLIALWRLVREGVVPDGVVLRPA

SEQ ID NO: 256893 - protein, 370 aa, unidentified
MKPNFEPSKWFMQCVGIDIAKSTFTACLCMYEFDMGCSTAPVVFNNNKTGFNQFVKWSRKEALKGYPLRYLMEPTGVYYEALACHLYKLGLDVCVVLPNKARDFAKYEGILTKTDDMDAYTLGMMGCLDKRLKTWTPPSPIFKELRQMTRFVADINKVKTELNNHLESLAHSETAEKSIVKHYNKLIDKIDKQLASNEKAIREKVKQEPGLAERIDRIVTIKGIGYMTVITILAETSGFALITNRKQLTRYAGLDVPAHQSGPVDPKRHISKQGNVHIRTALYFPAIVSTQYNPQMKEFYARLCKKNPQSKMVGVTAIMRKLLLLIYSLWKSGEKYDQEREKPVCSRKKKEAEPIGVQPHGIDVGTVAEE

SEQ ID NO: 256894 - protein, 307 aa, unidentified
MYIGIDVSKDRLDVHIRPTGEAFSVTRDETGLGELVTRLGVVGPALIVLEATGGFETIVATTLAAEGLPLAVINPRQIRAFAQACGQLAKTDALDAAIIARFAEAVQPQPRAVPDEAARALGELLARRRQIIGMTVAERNRRRQLTQPRLVKTVDRVLATLQKQLSAVETDIDTAIRDTPAWREKEERLTSAPAIGPKIARTLIADLPELGTLSRRQISALVGVAPFSHDSGQRRGRRAIAGGRPGVRAALYMAVLVTIRRKLPLATTYQRLRAAGKPAKVAIVATMRKLLVILNAIMRDNTAWRAA

SEQ ID NO: 256895 - protein, 369 aa, unidentified
MMGWTPRTASMCQSGVFEHHLREASVSGVITVGLDIAKHVFHAHGVDDQGRALFSKRISRGKLLDFFAAQPSCTVALEACGGAHHWARQLTQLGHEVRLIPPAYVKPFVKRQKNDAIDAEAICEAAQRPNMRFVAMKSEQQQAAGLVFRTRDLLVRQRTQLINAVRGHLTEYGWIAPKGPSHVAKLAHLIEEKRMAGSLPEAARAMFRLMLDQLASLNGRIAVLDKEIARRAREDEVSRRLMTIPGIGPISATAIAALAPPVETFAKGRDFAAWLGLTPVQRSTGGKQKLGATSKMGERTLRRLLIIGSSAVVQQASKRGAAKGSWLEQMLARKPRMWVAVALANKMARIVWALLVKHEVYRAPVAASA

SEQ ID NO: 256896 - protein, 376 aa, unidentified
MSNLRFIGLDVHGETIAVAVAEPGGEVRSLGVIPNRSEAIRKLVKKVGPAAQLRVCYEAGPTGYVVYWQLSELGVKCEVVAPTLVPVKAGDRVKTDRRDALKLARSYRAGDLTAVWVPDAAHEALRDLVRAREAAKKDQLRARHRLGKFLLRQGRRPATKMNAWTQKHLTWVKTVHFEHAAQEATLLDYLNEVEHVADRLERLERAIDDAVKRAPERMRTVIDALQALRGIAQVSAVTIVAEVGELSRFAKPRQLMGYSGAVASEDTSGKRTRRGGITKTGNAHLRRIVIEAAWAYQHRPGIGPALRKRQATVSPEVRQIAWKAQHRLNARYRHLTAKGKCRQEVVTAVGRELLGFIWAIGVKVAAQGRRKQSAAA

SEQ ID NO: 256897 - protein, 320 aa, unidentified
MNHYIGIDVASQTLQVYDGKKNYEVPNSEKLLELKHLLQDAFPKDWKKVRLLYEPTGVYSSYVEQFALRYSIQAYAINPKRSSNFAKALGNRSKTDPMDAKMLYEYHKLVAESDWKVPEIDKDLDALTHHLSTYEFLQMSRIQMGNHLHSLKRGKTVDASTVEFLEKEIDRLQKQEEAMMVAMEKKTKASETMKEDFARLTSIPGIGPLSAIVLLMMFRRYPETNRTEMTALMGLDPIRRTSGTTLHKKDRISKQGNHFARKILYMATVSALRSNDRIKLFYTHLIDKHKPPKVALIACMRKLILIAHQLYTKKEYYKAT

SEQ ID NO: 256898 - protein, 341 aa, unidentified
MGQASTIGLDLAKHIFQAHGADASGRVVFRKRLTRAKVVRFFAAQAPCVVALEACAGAHHWARELGKLGHTVRLIPPAYVKPYVKRQKNDMADAEAICEAAQRPSMRFVPVKSEEQQANGVVFRARDLLVRQRTQCLNALRGHLAEYGYVVAQGGTHADAVIAHVEDPNTSVPESARSILAVLVGTYKALEAQIRALDAEITRRAKADPVARRLLTIPGVGPIAATATTALVPAPEGFRAGRDFAAWLGLTPLQKSSGGKQKLGAVSKQGERTIRRLLILGASAVVRWASQRGAPEGSWLARMLARKPKMLVTVALANKMARVVWALLVKGGVYRAPAVAA

SEQ ID NO: 256899 - protein, 520 aa, unidentified
MATSRTRKRPGTRRFDHSVAKPRGLLHPRVQQVGPEHFGIVCFDCAKRRSKFLLADFYGRVLIPPTTVAHNRPDLDDAVAKVRHAFAEHQLHDGLVAIERTGRYHRLVQRTFAAAGFETRILHPFVTKQYRQPVDPGNKTDDTDLGAIHRATVTGCALLEATRDEAWTTLLLLVRQRRDLVRKGAALNCQIREHLNAALPGFAACFDKLWDSAVPWHLLQHFATATQLRAAGLTTLCQSLRHAGIRFQQRSVQAVLDWADQAAPPDIAAEQHRRIALAYYRDHQQKSQEIQALEGDIASRLVQTPYVLLLSFPGINVVSAADFAAEMGPIEHYANAKAISGRAGLRPSRYQSDKVDKSNGPLVRVCNRSLRAAILGIAENLIVCNHHFGVLAMQWAAQGKDARHTRVKVGLRFCRIAFQMVAGRQVFRHPAIQGRHYILDKLSAFHRDHDTAMPQVLSDLQAAVAQVPPREHAAEAKPLHEELQKIQDGRRRGPQPLADILPLVLARLGVGVVQSAESGE

SEQ ID NO: 256900 - protein, 367 aa, unidentified
MEKSSKVYVGMDVHKESIEVSLAEQGGELRRLGQIGGDRGSLLKMARKLQSKGGERVFVYEAGPCGFWIYRELAALGERCMVVSPALVPKRAGDHVKTDRRDSERLASLARAGELEAIHVPDIRDEAIRDLVRGRDDAVIAQRRVRQQLKALLLRNDIRYVGKTSWTGAHRRWLSELKLPEPAQQIVFEEYVDAITVATSRIERLTQAIETETRTWRFAPVVSSLQAMRGIQFVHAVTLIAELGDLTRFGSARQLMGYLGLVPREASSGEQRRQGSITKAGNSYARRALIEAAWAYRHPARVTRIIAARQTGLPKAACDIAWRAQLRLSAKYRRLNARHLNHNKIVVALARELSGFVWAIGQSVKPQ

SEQ ID NO: 256901 - protein, 345 aa, unidentified
MDYYAGIDVSLEQSSVCVVDGGGKIVREAKVASEPDALIEWFAALGFPLVRIGLEAGPLSQWLFAGMKKAGLAVELLETRHVRTAFKTMPVKTDRKDARGIAELMRLGWFRPVHCKSMSAQETRALLTTRRLIEAKLRDIELSLRGILRGFGLKVGKTTTMTFAGRIKQLVSGHTNLEVIGESLLAVREVLLREFRGYEKRVRTIARHDERARLLMTTTGVGPIISLTFVAGVDDPARFEQSKTVGAHYGLTPKKYQSGETEYSGRISKAGDKSVRTALYQAAHVILTRPVKGSKLKSWGLKLAKRVGMEKAKVAVARKLAVIMHRMLVDGTAFDLQLSKQAAAA

SEQ ID NO: 256902 - protein, 337 aa, unidentified
MAVAGIDSHKDTLAVAVVDDQGRELDRSEIENSAHGHHALIGWLGRHHPTRVGIEGAGSNGRVAALRLQDAGYEVVEVPPQLTAQARRRQRTQAKSDPIDALLIARIGLREPELPQIRPSRDIEDLRVLLRHRRELRSERTRLASRLHADLEQLEPGYQARIGRLTNERNLDRVRRLLGGDDRVRAQVARERVSRLRQLNRQIKRITGEIGLLAATFGSGLTTIIGIAELLAAELLAEIGDVGRYRTKAQFAMANGTAPLPASSGRIDRHRLNRGGNRQLNRIIHYVALTQISRSPEGRAYYERKRAEGKTTKEALRCLKRRISDRIYLTLRASALT

SEQ ID NO: 256903 - protein, 318 aa, unidentified
MTLPQVFVGIDVSKAQMEVALRPGDQFTVANEEAGWAQLVERLRAVSPTLVVLEATGGYELPVTGALAAAQLPVVVVNPRQVRDFAKATGILAKTDALDAQMLAHFAEVIQPTLRPLPDEQTQALAALVMRRRQLVAMLTAEKNRLRQASTRIRPNLKAHITWLEQAIQEADRDLAEAIRQSPIWREKDELLRSAPGVGPVLTTTMLATVPELGTLTHKQISALVGVAPFSRDSGTLRGKRTIWGGRAQARAVLYMGAIVATRFNPIIRAFYQRLCQAGKAKKVALTACMRKLLVILNAMLKHRTPWSHAVDTAGAGA

SEQ ID NO: 256904 - protein, 365 aa, unidentified
MFIGLDVHKATISVAIAQGDRRGEVRHWGTIPNRADHVRKLADKLGGDGRQLHFCYEAGPCGYGLHRQFTELGHDCVVIAPSLIPVKAGDRVKTDRRDALMLAKLHRAGELTAVWVPDTAHEAMRDLVRARATSVRVTGKARQHLQGFLLRHGRIYPGKKGWTKAYRRWLTTVRFEHPAQQIVLQDYIHAVTDAEARIERLTGQIAILLPSWSLAPAVEAIQAMRGVAFIVAVTVVAEVGDFNRFDNPRQLMAYLGLTPSEHSSGASVRRGGITKAGSSLARRALVEGAWSYRMQARVSRKLLDRIEGLPQAIRDIAWKGQLRMCQRYRHLMAAGKPKVVATTAIAREMAGFIWAIARTVTPAST

SEQ ID NO: 256905 - protein, 339 aa, unidentified
MKKRYMGVDLHRNCFTVYTRQEDGSGESREWTIRELKAFAKTVKANDEVAVEATGNTRLFTEALKDRGCRIVVVNPHQFQVISRSVKKTDEHDAKVLAEFLAKGMLPEVRMKDEVHARVASLAQTRDKLVKLRTTLKNKVNNLLAARGILICKESLASEKGLVEVLAAPVSELEHMELEILVGEIRHLNASIAKVEALLRDQGPKLPGWANLTSIKGIGTTGATVLLSTIGNVADFADEGKLAAYFGIVPRVSNSNETERSGRITKQGCKLGRTVLVQCALIAARYSPYLQSYYRRIAATRGTGKAIIALARKFLGIIYKTLKNNWIFEDFPRFVLANG

SEQ ID NO: 256906 - protein, 523 aa, unidentified
MAVRRTRTRSRSRAPQFVQKPHGVIHPRVQQVGPEHFGIVTVDGAKARSQFMLCDCYGHVRIPPTEVPHNHNALEAAVAQVRQALVTYDLRDVLVAIERTGRYHQVVQRVFRAAGFEVRIVHPFATKQFRQAQDPGNKTDDTDLVALQRAAINGFALTEASLDPAWQEWQLLIRHRRDLVFKTSTLCCQIGEHLDAAWPGYAARFGMLWDSAIPWCLLRQFESAAALHRAGLAGLRTCLRAHGIQFKQPTLVAVLEWAAQAAPGATPTDLHRRLALALDDERQQKAREIQALERELAGRLARTPYLLLLSFPGVNVVSAADFAGEMGPIGNYASARSITGRAGLYPSRYQSDRVDLANGPLVRCANRRLRAAILGIADNLIRSNHHFRHLAHTWQAAGKDPRLTHVKIGVRFCRIAYQIVAGRQLFRHPSVQQRSYVLDQLIAFHREHETPMAQTLADLQAAIDQLPKDAYATEAQPLADELQRIQQGRRRGPQLIGAILPIVLARLGVQPVQSQTSGEEDSR

SEQ ID NO: 256907 - protein, 355 aa, unidentified
MLYLGIDQHARQITISLRDDHGDVLLARQVSTHPEKIQAFFQQLTRERLRADESFVAVLEVCGFNDWLIQMLHDYRCHKVILIQPEDRKLRKTDRRDAAGLSELLWVNRERLLQGKPVRGLRHVDIARTADQENRRLTTLRKDAGQARTRLVNKIRHILRRHNLQWQMPTKKFPSKSGLAWLKQLVLPTIDHLELKHLLADLEQLQERRQELEQVIAERCGVSAEAVLLATMPGVSYFTAVSLACRVGRVERFPRAHSLANYWGLTPGCRNSGENNQRLGSITKAGSSMARWLLAQITINVLRRDALLREWFKRLKRRRGASIARFAVMRKLATIIWHMLRKRKSFAECRAPAAA

SEQ ID NO: 256908 - protein, 455 aa, unidentified
MAKKGKQTKPIPDNMLIIHPHAAGIDVGAEEHWVCVPADRDAQPVQKFSAFTCDLHRLADWLTACRITTVVMESTGVYWIPLFQILEARGFAVALVNARHVKNVPGRPKTDRFDCRWLQKLHTYGLLAPSFRPPEDICQLRSLLRHRENLIRMTVKHIQHMQKSLDQMNLHLHHVISDITGVTGMRILRAIVAGERDPRTLAQYRDYRIQSSADTIAKALEGDYRAEHVFTLTQSLALYDFTQQQIAACDQEIERVLGTLDSQVDPAEHPLPPPTTTHRQPQRNEPAFDLRTHLYRITGVDLTQVPGLQAPTIHIILAEVGLNMHKWPTDKHFASWLGLCPDNQISGGKVLSTGSRRVQNRASRALRMAAQSLRTSPSYLGAFYRRMRSKLGPAKATTATAHKLAKIIYHMLKEKTPYRAHGAEEYLHKDHERQLRQVRKQAKHLGFDLVPQPTN

SEQ ID NO: 256909 - protein, 346 aa, unidentified
MTNVTIGMDLGDKNHEVCVLDQKGHLMDRFVVGNTRKQLQKVFQPYAGALVAMENGTHSPWISRDLEALGCKVLVGNARKLRMIWARSQKTDVKDAEMLARIARFDRQLLYPIRHRSQQAQIDLEQIKARDLLVSLRTDLINHVRSTVKAIGERLPACSADCFHKRAQTFMPDSLRTALMPLVEQIASLTQQIRGYKCKIEQLALTVYPETACLRQIQGVGLITSLAFILTLESPDRFDKSRAVGPHLGLTPRQDQSGSCNKQLRISKEGDVYLRRLLVSCAQYILGRYGQDSDLRRYGERLIARGGRGAKRKAVVAVARKLAVLLHRLWSTGEVYQPLYNARKVA

SEQ ID NO: 256910 - protein, 324 aa, unidentified
MNCKGLRVIGIDVGKGMLDVAREGVRAGERYSNDVVEVARFVRGLDPERDIVVFERSGGYERLLEGQLAEVSVRWAVVHSKRVQAFRIAKGIKAKTDKIDCRLLRDFGRDQLDSGELRLGRLGDVTMAALAARRRQLNDMLHAERCRQETAALELVRSSIGCTIATLEAEITTIEAAIDTHMRTDPELHLKEDVMCRRIGVAETTARGLLAILPQLGHASAREITALAGAAPRVHQSGTRQKRRGLEPGRTVVKVILFYPAQTAMRFDPEIKAFAQRLRNRGKPGKVIMVAVMRKMLIQLNAAVRDALASSNTLALAPAGCAAD

SEQ ID NO: 256911 - protein, 496 aa, unidentified
MGCCALEGGDAVSAIPIRNLMNCAAQPFRWRQQEELEMNPKRSKSRHGRKMPMVHPNAAAIDVGATMHMAAVRADRTPEPVRSFGTFTADLHRLVDWFTQCGVETVVMESTSVYWIPVFELLDARGFTVFLVNARDAKHVPGRKTDVSDAQWLQRLHSYGLLRASFRPKGQIAELRSYVRQRERLLEYAASHIQHMQKALTEMNLQLHHVVADITGATGLRIIRAILAGERDPQALAALRHYSCHSSAETIAKALTGSYRAEHLFALEQALALYTAYREKASACDVRIEAVLKELSIHRGRDHGAVPPPRRRHRTDQVNALAFDVRAALFALLGKDITAIDGLGAYLSLKLIAECGDDLSSWPSAKHFTSWLGLAPSNKVSGGKMLSSRTRRSGGRAAALLRLAAVTVGRTDTALGAFYRRLSSRIGKAKAVTATARKVAVLFYNAVRHGMEYVDPGASSYETRYRTRVVNNLHRRAKAFGFVLQPLEPKAGAAVS

SEQ ID NO: 256912 - protein, 337 aa, unidentified
MIVVGVDVHKQSLTAVAVDEVGRTVAEVTAADSGDLLAWATSLRGERLWALEDCRQLTRTLERTLLAVGERLVRVPPKLMAPQRRAGRERGKSDPIDALAVARAALREPRLDHPRPGEQQLRELKLLVDHRDDLVDERRRAQQRLRWHLHDLEPALAVPAGALDRTVWLDRLGRRLARHDQSVQVGIARELIGRCRSLTRTILELERELQQRASETAPALLALPGCGAVSAAKLLGEIGPIGRFDTDARLARHAGVAPLEASSGKRRRHRLDRGGNRQLNCALHRIAITQARVHPPARAYLERKQAEGKSRREAVRCLKRQLARTVYTTLKNEPLLT

SEQ ID NO: 256913 - protein, 346 aa, unidentified
MGKSIINLPSVITVGLDLAKHVFQVHGVDALGRVVVAKPIRRNKLLEFFGSLPRCLVGLEASGSAHHWARELIKLGHDARMMPPAYVKPYIRRQKNDASDAAAICEAVTRPSMRFVGVRSLENQAALMRHKAREMLVSQRTQLLNGLRGHLTEVGVIAAQGPRHARELAELIEACDETVPFEVCEALAPLVVQLRNLDEAIARLDRTIVKMAQKDETARRLMSIPGFGPITASAMAATVQDTSGFAGPREFAAFLGLTPKQNSSGGKPKLGRISKMGNRNLRKLLVVGAHAVLFHRKPHTDPLRMWAKKLIEKKPFKLVAVALANKMARIAFAILRSKTVYRKIPA

SEQ ID NO: 256914 - protein, 384 aa, unidentified
MSQDDAQEGGTPQGKLGAIFASIELSKKTWLLTTMSPGAGDKMSRHIIPGGDIGALFAQLAALKRKTHDRTGRHYPFVIIQEAGLDGFWVHRALIAEGYESHVVDAASIATSRRKRRVKTDRLDGESLIRALLAFKRGEPRVCSMLRVPNPNEEDRRRIVRERKVLMEERIRHSNRIKGLLFSQGITGYDPLRRDRREQLEILRTGDGRPLPPNMKRQVLREFGRMELLIDQIKEVEAERDDMLIEERQSAREVALLSKVVGIGPEFAAVLWGEGLFRHFDNRRQVAAYAGLAPTPWQSGSIDREQGIGKSGNPRLRSTLLEMAWLWLRHQPSSTLSRWFNERVAQNGGRFKKVMITALARKLVVALWKYASAGVLIDGAVIRP

SEQ ID NO: 256915 - protein, 351 aa, unidentified
MKYYTSTTEFNCGIDLHARQMYVCVMDREGKTLVHTNIAGNDFAYFLKRVKPYRHSLTVVCECIFNWYWMADACAAAGITFVLAHALYLKAIHGGKNKNDRIDSEKLTHLLRTNLIPPAYVYPSAKRPVRALLRQRITYVWRRAELLARIEMGQLAEGFEPVKQSRPERDSWEERLMEAYTNPLHQFSVKTDLDMVRAYDRKIALLEQELLRITKRDSWKEFMLIQTVPGIGEALGLTILYEMDTADRFPTVKDFSSYCRLVKGSVASAGKIKGVRGGKLGNPYLRWAFGEAAVIAKRSHPLIHEYAKKLEVKHGKFVANAILANKLARAMYFMLKSGTGFDVERLIATSI

SEQ ID NO: 256916 - protein, 404 aa, unidentified
MCWLIRTSLDSYEVGVKIGSDIAAIKMLRRERMEECRVEPMQEVVEMIYIGIDVHKKFCVACIKDKEGTVLAQLKFLNKSRGMDKLLEIVDGRPAKAVVESTGNLWLRLFNTLEEAGVEVILSNPSKTKAIAEARLKNDKIDASILADLLRANLVAQCYVPPSSVRELREILRVRMNLVKDRTRVKNRVHALLDRYEPPKFEGTDVFGKGGMNWLRGLELTPTDSFVLNTYTNQIEFLNGLVQDLERAIAQVAVDDDDCQILMTIPGISFYTAMMVSSEIGDIERFPSSSKLVSWLGLAPRVRQSANTLHHGNITKMGSPRVRAVLVQAAQTAVRYDDHFRIKYERIGARRGKGKAIVAVARELAVACFHMLKRREPYKFMDIGLVRRKYKNMERIAKSTLCVG

SEQ ID NO: 256917 - protein, 402 aa, unidentified
MNCVGIDVSKGKSMIAVMRPFGEVVVSPFEVRHTASELSELARLLKSLDGETRVVMESTGNYHAPVAWLLHGAGLYVSVVNAMLVHDYGNNSLRRAKTDKKDAVKLANYGLDHWLTLPRYIPEEDTRLMLKICYRQYQQYSKVQTMLKNNLISLLDTAFPDANRLFTSPPRADGSEKWVDFVAAFWHCECVCGLSKKAFTTKYQKWCRKHGYNFSEDKALDIYASACRHFGVIPKTDTAKLLVEQAISQLQTTSAALAALKQEMQSLAASLPEYPVVMEMFGVGPALGPQLMAEIGDVRRFHSKKALVAFAGIDAPPYQSGQIDVRSRSISKRGSASLRRTLFLVMSVILQCAPIDEPVYQFMDKKRSEGKPYRVYMMASANKFLRIYYASVKAYLESLEHD

SEQ ID NO: 256918 - protein, 347 aa, unidentified
MNITAIGIDLAKTVFHIHAVDQRGNKVFSKKLKREQLAEFINQQPPCLIGMEACSGAHYWATKFKSFGHDVRLIAPQFVKPYVQGNKNDWNDARAIAEAVTRPHMRFVPIKDVEQLAMQSMHRVRSQLVKQRTALANEIRGLLSEYGIVIQEGIAKLRAELPFIIEDASNALMSTIRTLCDDMREHLKELDRKISHYDQQIKVTAKSSKTCQKLMAIEGIGPQTATIIAATVTDTKLFKNGRELAAWMGLVPSQHSSGGKNVLLGISKRGDRYIRCLLIHGARSALRSWKNKPRNTPRVIWALRKIEELGFNKACVALANKMARTIWAVLDKDAPYQSDYQPQLTRG

SEQ ID NO: 256919 - protein, 356 aa, unidentified
MMEIKGTDFRNQDFHIGIDVHRKNWLITIRNNQMELRTFSMNPSPEELHQHMEHNYPGGRYISAYEAGFCGFWIHRKLQELGFKSIVIHAADIPSTNKERSTKTDKIDSRKIARELENKSLNSIYIPNEFHQQLRSLCRLRHRAVQSQTRVKNRIKSHLYFNGTDIPSHEEMPHWSGHFINWLKSQEFSYPSAKDYLLFCIEELTQHRHRIAEIIRALRRHIKEQGQSEQIDLLCSVPGVGPIIATSFYTEAMDINRFRTFDHLASYVGLVPSVHSSGDKSTEQGLTKRRNSYLRYLIVEAAWVAIRKDPALLLAFNQLTRRMKKQDAIIRIAKKLLRRIRHVWKNQTPYVTAIVE

SEQ ID NO: 256920 - protein, 320 aa, unidentified
MTILNSPTVIGIDVAKAEIVVYREDLKITQAIANHREALGRWLKTLPAQSSIALEATSFYHLDTAELAHGMGFHVYVVDPYRVAHYRESIGLRAKTDPCDARLLARYLTNEQARLRIWSPPPEAYKVLKNLLRKRAALIKARVSIVLSFSNEPCLKDILARQLEVFKESDQAIQKLMREASQAAGITENINRCKAIEGIGELTAIGLATAFMRGHFVSGDAFIAFLGMDLRPKDSGKKHSPRHLSKKGDGELRRLAHNAAMAACRSPAWKPYYEAFLARGLARTQALVILARKLCRVAFALMKNQSEYQPNSRLQGSPAT

SEQ ID NO: 256921 - protein, 347 aa, unidentified
MTSVADWRAFLGLDYHVSSVQVCVLDAFGKVLGNRSLPNEMAAILAYVLSVADGRAICGGALEACCGAANLAEELRTQGWDIQLAHAGVCARMKQKPDKTDFGDAHLLADLVRVGYLPRVWLPPAAIRDLRRLVRYRTQLVEQRRNVKLRILALLREERLVAPSEAGNSWTKKWLAWVAKVALGTHSRWVLDQHLASLTRIVAEIKAAEQRMEEATKDDQVTQQLLAEKGIGLVTAVTMRAEIGSFQRFRCGKQLARYCAVTPKNASSGKHQADAGLIKAGSLPLRTVLIEAAHRLGRYAPKWRAMKEHLRKNKKPGGVIAAAIANRWVRQLYWQFSKLESELSAAA

SEQ ID NO: 256922 - protein, 349 aa, unidentified
MRKLYVGIDLGCKTCAGAVRDSKGKVLETCGFPTSAENLIDFVSNLKGEVRVLIEECELAGWVYRTLLPHVHSVEVSDPRHNAWIAKGKRKSDPVDAAKLSELLRGGFYRAVHHPEEEEMATFKIAVQHYDQMTKTTTRLQNQIRARFRQQGMVFEGKGLYGASGRQKAIARVKSEAIAEILLQDFRLLDDAQKERAMARVLVTKLSRNFPVIKRLERIPGVATISASRFVAYVQNPHRFNTKGLVSFSRLAVVKRESGESLIGREHLSKEGNGSMKALSRTVFNGVIRTRRMNGIKDYYLKSLRRTKNETHARLNTQRKILAVMNAVWRDETEYSDHLVTGNGAKRPL

SEQ ID NO: 256923 - protein, 325 aa, unidentified
MEAKKLCCGIDVSHLTLDVSYQNNLGELFHLRVGNNIKGFEKILEHTGTDYHFVMEATGVYYIRLAFYLHGQGCCLSVVNALSIKRYIQMHLERNKSDKKDAGWICRYAIEQCPPYWEMPESAYFECKDLYNTIREYAEQIKRFNNQLHSLGLLPVPSKDTMRSLVKVKQQLDKEMNSLEIKLEAVLQNWQPAQLKSVGSIKGIGKRATAMLIVFTQGFKYTHNHRQLISFAGLSPTEYSSGSSIQGKPRIYKRGGKNLRDVLYMCSMNAMKTNPACKALYERLRANGKTGKQALIAVCNKLLKQVFAVVKNNSLYQPNYCSARP

SEQ ID NO: 256924 - protein, 419 aa, unidentified
MSVTETPDAVEPPRPTPPTAGVDWATDDHAVAVVAPDGEQILRFSITHDAAGLRTLVKRLLAAGVAEVGIERPDGPVVDALRQAGLTVYVIPPGQLKNLRSRYGSAGNKDDRFDAYVLADVVRTDRRRLRPLLVDQPVTTALRQTVRARKDLVAHRVAVANQLRAHLQICFPGAVGLFADIDSDISLRFLERFPTQDRAGWLSPKRWAAWLSSVGYSGRTLPDTLHQRLTAAPAGATGPAADTAAAVTAAFIAVLRTLTTQIEALAARISEQLDLHPDAPIFTSLPRSGRVRAARLLAEIGDARGRFPTADSLACLAGVAPSTRQSGKVEVVSFRWGADKQLRDAICDFAGDSRHANPWAADLYQRARNRGHDHPHAVRVLARAWVDIIWACWTSNTPYDPDRHGALQRILNQDQPKAA

SEQ ID NO: 256925 - protein, 399 aa, unidentified
MLAVGIDISKSKSVAAILNQDGSMHTSPFEFHHTQPELDAFIKYILNSNQSATILMENTGHYHYPVLKAFREAGLPVCMVNAYQIKKFGDMDLRKAKTDKKDAVRIARYALEKSYSLVPYTSMGQKYEDLKFLARQYNQRMLTLKTNKVFLLNLLDETMPGITNILPLTTRTPETSLSVLFINRFKSYDRIKKMGKSRFLDAFEKITRKSRNRQTKTYGLAIYEAALRNITTRGENEYTLAAQDQCLELVCESQKAADSIILKMQTLAETLPEYAVLRSMAGVGDRLGPLILAEIGDIRRFHSGKALNAYAGNDAPPYQSGTFESHNRHISKRGNAALRKYCFEVMQALKLTRPQDDPVYLFLLKKEQEGNPYNVAKMAGVDKFLRIYYARAMETLKQQ

SEQ ID NO: 256926 - protein, 414 aa, unidentified
MIVAEEPTGARVCGGVDWAKDDHAVCIVGTEGQALQRFMATHDRSGLKDMVRRLLRAGVEEVGIERPDGPIVDALLAAGLTVLVIPPAQVKNLRSRYGSAGNKDDRFDAYVLADVVRTDRRRLRPLERDTVATVALRTTVRARRDMVAHRVATANQLRAHLQIVFPAAAGLFDAIDSDVSLRFLERFSTQGQADWLSPKRLGSWLASIGYSGGTDPEVIYARITAAPRGTTGADAATHSVTTQSYIAVLRTLNTQISTLAASIAEQLDVHPDAKIFTSLPRSGTVRAARLLAEIGDARGRFPTASSLACLAGVAPSTRQSGKVKAVTFRWGADKELRDALCDFAGDSRHSNPWAADLYAKARARKCDHPHAVRILARAWAAIIWRCWQTNTAYNPAEHGGLQRILNQDQQTVAA

SEQ ID NO: 256927 - protein, 410 aa, unidentified
MTEIIVAQDAPVLVAIDIAKARHEVLIAIPDKKRRRRLTVLNVLADFNRLIDTLRDYGCPVRVAFEATGNYHRALAYHLATAGFEVKLVSSVALARTREALNNSWDKNDPKDAQVILHMMEIGNEQFYHDPLVHGTNDIQELSKTHDIVSKSKTELWHRVLTHYLPLYFPEADRFHRSSRSDWFFAFLERYPSPHFITAMGKEAFTADAWDVIGRKVAKERLLADIYETAKSSVGLPVAPDSDAISMFRLVLGEGRSLIAQRNQIEDRAVALLKDLPDYQLLTSIPGIGPINALTILAEAGDLRRFGHHRQFLKFCGMDLATIQSGTFRGQTKLSKYGNARLRRTLWMAGQVAILQRTNSFRDKFERYIAKDRHNTHLRRKAYTAIAAKMARTVHGIIKHGEPYRPFFEG

SEQ ID NO: 256928 - protein, 334 aa, unidentified
MENIALIGIDLGKNSFHIHCQDRRGKAVYRKKFTRPKLIEFLATCPATTIAMEACGGSHFMARKLEELGHFPKLISPQFVRPFVKSNKNDFVDAEAICEAASRPSMRFVQPRTESQQAMRALHRVRESLVQDKVKTTNQMHAFLLEFGISVPRGAAVISRLSTLLEDNSLPLYLSQLLLKLQQHYHYLVEQIKDLESQLKRKLDEDEIGQRLLSIPCVGTLTASTISTEIGDGTQYASSRDFAAATGLVPRQYSTGGRTILLGISKRGNKKIRTLLVQCARVFIQKLEHQSGKLADWVRDLLCRKSNFVVTCALANKLARIAWALTARQQTYVA

SEQ ID NO: 256929 - protein, 453 aa, unidentified
MMKTTTDDQPALKMVNPGAAAIDIGSTMHMAAVNPDTDDMPVRAFGTFTKNLHDLAEWFRSCGVTSVAMESTGVYWIPAFEILEQHGFEVILVNARYAKNVPGRKTDVSDAGWLRQLHSYGLLRGSFRPAAEIATLRAYLRQRERLVEYAAAHIQHMQKALVEMNLQLHHVVSDITGATGMRIIRAIAAGERDPDVLASLRDVRCHSSIETIRASLVGNDRDEHVFALIQSLELYDFYQDKMLECDRKLEAAISDLTVRAEHQLPPLPKARTKTKQVNAPSFDVRAALYGVLGVDLTQIHGLGPSLALKLIGECGSDLKAWPSAKHFTSWLCLAPGNKISGGKLLSSRTRRSSSRAAALLRLAAVTIGRSDTALGAFYRRLAARIGKQKAVTATARKIAVLFYNTLRFGMVYRDPGATAYDERHRSRVLANLQRRAKTLGYSLEPMPDAECVS

SEQ ID NO: 256930 - protein, 340 aa, unidentified
MTSLPNTPIQPHAAAQTRDAALLAQPLYVGIDVAKQSVEVSFGAHLPTLALSNDSQGVEALLKRLQDETVALVVMEATGGLEAIMACALQGAGYAVAIINPRQARDFARAMGQLAKTDRIDAHILSQLAGVLDRHPQRERYVRALPEAEQSELAALVARRRQLVGMWVAERNRLPGSHPRARPSVIAMIEALAQQLANIDQDMDRHVKAHYADVSSLLDSAKGVGRRTIATLIAELPELGKLGHREISALVGVAPINRDSGQMRGKRTIFGGRASVRQALYMAVLSGTRYNPTIKVFYQRLLKAGKPKKVALTACMRKLLTILNAMVKSGKPWQESIHEA

SEQ ID NO: 256931 - protein, 356 aa, unidentified
MNKISKLDFKDQRIYVGMDIHKKSWSISILTDNFEHKTFTQPPNVEVLVNYLKRNFPGGSYKSVYEAGYCGFWIHDRLQEHGVQCCVVNPADVPTKDKERRSKTDRVDCRKLARSLRSGEIDSIYVPCRPKVEDRSLIRTRHSMVKKQTRCKNQIKSILHFYGIQIPEEMGDSYWSKRFITWIETIRLERSSGNFTLKVHLEELNNMRKIIADLTRGIRSLANCEEYRQNVRILKSVPGISTLTAMTLLTELYEISRFKNLDKLCSYIGLIPDTDSSGETERRTGITKRRNAQLRNILIESAWVAARKDPALVMTFHTLCKKMPKTNAIVRIARKLLNRIRYVLKTQQEYVPAVVQ

SEQ ID NO: 256932 - protein, 415 aa, unidentified
MSVTEDDGPGRGSGGGRATAGIDWASEDHAVSLVDVRGVEAERFTVEHTAAGLRRLVARLRRGGVVEVGIERPDGPVVDALLDAGLVVLVIPPNRVRGLRSRYGSAGNKDDRFDAFVLADTVRTDRARLQPLTVDTAATVSLRMTVRARKDLVAARVAMANQLRAHLNTVLPGAIGLFRDIDSPISLRFLTRFCTQDKADWLSPARLETWLRAAHYNNPRNAPALHAHLAAAARGATGPHGAARAAVTLALVAALTALREQIRVLDDTIAVQLDQHPDAQVFTSLPRSGTVRAARLLAEIGDARGRFPTPEALTCLAGAAPSTRQSGKVKVVSFRWAVDKQLRGAVIDFAGDSHHDNPWAADLYTRARARGHDHPHAVRILARAWLHIIWRCWQDHVPYDPAKHRALQATHNRAA

SEQ ID NO: 256933 - protein, 820 aa, unidentified
MPFRAAAIVVSEEERQELQQMAQSRSLPAGDVMRARMMLLLSEGVPYRKIQEILDTTAPTISRWKERFRAHSMAGLMEERHPGQKPSVRTPKLQARILAAIKNGPNDGSTHWSCRKLASHFGISKDTVQRILTQAAVRPHRLERYMASDDPDFENKAADVIGLYMAPPQHAAVFCVDEKTAIQALDRLDPVLPLSPGRLERHGFEYRRNGTLSLYAALDVKTGKVQGKTAERHTSAAFIDFLEQLVSTCKTRQEIHIILDNLSAHKPGWRGTTSLGPRNLFQSIGFATLIEGFASASYGRGLHWCFVPDHKHGSGSGDHWHGGKGASPSTPLGRLVNRSSPGRTASRFQIRRERMPNETSVNANKVAKKELARGLRSVDPGLEVVHPNAAGIDVGNASHYVAVRPDRDTEPVRRFECFTADLYRLAEWLSSCGVKTIAMQSTGVYWIPLYDILEERGFEVFLVNARHTKNLPGRKSDVQESQWLLKLHTHGLLNNSFQPPSDIRVLRTYWRLRAEHATGMATCIQRMQKALTQMNIQLANVISDLSGTTGQAIVRAVLNGERDPHKLAELRDRRIHATKEEIAKSLQGNWRPELLFIVRQQLEMYEAYERQIAECDLKLREHLESFASALSIPVDEGNSPQSKKSKRYRYMPQFPLSNELMRISGVDLTQIDGVDAMTAQTLISEVGLDMNRWKTESHFASWLGLCPDNRISGDKVLSRGTRRVINRAATALRIAASTLIRSKTYLGAQYRRLRTRLGAPKAITAMAHRLARLVYRMLKYGQKYVDKGADYYEQKSRQQQIDFLKKKAAQLGLQVTLAQP

SEQ ID NO: 256934 - protein, 444 aa, unidentified
MSESSISASEPEWAAFAAIDWADQKNFWRLVPAGSQQFEQGELENTPEAVEAWAVALQQRFGGRPIALIVEQSRGALVYMLCKYSHLVLFPVHPTTAARYRETFAPSGAKSDPSDTASLLDLLLRHRERLAPLQPDTVETRLLHFLVEQRRQTVDEKTCQSNRLTACLKLYFPQILQWFDDVTTPLVGELLERWPTLDELQHTHPGTLRKFFHQHHCRSEQLVEERIAAIYQAVPATRDPAVLEAGKMRTGGLVAQLAALRSQIAAYDRRLAELALAHPDGGLFASLPGAGPVLVPRLIAAFGTRRDRFQDADEVARYSGIAPVKIASGKTVRVCFRWACPKFLRQTFHEYASHSIGQSEWAKAYYDHLRQDEKKDHHAAVRALAFKWIRIIYRCWKDGKPYDEEVYLKSQRRRGSLLGGGLALATSVEWKTVAGFQKLSEKKA

SEQ ID NO: 256935 - protein, 326 aa, unidentified
MLYAGMDVHKKFCQVIVCTKEGEIVKKGKIKTDEKEIRKFFYGLKNVKIAIEASTNYSYIVDALAKEGYEILVAHPLKTRAIAEAKIKSDKIDAKMLADLTRGNLLPTSWIPSKEIRELRDLVRQRIFLVKQKTKIKNKIHAELIKRGIEYKRNIFTKAGREWLHNLKIPAIETYLLIMEKLEGEIKKMDKRLKEEEKKFEEVKLLKSLPGVSTFSALVILAEIGDVNRFPDEKKIFSYAGLVPSVHKSGDKVYYGHITKQGSKYLRWILVECARIHVRKCNSRITEFYRKLKRKGKHENVALIGAARKLLQTIYYILTKGESFHS

SEQ ID NO: 256936 - protein, 416 aa, unidentified
MTYRIAAIDIHKNVLMVVVALAAAEVRDAAGEALEFICERFGTGALERQRLVNWLKQQAVTEVVMESTAQYWKPIWLELEPHFQKLHLAQAQSNRAPHGRKNDFRDAKRLARRLLAGELSLSYVPEPEQRLWRVMTRSKQQLVRERVAIRNRMEALLEEMQIKLSSVISDLLGVSGRRILKALSEGETDPNQLAQLGDERLKCSQAELADALRGRPTPTHISMLKLFWEHVELMDRQIGDLDRLVAQALKPYQEAVLRLAEVNGFGVDSAQQLIAEVGVLADAFPSAGEFSSWVGTCPGSNVTAEENHSSRSPKGNQFARRILTQAANAAIKKQGSHFQNVFLRFVTKLGYQGAVWVVAHRLTRLVWLILNKQVRYVEKGEETDPKAKQRRARKLAQSLRRLGYEVTLKPIQPAQA

SEQ ID NO: 256937 - protein, 355 aa, unidentified
MDTKKYIGMDVHKETISIAVMKGDGKLVMESIIETKASTILQFIEGVRGDLHVTFEEGTWAAWLYDLLKPHVTELVVCDPRKNALMKEGNKSDKIDARKLADLLRGGYLRSVYHGENGLRTVKELARSYLTISKDQTRVMNRVKALYRSWGICCAGQQVYAPRHRSEWLNKIGETGVRRRAEFFYQQLDALRVLHKAVRRDLLAESRKHSATKLLREIPSIGAIRAALLLALIQTPQRFRTKRQLWTYSGLAIDTRDSAQHRYVGGQLQRSKKPQQVRGLNQNHNHDMKAVFKSAATMASGGEGAFHDFYQGLLTKGMEPAMARLTLARKIAAITLTIWKKGAHFDAKQLKPQAA

SEQ ID NO: 256938 - protein, 424 aa, unidentified
MDVIYDRVAGLDVHKETVVATVRVMVGRQAERECRTFETTTAGLSALLAWLTETRCSHVAMEATGVYWRPVWNILSDGAFELIVANAAHIKNVPGRKTDVNDATWIADLLACGLIRGSFVPSEKFQELRALQRTRKQLTREQTRHVQRLQKTLEEANIKLDSVISDIMGLSGRRMIEAIIAGVRTPRKLADLADRRIKATPKELYDALHGRVTDHHRFRLRLHLGQYDALAEAIAALDREIDAAIGRIDEERESAGQAPFRAASREVCEIPGINLLAANMILAEIGLDMQRFPTEAHIVGWSGLCPGQNESAGKRKSSKLRKGAPWLKTTLVQCAVSATNKRGSYFRAQFQRLKSRRGAPKAYCAVAASLLTTIYHMLKNRTKFRDLGHEHFDKRPTKAKVNRLLAQLAKLGYHADVRPLANAA

SEQ ID NO: 256939 - protein, 336 aa, unidentified
MTIIRIGLDTSKHVFQIHGVDENEKPVLRRQLRRSEVEKFFAQLPPTRIGIEACGASHHWARLLRGLGHAVLLMPPQYIKGYVKRGKNDAIDAEAICEAMSRPTMRFVPVKTAEQQAALTMLGVRDLLVKQRTMLMNALRGHAAEFGVAAAKGPNKIVELLQHLATGEGVPALAREMLGMLASQLEAVNGKLKAIEARLMAWHRQDQTSQCLATIPGVGPIAGVSFALKIPEARGFRSARHFAAWIGITPRENSTAGKHRPGKISHEGDESLRRLLVLGATAVIQRAKRGRVSPWLLGLLARKPKKLAAVALANKMARVIWAMMISGEVYRRPQEA

SEQ ID NO: 256940 - protein, 475 aa, unidentified
MNVKGKKKKNQVVTANIFEQQELLKKAEVIKENLTASTWRELETNGKFDKNEKLSFISDDMLILGCDVGSETHYLRAIDTRGRELSKSAYSFNNDHEGFQSAKEWAVKIAAEHDKSQIVLGLEPTGHYWFCLATWMISNGISVVQVNPYAVKQTKEVEDNSQLKDDTKDPKLIANLVKDGNFGMPYLPEKLYAELRGLSMFRDQLNEERIRAINRMHREMKIYFPEYKDAFGKVDGAFSLELLKTAPFPEDLKALDEDGIRQIWHEAKLRGRGYSRSGEILGYARASVGIKDGANAARMAVQWFVKKIMELDEDLAGIENLINQKCREIPHTGNILEISGIGENTLSGILAEMGDISRFDDVKEIQKLSGLGLVACSSGKHKGETKISHRGRKRLRYWLFQAAKSAVAHADEFKELHIYYTTRTKNPLKKMQSLIVIACKLLRIIYTILKKGTAYDPKKMLADIKRQEKQEVLAA

SEQ ID NO: 256941 - protein, 445 aa, unidentified
MTTISMTQTKSVLAAIDIAKSRHEVLIAIPGKTRRRRLTVLNRQEDYDRLIATLTAYGLPVRVAFEATGNYHRALAYRLGIAGFEVKLVSSVALARTREALNNSWDKNDPKDAQVILHMMQIGNEQFYHDPLLNGRNDLQELSKTHDIVSRSKTELWHRILTHYLPLYFPEADRFHRSPRSDWFFAFLERYPSPHLITAMDQEQFISDAWDVVGRKVEKSRFLADVYQTAKTSVGLPIAADSDAARMFRMVLAEGRSLIAQRKIIEDRAVELLKDHGDYRLLTSIPGIGPIHALTILAEAGDLRRFGHHRQFLKFCGMDLATIRSGTFRGQTKLSKYGNARLRRTLWLAGQVAIMQKTNSFRDKFERYIAKDRQNLHLRRKAYTAIAAKMARTAHGIIKRGEPYPVAGRRFASQICREAPLLRGVITAEGPFSDLAVGAINRPRR

SEQ ID NO: 256942 - protein, 340 aa, unidentified
MRIIGCDLHTTKQRIAMLDRDSGEVVEQTLSHDGETVREFYAAIPKPAVVGIEATGSMGWFVRLMEELGVTCRVGHPAAIRTAEPRRQKQDRRDAQLLLRLLLEDRFPAIWMPTAEQRDVRALLLHRHQWVRMRTRVQHALQAIALGQGVRRGATLWSTDGQTVLAALPLLPHATDRRDALQALYRQLEAHVERLDAEVRAITEQRAGATLLMTHPGVGPVTALATDVFLGDPSRFPNGKALASYVGLIPSEYSSGARQRFGHLSKQGNPFLRFLWGEAVMGAVRRDPELQRFFRRKLPQKGLGKARVAAARKLGIRLWIMLRDQITYDEFCRRNPRRRS

SEQ ID NO: 256943 - protein, 358 aa, unidentified
MKKIVIGIDISKEKIDASAIDVRNAQQGIQKLGYETFENRPMGFRRMLVWVRHLIKGVTLEEVLFCCETTGGYDRSLCDYIYAKDLDIWRESALQIKRSMGVRKGKDDKADSLMIAEYAMRHMDKAVIYETPSDNVRELKALLQYRHKLVQEKTEKKVRMSHLADTAAKSKSMSFILRDARKSIKALEKSVKQCEQQILELIKGDEELSRSYRHIISVTGIGIVNATALIAYSNNFRGITTANRMASYYGIAAFRDTSGTSVDKKAYVKCYSNSLLKAYLTQAAEWTIRENGIYHDYCLRLKEKGKPYGIIINNARNKLIHLVFSLVQNDMDYERNHEYIRMQRRVNADFTTELKNIN

SEQ ID NO: 256944 - protein, 320 aa, unidentified
MSPNTTNTMTETNSVVHVGLDIAKAQLQLHLQNQQHVLPNTVTGHQRLIRLLRVVAGAHVVCEATGGYERKVVAALHAANLPVSVVNPAHVRHFALAQGQRAKNDPIDAALLTAYGHALRPNATPVPQAVLAELRELVQWRDHLKEQLVRARQPAEHATLAFVHRQQSKEVTHLEKQMAAVEKELAAALTRHPHWREQVQRLAELDGVGTLTAVSVLSQMPELGQLNRGQAAALAGLAPWTRQSGPWEGQRHIGGGRAVVRRALYMSAVALARQTGSTLGKFYARLRATGKPAKVALTAVMRKLLLQMNQVLKYHVPDPA

SEQ ID NO: 256945 - protein, 392 aa, unidentified
MFFVGIDIGKNNHVASMMDESGKVVFKAFSFPNTSDGGHALFSKLTSYSPSPDDFEIGMEATGHYWLSVYSFLFEKKFLLHVINPIQTDGWRRGTEIRKRKNDIIDSVLIADLIRYGQFVETRLADEDLFSLRSLTRCRTYLVESISDLKRKVVCVLDQVFPEYQSIFSDIFGKTSKEILLQFSSPIDFESVSSQTLAELLAKLSRKQAGPAKAAQLKAAASCSFGVTFAKSSFTFQLKALIEQIAFIEKQVKETETEIAGIMEKLESPITTITGIGNITGAAIISEIGDISKFDSPRKLVAFAGLDATVTQSGEFEAAHNVMSKRGSPYLRKAIFQAALVAAFKDPVLSAYYQKKRAEGKHHLTCIGAVARKMCNIIYAVVKNNQPYVPKA

SEQ ID NO: 256946 - protein, 322 aa, unidentified
MNKYKETFGVDISKDVFDVHGSKTGHDQYKNDEIGFKKYLKQLPKSSLVVMEATGYYHYRLAQFLYKNGVVVSVVNPLSIKRFIQMKLAKVKTDKSDAKAICEYALINEVPIYNALTDTQSECLQLFRLLDAYLKQRTATKNKIHGEAVLGIPSKFVYRSLIRNKKQLNKEVTAIESKILSLVKEDQQEQLTLLTSIPGIGQKTALFLIVVTDGFSKFETAAQLCSYVGITPTIRESGSSVRGRARISKVGNRKLHNLLFLCSFNACKHNKACREVYERIVNKGKSKKLALIAVANKLLKQSFAIAKSGRPYDEAYVSVLPK

SEQ ID NO: 256947 - protein, 402 aa, unidentified
MLYVGIDIGKRHHEVGVIDDQGHPVGKTLRFANTKVGSEKLLNYFNQHGLTPDNSVIGLEATGHYWLSVFSFVHKLGFKTTVFNPLQSDALRHFYIRKTKTDVQDAYLIAQVIRIDSPDETPFIEEDLLQLRHLERLRYSFVDQASDIKRKVISLLDQVFPEYEQLFSDIFGKSSTELLKNYTLPEEILEVDTNELINLLMKASNGRLGESRSLNKVNQLRESALNTFGITIGTDVFKLQIQLLLEQIELIEKHLSEIEQVMIEISNRQEHFLTTITGVSDVTACVVLGEIGSIERFERPEQLVAYAGLDASVHQSGDFNSQNTRMSKRGSPYLRRAIWQAAFVASYHDPALSLHYERLRKRGKAHGTAIGAVARKLTHIIFAILSDNKPYEPRPQPNPNTT

SEQ ID NO: 256948 - protein, 405 aa, unidentified
MNKTIVHHEGAAARAAASHHATTRPATVKLGVDIHSQFYVVAAQYDHAAIKPPRRLTPEQFVPWVETLLRAGHQVHVVYEACGFGFGLYRRLIAAGAHCYVIAPQKLDEARTGVKTDPRDAIMLCQRLSRYLDGNTRELAVIRVPSEAEERARHAPRQREQLVRARKKLQAQGRGLLVNHGLPAPAHWWQEQTWGRLQKLLPGWVLPHLEIYRPILLALDAQIAALSAQLEAAAPADLPRGLGALTSVVLSREVCDWTRFKNRRQIGSYTGLCPGEHSSGAKRVQGSVTKHGNARLRAILVECAWRLVRFQPQYPPVKKRLHVLATGARATGAARKKAIVAVARRLAVDLWRLHTGRGNAGQLGLAGCESTRRLTPAAETDGLGSGGTASAARPTAGQPGASSKH

SEQ ID NO: 256949 - protein, 347 aa, unidentified
MKFYTPQHKHYCGIDLHARSMYVWSLDQSGMILVQKNLPTTPAAFLRVIAPAREDLVVAVECIFTWYWLADLCEREGIVFVLGHALYMKAIQGGKAKTDKIDAPKIAVLLRGGMLPQGYVYPAAMRATRDLRRRRCHLMRKRAELLAHMQNTNSQYNLPEIGKKLAYKANREGVEEHCPDPSVRKTIEGEVALIDHYDQLLGEVELYITRPAKTHEVQTFSRLQSVPGIGPILALVILYEIHDLPRFPRVQDFVSYCRLVKCAKESAGQRLGSSGKKIGKVHLRWAFAEAAVLFLRHNQPGKEYFTTLEHQPGKAKALTGLAHKLARAVYYLLTREQAFDLKRFVTA

SEQ ID NO: 256950 - protein, 447 aa, unidentified
MEIVYQRCAGLDVHKKNVKACFSAPGADGHRQKETRTYLTMTPNLLELRDWLKEQGCTHIALEATGVYWRPIYNLLEGDFEILVVNAHHIKTVPGRKTDVKDAEWIADLLAHGLLSASFIPSAPQRELRELTRYRTSLVEERAREVNRLQKTLEDTNLKLGDVVSDVMGKAAQLILHAVVEGETDSVRLASLAVGRVHASQQDLERALTGKVTAHHRFMLGQHLQLIEHLDEAIRHVTEELARRFTPPEPPTEEEEPHSPAEAPAPESSESAPSVTESAPLSWQKAAQIIDQVTGISERVAQGLLAEIGVDMSQFPSAKHVASWVGICPGNHESAGKRLSGKTRKGNPYARRLLIQAAHAAAHSKNTYLAAQYRRIAVRRGPKRAAVAVGHSILVIVYHLLRDRGTYQDLGGNYFDEHDRQMVQKHLVRRLERLGYQVDLQPRSEAG

SEQ ID NO: 256951 - protein, 427 aa, unidentified
MQSEAERLAAYRHLRDEIRSSERHLIVGLDIAKEKHFAFFGTLTGRVLCKQFTFPNCKDGFELLLARTEQLRLQQQLEAVVFGVEPTANYHKPLADYLVRQEQQVVQVSGVAVKQNRELLDGRWDKHDRKDAANVADLIAQGKCPFYEYPSLEIRQLRELLSLKHKFKKEEHGIKTRIRNNLLAKFFPEMDQFINTCQQDTFAVIGTCCAPELISELDYASFFAKVVPVYKGKRQEAHLMRIWQAAQHSIGCLSGELANYEGQLLMQQLQSVRQLIREIEEHIAQLCSGFPEYACLMSIPGVGPDISSKLLAYIGDPNRFETVSQVIKLAGLDLSASRSGKTAMKAAPVISKRGNADLRYALYQAALVASTKNTYFRCWFARQLKGREREQGILGIVRVKLAAKMLAIAWTLMKKNEMFAYERLNYS

SEQ ID NO: 256952 - protein, 413 aa, unidentified
MDVLHPRCCGLDVHKSSISACILLREAGRVQKHQRRFGAMTQELQELAEWLRQFGVSQVAMESSGVYWKPVWNILEGQFTVVLANAQHIKNVPGRKTDQKDAEWIAQLLQYGLLRPSYVPCEIIRDLRDLTRMRASLSQEASRISNRIQKVLEDANVKLASVATNVLGKSGRAMLEDIISGEDDPEHLASLALGHLRVKIPQLRLALEGKIRSHHRFLLRRLVDQIQFVEHEIALLDERLEEIAQQRPELSQAVARWDTIPGIDRVAAWALLAEIGDNMAQFPTAEHLASWAALCPGNHESAGKRLRGTTRQGSPWLCRMACQCAWAAARTKNTYLSSQFRRLAARRGKKRAIIAVAHTIIVIGYHLQKNQSNYEDLGGNYFDRIHSDGLKRYLVKRLQQLGHKVTLEPMEAA

SEQ ID NO: 256953 - protein, 352 aa, unidentified
MLAGIDTHKDTLAVAVIDDTGRPAVVTELANTEAGFDALELLLEEHTVTRVGIEGSGNYGRGAAVRLVLTGGLEVVEVPPSLTSRERSGRPGQGKTDPVDAVAIARITAREAGLPAVRLAIGVAADLRALADYRAQLVAERTALANRTHSELHGLLPGYQATIPRLTAPTFLTAAQDLLDGDTSVRAQLTRRRLIRLAQLTAEIRDLTGLITTAIAEVETGLTDLYGVGPVGAATILGEVADIRRYRSRHAFAAANGTAPIPASSGRTTRHRLNRSGNRTLNRVLYTIAITQIRADTEGRAYYLRKRAEGKTSREALRCLKRRLSDVVYKTLQDDLAAHPLPELAGAAAPGR

SEQ ID NO: 256954 - protein, 368 aa, unidentified
MGRKSSKLFVGMDVHKESIDITLAEEGGEVRHYGRIGGEQSALIRTVRKLESLGKSLVFVYEAGPCGFWIYRLLRERGHECWVVAPSNTPRRVRDRIKTDRRDSLKLAGLARAGELTPIYVPDAADEAMRDLVRAREDAVATQRQARHRLAALLLRNDIRYCGKTAWTEAHRRWRARLPLPGAAQRIAFEEYVLTVNEATASVQRLTASMEQELVHWRWQPVVHALQACRGIQLIHAVRIVAEVGDLSRFSHPRQLMAYLGLIPSEDSSGERRRQGPITQAGNRSARRALVEAAWAYRHHAAMSPIIVRRQSGLAKPVLDIAWKAQLRLCARFRRLSARGINRNKIVVAIARELAGFVGAIGQRVKLN

SEQ ID NO: 256955 - protein, 392 aa, unidentified
MIYIGIDIAKNKHDCCIIDSDGVVYNDSLRISNSRQGFELLYSSILSILPDKDISNVKIGLESTGHYSTNLQNFLYAKGFKLSILNPLATNLFRKAQSLRKTKTDKTDALVIAKMLFSDDTKSYSPVSYQIQELKSLTRHRYRLIGYRSKLKTSVNRLVDIMFPELPDLFWSIHQSSSYALLSILPSPKDIAACHLTKLTNILNTASKGKYGKDKAISLKESAANSIGTNSRSLSFELKQTIRLIQSVQHEIDSLELLIKEIVVEINSPLISIPGISYTLAAIILAEIGDVKRFTTPCKLLAFAGLDPSTYQSGKYTASHTPMVKRGSAYLRWAILMAGRTVSMRDATFSAYLSKKRSEGKHYYVAMSHVAKKLIRIIFHLLKTNATFAPQI

SEQ ID NO: 256956 - protein, 385 aa, unidentified
MQVMIEGQSHFQPFGLPYWGFADLNKGVGSMTASYEYHIGVDYHKSYSHLVVQDSAGKTLRSGRVKNDRQSLGGFLERYRENSHAVVEATRNWMVMYDWLDDICDDVVLAHPLKVKAIADAKIKTDKIDATVLAHLLRADLVPEAWAPSEKSRDLRVALRERMFYVRLRTMTKNRIVTVFDRYPEQTAQLKTLGDLFGKAGRIQLAQVKVSEIDRIQIDRGLAFIADIDVRVKQSEATIRAMTKANTNVKLLKTIPGIGEFFARLIDAEIDDISRFRNAKKLAAYAGLVPSTYSSGGKTFHGKIIKQGNKWLRWAFVEAVAPAIAADAQLRAQYEHLKLRGVNKARVAIARKLLTIAFQILRDQRAYEPRSTSTMEATSTISRLS

SEQ ID NO: 256957 - protein, 370 aa, unidentified
MLDTTTFIGLDVHARSIKAVSLDVMTGEVRAATFGYDAGAVAEWVRSVDPRARCVYESGVTGFDLQKRLSGLGVDCVVGAVSKMIKPSADRRRKNDRNDAEFLARMLSVGNVVEVWVPDDECEAARDLTRALEDARDDLSRSKQRLSKFLLRHGLAFDERTPTGRRKGNWTRAHWSWIESIRFAERADNDVLAYYVDAVRRAAEEKARLEGFVEAEARKPRWRKRVDSLRCLKGVDTASAADLVFEAGEFSRFRNARSFAAWVGLTPSEHSSGESDRRGAITKAGNKHLRKTLVEAAWHYLTCSGRPKDLAKGQAPDRGARRHAAKGVRRLVERREALLARGVHGNKANVATARELACWVWAVGLMAEEA

SEQ ID NO: 256958 - protein, 345 aa, unidentified
MKILALDLGKNKSVFVEYITGNGERTFGKISTNPRELRNLLERGTPDRLVIEAGPAAGWVCDLAESMKVPVQVANANDERWRWKTVKEKSDRKDAIKLAHLSEMDCLPTVHVPKASVRQWRSLIEYRHALVRRRTAVKNSIRSIYERRGLNLPSAKRAWTDAVMEELKKEASHYSSQRLWLFQVHCELQQFESIQRQIQAVEEKLEERARADGRVEQLKTAPYVGPRLGETVVAILDDPHRFKSGRQVGCYAGLTPRRWQSGESDRQGHISHAGNGLLRQMLVEIAWLGVRRGTWMTAVYEQVRRGSDKRKKIAIVAVARRLLVKLWAMLRDGTEWKEPLPAAAT

SEQ ID NO: 256959 - protein, 390 aa, unidentified
MQVIADQAEAPSAIRSNLGAIFVSLEPSRSTWLITSLLPGGSEKMSKHSVPAGDICALLARFSELRQKAFTRTGKSFPIIVIQEAGLDGFWIHRVLQNEGIESHVVDPASIATSRRHRRAKTDRIDGETLLRTLLAYKRGEPRVCAMVKAPTPEEEDRRRLCRERKVLIAERVQHVNRIKGLLLCQGVSGYEALRRDRRQRLDELKTGDGRALPDHLKAQISRELARLELLLEQIKAMEAERDALFAAAKATMPASGPVAMLLEIKGIGPEFAAILWMEAFFRSFANRKQVAAYAGLAPTPWQSGSVDREQGVSKAGNPRLRTMLIQLAWLWLRHQPQSALALWFKERVSRNGGRFKKTTIVALARKLLVALWKYVTAGVIIEGAVMKPA

SEQ ID NO: 256960 - protein, 351 aa, unidentified
MIIVGVDYHPSVQQVAFLDTETGETGERRLNHSDGEAERFYRDLQRRQVKVRVGIEATGHARWFERLLAELKFELWIGDPARIKAARVRKQKTDRQDAQLLLRLLVEGRFPQIWVPSPENRDLRQLIWHRHRLVQMRTRAMNQIQAAAMNEGVRRKKTLWSKTGRRQLEALPLAPWATRRRQDLLELVDRLNTTIGELTAAAEQEARKRPEVLRLMTHPGVGPITALAFVLVLGSPDRFGCGHQIGSYLGLIPCEDSSANRQRLGHITKQGSSLLRFLLAEAAQAAVRWDPDWRRRFVHLAMRRDRRIAKVAMARKLAVSLYWMWRKECDYQQTLQFGSHAGKPVYVHGVK

SEQ ID NO: 256961 - protein, 412 aa, unidentified
MRFFGLDVHRDFCEVAVAEDGELRSAGRVMTTPGALAEFAATLRESDQVAMEATGVAAAIARILEGHVARVVVCKAQDLPVAQARAKTDRLDAQQLARLLAQGYLREVWVPDEPTRVLRRRCSRRMSLVHARTRVKNEVHGVLMRTLQGRPPLTDIFGKSGRRWLAGLQLTVDESETLEASLRQIDFISQEIELLDGQIARQALDWPEIQRLMSIPGLDLYTAAAVMAAIGDIRRFSSPRQLVGYLGLDPKVRQSGSEPARHGHISKRGPAQARHALGQAAWVAMRSPGPMRAFAERIRARRGSQVAVTALARKLAVLSWHLLTREEDYAYARPTLLASKLRRLHLAAGAEPPATPSAKGRTREQERALAEQAESAYRRLLADWKAAGAGATPGRASQRPSKGKAARQATSP

SEQ ID NO: 256962 - protein, 421 aa, unidentified
MRGLRSNRVTAVKEGTLMVTVDVGMASNTGYCSTVDGRDTKPFKFDNTREGFDKLWSLVVVNKNRFKCNEVIVGYESTGPYAEPLLHYLRNKPVTIVQVNPMHTKRMKEVNDNSPLKTDDKDPRVIADILRIGHALSVVVPEGDAAYLRRLNNVRERHIRERTALLNQLQQLVFLIFPEFKTVIKNIKVKTARYILKTYATPEKIGCLNKDELGEAIRKQSRGKFGIGHADLLISLARDTIGIKEGVAGLAMDIRHILMQLETIDGFAAKIESEMEVTLIRIPCSTRILSIKGLGTVTVAGLIGEVGDFSKFRTRSEIMKLAGLDLYEISSGKRKGQRRISKRGRSLLRKILYYAAIQMIRKNGIMYDYYTRLTNRGMLRLKALVAVARKLLGIIHAIVRDNRDYVGAYHAPKRRMIKKAA

SEQ ID NO: 256963 - protein, 271 aa, unidentified
MLKFIVGADISKDKINFALRHLNGYLLEKDVKNTTSSLNKFIKEVKGLVNSVTKEKKSDFSLEFIMEHTGIYGNLLIECLSGQKVQMYVVSGLEIKNSTGITRGKNDIIDAQRIADYGVRFSDKLKPYTLSDETITQLKGLRTKRSQLVAMRAQLTQANDDNKKFMNKDVLKKITKINDPIVKELNVAIDKIETEILDLIKSNDEVYENYKIAKSVPGVGPVIAIAFICSTDNFTKFESAKALGSYCGVVPFDSSSGKYKVSRPKITTQVP

SEQ ID NO: 256964 - protein, 320 aa, unidentified
MRNTVGLDISKLTFDATAIVGNAEYSAKFDNDSKGLDQFSDRLKSLGCQNLHICMEATGNYYEEVADYFAQYYSVYVVNPLKISKYAESRFKRTKTGKQDAKLIAQYCRSAKESELVKRQKPTDEQYRLSRMTAAYAQIKSECAAMKNRHHAAKDEEAAKAYAQIIKAMNEQLEVLKEKIKEQTEKPNCKEGVKRLETIPAIGRMTAAVLFHHLTSSKFETSNKFAAFAGLSPQQKESGTSVRGKGKLTKFGNRKLRAVLFMPAMVAYRIRAFPDFIKRLEEKKKPKKVIIAALMRKLAVIAYHVHKKGGDYDPSRYKSA

SEQ ID NO: 256965 - protein, 315 aa, unidentified
MVDVPCFVGIDVAKAQLDIAVRPSGERWAVSNDAEGIVTLVERLQALHPTLIVLEATGGLERAATAALATAGLPVVVVNPRQARDFARATGQLAKTDALDARALAHFADVIRPTPRPLPDAQTQELRALLGRRQQLVGMRTAEQNRLTGTSGRLQTDIEAHITWLNERLATLDDDIETLLRASPLWRENDDLLQSAPGIGPVCARTLLLELPELGTLTRQQIAALVGVAPLNCDSGTLRGRRMIWGGRAHVRTMLYMGTLVATRYNPRIKAFYERLLAAGKVKKVALTACMHKFLTLLNAMLKHRTPWQAQEVQG

SEQ ID NO: 256966 - protein, 322 aa, unidentified
MHSFYLGIDVAKAKLDCAVRLPEGKIRHKVVDNTPAGFKDLRAWLAKQGADSVHVCMEATGIYWEAVAEFLAGCETITVSVINPAQLKAFGASQLVRTKTDKADAKLIAQFCCERRPAPWQAPTPAEQALRALVLRLDALQTMRTQEANRLEVARPAVQAGIARHLEWLDQEIDRLAKAIHDHIDADPTLHDKQRLLDSVPGLGERTIAVLLAYAAHLARFDNARQAVAFAGLDPRQHESGSSVKARPRMSKVGHNFLRKALYMPAMVTLYKTDWGKLFRERLAAAGKPPMLIIGAMMRKLLHVAYGVLKSGKAFDPALHGA

SEQ ID NO: 256967 - protein, 345 aa, unidentified
MKITTVGLDIAKRVFQLHGVDAAGKTVLRRNLQRSEVLVFFKALPPCLVGIEACGTAHYWARQIRELGHEVRLMPPSYVAPYVKRGKTDAADAAAICEAVTRPTMRFVPIKTAEQQAVLMLHRTRDLLVRQRTMLVNALRGHMAELGIIAPQGIARVADLMAVLFGEDTTNVPALAREALRGLAAELEALDRRMKEIEVAIVRWHKDNEASRRLATIPGVGPITASAIVATITDPFQFHSARHLAAWIGLVPRQHSSGGKQRQGGISKQGDRYLRRLLVLGATAVIRHSRSKSTAEAGWLKSLLERRPARLVSVAQANKTARIAWALLVRGEAYRMPAAVPGGAA

SEQ ID NO: 256968 - protein, 351 aa, unidentified
MKIVGCDFHPRWQQVAVFDTETGEVEELKLSNGDGQAERFYRELAVPALVGVEACGNSQWFLDLVAELGHEVWVGDAAQIRASYVRKQKTDRRDAGYILKLLMERRFPRLWQPSAGERDVRQLLIHRHRLVEIRTRVKNGLQHLALNRGVQKQRALWSGRGRVALEKLALDGWAGRRREDLLALLTTLDEQVGALDAAVLEAARDDARARLLMSQPGVGPITALAFAVTIGDVSRFASSGQVSSYLGLIPREHSSGGHQRLGSISKQGNRFMRQLLVEAVQTTCRLDEGFRKQYAARCHHKAKGVAKVAAARKLAVRLYWMLRQNIGYPEIAQIESSSRVPLAGKPCRRID

SEQ ID NO: 256969 - protein, 368 aa, unidentified
MNTVKFIGMDVHKKTITIAIADEGRQKQPRVYGTITNDLDALDKFCRKMVSTANQLHFVYEAGPCGYGIYRHLTEKGIDCMVAAPSLIPKKSGDRIKNDRRDAKMLARLHRADELTTVYVPDCQDEAMRDLNRAREDAVIVAKKAKQRLKAFLLRNGVAFAGSSQWSEAYFKWLADIAMPHPAQQVALQEYIDAVHESLNRVKRLTDQIRQMVPSWRLAPIVSALQAARGVSLVVAVTVLAELGDLSRFAKPSQLMAHLGLVPSEHSSGESIKRRGITKTGNSHVRKALVEAAWSYRMQARVSRLLLKRQQGLPDQVCKIAWKAQLRLCARYKRLVAKGKTKQKVVTAIARELSAFLWAIAKQVQPLA

SEQ ID NO: 256970 - protein, 354 aa, unidentified
MSKDIILTVDYHDRACVIRRLDRGADREQVFTEIPTTAASLGQVVDQARRDLGRRGRVVWIQESTTGWARVRELLADRVEFNLANVLQMPLPPKARRRKTDKVDTARMQREYLAGTLPLAYQPPAAWRQLRRLVAYREGLVSRRTAVRNWIDRFLAHETWFDRTGLWSPKGQKRLRTLLKGLPRTDRVILEQKIEELARLEGQLEVALKELLSAYHDSPDAQRLDAILGIDVVSAVSIVARIGPVARFANAEVLIAFAGLAPGIQESDRTRRDGRIGGGGTDRHLRHYLIEATVWARKLPRYLATYERIKKRRGSKVGRLVVARMLVRSIYKILKDGLAFDPGVSPRVTEAAAC

SEQ ID NO: 256971 - protein, 405 aa, unidentified
MFAGIDWGAQTHELCVLDHTGKRVDRLRVAHSAEGLQRLTARLARHGTPGQVPVAVERPDGRLVDYLLHAGHPVVAVKPNAIKAWREGEVLSGAKSDPGDARLIAEYLRVRYQQLRMLRPFGDQTRALRALVRSRTELVRQRVAAGNQLRATLEAFWPGAAGIFAELTSPIAVAFLSRFPTPATAAGLTESRLAEFLARRRYSGRRSPADLLSRLRSAPLGITSGLEMLARGQVVLAMVRILDALNRSIAALEGSIATHLDQHPDAPIFCSLPRSGCINAAQLLAEWGDCRDVYATPAAVAALAGATPVTKQSGKHRSVHFRWSCNKRLRTAMTTFADNSRHASPWAASVYANAIARGHDHPHALRVLSRAWIRVIWRCWQDQTPYDPARHGNASKLTQTATTAA

SEQ ID NO: 256972 - protein, 414 aa, unidentified
MLKIVYRICCGMDVHKSFVVACIASTNEKGVTTYKSKRFSTFTGDLRRCAAWLAENNCKDVCMESTGKYWIPVYNILEHTCTIVLAHPKYVKAIRGKKTDKRDAKWIADIFKHDLVSGSFIPPADIRQLRDLFRYRWKLTNFTTGEKNRAQNCLTVSNFKLDDVFSDVFGKAASAITARILEYPMERITDVSAFRTKGMKATNEQVLAAVDGEMCEEQAEKLRIIRSHMDSLALCKLNLESLILTSAEKYIPQLNLIMTAPGIQSFAAIGIISEIGVDMSVFPTSKHLCSWAGLTPQNNESAGKKKTTRISRAGAYIKPLLVQCALCAIRAKRFPEVRNRYLALKKRRGHKKAIIAIARMLLTAIYNMLKKNEPYNPELYRQADRPPAHREVSVKEAIFILQRQGYLVTAPPTV

SEQ ID NO: 256973 - protein, 364 aa, unidentified
MEVTTIGIDLAKNVFAVCGADSSGRVLMRRQLRRAQVLSFMRGLPRCVVGMEASGGAQYWARQLTALGHEVRLMSPALVIPYRKGNKTDRNDADAILEAVTRPSMRFAMVKSVAQQDLLALHRVRAQLVKSRTALCNQLRGLLRERGVVVRTGAAALKRSLPAALADDSSELSGEMRELLCEMSQWLRSLEQRIASCEARITRKFKHDERCQRLAAVPGVGPLTATALVAAVGNAQRFRNGRELSAYLGLVPRQHSSGGKTVLLGITKRGDRYLRTLLIHGARSALRQCEGDARSGWARRIGAERGPNVAAVALANKNARVLWALLARGDRYRSTNIAAHAVFRSGSPPAVKRARSAKLRVRKD

SEQ ID NO: 256974 - protein, 315 aa, unidentified
MANTVAQSVGVDISKDTLDVHLYPAGAARRFDNTRTGRCGLVAWLAQFTIGRVVFEPTGPYHHAFERQLAQAGLPLAKVNPRQARRFAQAVGQNAKTDAVDAAMLARLAALLEPPVRPVVSQALDDIKELIGARRALVKDRTAAHQRNGVHRSALLKRQAAQRLAQIERQLAAIDTALHAMLASDPLLKARFDILVSIPGLGATTALIMVAEMPELGTLDHRCAASLAGLAPLARDSGRHRGKRRIQGGRAALRQALYMPALVAVRFNAELKAKYQALRVAGKPPKLALTVIMRKLLVLANALVRDGRNWTAKLA

SEQ ID NO: 256975 - protein, 430 aa, unidentified
MNHMTDTNTTHAPEQFSAFIAVDWADEKHAFCLQAAGQKQKESGTLQQKPELIGAWVAALRERFGGRAVAVALEQSRGALIHALLGYDFLVVYPIHPTTVAKFREAFKFSGVKSDPLDTDQILEILTKHLDLLKPLRPDTQETRLLARLVEDRRKAVELRASHIQALKASLKEYFPQALEILSGNVTSRLAYAFLKKWPTFENFQQAQPSTVKRFFYGHNVRSPQRIEQVLQVALKSRALTTDTPVVESGVRLSQMHGEVIHTLNPLIEQYDRKIESAFNDHPEAKLFTGVPGAGPALAPRLLAAFGTDRSRYDAADNVQSFSGVGPVTKSSGKTRVVYARSACPKFLRQTFHEFARLSVAQCQWARNYVDYYTGQGKKYQTVIRALAFKWIRILFRCWKDRTPYDDQKHMKRLKQRGSIFATLHLQKSS

SEQ ID NO: 256976 - protein, 404 aa, unidentified
MIFAGVDWAEAHHDVCVMGEDGRVLEQRRVSHSVAGIGELHALVAAHAEDGEPVAAGIEVDRGLVVTALLAAGYQVYAVNPMASSRYRDRHSVSGAKSDRGDAKVLADLVRTDRHNHRQLAGDSDLAEAVKVLARSHQSAIWSRQRQVNALRSALREYYPAALAAFGTDLAASDAVAVLSLAPTPDAGRALSRSKIASALRRAGRQRNTGQRASEIQAALRAGYLQAPPAVTRAHGAAARSAIRLISAHTAEIAELEEALSEDFEQHPDAKIARSLPGLGTVLGARVLGEFGDDRTRFTSPKSRKNYAGTSPITRASGRSHIVLARHARNRRLADALDQWAFCSLTQSPGARHYYDQLRARGKTHRQALRQLANRWVGILHTCLQHGQLYDEAAAWQHLKAAAA

SEQ ID NO: 256977 - protein, 387 aa, unidentified
MNVKARRTKKQVNVENQAINLLSKEELNKKIEVVEKELRSYTWRKLEANGKFAKNDKLSFITDDMLIVGCDIGSENHYIRAIDVRGRELSRGAFEFSNTSEGFENAKAWVLALAAKHDKKQIVLGLEPTGHYWFALAAWMISNGISVVQVNPYAVKQSKEIENNSQLKDDRKDPKLIANLVKDGNYGMPYLPEKVYADMRRLSMFRDQLTEDRIRNINRLHRELKIYFPEYMDAFGKIDGAFTLEILKVSAIPSDITALGAEGMKNIWHNAKLRGRGYSRANEIVSYAEKSVGLTDGTDAGREAVKWYAEQILRLDEQLAEIESALHEKCREIPYAENILAINGVGENILAGILAEMGDISRFDDVKEIQKLSGMGLVACSSGKHKG

SEQ ID NO: 256978 - protein, 352 aa, unidentified
MSEHSKSAVATVVGIDLAKRSFHVYGADARGQPVFSKKLTRARLGPFIANLPPCTVAMEACGSAHHWARTFRTYGHEVRLMAPQFVKPFVKSNKNDAADAEAIGEAAQRPTMRFVAVKTVEQQDIQAIHRMRSLVVERRTAQVNQIRGLLLEYGIEIAQGRAAAMRRLPEILEDADNGLSARFRAELRELVEELRHLDTRVTHYDAQIDEIARNDEQVQRLMSIPGVGAKGATALVAAVGEDPGLFRNGRGLAAWIGLVPRQHATGGRERLLGISKRGDVYLRQLLIHGARAVLRWVDRKEDATSRWATALKARRHTNVACVAMANKIARVAYAVMTTGKPYDPNIGALAQG

SEQ ID NO: 256979 - protein, 418 aa, unidentified
MHETQSWFAGVDWASQKHDVWLTDASGKRLGKRTFAHSGVGLAQMCDWLIATSGGKPEDIHVAIEVPHGAVVETLLDRGFKVYSINPRQLDRFRDRFSPAGAKDDSRDAETLSSSLRTDRRAFHQVSLAGAAIIQLREWSRMADDLRADQIRHANRLREQLQRYYPQMLQFDSDLAEEWVLKLWEAAPTPAKAARLRQAEVEKLLKRHRIRRIDAAKVLAILKEQALIVAPGVTEAAVAHIRVLIESIRLFTQQLKEAHRQLDKLCKLLAEPIASENEQTGPEPEQTLGAILQSLPGAGRIVISTLLAEAFETLQRADYPILRKLCGVAPVTRRSGKSRAVTRRLACNPRLRNAIHYLADAARRCDEKSKAKYLALKARGCSHARALRTIGDRLLYVACAMLKNRTLFDPGLESQKCA

SEQ ID NO: 256980 - protein, 344 aa, unidentified
MTSYVGLDVGLRSTSVCVVDHAGMVLMESNVPSEVEDIARAIRSTGVVIEAVALETGNLTPWLTAALRAEGFRVVVLEARQVKTTLSSLRNKTDRNDARGIAQILRTGWYREVHVKSLESQRLKTLLAARKALSRRHIDLENEIRGLMKVYGRKLTERVRHGKFEDAVRNAIAGDDLLVEALQPLLEARMHLYRAFLELDRRVKAVALADPICQLLMSAPGVGYVAALTFKAAVDDPARFRRSKTVAAHFGLTPRRYQSGERDNPGRISKAGDVEVRSALFLAANVIMNGRGKPSALRSFGARLSRAKGRKRAIVAVARKLAVVLHAMWTDGTLYGSGEREALA

SEQ ID NO: 256981 - protein, 346 aa, unidentified
MSYSTTVGVDLAKNVIQVSVVSPRGKERLNRSLTRRKFAEFLAKQKPALVAFEACATSHYWARTAQRHGHTARIIPAKAVAPFRQGHKTDSNDALAVAEAARRPNIKDAPMKTIEQQGLQAIQRSRDLLVQESTALSNHMRGLLMEFGVVIPQGFAALRRMLPQILEDGDNEVPDMYRPTLHRLYHRFLELREDIQSMNVEVKELVKRHPDCKRLTALEGVGPISAVLLYASLGTGEAFSGSREFAAYLGLTPRQFSSGGKTNIVGLSKKIGNCRLRSVLIQGARAYVHKLKEPKSSKDRWLLELIERAGHGKAAVALANKNVRTAWAMLTQGTEYQRRPQLKVAA

SEQ ID NO: 256982 - protein, 318 aa, unidentified
MENFVGIDISKDTLDVHVDPEREILHVAYDCQGIAMVCQRLKAVSPALIVMEATGGLEVRLACELGALALNVAVINPRQARDFAKATGQLAKTDRVDAAILAAFARAIRPQARPLKDADTRALDDLVTRRRQLVAMRVQETLRLGTAASKPLQKSLNAHIAWLDKRIDEIDTDLTQRLRQSDLWRTKDDLLRGIPGVGAITSLTLLAKCPELGTLNRREIAALVGVAPLANDSGKHRGKRFVWGGRADIRAVLYMAAVSAIRCNPAIQTFAKRLKDTGKPAKVVIVACMRKLLTILNAMLRDQTSWNAARHLIGAVSA

SEQ ID NO: 256983 - protein, 372 aa, unidentified
MESIVYVGMDVHKDTYSVCCYKSSEDRNYYEKKMKATSSNIIKYLKNVEKEFGEGTVFVCGYEAGPTGFGLYRDLQKAGYICVVMAPTSLKKAPGNRVKNDTVDARYLAKTLFTKDYSEVHVTTKHEEAIKEYCRMRLSIKKELKTAKQLLQAFLLRQDKKYSDGTTYWTWNHRMWLKTVTFEDGYLQEAFNEYMITINTLEDRLKNIENRIEEIAKDSTIKEKVEKLVCFCGIETLTAVTIAAEIGDFNRFKKAYHFANYIGFGWAEDSSGKKEKVLGMSKCGNINIRRLLTESAKSIKKTNSRGKKSKRLIDRQKGKDPQVIAYADRCRYRLKNKMIHLECRGKNSNVSSTAAARELACFIWGMMTDNIA

SEQ ID NO: 256984 - protein, 330 aa, unidentified
MSVFVGVDIAAKTFDLVNRKGGKASKVESFSQSAQGHAKAIKRLQNLKPTLITMEATGIYYFDLAVALVQAGLPVAVINPKSFHHFAKLKLAGSKTDGVDAALLAEYGERMEPSLWTPPDEVRLALRDIGRQINRLTGTRTQAKNRLHALQAKNSTRSLLVEDEQEGIAYLDRRIERLSQAALALIAECETLSRYLTHMCAAKGVGKATALIVLAELCVLPSSLKAPQVSRFAGLDVRLTQSGSSVNRPARLSKAGNAYLRAALYMPAMSAVQHDPRVKAFYDALVSRGKKKIQALCAVMRKYLTGLWACIQTETAFDSAMLFSEEHLKA

SEQ ID NO: 256985 - protein, 359 aa, unidentified
MKTTTTRSTAAGPILAIDLGRYKSVACSYDPATRSAAFRTLDTGRADFDRLFARHPDALVVVEACANAGWAHDLARARGLAVQVANTNGAAWRFQHLKRKTDRDDALRLAELEALGQLPTVALPGPAARQRRGLIAHRQALVGRRVAAQNRIRARFAGQGLPSPRGHRAWTATGLAGLDLQAKPPAAGSPDELWRGMLHLALADYRHLLGQIAAAEAALDRLAADDPATRLLATIPGVGPRTAEAVAAHLHDPRRFASGKEVSASAGLVPRQYQSGESDRRGRITRRGPAVLRKLLVECAWAMLRYNPWARATYARLTRGGVTRKKPAVVALARRLLVRCWAMLRDGAPWRSDPVPAAP

SEQ ID NO: 256986 - protein, 311 aa, unidentified
MKKEIVFDQVIDRGCGIDVHKSVIVATIRGIGIEEATKSYSGFTESIEEMRSWLKEKKITHVAMESTGIYWKPIFNILEEDFDIILVNARHIKNVPGRKTDKKDSKWIAKLLLSGLLKASFIPPKPIRELRDLTRYRRKIVGQVAAEKNRIQKILEDANIKLSSVVSNMSGATATKIINAMIDGEENIEELLKFRHGKMQSSKEDLAASLKGKLTEHHKFMLTTIKESIKEKESLKEKLDIRIEEHLKANELILDSQLLQTIPGVGKDAASGILAEVGNKMDQFPNEQHLASWAGISPGSNESAGKKKVAG

SEQ ID NO: 256987 - protein, 387 aa, unidentified
MPQPNDLSRSPAALDHDNTLIAVIEMSQSSWLVAGIVPGIERHPAKKLEPDEAALLGLLHRWRDEAVKAGRTIRRIAVAFEAGRDGFWLARWLRTHGIEAHVIHSSSIAVSREHRRAKTDRLDTALLKRAFLGWLRGEPDHCSMAAIPTIEAEDAKRPSRERESLVGERTRIGNRMKSTFARLGIRGFKPTLRKASERLERLRTPEDAPLPPNTLAELRRDMARLRFINDQIREIEAGRLERLAQRAEEGAHPMVRLLARVIGVGIETADMLVQEVLSRNLRDRRAVARYGGLTGSPDESGARRREKGLARAGNARVRRGMIQLAWRFLMFQKDSALAQWYRARTADARGATRKTMIIALARKLLVALWQLVTTGEVPQGVVLRPVA

SEQ ID NO: 256988 - protein, 410 aa, unidentified
MNPLYVGIDVSSKNNVAYLMKPDGTKHSSFSVQNNRGGAKLMSERIVSALTAMQLSDVMIGLEATSIYGDCLVYALREDGRLGRFQRKIHVLNPKQVRKFKDAYSDLPKNDFVDAFVIADHLRFGRIASEVYMDDYRYKALQTLTRARFFSVQNLTREKQRFANYLFLKCSGLAQEKVLSQNTSATTIALMERFETVDALAYADIKELTDFIVKSGRGRFANPEATAKAVQTAAKGSYRLPKTVNDSVNQAMSVSIAAMRALESQIKTLDKAIEQQFEIIPNTLTSVPGIGKVYSAGIIAEIGDIHRFQSQASLAKFAGLVWSQHQSGDYEAENTHLIKSGNRFLRYYLLEAANSMRRCDSEFRRYYDLKFKEVNKFQHKRALALTARKLVRLVFRLLKDNRLYIPPEEY

SEQ ID NO: 256989 - protein, 335 aa, unidentified
MTNDQKGIAILINKLDAYINNKREQEKERYLIKAAIESTGNMWITMYEALEQQKGVEISLANPLKTKAIAEAKIKSDKIDSAVLADLARSDLVSKCYVPDKKIREMRSLVRHRIDLAQRNTQLKNKIHNILDKYMLRYDGVLFSGKGLKWLESQNIGTIDRQLVDACLKEMTTINELIENVEKQMASIAINNKKVDLLLGFTGIDYYGALLLINEIGDITRFSNPKKLISWAGLAPSLHQSGNIRWTGNITRQGNSRIRWYLVEAAQKAARYDPKLIPFYQRIAKKKGNQKAVIAVARKMLVSIYHVLTRNELYDGHRQDVRTRKIKKMERILKE

SEQ ID NO: 256990 - protein, 341 aa, unidentified
MEQVTTIGLDIAKYVFQAHGADAAGHTLFRKRLMRRKLLEFFAAQAPCVVAMEACAGSHYWAREIGKLGHAVRLIPPAYVKPFVKRQKNDVADAEAICEAAQRPNMRFVPVKSEEQQANGVVFRARDLLVHQRTQCINALRGHLSEYGYVFPQGITQVAALIAHVEDPNATLPGSARTILKLLIDTFTTLEAQIHQLDGEINRRSKEDPIARRLMTIPGVGPITATAITALVPAAEGFRVGRDFAAWLGLTPLQKSTGGKQKLGAVSKRGERTIRRLLIIGACAVIQQASRRGAPAGSWLAQMLLRKPKMLVIVALANKMARVVWALLVKGGVYRAPAAAV

SEQ ID NO: 256991 - protein, 418 aa, unidentified
MDTVYPHCAGLDVHKDTVVACVRHHGGGRKARQEVRTFATHTRALEELADWLTAEGVTHAAMESTGVYWKPVFNVLEGRVTVLLVNPQHIKQVPGRKTDVGDCGWIAQLLQHGLLTASFIPPARQRELRDLTRQRSQLGAEQTAVANRIQKILEDANVKFGSVVTDILGVSGRAILAAIVAGQADPGALAELARGRLRGKIPQLRQALRGRVTDHHRFLLRLLLEHLDHLDRLVAQLDARIELLTAPDAEALTLLTTIPGIKRHTAEVLLAEVGPNVDPFPTAGQFASWAGMCPGNNESAGKRRTGRTRRANRWLRQAVVQAGWAASHSKTTYLGARYRRVARRRGAKRALMAVGHTLLVIVYQVLRRREAYREIGANYYDRLQPERLARHLVHRLEQLGHTVTLEARPTEKPQPQAG

SEQ ID NO: 256992 - protein, 356 aa, unidentified
MGKSINNPSSVTRIGVDLAKNMFRVHGVDAQGAVVIARSVKRSGLLKFFASLPRCLVVMEACSSAHHWARALIDLGFEVKLIPAAYVKPYVQRNKNDAIDTDAILEASRRPGMRFVPVRSVENQAQLMRHRVRELLMGSHTRMLNALRGHLAEIGIVAPQGAENAYALMRQLADGFDENGEVIPDCVRAALAPLVRQIEGIDAEIAAVDKELMALAKADDTARRLMTIPSIGPVTATAIVATVQDIGAFASGRSFSGFLGITSREDTTGGKVRLGRITKMGDRYLRKLLVVGACSVLRHLKGHKDALRLWAGHLLETKTVKHKFKLTAVALANKVARIVYVLMTRGGEYNDAPVVA

SEQ ID NO: 256993 - protein, 343 aa, unidentified
MKIIRVGVDLAKNVFQVHGVDCNEKPVWQRKLNRAEWLKVLLEKIEPGCEIGMEACGSAHHWARKLQAKGFMVKLIAPQFVKPYVKSNKNDANDAEAICEAMSRPNMRFVPVKTVEQQDIQAVHRVRAGLMEQRKAKANQVRGLASEYGIIAPKEWLHLRRAIPCWLEDAENGLSSRFRKLLDGLWHDLLILDDRVAELDREIALIAASDPVARRLQQLRGVGPMISTALLATVGDANQFANGRQMAASLGLTPKQMSSGGKDRMLGISKRGDSYVRSLLVHGARAMIRTAKAKDDRLSQWVTRLATSRHPNIAAVAMANKTARIAWAMMKNGTDYQPELAAG

SEQ ID NO: 256994 - protein, 312 aa, unidentified
MENTIGIDVSKAKLDVHLLSEKSDMQFGNSVAGIKECVEVCLRVKPELIVMEATGGYEYSGAAKLCAQGLPVAVVNPRRIRDFAKAIVMTAKTDKIDARFIALFAANCQPMPQNRIDDNCRKLKALTSRRQQLLDMRTAENNRIEHAIDKEICRSLEVVIRTIGREIEKVDRQIGDHIDNMPQLKEKAERLRSVPGIGGTTAAMLVSELPELGTFNRRQIAALVGVAPINRDSGTFRGKRMTGGGRRNVRSRLFMPTFVAIRYNPVLKKYYQRLVNEKGKTKMVAIIAAMRKLLCIMNALLKNNQEWQLKTL

SEQ ID NO: 256995 - protein, 374 aa, unidentified
MKDLLEISCGLDIHKEKIVACILTGPLGKPTHSEIREFTTLIPDMLALRDWIISENCHHIAMESTGIYWIPIYEILEDAFSGDITLLVVNARHMKNVPGKKTDMRDSEWISTLLRAGLLNASFIPEKRIREFRDLNRYRKSIIRDITSQKNRVEKFLQSSGFRLSSFISDIFGASGRNIILHLMEHGQIDKISLDSYLKTKTRKRIDEILMSVNGTLSEHQKSFLKILMCHYDSMKEHLIEIETHLQEDMLPFALQIEQLNTIYGISTTASCAIIAEIGTDMKPFKTAEHICSWAGLCPGNNESAGKRKSTSITKGNPYIKSMLCEIAWVIAGKRNTYLSAWYWRIKQKKGARKAIVALARKLLVIIYLSLIHI

SEQ ID NO: 256996 - protein, 345 aa, unidentified
MDVMIGIDPHKSSHTAVAIDGHGEVLDQLRIAADRRQLALLLAFADKWPRRRFAVEGANGLGRLLAQQLLEAGEAVIDVPPTLSARVRLLSGGSARKTDAHDARSTAIAALHGARLRMVAAEDLSVVLRLLSDRRDQLSRERNRIVCRLHDQFRDLKEGGAKLNLTADQAARLLKGIRPAGLVAIQRRQLARELLADLRRVDKQLADIDQRIIEAVTAAKTTLTHIVGVGSVLAATIIGHAGDITRFADRGHFASYAGVAPIEASSGDVRRHRLSRRGNRRLNAAIHMVALGQLSHPSSGRDYYDRKLAEGKTRREALRALKRQFANVIWRHLVADADAVDLAAA

SEQ ID NO: 256997 - protein, 416 aa, unidentified
MELQRNKVCGIDVHKRFLIATILCRDGKKDTQRFSVTLEDLLKFRDWVIENGCEQVAIESTGIYWHPVHSVLEGKIDLIVANSYKIKHTPGRKTDVSDSEWIAELCLNGMIEPSRIFPKDDRELRRLTRAREGYVKQMTQEKNKIHQSLDSACIKLASVISDIFGKSGMYLLNCVLEGREIDDIIDGIPSGRLKKKADQIKESIKSRLDVSQVILIRGSLSLMKSIQERIDELDGEISARIQYRKNDLAIAMSIPGTGFVSATAILAEIGNYTDFKKPEQLAAWCGLVPSLYQSAEKTILGGITKQGSKHIRRMLIQVAYAISRTKDSKLKKFFLRIQAKKGSKVAAVALARKVLCILHHLLINQEMYLEDRDKKNMHHKPLIPPSPIEMSIQEMIDYIVRAGYVVTKSDSIGGFG

SEQ ID NO: 256998 - protein, 387 aa, unidentified
MAQQLDDLSRSPTPLDQGSTIITVIEMSQATWLVAGIVPGIERHPLKKIEPNEVELLCLLMRWRAEAMKKGRTITRIVVAFEAGRDGFWLARWLRVRDIESYVIHPTSVAVSREHRRAKTDRLDTGLLKRVFIGWLRGEPDHCHMAAIPTLAEEDAKRPNREREGLVRERTRLVNRMKSCLVRFGVRTFKPTLRNAPDRLATLHTPEGVPLPPNTLLELRRDMARLRFVMDQIKAVEAARAQGLKQAPQEKTHAMVNLLARILGIGIDTADMLVHEVLARNLRDRRAVARYAGLTGSPDESGSRRREKGLAKAGSARVRRGMIQLAWRFLLFQKESALAQWYRARTADARGGTRKTMIVALARKLLIALWRMLTTGEVPAGVVLRAA

SEQ ID NO: 256999 - protein, 423 aa, unidentified
MSKHIYQTTAVKAVNWERLQAQMAAQPRVVFGVDVAKEVFVGTLMKADRGVIATLKWCHPEETRELVNQLITAVGVARLEVVLEPSGTYGDALRGCLQAAGVAVFRMSPKRTHDAQELYDGVPSLHDAKAAYLVGRLHLDGASQRWQEPTAERRELSAMVAEVELHQGTYQRQLNRLEAQLSRYWPEVLRLLAVDSVALLSVLRAYGSPQAVARQAAAAGALLRDTGRTGLAEAKVVQVVASAATTVGVPCLEPERRYLRALAGEALHSYRGLQQTRHALEQRVAADPALAPMAALVGRVTSAVLIASLGSPLEFPSAASYLKGLGLNLKEHSSGKHQGQLTITKRGPARARQYLYLAVLRWLQREPLIGAWYQAKLQRDGGRKGKALVALMRKLAKALWHGARGQAFDAAKLIDRQALTGAH

SEQ ID NO: 257000 - protein, 321 aa, unidentified
MTLSTSQPAALFVGIDVAKGKLDLARSDSSQILTVPNDPAGIGQIIDLLRPLNPTTLVIEATGGLERALLEASLPVALVNPGHVRHFAKGMGTLAKTDAIDARVLVEFARRASPRLAEKRSKIQAELDALVTCRRQLTHVRTEQGNRRLTTSSPSARKAIDAVLKTVNRQIDDLDRQIKKLIDSDDDFNSIDKLLRSVPGVGPVLSSTLLAELNELGETDRRCIGALVGVAPFNADSGTRTGKRAIRGGRTALRSVLYMATIAAMRFNPVIARFAQRLQQAGKTNKVTIVACMRKLLALLNAMVRDHLMWHQLSVVKNLDN

SEQ ID NO: 257001 - protein, 309 aa, unidentified
MDTIVVGIDVSKDRLDVHVHPDGTALSFSRDASGIEALIGKLAGLALQLVAVEATGGFETVVVASLAAASLPVVVVNPARVRAFATALGKRAKTDPIDAQVIALFAAGTKPQVRPLPDAATQALADLVARRRQIIHMIVAEGQREKRASPRARKSIARMLKTLRAELSVINTEIDESVRGSPVWCAKEDLLDSVPGVSSVTARSLLADLPELGSLDRHQIAALAGLAPFTRQSGKWRGKSFIGGGRASVRAVLFMAAMTAMRWNPTLRAFHQRLRAAGKPKMVALIAVARKLLTILNAILRDNKPWQIA

SEQ ID NO: 257002 - protein, 343 aa, unidentified
MQAITTIGLDIAKSVFQVHCIDAAGSVVLRRQLKRRYVLAFFQKLSPCLIGIEACASSHHWSRELQALGHTVRLMPPAYVKPYVKRQKNDAADAEAICEAVTRANMRFVATKTVEQQSCLMLHRTRHLFIRQQTSVINAIRAHLAEFGIVAPVGRRGVEQLLEIAADTNNARLPEIARTCIAALAAQLRALKVQILEFDRRITAWHRSNEASKRLDQIPGVGPALATALVATVADPKAFRSGRDFSAWIGLVPKQHSSGGKDKLGSISKQGDRYLRSLFTTGALAVIRYAKIHGTKHRPWLASLLTRRPTKVAAIALANKLARMAWAMLAKGERYKEPVALAA

SEQ ID NO: 257003 - protein, 442 aa, unidentified
MSALAVLDPRAAFVDVGSEKMHVSVGGGPPQVFGTVTSQLEALRDFLIEQQVRSVAMEATGVYWLPLYGVLEAAGLDVRMVDGRQTRHLPGRKSDMQDCQWGSTLHAHGLLRAGFVPPAHIRRLQDYLRLRGEHIAAAAGHVQHMQKALERMNIKLHDVISSLTGASGLAVVRAILAGERDPAALLELCDVRIRKAKAYRVVEALRGDWADEHLFALGQAVASWDHYQAQIVDCDRRIAKVLAGMPGGEGPAAGAEQPAKRRTQPGVNAPKIDNLRELLERMCDGKDATTLPAHSEYTVLQLVGEVGTDLTRWPTEKHFASWTGLAPGSAQSGKRRAAVKRRRNRAGQLFCVMARALARSKYIALGGYYRRMAARRGGLVANKALAHKLAILFWRVMVKGMDYVEKGLAHYEAQVLETRQRLLRKLAKQLGQQLVPIQANPP

SEQ ID NO: 257004 - protein, 411 aa, unidentified
MHTRQNYLYVGVDLHKEHHTAVMINCWQEKLGEIQFDNKPSAFSKFLLEVETYVSAGITVVFGLEDVGGYGRALAKYLVDHEQVVKEVNPALSFLERKSHVTTQKSDSWDAECVARILINKLNQLPDAKPNDLFWSIQQLVSRRNALVKAQSALKNQLHIQLNHHYPSYKKFFSELDGKTALAFWQQYPSPFCLEGANIKQLTAFLLDVSNNTCSVKKASDILKLVKEDGQTMKEYQETRDFLVRSIVRDIEFKKKEMKYIERELKKLVNLLDYQLETMPGIELVTASALIAEIGDVRRFPNANKLARFAGIAPVYFGSGGKGKTHKSKQGNRALHALFYNLAVQQVQVAKGSKMQRNPVFHAYYQKKLKEGKTKGQALVCIMRRLVNIVYGMMKYKTAYELPIVQEKEVV

SEQ ID NO: 257005 - protein, 344 aa, unidentified
MSEVVTIGLDIAKSVFQVHGVGADGKVLIRRRLTRARMLPFFATLPRCLVGIEACNNSHYWARELTALGHDVKLMPAQYVKPYVKRGKNDAADAEAICEAVTRPTMRFVAVKSPEQQSLMMLHRVRLMLNRQRTQISNAIRAHISEFGVVAPVGRLGVERLLEVVADAGDDRVPEDARLCLQMLAAQLDVVKQQILENDRRVLASARRTELGRRLMEIPGVGPLLASAFVASVADPTVFKTGRDLAAWIGLVPKQNSSGGKERLGSITRAGNRYLRQMLVVGAMAVIRHAERHGTKRPWLVQLLARRPAKVAAVALANKNARMVWALMTSGERYRQPQPQPMPV

SEQ ID NO: 257006 - protein, 347 aa, unidentified
MTIVEAARGVTGGVDTHLDVHVAAALDPLGGLLGTERFETSSFGYKALLAWLESFGNVTKIGIEGTGSYGSGLTRYLRRVGVEVIEVDRPNREERRRSGKSDPLDAVEAARAALSGRASGRPKSRDGAVEAIRVLVVAKRSARQARAKALIQMRHLGYTAPEQLRCRLKGLSVPALVAEGTKLRPTRSPDPVTAATKASLSSLAHRIETLESELAELDERIAVLLAATVPELLDVFGVGPDTAAALVMAAGDNPDRLHSEGAWAHLCGVAPVPAGSGKTNGRVKAHDGGDRQANSALWRIVMVRIAHDPETQLYFERRVKEGKTKQEVIRILKRYVAREVYRYLPRG

SEQ ID NO: 257007 - protein, 385 aa, unidentified
MRDKTFVPREYDVFAGLDVDKKSIAATFSSHQGFIRSLSMPYKVEDLLNHVHNHFADQKVAFAYEAGPTGYGLYDGLTAQGYRCLIAAPSMIPRAPGQRVKTNRLDSKALSESLRGGQLKSIHVPSPLYRQLRHLTQLRDTMMSEAVGMKQRIKSLLLFEGIAFPPAPAGSQWSFIVKAKLRKLPCSHTVRFKLDQLLDSLEFAEKQVFKSTKEIRRFCQTDPELSQCIKYMMTVSGIGWIVASQLLARIGDWRELENIRQLGGFLGLVPMEHSTGDKTDRGPITHTGDGRLRSKLIQAAWSAIRKDGELREFFRSVCQRHPRKVASRVAIVAVARKLSVRISVVLMQQRPYAVREKVHSAPLTQEETSPQGTTRRQAEPGVETP

SEQ ID NO: 257008 - protein, 351 aa, unidentified
MVIIGIDAHKANHTLVAIDNVGRKVGSKIVPATNAGHLQAIRWAHNRFGSELQWAVEDCRGVTRRLEEDLTMAGYSVTRVPAKLMARTRSSARTTGKSDPIDALAVGHAALRDPRLPTATRDEAARELKLLVDRREHLIEQRTATNNRLLWRLHELDPSYHLAAGDLAHRNHRCATGTFLDRHRGLVADLARDELADITRLSEDAQRLERRITAYIRPRAPHLLSIPGCGDLSAAKLVAETAGVRRFASEAAFARFAGVTPEPAWSGASAGRMRYVKGGNRRINAALHRIAITQLRDGAGSQYYQKRVADGDSPLAALRCLKRRIARRVFSSMKADARTVGDSDCGTTLSA

SEQ ID NO: 257009 - protein, 417 aa, unidentified
MDTLHFRAAGLDIHKKFVMACIRLTDPTTGQARESVKRFGTMTDDLQSLLKWLQEAGVTHVAMESTGVLWKPLWNVLDDQRLELVLANPQELRQVPGRKTDVRDCQWIAHLLSCGLITSSFVPSRAQRELRDLTRYRACLEDERVRTVNRIHKVLEDANIKLGVVATDILGKSGRDMLSALAEGETDAVRIAEFARGKLKAKIPDLRRALTGCMKDHHRFLLKHLLKDLDHTETQIAELDARVQELRRPFVDEATLERLDEIPGVNVRTIENVMAEIGCDMAQFPTAGHLSSWAGICPGNESSAGHVKRRAVTRGNRWLRRALVEAARAAARKKGSYFNAQYHRIAARRGANRAAMAVAHSLIVVIYHLLKNPDQPYQDLGTAWFDTLDPQRLTRHLVKRLEQLGFQVQLTPKDTAA

SEQ ID NO: 257010 - protein, 331 aa, unidentified
MSVHVGLDVGSRTTAMGWRDKGRAAGSWDIAQTPKGRKAAVKKLKALKPLSVVMEATGMYYLDLALELNAAGLPISVINPKSSRNFAKLVLQHNKTDAINAQLLAEYGERMTPRLWMPPSPAQLELRAIGRHINRLTGHCTRAKNELHALRATETTSAMMIEDEEEAIAMFGRRIERFRQAGLEIIANCPALQDQFNHMAAAPGMGDVSTFAVLAELTTLPETLKSSQVSRYAGLDVRLTQSGTSIDKPGRLSKGGNAYLRSAMFMPAMSAIRCDPYVKAFYEGLVGRGKRKMQAICAVMRKYLTGLWACMRSGEDFDTAKLFSDKHLLKA

SEQ ID NO: 257011 - protein, 396 aa, unidentified
MRNDVTIYVGIDFSKEKFNACLLMEQGVMGESEFPNSKTGYLKLTKWVKNTSELGRSFDSSLVLFCGEHTGTCSIGLCEYLYAKGMKIWLESALKIKYGSGLKRIKDDKADAEMIAYYAKRFYEPGSCALFEPDSADLKTLRTLYQFRNRVVCDRVAIGNRISSGAFDCSTLVRNRMVKHHKEAQKDEKDIEKEMVKLMETSEELASNYQILISFKGIGPITAAALIIYTSNFKKFDNPRKFACYCGIAPFGKQSGTSINTKPHVSLFAHIGIKAAIVQACKSAMQHNAVIKAYAQRLYAKGKHEGIVMNNVKNKVMHIIFKMIQTQTLWEQEYQQKHMKECKAIPGKNGIGATEAAPIINATLKTSSSVVECTFLEEHSFQKNSKKTSSFSCVET

SEQ ID NO: 257012 - protein, 364 aa, unidentified
MNKCHSNTELSSLEETRCQFNGGTGAIKLGIDVHQDFYVVVEQAGGSNPKPPQRFPKAAFLHWAAKLKSQATEVYAVYEACGFGFSLQRKLSALSIKCYVVCPQKLDEQNRRVKTDGLDAKALCLKLDRFVQGNRDALAIVRVPSEEEEQARAIHRQREQLVKARKQLEAQGRSLMVNHGLEPVPNWWKPRTFTALPAPQWMKELLANSQPILVGLQQKIAALTVQLQSAASPEQPRGLGKMTSVVIDREIGDWNRFSNRRQIASYTGLCPGEYSSGNTRLQSCVTKHGNPRLRAALVELAWRLVRFQPNYHPLRKWRQILAKGALATGAARKKAIVAVARQLAVDLWRIKTGRLRSEELGLIN

SEQ ID NO: 257013 - protein, 359 aa, unidentified
MQKISTMQTSEENILNGQLTIGLDLGDRFSCYCILDEVGKILREQKVPTTPEEMKQTFGRMVRTRIAMETGSRLLTGLGHEVIVAHAQRVRLIVKSRRKDDRLDARTLARLARIDPELLSPVQHRSAEAQIHLTEIRARAGLVSARTALVNAARGLVKSYGERLRKCGTQQFRQEITSGLSTELREALEPLVREVESLNERIKEYDRRIERMAKETYPEVELLKQVKGVGDLIALAYVLTIEDPHRFRKSRDAGCFVGLQPGRRDSGESAPQMHISKEGDEYLRKLLVQGAHYILGPFGEDSDLRRWGKKLAERGGKNAKKRAVVAVARKLAVLLHRLWVSGEAYEPLRNSQKAMSTAA

SEQ ID NO: 257014 - protein, 349 aa, unidentified
MSILGGLDVHRAQITFDWVDRDSGEARRGRITPATRAGVGAWLGELPGAGGGFAVEGCTGWRFVVEELQAAGLVAHLAEPAETSSLRGPKRRAKTDRTDARLLRELLEQDRLPSSWIPPAWILDLRTTVRLRKTLVDQRTAWQQRIHAALFHHGLPRPTQELLSRASRAWLERVTLPPASRQALAVALRQIDGLDAELDPIDQWLRALARRQPGCRALMSHHYGIGAITAPTILAELGDARRFVGGDQVVRYTGLDITVYASDGKRSPGHLSRQGPEVLRWALFEAAKAAARPSSPDYAYYQQVKARQGGNRATLAVARKLARRVRHTLASLGDAALAPVEDLAVAEAA

SEQ ID NO: 257015 - protein, 355 aa, unidentified
MTSAKYIGMDVHKESISIAVLNSVGKVVMECVIETKASVILQFLNGLSGDLNVTFEEGTAAAWLYHLLKPHVTRLVVCNPRRNALLKVGNKSDRIDAQKLAELLRGNQLQPVYHGEHGLRTLKELVRSYLTVSKDLARVMTRVKALYRSWGIPCSGTQVYSRLYRVTWLSKITEPGVRLRAAFYFQQLDALRTLRQEVRRELLAESKKHKVWKRLCGIPSIGPIRAAVALGILQTPHRFRTKRQLWSISGFAIETRSSADHRHVNGRLQKVKKRVSIRGLNQNHNHDLKNLFKGAAVVASTKPGPFQEFYETLLAKGMRPEMARLTLARKIATIVLIVWKRGVNFDAQYLKPQTV

SEQ ID NO: 257016 - protein, 312 aa, unidentified
MADMVRLAGIDVSKQTLDVYVMPSGERWTVSYDRRGLSKLRRQLLDLGVAVAAVEASGGYEREVSEVLEDAGLVIHRLNPLRVRRFAQLRGRLAKTDRLDARTIAEFARAYPQDRQLRRDPRRDRLAEHLLVRRHVQDGIVDCINQLEHLRDSRLRRLIVTRKAALERTLAILDRRLAELIAEHDDLVALSNQLRTVPGVGPVLATTLIALLPELGALTRRQVASLVGVAPFDRSSGQQLGAKSIHAGRVLVRNALYMAAMAASRRNPAIKAFAQRLAAKPGKVRLVACMRKLLVTLNAIVRDGAQWQPRTA

SEQ ID NO: 257017 - protein, 382 aa, unidentified
MGDWNILPKRLSAETQREVEMTFFIGVDLHKTQFTVHVRTEERSETLNQIRQYKTDDKGYADFTTRIKAYKEIGAVVKIGVESTGNTRFFKHEVEKAGAEVTVINTLKFKVITESAKKTDKHDACTISEFLSKDMLPESYLCSKETENIRRLLKSRERLVRSIVGQKNEVHALLVSMGLKDESRSLQSKKGRQKVLDVLESNNDNVLEAQSVQLMFEIIRQMEESVKIIEKQLTELTKDDQMVNRLLSIRGCGKITAWTIRAYTEDMGRFASAKKYAAFCGLVPWVSDSNESIRHGKITKRGPQELRVSFVQLVMGIRRCKDTACWRLMQRYEYMKTHKGSGKSIIAAARKLAEIVWAMLNNKEDFDCERMKGTYNRMNLAV

SEQ ID NO: 257018 - protein, 362 aa, unidentified
MKVQRTSVGLDVHARSVVACGLDGDTGEVFQRRLCPDHQEVLEWIKGLPAPVAVTYEAGPTGFGLARFLLAAGMMCLVAAPSKLQRPAGDRVKTDARDAAHLARLLHLGQIVEVTVPSVAQEAARDLVRAREDCRGDLMGARHRLSRLLLRQGIVYYGGQAWTGKHELWLRAQRFDNPALTLAYEAALDAMVACVHRRDRLDEAIATMAVDSEFTPVAARLGCLRGISTLTAFGLAVEIGDWHRLTGRSIGAYLGLVPCEYTSGATRVQGGVTKTGNGHARRLLVEAAWHHRAPYRPSRDLRRRWDAAPVSARERGRQSPPAHPLGRFRHPQETPGGRQRRDRPGVGRLVLVTGRHGLTERR

SEQ ID NO: 257019 - protein, 402 aa, unidentified
MIFINCFGIDISKSESVVAHYKDEVLVKELVIQNNQNGYRYLKNDIKHLDSLFILFESTGVYSRGMKHFCEIHKINYLEMNPLEAKFKTNSLRSWKTDKSDAHKLALLAFRMKDSKVQRHPEEIYFELRERARFHLEMEINQNCLKVELVETLHQTFPGLEKLFTNRYSKIALNIAKAFPHPDYVSILTHDELVEKVLHSTDKGISIKKAHKYAKKLIEIKNNSFPNVRKSSFLLQKVQYLCDKLLIGIEEMKAFDQEMIDLAKNTTEFENIISIPGIGELTATLLIGELGDIREFKTNKQLNAFVGIDIKRYQSGTSKSRDTINKRGNKKARRLLYLITMNMLRGRNHYQSHIVDYYYKLREQPHGKPHKTAVIASINRLLKTIHYLIVNDKLYDYQKAPH

SEQ ID NO: 257020 - protein, 338 aa, unidentified
MAILMGLDQHRAQITTDWVDTSTGEVSRARVAPADRAGVRRFLARFRGQALEVALEATTGWRFVVEELHRIGAIVHLAEPADTAALRGNKKRAKNDRADARHLRELLMAGRVPESWIAPAHILDLRARVRLRHTLSEQRGEWQQRIQSVLYHHGCPKRGDLINQAGLTWLAAQPLPASAREQVTVALAMIDALERQLAPLDKQLRTYARCQPGCKALQAHYGIGALTSVTILAELGDPSRFSSSTQAVRFSGLDITVHASDQRRAPGHLSRQGPPALRWALFEAAQCARRPNSPDHAYYVQAAERLGGNRACLSIARKLLKRSYHTLRELGEEAMQPA

SEQ ID NO: 257021 - protein, 369 aa, unidentified
MRNAVAVAEDGRGGDVRYLGEIDTTEAATRKLVAKLAAKYRQLTFCYEAGPTGYGLYRLIRKLGHDCIVAAPSLIPKKPGDRVKTNRRDAVGLAKLSRAGELTAVWVPDERHEAMRDLSRAREAARKDLKGKRQQVSSFMLRLGRHYPGKKTWGPAHMNWLMLQKLEHREQRIALEELLGAVRQESERVERLEQAIRDAVPEWSLAELVTALQAMRGIDLVAAVTVLAEIGDLSRFQNPRELMGYLGLVPSESSTGDTVNRGGITKAGNSRARRILVEAAWSYRHPPRVSREKQIKVAAAPRAVREIAWKAQMRLCGRFRSLTRKGKRPTVVATAIARELSAFIWAINREVVESHATANRRPGHGPLEL

SEQ ID NO: 257022 - protein, 347 aa, unidentified
MAFIGVDLHTNSFTICRLHDDGSEAFETFTLSASALQAFCMSLDADDEIAVEATGNTAWFCDEIRPCVGRIVVVNPRQFQVIRKSVNKTDKNDARSLAFFLSKDMLPETRLKSTAEAELGSLVATRDVFVKQRTMLLNKIHAMFVRRGTKLKKEGLASKKRLRELDMSQFSALEQVELNALRNQALSLTETLAELDKAIEAAGAKLPGHEGISSIKGIGSRSAAILLSGIGNIEDFESADKLAAYVGIVPKVSQSNDTDNRGRITKRGNKLMRTTLVQCTLIATRYSGYLNAFYQRIKERRGAGKAIIATARKLLSIIYDTLKNGWVFEDFTEFKIKQNQCPTGQPS

SEQ ID NO: 257023 - protein, 315 aa, unidentified
MLPTIAQTVGIDISKATLDVYLHPQASARQFPNTAAGIATLLAWLAQGAVHRVIFEPTGAYHHRLERQLGNAGVPMVKVNPLQARRFAEAIGQRAKTDAVDAAMLARFGALDALQVRPMVSQTLSDMKELLVARRGLVKDRVAASNRNHVHRAPLLKRLADQRLRQVERQIAAIDAALRALCQADAELKARLDILVSIPAIGEATALAMLIEMPELGTIDNKCVASLAGLAPVARDSGQHSGKRFIRAGRAHLRQALYMPALVAIRFNADMKAKYQALVANGKPPKVAITAVMRKLLILGNALLREHRNWTPKIA

SEQ ID NO: 257024 - protein, 512 aa, unidentified
MVPGFVFVPVVTLASPRRRRQRSRLGEYCFYTTWAAALGNFSRGDLTMTRKRKSKRSVPAGRPESIPIWNPNAAGMDIGAEEIFVAVPADRDGQPVQRFGTFTSELGRLSEWLQQCRIETVAMEATGVYWIPVYQILETAGFELCLVNARYFQNVPGRKTDVSDCQWLQRLHSAGLLRGSFRPAQEVCVLRSLTRHRDNLIRLASTHVLHMQKALDQMNVQLHHVLSDITGLSGLAILDAILAGERDPRVLARLRDGRVKASEETIVQALTGDYRAEHVFTLKQSLTAYRHYQKLMAACDLEIEQQLKRFDAKVDAKAKPLAPPKVRRRKIFSNEPNFDLRSHLYRIFGVDLTAVPGISVLTAHTILSEIGPDISKFRSAAAFASWLGLCPHNDISGGKILSVKTRRVNNRAALAFRMAANALFRSQSPLGDFFRRMRAKLGAPPAITAAAHKLARIVFHMLTTRDAYDEAILNKNERGFRARAEARLRAQAKALGYSLVAAPAQTAQPKTA

SEQ ID NO: 257025 - protein, 340 aa, unidentified
MKNKKKYFIGLDVHKKKTTHVVKDRIGNIVIEGETATLYSELYERLEPYLKSAVIGLESCTSYYTLYQNFLKNNYNIKVANTIQLRMLVAKNDKLDAKRLAEMLRLGTFPKSYIPGEKIQRLRSLLQVRHSLVEEKTRCNNRIQAFLDRNGIVMPGQEAFGKKWREELLQYIGSSEVSLELRYEYDHFVYLEKKSEHLGQEISGYTMKHWKKEYILIQSITGFGPVLSCYVIANILPIRRFSSNRKLRRYAGVVPAFHESGGKKSKGHIPKTSSRKLLRWALIQAANSAGRTNTGLGRYYRKKKKQKGNASIAHVAVASSMIDIIYKVLTTNKPYNPEIC

SEQ ID NO: 257026 - protein, 379 aa, unidentified
MATGQNIITDDTTVYAAIELSKKSWVVGIAHPGRDRPSIHRFPGGDLPGVVAKVRKAAGNGERILVCYEAGYDGFWVARSLAGLGIDCRVLDPASIQVNRRARRVKTDRIDVLGLLRALIAINRGERHICSVVRVPTIEEEDARRSHRERQRLIRERTAHINRIKGLLFAQGIRGIEPKLRRTRINFAALTTAEGKPLPEHLRRELEREYQRLDLVQDQLRAVEQDRDAADAQDPAIECKRQMLCALRGVGHASAAILAREVFGRPFASRRHLGSYLGLTPSAYDSGSMSRCQGISKAGNCWARRTLIEVAWLWQKHQPDSPLSRWYAERTTGQSPRTRRIMLVALARKLAIVLWRYVETGLVPDGTVLNTTVPLRSAA

SEQ ID NO: 257027 - protein, 360 aa, unidentified
MTGEKYIGLEVHQATISAAVMDPTGKLVMESILETKAATILEFFAGLRGTLSVTFEEGTWAAWLYDLLKPRVAKLVVCNPGKNALLKHGNKSDKIDARKLADRLRLNDLEPVYHGETGVRMLRELARSYLTIVKDLSRVMNRLKALYRSWAIPCAGRDVYYTRHRSARLGKIPEAGTRRRAEQLYQQLDMLQHLRQQARRELLAESRQHTITAKLRQIPSLGPIRSALAVALIQTPHRFRTKRQLWTYSGLGLETHDSGEYHYVQGQVRRRKKQVSIRGLNQDHNHDLKGLFKAAATRASVQPGPFQDFYQRFGVVATNEDAAAEMESPRGQHYTSVFYGQRGWMSRTKPAHPAEGEKCS

SEQ ID NO: 257028 - protein, 350 aa, unidentified
MKNICIGIDVSKETLDVTVIHIESYELMAKLGYSKFENRPSGFRSMTAWIRKVIKSRGQMDEALFCMETTGSYDLPLCHWLYKNGLNVWRESALQIHCSKGFQRGKSDKEDSEIIAQYAARHQNRYTAFVPDAEAIADLKELICYRDSLVERRKECKVRLANKKETLVNRNSKAWKCIERLSKAEIKRLDKVIGECDEEIRNLMKEDEEMEKNYQHLTSIVGIGLINGAALIAYTGNFKKITTPNKMSCYCGCFTFYEDSGTSVHRKSPYRNACCKMLKGYLRMAAKSAMLANTELRKYSERLREKGKPYAVILNNVANKLLHIMFSLVKHDYDYEYNHEVVRRMEREIA

SEQ ID NO: 257029 - protein, 426 aa, unidentified
MSESEVLGQELQFAALVGIDWADQKHAWCLQAAGTTERENGEVEHTPEAIEAWVGQLCRRFDNRPIAVAVEQVKGALVFMLSKYEALHLFPVPPVMSAKMREALYPSGSKDDPQDADLLLELLLHHRDKLRRLSPDSEATRRVQNLVEERRNLVDEKTAQINRLTHQLKIYFPQMLEWFEQLDTELVCTLLERWPTLEELQKVPPERLRTFFRKQRCRYPELIERRLVGIRQAIPAIRDRAVIEAKSAVVKVNAQVIRSLVRGIGDLDRKIEEAAAAHPDFFIFESLPGAGAVLAPRLLATFGSQRERYASAEEVQTYSGIAPVMKRSGKKKWVHFRWACPKFVRQSFHEWAGHSIAHSQWARSYYRQQRERGKGHHAAVRGLAFKWIRIVFRCWKDRVAYDESRYLITLAKRNSTLAAVPGGTML

SEQ ID NO: 257030 - protein, 380 aa, unidentified
MEYSTVYVGMDVHKDTFSVCCYTYEDDKCKYKRTFGADYKNVLQYIASMRKQYGEKVKFVTGYEAGCLGYSLYNQLTAHNVECVIMAPTTMAKTANAGKHKTDRLDSEMIAKCLADRNYHAVHIPTEEDDQVKEYIRMRDDHKLALKKIKQQILSFCLRRGLQYSDSDSESKPRHWTQKHLKWLRDQASALKGEYKDALEEYLGTYDYLTNKITRLDQKIEEISQRDTYHENVKHLSCFIGVKTITAMGVLTEVGDFSRFESAEKFASYLGLVPGESSSGGSRTMLSLTKAGNSHVRTLLIESAQSYTRGKIGAKSVDLLKRQEGVEPKYIAYADKANERLRRKFYRLTLQNGKQRNVAVAAVAHELFCFIWGMMTDHVA

SEQ ID NO: 257031 - protein, 449 aa, unidentified
MSKPILAVGIDPAKRVHRAVGVLFPDEVVFDCELPNALDAIQSLDLRLVQLATTHAAELVYGLEDHRRYGRLLCQVLTERGRDVRVVNPLWTNRQRAFYGQDKDDAIDGRSIAAVVLRRRDQLPLANDFGQLAQAIREAERAVQDLGKKRTELVNRLHLQLSDVYTSVYERYFGELKSPIALRFFRRFPLPQDLSGQDAMQLSSIILGLANGKVGPHKGSDRETFLQAKAETILKTSASLVQTPRTLALELKAELIGQLCDELLVNHDRVVRLERMLRKQMLPATGQTITTMPGIGTILAATIIGETTSVTRFRSRAAYAVYNGTAPARHSTGGRERHKARRDCNHRLKRAFWLAARVAALHDPLAKAYFNQCKSRGLSYNECIKRVARRMSDIVYALLKSGGDYDRTIVEQAIQKRQEQVANADDNRAKEALPIPDQKTLSRRAHDGN

SEQ ID NO: 257032 - protein, 342 aa, unidentified
MKFYCGIDLHATNSFLCVIDGKDKILLKEKLKNDLGAILYALESFSPRPSIVVEATINWYWLIDGLQEAGFDVKLAHSMALYMITGAKVKTDRRDAFSLAKLLRLDAIPEAYIYPKAKRPIRDLLRKRKQVVNLRANAYGALRRVLLQYGIYGYSQATIKSLTEAQLDQHLEHFATQAGCHLEVQRIRFYSDQIKTLENIILSSVSDDQRFELLQTIPGVGKILALTILYETGDIDRFQSAKHFCSYARVVPGVAQSSGVSKRGRGSKQGNPHLKWAFCQAAALSVRYNAGIRKFRQRHLARRRSKAKKLVTLCIVAHKLAIATYNILKDRVPFKQELMFGS

SEQ ID NO: 257033 - protein, 359 aa, unidentified
MIVIGIDPHKQTHTAAVIERISGELVGERTVKARRVGHEQLLVWARSFAGERLWALEDCRQVSGSLERFLLARGERVVRVPPKLMGAARKGERSFGKSDAIDALAVARAALREPELPVGFLAGAEREIRLLHDHRDDLVAERTRIQNRLRWHLHDLDPELEIAAGALDRRCWLERIELRLARLEPTAQVRIGRELVTRCRELTRRIAELERELAALLRVEAGELLELVGCGVLTAAQLVGEVAGVERFATDAKLAKHSGAAPLPASSGTKQRHRLNRNGNRQLNCALHRIAVTQARCYAPARAYLARKQAEGKSRREALRCLKRHLARVVFRILRAIAARRPSLSSTPPIVPLTAVGLT

SEQ ID NO: 257034 - protein, 350 aa, unidentified
MTTLARQITGGVDTHLDVHVAAALDERGALLGVESFDTDPKGYDKLLTWLRSFGTVDLVGVEGTGSYGAGLTRHLHSEGVRVVEVDRPNRQRRRRHGKSDPEDAISAARAAQGGDATGEAKTRDGNVEAMRVLRVARASARKGRTQALNQMRSLISTGPDCVRAELRGLNVYRMLERASSYRPGTKRDLVSINKLTLRMLARRAIELEQEVREIDAILKVMVEETAPELSALSGVGTDIASALLVAAGDNPERLRNEAAFAHLCGTSPIDASSGKNQRHRLNRSGDRQANSALWHIVITRMVSDPRTREYIARRMKEGQTKKEAIRCLKRYIAREVYNNLPMEHLALDNP

SEQ ID NO: 257035 - protein, 338 aa, unidentified
MLHVGLDLHKRFSTIATMDDDGNIQLEDKLYHDDRGRLTEFFSGVAGKAVVTVEATRNWYWLYEMLEELGVTVKLANARKVRLIAEARLKNDKVDPRSLAQLERTGFLPEAYIPPRAIRDNREYLRYRLTLVRLRTGLKNKVHALLDKLGISHPFADLFCPAGRRFLSQLKLRPVYQEELTNYLALMDDIEHRIVAVTKEIQRQLKPDPRAKLLMTIPGIGHLTAYLLLNEIGDIKRFPTPGKLCSYGGIVPIVRQSADHRWQGHITREGNRYIRWALTESACLAPSKDYALGSFHRRLKARRGNLKARVAVARKLLVAVWHVLTYNEPYKTTPFPTV

SEQ ID NO: 257036 - protein, 350 aa, unidentified
MDYFAGLDVSLETVSICIVNAAGDILLEKKIEAEPAAIIEVLKNFGCPLKRIGLEAGPTSSWLYSELRGIGYPAICLECRHVKAGLSAMRNKTDRNDARGIAQLVRLGWFRQVHVKSEDAQRIRMLLVNRQQLLTKALDLENSVRGSLKVFGLRVGTVTRRTFEARVLELVAEDRSLMAITEPMLRVRRVLIAEFERLDRLCRMLARRDPVCHRLMTVPGVGTVVALTFRTGIDAPERFSRSRDVGAHFGLTPRRYSSGQTDYDGHISRCGDAMVRTALYQAANVLLHHGRWSSLRSWAMRIAKRGSVKAAKVALARRLAVVMHRMWVDGTDFRWSAVAAAAPAATAIAR

SEQ ID NO: 257037 - protein, 419 aa, unidentified
MTRVGIDAHKKSCTACVFNDDDALASRPSKTFTFRTTKRGVSEFMEEVPRGSIVVIESSTTGKVISRMLSPYYEVHMIAPPEKKPSVKTDKRDSERIVREDMLGYVRRCYIPSPYIEGLRFIVSKQMEIGEKISRAKDQIHALLERNMLQSEFEDLSDIFGAEGLERLSSIELSEQERTVLAMYLEELNLYTSQHKQIESEIAKVAEADGDCQILMSHPGIASFVAVAIKARVGDDASRFPTKKHFSSYAGVVPKADNSGERVSEHRPVKHGDDVLKYALTCGVRGAVHAKASSAVKTFYLKQIAKGKSPQDAQVAAARKLSWIVWKMLTTKTRYAEEDEYLTARKTSKLSKIARKPLKHAVRPEDVPILIRSLMPEAAVLQRYPENMHRMLGHHRGRGKNNDNSSNENISQAGGVVEK

SEQ ID NO: 257038 - protein, 397 aa, unidentified
MLGQSNQRTYCPTDFDIFLGMDVDKKSIDFTCSDSQKLLRSVHIPNHSEALVRYVQKHFPNQRVLFAYEAGPTGYGLYDGLTAVGFSCLVSPPSMIPTAPGQRVKTNRLDSKKITEALRAGQLKSIHVPSLPYRHLRHLVKVRDLVVRQIVGTKCRIKALLLFEGIPFPEARAKSHSWSRSVVVQLQKLPCSVAVRFRLDRLLEALEFQRQQYLKVTREVRNFCRQDPELKRSLSYLVSIPGIGQIVAPHLLARIGSWQNLQEHRVDELAGLLGLVPTEHSTGDRIHRGSITHGGDGRLRSKLIQSAWTAIRQDPELREFYRSVCRRHPQHLAARKAIVAVARKLTTRIFAVLKEQRPFVVRPVIHSRPLLPGEIGPRERLDASQKKEDGNLPSFVL

SEQ ID NO: 257039 - protein, 346 aa, unidentified
MIIVGCDFHPAWQQVAWMDTDTGETAERKLEHSNGEARGFYASLSAAALIGVEATGNCQWFLNLMTELGHQVWVGDAAQIRASYVRKQKTDKRDAAHVLKLLLEDRFPRIWVPNREERDLRQLLLHRHKLVEMRTRVKNELQHLALNHGVRKQRKLWSEAGQELLRSLALQPWAAQRRDDLFQLLAMLQRHIGLLDQAVKEKSQLDKMAQLLKTQPGVGPITSLAFVLTIGDVSRFQNGKQIASYLGLIPREHSSAGKQRLGGISKQGNRMLRMLLVEAAQTAVRSDPEFRKQYLHRCHSKPKAVAKVAAARKLAVRLYWMLRTQTPYPEIVRIESSPRVPLVGAS

SEQ ID NO: 257040 - protein, 344 aa, unidentified
MDHFGGLDVSVKETSICIVDDTGRTVKEVKVASEPAALLKVLGNPTYRFKRIGLEAGPLSQWLFSALAEAELPVICVETRHMQAVLKAQINKTDRNDARGIAQMMRAGLYRPVHVKTLRSQKLRMLLTHRKLLQSKAIAIENDLRGTLRNFGLKVGMVGKVRFEARIQELVKNQPDLAVLVEPLLIVRRVLREQIVILHRRLLAIVRDDEVCRRLMTTPGVGPVVALTYRATVDAPARFRKSKAVGAVFGLTCSRYQSGEIDWSGRISRCGDEMMRTMLYEAAQSMMHSKKWSWLKAWAMQIARRRGMKKAIVALARRLAVIMHRIWVDGTEFRWTREQAAAAA

SEQ ID NO: 257041 - protein, 432 aa, unidentified
MLKINFMSTLFVGIDVSSKSNVVYAMDFYKNKYISSAFSNNQPGAEELAAIILDCMKKHPDLTTVVAALESTSVYSIHIANFLSTCEVLMPYKPYVFCLNPKMTANYRKSFIGMSKTDPLDAFIISDFARAGRIECEPWRGSQYLALKRLTRHRLHLAECISREKTYMVSNLYLKFSELQILPDDDQPFSNIYGATASALLTEYMSVQEIIDAPEEELLQFLAEKSHNRIPDLSRTSQLLRKAARDSYRLDKCMYEPISISLASSFNCIEAYQKEIKAIDKAIFKAIQGMAPNALTILESIPGIGPVWAAGMIAEIGSITAFHSSDALAKYAGLTWRKGDSGDFESEDTPITRAGNAYLRYYLGEAANSVRRHIPEYQDYYARKYAEVPKHQHKRALALTSRKFVRLVFGLLAKNQLYTGELLDAELNSDTN

SEQ ID NO: 257042 - protein, 337 aa, unidentified
MDYFGIDLHQKESELCGMDAEGRVKCRQRIATTETGFRRAFGRKSRCRIVLESGCQSAWAARILEEIGHEVVVVNPRRVRLIAESTLKSDRIDAEILAWLSRQDEKLVRPVYQRSEGARQLRTRLRVRTSLVRSRTALINSVRGTLRSQGYRMGSCLAARFAQHFSEQKLDDELRQVLDPVVEMIGELSVRIARIEKDLVEESGADELLLRLQEVPGVGPLVCLAFVGWVDRPERFQRSRDVGACLGLRPQVRDSGERQWRGAITREGDSEMRRLLVQAAHAALNCRRQSALKRWAEQLAQRAGKRKAVVALARKIAVLLHRLWTTGQSYQPLLQAA

SEQ ID NO: 257043 - protein, 385 aa, unidentified
MKILVCRDAPAASDYATVHLAWELSKAKWKLGVLLPGAQQMSEFTIEGGDLAAVEARLASIRAKAAESGLPVRILSCYEAGFEGHWLHRWLESHGVVSHEVDPSSIEVNRRARRAKTDRIDLARIMRAFLAHLRGEPLACSMVHAPSPQEEDDKRLNRERERLLKERTAHTNRIKGLLHAQGIRDAKPLGRDFLKRLAEVRTGDGRALPSRLAAEIARERERLILVDRQIAAIEAETKRECAAAAPGSAAAKVTQLARLKGIAVIGAQVLVKEAFYRRFANRRQVGGSFGLVGTPFDSGEGKRDQGISKAGNRRARVAAIELAWRWVVWQPDSALTRWFKARVGDRKGRVRRIAIVAMARKLMVALWRYLETSVIPDGAVLSPSR

SEQ ID NO: 257044 - protein, 337 aa, unidentified
MYYTGIDLHRKTSFVTTVDQSGQIVKKINLINDEVTILDYFLSLDDDTKVVIESTANWYWLYDLLTEHSIPVVVSNPVKTKAIASARIKNDKLDSHMLAQLLRADLLATVHVSSKQTRELKELLRYRSKLVRDTVRMKNRIHNIMAKNNLTAPCSDLFGGRGLEYLSTAALPAYQRNQVDTYLTLYQQLKEHTDALTKQIKQHAADNPSAQLLMTIPGVGPITSMFMVAEIEDISRFKSYRHLSSYAGLVPSLDASADKQRMGRITKQGSPHLRTALVEAAQVAARTRSKLNIFFRRRIVRCGYQKAIVATAHKIIQYAFYILRDQKPYQEKIEAPA

SEQ ID NO: 257045 - protein, 414 aa, unidentified
MKLFVGIDVSSQELEVCFMNSDGDKLETLTVKNNLEGASYLRDRIVAAADKHSSSEIHIGLEATSVYSWHPAMYMHQDPALQARKAKVFTINPKLVSKFRDAYPDLDKTDRLDAWVIADRLRFGRLTTTIVMQEQYVALQRLTRMRFHLIHNLTREKQYFLQNLFYKCNAFTTEVDSSVFGHAILEMLSEKYSLDDIATMEVADLADYLRDKGRNRFPDPENVARCIQKAARASYRLSKVVEDSIDLVLGASIQAIRSIQTQLKDLDKAIERILDGIPGAKCLRSVPGIDRVYAAGILAEIGDIDRFSDQAAVAKYAGLTWRRHQSGAFEGEDTKRIKSGNRFLRYYLVEAANSVKNRDEEFGEYYRKKYNEVPKHQHKRALVLTARKLVRLVDVLLRNGQLYTPRKKVTTAKD

SEQ ID NO: 257046 - protein, 352 aa, unidentified
MEVTTIGIDLAKSVFAVSGADSRGRVVIRRQLRRAQVLGFMRGLPRCVVGMEATGGAQYWARQFNALGHEVRLMSPALVMPYRKGNKTDRNDADAILEAVSRPSMRFVMVKSVAQQDLLALHKVRAQLVKSRTALCNQLRGLLRERGVAVRMGVAALKRSLPAALADESSELSGEMRELLSEMSQWLRTLEQRIASCEARITRKFKHDERCVRLAEVPGVGPLTATALVAAVGNAQRFKNGRELSAYLGLVPRQHSSGGKTVLLGITKRGDRYLRTLLIHGARSALRQCKLEGDARSRWVARISAARGPNVAAVAMANKNARILWALLSRGDRYRSSRVLTRAVLRPGSPPR

SEQ ID NO: 257047 - protein, 347 aa, unidentified
MKKIVKQVVGIDVAQKELVVCLGRMYDDWMPELYAFKTFPNNLKGFDAFIKWVNSLSEASIPVRYVMEATGVYHESLAYHLDEQGLEASIVLPNKISNYARSLDVKTVTDKTASEAITRFGLERQLDQWSRPNELYRNLRQLTRERGQLIDERTVLKNQLHAEQAQARPNRKSMERAKKRIALLDKQEEEIIDELKGFIKTDKEMQQLIILICSIPGVGLLTATTVLAETNGFELIRNKRQLTSYAGLDVKEKQSGTSVKGKPKISKKGNKYLRRAMHMPALAAIRHEERFKAVFARLVSKHGIKMKAAVAVQRKLLEMIYTIYKTKKSYDKNYFKNHHPEVQLAMQ

SEQ ID NO: 257048 - protein, 297 aa, unidentified
MSEKIYFGVDVCKESLAFCAVGIAGQVPNNAPGQRRLLARLPKGAHLIIEASGGYERELVRVAQQSAVQLSVVNPRQVRDFARGVGRLAKTDPIDAEMLARFGAEVNPSPDAVPTAAELALQELVSARQQLVEQRTVLLQQQAQHLSSIVRRLDRARLKLLQRQIAQLELAIGSILEEQSALNQKVERLQQVKGIGFITAVTCVALCPELGSLSKRQTAALVGVAPYDDDSGARKGWRHIADPATPCSVHVRHQRHPLKPNLAPLLPATASAQQTSKVALIAAIRKLSSVESVFSLV

SEQ ID NO: 257049 - protein, 384 aa, unidentified
MPRPMKELAEVEHNVATLFASLELSQTSWLVTSLSPGSVTMSKHSISAGDGAALLGLLARLRTKAVSAAGVPVEIVVIQEAGLDGFWVHRLLEANRIESHVVDAASISVPRRRRRAKTDAIDGETLLRTLRAWKRGEPRVCAMVAPPSPEQEDQRRISRERAILLRERVRHVNRIKGLLASQGITDFEPLHKDRRVRLDALRTGDGRPLPPRLKAELLREIELIELLLLQIAEVETERDSAVEFDTAQNPSPIALLIRLRGIGSQIASVLYFEGLYRHFGNRREVAAYAGLAPTPWRSGTIDREQGISKAGNPRLRHIMVELAWLWLRHQPDSALAQGFRARVGTETGRVRRIAIVALARKLLIALWRYVNLGEVPEGAVLKPA

SEQ ID NO: 257050 - protein, 406 aa, unidentified
MKLVPIHKRVIGLDVHQAQITACAIIEEGSGETRIEQRQFGGFKRDRRELAAWAATLRPDEVVLESTGIYWKSPYAALEAAGIRATVVNARHVKQVPGRKTDIGDAQWLATLARAGLLRGSFVPPAKLRELRLIARQRQKLVGLLSSEKNRMHKVLTDAGVRLGVVVSDLHGQSARAMIKGILQGQAPNEVLALASRRLKASREVLHDALQGELTASHLFVLDELLRHIKELEARIARFDARLLHELASEHNALALLQTLPGVDTIGAAMLLVEIGSDMSIFGNPDRLASWVGICPGNNESAGKRKSGRVRKGNPYVRRLLCEFAHAASRTKSAFHAKFQSLIVRRGHKRAIVALAHKMLRTIFFMLKRGDYYRDSATSYEQLSVQRNASRWIKALTRFGFIPAAA

SEQ ID NO: 257051 - protein, 420 aa, unidentified
MKAQDTLCPYTATIGIDWADSKHDVFERCLDGSICQHQIASAPEAVREWLWALRSRAKGGRVAIGLETSRGPLFHSLSQHADWLDIFPINPQSLARYRQAFYPSRAKDDPVDSQLLEELIRSHPDRLRIYRPGPEMERKLDLLCQQRRKVIGMAVELENQLRATLKEYFPLAIDLCASNGLRNKLALDFLQRWPTYALLMKARPQTLRSFYYAHNARNQALIEARLARFSSSVPLTEDPAVIEPLSIVAKMLVCAIRAIERTVEQLQDKIATLFGQHPDHLLFENLPGAGKNLAPRLLCVFGSDRSRWPDAIAIQKYSGIAPVIERSGKSSWVHRRLFRPKFLCQTFHEFAGQSIHQSKWAAAFYERQRGKGKSHTCAIRALAFKWIRIIFRCWKSRKSYDETLYLRSIENQYKRSLKII

SEQ ID NO: 257052 - protein, 397 aa, unidentified
MDNDFAVFVGIDVGKGEHHAVGLDPAGKRVHDAPLPNSEPKLRAMFAKLAAHGPVLVVVDQPATVGALPVAVARACGHDVAYLPGLTMRRIADLYPGNAKTDARDAYVIADAARTLPHTLRRLNVEDEALAELDVLVGFDDDLAIEATRISNRIRGLLTGIHPALERVLGPKISHLAVLEILSRCGGPIGIGKAGRRKLASIATKHAPRMGAKLIEDILAALDEQTVTVAGTAAADKILPRLADSLKTIQAQRKTVAAEVEEILDAHPLARVLTSMPGIGVRTSARILLEIGDASGFKSSGHLAAYAGIAPVTHRSGTSIKGEHPNRAGNRKLKRSFFLSAFAALSDPTSRTYYDKKRAEGKKHNAALICLARRRCDVLFAMLRNQTLYHHPEASIA

SEQ ID NO: 257053 - protein, 425 aa, unidentified
MKKKRIYRATPVKQVRLEALMEAVGEQRVIVGIDIAKEDMFAAFESDGTVVLTVRWKHPEQTLAFAELLTVLCARGPVEVALEPSGTYGDALRALLERHGLPVFRVSPKRSHDAAEMFDGVPSYHDAKSAALLCKLHRDGVSERWSARSDHERGLSATVRLLGIYEGEFRRNSNRLEGLLARYWPELTQYLGLRLATLTELLATFGGPAAVATHAADAKSLMQRVGGAPLALAKIEAVLASARHTLGVPQLEPERELVMYVAREARRAQKLAKEVKRRLEELSQSHGATKHLCPVIGKTTAAVVVASLGDPRNYSSAAAFLKATGLNLKEKSSGKQKGSLHITKRGPGVVRLFLYLAALRLMQRHPAVNAWYQKKVQRQGGLAKPKAVIPIMRKLVLAAWFVARGDAFDVNKLFDVSRLEISPAH

SEQ ID NO: 257054 - protein, 338 aa, unidentified
MENFAGVDLHKRVSQLAVLRKEREPSQLRFLNDLATVEGVLRRLPARTHIALEATGSWWWFVEKARSMGHEVSLSHPKQTKAIASARLKSDKVDALMLARLLRADLLPTVWIPGEKERQIRELLTHRARVVRQRTAIINELQALYAKRNIDFEMIAKRARAVVAGAQDLSGYGPSIVERDVELLRVLNEQIRALDKDLERIAQHDAQARRLMSIAGVGPLTAVAVCCWVGDIERFADAKKLASYFGLAPRVSQSGERERHGHITKEGNRMVRSLLVEAALSSIRYSKGPARKHYLGVLKRRGKKIARVAAARKLLGAIFHMMKEGIDYPEYLKRSSAQ

SEQ ID NO: 257055 - protein, 512 aa, unidentified
MQGSRTVASSTPVRISVPDRGPRATRAVLMVLKGGGDDVVTKAPEVILDEANEQIVERVCAIDVAKDSGKVCVRVPAESGSGRRVSKVWDVPARTKAVIELGDHLACQGIQKVTVESTSDYWRIWFYLLEARGLDVQLVNARDVKNVPGRPKTDKLDSMWLAKLTEKGLLRPSFVPPRQIRVLRDYTRLRVDLTAERTRHWQRLEKLLEDALIKITSVASRIDLLSVREMIEALIGGQRNPRVLAGMARGRMRLKHADLVEALTGQFDDHHAELARMLLDQIDALTVQIDTLTERIDVVLADIPVPAPQPEPDPDDHGPGTSDDAEVTAVIRPSHGGAPRPRTAAPAVTALDLVDILDEIPGVGRHNAHEIIAEIGLEMTRFPTAGHLVSWAKLCPRTIQSGAKSSAGKTGKGNRYLRAVLGDAAAGAAKTQTFLGDRYRRLIKRRGKLKALVAVARSILVIIWNLLANPGMRYHDLGVDFHTKRMDTERRTRNHIRQLEALGYTVTLTTAA

SEQ ID NO: 257056 - protein, 398 aa, unidentified
MNAIGIDVSKGKSTVAVIQPFGVVIAEPFDVSHTESDLNKLVQLIKSLSGETKVVMEYTGAYYEPIANALHNQGIFVSVVNPLLIDDYGTNRVRKVKTDKKDSLKIASFAIDKWLDLREYIPANDIRKTLKILNRQYVQYNKILVMQKNNLISLLDSCFPNANTLFTSPRRESDGHEKWADFVLKFPHIHSISKLSLSAFKVKYQSWCRKNNYNYSDKKVADIHSYCKTQISVLPMTDSVIKIITEAAVMLNSTLETLCTFRDEMNRLSSTLPEYNAVMGIYGVGKVLCSQLIAEIGDVRKLNNSKSLVAMAGIDPPPNQSGKVDTKSRSISKRGSPVLRKTLFQIMTIIIQNKPVDDPVYQFLNKKRSEGKPYRVYMIAAAHKFLRIYYARVMQALN

SEQ ID NO: 257057 - protein, 394 aa, unidentified
MRFAGIDIASETHVVAVVDEASKPLVEPTSFREDAAGYARLRELLGSPGEVLIAMEATGHYWQNQFAFLAAEGFTLALLNPLRTRRFAGEDLDRTKTDAIDALGIARFAAQKRPAPTRLPDSTTQELRELVRLRARLKQDFDDRVRQLHRLVDLGFPEFTRYVHSLDSELAAAILHDYPTAAAFQGVSPRRLAALRYDGRHKVGDELAHTLLEAARSSVGCHHGPAYRVQVRYFCEDLDLLRRRLRELDRDIERTLGEHEVGTLLTTIEGIGPSTAARIVGTVGDPAQFRSAAALASYMGVVPGKRDSGKRQGRRAPLSPIGNAALRRALWMPTLTAVRKNPWLRAYYERLRAEGKPAKVALVAAMRKLLVAVYAVAKRRKPFVPHVREVTVRA

SEQ ID NO: 257058 - protein, 348 aa, unidentified
MAITMVDAARSVTGGVDTHLQLNVAAAVDAIGGLLGVEEFPTTRTGHDELLRWLKGFGPVARVGIEGTGSYGAGLARSLRREGVEVVEVDRPNRQSRRRTGKSDPVDAVEAARAALSGRAHGAAKAKDGNVEAIRALFVAKRSARDTRIKTLNQIRHLGFTAPEELRERLAGLSRTELAPAAAALRPREGGDQVAFATKTALSLLGRRVLALDAEKEHLDDLMAKLVKETAPELLGLYGVGVDTAAALLVAAGDNPGRIRSEAAWAHLCGAAPIPASSGKVTRWRLDRGGDRQANAALYVIVLARMSADKATKAYVERRLAEGRTKLEVIRILKRYVAREVYHYLPRP

SEQ ID NO: 257059 - protein, 346 aa, unidentified
MEKFSTDLASVTTVGLDLAKHVFQVHCIDAAGRVVAAKAIPRNKLLEFFASLPRCLVGLEASGSAHHWARELIRLGHDARMMPPAYVKPYVRRQKNDASDASAICEAATRPSMRFVGVRSLENQAALMRHKAREMLVSQRTQLINGLRSHLAEVGMIAAQGLRHARELADRIEASDEALPTAVSEALAPLVAQLRNLDEAIAQLDRSIVRLARQDETARRLMSIPGFGPITASAMAASVQDASSFAGPREFAAFLGLTPRQNSSGGKQKLGRISKMGNRNLRKLLVVGAHAVLFHRKPHTDPLRTWAKKLIERKPFKLVAVALANKMARIAFAIMRGKTNYREIPA

SEQ ID NO: 257060 - protein, 427 aa, unidentified
MSGIENGGQEPAFAAFVGIDWADQKHVWCLQGQDSTKRESGELEHTPEAVEAWVAQLCQRFGNRPIAVALEQSRGSLVFMLAKYEPLHLFPVPSTMSASMRKALYPSGSKDDPRDADVLLDLLLQHRNKLRRLSPDTEATRRIQNLVEERRKLVDEKTEHTNRLASHLKIYFPQMLNWFEHLDTELVCALLERWPTLEELQKVPPSKLRKFFGKHHCRNQELTEWRILAIRQSIPAIRDRAVIEAKSAAVKVIVQLIRILLEGIADLDERIEEGAAAHPDFFIFKSLPGAGPALAPRLLAAFGSQRERYRNADEVQTYSGIAPVMEKSGKKQWIHFRWACPKFLRQSFHEWAGHSIGYSVWARAYYRQQRGKGVDHHGAVRALAFKWIRIVFRCWKERVAYDESKYLAALTRRGSTLVALVATAKAL

SEQ ID NO: 257061 - protein, 377 aa, unidentified
MSNVRFVGLDVHAETIAVAVAEADGEVRSLGLIPNRPESVGRMIRKLGKPEQLRVCYEAGPTGYVLYWQLTQLGVKCEVVARTLVPVKAGDRVKTDRRDAAKLARSYRAGDLTAVWVPDAAHEALRDLVRARWAAKRDQLRARHRLSKFLLRHGRRTPEGVNAWTDKHLQWIKSQVHFAQRAQEITLDDYLHEVDHVAERIARLERSIDTAIESLPVKMRAVIEALQSLRGIAQLSAVSIMAEVGEVSRFEHPRQLMGYSGAVSREHSSGERIRRGAISKAGNAHLRRIVVEAAWAYRHRPAVGKTLAARQRHSSAAVTELAWKAQQRLHQRYVRLMGRGKSKQQTITAVGRELLGFVWAIGVHVEREAKVPLRQAA

SEQ ID NO: 257062 - protein, 321 aa, unidentified
MHYLGIDVSKQTLDCCHMTGGFFYARKYRNDERGYKELADYLSEYPKDEVRICCEATGKYYEAMAEYLHGLGYQIAVENPRKIKGFGVAVLQRGKTDKQDAELIVRYCKAVEPRAWKPLGGEQKELRELVRYIGRLKRQRAAEKVKVLAESSEAVRSSILNILAVIDSEIRNMRQALREFYKKRETLKEESRRLQTIKGVGEYAAAAIQTVLHDGHGFETAAQFVAYLGLDPKQHQSGTSVRGRSRISKVGSSEMRAALYMPAVVAYSRGGFPRLVRNMTANGKRPMQIIAAIMRKLAVVAFTIVKDKTIFDPPNMPDRRR

SEQ ID NO: 257063 - protein, 316 aa, unidentified
MLYLGIDQHARQITISLRDEEGDVIQARQVSTRPEKINEFFQKLTRERLRDGESFAAVVEVSGFGDWLIDMLYDYRCQKVILIQPEERKKQKTDRRDAAALSELLWVNRRRLLHGKPVKGLRQVDIASKVDQENRRLTTLRKDVRRERTRIINKIKYLLRRHNLIWQMPTKTFPTVDAVNWLKKLSLREVDRLEMDYLLADLEHIQQRLKDIEKVIDERCGSSEDAVLLTSMPGIGRFTAIALACRVGRVERFPRSHSLANYWGLTPGCRNSGDNTKRLGSITKAGSSMARWLLSQVAYHESTEMNPSGLGTTKPR

SEQ ID NO: 257064 - protein, 350 aa, unidentified
MIIIGVDYHPEFEQIALLDTDTGEFREVRLHHPEEAESFYRGLRSEGVQVRIGLEASGHARWLERLLGELQFELWIGDAAQICSKRVRKQKTDRHDAQLILQLLVEDRFPRIWVPSSENRDLRQLLWHRHRMVQARTRVMNQLQAVALNEGLRSKKRLWRERDRQQLESFQLGQWASRRRHDLLRLLDQLNPTILELTQAVEREAEKRPEVRRLRTHPGVGALTALAFVLIIGDAERFRCGKQVASYLGLVPLEKSSGSRRRLGHITKQGSSILRFLLVEAAQATVRSLPEWRSKYFHLTQRHGRNIAKVAMARRLAVRLYWMWRQEWNYEQLQKFGSHTGQPGNPYGVK

SEQ ID NO: 257065 - protein, 356 aa, unidentified
MSVYLGVDFHARTQTVCWCDQADGLVHQRTLDHQHDDVRGFYTQFAVPAVVGLEATGYARWFHRLLESLGHRLLVGDAYVIRKCALRRQKNDRRDAELLLDLLLHGDFPAVHIPSMASQAVLRLLRYRQRLVEIQTKLRNGTQALALNHQLRLGPKLWSKQGQQQLLALELDDTDVLQREHSLELLTQIHTRIRTIEKELTLRADQDTRVRLLRTHPGVGLLTSLVVVHALQPVTRFDRARRVAAYCGLDPCETSSGETVRMGHISKQGNRLLRHLLVEAAHRAVHCKTDNDLRNFYFRLIERKKNAAVAITAVARKLVLRLYRMLRENIDYTEFRRRGREARRARKTASPVVGGC

SEQ ID NO: 257066 - protein, 307 aa, unidentified
MAEALKNSIAVVGIDIGKNSFQVVGLDKSGAIVLRQKWSRGQVEARFANMPPCLIGMEACVGAHHLSRGLQKLGHAARLMPARYVRPYSKGQKNDFRDAEAIVEAVQRPTMKFVATKTADQLDLQGLHRVRERLVSQRTGIINQIRAFLLERGVAVRQGLRFLRNELPSILAAPSDALSPRMLRIIENLAGDWRRLDERVEGLSKEIEAIARQDAGCERLISVPGIGPIISSAIVAAIGAGDVFSKGRDFAAWLGLVPRQISTGDRTILGKISKRGNRYLRVLFVQAGWVVLIKPKSWERSRPQVLD

SEQ ID NO: 257067 - protein, 391 aa, unidentified
MICVGIDVAKDKHDCFILSSEGEVLVDVFTIPNNAEGFEILLHTIQSVSIPSEKIKVGLEATGHYSYNILGFLLNNGLPTYVINPLHTNLYRKSLSLRKTKTDRIDARTIATMLMSDVDLKSYTDTSYHNEELKSLCRYRFDLVRQRAKLKQSVSRLVTILFPELEKLVPSIHMASVYELLSEFPGAHQIAQAHLTRLKNLLSEAFRGRYGRETAVLLRDAARNSIGSRMPAKSMELKHTIRLIAELDQEIEEVEAEIEAAMKQIQSPITTIPGIGLRMGAMILAEIGDFSKFDSPDKILAYAGMAPSTYQSGKLTSSYCHMEKRGSRYLRYAIFNATKYVCLWDPSFKAYLEKKRAEGKHYNVAISHAAKKLVRLICAMERSGQPYRKSA

SEQ ID NO: 257068 - protein, 341 aa, unidentified
MNITTIGLDLAKSVSHVVCCNQAGKIVRKKMLRRTQILHFFSELAPCLVGVESCASAHYWAREIAKYGHQVKQIAPQHVKAYVRGNKTDFNDALAIAEAVVRPEMRFVRTKTQTQQDIQALHVMRKKCERDRTANSNEIRGLLNEYGIILPVGISHVYKSLPELFDRQVENGLSELFKELLERHYQKLVELDEHLDWYTKKIKQLSQHEACRRLQSIPGVGPIIASALYQHIGNGSEFKNGRAVSSSLGLVPKQHSSGGKHNLQGISKRGDSYLRTLLIHGARAVMRVSKHKETPLSQWIKRIEQTRGRNKAAVALANKLARIAWALLAQGGDYQPELTTA

SEQ ID NO: 257069 - protein, 346 aa, unidentified
MDKFDACGIEVSAKELVVALSRDGRAERLRSFPNTAEGHDAIVRFLANGSRRVRVALESTGLYGLDLAYALHRQTHIEVMVANPRAVRHFASALMQRSKNDRLDAVVLREFAARMPFQAWIAPSPHCFALCAVSRRLETLTEQSTAEKNRLHAASLSVAIPSVVRRDLQRSVRSIQRAIARLTQEAQHIVQADPLLNSSYHLLLTAKGIGPTSALRLLAETALLSEDLDVRQWVAYAGLDPREYQSGSSVHKRVRISKTGNRHLRRALYMPALVAVRHEPHLRAFYQHLLGQGKCKMQALVAAMRKLLHAVYGMLKHRQPYDGAKLCPLVMDRPAPPSGLRSAEAA

SEQ ID NO: 257070 - protein, 370 aa, unidentified
MNSTQNKKIEQVKETTMIVGIDVGSEKHYFRAFNWRGIELTRKPVAFSNSMEGFNSFYNTIVELMQKSELEEALVGIEPTGHYWFDLGQFMGEKSIKFVMVNPHHVHKTKELDDNSPSKNDRKDPRIIAGLVRDFYSYMPTGVYAELRNASNRRFVLVEEQTRAKNRLQKWIAVYFPEYKGIYTRIDAKGGLLVLKQAPTPEEITKLGEEGIIKIWKDAKLRGNGHKKAMKILNAAMRSIGLKAGLTEARMEIQDLIEDYELQTKRLERVNDLIKELCQQVRYADKLLEIKGIGITTVAGFIAEVGDITRFDSTKELQKLAGLELVADSSGKHNGRTKISKRGRKRLRYLLFEAAISVVGKNEEFKEIHR

SEQ ID NO: 257071 - protein, 437 aa, unidentified
MGVEEVKDEPLYRGRVCGIDVGKAELYATIRVPSDSNPARRASETRRFATTKRGVLELAGWLRCWQVPAVVMEATGDYWKGPFYRLEAEGFECVLADARQVKNLPGRPRRDPSDSAWLAACFERGAVTACFVAAPEFRLIRLHTRYRRDLTEERTREKNRAEKLLESAAIKLSSVLTDLHGVTGRDIMGHLIAGERDPRALAQLARGRARAKISELVAALEGAEFFTAEHAALLRTMLDRIDQIDAGIARLSQTIERLLAPWEEQLQQAESMPGWRRRSAEDALAETGPDMTRFPTGAHLASWAGRTPLESSSGQRQGKARAKKGNRYLAAVTGETAVAAGKTQTREGARYRRLARRRGRPKAQVALGNTQLKVYHALLSHPGTRYQDLGPDYYERQRDTRRQIAHHVGKLGALGFEVTLARIPAPEPDQTADTTAA

SEQ ID NO: 257072 - protein, 382 aa, unidentified
MAESITGKGVMTIGVDLGDKYSHSCVLDGDGIIVERARIRTTSEALKMRFGGIPQTRIAVEAGTHSAWVSRLLKECGHEVLVANPRKLRLVYENNRKDDEVDAEYLARLARLDPKLLSPIVHRSAAVQQDLAVLRARDSLVRARTKLINHVRGAIKAVGQRLPSMSTDAFGRKAGTAIPGELRPALEPLTVAISTLTEQILRHDRWVEHEAQDRYPQSALLRQVTGVGPLTSVAYVLTVEDPKRFSDSRMVGAYLGLTPKRAQSGDTDPQLRITKAGDGFLRRLLVGSAQYILGPFGPDTDLRRWGRAVAERGGKTAKKRAVVAVARKLAVLLHRLWITQGVYEPLRKTKGKLKAEESKGLTPVPLPLDKRSQAEGGGGTGL

SEQ ID NO: 257073 - protein, 338 aa, unidentified
MKLYVGLDVSLVRTAVCILNESGEIVAERQVDSEPDAIAGSLAKVQGIIERIGLEAGPMAPWLFAGLSGQGLPVVCIEVRQMKAFAKASPVKTDKRDARLIAQAMRTGLFKATHVKTDESQRLRLLLRHRQAVMRRNKDLINTVRGTLKAFGIRTGGGKNTPYARRVREAVADPSLLTVTEPLLVAYEQGLAVLAELDRMVLAAAREDAVCRLLMTVPGVGAVTALAFRTGIDLPERFAKSRLVGAVLGLTPRVYASGESEHIGRIAKCGDGTRWLLYEAANVMLTRVKGDNWLKSWALGVAQRRGMRKAKVALARRLAGVMHAMWISGQAFSLAKPL

SEQ ID NO: 257074 - protein, 422 aa, unidentified
MNFCPVAGIDVSKSFSDMCILSPDNKIFAQEKIYHDETSINRANALLQKAEQIFSSKPVIVMESTSHYHLILFQFFSEHGYDVIVVNPLQSSSMKDFAIRKRKTDRVDAFKLAMLYRTKTLHPSQIPQAAMRALRQLCRERAECLNDVTSYKNRLTAFLDQAFPGYDKIFSDVGGITSCAVLVHFPTPAILLAAEEAELVEVIAAASKSGYGFAKKKAELLISAAQKAQTLGIHSCADETLIVCTIQMLRTLSESVFQIEKAINNLLAQVKEVRNNVSLLQSIPGIGSHSAALLLGEIGDFTLFKKPKQLAAYFGLDPSERQSGTFRGTKNKLSKRGSPYARAALHMGVVNAICKHGKKTAPNPVLLSYYEKKCKNKPAKVAQAASMHKLIFIIFAVLRDQKPFELKTPEQHAFEQGFVKAA

SEQ ID NO: 257075 - protein, 342 aa, unidentified
MKTFVGLDVSQKKTSICVIDYNGNKIRMANVDTHPGVIADYLFSEGFDKSKVGLETGPLCVWLYHSLKSFGLDIDCIHARHVHAALSMQLNKTDQNDAFGIARLVLSGWYKPVHVKSLECHQQRLILTSREKLVQLRVAVTNQIRGLLKTFGVVLPPGKNSVFERAVLESSPSLETVKPAVIMLLDTWEHLSGQIRKFNYMLEKLARKDPVCQILQSIPGVGVLTALSFKTSIDDPSRFRRVSDAGAFLGLTPKKYQSGEVDRNGGISKQGNRMTRTLIYEAASCLLTRYGTDTSLAIWANELRHRMGYKKVIVALARKLTTLMLSMWKSETFYNERLKAVN

SEQ ID NO: 257076 - protein, 294 aa, unidentified
MDKLMLVGCDLHDKTMLTKLAVGRGAAVQRSFGNDPGGRRAMAAELKKRARAEGATRIIFAYEASGLGFNLHDELEAQGIRCHVLAPSKIERSPKHRSSKTDEKDATRILEILRGHYLAGNALPAVWIPDLQLRDDREVVRARLDTQEKCIAVKAQIRTLLKRNGVEKPAGVGAGWTREYRRWLDALSICAAPLSWGARQHLGSLLRQMKCLEEEVQTLERGVGELAAQPRHAARVERLTTLKGVGVLSAMVFLVEMGPPERFANRRQVGAFAGLVPSSDESGETNDKKGHITH

SEQ ID NO: 257077 - protein, 309 aa, unidentified
MEHFIGIDVAKDRLDVHTRPGGEVFAVARDSNGLAMLVERLQRLAPALVALEATGGYETVVASALGAAQLPLAVVNPRQIRDFARATGKLAKTDRIDAAAIAHFAEAVRPPARPLADAEARALGELVARRRQVIEMIIAERHRRRMASQRRVIRAIERHLALLQAELSELEGDIDDAIRKSPAWQADADLLASVPGVGKVTLRTLIAELPELGHLNRRKIAALVGVAPINRDSGTLRGRRTIAGGRPAVRTALYMAALVASRANPVIAAYYAKLRAAGKTGKQALVACMRRLVVILNAILRDRKPWQPA

SEQ ID NO: 257078 - protein, 354 aa, unidentified
MIIIGLDYHPGFQQIAFVDTDTGEIQERRLEHREEAEKFYRDLGAQGATVRVGMEASGHARWFERLLAELQFELWTGDAAAIRAKRVRKQKTDRQDAQLILRLMLKDDFPQIWVPSWENRDLRQLLWHRHRMVQARTRIMNQLQAVALNEGLRCKKRLWRDAGREQLEAFQLAPWASRRRRDLLELLDRLTPTIAELTAAIEQEVEKCPAAQRLQTHPGVGALTALAFVLIIGRAERFQCGKQIASYLGLVPLEDSSGQRRRLGHITKQGNSLLRFLLVEAAQVTVRSLPQWRSKYCHLTMRRGRKIAKVAMARRLAVHLYWMWRKGWGYGQLTKFSSHAGEPGNRDGAKHNTE

SEQ ID NO: 257079 - protein, 321 aa, unidentified
MSTTGRTTCYVGIDVSKATLDVAILPTEECFAASNDEAGIEELIGKLAELPEALVLLEATGGFERPVVAALAASGVALFVVNPRQARDFAKATGQLAKTDALDALVLARFAQAIRPTPRTIPDQEAREFGEILARRRQLVRMLSAEKNRLGASGFEAVRGRIEAHIRWLEEELARTDRDLDETIEKSPTFIKANEALLRSVPGVGPVLCRTLLAELPELGSLSPKELSALVGVAPLNRDSGTLRGRRTVWGARARVREALYMGALIASRFNPAIREFYERLLTAGKPKKVALVACMRKLLIILNAVMRDRTPWRSPHTLHP

SEQ ID NO: 257080 - protein, 412 aa, unidentified
MQTLIERGCGLDVHQATVVACLLIVRKDGKVQKEMRTFGTATRELVGLRAWLLSEGCTHVAMESTGVYWKPIYAILEGALEIVVANAQHIKKVPGRKTDVKDAEWIADLLCHGLLRSSFVPPKPIRELRDLMRYRRKLVESQAAERNRLLKVLETANIKLANVATDVFGMSGRLMLRALIEGKATPQEMAELAKGLLRKKIPELQLALEGKLEEHHRFLLELQLQRLEAAEKDLAALEQRIRQKLEPYAAQLALLDEIPGVDWTLAAVIIAELGVDMSVFGSVSQLASWAGVCPGNNESAGKRKSSRIPSGNVYLKSGLVEAANAAGRAKGTYLRDKFFRLKARRGYKRAVVAIAHKILVAIYHMLSQQVSYNDLGDLYLDKLNQNHLTRNLVHRLERLGYAVTLTLQQKAA

SEQ ID NO: 257081 - protein, 416 aa, unidentified
MKIVRPICCGMDVHKNIIVATIGITNKKTRITEYIQETFSTLNPDLLNLKQWLINHKCFDACMESTGKYWIPIFNILEDEINIYLTHPKYVKAIKGKKTDKKDSKWICDLFKHDLIKFSFIPPKEIRALREISRYRYKLVGMRSSERNRYQNCMTVSNIGIGSVFSDPFGKSAQAIMKEVLESDIIEDEKILKCVHGSCKNKDKILDSIKHCNIETDQRFKMNESMTHMEELQVHIDNCEIEMMKRAAPMFDQFMHITQLPGISTLSAILIISEIGVDMKQFESDKQLTCWAGLAPANNESANKKKSVRISKAGQYLKPLLVQCALGAIKDKEGYFGIKYSRIKKRRGHKKAIIAIARMMLVSIYHMILTGETFNPSDYESFRNPKPPIKQQVLTEESAIEFLKKSGFDVSKLTKP

SEQ ID NO: 257082 - protein, 346 aa, unidentified
MKIATVGIDLAKNVFQVHGVDGRGKAVLRKSLKRAEVVKFFAKLEPCLVGMEACGSAHFWARKLIELGHTVKLMAPQFVKPYVKTNKSDARDAEAICEAVARPNMRFVPVKTAAQQAVLALHRARQGFVKARTAQANQIRGLLAEFGIVMPQGIAHVVAKLPDILEDGENGLPGSLRQLLAGLLAHFKELDRQTGELEREIKLWHREHEASRKLERIPGIGPITASALVASVGDAKSFKNARQLAAWLGLVPRQHSSGGKSTLLGISKRGDVYLRTLLIHGARSVLRHLQRHTDQAEGWLARLAARRNPNVAAVALANKNARIVWALLAHGRDYHAGYGAVAAKAA

SEQ ID NO: 257083 - protein, 397 aa, unidentified
MDAAGRRLAAARLPEGVAGITRLHEMIGAHLGEDAGAGEDAGAGEVAIGIETDRGPWVSALVAAGYTVYAVNPLQAARYRERHGVSGAKSDKADAHALADMVRTDAHQLRPVAADSPQAEAIKVVARAHKTLIWERTRHTLRLRYVLREYFPAALEAFDDLAAPDTLELLAKAPDPASAAKLNRSQIRAALKHARRRDIDMKTTRIQAALRSQQLGRAPVITAAYAATTRSIAAVLATLTEQINTLRGQVETHFGRHPDAEIILSQPGTGVLLGARVLAEFGDAPGRYADAKARKNYAGTSPITRQSGKRKITHARFVHNDRLVDALMSQAQSALLASPGARAYYDKQRARGLDHHAALRQLANRLVGILHGCLKTRTLYDEATAWSHHNQDQRRAA

SEQ ID NO: 257084 - protein, 343 aa, unidentified
MNQYIGLDVSLKDTAISIREDGKRIWRGKCPSDPNLLAQMIRKKAPRAQRVVFETGPLSTWFYHALTSEGLPAICIEARHAQKVLNETLNKTDANDADGLAQLAEAGFYKAVRVKSFDAMMTRTLVAAREQLLNISTQLGNQIRGLMKTFGLIIPKTKGRVFDGDVRKLLDGNNELAKIILPLLEAWHDIRKRAADLGRQLLIVARESEATKLLMTIPGIGAVTAVSYVTAIEDPGNFRTSRSVGAWLGLTTRRYQSGEVDCDGHISRRGDNRLRGLLYEAATALLTRTSARTESSLKSWGLKLRERLGFKRAAVAVARKLAVIMHSMLKTGEVFNASAGATI

SEQ ID NO: 257085 - protein, 370 aa, unidentified
MKKPATLFVGLDVHKESISVAHVADDRRADVTYVGRIGTRPADIDRLVRRLQEKADRLVVAYEAGPCGYVLYRHLSRRRITCLVVAPSLIPKKPGDRVKTDRRDAIQLARLLRSGDLHSVYVPSVEDEALRDLCRAREAAVVTLKAAKFRLKSFLLRLGLHYTGRADWNDAHLRYLAEVVCPTPAQQIVFQESLRAVGEQVERLKRIETELADLVPAWRLAPVVRALQALRGVQDTVAITMLAEIGDLTRFDNPRQLAGFLGLVPSEDSTGESRRQGPITKSGNGHARRVLVEGAWAYQYSAKVSPHIRKRLEGLPQPIQDIAWKAQVRLCKRFRRLVARGKHPNVVVTAIARELAAFMWAIAKEVPVTA

SEQ ID NO: 257086 - protein, 339 aa, unidentified
MASMVVGVDTHKETHSAALLNELGVVQAGLEVAASAAGYRQLLGWARSNSEARVWVVEGTGSYGAGLTKYLSEQNEVVYEGDHPKRSWRGPAGKSDQLDAIWVAKESLSRPRPNLPRARGERELLRVLLTARNGAVEAEKQGLNQLYALVVSAPEAMRQRLGKLRGPALVKACRRLRPGGDQESEVTAMTLRSVAQRVSALATEAAAYEHQIGKLVGGRAPQLLAIKGVGPLSAAQILVSWSHAGRLRDHNAFAKLAGVAPLPASSGRVQRHRLNRLGDRQLNRALHLVVITRARCDAQTQAYIARRTSEGKSIRDIRRCPKRYLARRVFKLLEHLDKT

SEQ ID NO: 257087 - protein, 412 aa, unidentified
MQDILTCVMGLDVHRDIIVACLVRGAVDAEPEAETRTFSTLIPEMQKLQDWVIEAECRNIAMESTGIYWQPIYEMLESCFDGEISILVVNARHMKNVPGRKTDMKDAQWIATLLRAGLLKGSFIPDKTFRELRHLTRYRKSVVHDITAQKNRIDKFLQSSGFRFTAFLSDTFGASGRNIIRHLIEHGSIDREALDKCLKTKTRNRIDEILVALNGSLSVHQRRFLNMVFLHLEDLEAHKHTIEDEITEEVLKHTDALNLLCSIPGIDVTAAAAIVAEIGTDMSAFPDSQHICSWAGLSPGNNESAGKRKSVHINKGNPYLKSMLCETAWIMASHRKLYLSGWYWKVKQRKGAKRATIALARKVLSIIYTMLKTGTPYSEECFEQRRQRCERKRANRMVNELQKLGYTVVAPN

SEQ ID NO: 257088 - protein, 414 aa, unidentified
MKVVYPICCGVDVHKTFLVGTIISTTDGVQPHYQKKRFSTYNSYLHRFADWLHLNNCLDVCMESTGKYWVPVFNILEERSIRVTIANPKWVKAVKGNKDDTKDSKWIGDLFRLGLVPGSFIPSKKIRILREFTRYRYKLVSMKSSEKNRFQNAFTVCNIALDSVVSDMFGKSATVITNYLISEDSFNPEYCVSLLQRSLKKKSDSVLESIEGYSITDEQKLRMRIVRSHIDYITDAIAQVDSAIDTMVAEFENTISLLRTIPGVDRNSAITVISEIGNDMSRFGSAKRLCCWAGLTPGNNESAGKKKSVRITRAGVYLKPALVQVAHAAVKATDNSYYRLKYEHISKRRGKKRAIIAIVRMILSAIFQMMTTGEVWNPTDLFKVDMPDSLKERQLSKAVKQATKFLEKQGLTVS

SEQ ID NO: 257089 - protein, 342 aa, unidentified
MNQYVGLDVSLEETKIHVLDETGGRVWRGKCASHPGELETTICQHAPDAMRIGLETGPLTTWLWTELRKRGLPMVCLDARAAQRALDMRANKTDANDAEGLAHLVRAGWYKEVRVKSRDAMLSKAVSAARRQLLDISTNLSNQVRGLMKTFGLVVPKGKGRIFEANVRRLLDEEHALAAVVLPLLEAWRAIRNRAAELDRLLLRKVRDDANCRRLMTAPGIGAVVAASYVAAIESPANFKHARDVGAWVGLTPRRFQSGEMDYDGHISRRGDERLRALLYEAATVILTRVRSASALRSWALALKKRLGFKRAAVALARKLAVVLHVMWKTRKNFDPNHRLAA

SEQ ID NO: 257090 - protein, 401 aa, unidentified
MPFTVGFDWGNAGHAACILDETGAVRARLAVPHTAVGLAKFVAALARIAPAGEMPVAIERPSGLVVDTLVAAGHPVVPIHPNVVKACRPRYRAAGGKSDPGDAYMLADILRTDGHRFAPLRQASDAVKALRALVRGRDDLVATRVGLANQLRSLLESFWPGAAAIFADVDSPVALAFLARYPMPESAARLGEKRMAAFMAQARYSGRRSAAELLGRLRAAPTGLAGRDESEAKGEIVRALVLALERIVAAIRDLTARIEHDVAELPDGRIVMSFPRAGRINAAQILAEIGDDRERFQTADQLAAEAGVCPVTHASGKSRGVVFRWACNHRLRAAVTCFADNSRHASPWAADVYTRARQRGCSHPHAVRILARAWIRILWHAWRDRADYDPARHLAAQKCAA

SEQ ID NO: 257091 - protein, 343 aa, unidentified
MQTVTTIGLDIAKSVFQVHGIDAAGQVVIRRQLKRRYVLAFFQKLPPCLIGIEACASSHHWSRELQALGHTVRLMPPAYVKPDIKRQKNDATDAEAICEAVTRANMRFVVTKTPEQQSGLVLHRARHLFIRQQTAVINAIRAHLAEFGIIAPVGRHGVEELLNVVADPNDKRVPEIARACLMAFGAQLRRLKEQILEFDRMIRAWHRSSETSRRLDDCPGVGPVLATALVATVADPKSFRSGRNFSAWIGLVPKQHSSGGKNRLGSISKQGDCYLRGLFVAGALAVIRYAKIHGTKHRPWLTALLARRPTKVAAIALANKIARMAWAMMAKGERYKEPIALAA

SEQ ID NO: 257092 - protein, 342 aa, unidentified
MTAIGVDTHKATLAACAIDDLGRAIDEATFNNDPAGHVAFIAWARAIAPEVTIGVEGSSSFGAPLARAVQSAGLCVREVPPHLSRFERRRTRRPGKSDPGDALAIARVTAREPNLPPIRLPDRTSEIRLLLEAREDLIGETTRARNRLHAHLRVLLPGYGGKVANLVAARHRTMVRGLLRGNATVQGELARSLLDRLLRYERECATLTHRIEALVAGHPLLALPGAGPITVARLVAEAGDMRRFRTPDAFAALAGVAPIPASSGQVQRMRLNRGGNRQLNRAMHVIAVTQSRFYPPAKAYVTRRIEADGKTWREAIRALKRQLVRPVFRLLVEGSEVRLEAA

SEQ ID NO: 257093 - protein, 429 aa, unidentified
MTSKPSTTFTGVRVAIDVAKLTHQVLLELPSGQRRAMRIANTKTEIDHVVTTLRGFDLPCEIAFEPTGDYHRPLAYALGQAGFRLCQVSSIAVARTREALYNTWDKNDPKDAPVILPLLRNGTTQRYLDPLITGHQDLQEMANTYQQVSLRKVRLPHNLLTHHLPLYFPEAERYLHSSRAEWFTELLLFAPCPAAIRRDSKAAFVAAAGAPIAGRKVDKHRWLGDFYDTASHSVGLPVSDTSETIVMFRIVLEAYRALCRLRKRLEADIATHLSTQPDVVRLQTIPGIGPILAMTILAEARDLRRFGCARQFLKYCGFDLCTEPSGQFRGTTHLSKRGNARLRYAFWMAGTVAIRMQQNSFRRTFEDYIRPDPKSADRRRKGDTAVAAKMARVVFAVVTTGTESRRFPEATRPGGRIPSPGAVEAHATS

SEQ ID NO: 257094 - protein, 411 aa, unidentified
MEVVYPRCCGLDVHKETVVACVMVREGGKVQKETRTFRSVTPDLLVLHDWLLAHRVTHVAMESTGVYWKPVFNLLEGDFTVLLVNAAHIKTVPGRKTDIKDCEWIADVLAHGLVKGSFIPPEPIRDLRDLTRYRKSLIDERVREINRLQKLLESANIKLSSVATDIMGVSGKAMLEAILSGNTNPEVLAELAKGRLRKKLPLLKEALQGRFRPHHRFMLEQILTHLDFLDEAIAQMSDEVENRIRPFLPEIDLLKTIPIVAQRTAEMLIAEIGADMSRFPTDRHLASWSGFCPGNNESAGKRKSGKTRKGDRWLRRGLIEVAWAASRSKDTYLHALYHRIARRRGHKKAAVAVAHAILVMVYHILKHKVPYRELGPDYFDRLNLKYVKNHFVKRLEGLGYKVILEPTQVAA

SEQ ID NO: 257095 - protein, 426 aa, unidentified
MRVMYERVAGIDVHKDMIKVAVRTPGHRAWTRTSEVLEYRTFYGVLQKMAADLRKRGVTHVVMEASGVYTEPVYYALAEHDFEQVAVINPAHAKALKGHKTDAKDALRLAELFECGLLRGSYIPSQELKDLRDLTRYRIKTVQARTAEIQRLAKALESAGIKLDSVVSDLAGKSATLMIEALIDGERRGRVLADLAIGRMRTAGKLADLSAALVGRFTDHHAVLCRLHLDRITLFNAAVAGLEQKIAVKVTPYQRELELLKSIHGFGDAVAQAWLAEIGPAPHEHFASHERLASWVTLCPGNHMSAGKRRHGRTGKAGAYIKPMLVQAAWSAIKAKGRLQARYHKLVRRLGGPKNPAAVKKAITAIAHTLLKIAYEVLRSGKPYQDLGADFYTKRESPEQRRAYLLRQLEKLTPGCTITITPSEAA

SEQ ID NO: 257096 - protein, 328 aa, unidentified
MGHDSFEKSLKLPNDGVALLGWARNHLAGRRVCFVYEAGPTGFGVYDMLAANGYTCLVVSPGGVPRAPGRRVRTNRLDSRKLARLLRGGNLEGIRVPPPRYRELRELVQLRATQVAQLAAAKQRIKALFLRNALSFPGEKAYWTDDLRRRLRELECNRSLRIKLDSLLNALEFNQSQVNCSMTAIKSLVGSDEELAESVGYAMSIPGIGWVVATYVVARIGDWRLLRDSRETASFFGLVPAEDSTGDRNDRGPITKTGDPLGRSLLVEAAWAACSKDPEMAAFYRRVYASHPRDKAARIAIVAVARKLVTRLHCVLKERRGYELRLAA

SEQ ID NO: 257097 - protein, 312 aa, unidentified
MAMLSFCGIDVSKDRLDVVVLSEGWFFSVSNDTAGWAELVARLRPLTVSAIGLEPSGGYERGIIRALLAAGLSVRRINPNKLRQFARARGVLAKNDRLDARLIAEYVAIMPTRVVQRDAAAERLAEIVTMRRQLCDEHVAAENQAAHLEDAMLRRLSKRRQMRLEADIRLLDKRLAEMVAANVALAQRYELLTSMPGVGPVLAFTLIALLPELGKMSRKQIAALVGLAPYDFDSGKLKGHRSIYGGRMPVRNVLYMAALSASRYSPALKAFHKRLAAADKKSKVIIVAVMRKMITTLNAMLRDSAAWQPRSA

SEQ ID NO: 257098 - protein, 433 aa, unidentified
MKVLYERVAGIDVHKDMIKVAVRSPGEKPWTRTTEILEFRTFYGVLQAMARELRRRGVTHVVMEASGVYTEPVYYALCEQDFTEVAVINPAHAKALKGHKTDAKDCARLAELFECGLLHGSYIPAPELKEVRDLTRYRMKTVQARTSEIQRLGKALESAGIKLGSVASSITGASATAMIEALIDGERRGGVLADLARGRMREAGKLADLSMALTGRFTGHHALLCRLHQDRIAGFDAAVAGLDERIAGKAARWQRETGLLTSVPGFGDVVAQAWLGEIGPAPHRHFATGEKLASWVTLCPGNNISARKRKHGRTGDAGTYIKPMLVQAAWNAIRARGRLQARYNRLVRRFGGDNNPGAKKKAIIAIAHTLLKIAYQVLKSGTPYQDLGADFYTRRESPEQKQAWLERQLQKLHPGCTITITISPPQAALAPGA

SEQ ID NO: 257099 - protein, 480 aa, unidentified
MASEASTESSQGQRLTRKQKKELGRQIWSGSPGLEVVHRDAAGIDIGSREHYVAVGPDRDSQPVQKFGCFTTELHRMAAWLTQCGVKTVVMQSTGVYWIPVYDVLEQYGFDVWLVNARETRNLPGRKSDVQESQWLLKLHTYGLLRKSFRPTAEIRALRTCWRERAEYVQQAGTCIQRMQKALTEMNVQLATVLSDLSGVTGMKIIRSIVAGERDGKSLAEFRDANVKASKETIAKSLEGTWLPEQLAILQRQLADWDHVQKQMAACDQDLAALMKEMPTAEVEPVEPAPPAAGKTGKRKRKKASKNEPNFDLAAELKRVAGVDLTRIDGIQVMTIQTVISEAGLDMSQWPTENHFVSWIGLAPRNDVSGGKVLKKKKTRKVVSRLATALRMSASTLRESDSYLGAQFRRLRTRLGNPKAITAMAAKQARLVYRMLKYGQEYVDKGTALYEEKYRQQKIKLIARQAAQQGFALVPLINPA

SEQ ID NO: 257100 - protein, 452 aa, unidentified
MKNNKQKDLVMSVSFHKDAAGIDIGGAFHFVAVPSDRDDKPVRKFDNFTSDLYKLADWLLACNIKTVAMESTGVYWIPIYEILEARGFEVILVNARHIKNVPGRKSDVIDCQWIQQLHSYGLLRASFRPEHNICQLRAYMRQRESLIQYASNHIQHIQKALALMNVQLANVVDDIMGVTGLKIIREIIAGERSSEKLASFRDGRCKKSEEVIAKSLNGNYRDEHLFALQQSLELFDAYQAKIIECDLAVEKLLDQYYSDGQNPPRATGNKKKRRKNELHFNAENHLKQMTGVDLTHIDGLSTHSVLRIISEIGVDMSKWPTAKHFGSWLGLSPGTKISGGKKLGSRTKPSANRAATMLRIAASTLHRSNSALGAFLRRLKSKVGAPKAITATAYKIARLIYSMMKHGQDYVDAGQDYYDQQYKERIVKNMQKRAHMLGFELTPIQTLTLEVP

SEQ ID NO: 257101 - protein, 376 aa, unidentified
MYIVGIDIGKNHHEASIVSPEGKQIGRSLRFATTHKGADSLMSFIFKNIGNSPCVFGMEATGHYWYPIYSFLKAKGYTIYVINPIQSDSLRKMYIRQTKNDSIDSFLIAEVIRFGQFGTTSMADKNILAMRQLCRYRDSVISSRTEIKLRIGTIMEQIFPEYEKQFSSLWVSTSMGILEKYLTPENIENAPIDELFEIIKDKSHNRLTRAKAISIKEAAADTFGIKIAQDAFSFQLKQLIDRMNFLDKQIEALDCQILEYYEKFDCYLHTIPGIGMIAAATILAEIGDINRFKSSSALVAFAGIDPTVRQSGEFSSTHNHMSKRGSPYLRHAIFLAATTCSFHNSPLNAYYKKKRDQGKHHLTACLLYTSPSPRDA

SEQ ID NO: 257102 - protein, 424 aa, unidentified
MKRTQNEKILQIKFETLVVGIDIGKDTHYARAFDCRGIELSKLLRFSNTNQGYKALEDWMQEIMKEKGKTEAIVGFEPTGHYWFTLGDHLQRKGHRLAIVNPFHVKCTRELDDNSQTKNDKKDPKTIAMLVKDGRFRDVYIPEDVYQELREAVSERERLVEQMISLSNQVIRWLDIRFPEFNQVFKNWRGEAAWLTLRHFPTPAKVAATGASSIVSTWRKKMKKPSLKKAEKLVNLAIRSIGRTAGNEAAEAALRNLLTQYEMVMRQKQDIEQLMQELLIKVPSASKLVDIKGMGMVAAAVIVSEIGDISRFNDPRQIQKMAGLSLRENSSGKHKGKTRISKRGRRRLREGLFRAMITMLATNSEFRQLHQRNLSREQNPLNKMESIVALCGKLIRVIFAILTKGNDYDADRLLNDMKRSMKAA

SEQ ID NO: 257103 - protein, 321 aa, unidentified
MTYVGIDVSKATFVVAYSSAKTGRTKTFKNTVKGVHEFIQTISVTEHHCLLEATGNYSALLVYLLSEAGITVRLENPLKIKNFARAMLAVTKTDEIDARLIALYGERMQPAPYKLRSDSILVLKQKRTVLRQLKKQLVATRNLKGSMEALPFFDPKCKKTIERTIAFLDKQIKGMEEEIASLPQGEYKKQMDLLTSIKGIGVTLAAALIVATGGFTYFDNAKQLTRYLGLSPTYQQSGTSVNVKGHINRNGDSNLRSQLYVAAFSSLRCNTECKACFDRLRSNGKPGKVAVVAVANKLVRQAFAVATQGKPYVDGFKSERP

SEQ ID NO: 257104 - protein, 411 aa, unidentified
MSKKLKELAFVGVDTHKDEHTACMTNCFGQPLEVFTVENRPDRIEELLEEIDETAKSHSLKPIFGLEDVMGLGQHLARSLLAGGYQLKEVNPIETERKRLRRAHPDKSDPLDALAISKVLISEFDKLPTIQSLDEVYLAIHQLSNRRDSLVKEKTRIKNKLHILLHREYPYYQTMFKDTFSKAALAFWERFPIASLLKGIGVERLAQYLRANSNNTVSTKKALSILKLVDKDSLPSCLNLVHSSLIRNLVKHLRFLEEQIAIARKELEPLVDETGMKLCTLTGVDLVTAAKLIAEIGDINRFGSSDKLAKCAGIAPQQRSSGKKLKFKKSNRGRRQLNTAIYHIALCQIGSDRSGRPRSPKAREYFLRKISEGKTKKGALTCLQRRLCDIIYAMMKNKTEYRFQRTTNLAT

SEQ ID NO: 257105 - protein, 317 aa, unidentified
MNTKNNQNEINVGVDTGKKQLDIYIRPLDIYFTVENNQSGIKHAIQILKKHPVTCVTIEATGRLEQPFIIACAEANIPFVVANPVNIKRFAGAIGQKAKTDKLDAQLIAHFGEAIKTPLSSLMPEQMRLMSDLLSRRRQLMDMQTMEKNRSQIMPKTLSSLIKPILTTLENQIDKVDLKLQKLIEQCDEYKAKNAIIQSVPGVGNVVAFNLLSDMPELGYVNNKEAASLVGVASFNRENGVYQGKRMIRGGRPKIRTAIYIAMMSAIQYNSKFKDLYQRMVKAGKPKKVAIIACIRKLVVIINSMVKDGVMWDPKMV

SEQ ID NO: 257106 - protein, 350 aa, unidentified
MLYVGLDLSRKRLDFHAAGADGEPVAVAAAPPDSDGLRHLVKRLGDAEEVVAVIETMNGARFVHDQLELEGWDVRVADARKARALAPLACKTDRIDAWVLSELARRDLVPEVWLPDPAVRAERERARFRLHLVRHRSSLKNRIHATLMAFGHPCPVSDLFGVGGRRLLDRLELPEAWRETLEASLYLVDQLDEEIHECERELKQLGADHPYVPLLTTIPGIAWTLGYTIAAEIGDIHRFPSPVKLIGYTGLCPRVYQSGESDRRGPLRKNGPRYLRWALIEAAQHAARSPAYPYRETYERTRQRIGRNRGGKVAKIVIARKLAEAIWHMLTRNQPFTPCSGRRLVSLTAD

SEQ ID NO: 257107 - protein, 355 aa, unidentified
MDSIQYIGLDVHQSTISIAVLDADGKLVMQLVIATHAAALLDFLHGLRGTLHVTFEEGTHSAWLYDLLVRRVAKLVVCNPRKNALLKAGNKSDTVDARKLAELLRAGLLSPVYHGQNSTAAVKHLGRSYAALTEDTTRIMGRLKALYRSQAIACAGKKPYGSRHREEWLAQLTEGGLQRRARRLYQQLDLLQELRREARRDLIVECRKHSETKLLRSIPWLGPIRAALLVGRVQTPHRFRSKRQFWAYCGLALETRSSADYGFVNGQLERRKKPVFIRGLNLNHNHDLKNLFKSAATTASGSNGPFRPFYENLLLKGMKPELARLTLARKIAAITLHVWKKGEPFDAEYLKPQAA

SEQ ID NO: 257108 - protein, 426 aa, unidentified
MSKSDYDKQVLRRQRIRKTTLIVGVDIGNAFNALGFMDKEGNVLGSCTKLYNSREGFEQFVDMIEGLKAKHHLRDVLIGMEPTGHYWRKLAYFAKEHGYEVRFVRTTALKHHRELDESSSAKSDQRDALTIANITREGKYIDTVIEDGVLRQLRTLSKARERLLRYSVSAKNSLHAALDDYFPELHEIFWSMGSRSLWTILEQCPFPQDVVLMKVSTLQDLIAQSSRKKAGSAVKAEKLIESAQKSIGIKQIGNADRYRVQMCLEEVKRTVLSLKNIDKQLKFLLKETTAASYLMSIPGIGPLSAAVFLGELGDPTHFHNARQIVKYAGYDPQESDSGSHIGRKFISKKGRWLLRKYLFFMSMRVVFLSNYFQEYYLRKLETKNRVGQQPRRKEMLCAVAIKLIKVIFALLRDKREFVDLVPAAAA

SEQ ID NO: 257109 - protein, 340 aa, unidentified
MRIIGCDLHAAKQTIAMLDRDTGEVVEHTLSHDGETVREFYAAIRKPAVVGIEATGSMGWFVRLMEELGVTCRVGHPAAIRTAEPRRQKHDRRDAHLLLRLLLEDRFPAIWMPTAEQRDLRALLLHRHQWVRMRTRVQHALQAIALGQGVRRGSTLWSTRGQAVLAALPLRPHATDRRDALQALYRQLDAHVERLDEHVRAIAQQRSGATLLLTHPGVGPVTALATDVFVGDPSRFPNGKTLASYVGLIPSEYSSGARQRLGHLSKQGNPFLRFLWGEAVMGAVRRDLELQRFFRRKLAQKGLGKARVAAARKLGIRLWIMLRDQIKYDEFCRRSQRRPS

SEQ ID NO: 257110 - protein, 394 aa, unidentified
MILVGIDIGKNQHTFSIIDKNTGEILSNPSLFNNNQEGFRFLIKKLNSYSKSDLLIGMEDTGHYHFALLKYLLDIRYTVALINPTTTDLTRKLQGGITKNDPLDSLTICDVIGSNQRKKPYLITKVNRFDLYEQKQLTRHHHNLKEELNAYKNRLQKCIDIVFPEFNSLFRSKYGIVYMNILKTFASAEKIANSDIRTIRKCFEYNGRGKRITLSAEQLKAVAKTSIGIPSVAEEIQIRHLVCQIEMIEEQLSEIDKKIEEFSLKNNSPILSIPGISHFSGTSILAELGDICNYTKASQIIKFAGVAPYHYESSQFTAQHTAITKKGSRYLRKTLYQIILPVINHNKVFTAYYNKKITEGKGHRCAQGHCIRKLLRIIYHLLSTRQTFDPALLI

SEQ ID NO: 257111 - protein, 325 aa, unidentified
MFFGLDLHKRYSEFATMDIFGNVLRQGRIENTLEEMKTFSESIPAQSSIAIESSSTWYWAHRLLSERHRVVLSNPIKNKAIASAKVKTDKIDSVMLATLLRGGFMAECYVPSRETMEFRELVRYRANLVRQRTRMKNQVHAYLLMNNISIDAGPFTKGFVEEVRKIGDARVQGYLRLIDGLNREIREASATIRQKAGSNEDANLLMTIPGVSFYSALLIVSEIGEIGRFEDSSSLVAYAGLAPSTHSSGGKTYHGPIMKSGSRYLRWIVGQCTRVHMRAEPGGTVASFYARLARKKGDQKAIVAASAKLLKIVYWVLKEKRAYHS

SEQ ID NO: 257112 - protein, 343 aa, unidentified
MKLSRVGIDLAKNVYQLHGVDRHGKTVWKRRLKRHQWFKVLLDTVGPECEIGMEACAGAHHWGRELQSRGYTVKMIPPQFVKPYVKSNKSDAKDAEAICEAMSRPNMRFVTVKRVEQQDIQATHRIRAELMTQRTAKANQVRGLVAEYGLVAPKHLSSLRAAIPCWLEDAENGLTGDFRALLQGVWMDLLLLDDRVGEMDQKIKLLADNNEDCVRLQQLRGIGPMISTAMIATVGDARQYSKSRQMAAAIGITPKQHSSGDRDRLLGISKRGDVYLRTLMIHGARAVVARAKHKDDRLSRWVTNIANKKHPNVAAVALANKTARMAWAMLRHETDYDPDFALR

SEQ ID NO: 257113 - protein, 410 aa, unidentified
MEVLYQRCCGLDVHKETVVACLRVVSGGEVVREVRTFETTTASLMALSEWLAENGCTHVAMEATGVYWKPVWHILDDGDFQLILANAAHVKNVPGRKTDVNDATWLADLLAHGLIRVSFVPDTQTQELRTLLRTRKQLVREKSSHILRVQKTLEDANIKLDSVITDIIGMSGRAMIEALIAGESNPAKLARLANYRLRASQEKLREALRGRVTKHHRFLLRLHLNQIDALDASIATIDQQVEAGIAPFRVAVELVTSIPGVSDLGAQVIVSEIGTDMSRFPSEGQLISWAGMCPRNDESAGKRRSNRVRKGAPWLKTTLVQCAWAAVRKKDSYLKAQFLRIKARRGPKKAIMAVAASILTAIYHMLKDGTLYQDLGSNHFQSRSKGQQTKRLVKRLADLGYDVALTPLAS

SEQ ID NO: 257114 - protein, 363 aa, unidentified
MKIMTGIDLHSNNALCGLMDESGQRLVHKQLPCDLPAILQLLDPYKERIATVAIESTYNWYWLADGLRDHGYNVVLANPARMKPYDGLKHTDDVSDAFFLTELLRLNILPTGHLYDRKTRPVRDLLRRRLLLVHQRTSLILSFKSLNERTLGQRVALARVKAMKAEEARALFTDPADQLLSGTEIELMGHLTQAIHKIEAHVLNVAGKWSTYQRLQELPGIGKILGLTIALETGDAKRFADAGNFASYCRCVKSLRTSNGKKKGENNRKCGNTYLAWAFVEAAHFACRYDDQCRRFYDRKKQQTNPIIATKALACKLAKAAWHVMVEDVPYDAERVFGPGKKTDFGETGREPAKGSGPTSQTD

SEQ ID NO: 257115 - protein, 484 aa, unidentified
MNEHSTLTVGIDLGDRRSTACVDGAGVVVRWLEFPMTPEGVREAFTNQGFGRVAMEAGAQSGWVTRELRKLGYEPLVANPRKLKAISANERKSDRNDALLLARLAVADASLLYPIHHRTEARERALSVLRARDTLVRTRTRLISTIRAMCKGAGCRLRSCAADAFAKREAEMPAELAPATAGLFAAIRSLDEQIRLYDAQLAEMAETTFPETQRVLQVRGVGPVTALAFVRTLEDPARFRDGRTAAAYLGLVPRRDQSGEVDKQLGISKTGSTFARRLLVQCAQYILGPFGRDCDLRRFGQRLMERGGKSAKKRAIVATARKLAVLLYRLWKRDEVWKPLHNAELAAPPSKADAVRPQPAAPADCARFLDDAQAGERRRIDCSADDGPDPTTRRTSSGPSTSADRSTGRGAAASTTTKPRTAAPGRADRPRASGPGPATPSAPATPACAGDPADPCPPAPRHGPKRKQGAAGAAPSPAPGGRSP

SEQ ID NO: 257116 - protein, 323 aa, unidentified
MAKRITICAGIDTGKRKLDVALDGGSERFQADNTPDGHKVLVEWLRQHKVKRVGIEASGGYEQAVVAELRRQRFVVVVFQPAQVRAYAVFHLQRAKNDKIDAVLIAACTAAVKKIHPAPDPRLRPFAEHLTMIDQITEDIARLKNRIESCRNMRLQKLWKEDIARLVKRERAELKALAAAIREHRDLAKKLALINSINGIGLKTAMVILMRMPEIGQITREQAAALAGVAPYDDDSGDRTGVRQIAGGRERLRRALFAAALPASFRWNPQLIAFYGRLTGAGKEHKRALIACARKLLIFANTVVARGTPWQEKLPEVASMPAT

SEQ ID NO: 257117 - protein, 412 aa, unidentified
MKQIRDKVAGLDVHRDTVVACARIVEPDRSVSVTKASFSTTSRGLGELASWLGDSGASTVAMEATGVYWKPVYYALEGLFAELWLCNAAHVKNVPGRKSDLSDAEWLADVAAHGMVRPSFVPPPEIREVRELTRYRKAQVDARGKEIQRLEKTLQDAGIKLTSVASTVWSQSSRAMVEAMIAGERDPKVLAQMAKSRLRAKIPALEEAFSGHFGDHHAFLCREIIGHLDHLDASIASLNGEIARRLVPFEAAVTILSSIPGVSRTTAEVLIAEMGIDMSRFPSPGHLCAWAGVAPASHESAGKRRPAGTRHGAPWLRRALVPAARAAARTKGSYFSAQYARIARRRGPNKAAVAVANSIVAVAWHLLSNGALYDDPGADYFERRNDPVREAKRLQRRIEALGFEVTIGEKAA

SEQ ID NO: 257118 - protein, 340 aa, unidentified
MKLYSGMDLHSTNTYIAIMDENRRRVIDRRVPNQPKVILGFLEPYGANLEGIVVESTYNWYWLVDLLQGNGYRVHLANPSAIQQYSGLKHTDDRHDAFWLAELLSLGLLREGYIYPKEIRPIRDLLRKRAHLVRLRTSLVLSVQNIVVRNCALKVGAEEIKKLTADVLSPHLQENEGLCLSGKISKELIDAFTRQIKSIEAWIMKRLQVQELFVNLLTLPGVGQILAMTIQLETGSIVRFSQVGNYVSYCRLVGSQRTSNDRVKGKGNDNNGNKYLAWAFSEAAEHARRHYPMCRAFYNRKLRQKNSKVAHGALARKLARAAYYILRDQEVFKEAKMFSY

SEQ ID NO: 257119 - protein, 372 aa, unidentified
MNYNTVYVGMDVHKESFTLCAYTIDAEKGSHFQRTEADYKNVLKYLEFLRTVYGNDANFICGYEAGCLGYTLYHQLTEHDVNCVILAPTTMLEQRSKRRIKTDRRDAEIIGKCLAQHNYSPVHIPTATDEETKEFLRMRDDHKLALKKVKQQILAFCLRHNYRYDGNSHWTAAHIKWLKSLKPEALYKEILDEYLLTYTTLSDKVERLDKRIEELASKDEYRESVKKLCCFIGIKTHTALSVLVEVGDFQRFASAQNFASYLGLVPGEDSSGDGQTRLGITKAGNRHVRMLLTEASQCYARGQIGFKSKELKSRQAGNSPQVIAYADKANERLRRRYYKMVLGKSKKHNVAKTAIARELACFMWGMMTEHIA

SEQ ID NO: 257120 - protein, 367 aa, unidentified
MKKISTAAVKQVRNFSEQKLTIGFDLGDRSSWYCVLDEAGSVRLEQRLSTAPKAMKEVFGAMPRSRIALETGMHSPWVSRLLSELGHEVIVAHARNVRLIGESRKKDDRLDAQTLARLARIDPQLLCPVKHRSAKAQSDLTVIRARAGLVRARTALVNTARGLAKSYGERLRGCNVRNMNPEKAQELSPELQRALEPLLAGIESLSERICEYNERIEQLAQESYPQVVRLQQVKGVGTLIALTFLLTLEDAQRFRKSRDVGCYLGLQPGRRNSGQSVPQMHISKEGDPYLRTLLVQGAHHILGPFGADSDLRRWGLKLAERGGRNGKKRAVIATARKLAVLLHRLWVSGEAYEPLRNSNQRAMPAAA

SEQ ID NO: 257121 - protein, 411 aa, unidentified
MNNTLFVGIDISKRSNVATFMNCEGKVVGRLAFSNNGSGADRLVAKILSYYEKEDFEEIRIGMENTSVYSKNLVWFLYEHEALNEHKLSIIPLNAIMVANYKKSFLDMDKDDITDSFAIADFIRIRPGLLPFKLDDRQEALKIMTRSRYNYVQALSRMKSQFLTRLFLSFSEMEAGKPFYSIFSKTSLSLLEEEFTLDELAEKPIPELVEFLQEKGGGKFQNPEEIAKVLKKAASSSYRVPAMVRESLNRTMASDMEIMRILENEIHNCDKNIEKLMKSVPAILVSIPGIGPVLAAGIMSEIGDISRFQKQESLGKMAGFKWKRNQSGKKESEDKAAVLSGNKKLRYYLVEAANRVRIHDPVFEAYYRKKYAESKTHAHKRALILTARKLVRVIFYLLKENKLYKPDVGIS

SEQ ID NO: 257122 - protein, 334 aa, unidentified
MEFNNFIGIDISKDTFDLALIRENRETAMISRSFSNTHSGLVHLEEFLKNQELKMTETLFCMEHTGIYCRLLSEYLTERKYHVWLEMPVKIIRSLGLQRGKNDRIDAKRLAQYAFTNKAKATLWNPPREIVIQIHDLLTLRDRLVESRKSLKQPINEFNKTGFTEAAKLIESKCSITLNAIDKEIKQIEKDLDDMINKDSNLQRLYQLATSVPGIGKITTLFLLYFTNEFTLFSNAKQLACYCGIAPFEYKSGTSIRGKTKVSPFANKKLKKLLHLVALSTISKDRQLVGYYQRKVSEGKNKMLVINAIRNKVLHRLCAVINRGTPFQTEYQLM

SEQ ID NO: 257123 - protein, 392 aa, unidentified
MVVSVGIDVSKDKHDCFIVSSDGEVLADVFTISNTLDGFHGLLQRIQECSAPKDKIKVGLEATGHYSYNLLGFLLDNGLATYVLNPLRTNLYRKSLSLRKTKTDRVDARTIASMLLSDAGLKPYTDTAYHNEELKSLTRYRFDKVKERAKLKSSIARLVCILFPELEKLVPSLHIASVYALLEEFPGAKQVAAAHLARLKALLETASNGHYKRDMALEIRDTAKNSIGSQMPAKSLELQHTIRLIRELNREIDEIEEQIQSIMDELHSPITTIPGLGFRMAAMILAEVGDFTRFDSPDKLLAYAGMSPSTYQSGQLKNCYPHMEKRGSRYLRYALYNATKYVCHWDSAFADYLAKKRAEGKHYNIAISHAAKKLIRLIFAMEKSRQPYCSAA

SEQ ID NO: 257124 - protein, 348 aa, unidentified
MEYIGLDLGKTSSQICLLSEDGEFIERRIKTGRESFARIFGQRPKALILVEASTESEWVARYLEGFGHQLIVADPNFAPMYATRSKKIKTDKRDARALCEAARLGAYRRAHRSSDRQRHIKAELTVRATMVTTRTKYIVLIKSLLAREGWRLMGGSSESFVERVKLLQLPPELLGEIEPLLILLKALNEQISEADRKLEELVETDEMVKRLTSVPGVGKVTATAFVAAIDEVARFADARAVRSYFGLVPREFSSGERQQRGHISKAGSRRIRSLLVEVGWGILNRQNNPSTKSLRDWALKIAERRGKKIAAVALARKLAGILYAMCRDRTEFSPPSKTGESLQMGLAA

SEQ ID NO: 257125 - protein, 417 aa, unidentified
MKPIDEGGIGVWVGLDWADEEHAYGLRMSGSSEIETGEVKQTPEALASWINELRQRSGGGWVAIAVEQSRGALLYALMDYDFVLIYPINPKSLSSYRKAFYPSGSKDDPRDADLVLDFLLKHRERIRLWQPQSPEVRCLRLLCEQRRKLVDLRAELTNQWTANLKNYFPQALKWAGPLKGNKACDFLNRWPSLQSLQRARPSTIRRFFKSHRGGGSEQLQLQLEEIKQARALTGDTAIVTACSLLTQSLAGQILQLNDSIQRFDAKIEELFNHHPDHFIFSSLPGSGKALGPRLLTTFGEDRDRFECAGEVQTVSGIAPLLRTSGKSRIVSYRWACPKFVRQGVHEFAALSRHWCPWAQAYYQMQISQGKDHHVAVRSLAFKWLRIIYRCWKNRVPYDDAIYMDSLKANNAPLLAFL

SEQ ID NO: 257126 - protein, 340 aa, unidentified
MDQYVGLDVSLKETSISVRQKRKRIWRGKCLSDPKLVAEAIRRHAPDAALVVFETGPLATWFHRELTADGLPAVCIDARHAKAALDTAPNKTDANDADGLSLLAEAGFFREVRVKSPAAMRVRALIGGRAQLVGISTQLSNHIRGVMKTFGLIVPKGGGRIFEANVRTLLAGQEALASIILPLLETWRTVRAQAARLDRQLMAVARASAPCRLMMTAPGVGALTALSYASMIEDPANFKNARAVGAYIGLTARSYQSGEIDYDGHISKRGDKHVRALLYEAAILVLTRVRSASVLRTWGLKLKERVGFKRAAVAVARKLSVIMHAMWRDGSAFDKMIVAA

SEQ ID NO: 257127 - protein, 342 aa, unidentified
MTKDTMIGVDLAKSVFQLHGASMTGQPKFRKKLSRQGFAEFMAKQPPAIVVMEACGSAHYWAREMSRCGHEVKLIAPHYVKPFVKRQKNDMADAEAIVIAAQRPEMRFVEAKSTEQQSRAILFRARERLVHQRTELVNALRACLYEFGHVVPQGIHQLGRIKGILDEPNSDLPELMREECGDLMKQIAEKTVRVDARTAKIKALAAEADTARRLQTIPGVGPLTALAVEAFAPPMESFRSGRDFAAWLGLVPRQFSSGGKERLGRVSKAGQSDIRRLLIIGAMSRLNWLGRKSITDGSWLARIAARKPRMLVAIALANKMARTIWALLTKNEDYRDSAQVAA

SEQ ID NO: 257128 - protein, 387 aa, unidentified
MPQPNDLSRSLVPLEQDNTLAAVIELSQSGWLVAGTVPGVDRRPLKRLDPDERALLRLLLRWQDEATRAGRTVTRIAVAYEAGRDGFWLARWLRSRGIEVHVIHPTSVATSREHKRAKTDRLDTAMLMRVFLGWLRGERGHCGMVAVPSAEEEDAKRPSREREGLVGERTRLVNRMKSALARLGIRGFKPELRSAPKRLEALRAPEGLPIPPNTLAEFRRDLARLAMVREQIAAVEQARLERLEQAPKVVPHAMVRLLASVVGVGVETADMLVQEVLSRDLRDRRAVARYAGLTGSPDESGSKRREMGLAKSGNARVRRGLIQLAWRFLMFQKESALAQWYRARTGGARGARETTMIVALARKLPIALWRMVTTGEVPHGLVLRPAA

SEQ ID NO: 257129 - protein, 352 aa, unidentified
MDERNARVIGLDQGDRFSHLCVLNAEGAVVLRDRVRTTREAYRRRFAAWPGCRVVLEVGTHSPWSSRLLGELGLEVVVANPRRVKLISQAERKTDRVDAETLARLGRVDPQLLAPIRHGSEAMQRDRASLRLREGLVRSRTRLIQQARGVCKALGAPLPACSAGSFARRMKNAAELALVPGMARFIEEIEQLCAAIRAFDRDVEHACAQRHPVTAQLRQVAGVGPITALAYVVTLEDPTRFAKSREVGPFLGLVPRAHSSGERQPELGIPHRGDVLLRRCLVQAAHYVLGPFGPDTELRRVGLAIAARGGQRAKKRAVIAVARRLAVLLHRLWVTGETYQPIGYRHRAARAA

SEQ ID NO: 257130 - protein, 480 aa, unidentified
MSPSFIAIGCDSSKGRIDVEVRNHHGTVLHAGIFDDTPNDHAAVRRLIDELRERYPEAFFLVGIESTGGMERNWLAFFRKEKRWTKCMHVFKLNASSVHAYRLSQLHRAPGDAAAASDIARFLLEKCSKRTPVTEPESGPLVFYRMIRALIGERICASQRLQTLLVAVHPDLVRFCRYGLPTWILLLLERYPTAALLAQAQISTVDAIPHIDTTRAGELIANAGQSVASLTDSATSAAIRLLVRRLRDTEKCIDEAQAELLTIITSDPQSQLAKAVALLDGMPGIATWSAACLACEIGDPSRFPHGKSIVAWAGLDPVTEASGDDHHSLGISHRGNAHVRAMLFPLAMSGIQYNPVLKAFYERLTTTNGKTKLAALVAVMAKILRIAHAILLSEKAFDPTHEANRQQLAQATQANRSPVPAAAPAPPQAPRLEAPISRREANKRKKAAAPSASVRDQSPKRMTGREPHSKHHAQPTHAKG

SEQ ID NO: 257131 - protein, 359 aa, unidentified
MASKVKKNKVNFKGKMVSIGIDMHKISWRVTALVEGDVVLAITLARPNYEAFKKVISRFEGNHVRIVYEAGPGGFDLYDKLTEDGIECIVTPPSLIPTESGNKVKTDKKDSHKLARFLESGMLKEVWVLSPEERAHRQLTRTRRQIVNHRSDVMRQIKSLLLFNSIDVPFKSTQHWRGPFMNWLLKLDLGYETLNRSLKALVDLFNYLSAEKKRITEDVLELAKKEKYAKRVALLESIPGIGTLSAMEILVEIQDITRFKTADELAAYLGLTPSQYSSGEHIRMGHITHAGNTRARTTLVESSWTLIGKDPEMKGKYQRIKEKRGGKRAIVAVARNLSGRIRRMLLDHVPYELNFQKAA

SEQ ID NO: 257132 - protein, 428 aa, unidentified
MSNQEIIRRGKFCQIVKEIRGSNKYLVVGIDVAKDKHHAFMGTAAGKSLLRRLIFENNIEGFARLLTTADAIKSQNGLSKIVYGLEPTGNYHKPLARHLIRCDCDVVLVTGQAVKKNRYLLDGRWDKNDIKDAANIADLVSRGRCLYYDCPSPSIIEIRSLLSLRRRLKREEHGLRMRIRNNLLAQYFPEFDMFYSACESESLSIIKYFLDPDTISAMEFGEFFHLVTRTRRGTAQTLRLRKIHGLAIESVGCPMGPAGEYEADLLVEKLNQVRQQIKKTADLIKDFCLEFYEYSYLLTIPGFGPYISARVLASIGDPFRFENRKQLIKMAGYDLCANRSGRTSDKAIPVISKKGNGELRYALYQAAMVASARVDLFRTYFTKLLRGRERERGIKTKMCVKLAAKMLVIAWTLMKKREPFDPSYLNIE

SEQ ID NO: 257133 - protein, 455 aa, unidentified
MAHKGKKTKPTPEGMPLVHPHAAGIDVGAEEHWVCVPADRDSQPVQKFSALTCDLHRLADWLTTGRITTVVMESTGVYWMPLFQILEARGFEVALVNARHAKNVPGRPKTDRCDCRWLQKLHSYGLLAPSFRPPEHICQLRSLLRHRDNLIHMMVKHIQHMQKALDQMNLHLHHVLSDLTGVTGMRILRAIVAGERDPQTLAQYRDYRIKASPETIAKALEGDYRSEHLVTLTQSLALYDFTQQHIAACDQEIERVLSTFETRVDPTTHPLPPPTTTHRQPQRHEPAFDLRTHLYRITGVDLTQVPGLQAPTIHVILAEVGLNMHKWPTEKHFASWLGLCPDNQISGGKVLATGSRRVQNRASRALRMAAQSLRTSPSYLGAFFRRMRSKLGPAKATTATAHKLAKIIYHMLKEHTPYRERSAADYLHKAQERQLRQLRKQAKHLGFDLVPQTSH

SEQ ID NO: 257134 - protein, 405 aa, unidentified
MKVCGLDVHKDSIFCAIFDGKNADVKKFDTFTPDLKAMCEWVRSQGVETVAMESTGVYIDAIRTVMRQCGISTVVANPFLIKQMPGRKSDTKDSIWIAKLMYKGMLPSSFIPDGVLSELRAYTREYARLMQHRSAILTKIDRFLVSGGIRLSSCISKITTLSFSRVARAVAAGEDRPEVLEELVHGCTARKIDGTLRKALTGCMEKHTRWRIGLALEELDLCEEQIAEAKRNMEELAEANYHEQLYLLRTIPGVNIISAVCIIAEIGADMAQFGSASRLVGWAGLRPRNDESAGKYKSTAITRGGAHLKPTLVQCAWGAVHAKDSPFKTFFMRLSSRKSSKKAIIAVARKLLTAIHAMLLRHEEYCPNKTSSTSPDQLHKMVQYHLRQYQRLTAQLPQPAQIITA

SEQ ID NO: 257135 - protein, 356 aa, unidentified
MNKSNKLDFTGQPIYVGLDVHKKSWSVSILSEQCEHKTFTQPPEVDKLAYYLRRNFPGAQYHSVYEAGFSGFWIHDQLRERGIDCIVVNPADVPTKDKERAKKRDPVDCRKLARSLRNEELEGIYVPSRWKLEDRSLIRTRLSMVRKQTRCKNQIKGMLFFYGIHLPEELIHSHWSRRFIRWIERIRMERASGDIALKAHLEELKHLRKIIAALNRAILALARTEPYQVPVKLLKTIPGISTLTAMTLLTELYEIGRFPSLDELSSYTGLIPDTQSSGEKEHTGGITERRHPQLRCVLVEASWVAVRKDPALLMAFLQYCKRMRKTRAIVKIARKLLNRIRYVLKNQMPYVAAVVQ

SEQ ID NO: 257136 - protein, 409 aa, unidentified
MLFIGDDWAEAHHDLEIEDDTGRLLARKRLPEGLAGISGLHELVAEHLDPTGEPDQVLVGIETERGPWVQALLAAGYVVFAINPLQVARYRERHSPSGAKSDPADAHLLAEIIRLDRAHHRRIAGDSEIAEQVKVATRAHQTMIWSRVRQVNALRSLLREYYPAALTAFGTDLAGRDALAVLTAAPTPDQGRRLTQARLETLLRQAGRQRNLAATATRIRAALASDQLTARPGIVPAYAASASALLAVLTVMVSQTEVLAGQVEQGFGQHPDVEIYRSQPGLGVILGARVLAEFGDDPNRYADAKHRKNYSGMSPITKASGTKRVVLARYARNRRLGDALFLQAFAALNASPGAREFYDRQRARGATHYQALRTLANRLVGILHGCIRTQSCYDEHQAWHTEQEQPTAA

SEQ ID NO: 257137 - protein, 385 aa, unidentified
MKPNSQMTLGESFRQCVGIDISKDKFTACLYMYDRASDVGCCTKSIDFANTKSGFNQMVKWSRKEAVKEYPLVYLMEPTGIYYERLAYHLHKIGQTLYIVLPNKARTFCEAEGIKTKTDAVDARCLALMGCTSRKLRPWSPPKAIYSELRQLTRFHADLCKVRTSVTNRQEALLHMEDAAKGVLKGCEKLIAEIDKLLEKNEKDINDKLAQDKELKAKIERITTVKCIRIATVTCVVAETQGFHLINNRKQLTSFAGLDVVAKQSGKEDPKHVISKKGNAHIRAALYMPALSATFHNRQMKAVYGRICQKHPNEKKIAVIAVMRRMLLLIYTLWKNGEVYDEERDTTHTLRKKDFVAEYTKEDCMGTIQEPVDWNTMDENGEPPF

SEQ ID NO: 257138 - protein, 344 aa, unidentified
MKNSNVIGIDLAKNVMQVCIIDKHGELLSNKAISPSKLKILLANNIQSIVAMEACGACHYWARLAQKYGHDVRVISPKKVKAFLQGHKTDANDALAIAIASTQFGMNFSQIKSEEQQSLQTLETSRKFLSRELIALNNHIRAYLYEYGITMNKGQKGLREAIVVVLDGGDTRLPMCLKNTLRLLWERFQLTVAQFKDTEKYKAHLVNQIEPCKRLMDLEGIGKVCASMLYVNIGDGREFKSGRQASVYIGLTPKQHSSGGKTYMIGIDKHGGNKELRAALYQGALSIISRLPSEPRTVKEAWLIELVKRAGIKRACIAMANKTVRTAWALLATGKSYQPVLLSK

SEQ ID NO: 257139 - protein, 411 aa, unidentified
MDVLVERCSGLDVHKDSVMATVRTPGPAGQREEVTKEFGTTTAEILVLRDWLLSHGVTLVGMESTGVYWRPVFYVLEDAMECWLLNARHLRNVPGRKTDVKDSQWICRLVEHGLVRPSFVPPKPIRELRNLTRYRKAQIDERGREALRLDKVLQDAGVKLSSVATDILGKSGRDMLNAMVRGTRDPEVLAELARGKLRAKIPTLKEALAGRFSAHHALLVSSILAKLDFLEEIIASLSEEIDRVIAPFAPQVELADTIPGVDRRVAEALIAEVGVDMSVFGTPERLASWAGMCPGNHESAGKSRSGRSRKGPKWLQVHLTEAAKAAGRTRDTYSGAQYQRLRGRRGAAKATKAVGHSILVAYFSIMQNEVPYRELGPDWFAKRRPEAQARKLVHQLERLGYSVTLSDSAKA

SEQ ID NO: 257140 - protein, 388 aa, unidentified
MSKPFDLSKSLTALDQDSTLIVVIEMSQSSWLVAARAPGLARDPLKKLPPDPEQLFKLIDRWREESRRAGRVVRRVCVAFEAGRDGFWLARLLRQHDIEAYVIHPTSIPVKRDHRRAKTDRLDTELLMRAFLGWLRGEADHCSMAAIQTLAEEDAKRPTRERESRVNARSRLVNRMKGALARLGIRGFNPKLRKAAEKLEELRTGAGEPLPPNTLAELRRDMAQLRFVADQIKQIEKAREARLEKAPREGAHPMVLMLASIKGVGLETAEMLVAEVLSRKLRDRRAVARYGGLTGSPDESGSRSREKGLARSGNARVRRGMIQLAWRFLMFQKESALAKWFEARTANGPRGVRKTMIVALARKLLIDLWRFVEDGTVPVGVELFDSRA

SEQ ID NO: 257141 - protein, 487 aa, unidentified
MVPMSVDEILAVRDLIEAYIVRDIGLGCLIPKLITMAKLAKKKQTAKGLRLEVVNPNAAGIDISPKEMQVCVPADRDGDSNRTFGVYTEDLHCIAEWLKACHIDTVAMESTGIYWLPIFRVLKDSGFDVILVNASDVKNYSGRKTDASDAEWLMMLHSYGLLKPCFQPENIARTMRNLVRHRDNLIRSASREVLHLQKAMEQMNLKLDNVFSDILGKSGQAIIRAILEGERDPKALSALADPRCKTSKEEIEKSLEATWDEEHLFEMKQSDSLYQTYQQLITECDSKINEIATQYAAMVDAPKAELLRSEKHNVKKNQIGFDVEKASFNLWGVNVMRMPGMSRASLLRLLGELGADFTTKFPSVKHFVSWANLVPNNKISGGSLLSSKVPKKKNPVGIVFRQAANALKMAKCPLGDYFRHMKAKGGHLQAMVATGKKLASIFYIMVQRKIEYDEEVYTNHRKAELQNKVTYLQKRLERMELELANCV

SEQ ID NO: 257142 - protein, 341 aa, unidentified
MKNLFIGIDFSKEKVDVAIIFAEGLTETASRVFNEFKTTVSGYKQLVKWVEQNSYGIDSSLWLFCGENTGDYSNGLCNFLYGKGYDMWLENAKSIKDASGLRRLKSDRADASMIAEYAMRNYDRAIMYEPLSESLAQLRELFLYRQMVIRHRCSFQVRRGEKKLTMEKSPIKTMISQSGRHIVSELNKEIEKIDKRIAELIKSDEELTEVYTIVTSVPGIGTQNAVCMMVYTDNFRRFNYDSRKIACYYGIAPFGKDSGTSVHSDPRVHYMANRQIKAMLTQAALAAVNFNPVIARYYMRLVERGKKKQVVLNNVKNKLIHLITAMVRNRQLFSPEYKISA

SEQ ID NO: 257143 - protein, 389 aa, unidentified
MEARTVNNPPPAAPHDDAVRCVLAIELSKKSWIVAVNTPSSEKISRYTLKACDWKELLKLCERIGTRIARELKKDVELVSCYEAGYDGFWLHRLLEAHGIRNYVIDPASLQVDRRARRAKTDRVDVERLLRSLMAYLRGEPKVWSVVCVPSVAEEDDRRLHRERGRLINERIQHVNRIKGLLAIHGIYDYPPLRHDRMQQLERLRTADGRTLSPRLKAEILRELQRLELVIGMIKTIEAERDAIASAKIETEHSSAKRIQDLAKIKCIGPEFATTLVGEVFYRFFDNRKQLASYVGLTPAHFQSGETCRDQGISKAGNAKARRVMIELAWLWLRHQPASPLSVWFHDRVGKLKGRIRRITIVAVARKLLIALWRYLETGLAPEGAILKV

SEQ ID NO: 257144 - protein, 409 aa, unidentified
MRYYLGVDWADQTHAVWVGDERGTKITARTVPHTAEGMIEWGRELDEWRAQKLELWAAIERPEGRVVDFLLDHGVVVYPVNPKALDRARDRFRQGGAKSDPFDARVLADFLRTDHPRLQALQPSSEAAQELKFLTEDCQRQIRQQTRLVNQLTNTLKAYYPRGLEVAELTTALAREFLQAYPTPAAVAALTERQWQRWARAHRLSEARTQELWAVLQRPQLPVLPHVVRAKARLMHILLAELELVVAAVGTYRQAVEDFFAALPAAQWIRTLPIGEHGVTAPTLWARLGDAPGRWESFHHLQAHAGAVPVTVKSGKQQVVHFRFACDKALRSVVDQVAFLSLRSSEWARAYYDQQRARGHEHREALRALGAKWVKIIFVLWERQVPYDESYHLATMARQQLRQRPKKLA

SEQ ID NO: 257145 - protein, 341 aa, unidentified
MKTPENFVGIDVASLSFTAAVGKKPWQLVVQPTEFANDYDSFPKFLHWLQQHNLQPENAVLCMEATGVYGEALAYFVQANGYRIAVEPPLKVKRAFDTSGHKSDAVDSRQIAEYACRYFDELAFWQPRADILEQIKVLLTTREQFSAQLTAHRNALKTLQRKVVVTPLAEQLHQDSIIQLKNHIKSIEEEIRRLIDQDPTYRQMVSLLMSVPGVGLLLAAQMLVIVENSPEPVSAKTLSAYIGICPYEHLSGTSVFKRSSSRHYGPAAVRKLLYLAAMSICTHHGHFREYFLRKVAEGKSKKLVLNNIANKLLRIMCAVLRTQTPFIPNYQSVNPRFLITT

SEQ ID NO: 257146 - protein, 402 aa, unidentified
MNCVGIDVSKGKSMIAVMRPFGEVVVSPFEVRHTASELSELARLLKNLDGETRVVMESTGNYHAPVAWLLHGAGLYVSVVNAMLVHDYGNNSLRRGKTDKKDAVKLANYGLDHWLTLPRYVPEEDTRLMLKTCYRQYQQYSKVQTMLKNNLISLLDTTFPDANRLFTSPPRADGSEKWVDFVATFWHCECVCGLSEKAFAAKYQKWCRKHGYHFSEDKALDIYASACGHFGVMPKTDTAKLLVEQAIFQLRATSAALAALKQEMQSLAASLPEYPVVMEMFGVGPTLGPQLMAEIGDVRRFHSKKALVAFAGIDAPPYQSGQMDVRSRSISKRGSAALRRTLFLVMGVLLQCAPMDEPVYQFMNKKRSEGKPYRVYMMASANKFLRIYYASVKAYLDSLEHN

SEQ ID NO: 257147 - protein, 477 aa, unidentified
MAAKKKKTRGADPNLLEQINHPNAAGVDIAAEEMVAAVPRDRAVDYVRTFSSFTRDLHALRDWFLECRIETVAIESTGNYWVPLYQILEEAGLEVFLVNARDVKGIGGRKTDVADAQWLQQLHTAGLLKKSFRPVKEVAALRYLMRHRGNLIRCSATLIQQMQKTLTECNLQLHHVFSDLDGKSAQRIIEAILAGDRDPQKLAQLRDARCRTPLAKVLKALEGDYREEYLFVLAQCLEQWKQIQKTLIELDAKIEASVAAIAIEPTAPPSAGPTEPGAPLAGPIEPSALSVEPPLKRRLHKNSPRFDIFAQAYRFYGVDLAQVPGVASTTLSVLMSELGTGEQIKAAFKSAKDFCSWLALCPENKISGGKVLRAKTRRSANRVAAALRQCSQSLSHSKSLLGDFVRRFKGRLGKAEGITAGAHKLARIIYSMLTTKQDYDEAKAFTLTPAKKARRVQQLLVQAARFGYDLVPASPAP

SEQ ID NO: 257148 - protein, 351 aa, unidentified
MPRTATVHAVTAIGIDMGKNTLHMIGLDSRGAIVLREKVSRGRITSRLANLPCCLIGIEAGLATHYVARELAALGHNVKQVPPTYAKPFRQGHKNDFRDAHSVAEAVQRPTTRFVPAKTDEQLDLQALHRVRSRLVSERTAVINQIRGFLLERGIIIRQGLPFLRQALPDILAKRTDVLSPRMVRIVADLASDWRQLDERIEPVTDEIETLAKSDDGCRRVMTVPGIGPIISSAMVAAIGNGAAFARGRDFSAWIGLVPKQMSTGDRTILGRITKRGNGYLRTLFVQAARVILLRPASWPKHSFGVWLARAAQRLHRNVLAAALANKLARIAWTVLAQERSYEARITKPAA

SEQ ID NO: 257149 - protein, 479 aa, unidentified
MTVWRSHKRIILHKRRQARRKIKRLNFKKMGKIKKKKGQVRNISEITVINHYAGGIDVSDTEMMVAYPIDSKQLVVEPFGCFTCDLKEIVETLKKHDITSVAMESTGVYWVSLFLLLQENGIEVSLVNAKHVKNVTGRKDDEGDAEWIQKLHRCGLLQASFQPDNMTRTLRSMMRHRKSLVQTSSSFINRMQKALELMNIKLHTVISDIDGKTGLSIIKAILDGERRPEVLAELRDKRIKATKEEIIKSLEGYWIKEHLFELRQSYELYLILKEKINECDREIEKQLLEQIASKNDGIIPDFSKTKIQRKPSGKSRLPFNATLYLQNLLGVDVTKIFGINELSALAIVSEVGTDMSKWKTSGHFTSWLGSAPNTKISGGKIISSKIMRKKHHAGQAFRMAAQGLTNSKGPMAEFYKRIKAKAGPGKAIIATARKLAVIWYNMIANQQAFNPKLLEDYQHKHKEKQINYLKRKLQSLEAA

SEQ ID NO: 257150 - protein, 356 aa, unidentified
MSQGTWIGLDVHARKTVAGVLDAATGEVRTCRVASRPVETVAWLRGLPAPVRVAYEAGPTGYGLARACAAAGIACTVAAPSKIPRASGDRVKTDRRDAERLARLLRLGELVAVRVPEPHEEAARDLVRVREDARGELMRARHRLSKLLLRHGLVYDAAAWTLAHDAWLRRQRFDSAALQLALEESYAAAVHAKTRRDALDQAIAELAIEPPFAEVVGKLCCLRGVSTLTALALTVELGDWHRFRPESLGPFLGLTPSEDSTGERRRLGAITKTGNTHARRLLVEAAWHQRRPLRSSTALERRRQGQPAAVQARADQSGRRLYRRWHALESRGKRRTVIAVAVARELAGHCWALATM

SEQ ID NO: 257151 - protein, 417 aa, unidentified
MKLDPNLHLATLSTVSVELRSRHGPLYLERGGRLWRAGKRRQVVERMSLRGVRHVEPLARRAAPVVPPANNRSGAFGTAAAVTHDRTVARLSIARTRQVTVTKVICGVDVSSISLEAFVGPAGPARGFPNSGEGIAELLAFCREQSVELVAMEASGGYERPAFAVLWAHGVAVAVLHPRAVRRFAEGLGLLEKTDRIDARVIAWFAKVKGSVPCAPLSAEQQQLRALVTRLRQLTELQAAQKNQRLLVSDATVRALIGELLGVLTTQMRKLEAQIAALLASDPLWQKLDQAFRSIKGVADRTVARVLAEMPEIGRLSNKAISKLAGLAPLARDSGKKQGPRPIRGGRRNVRAILFVVAGVVRRHDPDFAAFHQRLSAAGKPKKVIRIALAHKLLVRLNAKARQVRNQFVEPTACQTT

SEQ ID NO: 257152 - protein, 391 aa, unidentified
MIYIGIDVAKDKHDCFITNSDSEVLFKAFTILNNLDGFNDLYQKIESVMDDVTKVKVGLEATGHYSYNLLGYLIDKGLPTYVINPLHTNLYRKSLSLRQTKTDKVDARTIASMLMSDVNLKSYSDISYHNEELKSLTRYRFDKVKERAKLKTSVSRLVCILFPELEKLVPTLHMASVYALLSEFPSAKHVATAHLTRLTNLLSESSKGRYGKDTAITFRDSARASIGSNMPAKSLELKHTIKLIQELDSEIDEIENEIKIIMDEINSPILSIPGINYRMGAMIIAEIGDFNRFDSPDKILAYAGFSPSTYQSGQLDGAYAHMEKRGSRYLRYALYNATKYVCHWDPTFAAYLAKKRAEGKHYNVAISHAVKKLVRVIYHLEKTKQQYIKAA

SEQ ID NO: 257153 - protein, 388 aa, unidentified
MFFLGIDIGKNTHVASLLDEKAKIIFKAYSFANTLDAAEALLVKLEPYKDSLEIGMEATGHYWLSLYSFLTEHKFIIHVLNPIQTDGWRKGIEIRKRKTDVIDSVLIADLIRYGDFLETSLADEDILSLRNLSRFRVYLVNSVSDLKRKAIAVLDQIFPEYASVFSNVFGQTSKELLKSLSLPSDYENLSATKIEEVLSNITQKKKASKTISTLSDKARRSFGIAFCKDSFAFQLKLIIEQICFIEEQISSVELEIEQLMSKLGTNIKTIPGVGSVIGAVILGEIGDIERFDNPSKLVAYAGLDASVSQSGEYESSSGKLSKRGSPYLRKALYMAAQRAEFCDPVFHAYYEKKRNEGKHHLVATNAVARKLCHTIYAILKKDIPYEIQ

SEQ ID NO: 257154 - protein, 341 aa, unidentified
MEKFIRTAIDLGKNYFQVHGLESEGGRSISRKVKRSKMHEFYSQIEPCRVGMEACGSAHYWARQLTAMGHEVVLIPPAYIKPYVKRGKNDAVDAAAICEAMSRPDMRFVPIKSADQQAVLMLHKTRELLVKQRTMAVNALRGHLAEFGIVAAKGIGRVDELLALAKADAALPHIAGAAVACMAGHLEGLDLSIETVDEEIAKAHRQNPISRLLDEIPGIGTLIASVIAASVPDPGVFRSGRDFAAWLGLTPRQYSSGGKEKLGAITKQGNRYIRKMLVTGATSVLRVAGKRKGALADWINALRARKPERLVAVALANKLARICWAIMTTGEGFRTDTYVKA

SEQ ID NO: 257155 - protein, 317 aa, unidentified
MSAPAASFVGIDVSKQQLEIAVRPSGETWTVAHDEAGVNALVGRLRDLTPTLLVLEATGGWEVAVAGALAAAALPVAVVNPRQVRDFARSTGTLAKTDRLDAQMLAQFAEAVRPEPRPLPDAQAQELTALLQRRRQLVEMLTAEKNRLPLAARRIRPQLQAHIAWLHKQIAQFDEDLRQLLRASPLWREKDDLLRSTPGVGPVLATTLVAALPELGTLSRRQIAALVGVAPLNRDSGTLRGRRTVWGGRAQVRAVLYMSTVVAVRHNPVLSAFYQRLRAAGKAPKLALTACMRKLLTILNAMLKHHTRWAPVLAQHV

SEQ ID NO: 257156 - protein, 453 aa, unidentified
MARQNARVSLKPGKSRAALTITHPNAAGIDVGSASHFVAVPPDRDDTPVREFPSFTVDLNALADWLKACGVDTVAMESTGVYWIPLFELLESRGLTVLLVNARHVKNVSGRKSDVLDCQWLQQLMSYGLLSGAFRPADQVCVLRSLWRQRAMLLNSQGRHVQHMQKALAQMNVQLANVISDVAGETGQKILRAIVAGERDGQVLGSMKNARIRASIDEIAKSLQGNWRAEHLFALKQALDAFDFIGTQLAECDREIEQQMQCLQAHEGEPAKGKQRGRSRNAPKFDLRTQLFKMCGVDLTRIDGIDVTTALAVISETGADMSRFPTVAHYASWLGLCPGTKITGGKLMSGKTKRCANRAAQALRLAAAALRTSQSALGAYFRRMCSRMDKPKAVTATAHKLARLVYTMLTKGQEYTDQGQDYYEQRYRERVLRQLSQRAHKLGMTLVATAQLT

SEQ ID NO: 257157 - protein, 341 aa, unidentified
MNQVSTVGLDLAKYIFQLHGADSAGAVVFRKKLRRGQLLAFLATLPPCTVAMEACGSAHYWGREIAKLGHTVKLIAPAYVKPFVKRQKNDMADAEAICEAAQRPTMRFVALKSANQQAAAVVFRTRDLLVRQRTQAINALRGHLTEFGVIAAKGPVHASKLIAALEDPASDLPQAARGILAILVEQLRSLDERVAVLDREIARHAKENAVARRLMTIPGIGAVTAAALTALAPPAHTFRRGRDFAAWLGLTPVQRSSGGKERLGKTSKMGERSLRRLLIIGASAVARWAARKGVPAGAWLGRMLARKPPMLVRVALANKMARIVWALLAHGGVYRAPVAAV

SEQ ID NO: 257158 - protein, 317 aa, unidentified
MSKHSMICAGIDTGKRKLDVAIKGQADEVQVDNSPDGHRALSGWLRRHRVKRVGIEASGGYEQAVVTQLRRDKFEVVVFQPAQVRAYAQFHLQRAKNDKIDAALIADCTAAVEHIHAPPDPRLAPFAKHLTLIEQITEDIARLKNRHESCRDQRIGRLWGEEIARLKGILRSELKQLVAAIRQHPDLAERLALIASVDGVGLPTAVTILVRMPEIGRVTREQAAALAGLAPYDDDSGDHVGARCIDGGRERLRKSIYNATLAACFRWNAQLVAIYKRLIGAGKTHKVARIACARKLLIYVNAVVERGTPWAQNPTAA

SEQ ID NO: 257159 - protein, 408 aa, unidentified
MLKIVYPNCCGIDVHKTFVLAVIAITDEHGVTQYFRHRFSTFTKGLGELKQWLEYYSCTDVCMESTGKYWIPVYNVLEDSCSICLAHPKYVKAIRGKKTDKKDAKWIADLFKHDLVAGSFIPPLPIRELRDLVRYHFKLTNFCSSEANRLQNSLTVSNITLSSVLSDVLGVSGSRIIDAILEKPTDEIDLSALIHGRLKSKLSDLELAIDGKITDEQAIKIRIIKSHYDALTLCKSDLEKAIIEVAEEFRAQQELIQTVPGCANQFTAIKIISEIGVDMGQFPTAGHLCSWAGLTPTNDESANKKKSVRISKAGHYLKPLLVQIANGIVKSEKYPEHRNKYLQLKKRRGHKKAIIAIARRILTAIYHVLLQREPYDSSYYSIEIVHPNRVMTINEAISFAKSHGFVVS

SEQ ID NO: 257160 - protein, 370 aa, unidentified
MKNVRFVGLDVHAETIAVAVAEPNGEVRSLGIIPNRAESIGRLMRKLGKPEQLRVCYEAGPTGYVLYWQLSELGVKCEVVAPTLVPVKAGDRVKTDRRDAEKLARLFRAGELTSIRVPTEVEEALRDLIRCREDGREDVLRQRHRLLKFLLRHGRVFRETKHWTLDHWRWLRGQRFEQPLAQTVFTEYLSALEKSLERVKTLDQDIASEATRAPYKELVGRLRCLRGIDTLSAMALIAEICDFDRFEHPRELMAYLGLVPSERSSGGKQRRGGITKTGNAHLRRVIVEAAWAYQFRAWLGGYLLRRQTGLSQEVRDIAWKAQNRLHLRYRKFLARGKNKPQIVTAVGRELLGFIWAIGVKVEAEQQRIAA

SEQ ID NO: 257161 - protein, 412 aa, unidentified
MMDVLYERCCGIDVHKKMVVACLITPDATGTPTKETRTYGTMTADLLEMLDWLVGAGCTHVAMESTGVFWKPLYNLMEGTLEVLVVNAAHMKNVPGRKTDVKDAEWIADLLRLGLLQASFIPDRPQRELRELTRYRTSLLQERSAEVNRLQKTLEGANIKLSAVATDIMGKSGRDMLAALVAGRTDAAAMAQLARGKMREKLPQLEKALRGQFAAHQRFLVAQQLAHIDGLDEIIDRVSAEIAERVRPFEDAIEHIDTVTGVGRRTAEVLVAEVGVNLTRFPTHRHLTSWAALCPGNNESAGKRHGGKTRKGSPWLRAALVEAAKAAGRSKKTYLGAQYRRIAARRGAKRAAVAVAHSILVSVYYILTRHEPYRDLGVTYFDERDRQAVERRLVKRLQALGYDVSLRPLSAA

SEQ ID NO: 257162 - protein, 302 aa, unidentified
MKNFVGIDLGKRKITAAKIFDDGRIERLECGTTPGEIAKLVQWIDKAERVALEAGNLAFRLARQIAKEAATQVVVLNPGELATIYASLKKTDKEDALKLARLVQRFPVEELPTVSLPTELEIEQRALVTEHESFTRIRTMLINRLHAIFHNEGITDVTRVQLKNSQKRADRISQLTGAARTRAIRLQRSIATVEANLTEVHEEQRRHLCNAKPFAQLALSIPGVGDRAAFTLMAFMGDGTRFKNAGQVSNYAGLIPSVYISGDKTHYGRIVKRGCRQIKRIVIQCAWGLINSSHGGQIKIFL

SEQ ID NO: 257163 - protein, 393 aa, unidentified
MSTFVGIDIAKEVHWICAIDSGGKVLLNRKLLNTPDDLARAVGELHALPAPVRIGIDVLGGIASLAQAMLLADGRFELLHVPGLAVNRARQGTVGGESKSDPRDARVIADQVRTRTDLRAVTAQTELDIEIRLLVSRRGDLSADQTRRLSRMHDLLVGIFPELERELDLTTKTSLMLLARFVTPHELRVATDAELVAALGAMARRRFGRELIATVRVLAHRQPIAVPGEALTARLIKESAAEALHAIAQLAALDVEIEQRLALHPDAALIRSLPGMGALMTAEFIAEAGNIERFKSADALAAAGGLAPVLKQSGKSRRMQRPNGGNKGLKRVFYQSAFASLSSPNSRAFYGRKRSEGKRHHQAVIALARRRVNVLWAVLRDRTPYASRSHVNA

SEQ ID NO: 257164 - protein, 348 aa, unidentified
MRFYTQQHQYTCGIDLHARSLYVCILDDTGQSVLHKQIKATPEALLKLIQPYQDDLIIGVECMFSWYWVADFCAAHEIKFVLGHALYMKAIHGGKAKNDKIDSDKIARLLKGGMFPMAYVYPRPWRSTRDLMRRRMRLVHQRAELIAHIHNTLSQYNLPPSTDNLRYSKNRDQFRELFSDTSVQRSIDLDLDRIDFYDEQLGKLEWYLKKTARSIDPNTIIRLKSIHGIGDILSLVLLYEIHDIDRFARVQDFVSYCRLVKCQRESAGKIYGTAGKKIGNAYLRWAFGEAAVLFLRGNPDAKQWLEKKTRKYNKAKALTILAHKLGRAVFYMLKRKTLFDQDKFLALG

SEQ ID NO: 257165 - protein, 450 aa, unidentified
MSKEKKSKAKKVAIGEFTVLHPNAAGIDVSSKDYVIAVPPDRDKKAIRTFGCFTCDLKLIAKWLLACKIDTVAMESTGVYWKQLFVVLQEHGIEVYLVNSRHVKNVTGKKTDEEDARWIQRLHECGLLSNSFQLKESVRTLRSLVRQRKKLCDNKSTYVNRMVKSLEEMNIKLNIVLSDITSVSGQKIIAEIVKGERAPENLVKHVHHKVKAKREDILKALEGCWREECVFELKQTHELYNFLQEKISECDNKIEFQLECIAAKANKGDITGLREGAKKKNSRKNEFNFNVSNYLSAILATDACKIYGISDDTALILYAETGGDLSGFKSADHFASWAGLAPNNKISGGKIISSHLPKKKHPIKRALLRAANSVYRSDNALGDYYRRMRARLGPKGAKCAVARKLLIIYFHMVTRKQPFNIELFDQQQKNNNQKRILFLKKQLAELEAAA

SEQ ID NO: 257166 - protein, 457 aa, unidentified
MESDRMKSEATVFDETRRNVAGIDIAGHADHYVCGPRRDDETPDIAHFGTTTAEIHRMLAWLKERKVESVAMESTSVYWIPVADLLEANGIEAVLVDTREVRMVPGRKSDVEDCQWLQKLHSCGLLRGGFRPPEHIAAVRTLLREKDSLVVMRTQCVLQMQKSCDQMNVRIHHAVSDIDGKTGMDIVGAIVGGQRDPTVLAKLRDKRCKQTEAQIAAHLTGTWREEHLFTLRQAYRTLEFIDGRIAEYDEKIASMYKRLADASGNPPPPPPPADVKPSAKDRRHAEEKRDLQRIAGFDLTVIPGIGYDTAAIILSELGSDFSRFPTESHFASYIGLAPSLGKSAGKNVRQRKRCKNTSRAGRALRMAASTLYKSRTEMGAFFRSVARRTDRKTAVKATARRMAHMIYRGVRYGSAYLDKGAEAFEARAREKAVKAVKNLIKTHGINELELKSALVAA

SEQ ID NO: 257167 - protein, 373 aa, unidentified
MPKYSTAFGMDVHLRSTTVCALDADTGEAVTRRFPGNPWGEIAGWMDGFPGPSLAAYESGYLGFAPQRELAGLGVECVVAAVSKIPRSAADSASKNDRNDAARMAKAILAHDISPAWVPSPEVEGIRDLAGAYDGATARLATAKQRLLAFLAKRGFVSGGTTPAGNPRKYWTYDFLRWLDKVRPEDDGGVRTLAALRNEVEAAAEARADLLSEYRAAVDASPIAAEVASLQSIKGCAFALAAAFSAEVGDFTRFRSGRQVTAYFGLAPSQRSSGDSVRLGGISGAGNALVRKLAVEGSWCYAAARHQPKLMPRDTGVPLEIRTHGRKGSERLLRRREEMLARGMPAAKANAATAAELVRWLWALGMMCREGAE

SEQ ID NO: 257168 - protein, 324 aa, unidentified
MILGIDIAKAKFDVTVLVTGLRPRHHSFANTAHGFAQLQTWLGPTAASAVQVCMEATNIYWEALATYLHGQGYAVSVVNPLRIAGYAKSQLQRNKTDKLDSAVIAAFCATQHPPAWTPPTATQQTLRSLSRHRDDLLKTRTQQTNRRSTCTEPLVQKSLDTLIDLLDRELAQVETQMADLVQQQSQFREELVLLTSIPGIGELTAYKLMAELYDLAAYPDVNALDADAGLSPAHYESGQSVHRQPKLAKVGKAAVRSALYLPALNAIRHNPFVKQLADRLKAKGKIPMVIIGAAMRKLLHLVYGVVKHKQPFDPSWGRNAAAPA

SEQ ID NO: 257169 - protein, 340 aa, unidentified
MEKRYIGIDLHRNRFTCCIRLENERTYVTEWALEDLARFVKKLRPSDEVAVEITSNTRLFYDALASHVARVVVVDTNQFRVISQSVKKTDPNDARLLSLYLSKGLLPEVRMKNKDLAQLASLTQTRDTLVKQRTALKNKVNNILSARGLNLAKEALSSEKKLAEVLELPFDEIVQIELRVIVEQIRSLNKSIAELGKTIGDEGSKLEGHKGLSTIKGIGKITGAILLSVIGDVNDFADEGRLASYFGIVPRVSNSNETERSGRIHKRGTKLGRTALVQSALIAANYSPYLKRFYEQVKARRGAGKAIIALARKFLGIIYRTLKNKWVFDDFPNFVLAEES

SEQ ID NO: 257170 - protein, 426 aa, unidentified
MSNRIGVAYAVAGRAAGLFKRRHRPLGHRFRWLGGWILLVLPERTQVAWMSLVMGIDQHRAQITAEWLDTETGEVSRARVRPADRAGVRRFLARFAGQQLEVALEATTGWRFLVEELRAVGAVVHLAEPAETAALRGNKRRAKSDRADARHHRELVLAGRLPESWIPPDHILDVRARVRLRHTLIEQHTEWQQRIQAVLYHHGCRQRRRLMEGDGREWLASQALSETAREQITVAMAIIDALDVQLAPLTKELCAWARRQAGCKALIDAYYGIGELCAVTVIAELGDCRRFQNSRDAVRYSGLDVTVYQSDRHRAPGHLSRQGPPALRWALYEAAQVARRPGSPDRGYYEQAAERLGGNRACLALARKLLKRCYHTLRELGDDALTPPVERPQPGPGSAAARRASSGSPRSLEPTTTNQRADVLAA

SEQ ID NO: 257171 - protein, 421 aa, unidentified
MPNIEIGVDSMVKENFIYVGIDLHKETHTAVMIDCYNQKLGEITFPNRPAAFPKLVTKVKKCNTDGKEVVYGLENAYGYGRALAVWLIDKGYLVKDVNTAISHRQAKHRGAMYRKSDSDDAKAIALATLNMLDKLPDACPNDAYWSLGQLVHRRDNIMKQRTRLVNQLHEQLCIAYPSYKQFFNDISRPTALYFWEHYPSRKYLKGKSVEDLRAELVPVSHNKCSTKTCEKILDAVASDKVKNNAYQDARDMVTLSIVSDLQHYDSQLTEVDKMLEQMYKMLGCTLTTIPGVNVITAVKILAEIGDIKRFSNANKLAQFAGIAPLHLSSSGKGKDVATKQGNRRLQATIYFLAIQMVQVSSKGTPRNSVVRAYYEKRKAEGKTSQQALICISRRLISVIYGMLKNGTEYRMPVVENAGEKL

SEQ ID NO: 257172 - protein, 460 aa, unidentified
MNRNRSKSRVDRTMPMVHPNAAAIDIGATMHMAAVRADRAPEPVRSFGTFTADLHRLVDWFTECGVETVVMESTSVYWIPIFELLDARGFAVFLVNARDAKHVPGRKTDVSDAQWLQRLHSFGLLRASFRPKGQIAELRAYVRQRERLLEYAASHIQHMQKALTEMNLQLHHVVADITGATGLRIIRAILAGERDPEALAGLRHYSCHSSAETIAKALTGSYRTEHLFALEQALSLYDAYHEKASACDVRIESVLKELIIHRGHDHGSAPPVSRRRNRTDQANALAFDVRAALFGLLGKDVTTIDGLGPYLSLKLIAECGDDLTSWPSAKHFTSWLGLAPSNKVSGGKMLSSRTRRSGGRAAALLRLAAVTVGRTDTALGAFYRRLSSRIGKAKAVTATARKIAVLFYNAVRHGMDYVDPGASSYETRYRTRVINNLHRRAKIFGFVLQPLEPKAGAAVS

SEQ ID NO: 257173 - protein, 355 aa, unidentified
MIVIGVDPHKRTHTAVVVGAGSGELVGERTVQARRQGYGQLLAWARSLAGERLWALEDCRHVSLGLERFLLARGERVVRVPPRLMGEARKGGRSAGKSDAIDALAVARVALRERGLPQAFLAGPEREIKLLLDHRDDLVAERTRIQSRLRWHLHDLDPELAVPAGALDRYCWLDRIERLLAGQAQTAQVRIAAELVSRCRELTRRVKQLERELQALVEQQAAPLLELNGCGVLTAAKLIAEVAGVHRFPSDAQLAKHGGSAPLPASSGTRQRHRLNRHGNRQLNCALHRIAVNQGRRHPPARAYLARKEAEGKNRKEALRCLKRHLARTVYRTLKSIEEQKMTATRPAASVPALT

SEQ ID NO: 257174 - protein, 330 aa, unidentified
MTVLAESVDAVIGVDTHRDTLSAAVVTPIGAVVADNEVAASAAGYRTLLEFGRAQVPGMRCWALEGAGSYGAGLSSFLSEQGEQVVEVARPKRPARAAGRKSDGIDAVRAAREALSCDHPVVPRSRGEREALRVLISTRASAVTARTRAINHLKALIVSAPEELRAELRGKTSDTQISYCAALRPRPSRDLEHRMTARALQSTAQRILTLRREADELEAEIQPLVTAIRPDLLDLPGVGPISAAQILISWSHPGRFRSEAAFATFSGAAPIPASSGLTNRHRLNRSGDRQLNRALHTIVLTRARIDPDTRAYIARRTSEGKRSTASTRPS

SEQ ID NO: 257175 - protein, 338 aa, unidentified
MTILTVGIDLAKNVFAVHGVNEAGKAELIRPAVPRDKLHELIASLPPCVIGMEACSGAHHWARLFQASGHTVRLIAPKFVTPYRMTGKRGKNDAADAAAICEAIQRPHMRFVPLKTLEQQSRLMVHRARQGFVEQRTATINRIRGLLSEFGIVLPLKAATVRRRACECLEDLPGYANTVIGDLLSEVTHLDERIAQYDTHIQAMAKDDERAKQLMQLGGVGPTTATCLLAMIGNGHDFDCGRQFAAWLGLTPGQYSSGGKTRLGRITKAGDAYLRSLLVLGAKALLAAAKNKADPVSRWAIALAERRGYWRAVVAIAAKNARMAWAVLRRGDEFVLPA

SEQ ID NO: 257176 - protein, 408 aa, unidentified
MNTLYVGIDVSSKSNVVYLMLPNGDKHSNFSVANSHEGSTQLVKRILSALASHSLDTVLIGLEATSVYGDNLVYFLREDATLAPFNRKIHVLNPKQVKKFHDAYNDLPKNDYVDSFVIADCLRFGRINKAVYMGDYRYKALQNLTRARFFAVQNLVKEKQRFMNVLFKKYSTMTQEKVFSDTFSTTALAVYDEFESAEALANMDLHELTDFIIEKGKNRFPDPDAVAKAIQKAARSSYRLPKTVNDSVNQVLSISITSMKALESQIKEFDKAIKAQMELLPNVLISIPGIGPVYSAGIMAEIGDINRFNSQAALAKYAGLAWKQHQSGGFESEVTRLIPSGNRFLKYYLCEAAFSLVRCDKEYSDFYHLKYKEVNRCQHKRALALTARKFVRLVFRLLKDNRLYCPAK

SEQ ID NO: 257177 - protein, 414 aa, unidentified
MLKIVYRICCGMDVHKSFVVACIASTNEQGVTSYKSKRFSSFTGDLHRCATWLAENGCRDVCMESTGKYWIPIYNILEPTCNIVLAHPKYVKAIRGKKTDKRDAKWIADIFKHDLVAGSFIPPADIRQLRDLVRYRWKLTNFTTGEKNRAQNCLTVSNIKLDDVFSDVFGKAASTITARILENPSEKITDVSGFRTKGMKATNEQVLAAVDGEMCEEQAEKLRIIRSHMDSLQLCKLNLESLILTTAEKYLPQLNLVMTALGIQSFAAVGIISEIGVDMSVFPTSKHLCSWAGLTPQNNESAGKKKTTRISRAGAYIKPLLVQCALNAIRARKFPEVRNRYLALKKRRGHKKAIIAIARMLLTAIYNMLKKNEPYNPELYRKGDQPPAHREVSVEEAIFILQRQGYLVTAPTTA

SEQ ID NO: 257178 - protein, 338 aa, unidentified
MTITTIGIDLAKNVFELCGLDDSGEIRLRRRVRRETLLRAVAEVPACVIGIEACTGAFYWQRQFEALGHEVRIIAPQHVKPFGRRQKNDRNDAEAIAIAVVQPRMRFVPKKSVAQQDVQTLHRARQRMVNHRTALVSQMRGILLDRGIAFGQSITRARAMIPRIIEDESNELTKLCRETLSSLLALMAEIDKRVREFDRRIDQVYRESEACRRVGKIRGVGPKTATAVVAAIGDGRDFDNGRHMAAWLGLVPRQHSSGNRTVLMGISKRGDQHLRTLLVHGARAVVRTAVGKTDRFSQWVNEFRERRGTSRAIVAVANKNARIIWALLAKNEEYRPAT

SEQ ID NO: 257179 - protein, 372 aa, unidentified
MKEHNGLFIGLDTSKLKISVAVAEGERNGEVRFFGDISAEPASVASMVAKLAKRGGQLHFCYEAGPTGYDLHRQIVDLGHACEVVAPSLVPRRPGDRVKTNRRDAVSLARLHRAGELTAVWVPDEAHEAVRDLVRARESANAALKKARQQLQAFLLRHGRIYLGRTPWTRAHSRWLAAQTFTHPAHHIVLAEYVQAIEDAGVRVDRLDKQVAETAASWSMAPVVEAYQAMRGVAFLTAVTFVAEIGDIRRFETAPQLMAYLGLVPSESSTGERVKRGGITKAGNMRARRVLIEGAWTYRYPARVSPAIQARLEALPRSVREIAWKGQVRLCARYRKLIIAGKLKSVAVTAIAREMAAFLWAIGQEVAPAAQG

SEQ ID NO: 257180 - protein, 355 aa, unidentified
MNDAKYIGLDVHQATISATVLDAKGKLVMEAILETKAETVLQLIHGLRGSLHVTFEEGTSAAWLYTLIKPHVTRVLVCDPRKNALLKVGNKSDRIDAHKLAELLRSNLLRPVFHDDTGLRTLREMARSYLTITKDVTRVMRRLKAIYRSWAIPCGGQEVYSPRHRAEWLGKISEASVRRRAELYYQQLDALVYLHRQAKKELLAEGRKHQATKLLRQIPSIGPIRSVLLVALLQTPHRFRTKRQLWSYSGLALETRNSGEYRFQDGQLKRSKKVFAIRGLNKNHNHDLKNVFKGAAIRAAAIEGPFQKFYEALVAKGMKPAMARLTLARKIAAITLIVWKKGARFDAEHLKQQAA

SEQ ID NO: 257181 - protein, 488 aa, unidentified
MAHSADTEFSSPAEAPARKAGWVHAHCARLRSPYAAQDKPFASGSTNPDRKGSDIMLKINYMSTLFVGIDVSSKSNAVYAMDFEENKYISSLFGNNQPGADELAGMIAGCMQNHKNLDTVIVCLESTSVYSVHIANFLSTCEMLMPYKPYVFVVNPKTTANYRKSYIGMEKTDPADAFLIADFARVGRTKKLEPWRGSQFTALKRLTRHRMHLSECIAREKTYMVSNLYLKFSELQLLDGDDKPFGNIYGATSSAVLTEFLSPQEIIDLSEEELLAFLAEKSRNRISDISRTSELLRKAARDSYRLDKCMYEPLNVSLASSFNCIQAYQKEIKLIEQAIEKCINGMNPNAFLILKSIPGIGPVWASGILSEIGDITAFHSSDALAKYAGLYWLKNDSGDFTSEDNAVSKAGNPYLRYYLGEAANSVRRYVPEYADYYAKKYAEVSKHQHKRALALTSRKFVRLVFGLLAKNQLYTGEKLDSEINTESN

SEQ ID NO: 257182 - protein, 343 aa, unidentified
MEHFAGLDVSLEATTVCVVDACGVVVREGTCASEPEALAGWLGAAGVALSLVGLEAGPLSGWLWSGLRAAGLPAVCLETRRLRGMTAALPVKTDRTDARAIAQAMRCGLYRAVHVKSAASQELRLLLSSRQQLLRLRVDLDNGVRGSLKAFGLKVGRVGASGFADRVLELLQGRPSLAGVVRPLLAARAELARQFAVLDAELRRLVRQHGTCRRLMTVPGVGPVASLAYVTALDDPSRFRRSREVGAYLGLTPRRYQSGEVDRLGRVSKAGDLLAREALFLAAHTLLTRVKRPSALRLWGLAVAKRRGLRRATVAVARRLAVLLHRIWRDGTTFRWPTPQPAA

SEQ ID NO: 257183 - protein, 356 aa, unidentified
MATYYIGADVHCNNLEIAIMNRKKIIQRYSVPTNITAASQVLDSYTGKKYMVIEEGPMAGWLYRNLRGKVNRFIVSDPRRNKLISSDGDHDDKIDSGKLAMLLEGGYLREVYHSDNEYQVELKHWVILYNDRVRDAVRNINKIRSRCRMHGIAIPRKVLREPKHRAEWLKSLKNTALASQLLMLWIGYDATAKQSRMAKQHMIQLSTKYPIIKLWKKLPGIGTIRAATIFAYLDTPWRFKKKNKLWKYCGIGLQRTASGKDRKGRPKPAILEMPLASNRVLKNAIMGAALTAINQKQNAFKTDYERMVRDGVVPSNARHTVARKLLTVMWGMWKTSCQDGPAKVSLPKLNEQCIYV

SEQ ID NO: 257184 - protein, 421 aa, unidentified
MTGNRRCIGLDVHRDFAQIAIWQAGKVTQAGTFATTPEGVREFAAGLGPHDEVALEATGNTWAIATVLASRAGRVVVSNPVKTRAIAEAKVKTDKVDAAILAQLLAADFLPPVWMPDAATSALRRQVLRRAHIVRQRTRLKNQVQAILARNLVPRCPASDLFGIKGRHWLAARDLPADEQAAAAALLRQLDFHGEELRLIDAELGQAALGRPEVLRLMTIPGVDATVALSIVAAVGDFSRFRTPERLVSYFGLNPRVRQSGGQPASHGRITKAGAAHARGMLVEAAWSASKAPGPLRAFSQRVQARRGMQVAAVATARKLAVLCWHLTIRQEDYAFALPSLVAHKRRKLELRAGASPARGHRGTAASYSLKAVRAAERDLAAQGEAAYRTMVAAWQPARPARKKVTGAAASKGTRLVKPAG

SEQ ID NO: 257185 - protein, 349 aa, unidentified
MGIIGGLDVHRSQITYDWIDPDSGQRQRGQLAPAHRAHLRVWLAQFAGRPAAFAVEGCTGWRYVVEELQRAGVEAHLAEPADTSALRGPKRRAKTDQLDARHLRELLAAGRLPESWIPPAHVLEVRTLVRCYKALLDEHTAWLQRVHATLFHHGVPAQRNLLAPDRRVRLEQGSGLSVAAHQQVTVALRMLDHLDAELDRLRGELVGFARRQVGCQALDALYGIGPLTAVAIWAELGEVGRFASSRHAVRHTGLDVTVYSSDGKRSPGHLARQGPPVLRWALFEAAKCAARPTSPDHAYYLQAKQRLGGNRATLSVARKLVRRCYHTLAALGERAYAPPSQHPNLGRVA

SEQ ID NO: 257186 - protein, 346 aa, unidentified
MLYTAFDVHKHYTWARVERQDGTVVREKRIAHEPRAFQQFLAGTEPGSPVAVEAIGNWYWVGDEVEAAGCTLQLVHAHKAKLMLGRVNKTDRLDAQGLVQLQKAGTLPVVWIPPREVRDLRELPRTRMVLVAQRTRFKNRIHATFSKYGIPLPEVSDLFGKRGRQELQARVPALPPHTGFVTARLLAQVERLNEEVEAVEQRMAELFEVDETIRLLMTAPGVGFILATVIRAEIGDVHRFSRPEKLAAYAGTVPRVHESGGHRYYGPMRSDVNQYLKWAFVEAANGVCKTHHKYPQRHTHRLYERVKKRKGHKTAIGAVARHLAEATYWMLTRGEPYREPDPSRGA

SEQ ID NO: 257187 - protein, 346 aa, unidentified
MMIIGCDFHPSWQQVSWMDTETGETGEKKLVHATGDAKTFYQQLEAPVLIGVEATGNSQWFVELVEDLGHAIWIGDAAQIRASYVRKQKTDKRDAAHILKLLVEGRFPRLWTPDREQRDLRQLVLHRHKLVEIRSRVKNELQHLSMNKGMQRKGKLWSQTGQKLLRELPLKPWAACRREDLLGLLAMLDQQVGKLDDAVQQAAEQHPQARLLMTQPGVGPNTALAYVLTIGDVTRFPRGKQVASYLGLIPREESSGGRQKLGAISKQGNGLLRSLLVEAAQIAVRYDPGYRKQYLHRCHQKPKGVAKVAAPRKLAVRLYWMLRTQTAYPEIVRIESSPRVPLVGAS

SEQ ID NO: 257188 - protein, 394 aa, unidentified
MKLVGIDVGKNSHHFCVMDKETGEFNVTPTSFSNNKEGFDFLINSLKPYSKKSILLGMEDTGHYHVALLKFLLSNGYTVALINPKTTDLTRKMEGGITKNDKLDTITICDVLDTPERKKQYRITKVDRFDLYEQRQLTRHHHNLKEELNVYCNRLQKSIDLVFPEFNTLFGSKYGVVYMNLLKTFGSAEAIASTDIRTIRKCFEIKGRGGRISLTPEKLKECAKNSIGISSEVETIQIEHLVSQIMLIKEQIAEIDKKIEEFSIKNNSPILSIPGISHFSGTSILAELGDIGNYSKPSQIIKFAGVAPYHYESSQYNAQHTAITKKGSKYLRKTLYQIILPVINNNPVFKKYYLLKISQGKGHRCAQGHCIRKLLRIIYHLLETGQSFDPALLR

SEQ ID NO: 257189 - protein, 422 aa, unidentified
MSNPLLVGIDPHRRTNTVCLMDGHGHEVGRRFTIDNNRPGAQTFVQRVAQAVQAGSFDRIEIASEATGWYWFLFFQTLSRDPLLNQWPLHLYPFNPRLTAKFKETYADDDHTDPYDAFVTADRLRLGRDLPAPFGRDDTYLPIRFLTRYRYHVVHNLAREKAYCLSILYLKASEYTRQDGDKPCQDQRPFSNVFGAASRAVIQEFASIEEIAALPFDDLVAFIDAKGKGRFADPSENARRLQRVARDSYPLPEALQAPIQLVLKLSLQQITALEQQEKRISAAITDLMAAVPQTLDTIPGCGPVFSAGILSEIGNLSRFHGDVQAQVAKLAGFKWRKHQSGDFEAEDTQLTRSRNRYLRYYFCEAANAVRMRDAEYAAFYDRKFNEVRTHQHKRAIVLTARKLVRLVVRLLTTNQPYQPRRR

SEQ ID NO: 257190 - protein, 321 aa, unidentified
MKTVLGIDQAKKKFDVALLRNGKYRSKVFENNPAGFSALLAWLSKNDVETVHACMEATSTYGEALARFLHDAGHSVSVTNPARIKAFGKSELLRTKNDKTDAKLIARFCETMKPTLWQPAPAEIEYLRGLGRRRDALVSMRTQELNRQENSNEIVSTSIQTVLECLDKEIEQISKLIRDHISKHPGLKHKHDLLNSIPGVGPATIEAILSEINAFEGFATVEQVVAYMGLSPKEHTSGSSVKGKSAICKIGNSRLRKALYMPALSAMLYNPIVKALYDRMKAKSKNGMVIACACMKKLVHLIYGVIKSNKPFDPAYTLKTA

SEQ ID NO: 257191 - protein, 411 aa, unidentified
MENVFACCAGLDIHQKSVEACVRRLEPAGQLHHQTRHWGTMTRDLLAMADWMAAQGVTHVAMESTGVYWKPIYNILESRFTVLLVNARHLKQVPGRKSDVRDCQWIAQLLQHGLLKGSFVPPRAQRELRDLTRHRTQLVEEKTRTVNRLHKVLEDGNIKLASVATDILGVSGRAMLEALMEGQEDPVKLADLAQRQLRGKIPELEKALEGHLTEHHRFMLRLLWKELGQQEELIAELDRKIEEQTRPFANEIERLDAVPGVDRRVAEVALAEVGSDMKPFPTHSHVASWAGMCPGNEESAGKRRRQRLTPGNRWLKRSLVQAAWAASHTKHTYLASQYRRLAGRRGRKRALVAVGHSMLVIFYHMLKDRTTYKDLGGDFFDRLEPERLTRYYVKRLEDLGHKVTLESSVPA

SEQ ID NO: 257192 - protein, 445 aa, unidentified
MKQRPRIHYSDSQKALMWERWKQGWTSHEIGKLFDRAHSSIHRILAETGGIRPAQRSRAATALTLPEREEISRAIVARASIRAIAARLGRAPSTVSREIKRNGGCNSYRANQADAAAWGRGRRPKCCKLVANRALAQTVAHKLRTLWSTYGPIVRVGVDLSKRLYQVHAVGQWGHQVLAKSLSPERFYAWAITLPQGCLVVTEACGGAHYVARQLRAIGLDARLIAAHFVTPYRMAGKSGKNDANDAAAIYEAASRPYMHFVPIKSAAQQGQLVVHRLREGYKQERNACTNRIRGLLTEFGLVFPLRPEKLRKVLAEVLEDASNELPGVVRLALGRAWLHWIDLDIQIAWCDEHIAVHLRTEERVKRAAKLRGVGLITASALVATVDKLQQFRSAKQFGAWLGLVPSQNSSGGKTRLGNITKRGDDYLGTLLIQGAKPAVNATTG

SEQ ID NO: 257193 - protein, 474 aa, unidentified
MPRRRLKAKSKAKATEPVENLAVINPNAGAIDIGSEQHVVAVAPGRDPEPVRTFSSFTADIHEMGRWLKACGVKSVVMEATGVYWIPPFQILEQDGLEVHLIDPRAAKNLPGRKSDVLDCQWHQKLHSFGLLSSCFVPPAEIVPLRTYLRLRQELVQGSSQAVERMQKALFAMNVQLVNVISDITGETGLAIIKAILAGEREGTKLAELKNRRIQASKALIAKSLEGNWKEELLYALQTALESYEFHQQQIEQCEQKITEALGRLPSRQIPPQDNCQANELQPLNKKAVKVYQLKEPPPASNSGPEALSPLAAELKRIAGVDLSSIDGIGQQTAQVILSEFGPDLKSCFKTEKHFSSYLGLCPGTRISGGKVLNRRSRKVSHRVATALRLAARSLHSSQSALGANYRRLKARLGAPKAITAMANKLAKLVYRLLVNGQDYFDRGMQHYEEKFRQQQIRRLQKQAKILNLKLVPA

SEQ ID NO: 257194 - protein, 408 aa, unidentified
MQDLNERAWPVFAGVDWGGENHQLCVVAPDGKRLLETRVSHDVAGLRQLDHHLNGFGAQVPIAIERSEGLLVEHLQAAGHAVFPVSPRISARARERYKVAAVKDDRFDAFVLADTLRFDHAHWRPLSIPSPLLAEIKALTRDRDRLLETQQATESQLRMILEAYHPAPVRLFSSVDRQITLSFVTDYPTPANASRVKTTRMAGFLSRHHYTGRVPAQTLTDRMRQNLLSGSPGTVAGKSFSALAFTQVLQLLNTQLAEYDDAIAAATAEHPDAPIFASFPGIGPVLTAVLLAEIGEDRARFPQPEVLLAEAGLAPVTRSSGRSRSVRFRYAANSRLREATMWWAFNSIKLSPWAAAAFRDAREQKGQRYHRALRGLTARWTRILWRCWTNHETYDPARHGSAALITAA

SEQ ID NO: 257195 - protein, 358 aa, unidentified
MPYRTSIGLDVHARSVSACALDHLTGEIAQRSFSEPVPQDIVEWASGFEGPMRAVYESGPTGFSLARALNASGLECLVGATSKMLRPSGDRVKNDRRDAVLLARMLSTGNIPEVRIPDPEQEAAKDLVRMRETARAALTAAKLRLSHFLLRKGYSYEKGKKTWTRAYEDWLRHLVFDSELDRAVFDELLADVLAARDRKERLQKMVEEQARSARWSPMVSRLSCMKGVSSYTALAIAVEIGDFSRFPNARAFQSYVGLLTTENSTGAKVHTGGVTKTGNALVRKLLVEASWLYLRPRMLNPTIASDGVPAQVAEHARKGCMRLKKRAAHLQSRGKKGCVVVAAISRELAGWLWALATM

SEQ ID NO: 257196 - protein, 343 aa, unidentified
MNTVATIGLDIAKQVFQVHGADAQGATLFNRKLRRSEVRPFFEKLPPCVVAMEACGSAYHWGREISALGHEVQILPAQYVKPFVTRGKTDAGDAIAISQAMRRPDIRSVRLKTATEQAAAMVLRTRVLFVRQRANAMNALRGHMTELGLIADRGIPNIGKLAAALPEEGDARIPPSARAVLEEILAEIEALTSRIERIDRQVASVAKEDEDIRRLTAIPGVGPVTASTIKAYVPDAAYFKTARHFSSWLGLTPKLNASGERLRSGRISKMGNVELRSLLYMGAMSVLIAARRRGTPSPWLRRLLDGRPLKVVAVALANKTARVIWALLTKGGSYEAPSERAGA

SEQ ID NO: 257197 - protein, 423 aa, unidentified
MDHYDDSRLNEFRQLKEHIRRSKDYMVVGIDIAKDRHNAFFGMPTGRSLLKRLAFDNNRDGFEKLLFHADTIMRRNTLKKTVYGMEPTADYHKPLGEYLISRGHMVVLVAGTAVRNNRELLDGRWDKNDTKDAANIADLICQGKCLFYDHPPVHIRELRLLLSLKRKLKKQEHSYTVRIRNHLIAQYFPELDPYFSYSEGPAIVKWCLDPGKLHALSFEEFSRMVLSRNGGERQRRRLDEIHRKASSSIGCAVMPSVSHEAGVLVNAVRQVREMIGQTDEKIALVCKEVPGYANLLSIPGFGPDISAKVIGALGDPSRFDNHRQVLKLAGLDLSGDRSGKRNDVPVVISKRGKADLRYGLYQAALVASIKNPVFMRYFTGRLAGREKERGIGTKIRVKMAAKMLVIAWTLMKRREMFDSRHIN

SEQ ID NO: 257198 - protein, 439 aa, unidentified
MLYLGIDIGKSHHLAAFLSGDLLARHMRYDACPTLAIENTRAGFDRLRAAIRQHADEAETCVLLERTGHYGASLEAYLSEQGCHLYWMQARARYANNKTDRQDARALVVLLYNELELHAPTVDERLRISPIATPGREVRTLHGLVHHRDELVAESTRRKNKLTAILDELFPEFVAVYHDPFTPSALACREQFPTPTDVAEADIEDVCHTRKRNQPSRADLMELQTLARATIGTRDGARVASLLVEQKQLIAELHLMMAHVEQLDGEIERLVASSRAGQILLSFPGVASVQAGKLLAGIGTISNFESEAKLRGYLGWAPQSAQTGTSMDSSSLSKGGNPLLKKTVFMIVMTAIRSEPWKSRYAAMVARKCNYDGRRKEYTGRMKVVGHLCGHFIRVLYTLLKRDADLLADLPAGTEPPPPECYDPARHITGQKKAGGTRH

SEQ ID NO: 257199 - protein, 379 aa, unidentified
MITSKFKKVIAVDTSKNTFNLCVRDLATNKESFHKIRRDDFVSRVIQMATDGSVVVMESCGGSHHWARTFKNAGVAVRLIAPQHARKFLPNKRMKNDTNDAIAICRCAVQPETKFVRIKTEEESAISSTHCQRRTVISLRVASENRMRAMLQESGLVFPAGEKGLNKMLDFIYSECITNCMPEEKLINLRDEAEHYRYQRKREERLDEQIYNTARNNELSRLAMGCPGVGALTASAVISQLGDCSQFKNGREMAAMIGLTPTQNSTGGRNNLGPISKNGNTYLRSLLTMGAESIIRTMTAREDKNRATQLDEFARRLLNRGKQTRKVIIALAARMARTLWVILSRKEAFKNTLQETNCETDCKTNCEANCEINCETVKQ

SEQ ID NO: 257200 - protein, 340 aa, unidentified
MEKRYIGVDLHRNRFTCCIRLENERTYVTEWELEDLGKFVKKLRPSDEIAVEITGNTRLFFDAVAPQVARVVVVNTSQFKVICQSVKKTDPHDARALALYLSKDMLPEVRMKDKEHGQLASLTQTRDTLVKLRTALKNKVNNILSARGLNLAKEALSSEKKLAEVLELPFDEIVQVELRVIVEQIRSLNKSIAELEKTIGEEGSKLEGHKGLTSIKGIGKITGAILLSVIGDVNDFPDEGRLASYFGIVPRVSNSNETQHSGRIHKRGTKLGRTALVQSALIAANYSPYLKRFYEQVKARRGAGKAIIALARKFLGIIYRTLKNHWVFEDFPNFVLAEAS

SEQ ID NO: 257201 - protein, 368 aa, unidentified
MKTKHYVGFDVHKDTIAVAIAEAGRDGEVRSYGSIPNTLYSVEKLVGKIGAEGVELHVVYEAGPTGFVLYRWFTKRGIDCAVVAPSRIPQSPGLRQKTDRRDALQLARLHRAGELTAIHVPDEADEAIRDLTRARADAVADRTRARNRLKGFLLRHGHRYGGSANWGEAHMRYLRTLELPSPVHKAVLEEYLLAVDQVSERIGRLDALIETQAAAWRFYPAVQALMCLRGFKLTAATVLVAEIGDIQRFRHPRHLMGFLGLVPRERSTGLTRRLGAITKTGNAHARFVLVEAAHHAFHPPAVSHKLAERQSDQPEPYRTLAWKAQARLYQRGWHLLSRGLMKQKVVIALARELAGFVWALLCQVPTPA

SEQ ID NO: 257202 - protein, 442 aa, unidentified
MPVIHQQVAGIDIGSKFHVVAVGDNAKTDVKEFGVSTKALFEIALFLKENGIQHVAMEATGGYEKPLVSVLQQEGFDVLVTAGANTKNYRRFKSDVSDAIHIRTLHQLGLLPPIFITDEFATTIRPLVRMRQSLIEDGADYIRRIQKALRLINVRLDATLTDSTSVSGLAIIKAICEGEEDGAKLAALVDKHCKKTPAELTQLLTGNWTPSVRLQVQLSYRLYQAVQAEMARLDAELDRLFTEHTQHLPKAEATKKKPRKHRNAPKVAVEQYARRLLGVNLHEIPGFGRTAILTLMSEVGESIHRFTSAKAFAKWLGFTPNNKASGGKVLSRKTLKNKSNLPNTFRQVANSIGNMKDSNPLVNFFKRVAFKSSRKKAITATARKVAVLIYTMLKNGEAYQPEKLERDREQLKVMQIRKIKKNLHKFGISIQDLGWNVDFKIA

SEQ ID NO: 257203 - protein, 370 aa, unidentified
MRIIGCDLHARQQTLAMLDTTTGEVVKLTLMHEGDKVRQFYSQLPRPSLVGIEATGSMQWFLSLMEELGIECRVGHPGQIRAAEPRKQKHDRRDADLILKLLAENRFPAIWLPSKELLDLRALLLHRHQWVRMRVRMQNALQGIALANGLRRGRSLWSYDGQAKIALLPLLPHAAYRRSALQAMYKNMEAEIENLNQQVAEQAGNRSGARLLMTHPGVGPVTALATEVFLGDPQRFADSKALASYVGIIPQEYSSGGHQRLGGVTKQGSPLLRFLWGEAGAHAARRDPELKRFYRRKLVQKGLGKARVAVARKLGIRLWIMLRDEIDYQEFCRRGQMQQKTVRPAAGMPETGNGAKSHRPSDEATRLPES

SEQ ID NO: 257204 - protein, 401 aa, unidentified
MTFVIGLDWGGAAHAVCVLDRGSGAVIDRFEARHDAGGLRDMERRLARHGAPGDLPVAVERPSGLIVDALVAAGHPVVPIHPNAVKASRPRYRANGAKDDRGDAYLLADLLRTDGHRFRPLTPPSDAIRALRALVRDRDDLVATRLQLANQLRALLESFWPGAAAIFADIDSPIALAFLERYPTPDSATRLGVKRLASFLAQHRYSGRRSPDELLARLRAAPQGLAGPVEAEAKGEMVRALVAILGPLVTRILDLTARIRHDTAASEDGQIIMSFPRAGQLCAGQILAELGEDRARYLTPDQLAADAGLAPVTRQSGKSRGVSFRWACNRRLRTALTCFADNSRHACAWAARIYSSARGRGCRHPHAIRILGRAWLRVLWRAWQDRKPYDPVLHGAANAIG

SEQ ID NO: 257205 - protein, 412 aa, unidentified
METIFERVGALDVHKAQVTACVRVPDEAGRRVPHLAEFQTTVQGLMALHDWLAAHRVTHVAMEATGVYWQPVWHILEEDFELTLCNARHVKNVPGRKTDVCDAQWLCQLMEAGLLRGSFVPPKPQRRLRALTRYRKTQIAERKRETNRLHKALEDTGIKLDCVASDILGKSGRAMLDALVAGTTDPEVLANLAQGKLRAKMPALRQALQGRFEAHHALIIGAILEHLDFLEQQIGKLSEAIEQQLGSCGRAAVALASTITGVAARTAEVMVAEIGTDMAVFPSAGHLASWAGRCPGNDESAGKRRSGRTRKGSKWLGIALQEAALAAVRSKNTYLAAQYQRLKPRIGHGRALGAVKHSMLIAYWHMFTNGEVYRERGGDYFQRRDPAKATKRLVAKLQALGHTVTLQPQAAT

SEQ ID NO: 257206 - protein, 348 aa, unidentified
MTVYIGVDFHARQQTISYLTTKDGEIQRLQLDHAQAEEVRRFYRQFAGQRVIVGFESSGRAAWFEELLEELGCEIWIGHATAIRLFARRRQKNDRRDADLILDLLVRGDFPRIHRYSAESRTVLQQLRYRQRLVKMRTMLLNSLVFMAASRGVVLRSQLKTKRGLERLRQIDLPPALGEQRDELCQLLLELKPKIDKVESSLAAKAESDVRVRRLRTQYGIGPLTGLCLAHTLESPDRFANPRKVTAYVGFDPVEDSSGERRRIGSISKQGSRLLRFLLVEAGQIAVRRDQELARVYQRVLIRRGHAKAKVAIGRRLLVRAFIMLRDEIDYAEFQRRGVAARSSREIA

SEQ ID NO: 257207 - protein, 425 aa, unidentified
MKIQTIHSKIISDNKLVVAFDVGKDKLDAYCEYGQHCFNDSFANNTLKIEQKLITFSGIAESTGYDGLRIIAEPTGVYHLKLFRTARRLGHQTALVNPESVHKFKVVESNDSGKTDHKDPRVINLLAKYGKTLIDRNIRDEYLLLRQLNTMIIDEEKAYTATRCKIHRVLTELFCDYSFNNEYLYTNVGRIFMKKYHANPYRIVQRGYAAFYQRMKAAASRIRESTLQRLWRDAQSSIRHQLPADYVQVLESRFNYLWEELLLRENRMAEIEDAMIGVTDELREKDPNIPLPAKGVVTAFRIAQVLAETGSLNDFESIEELMRYAGLNIRERQSGYYRGNNKISKKGRSNLRRVLGYIVLPLVKKKSLYGTVYHAKKNSGMVGNKAMVAMMRKFLRMFYGWYKSGLPFNKNRVFTDEVNCVQITQ

SEQ ID NO: 257208 - protein, 341 aa, unidentified
MAITTHSEHITNYVGIDISKRWLDLWLRPAGKHHRCSNDRQGFQQIHRWLTSRGCTPQNTILCMEDTGIYGKRLVLAMTQRGWACAVEKTTVLAKVGPEHHRKDDRFDARLLAEYADRFSDQLTVTTPAEPQLDRIQQLYAERRRLIRQRTSTKTKQTQSAQQPHCPQLLQEAWRQQLALLDRQIATLEEQIQQLVAGHQGLSGYYRLLRGIPGIGQVTAWLWLIIFYGQARLNPKKIASRFGVAPHSHSSGSSVQGKTRSSGHGASEMRSALTMAARSASTHSSKFITYKQRKLEQGKPWPVVRNNLVNKLITIVCTIWNSQQSYDPDHQSRLDQPKNAA

SEQ ID NO: 257209 - protein, 337 aa, unidentified
MNYCGIDLHSNNCVVVVSDEDDRVLYQKRLPNDVAQIHAALEPCCGELAGVVVESTYNWYWLVDGLMDAGYQVHLAHPAAIKKYDGLKHSGDFADAAYLAQLLRLGLLPEGYVYPREERGARDLARKRMQLVRYRTAQILSIEGIMVRQTGTRMKSQAVKQLTAEQVQELAFAPDVALAVEANRAVSEALGQQIESLEKRLKERVSLRPEYHLLNTVPGIGDTLATTIMLETGSISRFAQVGNFSSYCRCVDSLRESNGRKKGEGNTRNGNKYLAWAFVEAANFAIRYSPQARSFYDRKKSRTNRALATKALAHKLARACYYILRDQKPFDAHLCFG

SEQ ID NO: 257210 - protein, 334 aa, unidentified
MRNARSYRLFAGVDIAAETFVATWGTADGGPIKPRSFAQTSQGYRQFLQQLQLTTVAPQQTLVVLEATSSYWIGLAVAMHQAQYVVSVVNPAHVHNFAKSLPRRSKTDPLDAQLLLQFAIERQPAAWTPPPDVYHELRQRLVARDALLEMRQQARNHRHALLQWPVQIASVKDQLEAVIADLDERIRSLEREIGAVLEQSAWAESALLLQSINSIGPLTAAWVLVLTLNFQACRTSTAAVAYAGLAPMLRESGKRSRGRPEIGHGGNKRLRTALYVATMNAVRFNPVIKAFYDRLRAAGKPAKVARCAAARKLLQIAFAVVTKRQAFVVRPVGG

SEQ ID NO: 257211 - protein, 408 aa, unidentified
MGWELGSEASGNALQRGQMRFIGIDIGSEKHFVAIVDETGKPTRKPMPFGEDAEGYSALRRVIGEPADALVAMEATGHYWQNLFTFLHAAGFAVALLNPVRTSRFAAEDMRRAKTDALDAQGIARFAQQKRPPATRLPDTATLELRELVRLRDRLVQDLGDRTRQLHRAVDLTFPEFTQHVKDLASYTATKLLHECPTGQAFRAADPTRLAELKYDGRHVIGVELATAVCEAAKGSVGSQGGAPFELQVRYACEDIDTLRVRIKSLDSDIGNSLREHKVGSLLTTIEGVGDNTAARMIASIDFEAFRSASQLAAYVGVAPIVNHSGKRTPMRGPACTMGDAGLRAKLWMPTLRAVTKNAWLKAFYDRLVAAGKPKKLAMIAAMRKLLSAMVSVARSGKPFVPKLSTAA

SEQ ID NO: 257212 - protein, 319 aa, unidentified
MKNLAPNITKIAVGVDVSKDHLDCCIYPTEKLLRIPNTTGGLKKLVRKLSGKGVTQVVCEASGGYERLMVKTLRKRGYKVWVVDPKRIKAYKDSKGRRVKTDPIDAKMIALFAGQESCDYEQCNPSEQEEDIKALANRRSSLVAMVINEKKRLQQESNIACKKSIEQTIRYLEKQIKIIDKKRKVIIEGQGNLQKKADIMQSMRGVGATTAHDLLSFVPELGKVENKAIAAIVGVAPETRQSGKYNGHAFIRGGRSAARKALYMAALTASRSNPVLSQFYNRLTSRGKPSKVALVGVMRKMIVTLNVMLREEETWINYA

SEQ ID NO: 257213 - protein, 337 aa, unidentified
MNIVRMGIDLSKNSFHVHAVNEAGHPVLKKLMNRAQLRQFLALTAPCVVATESCGSAFHWARYAAQFGHRTRIIASQFVKPYVKTNKNDFNDAAAICEAASRPSMRFVPTKSIEQQDIQALHRVRTRRVAERTALGNQIRGLLLEYGLAIGLSLITLRKKVPEIIAREDNELTPRARAMFRELYEELVELEGKIAYVERKINQIFKASEPCQRLAQIMGVGPLTSTALVASVGDAQVFKNGRHMAAWIGLVPRQSSTGGKPRLLGISKRGDRYLRTLLIHGARSALRVMGPRSDRRSQWAIDIARRRGANIATVALANKTARIAWAILAHGENYRAA

SEQ ID NO: 257214 - protein, 375 aa, unidentified
MRNVRFVGLDVHAETITVAVAESTGEVRALGTVPNRPEAVRRLVGKLGPVDRMRVCYEAGPTGYVLYWQLIGLGAHCEVVAPSLVPVKAGDRVKTDRRDAEKLARSYRAGDLTPVWVPDAEHEALRDLVRAREAAKKDQLRARHRLGKFLLRHGRHRPAHLKMAWTAGHLDWIRSLTFVAAAHRIVLSDYVHEVDRVATRIGSLNAAILEAIQTAPPQMRAVIHALQALRGVAAVSAATIVAEVGQFSRFEHPRQLMGYSGLVPSEYSSGTRRRTGAITKTGNAHLRRVVIEAAWAYRFGPAVRGPRRARQAGLDPAITEIAWRAQKRLHDRYRTLGARGKNHNQVITAVGRELLGFIWDIARTVERQASFPATA

SEQ ID NO: 257215 - protein, 412 aa, unidentified
MRRVIGIDTHRTFGEVVFWEQGRLRRAGRVDMTRTALEGFGKSLLASDEVVIEATGNCMAVSRVLSPFVKRVVIANPLQVKAIAHAHVKTDKIDAGTLANLYAAGYLPEVWMPDAVTERNRRLNARRYQLVRHRTRIKNEVHAILYAHLIPKCPHADLFGRLGRAWLARQPLPDDERAAIERHIRELDRLNDDLEVLDREIAEGALDDGAINRLLTITGVNLTVAAGLIAAIGNIARFKSPQKLVSYFGLNPRVRQSGLGPAHHGRISKVGRSHARAMLVEAAWAAAKTPGPLHAFFVRIRAKRGHQVAAVAVARKLAVLVWHMLTKETDYLWARPSLVAHKMRGMELQAGKPQKKGNSRGPAYAYNVKELRNREMRVAEQAQKSYEHFIEAWRPRPPKGQARERLNPARKE

SEQ ID NO: 257216 - protein, 412 aa, unidentified
MDVIYRRCCGLDVHKDSVSACVLVAEPPGRRRKELRRFGTMTRDLLELLDWLLELRVTHAAMESTGVYWKPVWNILEGHVEVLLANAQHIKVVPGRKTDTQDCEWIADLLQHGLLRGSFVPPEPVRDLRDLTRYRAILSQETTDVANRIQKVLEDANVKLGSVASDVLGVSGRAMLEAIVEGEQDPTRLAEMARHRLRKKIPELCVALEGRIRDHHRFLLKQLLDHLKFLESKISEVERQVEKCMGPFEKAVTLWITIPGVDVVTAWSLVAETGADMAQFPSAQHLASWAGLCPGNNESAGKRKGGKTRKGSLWLRRALSQAAWAASRTKATYLAARYRRLAARRGAKRAIIAIAHNILLIAYWLLQTGRPYQDLGADYFDRINAEGLKRYLVRRLERMGHQVVLSPAPATP

SEQ ID NO: 257217 - protein, 328 aa, unidentified
MVAKVSDAIVGIDVSKETLDAYCAKGQRKQGRTFANSSDGWKLVRTWLKVMGSKQAHVCMEATGRHSLGVALALHDAGHVVSVVNPAQIRDFARTKLGRNKTDKVDAALIREYTELFKPEPWTPPSPAMRRLCELQTVRAGIIRSRAEWKNRIGSGLGDTTATKLAAATIEHFTTQLEAIDRAISETIDQDAELHARCDLLVSVIGVGDTLAALLMAKMPEPGVLHRSGEIVAYAGLNPSHHRSGTSIDRPTRISKIGNAELRSALYMPALSAMRFNPAVAALVARLKSAGRLKPRQIVVAAMRKLLVLCFGVLKTGKRFDPAIAMPA

SEQ ID NO: 257218 - protein, 356 aa, unidentified
MPTQVPGGRVIVGVDTHKHLHAAAVLDERGALLATATFDANTSGYRALIDWAGTFGTASSFGIEGTGSYGRGLAAAVRRSGSDVLEVMRPNRQDRHRRGKSDLLDAENAARAVLAGHTEAIPKTDDGTVEMIRHIKVAKNAAVKARTTAMQSLKAVLITAPAELRETLQPLPNMALLRRCASLRPGPTTSVTAAAKYSLRAIAQRWLALNDEVTEHEKLLGPLIEQIAPQLTAAVGIGPDNASELLMALGDNAERIRNEAALAKLCGTCPIPASSGKTRRYRLNRGGHRRANAALHRIVVVRMKYHEPTRAYVARRIIEGKTKPEIMRCLKRHLIREIWTLTKHLRQQPTTHQTAA

SEQ ID NO: 257219 - protein, 349 aa, unidentified
MEFYAGLDVSLETTSVCVVDREGKVIREGKLASDPDAIEMFLAEWGIHLKRIGLEAFSFSGWLFTGLEEKGLPVVCIETRHAKAAMNAMLNKTDKNDARGIAQMMRTGWFRAVHVKSGEAQTLRALLVGRKAMLGKVIDMENMIRGLLRPFGLKVGPISTGQFDARIRELVAGMAKLEAIIAPLLDARYEMRLQLAKLHRLAVVAAREDKAVRRMMTVPGVGAVVALTFRATVDDPTRFKKSANVGAHFGLTPRRYQSGETDYTGRISKCGDEMTRTMLYEAAIAILTRIPRNFKLRLWGLRLMKKRGLKRAATAVARKLAVLLHKVWVDGTVFRYGAGMKRGRIAAAS

SEQ ID NO: 257220 - protein, 368 aa, unidentified
MKKHDTFIGLDVHARSISACALDPLTGEVAEGRLGAEAGPLAEWVLAFDGPPCVYESGPTGWHLARELQALGVDCVVGASSKMLRPPADRGRKTDRRDAEFLARLLATRNVTEAWVPDEECEAARDLSRALEDARCDLQRARQRLSKFLLRHGYVCDELTPTGARRGAWTAARTRWLDGIGFEQADDAATYEYYRDCVRRCTEAKGDLERRVARSAGAPRRKPAVDAVRCLKGIDVATAHALVVEVGDFSRFRNASGMEAWTGLVPSEHSSGETVSRGGVTKAGNAHVRRLLIEAARHVPAAGRDPKGLARGQVVSPEVRRHATKGNRRPKERRLALEGAGKKPVVANCATAREMAGWVWALGRMAEG

SEQ ID NO: 257221 - protein, 400 aa, unidentified
MNPVVGLDVAKGESQVQAFLDQSKPYGKSFSMKHTKEELDQFLDFLKEVEEVAGQMPMVILESTGHYHSPVIQYLEEQGILYILLNPIISYQAKKSSLRKVKTDVIDAYQLCVLYYKEDLEPHKIRGIQLLDLRNLSRQQEIVTNMYVEAKLQFHTILDQVFPEYRKVFGDLYSKVSLLMLKEYPTSEAVLKAGESRLAESVIQFCPSRSGEWAWEKAKKILDSASRNPFQKNVYESHVINLRMYIELLFHYQGHLSELEDRIVALANELEEYKVIQSIPGIGEKIAATIISEIGEIERFNHPKKLVAFAGVDPSVHSSGKFTATINRITKRGSSRLRHSLYLAVLCGIRSSRNKKLKAFYDKKKSEGKPAKVSIVACMNKLLHWIYALLKRKEAFLDLA

SEQ ID NO: 257222 - protein, 457 aa, unidentified
MRNRAYRATEIKAVNVAEAATRLAAGPVWVGVDVGKLQVLCVVRDAAGYFERPWRVRCPQEVSMLVARLQELAALRPLTIALEPTGTYGDALRQAAGDAGLEVRRVGGKAAHDYAEIFDGVPSAHDGKDAAVVAELAAIGKSAPWPLKVASPREAELAAAVSWLDAQQSIRQLWLGKLEGLLARHWPEATRLLALGSSTLLRLLAQYGGPSGFAADPQAAEVLARWGRGFLKPEKIAAVCASARATIGVRMNAADVELLKACAAQAWAAQVQIRATKRRLAAWVKQDPVLQKHAAIVGAATACVLRVAVGDPRDYHCGEAYRKAMGLNLKERSSGKHQGQLKIAKRGSSRARRWLYFAALRIVQQPPVRGWYEAKREKDKGRGNGGVVAVMRKLALALYAVVVHDQDFVLARLIGNRGPHATPPLATPPLATPPLATPPRTKRGVPQTGLSHSPKAK

SEQ ID NO: 257223 - protein, 355 aa, unidentified
MLYLGIDQHARQITISLRDDHGDVLLARQVSTHPEKIQAFFQQLTRERLRADESFVAVLEVCGFNDWLIQMLHDYRCHKVILIQPEERKLRKTDRRDAAGLSELLWVNRERLLQGKPVRGLRQVDIACSTDQENRRLTTLRKEAGQARTRLVNKIRHILRRHNLQWQMPTKKFPSKSGLAWLKQLVLPTIDHLELKHLLADLEQLQERRQELEQVIAERCGVSAEAVLLATMPGVSYFTAVSLACRVGRVERFPRAHSLANYWGLTPGCRNSGENNQRLGSITKAGSSMARWLLAQMTVNVLRRDARLREWFKRLKRRRGASIARVAVMRKLATIIWHMLRKRKSFAECRAPAAA

SEQ ID NO: 257224 - protein, 341 aa, unidentified
MDEYIGLDVSLEETAISIRRDGRRLWRGKCKSDPNVISALVRKRAPDAKRMVFETGPLSVWFYHALSAEGLPAICIDARHAKAVLNMAANKTDANDADGLAQLAEVGFYREVRVKGYDSMLTRTLVAARTKLVRICIELSNQIRGLMKTFGLVIPPGRGRTFEQNVRELLDGNDALSPIFMTLLEAWCGMRRQAAKLSRQLMATARQSAPCRLLMSIPGVGVVTATSFVTAIEDPGNFRKSRSVGAWLGLTTRRYQSGEVDYDGHISRRGDAHLRGLLYEAATVILTRAGADSSLRSWGLKLREKVGFKRAAVAVARKLSVIMHAMLKSGEFFDRSAGVAA

SEQ ID NO: 257225 - protein, 340 aa, unidentified
MEYFAGLDASLETINICIVDHDGNVLLERKVVAEPDAIVAVLESFGRPFKRIGLEAGPTSSWLYSGLRSAGYPAICLECRHVKAGLSAMRNKTDRNDARGIAHLVRLGWFRQVFVKSDEAQRVRMLLVNREQLLNKLQDVENSLRGSLRVFGLRIGRVTKRSFEARVLELIEDSPSLLAITEPMLRVRQTLLEAFANLDRLAKQLARQDPVCRRLMTVPGVGVVVALTYRTGIDAPERFARSRNVGAHFGLTPRRYSSGQTDYDGRISRCGDEMVRTALYQAANVLPHHGRWSSLRAWAMRIAKRSSAKAAKVALARRLSVIMHRMWVDGTDFHWSAAKS

SEQ ID NO: 257226 - protein, 341 aa, unidentified
MEKFIRTAIDLGKNYFQLHGLESEGGRSISRKVKRSKMHEVYSQIEPCRVGMEACGSAHYWARQLTAMGHEVVLIPPAYIKPYVKRGKNDAVDAAAICEAMSRPDMRFVPIKSADQQAVLMLHKTRELLVKQRTMAVNALRGHLAEFGIVAAKGIGRVDELLALAKADAALPHIAGAAVACMAQHLEGLDLSIATVDEEIAKAHRQNPISRLLDEIPGVGTLIASATAASVPDPGVFKSGRDFAAWLGLTPRQNSSGGKEKLGAITKQGNRYIRKMLVTGATSVLRVAGKRIGVLADWINALRARKPERLVAVALANKLARICWAIMTTGEGFRTDTYVKA

SEQ ID NO: 257227 - protein, 356 aa, unidentified
MTKYYIGADVHSNSTELTIEKSGKIVARYSIPTSIPAITNVLDSLQGKKYFAVEEGPMSGWLYRNLNKKLDQFISSDPRRNKLIASEGDKDDKIDSAKLASLLRGGFLRQVYHSNDDDRAELKHWVSLYHDRVRDAVRGINKIRARCRMHGVKISRAALRDPASRLKWLLKTKHNALADQLKMLWIGYDATVKQVKFAKRQLATLAGKYDIIEQWSQLPGIGLIRATTIFAFLDTPWRFKKKNKLWKYCGVGLQRSTSGTDRKGKPKSARLKLPWAVNKTLKNAVLGAALSAINQKENVFRDYYERMVQDGMITSNARHAVARKMLTVIWAMWKTNSQFNEKIVCNKLNMPTASAL

SEQ ID NO: 257228 - protein, 350 aa, unidentified
MDIVAIDLGKFNSMCCFFDTDTQQHSFQAAETSRSYLRSLLSSVRCDLVVMEACGPSGWIRDLCLELGLKTLVCSTNEEAWRWHNVKRKTDRDDALKLARLAMLGQLKPVHIPKPSVREHRTLVKYRKTLDGRINRIKNSIRSLFANRGIEISRGARTWYTGREQIDGYRTPLADCEMKELWRGQLDVELSQLDSLTEQLADVERRLEAIAKTDDRIRRLRTIPGVGRITAEALATALDDPHRFQNGRQVSAYIGMVPKQYQSGEMDRHGRITKRGPRLLRTILLECAWVSLRYNPWCRATYDRIHGGQKTRKKKAAIALARKIAVVGWAMLKNEKDWDPTRMELPTKVT

SEQ ID NO: 257229 - protein, 400 aa, unidentified
MNETSFSGFLGIDVSKDKFDAYCIGVNGERYFYLSCPMDRTGFEKLVSRLGALSIPQGSLLIGMESTACYHMNLFSFLLAGGYTSVIINPLLISNFVKMQLRKTKTDKKDALVIAQFLLMYRDTLAQKSISPHVSDLRDLSRQRESLLSQMTALKCDMKRLLTITFPELEKLTGVFTKSILKLVSRFPSAHVIAQADPAEINQLLMDHSMGRNSAKTTQAIIQAARSSIGTTSPSRELILKQKADVVIHLEGHLKELTAMMIELCRSDMGDDIDIMTSLRGIGEKTAANFLVEMGGDIRKFTDHKKLIAMAGIDPAIYQSGKHDGHGRITKRGNRHLRRVIWLMTIRVIQFNDCFRSYYKKRTQDGLPFKKAVLATAHKLLRVIYAMLTQRTSFSYAANS

SEQ ID NO: 257230 - protein, 368 aa, unidentified
MGNEAKRFVGIDLSKRTYEAVAITVNPQTITRWNGKLDLRGRKCLLDKLHSGDTIALEAGTASFKIAKEIQSKQGVMVVVLNAANVAIIHASLKKTDKEDALKLARLIEKYSPEELPVVPIPTDQEMERRALVAHETRFRQDRVRLINRLHAVFLRAGFPDHTKRQLGITASREKLIVSELDGFNLVEAMNLDHMIVEYEKILEDLDKQINDTVVACGEDAEILLSIPGFGIKTTMAVLAYAGDMRRFENPSQLVNYIGFSPRLYASGDIERSGSITKRGNPHVRWLLIQSAWCMVQSKAANPLKDRFEAMLKRGKAKSVAIVALARKLLELVFILLTRREKYRFIDPSLYAIKLRRAGFNLVGAGIG

SEQ ID NO: 257231 - protein, 346 aa, unidentified
MKITTIGIDLAKNVFQIHGVGERGKVAVRKQLKRADMAKYFSNLEPCLIGMEACGSAHHWARKLEGYGHTVKLMAPQFVKPYVKTNKNDIADAEAICEAVGRPNMRFVPLKNVEQQAILSVHRARQGFVKARTAQGNQIRGLLSEFGIAIPQGIGQVMKQVPEILEDGENGLPGTMRHLIARLADNLKEMGRQVKELEAQIQQWHKENEASRKLAKIPGLGPITASAIVATVGDAREFKNGRQLAAWMGLVPRQNSSGGKQNLLGISKRGDTYLRTLMIHGARACVRVAEKKAEPGSWMRKLMDRRNKNVAAVALANKNARIVWALLAHDRMFRPDYAPAEKTAGA

SEQ ID NO: 257232 - protein, 360 aa, unidentified
MFTERTSVGLDVHARSVTAAAIDGVTGELVQTRLTPSHDHIRSWLAEVPGPVAVAYEAGPTGFGLYRVLSAAGIRCVVAAPSKLQRPSGSRVKTDARDAVHLARLLRLDEITPVSVPTPGQEAARDLVRAREDCRGDLMRARHRLSKLLLRHGIVYTGGQAWTGAHDAWLRRQEFASPVVRMAFESDYETVLTVKARRDRLDKAIAAMAADSEFTGCVRRLGCLRGVCTLTGFALAVEMGDWHRFTGRTIGSFVGLVPSESSSGASRVQGSITKTGNAHVRRLLVEAAWHHRARYTPGKTMRERWELAPPAARARGDAGNRRLHDRWIGFNLRHKRAVVANVAIARELAGWCWSLAVMND

SEQ ID NO: 257233 - protein, 411 aa, unidentified
MRLLVGDDWAEDHHDVEVMNEAGKILARKRLPEGAAGMAGLHELIGRHLGEDADGAEVTVGIETDRGLWVAALVAAGYTVFGVNPLQASRYRERHGVSGAKSDSGDAHMLADMVRTDSHQLRAVAGDSAEAEGLKVLARTHKTLIWERTRQVQRLRHQLLAYFPAALEAFDDLDAPDALELPGRAPDPARAARLTRAQVSAALKRAGRRNITDRATKILAALRGEQLGQPPAVTAAYAVTARSLIALIAALNEQVKILHGQVEADFGRHPDAEIYRSQPGIGAILGARVLAEFGDDSRRYAGAKARKNYGGTSPITRASGKKKVVAARFIRNDRLIDALMTWAFASLNASPGARAFYDQQRAKGLEHNDALRRLANRLVGILHGCLKTRTLYGETTAWGHRENLPQSSAAA

SEQ ID NO: 257234 - protein, 374 aa, unidentified
MSKSTTTYVGLDVHKDSVDIATCGAARAAKAEHLGSVGGGLEPVTKALRRQVSRGQRLHIVYEAGPCGFVLQRHLAALGWHCEVIAPSSIVKAPGERVKTDRRDAIKLARLASQGLLTAVRVPDRGDEAVRDVVRAREDAVREQRCARQRLKALLLRNGIVYVGRSSWTAAHLRWIARLKLPETAQQLAFQEYLHAITEASARIARLEQALRDLLPDWPLAPVVAALQALRGVQLIAAITLTAEIQDFWRFASPRHLMAYLGLVPGEHTSGPRRRLGAITKAGNSPARRILVEIAQHYDQPARVSPIIARRHTNLSKAVTDIAWSAQVRLCARFRRLGARRLLRNKIVVAIARELCGFVWAIAREVTVPAQPRQ

SEQ ID NO: 257235 - protein, 458 aa, unidentified
MSPNKSTDQGRRTMSVVHPNAAAIDVGATMHMAAVNADRTPEPVRSFGTFTTDLHRLVDWFAECGVDTVVMESTSVYWIPIFELLDARGFAVFLVNARDAKHVPGRKTDVSDAQWLQRLHSFGLLRASFRPKGQIAELRAYLRQRERLLEYGASHIQHMQKALTEMNVQLHHVVTDITGATGLRIIRAILGGERNPTVLARMRDRRCHATVETIEKALAGNYRAEHVFALEQALALYDTYQQKASACDARIEAVLKELSVRRGRKTGPLPPPRQNRSRQQNSLLFDVRAALFALLGKDLTQINGLGPYLALKLIAECGDDLSAWPSAKHFTSWLCLAPSNKISGGKVLSSRTRRSGSRAAALLRLAAATVGRTDTALGAFYRRLSARIGKAKAVTATARKIAVLFYNAVQHGMEYVDPGASSYETRYRARVIDNLHRRAKAFGFVLQPIDPTPGIAVS

SEQ ID NO: 257236 - protein, 406 aa, unidentified
MFIGWDWATETHDVTVMDNSATRVARWEFAHTEEGIVRMLAKLAKYGDPADLPVAIETTRGLVVDRLLAAGHPVVPVHPNAFHAMRPRWGASKAKTDAGDSLKLADYLRTDGHFLPRLEPTERATMDLQALTRQRADHVEARIAAVNQLAALLDMHWPGGKAVFASLDSDIALAFLERYSTPASAAKLTAARLEAWCKRHSYTGKRSGSVLIERLRSAPKPASRLSETVVEQLVRVQVRLVGAIRTTVRTLDKAIADAVATHPYAPLFATMPRIGNVNLGQIIGELGPILERSRTSEQFIAETGVVPVTRASGKSRAVTFRYATNRRARLAIVTFADNSRHASDWAAKIYDGARAAKKRHPHAARILARAWLRVMWACWRDGTCYDPDTHQANNKINQTPEAPLAA

SEQ ID NO: 257237 - protein, 454 aa, unidentified
MSRRKKKVKNFEMTNLPAQLRHVNLDAAGIDIGSDRHLVAVPPGRDQVSVREFGTFTADLEALADWLAQCHISTVALESTGVYWIPLFEILEGRGFEVKLVDARRVKNVPGRKSDVLDCQWLQELHTYGLLAGAFRPPDQICVLRGYMRQREMLVQAAAMHIQHMQKALQQMNLLLHNVVSDITGTTGMKILKAIIAGERNSQVLASHRDPHCRNSAETIAKSLVGNYREEHLFALTQAVELYEIYQSKISACEMAIARHLAAQSACTDEPPPPSGKRVQAKNIMRGGVNVRDQLFKLTGVDLFSISGLGADTLLTLVGEVGVDMRPWKSEKHFTSWLALCPGTRTSNRKILSTKTRRSSNRAAAAFRIAATSLGRSKTALGAFYRRISARVGRPQAVTATARKIAVIYYSMLKFGTQFVEFGQAAYEQKYQTRRLKGMKQQALALGYQLVPIN

SEQ ID NO: 257238 - protein, 375 aa, unidentified
MQEKLRFLGLDVHAETIAAAIAEPDGEVRSLGTIPNRRESICKLIKKLGPAEKMRACYEAGPTGYVVYWQLAELGIQCEVVAPTLVPVKAGDRVKTDRRDAEKLARCYRSGDLTAVWVPDEGSEALRDLVRAREAAKQDQMRARHRLSKFLLRSGQRPPSGVRPWTRPYLIWVAQLRFPQIAQEATRQDYLHEVEHMRERVARLEQAITEAVKLASPALQQVINDLQALRGIADISAVTIAAELGQVSRFESARQLMGYCGAVPSEDSSGKRIRRGGITKTGNAHLRRIVVEAAWSYRRPPGIWYGLRRRQESISEEVKEIAWKAQHRLHKRYRKLGAAGKDQRKIVTAVARELLGFIWAIGTRAETIVRQQLTA

SEQ ID NO: 257239 - protein, 363 aa, unidentified
MEQQNRRFVGLDFGVRTYEMCMYDENGKIVRSNGLTTPEGRQKLYSKLKPTDRVGIEMCSLTMKVAREMKSAVGCDVLLLHAGKLAVIYKSLKKTDKEDALKLARLVKTHDDEKLPVVPLPSETDLKRRRMIREAKQLRSDRTKEVNRLHALFVECGITDIKKKNLATKTSREKSLQLLEETQRRQAERICQVIDLVETQIAEVKKEIAIEVESDNNIKNLQTVPGIGELTAVAYSGFVGDGSRFDNGSQVSNYLGLVPKLDISCDQVHYGNITKAGNPEVRSLLIMAAWSHVRFAKEDTVLKSKWQYLTQVRGMSKKKAIVCIARKMAEMMLAILKSGKPYSPKKFSVDQYSELAEKALKSA

SEQ ID NO: 257240 - protein, 374 aa, unidentified
MKGATELKKQIINTANSNQIDQVIIGMEATSIYSFHPAMFFQEDIDLKAFNTQSVVVDPKKTKRFHDVFAEDKNDQIDAYYIADYLRVGHYSIGIVRQENYIALQRLTRSRYEIVQSLVRAKQHFIENLYYKLNKIVISDELNTSIFGSTMMQLLTEDLTTDDLLNISINDLTDYLAEHGRGRFADPEALAKTIQKAVRSSYRLDKVVANSVDAVLSVYAEEIKAFQKMIKDLDKSIEKVVKVTDDEQILRSIPGIGPVYAAGILAEIGQIDRFDNEAKLAKYAGLSWREKQSGSYTSDNTPLKRTGNTYLRYYLVEAANLVRTHDPVFGEYYQRKYKKVKHTPSKRALVLTARKLIRVIYFLLKNHQIYQEKR

SEQ ID NO: 257241 - protein, 347 aa, unidentified
MEHIAIDLGGKKSRICVRDDKGTILEERNHPTERLSSYLKKRPGSQVVLETCSEAFAIADQAKQLGHKVTVVPATLVKELGVGSRGVKTDKKDAQVLSQVSSRVDLPSVHIPSGQAREWKALCSSRDCLVASRTKLINHVRGWLRTQLVHVRSGGVQTFSQRVEEELLSRPDGMPMYIHRELQSIKMLNEQIAEADKELDEITAQETRCRNLMTVPGVGPVTALRFVATVDDVGRFRRAHALQSYLGLTPGENSSSMRERKTSITKAGAPEVRWLLVQAAWCAWRTRPGDPMVKWANQVASRRGIQIAIVALSRKLSGILYAILRDGSQYQSKRAADSLPLPANSPV

SEQ ID NO: 257242 - protein, 348 aa, unidentified
MSQIIRVGMDTSKNVFQLHGVNAAEEVVLRRKFRRKEMEAFFRKLPPTVIAIEACGASHHWARYLGGYGHEVKLIAPQLVKPYVKRGKNDAADAEALCEAMSRPTMRFVPVKTAEQQAGLMLMGVRDRLVRNQTQLANAIRGFAAELGVTAPSGIRHLASLLEGLEADKSLPILAQELFAAQAKEYAQLQSKICEIDAKVAAWQKSEPRCKRLVMIPGVGPIGAALLVMKTPAPELFRSGRQFAAWLGLTPKDHSTAGKTRLGVITRAGDEGLRSVLVAGATAIVRHVRAGMSKNGFAPWVAELLKRKAPKLVAVALANKIARIGWKLMATGQTYKNRSAPNALASAT

SEQ ID NO: 257243 - protein, 423 aa, unidentified
MDVLYERVAGLDVHKETVVACVRIMADGKARRECRTFAATTEQLTELRAWLEECWCTHVAMEATGVYWIPVFRIVDEGGFELILANAAHIKNVPGRKTDMNDAMWLADLLACGLIKASFIPNEEIQELRALTRTRKQLVREQTRHVQRIDKTMAEANIKLSSVLSDIMGASGRRIIEAMIAGVRQPKQLAELAGKQIKATPKELYDALHGRLTDHHRFLLELHLKQRDSLDETIRKIDLEIDQRIARTHAEVGGSQVPFRALIDLVSTVPGVSLVAAPAILSEIGPDMSRFPTAGHLVAWAGLCPGQNESAGKRKSSRLRKGAPWLKTMLVQCAWAAKRKKDSYYRAQFFRLQSRRGPQKAICAVAASILTAIYNILKDGVEHHDLGGTYFDRRPVELKANHLVARLKKLGFTVQLQPIAETA

SEQ ID NO: 257244 - protein, 452 aa, unidentified
MAKKNKKQQKTINSRKAVLERIRLNAAGVDIGSEEIYVATVEGPVREFSTFTQGIKESLKHIKSEGVDSVVMETTGIYWWPIYEIYTAAGLEVYIVNACHAKNVPGRKTDVLDSEWLRELHTFGLLRSSFVPASNICKLRVYMRSRQDHIEMAAAHVQHMQKHLDAMNVKLHNVISSLTGESGMKIINAILAGERDPKKLTALCSQRIDAKKLSYVELSLDGHYKEEHLFGLQQALDIWFQYQSQILECDRKIEGLLKLMIKDKPVPEKIRSPKPISNPNKLQIKGLHEMLMTYTGGKDASQLPGFNDYSLTRVISETGIDMSPWPTEKHFTSWLNLAPWQNSSGKKKKTRRRKIQNRAGQMFREMARSVGNSKYQALGGFYRRIKSRNGARVANKATARKIAVLYYRLIKFGFDYVEQGLDEYEKIYQERMIRSLTKKAKQFGMLIIPEVA

SEQ ID NO: 257245 - protein, 343 aa, unidentified
MEITTIGLDLAKHWFQVHGVDANGRVVVRRRLWRSGVIAYFRSLEPCLVGMEACATAHYWARELIALGHRVKLMPPAYVKAYVKRNKNDAADAEAICEAVARPSMRFVPVKDAEQQSVLMLHRARSLLVRQRTMLVNALRAHMAEFGIIAPQGLRHVEILTKTIAHQQERLPELARAILQMIVGQLNGTMVRIREIEGQLARWHRESPVSRLLATVPGVGIMGASAIAATVADPTLFRSGREFAAWLGMTPRQNSSGGKERLGRTSKRGDKYIRSLLTAGAVAVLRHARNRPTRDGEWVRALLARKPTKLAAVALANKTARIVWAVMMRGEGYQPKEVFGQPA

SEQ ID NO: 257246 - protein, 429 aa, unidentified
MRTESTPGARGPVFCGVDTHADSHWLCVLDWRGRKVLSRQFPADAAGYEALAGAIAAAGEPACIAMEGTSSYGAGLTRHLASLGMPVREALSPARMQRRRPGQGKCDEADAERAARAAMSGSKLGTPKSQDGWVDGVRCMLAARSGAVKARTSAINTARSLLTTAPEGLRSRFRGMGGPRLMEELPSVRAEGALGAALGALADLWAAARDAALDMERAIEASLEENCPALLAMYGCGPVSAAKLAVAAGDNPGRLRSEASFAAICGACPIPASSGKTVRHRLNRGGDRQANSALHEIARQRVMRDPETAEYAERARERGKSDREVMRCLKRYVAREAYRALMHPHEIRRPEDASELVAARRAAKVSQVRAASILGTSEKYISMLERGQRELKPIRRAYEAWVEAGLPLDWDRQAFEAERKMDSKKSLAK

SEQ ID NO: 257247 - protein, 346 aa, unidentified
MSNYVGLDVSLKEVSVCVVDAQGSVVKRATLPTDPDVIADHLSREVPDAERVVHESGILATWLTRELEKRGVPIICIDARMAHKALSARLNKSDKADAEGLAQLSRTGWFTKVHVRSEASDRVRALVGARERLIRMRKDLEAHIRGVLKTFGIRMGAVPSAHHRQGFRDQLAEAGACDPMLGLVAQTMIPIHKTLCASAEALADELMHVAKQNTLARRLMTVPGVGPLVALNFIATLDDASRFRRSSDVGAFLGLTPRRYQSGEIDRSGRISKCGDAEMRRLLVSAAASLMTQVRRFSPLKSWAIRLSARKGFKKAAVATARKIAVILHAIWRDGTEFNWKGEPAT

SEQ ID NO: 257248 - protein, 338 aa, unidentified
MKAYAGIDLHSSNNYLGIIDDNDKRLYGRRMPNDLNHVLMALEPFRSQLEGVVIESTYNWYWLVDGLHDHGYKVHLANPSAIRQYEGLKHTDDKWDSFWLAHMRRLGILPEGYIYPKEQRPIRDLMRRRLLFVRQQTAHILSLQSMITRNLGFKMSNNEIKKLSVKDAENLFDSPHLVLMARNSLSATDFLKTIIKSIEKEVTSQVKLRKEFVMLLTIPGIGPILALTIMLEVGDIGRFAKVGDYSSYSRCVESKRLSNDKKKGENNKKNGNKYLAWAYVEAANFAKRYCCGAQSFYQRKKAKTNNILAIKALSNKICRASYYIMRDQVAFDEKKLFR

SEQ ID NO: 257249 - protein, 345 aa, unidentified
MQHTTIAVDVAKSVFEVAVSQRPGKVSSRQRLTRPRFARFLREQEPATVVMEACGMAHHWGREARACGHTVRLLPPRDVKPYVRGNKTDRSDASGLLEANRNEAIRPVPVKSVEQHALAGLHRMRSAWMATRTARLNTIRGLLRELGLMIPAGARQVVPRVWDLISEADSRLPEPLRVVLAEAAREVAELEGRIGEVEAQIEGLAKQSPLVRRLRTIPGVGLLTATAIVASIGDLRRFPSARHFASALGLTPREYSSGHVRRLGRITKRGDPYLRMLLIHGARSVLHHAKRSPAPDRLRSWALERERLRGHNKAAVAVANKLARICWAVAVREDDYHSRSATDAE

SEQ ID NO: 257250 - protein, 409 aa, unidentified
MEILHPRCAGLDVHKATVAACVLTPGPGADPNREIEEFGTTTAELRRLLQWLQERGVTHAAMESTGVYWKPVFNILESGCQLILVNARHIKQVPGRKTDKADCAWIASLLRHGLLEASFVPELEVRQLRDLCRMRTTLVQETVQTGNRLRKVLEDANIKLDSVASDALGVSGREMIRSLIEGNENPAALAGLARGRLRAKLPELERALEGQVTPHHRFLLRELMRQLAFLEEEVNRFEQEIERHMPPFEWAAGRLLTMPGVDRTAACALIAEIGADMTRFPSARHLASWAGLCPGNNESAGKRRSGKSHRGNRWIKGTMTEIAWAATRTKATYPASQYRKLAGHRGKKRALVAVANSLLQAIWFMLTHRQDYKDLGDQYLDHIRQKQLERSLVKKLEKLGHKVTLEPAA

SEQ ID NO: 257251 - protein, 318 aa, unidentified
MKQADVFVGIDVAKARLDVALHPSGATWTVPNSEAGIAGLVAQLHQQPVTHIVLEATGGLEIPLLGALGAAGLPAVAVNPRQVRDFAKALGRLAKTDRLDAQVLALFAERVRPALRPLPDQATQALSALVARRRQLVEMLTAEKNRHGQALPAIQADIATHMAWLEARLQRVNTDLGQQLKRSPLWRAQDDLLQSTPGVGPVLSQTLLADLPELGTLDRKQIAALVGVAPLNRDSGTRRGTRTCWGGRASIRAVLYMATVSATRCNPVIQTFYRRLCAAGKAKKVALTACMRKLLTILNAMVKHRTPWGAPAAGAEPV

SEQ ID NO: 257252 - protein, 424 aa, unidentified
MKQSILCVGADVHLNEIVLRAVDKLTSAEVIAPFRVTNNLPGAEAAAAHLVEVATSLNYPCIQIGYEATGMLWIPFHRFLKTNQLLKPFELQQVCFNPKLVADFKDALVLRGPKDDDRDAFDVAARVQFGHWPASYVPDDFWQGVRRLTRYRFQLSRTLSREKMRFQSYAFLKCSDWKRIKPFADLFGATSTALLTEFTAAQLREMSQTQLADLIAHRGHGRFYDPGTTARTVQRALDTSYPIEPQMDDMITATLATGWEHIRAVKRLIKRLDQQIARCIDPIPNPIITVKGLGPVITAGLLAEIVDIDRFPEHKHLAQYFGISWAKRSSGGFVSQNTRMTKVGNPYGRYYFVLGADRLRQFNLEYKAFYWRKYHEVAKYQHKRALVLSARKLVRLVHALLTKNVPYVRPQMATDPVEDDHLLQ

SEQ ID NO: 257253 - protein, 424 aa, unidentified
MKHQLFIGIDRSDQCLDSCIIDTKNNIINQLNVSTNPRDLTSWCAEILKLKDSKNAESIAICIEQPCQNLTHFFKQYEEFTLYLINPVILKRYRETFNLSRSKDDKKDALHLALLISEHHEKLTPWKALEPNYQKLSMLTEKRRQLINARTALSNRLTQNLKEYYPQAIELLGRQLSSSISIAFLRRWTSLQKLQKSQLSTIKKFYYLNHCRSNTAIDKRLKIIPAAIPLCSDEVIIEVHSIMTIAYIDQLAALEKNIQRLDDLIEETHKQCDKHQIIESFPGAGQHLSPRITAFMGLHSEGWEKAEGLQCQSGVAPVTKQSGKTHFVHKRYACSTFVRQTFVEYAGQSYKYSTWAKAYYEQQKSKGKTHQIILRGLAYKWQRIIFKCWKNGELYDEEKYLKALQKSGSDLTEIIRNQPSKKCA

SEQ ID NO: 257254 - protein, 414 aa, unidentified
MFAVGVDVSNGRSTIAVLGTKRTMVVKPYEVPHTTNGFAELVKRLHGLGGEVRIVMEHTGRYYESFAMSMCRAGFFVSAINPLAIKDYQEGITVRKVKTDKADALKIAQFAIDKWEILPQYTPMDTIRYELKTLHRQFQLSSKTRTALNNNLIALLEQSYPGVNKYFSSPVRSNGSQKWVDFADTFWHVDCVAKVSRKAFVDRYRKWCKSHSYSFSEAKAEEIHEESRQKFPLVPKTDTCRLLVREAVAQLNAVSRTVEAYRSEMDRLASQLPEYQTVMAMTGVGKSMGPQLIAEIGDIRRFAHQKSLVGFAGTDPIKDDSGDKISGSKPSSKRGSPYLRKTLFVIMTILLQLQPLDDPVYQFLDKKRSEGKPYHVYMTAGMTKFLRIYYGKVRNSLKEQGLWEQSDVVEVNPD

SEQ ID NO: 257255 - protein, 430 aa, unidentified
MGLTVPTTMPPERDAQLMPYEWFVGIDWGSQQHQVCVLDRDRRRVGERVVDHDGASLARLADWLWTMAVGQPQRVAVAIEVPRGAIVEGLLERGFHVFALNPKQLDRFRDRHRVAGAKDDRRDAFVLADSVRTDRPSFRRLHLDDPQLLVLRELSRAEETLLEDFRRSANRLRDQLHRFYPQMLQLCSAADAPWLWDLLDLAPTPAHAALLSPEQVQRVLKAHRLRRLTAPEVLACLQAPALPVAPGTAEAAQAHCGFLVPCLRVLAKHLRACGQQVDALLRTMADEPGEGDRPSDVAIVLSLPGVGRKITAWLFAEAAQPLAERDYQVLRTHSGLAPVTKQSGKRRLVVMRRGCNPRLRHALYHMARVAMQRDAHFSRVYAALRAKGQRHGQALRTLGDRLLRILVAMLRDRTCYDASRMRRESAVQMG

SEQ ID NO: 257256 - protein, 334 aa, unidentified
MWHIGIDLHRETVVIAAVNDAGEVTKPVTVRCEDTATIVNIVKALAPFRAVIEASATYRWLHDLLRPYGTILLAHPFRLRAMVQRRAKTDKLDAQLLANLLRINQIPLAYIPPEPFQQLRELTRRRARLGRELAQAKIHLRAMLARQNRQAPFRVPFGTRGLAWFRGQDFGWIENLVRDELLARLKHFGQQATIIDQHIERMSAAFPQVETLTEIHGIGLYSALLIVAEIGEPERFRAAKQVGAYAGLTCRVHQSGGHCYRGSISRQGSAWLRWILVQTAIRAIRKDAALKNFYARVRKRSSAKIARVAVARKLAEICWKRLRRWQHEHTNQAA

SEQ ID NO: 257257 - protein, 382 aa, unidentified
MFIVGIDIAKRSHEAIIITEDGQVVRKAFSFRNNCTGYNLLLEQVRRLTLVKSQIVFAMESTAHYWLALYARLLKDGYTVMVLNPIQSHSLRELYIRKAKTDARDSLIIADLVRFGRCKASNVPQDKILALRELCRSRAYLVDMAADLKRKLIALLDRIFPEYESLFDSVFSKASIAVLRKYSTPQKVKNANLRKLTDLLMESSNGHFGEWKAHQLKEAACSSFGMFLEQILSLTAQADSLEKQISVFFQEFNNPLTSIPGVGTVLAATILSEIGDITRFSSADKLLAYAGLDPSVKQSGEFKSNQNRMSKRGSPYLRRAIWLASTVAVHRDPMFQIYYEKIISEGLHYMNVIGHVSRKMTAVIFAVLRDGQPYQPILQSAG

SEQ ID NO: 257258 - protein, 348 aa, unidentified
MENITRIGMDTSKSIFVLHGVDASDQVVLRKKLRRKEVVEFFRKLRPTRIGIEACGASHYWARQLGALGHQVLLIAPQHVKPYVRRNKNDAADAEAICEAMSRPRTWFVPAKTAEQQAGLMLAGTREAFVRRRTQLSNTIRSYAAEFGLVSSRGLDKIEPLLARIAADNDLPTLAKEMFADLGEDYTLLQKRLDIIERKLRLWHRNDEQSRRLAEIPGVGVVGASLLAMKVPDPKAFRSGRDFAAWLGLTPKDHSTAGKQRLGVITRAGDETLRSVLVVGATALLRQVRMGRSHHSRWLADLLRRKPPKLVAVALANKTARIAWKLMVSGESYDRTRVGIAAREAAPA

SEQ ID NO: 257259 - protein, 378 aa, unidentified
MKRVRFVGLDVHAETIAVAVAEKDEEVRSLGVIPNRAESIRKLVKKLGPAEELRVCYEAGPTGYVLYWQLTALGAPCEVVAPTLVPVKSGERVKTDRRDALKLARSYRSGDLTPVWVPDAAHEALRDLVRAREAAKKDQLRARNRLSKFLLRHGKRPPAGVKSSWTGNYLLWVKQEVHFEQFAQEFTLLDYWHEVEHAAGRVERLDRAVEEAVKSAPPQMRAVIEGWQALRGIAQVSAVTIVAELGQISRFARARQLMGYSGAVSSEDSSGERVRRGAITKTGNAHLRRIVMEAAWSYRHRPAVSRALRQRQEVVSEEVKEIAWKAPHRLHTRYRKLTARGKNKGQVITAIGRELLGFIWAMGVKVEGAQKEPLQRAA

SEQ ID NO: 257260 - protein, 425 aa, unidentified
MKSNPIKSQNQRVERIATTTLVIGIDIAKEKHAAQAINFRGIVLTKRPILFSNDLAGFEHLEHNIRKLQKMHGMNDVVVGMESTGHYWFNIANWLVGQGIDVALVNPMTTKRNKENRDNSPSKNDPKDALVIADAVSRGFYTPFAPKDEAFRRIRVMVTNREHWVVKSGRIKNRIHRWLDIRFPEYRQAFDDIFSDRSLATLRRFPAPSDLLQLTPEQMVQIWGEYMARPGGVRGKNKAMELQLLARHSVGDTTALEEDKWELRHLIEEYERICRIIDEADEMIEQVLPEIPCSDLVRSVGASVPATAAILAFGGDLRMLSHGNQLLRKAGLNLAERSSGKYKGQIKLTKRGNSLLRKHLYFTVFHLLSFNEAFQAMHAHNTEVKRMTKMQSMMKLIGKLARMLVAMAREGQTFSMDKAQLPLAA

SEQ ID NO: 257261 - protein, 407 aa, unidentified
MISVGMDISKEKITVCALKEGCKIIWKPFDVYLNKSKVEGLIEKLEKIKEEVKIIMEATGKYHLPILYELKERGYFVTVINPLKMKQYCRALNFRKAKNDKIDAKQIAEYGLMYWKELEEYKVDEENYRVLKELNRSYQHYMDLRINQMNYIDQTIHQTFPGIKKLILHNSGDFSKDKLIDFLEKWWHKDLVLEKTEEEFVEEYKTWAKEKRYHPNVNKAKAIYSLAEDSISTQPSLNPKIETNIREGINLIKQINQILNSILSQMIEISEPLEEYQEVKKFSGISEKLAVQIVAEFGNLSKFKNKKSLISFIGIDAPPYESGNFKADQRKISKRGNAILRKVGYQAMKCMMSAKNPENEIYNYMIKKEKEGKAKKVCKFAGLNKFLRIYYARVMEAKAKKKELKVA

SEQ ID NO: 257262 - protein, 349 aa, unidentified
MRKYYVGLDVHKLSIAIAVLDAYGKLVSRAVIETTTEAVRDFFRNLGGEIHLTFEEGNHAAWLYDIVEPLVKRVVACNPKHNRIEGSRSDRVDAVKLAELLRLNALKPVYHGEHGTRTLKHLMRSYECLVKDITRVKNRLKALYNSQAIKQRGRELYHVSKRQSWLEKLPNPGQRTRAELFFQQLDELKVIKRAAQKAMVAESKRHPAYRVLTTVAELGPVRIAQIIPTVETPWRFKSKRPFWNYVGLAVVTRSTADHEFEDGRVRKRKKQIIQTRGLNQDYNRRLKLIFKSAATHASHCGAYREYYEGLVKTGMREEMARLAVARKLSATVLAVWKSGESFDAGRILR

SEQ ID NO: 257263 - protein, 462 aa, unidentified
MAAQRRSPVPRRLTTPSAPKPQPALTVKNPRAAGIDIHDGVHWVAVPPDCDPEPVRRFDTFTADLETLADWLTACGVDTVAMESTGVYWIPLYELLERRGFKVFLVDARAVAKVDGRPKSDIHDCQWIQRLHSYGLLDKAFRPQDEIVVLRGFVRQRQNLIAYASQHIQHMQKALVEMNLKLTLVVSDIVGKTGMAILKAILAGQRDPRELAKLRDERCKHTAEEIALALVGNYREEHLLALKQAVELYEFYHSKIAECDQAIDAYLRRLPNRAGDKPLEPRPAKRKNKDNELRFDARKRLYEMLGVDLTAIDGISVSVALTIASELGPDVSAFRNEKAFSSWLGLAPNHKITGGKIKSRKTRPGANRIATALRMAAASLLRTPTALGAFGRRMRSRVGSPKAITARAHKLAKIVDRMLKYGEDYVRQGAEESEARDQERRFEALRRTAAALGYRLEPQVVQ

SEQ ID NO: 257264 - protein, 342 aa, unidentified
MNIPVRIGMDTSKSVFQLHGVDENEVVVVRRQFRRAEMIRYFERLPPVLVAIESCGSSHHWGRLLQSFGHEVKLIPPQYVKAYVKRGKNDAADAEALCEAVTRPSMRFVPVKSKERQAACMLMTVRERLVSVKSQLSNAFRSYAAEFGIVGPAGQQNVAALIKRVLEDESLPEMARDLFRLQADEYAAVQARLANIEAKLMKWHREDDISRRIATIPGVGPIGSSMLSMKAPPPETFRSGRDFAAWLGLTPKDHSTGGRQRLGGITKAGDSILRSTLIVGATALLRHIRKGRHKPTQWLASLLGRKPPKLVAVALANKFARIAWRLMISGGVYKQPVAAMPT

SEQ ID NO: 257265 - protein, 366 aa, unidentified
MREQQSNRGGRTTIGLDLGDRGHRFCVLGESGQVVEEGSVANNRVALSELSSHYPGALIVMEAGCHSPWVSRHLEQAGCEVIVSNPRKTRAIYQHERKSDRRDALMLARIARMEPALLYPVRHGSEEAQQDLLRIKLRDSLVRVRVGLINSVRFTLKSLGYAMANPSTERFHKAIKSALPESIVQMIAPSVQAIEQLSLRIKLLDREIRTLAHTKYPETTWLEQIPGVGPITALYFVLKIGDPARFKRVRDVGAFIGLCPRRDQSGESDPQLRISKRGDAYLRRLLVSSAQYILGPFAPPSALRQYGLALATGATARAKKRAVVAVARKLAVLLLTLWKTKSAYQAFPRQCEKMRTLDLERLRCIA

SEQ ID NO: 257266 - protein, 454 aa, unidentified
MLKGRKSRQKAADFDALDQINLNAAGIDIGAAEIFAAVPKGHDEQAVRSFPTFTVDLRRLADWLEHCGIETVAMESTGIYWVPLYEILEERGFEVCLVNARHVKNVPGRKSDVMDCQWIQQLHTYGLLQASFRPPAEICAIRALVRHRGMLVRYRSAHIQHMQKALHLMNVQLTNVLSDITGETGMKIIRAIVAGQRDPHRLAQFRDPRCARTEEEIAKSLEGHYQREHLFALKQALELHDTYSQQIQSCDAELEALYQDMDSDPDPTDNRPPDPKTQKRRKSQAHFDLRMSLYRMAGVDLTRIDGLDALTVQTVLSEIGLEMSRWPTVKHFCSWFNLAPRNDVSGGKVKRRGTPKTKQPGATALRLAAQSLARSDSALGSYYRRIRARHGGPKAVTATAHKLARIIYHMLKHREDYVDPGSGHYEQQYRQRTIRNLKHRAARLGFRLEPTSVT

SEQ ID NO: 257267 - protein, 338 aa, unidentified
MSIFAGLDVSDKTTHLCVVDADVVILKRDVVASDPDLLAKWLGKHCPGLVRVVLETGPLSTFLYHGLAERGIPVECICARHAKGVLAARVNKSDVHDAEGLAQLARTGWFKRVHMKASATHIDRAALRIRAQLITTRVAMGNQLRGLLKLFGLRLGAARTPGKRRERLAALYQQRPDLEPLFAPLVASMEVIEDQLRASNRLLESRATEDAVCSRLMSVPGVGPITALTFTASIEDPHRFARSEDVGAYAGLVPRRSQSGERDVRGNISKAGDPMLRRSLYEAANIMLCRVQRPFAPQQWGQRIAESKGNKRARIAVARKLAVLLHSLWLNETEFRWA

SEQ ID NO: 257268 - protein, 417 aa, unidentified
MEYPPETLPAVPPGGVTCGIDWANDDHAVCVVDMAGKVVQRFIAEHTGNGLAGLVRRLRRAGAGEVAIERPDGTVVETLLEAGFTVVVISPNQLKNLRGRYGSAGNKDDRFDSFVLADTLRTDRARLRPLLPDSPATVTLRQTCRARKDLVHHRVAVCNQLRAHLKIAFPGAVGLFAVLDSPVSLAFLARFDCQDRADWLSPRRLAAWLEGQGYCGRKDPAELHARLAGAPRGATGDDGAAKAHITRALLAVLASLVQQIKTLNAQIAEQLALHADAHIFTSLPRSGTVRAARLLAEIGDCRARFPTPESLICLAGVAPSTRKSGKTTYVDFRWAADKQLRDAVCDFAGDSRHASPWAAQLYNDAIARGKDHPHATRILARAWLYVIWHCWQNRTAYDPARHKALQRILAQEKPAAA

SEQ ID NO: 257269 - protein, 325 aa, unidentified
MIKTMQNQNTVVYAGVDVAKATLQLHLQGQQSEFSNTAKGLHQLCTRVQKVSSVHVICEATGGYERALVKALQQEQIPVSVTNPARVRAAAQAQGQRAKSDPIDARGLTDYGQRYQPEPTPPTSATQDRLVALTQWLKQLIHGLALAKTQAEHHQDPFVRRQHAKLMPHLQSQIEAVEKQIKALLKQDAELQERVNCLDEIEGVGLRTAWMILAHMPELGYMNRQEVAALGGLAPWTRDSGAMKGRRCIGGGRPEVRLALYMAALSAARCNPVLRALYKRLRAKGKLAKVALTAVMRRLLTYMNHRLKALLSKTATAKAQEPKIA

SEQ ID NO: 257270 - protein, 359 aa, unidentified
MLVERTSVGLDVHARSVAAAAIDGVTGELKRARLTPSHDHIRSWLGELAGPVAVAYEAGPTGFGLYRSLTALGIRCVVAAPSKLQRPSGDRVKTDARDAVHLARLLRLGELTAVCVPSVDQEAARDLVRAREDCRGDLMRARHRLSKLLLRQGIVYCGGNAWTDAHDRWLRRQRFDSPATTTAFESDYDTILTVAARRDRLDNTIAELAADSEFTPVVRRLACLRGISTLTAFALAVQIGDWHRFTGNTIGSFIGLVPSEHSSGASRVHGSITKTGNTHARRLLVEAAWHHRASYRPGKTMHQRWELAPAAARARGDAGNRRLHARWITFNLRRKRPVIANVAIARELAGWCWSLAVMD

SEQ ID NO: 257271 - protein, 367 aa, unidentified
MKDSSTVVGLDVHKNSIEIVTADTEGAMEVRHFGRIGGTMDALDRAVRKLTSQGSILRFVYEAGPCGYEIYRHLTGKGFSCKVVAPSKTPQKRGDRIKNDRRDAETLARLERAGELTAIYVPREEDEAMRDLTRAREDAVKALRTARHQLNAFLLRYGKRYPGKASWTPSHLRWLSDIALAHPSQQIVLQESILAVTGCTERATRLTDQIGKLLPEWRMFPVVKALQALRGVAPIVAATTIAEIGDLSRFENPKQLMAYLGLVPSEDSSGESTHRGSITKTGNGHVRRVLIEAAHAYGFPARVSRHLLKRHEGLPQPVLAIAWKAQVRLCGRFRRLMGRGKLKTKVVTAIARELCGFMWAIAREVRV

SEQ ID NO: 257272 - protein, 346 aa, unidentified
MKKFFVGIDFSKRKMDVSIVEKDFPERTIAYKQFINNAEGAKKMCKWVEYTTNTSTKLEGEVLFCCEHTGSYCLVVCDYLSENGKYIWLGNPLDIKRSMGLVRGKDDVIDSRRIATFAAEKHHKAILYMRPEDSTRALKYLLSIRNTLVGQKKALACQIKENFPKLHNITLLCKIEEKLKQMLDSIINEIKKIEKMMLDIILSNKEYKNTFDILTSMKGVALINAAAIIVFTDNFKRFSFNSRKICTYWGISPFRNESGDSIRRGTHTSPIRNNWLKAILSEAVLCAIRYEKRMKEYYSRLMVKGKHRNVALNNTKNKLLKTLVAMVRDGKKFDENYVSIPQAYAV

SEQ ID NO: 257273 - protein, 343 aa, unidentified
MRVVRVGVDLAKNIFQVHGVDRDDKTVWCRKLNRDEWINVLIAKTDTHCEIGMEACGGAHHWARLLQAKGYTVKLIAPQFVKPYVKSNKNDANDAEAICEAMSRPHMRFVSVKSVEQQDIQATHRVRSGLMDQRKAKANQIRGLVSEYGLVAPKELIHLRSAIPEWLEDAENGLSSRFRQLLHGLWNDLIALDQRVNALDQEIITLATTDPVAKRLQQLRGVGPMIATALLANVGDASQFSNGRQMAASLGLTPKQNSSGGKDRLLGISKRGDAYVRCLLVHGARSMIRMAKDKDDHLSQWVMRIANNRHPNIAAVALANKTVRIAWAMIVRGTDYQPDLVAV

SEQ ID NO: 257274 - protein, 346 aa, unidentified
MSEKDIAVLGIDLGKNICSLAGFDRAGNIVFKKRMRPSTIPKFTAKLSQCVVAMEACCGAHFLGRRIATQDHDVRLMSPEYVRPYVKAQKNDERDAEAIAEAATRPTMRFVELKSEAQLDMQTLHRARSRLVGMRTMLINQLRAVLIERGLTFPQGRRKLELALDELLADEVPGISERMVLLVKDMREEWRELDQRIAKLDRKFLGFARSDEAAKRLTSVPGIRPLTATALIAAVGNASSFQRGRDLGAWLGLVPRQRTTGGKPRLLGISRRGNTYLRTLFIHCARAALPWLAKHETRLGLWLRTLLVRSHRNVVVVALANKLVRIAWATLHHKTPFRNEPGILVA

SEQ ID NO: 257275 - protein, 350 aa, unidentified
MRHVIGCDVHKRYSVFVAINTHGKLSKPTRVEHDRDGFRAFLQSLPPHCEIAVEATGHWYWIIDEMERAGHQPHLADPHESKKRMGKPNKHDALDAGGLAILLHNGTLPESWIPPGDLRDVRELLRTRMALRDLRTALKHRIHAAIDRYGLHNDAISDLFGKAGREFLLNQLSGLPPETHAMLLLELDAMDDLTPRIETIEARVAEVIVPSPEVQLLLTLPGAGQILAPLLWLEIGDVARFPRAENLASYAGLVPRVFSSGGHTVLGHTNRYVNHYLRWAFVETATCAAHLHAYRESHIGVLFQRLLPTRGYGRAIVAVARHLAEASYWMLRKRQPYRPPKPKLSSSKIG

SEQ ID NO: 257276 - protein, 368 aa, unidentified
MVKYKLKAAPTAISKEQKGQRGSKAKRILIGVDAHLESYQAASKIDNGAVGVAQSFGSKEALLLRVEKQLQQAEEVVVVYEAGPLGYSLYRDLSARGIKCLVCAPKSDEQKRKRRKNNSIDARSLVSHLFNYLNGNEQALQLVRVPTPAQEQARLASRQHDALVQERKRLGAMGNSLLLSQGYGSWKNWWRRKSFERLSQVLSSWVVELLNTWVDLLRALDEKIQHAKVSLAKQCQGPRPKGVGAPSLVQLGAEVLDWKLYSSGRKIGCLTGMVPSEWSTGNGQRLGSITKVGVPAIRRIITEMVWRMILFQPQYKAVQKWRAVLEGSNRGLKKKAVVAIGRQLMVDLWRLQTGRISAQELNLIMVEG

SEQ ID NO: 257277 - protein, 333 aa, unidentified
MNYIGLDIHKKNTQACVMNDRGRVLMNVRFPSDSKDINEFLDKIEPLGAASIVMEATGFCMYIYDIIEARGHDVKVAHPFKVKALTAGRAKTDKNDAEMLAELLRLNAIPESYIPPKELRELRELTRFRQSLVRNSASIKNQIHAILAMRGIKVPPLLRSHFSKKHVMWLRSLEIAQLDDFLDIMALIDTKIGKADEDIERICHDDEDVQRLKTIPGIGDVTATSFVAEIGDIQRFASPEKLASYAGLTPIVRQSGEKTWAGPISKRGNATLRYLLIEAAYSHVNSSKESKLTRFFERKSQAKGRKKAIVATSRKMLEVIYYMLKRGEAYHAH

SEQ ID NO: 257278 - protein, 420 aa, unidentified
MLMNIPSQFPYRATVGLDWADQKHDVFVRFANGDSYRRKIDSRPEAIQEWLLELRSTCAEATIAIALEQRRGALFYHLCTHLSWIDLYPINPHSLASFRQTFFSSRAKDDPVDSQLLEELLRTHPERLRSYQPEPTAERKLDQYCRHRRSLRDLATKTELKLISTLKQYFPLAVNLFADVGLKSEIALDFLSRWPTLEELHRAKAQTVRSFFYAHNSRSQSLIEKRLQLIAQAHPVTDDLALIEPLVLTSKCLVTQLRQFNQAIGQFDQKIRELFKSHPDHFLFESLPGAGEQLAPRLFAVFGSNRSRWADATDIQKYSGIAPVVERSGKSLWVHRRLARPIFVCQTFHEFAQQSTHRCSWADQFYRRQRQRGKSHHSAIRALAFKWIRIIYACWKANKPYDESLYVHALEKRNFSVSTT

SEQ ID NO: 257279 - protein, 355 aa, unidentified
MIIIGVDYHPEFQQIALLDQGTGEFQEKRLSHPEEAEQFYRALATADQKVRVGMEASGHARWFERLLAELQVELWIGDAAEIQSKRARKQKTDRQDAQLILKLMLKDDFRQIWRPSWENRDLRQLLWHRHRMVQTRTRIMNQLQAVAINEGLRCKKRLWRAGGRQQLESFRLAPWASRRRQDLLELLDQLTPTIAALNQAVEQEAEKNPEAKRLMTHPGVGALTALAFVLIIGKTDRFQCGKQVAAYLGLVPLEKSSGNRRRLGHITKQGSSLLRFLLVEAAQVTVRSLPEWRTQYFRLLMRRGRKTAKVAMARRLAIRLFWMWRDRRDYELQRSSVRTQDSPEQAMVCSRTPRN

SEQ ID NO: 257280 - protein, 343 aa, unidentified
MEYYVGLDVSLKQTSICVVDQAGLVVREGVVDSDPEAISVYVTSRAPNAVRIGLETGPTSTWLWTELKRLGLPVICIDARHAKAVLKMQINKSDRNDAIGIARIMQTGWFKEVHVKDIDSHSVRALLASRALLVKIKRDLENHVRGLLKNLGLVIGRAKFNVFAVRAEELIEGRPELVAAIRPLLEARNAVEQQVSELDRKVMKLARHDAQIRRFMTAPGVGPITALCFKATIDDPARFARSRSVGAYVGLTSRRHASGEVDWTGRISKCGDAMLRSYLFEAAGVLLTRVPKWSSVKAWGVRLAKRNGLRKAKVAVARKLAVILHRMWVDGTEFNWSKKEIAA

SEQ ID NO: 257281 - protein, 344 aa, unidentified
MYYCGLDISIKSTHMCLEDAHGRRVREVAVATTAEAIRTVLQRYKAKGLRVAIEAGGQTAWIVDVLRELGAQVHVVHPLKVKWIAESKKKTDRVDAALLAHLLRIGGLPEPVHVPEPRSREVRHLLVARRQLVTMRTKTINVIRGLLRQQQVVLPTRALSTLSGWARLKRVSVSASTQAVVDAYAELATALFAALKALDQELHARAQTDARVAQLETIPGVGPISAQTLLAAVDTIQRFPSAKHLVAYSGLAPSVRASGEQVRYGAITKQGRSEIRAVWVQAAFAALAVKAPAARPLQQWWHRVARRRGKKTAIVALARKLLTIAFHVLRDETVYQPQRLGAVA

SEQ ID NO: 257282 - protein, 346 aa, unidentified
MQYYTERHRHTCGVDLHGRNLYLCVLDPDRQIVLHRRVDCDEKKLLRVLEPYREDLVVGVECMFKWYWLSDICEEHGIPFVLGHALEMKAIHGRKSGNDKLDAARIARLLGSGMFPVAYVYPKRMRSTRDLMRRRSFMVNQRSALINHIQVTNLQYNLPELGRISNPDNREGIIEQFEDPSVRETIAADMSVIEVLDVVVNRLEREIIKKARGHDRHAFTLLKSVHGIGDVIGLTLLYEIHDIRRFDSLGGFLSYCRLIKCEKTSDGKKKGTGGRRQGNHHLKWAFSEAAALFLRANPEGRKLHSRLLKKHCKAKALGILAAKLARSVYYMLHRNTPFDMDRFVRT

SEQ ID NO: 257283 - protein, 343 aa, unidentified
MQTVTTIGFDIAKSVFQVHGVDAAGQVVIRRQLKRRHVLAFFEKLPPCLVGIEACASSHHWSRELQALDHTVRLMPPAYVKPYVKRQKNDMADAEAICEAVTRANMRFVPTKTPEQQSCLMLHRTRHMFIRQQTALINSIRAHLAEFGIVAPVGRKGVTDLLQIVADTSDQRVSEVARACLAALGTQLLSIKKQILEFDRMIMVWHRSNQTSKRLHCIPGVGPMLATALVASVADPRTFRSGRNFSAWIGLVPKQHSSGGKERLGSISKQGDRYLRSLFVAGALAVIRYAKIHGTGHRPWLTALLARRPTKVAAIALANKIARMAWAMMAKGERYKQPVALAR

SEQ ID NO: 257284 - protein, 341 aa, unidentified
MLNYGLDVHKKYTTYCIMEDDGRVLREGRCQNEDLPGIFSLNGEKRAVLEAGQNWSYLYDKVEPLVDQVLLAHPLRVRAIAAARVKTDAIDARTLAPLLRADLIPAAYVPAPEIRRQRELLRYRLDLVKQRTAMKNRVHALLTTAGQLPQVTDVFGREGRTWLRLVPLSAQKRYELDGYLRVLDCLQERIDDATQLVRQEAGRNPQAQLLTSVPGIAALTALTVLAEIGDVRRFPDARHLVSYAGFAPRVRSSGGKTQRGHITKQGPSALRWVLIEAAHQAVRKPGRLQQLYLRLRRGKSSSVAITACARELLVAIYQMLMRGEAYRVGGSPEGFLTPEVA

SEQ ID NO: 257285 - protein, 418 aa, unidentified
MVETDEKERIRIYQKRNICFIGIDMHKDTHCAVVIDCWMNKLGEVSFENRPSKFPAFVEDVREICGIKEFVFGLEDTRGFGRNLAAYLVGRRFEVKHVNPAYTSAVRLANPIIHKDDSYDAYCVARVLRDMVDTLQDARHEDIFWTIRQIVKRRDLIVKSNVMNKNQLHSQLSYSYPSYRKFFALIDAKSAMCFWENNPSPEHVKATTPEKIYETIKPVHQALKMQRIHEIIAMIEKDGDTRKDYQQERDFIVRNIVKEIRHNKELIAEIDDELWKLLPLTGYRLHTMPGIDLATEAQLISEIGDINRFPDSDKLARFMGLAPVQFSSAGKGKDQRCRNGNRALNAIFHFLAIQMVAISPSGKSRHPVFREYFEQKVKEGKNKPQALVCVARRLVRIIYGMMKTKTEYRPFEKVVGKN

SEQ ID NO: 257286 - protein, 352 aa, unidentified
MEFVGIDWAYRRAAWCAMGTAGEIRDEGFVPADEDGLAKLVLALGPRVSACVEMMSGAVWVRDRLQAAGWEVEVADARKVKAVAPLACKTDKVDARVLAELCRRDLVPAVWVPSLSDRELRERLNRRAHLIRLRTAAKNRVFGALSQWGLRIPLRVLRAGDAMALLERRGLPEVWRRSVAEALAVIDILDARIAPLEAELRPLVRADERVQLLTTVPGIGDHLALMIAAEIGDIARFATPRKLIGYAGLAPKVKQSGQSSRTGALSKAGSRSLRWAAIEAAQCAWRPTNPWNRLYLDVKGRTGKSNPAKSAVARKVLIAAWHVLARHEPFKPSRPRGGADPVPASSHFHLAA

SEQ ID NO: 257287 - protein, 384 aa, unidentified
MKKVNSNVACAGMDVHYKFSNVTFRDASGKVVSRQRLDHPDRKQLAERLSRWPTGIPVVMEASFGWGWLSDLLEQAGQDVHLSNCYKVEQMRKARGWVKTNKKDADLVSLLVFEQSDWWKVWRAPPDVRNRREQMRFRGDLVGSQTRVKSRVHAIFHRHGIFHEFSDLFGGKGRKFLVELCLYNSANLPPGALLALRGQIKLLDHLRRQLADVARILHKQLLKTPLTMRLKTVPGFGLILAHVLAAEIGKIERFKNQKSLASYSLLAPRADDTGEDDPRHSPKGRHLGLRGNRTLKWAFIEAAHGAVRSGGKWRAIFDRATDGGKKNRNRGYIKVARELVKVVYAVWAKGVDYQVIPPGRPGRKNNNKKSRSETGQLLHPMVHA

SEQ ID NO: 257288 - protein, 386 aa, unidentified
MALTKDKHDCFIVSSEGEVRADVFTIPNTMDGFHCLLQRIRDCANAQDKIKVGLEATGHYSYNLLGFLMDNGLATYVLNPLRTNLYRKSLSLRKTKTDRVDARTIASMLLSDEGLKPYSDAAYHNEELKSLTRYRFDKVKERAKLKGSIARLVCILFPELEKLVPSLHIASVYALLEEFPGARQVAVAHLTRLKALLETASKGRYKRDIAQEIREAARNSIASRMPAKSLELQHTIRLIRELDAEIHEIEAEIEAMMDEIQSPITTIPGIGCRMGAMILAEAGDFSRFDSPDKLLAYAGMSPSTYQSGQLKNCYPHMEKRGSRYLRYALYNATKYVCLWEPTFAAYLAKKRAEGKHYNVAISHAAKKLVRLIFAMEKSRQPYRAVA

SEQ ID NO: 257289 - protein, 342 aa, unidentified
MSIVGAFDVHRRQLTFDYLDTVTGVVERGRVLPADREHLRQWLARFAGHGDVQFALEGCTGWRYVVEELLAAGITPHLAEPADTAALRGKKQHAKTDKSDARHLRVHLAAGDLPESWIPPEHVLEARAIVRLYKDLVDERGAWHQRIAATLFHQGVPADIGSMSTAEGRHAVAGVDLSVAGRQAVDTGLRQIDRLTGELEPLRRQLDMLSRRQPGCKALRAAHYGVGPITAVAIWAELGDVHRFGNSDDVVRHTGLDITVHSSDTKRAAGHLSRQGPQLLRWALYEAAKCAAKPTSPDHGYYTAARHRRNTGLATLSVARKLARRCYHTLRDLGPGALAPAA

SEQ ID NO: 257290 - protein, 401 aa, unidentified
MKYVLVLDVAKGKSMFMLSSNVGEVLLEPTEYSHNKTDFELINSYINKLNIKDNLTVIMEATSIYHKAPERFFKENNYHVIVFNPLIGKEITNTIRKTKTDKQDCIKLTNLFWKGSIPDRNYTEDEIYTRLNELSRQYYHLDEGLTRHKNRYKELLHLCFPEFEHCFKDGKIYDLTALNFIKEFPHAYIIKDKRVDALAYNMANTNNRHLNYYKRKAITIKEYAQNSYPGVNQNSNDVDNLKQLVEIIINLNSQKDTVKNQMIELAKQTKNYNVIVSLFGIGELSASLIIAELKDITIFNNIKQINASCGLDPTIVQSGKSINYHGPISKRGNKYARKILFNCSRNIVTLSAKCDKKNPIYVYYLKKKQECKHYYACLTACSTKLIRIIYALCMNNSQIQN

SEQ ID NO: 257291 - protein, 341 aa, unidentified
MRAIGIDTHKATLAACVVDELGLPLAEATFANDPAGHRALAAWAGAVAPGGLIGLEGSAGFGAAAARFLLAQGREVREVPPQLSHRERMRTRRAGKSDPGDALAIARVTAREPDLPPVRRADASRALQLLVEAREDLVAEATRVRNRLHADLVVLLPGYGVAAVNLVAARHRAAIGARLRRLPGVRAGLARERLARLGRLMAEADRLEARLAVLVADHPLRTLPGAGVLVTAKLVGEAGDVRRFRSEAAFAMLAGVAPIPASSGQTQRMRLNRGGNRQLNRALHVIALAQAWHDERARTFVARKRAAGHTWREAIRALKRHLARVVYRLLVAGASAPDPAT

SEQ ID NO: 257292 - protein, 313 aa, unidentified
MPVALSKPIVGVDVAKNELVIYQADNDLLEAIPNTKTPIKQWLKALPGPVSIAIEATNIYHLEFADLAYEAGCTIYMVGGYELKHYREGVKIRAKTDALDAKLLARYLKNEAEELRPWTPPSPMYRQLLSLFRRRAALVQARVGLVQSWSNEPLLKAAFAEQIKSMQRLETMIEKTINDQLKEAGLFGQLKRCLKVEGIGFLTGARLLTAFQRGEFNNADAFIAFLGMDLRVSKSGQKDGRRSLTKRGDPEARRLLHNAAMSASRTKAWKGFYENQRARGFSTTQALVMLARKLARVVFALLKGQSEYQPKVS

SEQ ID NO: 257293 - protein, 327 aa, unidentified
MIEDFNTELKATLGSGLWWGVDVASDKLDLACYEGTEVLTFANSPKGIKQLVARIARRGATRIVIEATGGYELSVLAALVDAQLPVVRINPRQVRAFATAVGELAKTDAIDARLIARFAHDVRPEIRPLPTAQQRRLGDLAARRRQLVGLRTAESNRLRTTCQPEIKRSIKAMLVSLDRQITRLEQQLAEAVAADEQWQQRDQILQSVPGVATATSQTLLADLPELGQLEHKEIAKLVGVAPLNRDSGKFRGRRTIVAGRSTVRTALYMATMSARRFNPTIRCFYERLRNAGKPFKVAIVACMHKLLTILNAMIRDQQTWRNIYENA

SEQ ID NO: 257294 - protein, 342 aa, unidentified
MVTNGYYVGMDVHQRTTSLCLMDGEGAVIREWKTRSAPKELDELHRELGRLCGEIPVMLGLEASTTGKATFQHLRKLGRNVVMAHPRALRAVTTSETKTDSSDARTLAHLLRLNFLSRAYVPEEPIERLRTLVRLREEQVDKLRRAKIQVRTLLLKHHLQHESLRYDDIFGVQALHWLKGIDLPDPYAQRQLVLLLEEGALYTRQVEELKRELARVGVEEKTVGILQSVPGIDYVLGLTILAEVGDVHRFAHRRKFAAYCGLVPKNRDSGEVVGRHSKLRHGSSRLKWAMMVTVQAIRKSGKGRFALLLKRLEKRIGTPKALAAVAHRLAFTVYGLWKTGTI

SEQ ID NO: 257295 - protein, 340 aa, unidentified
MKNTKYFIGLDVHKNRTTYVVRDKIGNIILEGESATIYSELHERLEPYLKQSIIGLESCTSYYTLYQNFLKNNYNIKVANTIQLRQLIAKNDRLDAKRLAEMLRLGTFPASYIPDDKIQRLRSLLQVRHSLMEEKTRCNNRIQAFLDRNGIVMPDQEAFGKKWRHALLRYIGSGEVSLELRYEYDHFVYLEKKSEHLGHEITGYTMKYWKKEFNLIQSITGFGPVLACYVIAHILPISRFQSKRKLRRYAGVVPAFHESGGRKSKGHIPKSSSRKHLRWALIQAANAAGRTNTKLGYYYRKKKKQKNNAGIAHVAVASSMIDIIYKVLTTNKPYNPKNIC

SEQ ID NO: 257296 - protein, 316 aa, unidentified
MSHPATPVSRFIGCDVGKTAIVVFDSMTGRSRSIANEPQALSDFASGLEPTCFVVCEATGGYEGALLAALLAAGVPVHRADARKVKAFIRSFGTIGKTDAIDAKALARYGSDRWAELARWQARDRERLRLQGLVLARRDMVRDRLAYANRRAAPGAEPAQAHLDALLASFDAQIKAIDADINVLTAQCQPIARAVNTLVAIEGMGAKTATALIALMPELGSLARRQAAALAGLAPHPRQSGELDAYRRTRGGRPEVKRVLFMAALSARKHNPTLKAFFERLVLAGKKPLVAITAIMRKLVVIANAKLKAANALQLS

SEQ ID NO: 257297 - protein, 330 aa, unidentified
MKKLIIGIDISAETLDICLKTDLEERYEVIENEISVIKKFFKSFKIYEEVVVAMENTGRYNWNLYEVLEHFEFKVYVINPLHLKKSLGLSRGKNDKIDASRIAHFIERNSGDIELWKPSSESMKKLKVLLTERKSKVKLKSSLLQQKKNYKCTKAIVLEKMLLKINEKEIKLLTDHIKFLEQEMEKVIKMDAELKEKSGLMQSIPGVGKVLTWMILAKTDNFQMIDSARKLACYSGVVPFDHQSGTSLRYRPKVSPYADKSLKSTLHLGAMSVVKLDNDLSKYYQRKVLEGKNKMLVLNNIRNKIIHLIFAVLKSGKKYENNYQNSLAVS

SEQ ID NO: 257298 - protein, 387 aa, unidentified
MARKRTLSTLDTSIAYEAVGLDLAKEDVALAAFDSDHKEPYLIDRIPYDKLYELLADMAPTLVAMEPCSGAHQIAEQIQELGHEVMMISGRHVQAWVKDHCNGQKTDLNDAFAILNLAYDRWLTPIRGKTREECRLLALQASYRQLKGQRTKTMVHVKATLHAWGFPIRAGSFNQKVLHELIDTNREAFGDEVVETLHLMINRVRDLDHDIATVLKLLTEATKRDPRASLLRSIPGFGILTMSRWCAVIGDIARFDSPKQTMAFVGLVPNNRITGHHTETSSGREARGQGRMSKRGDKMLRSLCILGAASLCLMVRNDRLPDCPFVASIKERLASPRPWFKVLVYVAAKLVRIATALLKYGETFSYEKAGISKAVLKQWELEQAKAA

SEQ ID NO: 257299 - protein, 368 aa, unidentified
MNTVYCTTIGADVSDRTTKICVMSKESGKPKIIRETTIPTTPDGFRAFLEGQDKSAPLVFETGTHCRWIDKVGTGMGFKTIVANPARLRMITESNTKNDKNDARTLARMALADVELLHPVRLRDDEHQKMVNLHEIRDQLVKERTAEVLQIRAIAKSMGFRIPDCSAECFHNIAKNSIPKELSDIVWPLMKELKSKAVTIKTVEKQMRRLAKSDVFKAQVERLMEIPNVGFITATCFVAVTGGDMDKFDSPRDIGPWLGVTPKQDQSGDIDRQCHITKAGSMMLRWKLTECAQRVLQKNSADIDLKVKGLRIRARGGKIAKGKSITAVARGLAVLMVAMLKKPDVPYVPLSEDKAKELAQIRAAMAAA

SEQ ID NO: 257300 - protein, 333 aa, unidentified
MVEGTKGSHHKEGSRKMSKHSMICAGIDTAKHKLDVAIDGCREQLQVPNNADGHRALSAWLRQRRTKRVGIEASGGYERAAVAALRRDRFVVILFQPAQVRSYAKFRRQRAKNDRIDAALIAACTAAAEEIHPAPDPRLAPFAVQMTLIDQITDDIAHIKTWRETCPDPRIRNWWTSEIARRKATLRAELKALVAAIRQHPDLAKRLELIVSVQGIGLKTAVAILVRMPEIGRITREQASALVGFAPYDDDSSDRIGVRHIEGGRVRLRTALYNAALSAAFHWNPQLIAIYRRLIAAGKPHKVALVACARKLLIFVNTVVERGTPWVPSTATS

SEQ ID NO: 257301 - protein, 408 aa, unidentified
MQVEHPVCCGIDVHKDMLTACLRRVEGNGQVSKEVREFATTYQALLALADWLAEQHCPVVAMESTGVYWKPVYHVLVGTVEVFIGNAHELRSRPGKKTDKRDAAWIAELLAHGLIRPSFVPPPDICALRDVTRTRVALVQTRSQSKNRVHKLLEDTNLKLGSVVSDLFGVTGRRMLAALVAGERDPQVLASLALGSLKRKRPQLELALTGQFTAHHGTLLAVLLELIEVLDRQIATLDQQIGALVAPLQAQIAQLDSIPGIDIIAARDILAEIGTDMSRFGDAARLASWAGVCPGNHESAGKRYHGKTRKGNRYLRRVLVQCAWGARKTPTFLGRTFRRLEVRIGKKKAALAIAHKILVIVYHLLALGTCYEETRYDQWNPRQEARERQRAIKALERLGYTVTVERAA

SEQ ID NO: 257302 - protein, 318 aa, unidentified
MILVGIDIGKNKHTFSIIDKNSGEILLSPSDFSNNLKGFLFLIQKLSSYTKSELLIGMEDTGHYHFALLKYLLDRRYTVALINPTTTDLTRKLQGGITKNDPLDSLTICDVISFNHRNKPYRVTTLNCFDLYEQKQLTRHHHNLKEELNTYKNRLQKCIDIVFPEFNSLFHSKYGIVYMNILKAFSSAKAIANADIRSIRKCFEFKGQGKRISLSAEQLKLTAKSSIGIPSVAEEIQIRHLVSQIELLEKQLSEIDKRIEEFSLKNNSPILTIPGISHFSGTSIISELGDICNYTKASQIIKFAGVAPYHYESSQFTA

SEQ ID NO: 257303 - protein, 418 aa, unidentified
MTRGDDSRIIRIVHPICCGLDVHKESVSVCVIFPDDKGEEQCDVKVFGTFTDDLVRLRDWLAAHNCPVVAMESTGVYWRPVHNVLEDSVQVVLVNARDMHNVPGRKTDIGDSRWIAGLLRHGLLKSSFIPPQDVRQWRDLTRLRKKYVHTVGDYRKRTHKLFESANIKIDSVVSDLFGVTGRNLMQLLVADRKLTLSDIQTCVRGKLKGKEAELFRSIQGFFTDHHRFVLKMILETIATLEAQIEALDLQIRCAMKEHEALLDRMKQAPGIADVASREILAEIGPTLDSFRKDTALVAWSGLCPGNNESAGKRKSGKSPVRKHHLKTIMIEVAWAAIKKKDSYFKDKYYRLKARRGAKRAIAAIAHRILLGIYHVIKDGVDFRDLGGDYLTLRNKSQKVFHLRKQALAMGFDLVPQTV

SEQ ID NO: 257304 - protein, 355 aa, unidentified
MSQEKYIGMDVHQATISAAVMDAHGKLLMECLLETEASTIVDFIQGLHGTLSLTLEEGTSAAWLHDLLKPHVSRLVVCDPRKAALLKEGNKSDRIDARKLAELLRTNQLKAVYHEEHGIRALKELGRSYLTITKDVTRVMNRIKALYRSWGIPCSGTSVYAPRHRAEWLAKIVEPGVRVRAEHSYQQLDSLQPLRLQARRELLQESYQHPAVKLLRQIPSIGPIRAALLVALLQTPHRFRTKRQLWAYSGFAVETHDSGEYRYVRGKRQRNRERISVRGLNDNHNKDVKNLFKSAAISASTRPGPLHDCYVARVEKGMRPTMARLTLARKIATITLTIWKKGVSFDPKHLHRQAA

SEQ ID NO: 257305 - protein, 349 aa, unidentified
MDYRVYCGVDFHARQQTICSLTTETGVMSTHELKHQNKAELKEFYSRLRGPVLVGLEASGYSPWFERMLEELGHEVWLGDALEIRRRARRRQKNDRRDAELILDLLIHDEFPRIHRPTPTSREILRMLRYRHKLVKIRIIIKNSLQALSIQSGLSLRARLFTEAGLEQLRATTMSPVMEYQREQWLAALEPLNQRIAETVNWLEQQAAGDQRIERLRTHPGIGLLTGLGLVHTLAPISRFSNQRKVAAYVGFDPRERSSGEKKRYLGISKAGSRVLRFLLVEAAQTACKGDPELKRFYLRLWHRQGKPKAKVAVARKLLIRSYILLRDEIDYAEFQRRAVAARLAREGA

SEQ ID NO: 257306 - protein, 368 aa, unidentified
MNDLIRIGVDTSKSVFQLHGVDAAEQPVLRKKLRRRQVLDFFAKLPRVRVGIEACGAAHYWGRELSALGHDVVLLPPQLVKPYVARNKNDAADAEAICEAMSRPRMRFVPIKTAEQQAALMLVGVREQLVARRTQLSNIIRGHAAEFGVVAAKGLAKIEPLLARIAADETVPALAKELFATLGGDYAQLQRELRTIEAKLMAWHRHNELSRRLAEVPAIGPIGGTLMAMKVTDPAAFRSGRDFSAWLGMTPKDHSTAGKTRLGVITRAGDEALRRVLVAGAMAVIQQVKNGRAQASPWLVELVKRKPAKLAAVALANKTARIAWKLMVSGERYNAAAASRARRCAPLARGCAARPARDAQPARLAADA

SEQ ID NO: 257307 - protein, 371 aa, unidentified
MNSIVYVGMDVHKESYTLCCYCYDTDRVEYKQTIPSDYKLILKYIESMRKVYGENADFVCGYEAGCLGYSLYHQLREHAVECKILAPTTMAITNTSRVKTDKRDAANIARCLAFRTYSEVYVPDDEDNSVKEYIRMRDDQKLMLKKIKQQILAFVLRQGKKFEGGKTYWTVAHMKWLKALDLTGLAKETLQEYLVTYEYLMDKIERLDNRIEELASGEKYKETVKNMTCFLGVKTHTALSMVVEIGDFKRFEKAPKFAGFLGLVPSEDSSGDKVNRFSITKTGNSHLRRLLIEAAQSFTRGNIGHKSIALKQRQQGCATEVVAYADKANERLRRRFYKMTLNKGVNRNVATTAIARELACFMWGMATGNIG

SEQ ID NO: 257308 - protein, 412 aa, unidentified
MNPVVGLDVSKGESQVQAFLDKGQPFRKSFSVKHTVEGFEHLIGFLKEIERVADGKQPSVILESTGHYHAPVIQFLEEQQYVYIIVNPLISHRARSASLRKVKTDAVDAYLLCELYYKEEVEPYKKRGIQLLNLRNLTRQQETISAISAQTKVQLLTVLDQVFPEYRGVFGNLYSKVSLQTLSLFPTSEHVLNTTESVLTDEIVSLCTRRSEKWAKEKAQKLMEAALRNPFQNNMYESHIINLKMFITIVLQYQEHLSQLEAEIDALASEIEEYKIIQTIPGIGEKIAATIISEIGEIDRFNHPKKLVAFAGIDPSVYSSGRFTATNNRITKRGSRRLRQALYMAVYCGIRDARKQKTSETVIPRNRKLREFYDKKRDEGKPYRVAIIACANKLLHLIYALLNNKTTFQELA

SEQ ID NO: 257309 - protein, 370 aa, unidentified
MLDTTTFIGLDVHARSIKAVSLDVMTGEVRAATFGYDAGAVAEWVRSVDPRARCVYESGVTGFDLQKRLSGLGVDCVVGAVSKMIKPSADRRRKNDRNDAEFLARMLSVGNVVEVWVPDDECEAARDLTRALEDARDDLSRSKQRLSKFLLRHGLVFDERTPTGRRKGNWTRAHWSWIESIRFAERADNDVLAYYVDAVRRAAEEKARLEGLVEAEARKPRWRKRVDSLRCLKGVDTASAADLVFEAGEFSRFRNARSFAAWVGLTPSEHSSGESDRRGAITKAGNKHLRKTLVEAAWHYLTCSGRPKGLAKGQAPDPGARRHAAKGVRRLVERRESLLARGVHGNKANVATARELACWVWAVGLMAEEA

SEQ ID NO: 257310 - protein, 362 aa, unidentified
MAKVRSWVGLDVHARSVLAVTIDGESGELSSRRLSGVTADVVEFCFSLPGPTRAAYEAGPTGYGLSRALTTAGMGCVVAAPGKIERPSGDKVKTDQRDAERVLRLLMIDGLHAVRVPTGEEEALRDVVRAREAIRGDLMRARQRLSKLLLRHDVRYEDTASAWTVAHRGWLTSLDLGERGAQFTLLEYLGAIDAIVIRRDALEKTIADLIPGSPWEQTVARLRCLRGIDTLTAVGLCAEVGEFTRFEKAGQLMSYLGLTPSEDTSGEKRRQGAITKTGSRHARRLLVEAAWHYRRAPAKGQALKRRQEGQPAHIVEIAWQAQRRLHRVWQRLDTQRGKRRTIVAVAVARELSGFCWALANAD

SEQ ID NO: 257311 - protein, 344 aa, unidentified
MGEVSIIGLDIAKSVFQIHGVDGVGAVVIRKRISRAKMLEFFADLPPCLVGIEACPSAHHWSRELQPLGHTVRLMPPSYVKAYLKRSKNDANDAAAICEAVTRPSMRFVPIKTKEQQAALMLHRTRQLLVRQRTMLSNALRGHLAELGIVSAKGRNGTGELLRIIADGADSRVPAAVRGILDVLARQYSALGTEIGSIDKSILALHRSCEASRRLAEIPGIGPIVATALVAEIGDWKAFSSGRSLAAWIGLVPKQHTSGGKDRLGSITKQGNRYLRWLLVVGAMAVIRYAKIHGTKNRPWLARLIERRPTKVAAVALANKIARMAWAIMVRGERYKEPKLLMAA

SEQ ID NO: 257312 - protein, 392 aa, unidentified
MLFVGIDIAKRNHEASVIAQDGHVVRKAMRFANSQAGYNKFMDMVRSLSEPVVFGMGATEHYWLTLYTHLRNDGFTVHVINPTQSDALRGMYIRKTKTDSVDSVIIADVIRFGRYCETSVDPGDLQAMRELCRQRFYIIDMASDLKRKVIALLDQVFPEYEKLFSDSFGLSSMELLSQYTTPEEMLSVSSQQLAEVLKKASRGRLGAEKAVEIQDAAKNSFGIVMASSSFSLIIRQYIEQIRSLESSVDIFDTEIARLLSGFDTQLTTITGIGSTLAAVILSEIGGDIRRFSSPAKLAAYAGVDPTVKQSGDFSGTRIKMSKRGSPYLRRAIWLASTVAAFKDPVIHALYERKRAEGKDHMTVIGHVCRKMISIIFAVLRDNTPYVPAGISD

SEQ ID NO: 257313 - protein, 409 aa, unidentified
MTVVGIDVSKGKSMVAAMKPGGELVAAPYEVRHSDIELSHLALDVLCMEPDTRVVMEATGRYHEPVAALLHSEGIFVSILNPLLIKQSGAGSLRKVKSDPKDALKIAKYGLDNWSTLREYTPMEAIRQQLKLCARQCDLYNKNIVMLTNNLISLSDKTFPRVNELFSSPEKADGHLKWVDFYRSFWHCDCINRMSPDAFEERYKKWCKRKGYHFSTDAADALYAASCGLYTTLPRDNNAKLLVTVATDQLIALRENQSKLETEMLNLCKQLPEYETVMAMYGVGKSTGPHLMAELGDIRRFPHRSSIVAFAGVDPGVVGSGKMQLSSVATSKRGSPQLRKALFQVVSAYVKRKPENEAVYQFYAKKRDEGKPYYVCTTAAANKFLRIYYEQCYAAAGVDRRHQQCGLLG

SEQ ID NO: 257314 - protein, 412 aa, unidentified
MLFIGDDWAEGHHDVVVQDDAGRTLARRRLPEGVDGIARFHDLVASCLGEDGEPDPAQVVIVIETDRGAWVRALAAAGYEVCAVNPKQAARHKETISVSGKKDDFFDAACLADMGRTRRHQIRELAADSDLAEAVKIAARAHQKLVWERTRHLLRMRSALREYFPAALEAYAPLTLSGPDALELLRKAPDPESAAKLTAAQITAALKRAGRRGGLPQRAQDIQAALRTPHLAQAAVITEAHAASVMAATAVITILNEQIKAMETKVSGLFHRHPDAGIYLSQPGIGDITGARVLGEFGDAAGRYATAKARKNYAGTSPLTIQSGKSKTAHARFIRNRHLIDALHAQALSALTASPGARAFYDELRAREVGHDDAMRRVASRFTGILHGCLKHGRDYDEATAWAHRAGLTRAA

SEQ ID NO: 257315 - protein, 360 aa, unidentified
MLIIGCDYHPSMQQIAWVNTETGECGERRLMHRAEAEQFYRELKAKQVRIGMEATGHSRWFERLAAELKLDLWVGDPAQIRAKQVRKQKTDRRDARHILKLMLEGNFPRIWTPTPENRDLRQLVWHRHRIVGMRTRVMNQLQAVAMNEGVRCKKGLWSKKGRQQLESLSLMPWTARRRQELLELLDQFDPSIDQLSQTIEKEAERIPEVKLLMTHPGVGPITALAFVLVLGTPERFGCGKQVASYLGLIPCEDSSADRWRLGHITKQGNSLLRYLLGQAAQSVARCEKQWQRQYAHLAMRRNKAIAKTAMARKLAVRLFWMWRKGWDYQQLNKFSSHVGKLADSIGVKQITDVMIGHPTP

SEQ ID NO: 257316 - protein, 344 aa, unidentified
MNFYSGIDLHSKQSTLCVIDDKDNIHLRTTVPNQIEQILQPLQSFTPSPEVAVEATLNWYWLVDGLQDAGFKVKLAHPFGLQIIKKAKVKTDNRDAFNLARLLRLDALPESYIYPKAKRPIRDLLRRRQRIVSLRASDYVTLQRVLQQYAISDLASMGAKKIGPKDIESQVDEPAIKCRCQMELERIGLYSRQIQVCEDIIISSLVDDADFKRIQTIPGIGNILAAIILYETGDINRFKSARHYCSYARVVPGIAQSSSTIRRGKGSKQGNPYLKFAFTQAAALAVRYCQPIRKFRQKHLNRKRSRARKLISISIVSHKLAKAAYYILTRKEPFRMEMMFGSYL

SEQ ID NO: 257317 - protein, 360 aa, unidentified
MKNCSRETDWKQRPKRTVGVDLGDRFSRYCGLNEDGEVMEEGRVRTSAEAFRRHWEGEARQRMVMETGTHSPWISRLLEGFGHEVIVANARKVRAISQNESKNDRQDAEMLARLGYCNPKLLAPVRHRRVERQRDLNPIRARDTLVRARTMLINSVRGLVKSGGGRLPPAASDYFVARVGAAVPAELKPAIQPLLEQIAGLTMQIRHLDQSIEKLGERYPEIRILRTVPGVGPVIAAAYVLTLDGSDAVAHSRSVGAFPGLRPRQSQSGDSDPEHNISKTGNIYLRRLLVQAAHYILGRFGPDSRLRRWGLKLAVGGQRSKKRAVVAVARKLAVLLHCLWRSGQPYQPFPGATAADGSAA

SEQ ID NO: 257318 - protein, 344 aa, unidentified
MQTVTTIGLDIAKSMFQIHGIDAAGQVVIRRQLKRRYVLAFFQKLPACLIGIEACASSHHWSRELQALGHTVRLMPAAYVKPYVKRQKNDAADAEAICEAVSRANMRFVETKTPEQQSCLMLHRTRHLLIRQQTAVINAIRAHLAEFGIVAPVGRHGVEELLGVLTDPSDKRVPEVARACIAALGAQLRVLKTQILEFDRMINAWHRSSEVSKRLDEIPGVGPALATALVASVADPRAFQSGRDFSAWIGLVPKQHSSGGKDKLGGISKQGDRYLRSLFTAGALAVIRYAKIHGAKRRPWLAALLARRPTKVAAIALANKIARMAWAMMAKGECYKEPAALAAL

SEQ ID NO: 257319 - protein, 459 aa, unidentified
MARHQRKGNGLPSQLAAVNLHAAGIDIGSQEHWVAVPPESASQPVRRFGACTADLATVVAWLQQCGVTTVAMESTGVYWIPLFELLEARGFTVVRADAREVQRAPGRPKTDVQDCQWLQRLPTYGLLAAAFRPPEQIYVLRSSLRQRSMLVTYASQHIQHMQKALTQMNLKLQHVVSDVTSVTGMAILKAILAGERDPLTLARLRDRHCQHSEGDIARSLQGNWRTEHLFALQQAVELYEFYHRQIAACDRQIEGQLQTFPDHSGGKPLPAAPRKPKRRRNEHHFDARLPLFRATGVDLTAIEGINEHTALVLLSEIGTDMSRWSTEKHFAAWLGLCPLHKISGGKVLSRKVRPSANRAAVALRLAASCLHHSQSALGAFFRRLKARLGTPKAIVATAHKLARLVYRLLKHGEAYVAQGMADYEHAYRDRVVKNLIRKAKELGYQLLPTNTRTAPEATA

SEQ ID NO: 257320 - protein, 455 aa, unidentified
MPQRTTGDRPELKPVNVSAAAIDIGSKMHMAAVNPDCTDIPVRAFGTFTQDLHDLADWFSACGVTSVAMESTGVYWIPAYEILEQRGFEVILVNARYAKNVPGRKTDVSDAAWLRQLHSYGLLRGSFRPDAEIATLRAYLRQRERLVEYAAAHIQHMQKALMEMNLQLHHVVSDITGATGMRIIRAIVAGERNPDVLATYRDVRCHSSTETIRAALVGNDRHEHVFALSQSLELYDVYQAKMLDCDRKLEVLIAALGNKGAKPVGKLSKPRIKTKQINTPTFDVRTALYGVLGVDLTEIHGLGPSLALKLIGECGTDLRAWPSAKHFTSWLCLAPGNKISGGKVLSSRTRRSSSRAAALLRLAATTVGRSDTALGAFYRRLSLRAGKSKAVTATARKIAVLFYNTLRHGMSYRDPGADQYEQQYRSRVLANLQRRAKSLGFVLQAIPTDANPAVS

SEQ ID NO: 257321 - protein, 455 aa, unidentified
MLKPPKTKRKSKADPFSGLPPLNLNAAGIDVGNSQHYVAVPPDRDPQPVRNFDTFTCDLHRLANWLEACGVDTVAMESTGVYWIPIYEILEARGFQVCLVNARHVKSVPGRKTDVFDCQWIQKLHTFGLLNASFRPANEICVLRSYLRQRDNLITSASTCIQHMQKALSEMNIQLANVISDISGQTGLIIIRAILSGERDPIILAQMKDYRIRASKDTIAKSLEGNWREELLFNLQQALTLYDVYQRQIAECDHRIQKHLATFDDRIDTSDPPLPPSKPSKRPHGNAPSFPLRQELHRISGVDLTRIDGIDVVTAQVVISEIGLDMTRWKTEKNFASWLGLSPDNRITGGKILKRRTRHVINRATQALRMAASTLRNSKSALGANYRRLQTRLGAASAITAMAHKLARLVYRMIKYGHHYVDKGMTYYEAKYREQRLKWLKKQAKEFNLYLVEQT

SEQ ID NO: 257322 - protein, 324 aa, unidentified
MIYVGIDVAKDKHDCFITNSDGEVLFKSFTISNNREGFEALFQRIKSVSDDLTKVKVGLEATGHYSYNLLGFLLDKGLTTFVINPLHTNLYRKSLSLRKTKTDKVDAHTIASMIMSDMNLKSYLDISYHNEELKSLTRYRFNKVKERAKLKTSVSRLVNILFPELEKLVPSLHMVSVYAMLSEFPSSSAIASAHLTRLTNLLDEASKGRYGKDTAILFREAARTSIGSHMPAKSLELKHTIKLIQELTVEIDEIEVEIKSIMDSIHSPILTIPGISYRMGAMIIAEIGDFSRFDSPDKLLAYAGMLVRVIYQLEKSGQTYIKAS

SEQ ID NO: 257323 - protein, 387 aa, unidentified
MLSTPPKTSAQSRAATHCDIAMLYASLELSSTTWLVTSLAPGSAKMSKHRIEGGDSCGLLDLLRRLQSKDAKRLGAPVRIVTIQEAGFDGFWLDRLLKSECIESHVVDAASVAVPRRRRRAKTDRIDGELLLRTLLVWLRGEPRVCSMVVPPSSEEEDRRRLARERDILVEERTAHTNRIAGLLSTQGIRGYRPLRRDCRARLEELETGDGRPLPPKLKAEIGRELDRLELVKQQIAEVEAARDDLLIAEDRSPGKLLLQLRSIGPEIASVLWLEGLYRHFDNRRQLAAFSGLAPSPWRSGKIDHEQGIAKSGNAKLRSTMIELSWLWLRYQPDSELSRWFQERVCGKNTRRYRKITIVAMARKLLIALWRYVTEGIVPEGAVMKAG

SEQ ID NO: 257324 - protein, 372 aa, unidentified
MNYNTVYVGMDVHKESFTLCSCKYEDEKASHYQRTPASYKNVLRYLAFLRTIYGEDTRFVCGYEAGCLGYSLYHQLENFNVECVILAPTTMLEQRSKRRIKTDKRDAEIIARSLAQHNYSPVHIPTETDNQTKEFIRMRDDHKAELKKIKQQILSFCLRQGYQYDGSGNWTAKHVKWLRSLKPAGLYKEILDEYLLTYTILTDKLNRLDQRIEELASKEEYKESVSKLTCFLGIKIHIALSVIVEVGDFQRFVSARKFAGYLGLVPGQHSSGDDRNGLGITKAGNTHVRRLLVESAQSYTRGKIGYKSRVLRSRQAGNSPQVINYADRANERLRRRYYKMVLKDGKKYNIAKTAIARELACFIWGMMTDNIY

SEQ ID NO: 257325 - protein, 339 aa, unidentified
MARYVGVDLHRNQFTVCVITENGREYRSAYRLEQLPRFVGKLRPTDEVAVEVTGNTRLFYDAVAPHVAKVVVVNPTQFRVIRDSVKKTDPHDARTLAFYLSKDMLPEVRMKDKLHAQLASLTQTRDTLVKQRTALKNKVNNILSAHGINLRKAALSGDSGLEEVLGMKFDAIVMTELRVIVGQIRALNQSIAELEKTIKTEGPKLPGHENLRSIKGIGDLGATILLSVIGDIQDFAHPGKLAAYFGIVPRVRNSNDTERSGRITKRGTKLGRTTLVQCALIAMRYSPYLAKFYRKIQARRGTGKAIIALAKKFLGVIYNTLKNNWIFEDFPNFVLAEAS

SEQ ID NO: 257326 - protein, 348 aa, unidentified
MVADEVDYVVGVDTHRDGHVLAVVAAPVGTVVAQRTVAASAGGYGQAFRFAQQHAEGARVWAVEGAGHYGAGLARYLSRRGETVLEVGRTPRGERRLRGKDDQLDAVRAARAALSSEPLPRPRSGERREALRLLLVARRSAVDVRREALVQLRSVIVTAPDRLRQELRRLPRQRLLARCSRLRRSSSATPDELAARLVLRTLARRVEAAAAEAAELEREILAHVRALAPELLEEPGVGAIVAAQLLVAWSHPGRVRSEAAFARLAGVAPVPASSGQTRRHRLSRGGDRQLNRALHTIVLHRRQHDPKTRDYISKRIAEGKSRRDATRLLKRYLARHLYRLLEQQPLMT

SEQ ID NO: 257327 - protein, 432 aa, unidentified
MPRAAAACANMEDRTGREEGLDTYCGIDWAGDHHDIAVVDRDGALLARKRITDDPAGLAELLGVLAGHGDDAGDAIPVAIETPRGLLTACLRATGRQVYHINPMSVARYRDRHSVAGRKSDHGDAVVLADVLRTDMHAHRPLPADSELAQAVAVLARAQQDAVWDRTQAHHKLRSHLREYFPGFLAAFPAASGSITRPEARVILAAALTPAAASALTEARLRALLRKAGRSRGIDAEAARLRQAFAVPQMRQLPLIEQAMGRQSLALLGQLAAACAAAADLEQAVAESFNQHPDAGIITSFPGLGILTGARVLAEIGDDRTRFSDAKGLKAYAGAAPITRASGKITSITFRRVKNNRLCAAGYIWAFSALTASPGARAHYDRRKDAGDRHAAAQRNLFGRLLGCLHHCLATGQHYDEQTAFPSPAKEIRKAA

SEQ ID NO: 257328 - protein, 292 aa, unidentified
MQRIYIGVDFHARQQTICYLKIETGELITSELKHQDKAAVRAFYAGFSAPVIVGLEASGYSPWFEQMLEELGCEVWVGDATEIRRRARWRQKNDRRDAELILDLMLHDEFPQLHRPSAQSREVLRMLRYRQKLVKMRTMGKNSLQALALQSGLSKRSQLFSKSGQQELRALQMSPVMEWQREQWLQLLEPINERLLETMHWLKQQSLNDERISRLRTHPGIGLLTSLCLVHTLWPVSRFRNQRKVVGYAGLEPMERSSAERKHFLGISKAGSRVLRYLLVEAAHTAVKKDDD

SEQ ID NO: 257329 - protein, 479 aa, unidentified
MKRSQKRRSSALKSTSETAGGIDPHQNPHAAGIDIGARELVAAVPPQSTTGPAVRTFPSFTSDVEALRDWLLDCGIKTAAMESTGNYWITAYDLLEEAGIGVFLVNARHVKGVPGRKTDVQDAAWLQQLHAAGLLRKSFRPAQEIVSLRYLMRHRQTLVSAAARQIQAMQKIMTEPERSGGSQRSLVEICWQMNLKIQHVFSDADGVSAQAIITAIIAGERDPAKLAALRDRRCRSSLADTKSALAGNYREEYLFVLKQCQSTWQRIQDDIAACDEQIAILTQRVHAEAPGPLPDPLTGHQHKASKNSPQIDIFEEAWRYYGVDLSAVPGVSTGLLSVLMSELGTGAQILTSFRSGSAFASWLGLCPDNRISGGRILKAKTRQVCNRVANALRMGVFGLHRSQTKMGEYTRRMKGRLGKAEGITAGAHKLARIIYALIATRKAYDESEAFKITPRSLERQHAQLFKQAQSLGFQLVPAA

SEQ ID NO: 257330 - protein, 341 aa, unidentified
MYYAGLDVASKGSFVYVRDKKGIKVESGEIETTRKGIKSFFDKYVDKRIIVAVEASGSTRWIYDLLTRMGIEVYVVNPNKVKAIADSKRKTDKIDAKILSELLRIDALPERVRMAEGQDRELRDLIQARFQVIKGYTNLMNYLRGLLRQEGVRMPAREFKKSEYVARLSCQRLPGHVQEIVTRYADTISGMLEEKDKLEDKIKGYRTKDIELIKTIPGMGEISSRTITAAIGDIKRFKHAKQLTSYCGLVPTVYASGERVEYGHITREGRSEVRRVGIQCAHALLRSKAIESQPLRKWWLHIARRRGVKTALVALARKLITITFYVLRDQKEYDYTLLRAA

SEQ ID NO: 257331 - protein, 360 aa, unidentified
MSTIADDDDLRVVAGVDTHKDVHVAVVLDELGRLLDTASFPATARGYRRLTGWVTSFGEVLAIGVEGTGSWGAGLSRHLRARGLNVIEVNKPNRHNRRRRGKTDPIDAEAAARAVLAGDATATPKAGDGPVEALRQLRVARAGAMKARTAAANQFHSICDTAPEVVRRQLRGLSTRRKMSVAGRYRAGDPFTPTGAAKTALHSIARRWSALDTEIRALDRDIKTILDTIAAPLLARHGVGYETAGSLLCAAGDNPDRLATEASFAALCGTSPVPVSSGRTNRHRLNRAGDRQANAALWRIVIVRLRSRHTPTMDYLERRVTAGNSKRDAIRCLKRYLARELYNDIQAIVTTTQPRSQIAA

SEQ ID NO: 257332 - protein, 366 aa, unidentified
MSATTANTSPAAAAPGLILALDLGKYKSVACLYDPATAQARFDTLTTSRDELRKLFARHRPAVVVIEACALAGWVHDLRAALGLPCRVANTASEAWKFKHTKRKTDKDDALRLAQLQALGQLPTVVLPPKQTREWRALIACRQALVGRRCAAQNRARAVLVGQGLPAPRGAKAWSAAGLEGIARHAKPLAECAPDELRRGLLESALTEYRQARELIEQAEAKLDALAKADAGVRLLETIPGVGPRTAETVVAYLGEARRFETGKQVSAYGGLVPRQYQSGESDRRGRITRRGPALLRKLLVECAWVMLRYNAWARAVYQRLSRGQARKKQAIVALARKLLVRCWAMLRDGQPWRAEPPAKAEAAPA

SEQ ID NO: 257333 - protein, 301 aa, unidentified
MEISTIGLDLAKNIFQVHGISATGEVVLCKALRRSQMLPFFEKLPPCLVGAEACGTSHHWARELTRLGHDVRLMPAAYVKPYVKRGKNDAADAEAICEAVTRQTMRFVPIKSREQQAALSLHRVRSLLIKQRTQLVNMMRSVLAELGIAIPVGIVKALQMAREIVDGETKLDLPAEAINVVAMLAEQLLQLHVQLRKLDLRLAALQRSDDRAKRLATIPGIGPIGATALAASVTDPSQFSSGRQFAAWLGLTPRQSSSGGKDRWGALPRWATDICGSFWWSAQPRWSDTPRRSPARSIRAL

SEQ ID NO: 257334 - protein, 358 aa, unidentified
MEKLYLGVDLHKKSCWVTVLDADGHQLDSRKLGTEKWELLEYFGKVPQPAVLAVEATFNWYYFLNVVEPLGLELHLVHPWKTRAIASARIKHDKLDSRVLAELLRTGFLAEAWIAPRPVREQRQLLRYRVHTVQWATRAKNCIHGVLNRNGIRSPLSSPFGPRGRAFLQEAEIPETDRWEVKGQLARLDLLGEQLRELDREIRKRSKANPIAQALEEIPGVGPFIASLLIAEVGDIQRFPTAKHLASYTGLVPSLYASGERRWGGPITKQGSAILRWALVQAAHRAAVSPRFQAFYQRHRQRHGAGKATVALARKLAVIAYYRWRHALHASSPPAKLEKVRERSCGSAWSEERPVTSD

SEQ ID NO: 257335 - protein, 392 aa, unidentified
MLFVGIDIAKRNHEASVIAQDGHVVRKAMRFANSQAGYNKFMDMVRSLSEPVVFGMEATGHYWLTLYTHLRNDGFTVHVINPTQSDALRGMYIRKTKTDSVDSVIIADVIRFGRYCETSVDPGDLQAMRELCRQRFYVIDMASDLKRKVIALLEQVFPEYEKLFSDTFGVSSMELLSQYTTPEEMLSVSSQQLAEVLEKASRGRLGAEKAAEIQDAARNSFGIVLASSSVSLIIRQYIEQIRSLEASVDVFDAEIARLLSGFDTQLTTITGIGPTLAAVILSEIGGDIRRFSSPAKLAAYAGVDPTVKQSGDFSGTRMKMSKRGSPYLRRAIWLASTVAAFKDPAIHALYERKRAEGKDHMTVIGHVCRKMISIIFAVLRDNTPYVPAAISD

SEQ ID NO: 257336 - protein, 316 aa, unidentified
MAQEQVVVGIDVAKDKVDVAIRRGAEGCFANDPRGRRQLLAWLKEQAVGQAVMEASGGYERSWARLLRTAGLEVVIVDPKRVRHFAKSAGQLAKNDPIDARMIAWFGEAFEHRGKPEDAAREELDQLVTARRGLSRLREKIDNWGEHEQPKAVQKAYQVLLKEIVRQQARLEALIADRIEKTEHFAQRAEIIQSVPGLAGNSAAALLALLPELGQVDRQAASALLGVAPFDDDSGKRHGHRHIHGGRRKLRCLLFTPILGAATQHNPVLKDYYRRLIAKGKEHKVALVACMRKLICILNTMLARSEKWDPARHALA

SEQ ID NO: 257337 - protein, 361 aa, unidentified
MTGTMTWVGLDVHARSTHGAAIDAMTGELRRVRFGPGVDEPVGWLLGLAGPVRACYEAGPTGFGLYRAAVAAGIAMEVIASGKTPRGPSDRVKTDRKDAELLARLLLAGSLTRVVVPPPELEAARELMRCHDACRRDLMTARHRVSKMLLRHGRVYPSPSTWTVAHRRWLARQQFEHTASELAFADLVAACDALSARKTALAERLSVLATGELWWPTVSRLRAFRGVDTLTAFALHLELGGDWRRFQRPAALSAWLGLTPSLTQSGESSRQGAITKTGSQLARRLLIESAWHYIREPRIGATLENRQHGQPAHVLQISNRAQQRLYRVHKTMRARGKAGNVTVVAAARELSCFLWAAATAD

SEQ ID NO: 257338 - protein, 365 aa, unidentified
MKKSSKKQQGATVAESKPAQVVGLDLGDRHSHYSMLTGTGEAMEEGRIQTTRAAMEKHFASEPRMRIALEAGTHSPWVSRLLKSYGHQVIVANPRKIPTLTKSESKNDRNDAEQLARMAAFDPKLLHPIEHRNLERQQDLNLIHTRSVLVRARTMLVNSARGLVTSAGGRLPACSSEAFPEKASVAVPGELKAACEPLLKQIAQMNRTLVAMDKQIEGLAKKYPEIALLRTAPGVGPVVAACYVLTIGNPQAMETNRQAGAYLGLRPSQQQSGNCDPQCGITKTGNSYLRSLLVQSAQYILGRFGPDSELRCWGLKLAACGGKRGKKRAIVAVARKLAVLLLSMWRNGKKFEPFPQSATQLAKAV

SEQ ID NO: 257339 - protein, 368 aa, unidentified
MKKSIIFVGLDVHKNSIDAAIADAGRNAEVRHYGTIGGGLDDLDRLVKKLSAAGKEPHFVYEAGPCGYDIFRSLTDKGFDCAVVSPAHIPKSPAERVKTDRRDAMTLARLHRAGELTYVFVPREDDEAMRDLTRAREDAVKAQRVARQQLGGMLLRLGFRYHAKNWSPQHFRWLADRKMPTPAQQVVFQEYINAINETTTRVGRLTQQIESLVPSWRMAPVVNALQALRGVSIIVAATMIAETGDLTRFEHPRKLMAYLGLIPSEHTSGDKRRQGGITKTGNGHARRVLVEAGQSYSHPARVTRFLLKRQEGLSHEVTDLAWKCQVRLCARFRRLMAKGKNRNTVVAATARELAAFMWTIAMKTPIAA

SEQ ID NO: 257340 - protein, 414 aa, unidentified
MHNSKFKKLTGKTLISAVDFSKNKHTGFFKTLMGDESPTFNFSNSREGFEKFWGKLQAFKKKYELDDVVVSFESTSTYGVPFIHFIRKKEVRMIQVNPKHTKRTKEIADNSPNKTDKKDPRVIANLIQLGNGLTVNIAEGHIQGLKNHIYNRESIIEEQKRVIGRIESHLAVYFPELLDLFSSIQSKTMLHILRHYPMPEDLLQADPDKLEEELKTVSRGRVDQTKTNRIIKSARESIGITEAGESYRSTIKSFLEQLELFNRQKKEIEKSINDLLEDIPQSKILLSVKGLGKISVAAILSEIIDFHSFSTIREINKYSGFNLYEVSSGKYQGKRRLAKRGRALLRKTLFFATLNMIRKGGIFHEQYHRHLDKGMPPIKAIVALSRKLLRMIFAIVRDQRDFNIEKTKTIKTAA

SEQ ID NO: 257341 - protein, 346 aa, unidentified
MEQIIRIGMDTSKHFFQLHGVDASERPVLRRKLRRHEVLAFFAKQPPTIIGMEACGAGHYWAQELRKHGHEVKLIAPQHVKAYVKRNKNDGRDAEGLCEAMSRPTMQFVPVKTEEQQAALMLMGVRQQLITRRTQLSNAIRGYAAEFGLITAKGLVKVEPLLARIAQDESLPALAREMFALQGRDYARLQVELKAVEARLMAWHRANADSWRLAKIPGIGPIGATTLVMKAPDPGLFPSGRHFAAWIGLTPKDHSTAGKTRLGKITRAGDEMLRSVLVAGATAVIQQAKKGRGHPSPWLVALLARKSPKLVAVALANKTARIAWKLLTTGESYDGARMPGASALAA

SEQ ID NO: 257342 - protein, 371 aa, unidentified
MKKNSSNKQRTGKGNRQDEEKGTFAFHIGIDLGDKNCDVCVMNPAGEVHEQFRLRMKAPDLVAYFLTIGRSRVAVEAGGQSQWVAEVIEKCGHQVYVSNTRKVPYISESDAKDDPGDAYKLAELVHFKPRLLHPIEHRSQALQADLSWIRARETLVESRTQLINTIRGISKAFGERLQKCSVEAFTAKLAEQIPAAIRGAVAPLLEMIDHLNEQVHYYDQMEEHIARERYPKYWLLAQVDGVGVHTALSYMLTIGDPERFAKSRMVGCFLGMRPRKQESGESKPQLGITKAGDEYLRKTLVNCAHYILGPYGRDSDLRRYGLRICERGGKNAKKRAVIAVARKLSVLLHRLWVTGEVYEPLRNGKRAEQAA

SEQ ID NO: 257343 - protein, 323 aa, unidentified
MSESVKAVKVNAAIDVSKDYLDVHAGDVSFRRFPNNTRGLSTMKRMLSRFDISLVLLESTGGYENLAVMYLQGLGYDVCVVNPRHARDFAKAMGRMAKTDKIDAEMLCRFADLIDARPDRARFVKPLTDERREYLNALVRRRRQLVDLKVTERQHKSAPVVSSAGVADIDEVIAFLDSRIDIIDREIAAHVSTCFSDVSEILCSFTGVGPATAGTLIGGLPELGKLTRRQISALTGVAPFNHDSGRMRGRRVISGGRADVRKVLFMAAMSAVRFNPVIRSFFQRLVSAGKPKKLALVACMRRIVCILNAMLRDGTRFNSVIPV

SEQ ID NO: 257344 - protein, 381 aa, unidentified
MQASDACMPIAGNIATIFVAIELSQRGWLVVMQSPGRERISRYKLDAGDHDGLVALIEKMRERAARSLGSAPAVVSCYEAGYDGFWLHRRLTAAGIANFVFDPASIAVEQRGRRAKTDRIDGEVMLRTLMAYRRGEPRVVRVVRVPSAEHEDIRRGSRERQRLVTEQTAHINRIKALLKLLGLAAGDVRRRDWPSWLEAQRDWQGQPVPAHLRDELRREHARLLLVGEQLQAAVTAAQPASPTAAQMAQRKAQLLRLKSLGPVFAGTLTAELFYKDFRNRREVAAYCGLAPTPWRSGAMAREQGISKAGNRRVRHKAIELAWLWLRHQPGSALSAWFQRASANGGGRAKRIAVVALARKLIVALWRYLTTGLVPEGAIIDA

SEQ ID NO: 257345 - protein, 395 aa, unidentified
MDVMHPVCCGIDVHQKSIVCCILDGPLTSNEPKKYQTSFGTTTKELKAALDWILEHQVTHVFFESTGQYWIPLFNIFSDSDLELVLANPQHIKNVPGRKTDVKDAEWIAQLGRCGLINQSYIPSQEVLQLRYLTRYRLSVKQRLTQIKNHIHVILQRANIKITSYLSDIFSKTGQALLTLFIDGEVINEDNVESCIHGRIKASTKQLIEAMEGKLSTVDRFLIKECMEEYKLQKKISDELNKEINEYILEHFPEEYQLLLTIPGISDNCCATILAEIGPNVDAFKTDKKLASWSGMCPGSNESAGVKRSSHTTQGNKYLKQALVMSVLSVQRAKEETFSLFYQRISSRGSKMKAIIACGHKMLRIIYKILQSHQPYNSQKALGLRQQTNALSLTI

SEQ ID NO: 257346 - protein, 390 aa, unidentified
MIYAGIDVAKDKHDCLITDSDGTILFEPFSFSNNFIGFECLLEKLWEYSGDLQTVKIGLEATGHYSDNLLEFLISKGLPTTVINPLHTSLYRKSLSFRKTKTDKVDAHSLVTMLRTERLKPYSQSSYHVRELKSLTRYRFSLVQDCAKMKSSYSRLCVILFPELEKLVPSLHIVSIYALLSELPNTKDIANCHLTRMVNLLSSASKGRYGKDKAVQIRDAAKISIGTYSEVKSLELQQTIQMIRVMEAQIAQVEAKINPIIDSLRSPVMTIPGISYRMAAIIIAETENFTNFGSAEQVLAFAGLEPSVYQSGQLVSTHAKMVKRGSKYLRYALFNAAKYVCHWDPVFSAYLAKKRSEGKAYNVAVSHAAKKLTRVIFHLVKTNRPFIKQA

SEQ ID NO: 257347 - protein, 415 aa, unidentified
MEGMELLHSHAAGIDVHRKSLSVCVRHVGTDRRIRQEVRTFGTMTQELLTLRDWLEAEGVTHVAMEATGVLWKPVYNLLEDRVEVLLVNARHVKQVEGRKTDVKDCQWLAQLLSCGLLRPSFIPPKPQRELRDLTRMRSQLVGERTRVVNRIHKVLEDANIQLGAVASDILGMSGRQMIEALIAGEQDVETMAQMARRRMRAKLPQLRLALDGRVSEHHRFLLQMLLEQYDGIDKQVQRLAERIEKVCVPFAPAIEKIVEIPGYDQTSAQNVVAEIGSDMSRFASDDHLCSWATICPGNHRSAGKQTSGRSVHGNHWLKAALCQSGWAAARMKGSYFGAQFHRLAGRRGKRRAVLAVAHSQLRVIYHLLNSGQSYKDLGADYFQKLNTRRVVRYHRKVLESLGYKVIPPQADQAA

SEQ ID NO: 257348 - protein, 362 aa, unidentified
MHNHRTLVGLDVHARSSIAAGLELGSGELRFRRINGPPRSVVNYLEQLPGPVLATYEAGPCGYGLAREAAGRGIEVRVCAPGSIPRKPSERIKTDRRDAERLVRSLLAGELSFVRVPTVEEEQFRDLARCREAARVDLMRGRHRLSKFLLRRELEFPGPGGSWTEAYWKWLRSLQFSDHPSRSVFCDYIAGVAFGEQRRGGLDTQIEIAAPESPWARTIANLRCLRGISTVTAYGVCCEVGDFRRFEHPAALTAYLGIVPSEHSSGEQVKRGPITKAGSPHARRLLVEAAQHYRHKPAIYKTLAARQRGQDPRAVEIGWRCQQRLHRQWQRLRLERGKPGNVVVIALARELANFVWEVGQLT

SEQ ID NO: 257349 - protein, 341 aa, unidentified
MQVITVGLDIAKNVFQVHGVDDQGRAVLRRKVRRDQLLKLFGSLEPCLVGMEACATAHHWARELGALGHEVRLMPPAYVKAYVKRNKNDAADAEAICEAVTRPTMRFVPIKSTEAQSVLMLHRARHPLVRQRTAQVSAMRGHLAEYGIVAAKGLSRLRDLRPVLDAGAGVLPELARQTLLLISQLIEALTVQIRKIETELLAWHRSNPASQRLETIPGVGVITATALAATVLDAKAFRSGRQFAAWLGLVPRQNSSGGKDRLGGISKMGDRYLRHLLVVGATAVVRYTRRKATAISIWANRLLDRKPARLVTVAVANKMARIAWAVMAREENYRATPVVAA

SEQ ID NO: 257350 - protein, 345 aa, unidentified
MDHIAIDLGGKESQICRRSADGKIVQELRCNTALLTGYLKKQPPSRVVLETCAEAFKIADTVLELGHEVRVVPATLVPALGVGSRGVKTDRRDAQILSEVSTRVDLPSVHIPAQLSRVRKASCTAREALTAARTLLINSVRGWSRTELLKLGSGTPSTFPRRVRDKALSRPEGLPEFIAQVLLSIETLNEQIAQADEGLKQMAKSDPVCERLMSVPGVGPVTAIRFVAAIDDVKRFPSAHAVQCYLGLVPGEHSSSDKKRRTGITKAGPPRVRWALAQAAWSLRLSKKLDPLALWANRVEARRGKKIAVTALARRLAGVLFALWRDGTRYDFTRLRTADNQPGTH

SEQ ID NO: 257351 - protein, 407 aa, unidentified
MDLLKTVFGIDVSSRKSNVCIMVNGQKVNDYAISNDMVGFNQLLGDLKQVTNPQIIFEATGVYSRRLQAFLDMHELRYVMMNPLEAKRKTKDDLHQNKTDKLDALYLAKLQSEHPQRLAYVQSEEYQELMANNRIYEQASHDLITNRNRLHKAIQLTFPEIEHLMVNPRGKNYWSIVLRFPHPDIVLETKEADIIDFLKGLTGIGKKRANDIAQSLIRLAKVACPAVKKNSAHIRGLKMAINNILSAEEECQTALQEMAKLAPKRDLEILTSIPGIGENTALRIISELGDIRRFNNPSQLNAFVGVDPQVYESGNLTAHLSISKRGTAIGRKVLYLAINQIQSAKKAGNPCHIADYYEKRKRSSETASHKKAAIASIHKLLRTIFALIKNDQLYSYDVAKHNQRLLS

SEQ ID NO: 257352 - protein, 350 aa, unidentified
MNEMRYVGVDIGKWRCRAAIMDSEGGIVNEFTFPNDAEGILSLASRLTTEDRVVMESTGSVWSNLYNHLDERHIPVTLANPLKTRAIASARIKTDKVDARILAHLLRGDLVAECYVPPRDLREIRALVRHRASLVRARTTVKNRVHAIVDQRGLRCEYSDMFGKRGSEWLRSLDLGALDDLMLRSHLEQVEGLSRLVEEADEMIRSRSSLDEDVKLLLSLTGVDVYTALLIRSEIGSISRFPDYKRLISWAGLAPSLHQSGTVEYSGGITRQGSRMLRWAMVESARTAVRHDERMRVFYERVKRRRGDGKAVVAVACKMLKIIWFMLKRREPYQSRNEGRYGRKLKSLDR

SEQ ID NO: 257353 - protein, 396 aa, unidentified
MYAKCRATNERRADGMNDSTKFVGMDVSKEKIAVAHPPSAGPRDSGGEPARYWGEIPNQVEYIRKLIGRLSEIGKLQVCYEAGATGYMLERQLVSMGVACVVVAPSLVPKQPGNRVKTDRRDALRLAELFRAGELTPVWVPGEEGEALRDLVRAREDAKEDLLRAKHRLLKLLLRHGMHEPLGIRSWSPKYRAWLKGLLFDSGALQTAFDEYRLSIEEIEGRVQRLESEIHEQAEKSVHAPVIKALETFRGIKEIGATTMVAEVGSFLRFKKAPQVMGYSGTVPSEYSSGAETRRGKITKTGNNHLRRILIECAWSYRYPASRSEAIKKRQEGQPASVQAIAWKAQVRLCKKYRRLISKGKSGQVAVTAVARELLGFIWAAACEVEKQGVKQESAA

SEQ ID NO: 257354 - protein, 427 aa, unidentified
MTDHSQATVVASQPTEARTEFAVFVGIDWADEEHAVCVLEGEQVRREVLPHTPEAIAAWAAGLERDFDGRPVAVMLEQSRGALLHALLQYPQLVLYPINPKQAARYREALVHSGKKDDPTDAECLARFVREHHRELRAWRPSDAATRQLALLVELRRKAVESRKQTTQQVEARLKQYFPLALDLGDAALAIAVVERWPTQQALARANPATLRKFFAQRGRRNTDQVNELILRIRAAIPLTTDRAIIEPSALAVKFLVQELRVLEAAVAEFDSTIAQCFASHPDAELFRSPPGAGAALAPRLLVAFGTDRDRFATADEVQAYSGIAPVTKRSGKSCQVAKRHFCNKFLRQTFHEFADHARKWSTWSKAFYDHLRARGHRHHAAVRCLAFKWIRILFRCWKNRQPYDEERYLRQLRSKGVPYVPSPQST

SEQ ID NO: 257355 - protein, 309 aa, unidentified
MKQSVVYIGIDVAKAHLDVAWAGTFRRLPNERSGHAALVRWIKQSATPVQLICEASGGYEQALLESLEKSEVKVTLVQAVPVRQYARAAGILAKTDRIDAKVLAAFGSAMQPQPTSPLSAEQKRLRQYEAQRRQLSRILVAEENRLAQLSCTELRTLSRSLISKIKTQIKTLDRGISDLIAQDQTLCVKAQKLTAISGVGVRTAALLLAQMPELGQLNRRQAAALAGLAPFNHDSGSVRGKRAIFGARPALRSGLYMAALSAARFNPILSSFYQRLRTKGKPHKLALTAVMRKLLLALNQTLKPLPCST

SEQ ID NO: 257356 - protein, 405 aa, unidentified
MEELLVGVDWSQSHYDIAVVAPSGALLTQFRIAKTAPEFSLLAEKIEAFGVPTSNCHIGLETAHNILIDFLWSRQYATFVIAPSIVKSSRGRFGNSGAYTDAKDAHLIADLLRTDRERFAPWRPDSELLTRIKTKLGHMDYLTKLITSHTNRLRHILLRVYPQVLQAFNDLHVCLALHLLVAYPTAATLAGFSYAEFAAFCRSQHCHRLDWITTWYSRLQQPQPLVQSSMAAAYRDEIVFIAQQLLGLIQEKKLTLQQVQVLFQQHPDHPIFSSLPGAGDMLQPKLLVMFGEDRARFPSPQDIRALAGTCTVTKQSGKRRHIQFRRACNHSFRETAQQFAVASVQHVDRAAAYFTSALSRGLRKNHAYRCVANRWLGVIWKMWQTHQPYDETYHLKQIHHQRRPT

SEQ ID NO: 257357 - protein, 374 aa, unidentified
MLQPRQREKLAWGTEDKERVMSNVNSAIATIGIDIGKNSFHVVGQDERGALVLRQKWSRHQVEARLANLPACLVGMEACVGAHHLSRKLQALGHDARLMPAKYVRPYSKGQKNDFRDAEAIAEAVQRPTMKFVATKSTEQLDLQALHRVRERLVGQRTGIINQIRAFLLERGIAVRQGLRFLQTELPSILATRSDALSPRMLRLIDDLAGDWRQLDGRIEDVSEEIEALACQDPACERLMTVPGIGPIISSAMVAAIGTGDAFSKGRDFGAWLGLVPKQISTGDRTILGSISKRGNRYLRALFVQAAWVVLVKLGKKWERYGLRSWIEAAKKRLHHNVLAIALANKLARIAWAVLHKGRAFECAKIDALSARPI

SEQ ID NO: 257358 - protein, 345 aa, unidentified
MGEVITIGLDIAKLLFQVHGVDETGAVVIRKRVTRSKMLVFFGSLKPCLVGIEACPAAHHWGRELQALGHTVKLMPPSYVKAYVKRSKNDANDAAAICEAVTRPSMRFVAIKTKDQQAALMLHRTRQLLVRQRTMLSNAIRGHLAELGIVSAKGRQGTGTLLEIIADTGDSRVPAVARGILDVLARQYRTIGAELGSIDRSILAWHRSCEASRRLEEIPGIGPVVATALVAEIGDNWKTFGSGRSLAAWIGLVPRQQSSGGKDRLGGITKQGNRYLRWLLVAGAMAVIRYAQKHGTLKRPWLGRLMGRRPTKVAAVALANKIARMAWAIMAHGERYKEPKPLLAA

SEQ ID NO: 257359 - protein, 306 aa, unidentified
MSNIIGIDVSKASLDCAYLRDLDQKRAKRLSCHNEVSCFAALVVWAEARSGLPIQSLAFIIEPTHIYHEQLVQFLHNTGATVHLVNPGRVRKFAAGIGILSKNDLVDADLLTRYGLLARNLIAYAPVAQKVNDLRSLLNRLDVLEHNLRSELNRQEKVGKTMVFHRLEQQSIARSVKRLKAEIITFKRAIRECTKSTPSLQQSFDLLYTIPGVGAKTAWIMIAILTSRPFMSAPEVASFLGLNPIEKRSGNSQYRRPRLLKPGSGHYRQQLYFPAMVTTRKNPDIQALYERLLAADKPKCVPWEPP

SEQ ID NO: 257360 - protein, 345 aa, unidentified
MKITTIGIDLAKNVFQVQGVDERGKAVLRKQVKRKDVMKFFANLEPCLIGMEACGSAHYWARKLTELGHTVRLMAPQFVKPYVKTNKSDRNDAEAICEAVARPNMRFVPVKTGEQQAVLSVHRARQGFVKARTAQANQIRGLLAEFGIVIPKGIGHIAKRLPEILEDAENGLPGMMRQLLERLGENLKAMDRQVGELERQITLWHRDNEQSRTLEAIAGIGPITASAFVASVGDAKSFKNARQVPAWLGMVPRHEGTGGKVKLGRISKRGDVYLRTLLIHGARSVIRQFERKPDRADGWLKKLLARRNKNVAAVALAAKNARIAWALLAHDRTYQSDYVTKRTAV

SEQ ID NO: 257361 - protein, 361 aa, unidentified
MNATTAAIDLAKNVFQVALADANARVLEQHRLTRAQFERFFDNRKVARIVMEACGSAHHWARVFTARGIEVMLLPAHYVSAYVRRSKTDAADALALLEAARCADIVAVKVKSVEQQSLQAVHRTRSLWMGTRTSRINALRGFCRELGLHVPVGARTGLEAMARAVADDQSPIPALLRPIMQQLLEEIRVLEVRIAQLERQLAQLARECSACRLLMSIPGVGLLSATAILAATSGNVAHFKSARHFASWFGLTPKESSSGGTRRLGRISKMGDKYLRMLLTHGARSVMRAATVAKLRGQELLGVRHWALQLQGRSNHNKAACALANKMARICYAVLRDQTPFGQPATRLSKKMQRQSFELAH

SEQ ID NO: 257362 - protein, 369 aa, unidentified
MFIVGLDLGKRKSQMCVTDAAGKILEERKIETTREALEEEFAKYKRSRVLIEASTSSEWVARALEKIGLEVIVANPRFDLMYAQRDKKVKNDRRDARALAQALRLGAYQAIHRRSDAARKLMTQLMLRNALVSSRTKLINLVRSIAEAQGVTIGSSATGYFAANACEDLENHPELLAEVSPAIAQIGMLSETIKLMDDEFEEQSQANAVTRNLRTMRGIGPLASLTFYAVIDDVKRFDSGRQVSAYLGLVPSENNTGGSKRRPGAITKSGNSLARKYLVEAAFSHTSERAPKSNLKGWRDGLLKRDGRKSKMKAGIAVARRMARILFAMWRDMKSFDDTRTAPVVPAETATNATTDESQGSTSEVASAA

SEQ ID NO: 257363 - protein, 422 aa, unidentified
MKESARIVGFDCAEDEHSAVLLDASGEYDQRFSVINERGQVQEALAKLLLAVGPNSQLVVVVESKRSHGRIVADVATELGCELWQVNTVALNHFRDLEGQPRKDDEWDAYLGARMVHLRMGGCRAAIETTEEERVLSRLTRIHSRVTEDRKRYVARLRAILLELAPEMLHSKWKGPQPGSKAMLYLLEHWPGFEGLERAQLRSIDKILSQCRYKSKDRGPVAKLIRKAARGISIAAEERSALTLDLDLLVRQIRVCNESIKQVYSEIAHRVERHPVGHKLLEMPGNGPVISGVLVSELYPVARTAPEPKSATYSGVTPLSRKSGKTLDKDRLTQGVNKRILHALYTSSVVAIKNSAVDRAYYQKKLRDYAGHPKPHVAAFIALSRQRHKVIYKLMTTEARYEKEVLIASHLERIERERADAA

SEQ ID NO: 257364 - protein, 367 aa, unidentified
MEKSSTVFVGMDVHKESIDITVAEPGGEVRRLGQIGGDRGSLLKMVRRQQSKGRKLVFVYEAGPCGFWIYREITALGHACMVVSPSLIPRRAGDHVKTDRRDSERLASLARAGELEAIHVPDIRDEAIRDLVRGRDDAVIAQRRVRQQLKALLLRNDIRYVGRTSWTGAHRRWLSELKLPEPAQRIVFEEYVDAITVATGRIERLTRAIQTEVLTWRFAPVVAALQAMRGIQFVHAVTLIAELGDLTRFASARQLMGYLGLVPREDSSGEHRHQGSITKAGNSYARRALIEAAWAYRHPARVTRIIATRQTGIPKAVCDIAWRAQLRLSAKYRRMNARHVNHNKIVVALARELSGFVWAIGQSVKPQ

SEQ ID NO: 257365 - protein, 418 aa, unidentified
MTSSKDIVYVGIDIAKHKNDVMVELPNNKRQKFTVINRQEDFEKLAGYLISLGHDCQIGLEASGNYHRPLAYYLQKKGFEVYLISSLSLARTREAIHNSWDKNDPKDAEVIVHLLKTGIKQRYYDNFIQGFGDAEELSKTHYQVSLAKMKIQHSLLTHFLPLYFPEVEKYFCSSRAAWFSKVLYHFPSPHHIREMGEELFIKQAWSLVGRKVAKEQFLKDFYATATKSIGIPVDRNSCALEMFRRTLKQHHELCVRRQELEDLAHQRLKDNRVYQILRTVPGIGPVIALTIISETGEFARFKHHRQYLKFCGLDLSTTQSGQFRGQSKLSKRGNRRLRCAYWLASTVAVRMRENTFREKYHRYILNYPDNADLKRKAIVATAAKMARVCYGLVKNLKEYRPYYDGDMPSGEIRSLCVR

SEQ ID NO: 257366 - protein, 359 aa, unidentified
MPELFVGIDVAKDTSSAQGIDSNGNGRFSLTFPMDSEGFMQLWKAIAAHSKDLSDVTAAVESTACYHINLYSFLTARGIAAVVINPLLISNFTKLSLRKTKTDKKDAMSIAQFLLAHEASISQLAVSQDLQDFRDIARERESAGNMLTVHKVEIKRLLQSTFPELERIGNLSTRVIQDFIAEFPSARLVKMAKPKAIQKILQRKWVETKLTYTAEDLIRAAKQSVATISPAKELLLQGKVRTLQHLQERYEGLTKILTEYCKASMLEDFEIMTSIDGINKRTATTFLAEVGCIGNYASLKKLIAFAGIDPMVYQSGKFEGSSRISRRGNRHLRRVIWLMTTCVIQHNTTFKASYMKKRV

SEQ ID NO: 257367 - protein, 365 aa, unidentified
MQELTHIGLDVHKETIAAAVLRPGTTECDERVIANTPEALRRLVSRFPDRAALRTCYEAGPTGYDTWQLLSALGVPCEVVAPSLIPRRAGAHVKTDRTDARNLARLHRAGELTAVRVPSPAEEALRDLVRTREDLRSDRRIARQRIRSFLLRYGRRYPTGSGRWGVRYELWLQTLRFAEPAAQAAFDHLMGAASVRTAQLAAIEREIEQAALSGSLAEPVAHLRAFRGIDTLTAVTVITETCDFRRFGSARGYMAFTGLVPREHSSGAVRRQGAITKAGNAHVRRVLIEAAWAYRHRPAVRGKLAVRQEGLPPELLAYSWKAQTRLHATYRKLAARRGANKAAVAVARELSGFVWGAMTGRTDVR

SEQ ID NO: 257368 - protein, 411 aa, unidentified
MDRIYDKCCGIDVHKKLIVACFKKGNRQEVREFGATTRELLILADWLKDSGCEMTAMESTASYWKPLYNILESSGLKAMVVNAHHMKAVPGRKTDVKDAEWIADLLQHGLLRPGYIPDKDQRELRELVRYRKSLVGERTSELNRLQKMLEGANIKLSGTVSDINGKSARSILEYLLTGESVDGAKYDEMYEKKIIAHNLKATKEQIVDDLNGIMSPLQRRMMKELLNHLDELNIHIKNLDDEIDHFMKPEEKKASAAIQDVTGIGNTSAQAIISVIGTDMERFPTDSHISSWAGLCPGDNESAKKRKSGKTGKGNALLRTTLITCAHAAVKNKKSYFYAQFMRISSHRGKKRAYVAVAHSMLIAIYHILKDGVVFKDSGAEYYNQFNKERKINAYLKKLKALGWEAPVVAA

SEQ ID NO: 257369 - protein, 460 aa, unidentified
MSMTLGIDLACRAAHVASLAGPDGALIWRGRSLFTRPADLEKLWRDIECPPGELTVVLEPTRNVWIVVAAWFRRRGARVVLVPTTQSADLRAYYAKHTKNDRLDSTILARLPLLHPEGLREYAGDGPADPLRRIVKQRSSLAKRRAAIFHRLDAQLELLGPAWYDSLGTDYGHATLHFLARYADPNTVIRLGQARLGRFLRRYSHGHWREGKAAELIAAAHQTLQLWDGDGMDFAELAADIAIEAEQAQVLTAQMNDLDERIGNLYAEADPAGIIRSTPGVGPVIAGIIAGRLGDPHRFTSLAAIRSYAGLVPKVNQSGTSDKPGGLTKAGDPLLRQAAWMAAEQARKFDPQLAAKYKRLMAADRHHDSAVCHIATILLTRIATCWRLGEPYQIRDLDGTPLTMAEGKRVVTEHHQVPKKKTKNSYHRATNHKADREQQKSLSAPTSRPAETKPKPPRAA

SEQ ID NO: 257370 - protein, 321 aa, unidentified
MTLYNNFIGIDIGKFNFVVASYDSKVINEYQNSAAGIKLFLKEYKDKFKYSLCILEATGGYEVKLLNTLCTKKFAVHRANTRKVKSFISSHGNNAKTDSLDAKALAKYGFERHKLLKLYIPTAKILTHLYQLSCRRRELKQMLVAEKNRFQAPNNNLIKDSCKAHIDYLATQISYITEEISKIIAKDQKLEAKKEILKSIPGIGEITAAELLVLMPELGNMSGKQVASLAGVAPRANDSGKYKGYRSVASGREIIKPILFLAAMAARKSNSDLRSFYENLIARGKKKMVALTALMRKIIVRANAKLRDLELSLEKKVKIIS

SEQ ID NO: 257371 - protein, 345 aa, unidentified
MKNLFIGIDFSKEKFDATIITAQGLEELSARMSETFPTTTSGYNKLVRWVEKNSLGIGRDAWLFCGENTGDYSKPLCNYLYGKGLDIWVENAKCIKDAAGLRRLKSDRADSVMIAEYAMRNYDRAEIYKPLSESLSQLRELFLYRQQLVQHKHGFQVRRGEKKHTMEKSSIKTTISQSGRHMVNVLDKEIEKIEKKIQELIKGDEELKGTYELITTVPGIGMQNALCLLIFTNNFKRFNLNPRKIACYYGIAPFGRDSGTSVHSSPHVHYMANKMLKAILTQAALASIQFCLPITNYYNRLVNKGKKKQVALNNVKNKLIHIITAMVKNNQPFEPEYIKNNKSIA

SEQ ID NO: 257372 - protein, 369 aa, unidentified
MPHVTSIGLDVHARSVAAAAFNPFTGEVVRRSFGTDASEIAEWALGFEDPRACYESGPTGFHMARELRALGLDCAVAAVSKMQRPAADARRKNDRRDAEFIARMLATHNIVEVPLPDMAVEAARDLDRALDDATRELRRSRQRLNMFLIRLGHVWDERNADGARKKAWTRAHWRWVSEIRLEGPQRDALEYYVTAARCAESDGRQLERRVVALAGTDRWRATVEALSCIKGVDTLTAFRLAAEAGSFSRFRSAPAFASWCGLTPSEHSSGESERRGGITKAGNALARTALIQSAWHYSTCSPRPKAPAPGTDVPPAIRSRADDCTARLHRRREALAAAGKSACKANAAVARELACWVWEIGCRSEGTVL

SEQ ID NO: 257373 - protein, 330 aa, unidentified
MQEKVRFLGLDVHAETIAVAVAEPDGEVRSLGTIPNRAESIRKMIKKLGPAAKLRVCYEAGPTGYVVYWQLAELGAECEVVAPSLVPVKAGDRVKTDRRDAEKLARCYRSGDLTAVWVPDEGSEALRDLVRAREAAKQDQTRARHRLSKFLLRSGQRPPTGVRPWTRPYLIWVTQLRFTQIAQESTRQGYLHEVEHMRERVARLEQAIMEAVKLASPVLQQVINDRQALRGIADISAVTIASELGQVSRFDSARQLMGYCGVVPSEDSSGKRNRRGGITKTGNAHLRRIVVEAAWSYRRPPGIWYGLRRRQESISGRGQGVCMEGATPVT

SEQ ID NO: 257374 - protein, 446 aa, unidentified
MVWLGRRPNRMQEVIPVSRKNPYSASDVNQILIASLVERRRGQAASVGVDVAKKEHVVCVVWPDRSFERPWRVQSPGQVQLLVQKLVELNQGCPVIVAMESSGTYGDPLRQAIGDANLEVRRVSSKAVKDQSETFDGVPSQHDGKDAAIIGTLNVEGRSKPWSFIERPEPDQALRYWVGKLDTAQRIKQIWCGKQESMLARHWPEAGRLLKQSGATLPAALAHWGDPAALAKDPQAAEQLKTFGGRYLSDQKIARVIESAQTTIGVRMNGWSIREMREIAEAIVGKRHLIQECRHELKKLSRHYPVICSQAPAVGLTTACVLWMCLGDAGNYASAAAYRKAMGLNLKERSSGMLKGKLTLSKRGQRLTRKWLYFSALRWMRDPLVKLWVERKKQRDGGRGDKAATGVMRRLALAAWHVGQGEAFDVRRLFPGTRKPHEAGKVQAMR

SEQ ID NO: 257375 - protein, 343 aa, unidentified
MTFYVALDVGLRMVSLCIVDEAGGVKLEKSLPSEIEDIVACLRDFGEEIACVGLEAGTLTQWLTYGLRAAGFKPVVLEARHVQAALAAMRNKTDRNDARGIAQILRTGWYRPVHVKSIESHYTRTLLAARKALLRKCIDLENEVRGLLKVFGIKLMPGLRHGAFDRAVREPIEANGALRHALVPLLDVRLEIYKAFLEMDRRVKALAQADQICRLFMTAPGVGYIAALTFKSAVDDPSRFKRSKTVAAHFGLTPRRYQSGERDNPGHISKAGDTEVRSALYAAANIIMTRSTKPSTLKAWGSRLARSKGRKRALVAVARKLAVILHTMWIDGTEFCMQAQEAA

SEQ ID NO: 257376 - protein, 310 aa, unidentified
MKSEPVYVGIDIGKDTLQISPFDGKAVEIPNTTKAIRSLIRRLERVEEVVVCCEATGGYESLLVTELTEAGMPVALANPRRVRDFARSKGILAKTDAIDAAVLCQYAEQNQPRLLEKLPESLQTLRSLLVRRSQIVEMIKDETHRLDPKPRKQIQQSIQTNIRNLQKQLEKLEEHIRVLVEEDQPLTNRVESYTQVKGVGLQSALHLTAFVPELGHISDKQVTALVGLAPFNVDSGKFRGRRVIRGGRSRVRKVLYMAAVSARTHNPILRDFYNELIARGKPPKLALTAVMRKILILANRIASDPNFVPA

SEQ ID NO: 257377 - protein, 326 aa, unidentified
MTQNAPTYVGIDVAKATLQVHLKGHQIEFNNNAKGLAKLSKKLAHLTRPHVICEATGGYERPVVAACHQDKILVSVLNPAHTLAAAKAQGIRAKSDCSDAEGLTDYGQRYQPQPTLPVPPERRETTELALWLQQLIDQRAVAKTQAEHHDNPFVCQHHAELLAHYDEQIQTVEKEIKKRLQSQPEFQQRMDCLDEIQGVGFRTALMMLVLMPELGQMNRGAAAALAGLAPWTRDSGKMKGKRCIGGGRAQVRPVLYMSALCASRCNPVLAAFYAALKKRNKPKKLALTAVMRKLVIHMNQKLKVLATTPSPQDKKTATKSKKNLAN

SEQ ID NO: 257378 - protein, 355 aa, unidentified
MNSSKYIAMDVHKDSISLAVRNAAGKIVMESLIETKASMILQFIDGLRGDLHVTFEEGTSAAWLYDLLKPHVTRVVVCDPRKNKSMREGNQSDKIDARRLAELLRLNHLTPVYHGEHGLRTLKELVRTYLTVTKDLARVMTRVKAIYRSWAIPCSGKQVYARCHRAEWLGKITEPGVRRRAEFYYLQLDALRVLRQDARRELLAESKKHKAWKRLCEIPAIGPIRAAVLLGILQTPHRFRTKRTLWNYGGLAIEMHSSADYRSVDGELQRSRKNVLVRGLNRNCNHDLKNLFKGAAAVASSKPGPFEEFYAALVAKGMKPEMARLTLARKIATIVLIVWKKGVCFDAQYLKPQTA

SEQ ID NO: 257379 - protein, 456 aa, unidentified
MAGKHERARAQGNRRQLQGLPVIRQNVAGIDLGSERHWVCAPTPDGSGREIASFGATTAELIGMAEWLKARRVESVAMESTGVYWIAPHEVLEAQALAVLLVDTRQLARVPGRDKKTDPTDCEWIQRLHSCGLLQGSFRPEEAVCMLRTLVRDKANLVAERGDWLRRMQKSLDQMNVRVHRAVSDLDGVTGMAILRAIAAGEREAQQLAKLRDPRCSKSELEIAEQLQGHWREDHLFSLQQALQMHEAVEERIAAYEKEILRKLGDMEREQQRGQTAPPLNNTNKARAIKQRGQEPMRQALYRMSGVDATHIDAIGVETLEVVFSEYGPDLSRFPTEKQFVSHLTLAPHVPTSGGKPLKKRKRYSASTRVAAALRMAALSLRHSQTALGAYYRKMAQRLGADIAVFATARKLATLIYRLLRWGQPYVDEGRLHTKPGIASSASDAWRPQPNNSVIS

SEQ ID NO: 257380 - protein, 516 aa, unidentified
MKNKQPEKTEEAPCRPTQGHWHEMNRKQRREMMRKIQSDDLRLEVVHPDAAGIDIGNESHYVAVPPTRDSESVRRFGCTTAELKEMADWLKQCGIRTVAMQSTGVYWIAVYDILEEAGLEVYLVNARETKNLPGRKSDVQESQWLMKLHTYGLLRNSFRPSQEIRTLRTYWRQRNDLVRAAGRHIQRIQKAMTQMNLQLANVLSDVSGMTGQAIIKAILGGERDPQKLAEFRDSRVKASKEEIARSLEGHWQEDLLFVLQQEQSGYEFCQKQMAECDQRIEQYLKQREDRSAGDNLPEEKRKERLRKKKKGNAPQFDLRAELFRMTGADLTQIDGVDVMTAMTILSEVGWDMTKWKTEHHFVSWLRLCPDNKISGDKIIGKARLPTNNRATSALRMAASTLRLSNTYLGAQFRRLRTRLGAPIAIKAMAAKLANSWTRERSSTRLNTARCRSTISNGEPRKWDSKLSKLRQHKDGSFWRELNSRDVERCEDLLQVDLLMEFAALQIGCKLLLIKLL

SEQ ID NO: 257381 - protein, 417 aa, unidentified
MIRKVMEVIYPCAAGLDVHKKMVMVCRRRLLGDGQVEVEVQEFGTTTAQLRQLSGWLAAWSCTHVAMESTGVLWVPIWNVLEGGFRLLLANARQLKGVPGRKRDVVDAEWIAQLMQCGLLKPSFVPSKQVRHWRTLTRQRMKLSDQHTSVVNRLHKVLQQGNYKLSSVASQVLGVSGRAMLQALMDGESDAEKLASLAQGRLKAKHADLVEALEGRLSEDERWVLKQLWEQLRHLEAEMARYDDEIRAQMGDYETVLERLMTIDLLGRRSAENLLAEIGPDMSFFPSAANLVSWAGLCPGSEESAKKNRSGKTPKGNPWLRRALVEPSWNAARRKDGYLSAMYRGIAARRGSKRAVVAVARTILEAAWHVLSEGVEYKELGSNYLDQRHGEKTRNQLVKRLENLGYEVSLTPKSVPV

SEQ ID NO: 257382 - protein, 386 aa, unidentified
MAHSTNILPRSVDYDQTLVLAIELSNKSWVLAAQVPGLLQTKAKRTIDPDKNDLLAAIDGYRTRAAAAGRSVKRVITSYEAGWCGFWLARWLMAHGIEVHVVQPSSVPVDRRMRRGKSDGIDAELLLRTLLAWLRGEPRVCSMVPIPDEADEDARRCVRERSELVSERVGLVNRIGAILATLGADDYNPLLQSRRRRLTELRTGLGDPIPPNALAKITRLLTRLELVLAQIAELELERDAVARTDAPDHAGEMIQQLISLRGIGVQSATVLVREAFVRRFANGKALGSYAGLTSTPYSSGGIDREQGIGKAGNRRLRTVMVELAWLWQRYQPGTAQVAWFRERVGSTGRRVRKVMVVALARKLLIALWRFVIDGVMPEGAVTKPSI

SEQ ID NO: 257383 - protein, 396 aa, unidentified
MTKFNAESVSIHTVGAPVEPEQPTIHNAYVGLDVHKETIAIAVAEPGRQKPVYEGEIANTAKRVERKIQQLSERYGGGLLQFVYEAGPCGYGLYRQLLASGHDVQVVAPSRIPKAPGERIKTDRRDALKLARLARSGDLTPVWIPDTEQEAMRDLTRARDDMKAQERKARQQLNAFVLRHGHHWPKGRTRWTQTHFNWLESLRFEHDWQQVVLQEYIDAVKAATQRVADLTAQMERALPQWSLAPVVEALVALRGIDKLAAMVLMAELGDISRFDSPRQLMAFLGLVPSEHSSGSRRRQGAITLTGNSYARRMLVESAWSYRFPARQTMHLKRKAAGAPEEARAVAWKAQKRLCGRYRDLTRAGKNTKLVCVAVARELTGFIWDIVCRVMPGAYAA

SEQ ID NO: 257384 - protein, 344 aa, unidentified
MTTHPLIKTALESQPALFAGIDVGAEELILVIRKNGKSFDPQKFANTLADRARLVKKLVKLPGLIVCLEATGIYHFDLALALHDAGVLLMVINPKASHNFAKVLMKNSKTDAVDADTLAEYAARMDFVAWTRPSNEKLALRSFARRVNALTGQKAAAKNHLHALTATQETPKAVLKDAKLAITQLEKRIDQLTAEALLLIAKYPELKRVLILLTGIKGIAETSAIALMGELLLLPPGLSHREWVKFAGLDPKSFDSGKSVHKKTRMSKAGNRHIRSALYMPALSAKTHDPHVSAYFQHLVDNNKKPLQAVCAVMRKLLHAIHGMLKNDTPFDNTRFYAIPAVAK

SEQ ID NO: 257385 - protein, 338 aa, unidentified
MAIVTVGIDLAKNVFAVHGVDESGKPALVRPEVPRAKLLELIASLPPCSIGMEACSGAHHWAREFGKFGHTVRMMAPKFVAPYRMSGKRGKNDAADAAAICEAVTRPNMRFVPAKSLDQQSRLFVHRARQGYVEQRTALINRIRGLLSELGIVLPLKAATVRREAHEHLEDLPGWCNTVVGDMLSELTHLDERIGQYDKHIAQAAQEDSQAKQLMRLTGVGPTTASAIVATVGKGHDFTCGRQFCAWLGLVPGQYSSGGKQRLGRITKAGDPYLRTLLIMGGRAVLSAAKNKTDPLSRWAVSVQERRGYWKAVVAIAAKNARMCWAMLARGEAFRMPA

SEQ ID NO: 257386 - protein, 368 aa, unidentified
MGAIGIDTHKATLAACAVDALGMAHAERTFDNDPAGHRALLEWARAADPDAVIGVEGSASFGAPAARFLIAAGRSVREVPPQLARRERIRTRRAGKSDPGDALAIARVTLRESDLPPVRLTDRSLEIQLLVAAREDVVEEMTRVRNRLHADLRVLVPGYGASATSLTTVRHQRTVARLLRGLAGVQAELARGRLGRLRALGTDEHALAAQIGTRVDGHPLLVLPGAGALVTAKLVGEVGDVRRFRSADAFAALAGVAPIPASSGQTQRMRLNRGGNRQLNRALYTIALSQAFHHPTGDGVHRAAAGRGQDLARGPPGPQTPARSDRLPVAPGRRQIGGTRRLTTSQELGLPGVGPGTGMLPARSRPMR

SEQ ID NO: 257387 - protein, 399 aa, unidentified
MNKSIHYIGLDVHKETIAVSIAPQHSTEVRRYGIIGGTLDAVDKLVKKLAPPLPDGQEVELRLVYEAGPCGFVLCRHLRHKGFDCEVIAPSLIPKKTSDHVKTNRRDADQLARLHRAGELTAIHIPDQEDEAIRDLVRARYSAITDQKQARNRLKGFLLRLGYRYTGKSSWNDAHKRYLSGLVMPQAAQQIAFQEYIHAIDDSTDRLARLTQAVEDAVTGWKWEPVVRALMSLRGVQVLTAMTLVAEVGDFSRFEDPRSLMHFFGLTPSEHSSGDKRVQGGITRCGNSHCRRVLTEAAWQYRLKPKVSEAIQKRQEHQSKEVRLIAWKAQERLNKRFKLLAAKKKSVIAATAIARELTGFVWAIACQVKPARAALPEVIRTCRGKVYQLDASKKLEQAQ

SEQ ID NO: 257388 - protein, 340 aa, unidentified
MQIAVLGVDLGKNSCSIVGLDDGGAVVLRRRMRREGVIKLAAKLKPCVVAMEACCGAHHLGRVLRALGHEVRLMSPEYVRPYVKSQKNDDRDAEAIAEAATRPTMRFVALKSEEQLDMQTLHRARDRLVGERTALINQLRAVLLERGITVAQGRRQLERHLAGLDAQGGLSQRMRVLIEDMRAQWGELDRRVAELDKELAEWARNEEAARRLMTIPGIGVLNATALIAAIGQAESFVRGRDLAAWLGLVPRQVTTGGKPRLVGISKRGNKYLRKLLIHGARAALPTLLTSSTPLGAWLRGLVARMHKNAAVVALANKLARMAWAVLRHGETFRLAVSATA

SEQ ID NO: 257389 - protein, 334 aa, unidentified
MEKITTVGVDVAKVVFTVHGVDAAGRTVLRKTVRREKLMELITSLPPCLIGMEACAGAHEWARRFIPHGHRVGIMMARFVKAYRKSSKNDRNDAEAICEAVGRPNMRFVPVKSAEQQAILALHRVREGFIEERTATINRIRGLLGEFGVVLPQRAEQVRRGAVVAAEALPVLAREAVADLRAHLRYLDARINHYERQLLALTKTQQAAQRLQGIPGVGPLTASAITASIASGHEFANARQFAAWLGLVPRQYSTGGKAKLGRITKRGDAYLRTLLMLGARAVLQSAAQKTDRLSRWAMALRLRRGHHRAIIAVAAKNARIIWALLARNQDFAIA

SEQ ID NO: 257390 - protein, 405 aa, unidentified
MQVYIGIDWSESKHDVVAMNAAGAVLAQLTIPHSIEGFLQLTDLQEKLGMHSEDCLIGLETAHNLIIDFLWSRGFGQVFVVPPRVVKSSRTRFRHSAARTDLSDALVIADCLRTDRGRMQPWHPDSLLTQQIRAKVSLIHHLTRGIGRLYNRLRDVLLRYYPAALDVFGNQSKVWLAFICAYGSPEKARKLTFEDFRLFARQHRYPKPALLPAAFARLQAPRPTASATIVMVYEDEAHTLARLLFEMKTSKEKALKELKNLFDQHPDAPIFDSLPGAGDLLAPALLAKFGDDRNRFTSPASVQALAGTCPVTDASGKRRVIKFRRACDREFRRITQQWAKASLGKSVWANAYWLKVYSRRGYASHAYRCLANRWLAILWRIWQDGVIYDETYHLQQRAMHSKAYN

SEQ ID NO: 257391 - protein, 326 aa, unidentified
MSKVIGIDISKQTFDVSFREENKLLHEVYANNLKGFKEFIESDYCKSDPIVVMEASGPYYVCFASYLYDHAIKVCVVNPLMVKRFGQMKFYRAKTDKKDASIIMEYGETEMKSLSLWKPETKGVQSLKQMRTTVELLHKQERQSKNQLSAFKSSGFLNHEVERGLKSIIRSLEKTISKIEDQMLVVCNSCYKESLELITSVPCVGEKTAMMLIAITDDFSKFEHYKQLIAYVGFAPRVYQSGTSVRGKGHICKMGKSQTRKLLYMCSWTAKRYNKTCREMYERLKAKGKPERVIKVAIANKLLKQVFAVATSKQKYIENYQPNICF

SEQ ID NO: 257392 - protein, 414 aa, unidentified
MKSCLFVGIDTHKDSHTAAVLDGYFGVLATITFDNSSTGFTGFEGKLKKLSRGRDLVFGLEDSQGLGSFLASYLSGKGYVALEINPVTTDRGRKHTVSHDKSDERDAVVIAKTLIRERASLHPVRIDRNGVAIREMTGYRQMLVGESTRIKNRLHMVLFNQYKGVLSCFKDPFRKCALAFFLRYPAPSSLKEADPDSLSDFLKANSKGMFSREKARAILSSTDNSITDSLTDARAHIITAHIERLLGIGKELKKIQDVLEGLVKASSYYCLTSIPGIDIVTAAKIISGVMDISRFSSASKLAKFCSIAPSERSTGKKKRYEKSKYGNKSLRSTIYFVALSHISRTRDGRDKNPISRAYYLKKISEGKTKKEALTCLTRRLVDIIFAIMRDRSIYNFSKSRFIKQRDTELDSAAA

SEQ ID NO: 257393 - protein, 457 aa, unidentified
MQSFYLGSDVSKGYADFVILDSRKQQVMKNFQLDDTFEGQCHLYDILSQFMAAHSGTVLFAAVESTGGYENNWYNTLVKFQSTLNIQTARLNPLGVMYNSKADLKRNNTDKISAQSIAEYLITHPEKVTYQQEDQMASLRKQWGFIRMLTKQSTQLLNQLESLLYIANTELLAYCKDGTPDWVLKVLLKYPTAARLARTRVPVLARIPYVTSERAQELVISAKQSVSSASDRITEKLVSATVKQILNLKKTIDEQTKLMSKECSISEVDILKTFTGISDSSAIGLILEIQAIERFKTVKRLASFFGIHPVYKISGDGSGGFRMSKKGRKEPRKILFMVALTAIRSNPLIRNIYLERTEKGMEKMAAIGLCMHKILRIIYGMLKHGKPFDPQIDLNNRQRSFKKKPANQMNESRRFQDYDSSAPISRRQNKKRLERKPSNSVNDTKFGIDTPVPELVS

SEQ ID NO: 257394 - protein, 339 aa, unidentified
MSIIGCDLHSRYQVIAVVDTDTGEMVTRRLEHENGEARTFYAGLPKPSLIGIEATGYTQWFERLVAELGHELWVGDAAEIRARAVRRQKTDTRDAEHLLDLLLTKRFPRLWVPTPEERDARQLLKHRNKLVRMQTSVRNQLHFLAMSQGVCRKQKLWSARGRAELEGLSLGPWASQRRKELLQLLDGLGPRIEELDGAVKTEAERRPEAVELMKHKGVGPVTALSFVLTVGPVARFANSRKLVSYLGLNPGEDSSGGHQRLGHISKQGNEMLRWLLVEAGHGAAQFDPELRRKYQRLVFRRGRNVAKVALARHLAVRLYWTLRQASSATPPVRTPGSPR

SEQ ID NO: 257395 - protein, 411 aa, unidentified
MYYVGIDIAKSFHVVSIIDDEETKVINKPFKINNDLNGFEKLLTILDSVTLDKDDFLIGLEATGIYGENLLEFLKSKGYSVKLLNPFQTSRYREQITMKKVKNDNIDSLVIALFLKDGKYSSGYVTDDEYQSLRTLYRNRTSIQSDMKEVKKRILTQITVTFPEFESFINPFTISGLALLDKYPTAHHYKHSSVDRIMKVFAHIQGNNFNKDKALKLLELSRESIYSGKAKDARAIAIRSTIRLLKMYLSELDIIEAEIVALLNKKGIDDQTLDELPTKNSLINNLKTIPGVSDTTIAAVISECGDLTRFPSIPKFIGYLGLFPTENSSGNSKSIGHLSKRGSSLVKHALYMSATSCLIHNKQMKQLYDTKRSQGKSKKESLIAVSRKLATIIYSIFKYNTPYNPNRVFTN

SEQ ID NO: 257396 - protein, 342 aa, unidentified
MEHFAGLDVSVKDTSVCIVDDTGRIVREVKVASEPEALLAVLENPAYHFKRIGLEAGPLSQWLFSALVEAGLPVICVETRHMRAVLKAQINKTDRNDARGMAQMMRVGLYRPVHVKTLRSQKLRMLLTHRKLLQSKAIAIDNDLRGTLRNFGLKVGMVGKVKFEARIRELVENLPDLAVLVEPLLIVRRTLREQFCILHRRLLAIVRDDEVCQRLMTTPGVGPVVSLTYRATVDVPARFRKSKSVGAVFGLTCAKYQSGEVDWDGRISRCGDEMMRTMLYEAAQAMMRSKKWSWLKAWAMQIARRRGMKKAIVALARRLAVIMHRIWVDGSEFRWTREAAAA

SEQ ID NO: 257397 - protein, 400 aa, unidentified
MPMLSIGIDVSKGKSTVCGMKPGGEIVYAPFEVQHTRKEMSELVSLLRGSGEEVRAVLESTGSYHCPVVAALLENGIFVSVVNSLRMKRFCSQSIRRVKTDQIDAMQIALYGLAYWQELQPTRLPENTYRELQLLARQYYQMTSLLIKAKVDFNALCDQVLPGMQELMSDHAGRHKLSDFVLRYRHTTHILEMGETRFRKDYCKWAEKKGYRNCERMAVLIFATAQNGIPVLPNAPSTQIVITEAIRVLHTVEASRDAILTQMQALAKTLPEYSLVREMPCIGDTLAPRLIAEIGDVRRFHSKRALIAYAGIDAPPYQSGKFCANNRHISKRGNRYLRKTGYEVMQSYVMHKPANDPIFTFIEKKRSEGKSGKLAMVAGLNKFLRVYYGKVTELYRSLPQ

SEQ ID NO: 257398 - protein, 343 aa, unidentified
MDHFAGLDVSVKETSVCIVDETGKIVREVKVASEPDALVAVLTSPSYHFKRIGLEAGPLSQWLYNALAEAGLPVICVETRHMRAVLKAQINKTDRNDARGMAQMMRVGLYRPVHVKTLRSQKLRMLLTHRKLLQSKAIAIDNDLRGTLRNFGLKVGMVGTAKFEARIKELVENLPDLAMLVEPLLVVRRVLREQIGVLHRRLLAIVRADDVCRRLMTVPGVGPVVALTYRATVDVPARFRNSKAVGAVFGLTPSRHQSGESDRPGSVSRCGDEMMRMMLYEAAQTMLVVSTKWSWLKAWAMKIARHRGMKKAIVALARRLAVIMHRIWVDGTEFQWTREVTAA

SEQ ID NO: 257399 - protein, 314 aa, unidentified
MRTQVFVGIDVSKAQLDVAFRPEGRVSVPNDEAGCAQVLERLRAVPPTLVVLEATGGLEIPLTGVLAAAGVPVVVVNPRQVRDFAKATGRLAKTDTLDAQTLAHFAEVMRPELRPLPDEQTQALAAILARRRQLVEMLTAEKNRLGSAPKPVRKSLRTHIAWLERELTHTDSNLAHAIRESPVWREKDALLRSTPGVGPVMTTTLLANLPELGTLTGKQIAALAGVAPLNRDSGTWRGKRTVWGGRAQIRATLYMAALVAARFNPVIRAFYQRLCATGKAQKVALTACMRKLLIILNAMLKHRTPWRTELVPCA

SEQ ID NO: 257400 - protein, 414 aa, unidentified
MPNVQVDSLFANLSMEGVRIMDVLYHRCAGLDVHTETIVVCALLGEEDHIQKEIETFPTFTKDLFRLLKWLEDRGVTHIAMESTGVYWKPVFNILEDYFDITLANAQRIKNVPGRKTDVSDAEWIAKLLRYGLIEKSFVPPADIRELRDLTRLRKKWIGQLTVEKNRIQKVLECSNIKLSSVISDIFGVSGRKLLERLMKQGYIEEPEIDACIHGRMKGKRQQIQDSLFGTLTEHQLFMIRQSWKHIESLESLLREIEERIDQLLQAYKQEMELLVTIPGVKKETAAVIIAEIGVDIGQFPTSQHLASWAGVAPGNHESAGKRKSTRTTKGNPHIKSALCEAAWALLDAGINDWQRNIGHWRHAGERKKHSLRWRTECLQSFTACFLEKNRFENSQPISITKKTKNYTRYLKIR

SEQ ID NO: 257401 - protein, 323 aa, unidentified
MSQPNPLCVGIDVSKTTLDIATANNEFAQFTAGNDTDGFELIIAELRKHSVALVLMEATGGLEAAVACSLQAEGFDIAVINPRQVRNFSRAMGYLAKTDRIDAKVLSQMAEVINRHPERERFIKAIPDAERQILAAMVVRRRQLITMLVAERNRLHPAHPQNRKSINTIIKALEDELSRIDEAMNNHIKTHFKELAARLSSIKGVGAMTVATLLSEVPELGSLSRREISALIGVAPVNRDSGTMRGRRTIFGGRAGVRTALYMAALVATRFNPVIKDFYTRLITAGKVRKVALVACMRKLLTILNAMIRKNEEWSDSYHKFSL

SEQ ID NO: 257402 - protein, 349 aa, unidentified
MHFNTFLFFLNFKCMKNYELHVGIDISKLKLDVSFITDPSKKEHDHLIVSNNKTGLMQLVKAIKKRHTRMSEVLICFENTGIYGMLLAMFLSEQKIDYSMVAALEIKRSKGITRGKNDKADARDIALYAITHKHKLSLYQLPDGDIMKLQVLHTQREKLMKCILSLSMTSENEGFLQKEIVKEVQGISNSGIKKLKELLKQTEDRMMEIIKANEQMKEQYELATSVPGVGQHVAIALILTTRGFSAFDEWRKLACYVGIAPFEYSSGSSIRGKTKVSRVANKKLKGLLNMSALAAKRSDKEIADYYKKKVAEGKNKMSVLNAIRCKVVARVFATVQRGTPYVNTQKFAA

SEQ ID NO: 257403 - protein, 390 aa, unidentified
MDVLYQSCAGIDVHQANIVVCILHGPLTSTRPKREMATFDTTTKGLCACHDFLSQFHVEAVGMESTGVYWRPVWHALCDDFELILAQPAHMKAIPGQKTDKKDAHWIAKLTRIGLLPRSFVPDEIIQELRELTRQRKHYVESRNRETNRIHKILQSGGIKLTTYIEDIMGLSGRNLLQLLVDRTPITPRIVHQSVYTSLKKKVPQLLEALDGYFSDHHRFMLKQSLEIYDFYQKQIELLEERINVYLSQYENHVEILDSIPGIDVITASVIISEVGVDMSQFPTAGHLASWAGLCPGNNESAGKKRSTKIRHGNSYLKKCLCQAAFAVKKQKGSPLADRFYQIQSRRGSQKATIALAHQLLKIAYILLKEQITYPEFLAQKKTTRDELVA

SEQ ID NO: 257404 - protein, 343 aa, unidentified
MQGVTTIGLDIAKSVFQVHGVDALGTVVIRRQLKRRYVLAFFEKLSPCLVGIEACASSHHWSRELKALGHSVRLMPPAYVKPYVKRQKNDAADAEAICEAVSRANMRFVATKTPEQQSCLMLHRTRHLFIRQQTAVINAIRAHLAEFGVVAPVGRRGVEALLEVVADSDDERVPEVARACVGALGAQLRMLKAQILAFDRQIMAWHRSNETSKRLDEIPGVGPALATALVASVADPKAFRSGRNFSAWVGLVPKQHSSGGKGRLGSISKQGDRYLRSLFTAGALAVIRYAKIHGTKHRPWLTALLARRPTKVAAIALANKIARMAWAMMAKGERYKEPAALAA

SEQ ID NO: 257405 - protein, 520 aa, unidentified
MATSRTRRRPGPRRTVATVGKPRGVLHPRVQQVGPDHFGIVCFDCAKARSKFLLADFYGRVLIPPTTVAHNRPDLDDAVAQVRQAFASHQLHDGLVAIERTGRYHRLVQRTFAAAGFETRILHPFVTKQYRQPVDPGTKTDDTDLSALHRATVTGCALLEGARDEAWTTLQLVIRHRRDLVRKGAALNCQIRDHLEAALPGYAACFDKLWESQIPWHLLRHYPTAQQLRTAGVTTLCHSLRQAGIRFQRRTVQAVLDWAEQAAPGDIAAAQHHRIALALYDDRQRKTQEIQALEGESAGRLAQTPYVLLLSFPGINVVSAADFAGEMGPIEHYANAKSITGRAGLRPSRYQSDQVDKANGPLVRNCNRSLRAAILGIADNLILCNHHFQALATQWARQGKDPRDTHVRVGLRFCRIAFQMVAGRQVFRHPCIQGRHAILDKLTAFHRAHDTPLPEVLRDLQAAIGQLPPREFAAEARPLQEELQRIQDGRRRGPQRLGDILPLVLARLGVGAVQSTESGE

SEQ ID NO: 257406 - protein, 465 aa, unidentified
MKKESNQRMKDKRLKGHLDCVNLFAAGIDIGSTSHFVAVPQELDARFVREFSCFTKDLIRLADWLDQLGIQTVAMESTGIYWIPIYEMLEERGLEVLLVNAHHVKNVPGRKSDVQDCQWIQQLHTHGLLRGCFRTPEKGIALRAYMRQRETLVRKASEPIQHMQKALRQMNLLLDNVVTDITGKTGMGIINAILGGEHDPVKLAKLRDGRCKHNEETIAASLEGHYREEHLFSLQQAVEIYNFYQQQIFACDAVIENELASLESKGNQTGTPATSKKRKNKSSLNFDVHSELYRLTGVDLTSIDGMNENSVLKVLAETGTDMSHWQTEKHFSSWLGLSPNNKITGGKVLSSKTKPTANRAAAAFRMSAYTLHGSNSALGAFYRRQRTRLGAPKAITATAHKLARTFYSMLKNGTEYVDHGKEYYERQYENRVLKNLKKRATSLGFKLVPNIDQGDINKDLAISAN

SEQ ID NO: 257407 - protein, 342 aa, unidentified
MENVILVVGIDISKDDFHVCAKEKTADGNAKVKGSRSFKNNDKGFAELALWVLKREKSGGSVRYIMEATGSYYEDLAYYLYEAGNRVSVVLANKIKHFAKSLNVKTKTDKVDSAVIAEIGVEREMPEWKPMSSKYKELRDLCREMLSLKKEKSRAMCQLHAMNYSHDKTPSVVKIKKSQIDFYEESILEIEAELERLVNADPELKHRIDKIQKVKGLKMNTIIVVLCETNGFEMFESIRQVVSYAGLDVVMKESGNFKGKTKISKKGNNRIRQCLFMPAMSAIQHNAKIKDLYCRIVERNPDIKRKGVVAGMRKLLILIFVLWKKNEEYDPNYVWQKNDIGK

SEQ ID NO: 257408 - protein, 367 aa, unidentified
MDHFAGLDVSVKDTSVCIVDDAGRIIREVKVASEPDALLAVLTNRIYHFKRIGLEAGPLSQWLFSALAEAELPVICVETRHMRAVLKAQINKTDRNDARGIAQMMRVGLYRPVHVKTLRSQKLRMLLTHRKLLQSKAIAVDNDLRGTLRNFGLKVGMVGTAKFEARIRELVENLPDLAVLVEPLLVVRRVLREQIGILHRRLLAIVRDDEVCRRLMTVPGVGPVVALTYRTTVDVPARFRKSKSVGAVFGLTCSRDQSGERDRPGAISRCGDEMMRAMLYEAAQSMLGRSSRWSWLKAWATQIAKRRGMKKAIVALARRLAVIMHRIYGPAVRCKGIRTEWSFWSALIYPASRGSSCSGPSWLSAHT

SEQ ID NO: 257409 - protein, 389 aa, unidentified
MERPMQKLNDLSRSPSPLDPDGTLIAVIELSLSSWLVAGIVPGVERQPLKKLAVDESTLLKLLHRWREEAAKAGHRIKRIAVAFEAGRDGFWLARWLSARDIEAHVIHASSVAVSREHRRAKTDRLDTELLKRSFLGWLRGERDHCKMVAIPTTKDEDAKRPNREHESLVGEQSRIVNRMKAALIRLGIRGFNPKLKKAAERLDGLRTPEGEPIPPNTLAELRRDMVRRRLVSDQIRQIEDARLERLKQAPNDGPHAMVRLLARVIGVGVETADMLVQEVLSRSMRDRRAVARYAGLTGSPDESGRRRREKGLTRSGNARVRRGMIQLAWRFLMFQKDSTLAQWFRARTESARGTRKTMIVALARKLLIALWRLVREGVVPDGVVLRPA

SEQ ID NO: 257410 - protein, 364 aa, unidentified
MQKHIFVGIDLGDKNSVARIGVDRNKSERLSFINTRAGRARLFREVIGRSQQAESAKIIMAYEASSCGFILRDEAVARGIACEVLAPTKMDKSVEQRMQKTDDRDGEDVLEKLRGHVLAGNRLPTVWIPDAQTREDRELVRTRLEIGEKLTQVKTQIQMLLKRQGVEKPSEIRGNWTHPYRRWLEALVADSTWGWGARESLASLLRQLDGIESELKKLDKRIQQMSRAERHKPIVESLMKEKGVGLLTALVYRTEIGSAGRFRRGRHVGKYVGLTPTSHESGQQQDRKGHISRQGSPRLRKVLCQAGWVHVRYDPYARDLHVRLVAKNPKKKKIALVAVMRRLAVRLWHRMREAELEIAATAVN

SEQ ID NO: 257411 - protein, 413 aa, unidentified
MSMYFVGIDISKYKHDCCIISAADQQIVSKFTVKNDKDGFEHLLTTLNSLSNPEDIKIGFESTAHYALNLELFLENAHHSFMEVNPVLIKEYKKSTTLRRTKTDSVDCESIARWLMTVEYKPHSKGFYHAYSLKSLTRLRDKLIRQRSFYLIKITNVLDHTFPEFKPFFNERLSKTALYLLENYGSAEKMARMNSASYEKLRSLSRGKFSPQQFLRLKELAANTVGVNNSIFDVELNSLLSLYKSLVKEINTIEKEINKLIEEVHPHYMSVPGIGPLSAAVIYSEYGDISNFTNPGQMLAFAGIEPGINESGTESHGGKMVKHGSSQLRYTLINWNFTYLDNGNVNFPDNKKYSRSKPTIIRIPPTTLMPIRLTLLFFIILFAKTNSSAPTTIIKTDINGYMSFLLSNSDLLS

SEQ ID NO: 257412 - protein, 402 aa, unidentified
MKVCGLDVHKDSIFCSIYDGKTTSEVKIFDSTTRAIYEMGEHLMTERVKRVAMESTSIYWIPVWNILLEMGFELTLVNPFLIKQMPGRKSDVKDAQWIATLLHKNLIRGSVIPNSTIQELRFYTRKYMKLQQDKCKLLTKMDRIMVMANIRISSCVSKLTNKSVIMVIDALIKGETNPDNLMKLVYGNTKNKQSGKLREALTGYIKDHHRKVLKWEKEIYDNLERQTIEYVEEMECICEEHYKDEMVLLQSLPGVSKITAICLIAETGADMSVFENSGKLTGWAGLRPRNDESAGKFKSKAITKGNKYLRVVLIQVAWAASRTKGSYFMEKYHRLSMRKSNKKAVVAIGRKILVIIWNMLKEKKPYNPNLVCIYDPIKIERKLLYHRKEMEKAAKLLHKEII

SEQ ID NO: 257413 - protein, 440 aa, unidentified
MIDTNQNKEIEFAAFVGIDWADLKHAWALQIPGHLEVERGDLDHTPQAVEDWAAELGRRFGGRPIAVALEQSRGSLLFMLTKYAHLVLFPVHPTTLYDYRKGFRPSGAKSDPSDAGLLVDLLVRHREKLRRLNPDTEQTRTLQFLVEARRKFVSDKTRYSNRLTAYLKMYFPQVLGWFSEVTSPIAGDFLERWPSLQKVQKARPETLRKFFLQRHSCTLDNVDRRLEEIRSALTATHDVAVACSCSAAVLALVRIVRTVRDAILSYDQQIETLARQHPDFAIIDSLPGAGPALVPRLIAALGTQRDRYQSASELQSYSGIAPVLASSGKQHWVHWRWACPKFVRQTFHEWAAHSIGSSAWAKAYYEQQRANGKPRNTVVRALAFKWIRILFRCWKDRKPYREDFYREALARHQQRASKRTPVQLQWKTCAGFSKITAITS

SEQ ID NO: 257414 - protein, 338 aa, unidentified
MTLIGIDIGKHTFHLHAQDKFGKEVMRKKCSRQQMMRFLANHPPCTVVMEACAGSHCLAREIKAMDHEAKLISPQFVKPFVKSNKNDFVDAQAICEAASRPSMRFVTPKSPEQQTLSVSHRMRESLIRDRTKTVNQMHGFLLEFGVSLPTGLAVVKRLASVLEEHDLPIRLVALLQRLHDHFVYLSEQIKVLDKELESQLADDDLGSRLLSMPCVGPITASLLAVEMGDARQYGSSRDFAASVGLVPRQYSTGGRPALLGISKRGDKNLRHLLVLCARVYMLRLKYQKGPLADWVRSLLARRHSNVVACALANKLARIAWAIATRHTQYKTEPDAINA

SEQ ID NO: 257415 - protein, 304 aa, unidentified
MNGIGIDVSKRQLDVGTTDGETLQVCNNRSGFSELDVWLKKRPVSQIVLEATGGYERPVLDFLHAVGHPVVRANALRARRLAQGMGQMAKTDRLDAYALAQMAALVKLPAYQPLEPWQQKMREFVRARRQAMHARTIARQQLEMVGDRELRRLLQANITRLQTLVERLGKQIAEQVTQQPQLAVLKSMKGVGPGLQAVLASYLPELGKISGKAIASLVGVAPMSHDSGTMRGKRSIHGGRAEIRQVLYMASMSAMRHEPQLRDFYQSLRARGKEGKVAIVAVMRKMLVILNARVRDAENGLVPA

SEQ ID NO: 257416 - protein, 331 aa, unidentified
MPPISSHLLTNPLRTCLGLDIAKAKLDACLLHDGHIHHAQFENTPQGLGALRAWSKKHGAPTAFTVLEATGRYSELAAATLHAAGHCVHLANPRRIKDHAKSLGRRNKTDRLDAALIASFGLTRSLPAWQPPAPAQAQLRALLRRLSDLESLLQAERNRTEASGDPLLAKSFQRLQRALAKECTALEAQIGQHLHASPELQADIDRLTAIEGIGQRSARWLCAELPRHLPNARAAAAWLGVTPRLRHSGSSLHHTASPGPEGNRHLRRVLFMAAMVARRHNPRLKRFADNLALAGKAKMSVLIALLHKLLKISFAILKSNSTYDPAHHAKN

SEQ ID NO: 257417 - protein, 473 aa, unidentified
MKNNNTKSSNITAISNPLKNINPNVAGVDIGAGSIYICAPISSEKLEVREFLTVTADLKAAAKWLKTCKVTSVAMESTGSYWIPTFEIFEEAGLEVVLANAYHLKAVPGRKTDVKDCQWIQHLHSLGLLRGSFRPKKDAVEFRAYVRQRSKLIELLSMQAQLMNKALIQMNIRLDRVLSDITGVSGFAIIRAIVAGERDPKKLALHRNYRCSKTTEEVILALEGNFRSEHIFALKQALESHDFLKNQISECEQEIKKHLDIWNAEQEKQNAVKSPADTDNKVNIVQAEQTQKTKKLSKNAYDFNADELITNACGVDLTKVPGIDTSTAIKIISEIGRDVSAWGTAKQFASWMGLCPGNKISGGRILSGRIVPTKNRVKQAFLMAASTLHHSTSALGAFYRRMRSRLGAPKAVTATAHKLATIVYNMLKNGSEFYEIGQEAYEKRYEKRTIANLKANAAKFGYVVVKAEQKSVA

SEQ ID NO: 257418 - protein, 352 aa, unidentified
MVIVGIDAHSQSHTAAAVNEQGRALATLEVGASPRELDRLITWIEQLGEVKIVAIEGAKGFGLPITRRLLGGVVEVVDIPTHLTALGRRSSRSRGKDDAADAVTIARMALREPGLPRLRPSHLASDLKLLVDARDQLVAEGTRIRNRLHALLLALAPGYRVETGALSSRVALRTARRLVRAGEATDPIRARLALGAIRRLKAIDAEAAELEHEIAGMVEATGATSLRAICGVGPIVAGKILGETHDVDRFPSAAAFAAHSGVSPIPASSGTTTRHRLNRGGNRQLNRALFTIAMVQARWDSQGRTYLARKRAEGKTPSEARRCLMRQLAGVVYRAMVVDAAARQQDRLSGVA

SEQ ID NO: 257419 - protein, 347 aa, unidentified
MRFYTQQHKQYCGIDLHARKMYVCIISNRGKVKVHQNIKTDPELFFELIFPYLDDLIVGVECVFCWYWLADFCAKHHIPFTLGHALYMKAIHGGKTKNDRIDSYKIASLLKGGNFPIAYPYPAKWRATRDLLRRRMYLSRRCAELVAHIQNTNTQYNLPVFKKKLSRKYNHDGVAERFQDPAVRKSVEVDLAVIAALNQILNQLEWHIEKTARQHDYHTLFLLRSIPGVGQILALVILYEIHDIKRFARVQDFSSYARLIKPVKESDGKWAGHSKKKIGNHHLKWAIKEAAVLMLRTSHEAKYYVRKLEHRYNKGKAMGIFAHKLGRAIYFMLKNKEAFDMKRFFAQ

SEQ ID NO: 257420 - protein, 412 aa, unidentified
MNVRVERACGIDVHKSFLVATMLTCEGVKETKEFNTGLEDLINLREWIMERHCQRVAVESTGIYWTPLYTCLEGKVETIVANPRFIKNIPGRKTDYLDSEWIAELCLNGQIKPSFIPSKEIRELRDLTRTRTKMIQTRTAFKNRVHKVLQRANIRISVVLSDIFGIAGLQILNGILNGKSIDDVLKDVKRINKKKAAIKEAICGELSQADVFVIRECLETIAFLQGKIDQLDSMINQSIEKVKKKDQMEILMSIPGISFTSASAIVAEIGDINVFPFPKSLVGWSGLAPSLDESAGKSSNGHITKKGSKYLRRMLVQCANAIADGRPNKLRFFFQRILMKKGRKIAIVALARKLLSITHHLLKNNEKYNEEDLKPKQVRVPKFKVISEFSIDEMIKIISNSGYTVDKRSSNC

SEQ ID NO: 257421 - protein, 368 aa, unidentified
MKKRITFVGLDTHKNSIEVALADDGRNTEVRLYGSIGGDLASLDKMIRKLQATGTELRFVYEAGPCGYQIYRHLRAQGLQCDVVAPSMVPKRSGDRIKTDRRDACNLARLYRAGELTAIYVPQEDDEAMRDLVRGRQDAVNAQRKVRQQLGGFLLRHGFRYPGKCAWTLAHRRWLAGVRMAHPAQQIMLQEYIHSVEECTQRVHRLTEQILQLMPDWRMRPLVGALQALRGVAPVVAATAVAEIGPMGRFERPRQLMAYLGLVPSESSSGGSVRRGAITKTGNGHARRALIEAAQAYSHPARISRVMLKRQEAVPEPIRQIAWKAQLRLCARFRKLTARGKSRNRVVTAIARELSGFMWAIAKQVPVP

SEQ ID NO: 257422 - protein, 342 aa, unidentified
MQITTIGLDIAKNVFQVHGIDAAEKVVVRKQLRRSKVIAFFEALPPCLVGMEACASAHYWARELRKLGHEVRLMPAKDVKAYVKRNKNDAVDAEASCEAVRRPTMRFVGVKSAEQQGRLMQHRTRDLLLRQRTQVINALRAHLAELGIVAAQGREGLKELLAVIADEKDDRLPIDARASLMVLAAQLQALQTMIGSIEKRIIAQHRASEESKRVATIPGIGTLGASAITATVTDPSAFRSGRDFAAWIGLVPRQDSTGGKQKLGPISKQGDRYLRRLLVVGAIAVLRHAKQNPEQYPWLTQLLARRPFKVVAVALANKMARMAWALLAKGGTYRALALAAAA

SEQ ID NO: 257423 - protein, 355 aa, unidentified
MSMVRTVIGGVDTHADVHVAAAIDSAGGLLGIESFGADAAGYEELLGWLAGFGRVALVGVEGTGSWGVGLARFLDDQDIETVEVDRPNRQQRRKRGKSDPIDAEAAARAALSGEASVTPKTRNGPVEQMRVLLVARRSARQQRIQTLNQLRHLVFCAPEPIQLRFKDRAKTGLVSEAAAMKPRNGSDPVTFTTNTVIRSLARRIQHFNTEMASIDGMLSELVTETAPSLLELHGVGVDSAASLLVTAGDNPERLRSEGSWAHLCGVAPLPASTGKNIRHRLNRGGDRHANAALYRIVLTRMSNHPETRRYVTRRRAEGRNTTEIMRSLKRYVARHVFKQLPRLAQIWVGSDPITG

SEQ ID NO: 257424 - protein, 344 aa, unidentified
MTYYTGIDVSLRSVSICIVDDRGEVCLETKVEAEIDAIVDRLRRFSSEVKSVGFEAGTLTQYLTYGLQAAGFEVICLEARQVSVTLAAMRNKTDRNDARGLAQILRTGWYRRVHVKSLHSHQVRALLASRKVILKKCVDLENELRGLLKVFGIRLPSRVGHGSFDAQLRETVSTHEMLACALVPLLDARTVLYKTYLKLDNAVKGLVRVDPICRRLMSIPGVGPVTALTFKAAVDDPNRFKSSRTVAAHFGLTPRRFQSGEVDNPGHISRAGDADVRSALYVAAHSLLTRNAQWSTLKAWGVRLAKTRGHRRAVIAVARKLAVILHRMWIDGSEFRWGAGETAA

SEQ ID NO: 257425 - protein, 319 aa, unidentified
MMKNLYIGIDVAKDKLDICIYDNKSVDTLQIFNNETSILGLIDYLKSTYKKFTFSFGYEATSTYMNILKKVIHDCGYNQIMINPYQMSHYLKHLDSRNKTDIKDSIGIAKYIATLESDDFKTTYDSNYLLFQKHNTTIDLLSKISTQLKNLFKSQKNIQSVLLDESISALQKQIITLKKQIEKNATELMFDIFPQTRKIIEEISGVGSSLMLQLVPIFLSAKNYTIKQLQSYIGLSPRLFESGKSVKKLVVMSKRGCGLVRKKLYLSAMSAIRYNEIIKEKYQRLIENGKQKMVALVACMCHLFRAVFIKFNEYSLSSK

SEQ ID NO: 257426 - protein, 465 aa, unidentified
MCGGVRTESAQFKQEVIPVKKKRSYRAKEINAVSVAKVIEGREGQRAVVGIDVGKEDLSLMLRWDDGSYAGPWRAKNKTEIRVVVEFLTCLAHNRRLIVALEPTGTYGDPLRYALTQAGLDAHRVQGKAAHDYAEIFDGVPSQHDCKDAGVVADLAALGKSTPWPCEAESLEDQERTYWVQRLDAEQQMAQIWTGRLEALLARHWPEVTGLLKLGSITLLKMLAHYGSPAKLALDSQAAARLARWGGPLLPPEKIAALLASARETVGIPPGKYEEQWLQECANGLLAARRVKQKAKRELKRLSERNPMLGRLAAAVGYGTASVLWVQLGSPQSYHCGEAYRKAMGLNLKERSSGKYKGQLRITKRGPGAVRRWMYLASMRLLRETEVHRWFEAKKARDAGRGGKALVGVMRRLAVALYRVAVDGAAFDAAKMFPGKPLKQTNPSAQARQKGPPLRAFAFASVQRK

SEQ ID NO: 257427 - protein, 318 aa, unidentified
MNTKTNQNINIGVDTGKFQLDIYIRPIDIYFTVSNDEKGIKEAVKIIKKHNPERVVIEATGRLEMPFILACASAKLPFTIANPVHVKRFAGALGQRAKTDKLDAQLIAHYSEAIKPKLSQLKPETMQAMSDLVSRRNQLLTMQTMEKNRLQIMPKELAMTIKPVLTLFKNMILKTEAKIAKLIESCPEYSAKNEILQSMTGIGRIAAASIISNLPELGYINSKQASALIGVAPMNKESGRFKGHRKIQGGRPQVRTVLYMAMMSAMQSNPVFKATYQRLLAAGKPKKVAIIACIRKMIVILNSMLRDGVLWEAPKVIN

SEQ ID NO: 257428 - protein, 431 aa, unidentified
MSKYLNSLVVGIDVASDFSFAAVLAPDGSKYRKPFKIFHTAEGFKYFIEQIKKAEEEFSTKPVFFMESTGVYHLTLFHFLKDNNFETFVINPLVTNCNKNKDIRKVKNDRNDALSIAKLGKFEDIKVSSDSDIKILTLKLLIRDYYKLIDTRSIFKKKLSSSLCITFNGYQNVFSNTCGLVSINILKMFPNPQAIISAPKQDIIDILLNSRKGVNWAEKKYTKLIESAENAQFVSLTSPWLSVSITTSISIYEAIDAEVATLLKKIECFINSDEMSITFRKNILLLMSIPGFGYNTAITILAEIGGIDRFITPKQLVAFFGVDPAVNESGKFKGDKVKMSKRGTRFGRRALYAAALASIRIKRNGEATNQVLLKYYKENLKGKKAKVALVAVMHKLIKYLFAVLRNQQEYQVRDPKLHQKMFLENKIVQVA

SEQ ID NO: 257429 - protein, 300 aa, unidentified
MGPMYYIGLDVHKQKISYCVKDVGGRIQVEGWIPATRFDLDRWMKTLPQPWSAALEATMFSGWIYDHLKPHAAELKVAHPLMLRAIAAAKKKNDRIDANKICDCLRCDFLPECYMAPTAIRERRRTLRYRNLLVRQMVQMKIKISTLLMEAGVSYNKQKLHKAGYFRELLASNPDIDESLRSLLRQCREMVVRLGKMETALIHSLQQDPLLVERVERLMSIPAIGPITALTWALEIGEVQRFSSIKKAISYCGLCGDEATFGELCATHTDLQATQQASADHANRGSQDGPALQPHAGAAV

SEQ ID NO: 257430 - protein, 488 aa, unidentified
MKPKQEEKTKQATWGPTQGNGQHMNRKQRREMTRKIQSEDLSLEVVHPDAAGIDIGNESHYVAVPPTRDREPVRRFGCTTAELKEMAAWLKQCAIRTIAMQSTGVYWIAVYDILEEAGFEVYLVNARETKNLPGRKSDVQESQWLMKLHTYGLLRNSFRPSQEVRTMRTYWRQRNDLVRAAGRHIQRIQKAMTQMNIQLANVLSDVSGVTGQAIIKAILAGERDPHELAAFRDRRVKASEEEIARSLEGNWQEDLLFVLKQEQDGYEFCQKQMAECDERLQQYLKQRKDRSAAANLPEEKRKERLRKKKKGNAPRFDLRAELFRLTGTDLTQIDGIDVMTATTILSETGWDMSKWKTEHHFVSWLRLCPDNKISGDKIIGKGRLPTNNRATSALRMAASTLRLSNTYLGAQFRRLRSRLGAPIAIKAMAAKLARLVYRMLRYGMQFVDKGAEFYDAQHRKLQINYLKWKAANLGLQIIEAPAAEAPAA

SEQ ID NO: 257431 - protein, 344 aa, unidentified
MEQYVGLDVSLREISVCVINDKGTILFEGKTAAEPASLAKLIRAKAPEVVRVGMETGATSPWLFHSLTAVGLPVVCMDARQAHAALSMRPAKSDRSDARGLAEMLRMGWYREVHAKSFTSHERRTMLGARHQLVTMRTELDAQIRGVLKTFGLILGTGNSNVLIRRAEELAEGHPVISGLIAKLAEVRRHVALQVAAIDRDIRRLVRSEPTLKRLMTVPGVGQITALAFLSAVDDPERFKHARDVGPYLGLTPTRYQSGETDRQGRISKRGDTFTRTCLYEAANVLLTKVQRFSPLKAWGMRLVKRIGTRKARIAVARKIAVILHCIWMDGTEFRWTREEVKPA

SEQ ID NO: 257432 - protein, 580 aa, unidentified
MILPNTSDKPVFGVGIDTARYGHHVSFLRPDCQAAAEPMSVMESREGYRQLQQRLELLHQRHPETRLYVRIDAAGQYAANLERFLRQLPLPLEISVGEPARNKAYRQAHFPKRKADVVESLANARYAVIERPPATCEVPAAFAALREVASQLESQVRQSTRLTNRLHNQLARVFPELAVVASSIAAKWVLELLAKYPTPEKIARAQIRSLESIAYIPEGKAAEVQKAAQNSVASLQGDMAEQLVRGLVGQLQQSHAAEKALEKLLEKAFQALPEGGHCQVLTIPGIGIGTAAVLVAKIVSIDRFVTVEQLINYFGVFPEENTSGVDKFGKPVPPGTMCMSRKGNDLVRRYLYMAAMTAVRDNAAARAVYARQRARGKRGDVALGHCMRKLLQQVFAVWASNRPYDPEAYPHRKAQEQADASDKAKAESKAAGRNKGQGPKQKAVTAATLSVEHNQAPVKEMEASAASPASQELHSPQAPVLMDFAAIRRQVTMEQVLSHLGHLGRLVGSGAQRRGPCPLHAEENPRSRSFSVNLDKNVCQCFHPPCGLKGNVLDLWARYHQLPLREAALNLVQTFSLNTP

SEQ ID NO: 257433 - protein, 313 aa, unidentified
MLYVGIDVAKNKHDVTALNVPGKTVLKPLTFSNNKAGFELLDLSLRQLNQDCLIALEDTGHYAFNLLNFLHEQGYEVYTYTPLLIKEFAKSLSLRKTKTDKKDAHGIALKLLSDPNREQFQHDNRQVELKILARHIHRLKKKQSDWKVQYTRCLDIIFPELDKIVGKHSEYTYQLLTRYPNPQKRIEAGFDKLIEIKRLTASKIQDILSVAPRSIGTTSPAREFEIIKHYKRLIDKVEKCVNDLMAEFNSVITTVTGIDNRLGAVILAEIRNIHAFDNPAQLQAFAGLDSSIYQSGQIDLAGRMIKRGSPHLR

SEQ ID NO: 257434 - protein, 542 aa, unidentified
MKLRPCAIQWIFLIGPIGMVAVKVLSSLQHLPLSQHGSGPLLNIDEAYALSYKRILQKPPRAAVPSPEPGRQITMARKSKKHGKSKNRKRQPRTLKTVQPNAAGIDLGSREHWVAGPPLPDGSPNVQHFGTTTPELLRLAGWLDQQEIVTVAMESTGVYWIPLFEILDNRGFDVNLVNARQISHVPGRKTDMIDCQWLQLLHACGLLPGSFRPDDDICRLRALIRERNKVVDNRSDWVRRMQKSLDQMNICVHHAVSDITGVTGMAIIRAIVAGERDPQSLAGLRDPRCRKSEEQIAEELTGNWRPEHLFNLEQALKVYNQLCAVIADYDTEILNYIDSLQPPEANDSSVPPPTTKTKARSIVKRGQEPLRQALYRMSGIDLTTIDGIGVDTAAVVISELGPDLSTFTDEGRFISYLRLAPNISISAGKKVPGKFKAVTSTRVCNALRMAATTLRNSKTALGAYYRRISYRKGASVAVFATARKLAQHIYRLVRYGQAYVDAGAKVYEERFAQRRLKSYTNALKEMGYKVESLTAQEAVGAI

SEQ ID NO: 257435 - protein, 409 aa, unidentified
MDTRVECCAGLDVHQATVVATVRQPDGHGGRQLTTETFETTTRSLLVLREWLQACGVTHVALESTGVYWKPIYYMLEDGFTLLLVNMRHLTHVPGRKSDVKDSEWLAQLLEYGLLRGSLIPPEPMRDLRDLTRYRKKQIQDRTAEINRLYRQLEDAGIKLASVMTDVMGVSGRAILEALLQGTTDPAVLAELARGRLRKKLPALRAALQAPFRRHHAFMVSQILTKIDFLEETMATLTEEIDRQLAPFEATLVRLDTIPGVDRIGATTIFVETAGDMTRFATAGHLCSWAGICPGQDESAGKRRSGKTRKANPYLRAGLIQAGLAASHAKGTALQARYHRVKRHRGHKKAVVATGHQILEIAYYIMREGVTYHELGGDYFDRRPRDRSRQRHLRQLEALGYKVTIEEAA

SEQ ID NO: 257436 - protein, 341 aa, unidentified
MNQVSTVGLDLAKYIFQLHGADSAGAVVFRKKLRRGQLLAFLATLPPCTVAMEACASAHYWGREIAKLGHTVKLIAPAYVKPFVKRQKNDMADAEAICEAAQRPTMRFVALKSANQQAAAVVFRTRDLLVRQRTQTINALRGHLTEFGVIAAKGLVHTSKLIAALEDPASDLPQAARAILAVLVEELRSLDERVAVLDREIARHAKENSVARRLMTIPGIGAVTAAALTALAPPAETFRRGRDFAAWLGLTPVQRSSGGKERLGKTSKMGERSLRRLLIIGASAVARWAARKGVPAGSWLGRMLARKPPMLVRVALANKMARIVWALLAKGGVYRAPVAAV

SEQ ID NO: 257437 - protein, 372 aa, unidentified
MPTNLRYVSFDVHADTIAVAMAEPEGDVRSVGVIPNRAEAVAKLVRKLGPRDSLRVCYEAGPTGFVLYWQLTKLGIACEVIAPSLVPTRAGDRVKTDRRDALNLARCYRAGELTPVHVPDAAHEALRDLVRAREAAKQDQLRARHRLSKFLLRQGRSRPPGMAVWNSRHHAWLTTLRFDQMAQHTAFLVYLHEVDHARDRVQHLETAIAAAITTAPPALRAVIGALQTLRGVRDVVAVTVASEIGSLQRFAHPRLLMGYSGLVPREHSSGRSIHRGGITKTGNAHLRRVMIEAAWAYRHGPSVTGHLRRRQQGQSPQVTALAWQAQRRLCARYRHFVSRGKPTPQIVTAIARELLGFIWAIGREAEQRVAAA

SEQ ID NO: 257438 - protein, 363 aa, unidentified
MNEITTVGVDLAKEVIAVCGADRSGKTVFTRVFRREAFAAWAVQLPPCVFGLEACGAAHHWARWLTSHGHMPRLMAAEFVKPFRKSRAAKNDRNDAEAVLTAVRQPNMRFVAVKSIEQQAYLSWHRMRQGWSEERTALINRLRGLLGEFGVWRGRSAEALTRALPVLEHDEALPLMVRRLLTEARPHLARLDEAIAGCEVEIKNHVKGNAVAKRLTAISGVGPLTAAAVLATVSDARDFKNGRQFAAWQGVVPSQDSSGGKTRLGHITKRGDSYLRGLLTQGARSALQAALTQEPLRRSRLQSWIVQLHARVGYHKTLVAIANKHARMIWAILAKGEDYDPDAWRRWSRTAPSTPPAMCGVTP

SEQ ID NO: 257439 - protein, 341 aa, unidentified
MGEVSMIGLDLAKSVFQAHGADASGGVVFRKRLRRDKLLAFFAGQPRCVVAMEACASSHYWAREIAALGHETRLIPPAYVKPFVKRQKNDMADAEAICEAAQRPTMRFVTPKSAEAQGAAVVFRTRDLLVRQRTQLINALRGHLAEFGFIVRQGSGHVSKLIDLVADPSSELPAEARAVLAVIADSLQAIQARISVLDREIAARAKADPLVRRLMTIPGVGPIVATALVALAPEASTFRRGRDFAAWLGLTPRQHSSGGKERLGRTTKMGERSLRRLLILGASSAAKNAGRDGSRASPWLVGMLARKPRMLVTVALANKMARIVWALMAHGGTYRAPVAAV

SEQ ID NO: 257440 - protein, 352 aa, unidentified
MDIIGLDLHKRESQLCIGHADGRITERRIVTSRERFTAELGDRPRARILLEAATESEWVAQHLEALGHEVIVADPNFAPMYATRSRRVKTDKRDARTLYEAAQQGTYRPAHRLSSARRHVRAELAVRDTLVRARTRCLALAKALVRRDGLRVPSSTSRLVMRRIQDLTLSDVLGAELAPLVAVVAPLTEQIQAADARLAGVVETDVEMQRLLTMPMIGPVTACAVVATADDITRFASAHAFEAYFGLVPSERSSGEKRRLGAITKTGNARVRWLLIEAAWRILHSKRADTVALRTWALRIAARRGKAVAVVALARRIAGILYAMWRDRVPYDGTKLPLPRARRGARGAHPAT

SEQ ID NO: 257441 - protein, 346 aa, unidentified
MDQIIRIGMDTSKHIFQLHGVDAAERPVLRKRLGRKQMVAFFARLAPTVIGIEACGAAHYWARVLGEFGHEVKLIAPQHVKPYVKRNKNDSRDAEGLCEATGRPTMRFVPVKTAEQQAALMLAGLREQMVARRTQLSNAIRGYAAEFGIGAAKGLDKIEPLLAQIAQDEGVPALARVSFAVQGREYAQLQVELKAIEARLRAWHRANADSRRLAQIPGVGPIGATALVMKTPDPRAFPSGRQFAAWLGLTPKDHSTAGKTRLGKITRAGDERLRSVLVAGATAVIQQAKHGRGHPSPWLIALLKRKPPKLAAVALANKIARIAWKLMVTGESYDGARMLGASALAA

SEQ ID NO: 257442 - protein, 377 aa, unidentified
MIGELYDYVVGVDTHRDFHVAAIVASPSGGLIESARFTADAGGYEDAVAWVEERTGCDANTRCWAIEGTGSYGAGFAGRLDGDDETVYEIDRPNRPSRRLGHDKNDHEDAVRAARDLIGENRPARPRSGALGDEFRILSRTREGAVSQRTAVICQMKAAIVIAPEELRSELRPAIEGRGRSYNRLVDACAALGDRCSTDTEGSCDCSDQRACAYRLSFSLMARRIEALSAEIDELDRRLDERTRTEAPGLRAQSCVGPVVTAVLVSTWSTQGRFDGEAAFSKAVGTSPIEANSGQTVGRHRLNRGGDRRANAAIHRIVIGRIQRQQETRDYIDRRCADGKTRREASRCLARYVSRAMYRLLESGDAFKHPQNLVETP

SEQ ID NO: 257443 - protein, 337 aa, unidentified
MTKLPVFVGLDYHQSSVQVCVMNVSGEVLTNRKCPNDWRAVARAVGPRGAQVHAAIEACGGAADLADELVQQAGWSVDLAHPGYVHRIKQSPDKSDYSDAQLLTDLERVGYLPRVWHAPQRIRELRRLVRYRQQLAAARRSLKLRMRALLRDHRLSTSDASAWTKAWLRWVAETTELPRFSRWIMDQHLGELARLAEQIQAVESLLAEIAQEDRLIVELLKIPGVGLVTAVTIRAEIGRFDRFRNGKQLARFCGVSPRNASSGERQADAGLIKAGNAELRRVLTQAAHRLIRYEPRWQALACQLKQRGKPIPLVVAAVANRWMRTLYHQLHSYGLAA

SEQ ID NO: 257444 - protein, 429 aa, unidentified
MKNSAANKLKQVPVGYLVIGIDPHKKGHAAVIMTQDFTTHSKFKFNNSKEGFETALERIRMEMVRTGSRGAIFAIETGGHYWRNLAYFLDERGIPFHFINQFTLKRRREGKDLNRRKNDYRDGEVAAQLLCTGEFTDTKLQHGVYAELRAVHNAYRRLVKERTRVTNLVKGLLDGLFPEFTQVFKNPCGLTALSVLSICPIPEGIAAMTEEEFVNTIRTGHPGFLMRKKLRALHYAAQTSIGVKADAQSVSYELSFLVEKLQLIRRQICSIDETLVRLVDETEEGKYLLSIIGLNYISVAGILAELGSFRSYKSAKQLIKMAGSNPTESESGGKRSAHTPMSKKGRPVLRYCAWTAVIPMLRFNPDFRAWAKKLRERPVHANPLSGREIVGAALNRLLRLAFVLVKNQTFHQVPEIESMPEPELLPVAS

SEQ ID NO: 257445 - protein, 415 aa, unidentified
MKAWKEITYYGGFDWARDHHDVVIVDRRGQMMADFAIEHTAEGWQRWREQVAALGAENLAVCLETSHGIVVEQLLESGVTVYPIAPVSSKAYRERKAPSGTKTDRLDAWSLADALRLDGHSWKALAKEDPLIAELRLLCRDEIALIEERTALLNQLQSALQEYYPAALEAFEDWTLPAAWAFVEVFPTPARLAAAGQRKWEKFLHVHKLARPQTYAKRLEIFARGSELAAGEALTRSKSRLALARIRMLRVLQHQIEAYRAEIEKLFAQHPDHHLFGSLPGAGPKIAPRLLGEIGSDRARFDDPSALQALAGTAPVSYQSGQIHKVYLRRHCNKSLRATIHLWANLSRRASPWAALYYQSLRARGKSHASALRSLGQRWLKILWKIWQTRRSYDPDLHTRNQLQHGSWILRFQSP

SEQ ID NO: 257446 - protein, 343 aa, unidentified
MKDYIGLDVSMKETAISIRRAGERVWRGKCVSDPMRIAQIVRKHAPNAARVIFETGPLSVWFYHALKAEGLPVICIDARHAKAALNMAANKTDANDADGLAHLAEVGFYREVRVKGFDSMLARSLVAARTKLVRITAELSNQIRGLMKTFGLIVPAGKGRTFETNVRRLLADQGELTNILLPVLEAWCDMRTRAAEMTKMLLALARQSQACRLLMTIPGVGAITATSFATAIEDPSNFKNSRSVGAWLGLTTRRYQSGEVDYNGRISRRGDRHLRGLLYEAALVILTRSKVKSDLQTWALELKERVGMKRAAVALARKLAVTMHAMLKTGSVFNPISQPPMAT

SEQ ID NO: 257447 - protein, 360 aa, unidentified
MEVTTIGIDLAKSVFAVCGADSSGRVVLRKQLRRAQMLGFFRRLQPCLIGLEACGGAHWWARQLSALGHTVKLMSPALVAPYRKGSKHDPNDAAAACEAVGRGNMRFVAIKSVAQQDLLALHRLRTLLVRQSIAWSNQLRALLYERGVVVAKGAAALKRMLAQLPQDNPELSGELCTLLVTTGQWWQQAQARVAQLDAQLKRKCAEDERCRRLEEITGVGPLTATALVATVGNAAEFKSGRELSAYLGLVPRQHSTGGKTVLLGISKHGNRYLRTLLIHGARSALRTCGRHDDPQRRWMYATLLRRGPNVAAVAVANKHARIMWALLSRGDRYRAGVRPAPSAGAVVKRVRDEPLLILKD

SEQ ID NO: 257448 - protein, 338 aa, unidentified
MTAYAGIDLHSNNIFLGVIDSDNKKLFSKRLANNLSIIKKALQPFKKALAGIVVESTFNWYWLVDGLMEAGYKTHLANPAAIKQYEGIKHTDDKSDAFWLAQMLMLGILPEGYIYPKDERPTRDLLRRRMLYVRQRTAHVLSLKSMARRSLGETISTNRIKQLKPEDAESIFDHEHLKMAGSHALATIHFLSSQIKSIEKEVMKHAKIKPEFTSLLTMPGIGNILGLTIMLEVGDIRRFPRAGNYASYCRCVKSEKLSNEKKKGAGNRKNGNKYLSWAYVEAANFAIRYHSKPKSFYDRKVSRTNNTVARKALANKMARASFYIMRDQVAYDENKMFD

SEQ ID NO: 257449 - protein, 380 aa, unidentified
MASMHDSVRFKTTVYAAIELSKKSWVVAIARPDRDRPSIHRIAGGDLADLIGRLRKAAGEKQRIVVCYEAGYDGFWLTRSLAKIGIDCRVLDPASIQVNRRARRVKTDRIDSLALLRALIAIDRGERHVCAVVRVPTVEEEDARRSHRERQRLVRERTGHINRIKGLLFAQGIRGIEPKRRRTRIDFGKLTTAEGRPLAERLRRELEREYQRLELVQSQLRIVEKERDTADAQDPTVERKRELLCALQGVGGASAAILAREVFARPFASRRQLGSYLGLTPSAYDSGSTTRCQGISKAGNSWARRVLIEVAWLWRKYQPGSPLSHWYARKTADQSPRIRRIMLIALARKLAISLWRYVETGLVPDGAVMAKTTPHMAAAT

SEQ ID NO: 257450 - protein, 454 aa, unidentified
MQLRNAIGIDPDSKGIICSYVKSNIEKPEKKGFLATKNGLNEFVRWLGKHKNIIIAIEGQNGQSKPVEKILRKNGIIFYSFKPYDVDKFRKAVLGQNKNNHKDAESVARYAMALEAQGKLENYKRVWFPDEELQILTRSHEEKTKELTREINRLWKLIRMASVDLYLALGGKNPDISLNSNKIKNKGILTLLSKIPDIHLWKDLSENDILNIMDGNSYKGRINLIAELKKISVNFEPISQALSLLIKNAAVQICNLTSQKTDLENLIKQVTKDNKAVKILEEIKGISIITASKMIAEIINIKRFLKNDNLASYSGLCLKENKTGESEKMKYSKMFNHRLKDTFMVAAKNFVMFNPDSHLSGYCRNLIKSRVKKTEVRKRVARALVRVIFRKLNGKSLDSSPNMQHSRSENEMASGSSHKDHNNPGNISLSTPLDIQTNIDNKGKEKKEILVEIC

SEQ ID NO: 257451 - protein, 342 aa, unidentified
MNIPVRIGMDTSKSIFQLHGVDENEVVVVRRQFRRAEMIRYFEKLPPALVAIESCGSSHHWARLLQSFGHEVKLIPPQYVKAYVKRGKNDAADAEALCEAVTRPSMRFVPVKSKERQAACMLMTVRERLVSVKSQLSNAFRSYAAEFGIVGPAGRQNVDALIKRVLEDDSLPEMARDLFLFQAQEYAAVEARLAEIEKKLMKWHREDDVSRRLSTIPGVGPIGSTMLSMKAPPPETFRSGRDFAAWIGLTPKDHSTGGRQRLGGITKAGDSVLRSTLIVGATALLRHIRAGRHKPSPWLAALLERKPPKLVAVALANKFARIAWRLMVSGGVYTRPQASMPA

SEQ ID NO: 257452 - protein, 338 aa, unidentified
MEWTVAIGVDTHKEVHVAVALDALGAHLDSQEIAATPAGYRRLLAWAQELGLPAFAVEGTGSYGAGLVRFLEQADVAVFECERPRRQERRRGKSDLIDAALAARRLLAGERLSLPRGGGRRDDLRVLLLERRGAMQARNAALNQLSALVVTASDDVRERLGALSGERLAQAAARLRPRPEIMNGVLRRLGKRAERLSQEVAEAECALAALIGEVAPELLEECGVGPVCGAQLLVSSGDPSRMRSEASFAALAGTSPVDASSGKQRRHRLNRGGDRQLNWALHVVALARIRHHDETTAYYQRLLAGGKTTREARRCVKRALARHFYRRLCEITTAPLTT

SEQ ID NO: 257453 - protein, 370 aa, unidentified
MSATRMPCGYVNVKWVGLDVAKDAIAVSVLDGSSEATPRLEKIAHDEVSIRRLVSRLGEPARLRACYEAGPTGYELYRLLMSMGVGCEVVAPSLVPVARGDKVKTDRRDARRLVRLYRAGELVTVRVPTREEEGCRDLCRLRGSAMVDRRRARQRLGSFLLRRHLVYRDGTPWTLKHRRWLRSLAFDDTSAQATFAHLLASVEERELRVVAIEADLAGFFERGLFVDEVARLAAYRGIAPLSALGLACEVCDWRRFPAPARFMGFVGLVPCEYSTGASTSRYGITKSGNAHVRNILVEAAWAYQYPPRVSPELHRRHEGLPPEVVARAWAAQIRLCGRFRRLAARKDRRTVVATAVARELAGFVWAEMTA

SEQ ID NO: 257454 - protein, 343 aa, unidentified
MKLYVGMDVSLKETSLCVVDGKGEIVSEGTVISDPTAIAAFIKGKARNAIRIGLETGPTTTWLWHELRALGLPVICIDARHAKAALSLQINKSDRNDAVGLARIMQCGWYKEVRVKSLPCHEIRAVLNSRAQLVKIKRDLENQIRGLLKNLGLVIGKAGGNVFHRRAEELVGEHPLLQEAVRPLLGVREIVRREIAGLTRKLLAMARDNDESRRLMTVPGIGAINALAFCAAVGDPGRFQRSRSVGAYFGLTPRRHASGEVDWTGRISKCGDAMVRTYLFEAAGVLMTRVPHWCRLKAWGLRLAKRIGFKKARVAVARKLAVILHRMWCDGTDFIWSSKEAAA

SEQ ID NO: 257455 - protein, 458 aa, unidentified
MTKSTKFSKTKPASLSQLNPKCAGIDVGAAELFVCIAKNSSEQEVRTFSTFTADMNLMIDWLKKNKVKSVAMESTGVYWIPPYEFLEEAGFEVLLVNARFFKAVPGRKTDVKDCQWIQQLHSYGLLRGSFRPEMDIVELRSYVRQRSRLFESAGTQVQLMHKALTLMNIQLNHVISDITGMTGMNIIKAILGGERDPIALADLSVAGCRKKLDLIVKALEGHYKEEHVFALQQSYEAYEFFHKQIDKCEKKIQHVLHAIQAADQEEIKERPSSESNKKTKPKKTYNRSPYHFNATAEIKKITKADLTTIPGIDANTAMKVLSEIGTDMSRWRSAKAFASWLGLCPGNKISGGKVLSSRTKPSDNKAAQALRMAVSSLYRSSCYLGAFFRRMRARLGAPKAITAAAHKLAKILYRMLMYGEDYRELGENYYEQQYQGRVLANLSKRAKEMGYILAPIET

SEQ ID NO: 257456 - protein, 311 aa, unidentified
MRTEHVLTMDAHCRSSDVCIKTAKGKLIRRDRVSTGIPQLQALIESVPRPRRVAFEEGAIAGWLYRNLKNSADEMVVCDPRRNAYVAKDGDKDDPIDAEKLNDLYRGGFLKAVHQPNSSEKAGIKQLVGIDHERVVHRVGEGCRLLALGRRCGVLLKRSMLLGTQGRRMPESRLEQGAVPARIRSVAEGLRESFDAAVKQEEQLDEQVCELAREDKMMRRAAVLPGYGPVRAATLISYLDAPWRFKSKSALWKYVGIGLRRQSSGEGLDVVLVEQACNHLLRNVVIGAAQSAMDQKENVFAERYARWMKAE

SEQ ID NO: 257457 - protein, 344 aa, unidentified
MGEVITIGLDIAKSVFQVHGVDEASAVVVRKRISRAKMLEFFGGLQPCLVGIEACPAAHHWGRELQALGHTVRLMPPSYVKAYLKRSKNDANDAAAICEAVTRPSMRFVALKTKDQQAALMLHRARQLLVRQRTMLSNAIRGHLAELGIVSAKGRNGTGALLEIIADAGDSRVPLVARGILDVLARQYGALGAEIGSIDRSILAWHRSCEASRRLEEIPGIGPIVATALVAEIGDWKAFGSGRNLAAWIGLVPKQHTTGGKDRLGGITKQGNRYLRWLLVAGAMAVIRYAQKHGTLKRPWLGRLMARRPTKVAAVALANKIARMAWAIIVHGDRYREPKPLLAA

SEQ ID NO: 257458 - protein, 412 aa, unidentified
MQDILTCAIGLDVHRDIIVACLVKGAVDAEPEAETRTFSTLIPEMQKLRDWVIESECRNIAMESTGIYWQPIYEMLESCFDGEISILVVNARHMKNVPGRKTDMKDAQWIATLLRAGLLKGSFIPDKAFRELRHLTRYRKSVVHDITAQKNRIDKFLQSSGFRFTAFLSDTFGASGRNIIRHLIEHGSIDREALDKCLKTKTRNRIDEILVALNGSLSEHQRRFLNMVFRHLEDLEAHKHTVEDEITEEVLKHTDALNLLCSIPGIDVTAAAAIIAEIGTDMSSFPDSQHICSWAGLSPGNNESAGKRKSVHINKGNPYLKSMLCEVAWIMASHRKLYLSGWYWKVKQRKGAKRATIALARKILSIIYTMLKTGTPYNEECFEQRRLRCERKRANRLVNELQKLGYVVVAPD

SEQ ID NO: 257459 - protein, 356 aa, unidentified
MRRDYQKGKVLAKGKDVYIGIDVHKEKWHVTGRVEGEEVFHGSMLSEYQCLKKFLERFKGCKVKVAYEAGPCGFGLHDKLSADGVETIVVPPSLIPVESGNKVKTDKRDSRKLAKLLESNMLKKVYVLTEQDRANRELVRTRRQLIEHRSDVMRQIKSKLLFHGIRSPFPSKQRWTKGYVKWLRELHLEHEVVKVSFNTLIDLYEYLGSQLMRISKEIIALSQSDKYSHKVKLLRSVPGIGILIAMELLVELGDIERFRTADEIASYMGLTPSEYSTGQYVRQGRITRCGNTRARVCLVESSWHLIVKDLFWRGKYMKLKYRRGAKRAIIAIARNLIIRIRRILLNNEPYVVTAAA

SEQ ID NO: 257460 - protein, 349 aa, unidentified
MNVIKQTVGVDVAQKELVCVVGVLLDDFSVSLKARKAFANNMSGFKAFLKWAKSFTEASLDLTAVLEATGVYHEKFVHWLVGQEQQVAIVLPNKISNYMRTLSIKTITDNTAAEAIAQFGLESKLETWTPPKPIFRKLKQLTRERDQTVCERVVVANQLHAENAEAFSNANSLKRLKARKALLHKQEKEIKKEIHLLVKSDPNLEENISYMTSIPGVGELTAVIALAETNGFELVMNKRQLVSYAGLDIREKQSGTSVKGKPKISKKGNRHLRKSVHLPALCAIKNCSLYKNNFARLVGRHGIKMKAVVAVQRKILELMYILYKTKTVFELEYELKKEQQPDAATPLTV

SEQ ID NO: 257461 - protein, 347 aa, unidentified
MRFYQKQHPFYCGIDLHAKTLYVCIVAHDGEILVHRRIPARPDAFLKLVCPYREGLVVGVECMFSWYWVADLCREHEIDFVLGHALYMKAIHGGKVKNDKIDAEKIAMLLRAGMMPIAYVYPKEMRATRDLLRRRCYLVGIRARALSHIQNTNTQYNLADLAKRITYAANREGLAEHFPEGSTRRMIELDLALVDQLDDEIRRLELYLTRTAKIDAPHDYYRLQSIPGVGKILSMVLLYEIHDIRRFPKVGNFLSYARLVRCSHESAGKRCGFGNRKIGNAHLRWACSEAAFVMTRESDEVKQFLARKEKKHGKPKAIAILNAKLGRAIYYILKRKEPFDPKRFFTT

SEQ ID NO: 257462 - protein, 432 aa, unidentified
MNRLQVGIDFSQKKADFCLLFPDGQPLEPHISFANSCSGYSSAKQLLIDALDTYAFDGVDVSGEATGYLWLPFFLQLATDPDLTLRDTNLFLLNPRWVKWFKKCFAEDHKCDEKDPFYIAERTRTRRPDTAWSPPDCLPLRFYTRLRFHIVQNLAREKCYFSAFLFLKASSYRCIKPFSDVFGVTSRLILTQQPTLDELADLPVEDLASRLYELSGNHLPDSLNNARKLQRVAKESFHLDQSLFLPVQRILDLTLDHIRFLESQLEQVDHWIAAELENYPVIAQLASIPGVGPVFSSGLGAEIGGVQRFLQGQKWDKKRKRYRPRNLRDAEDAVAKIAGLWWPRADSGDFEAQDRHMAKSGNRYLRYYIIQAANLMRLHIPEYAKFYARKHKEASKHHHKRALVLTARKSVGLVVGLLHRDEPYRSKEDRRT

SEQ ID NO: 257463 - protein, 364 aa, unidentified
MNTHNEPIDRNNAVYIGIDVHRYQHTAVAANRFEEEMGELTFPNTHDGVAAFVAWSKNIAEANLTRVIGVEGTNGNGRLLRNAVIPVYPDVYEINPIYTKQRRDHGTRGDKSDPVDAKLMIEVLTRKLDELPKVTEQDNSAPMQALSELVAFHDDLTRSQARLKNQLHRLFYEADTEYTLTRSQAFANKRLHKWLAKTKQPKRAVNQEVQRLLLRTKIRQLRDLSKTRTKTDVLISQLLARANSNLVTMPGAGTITAAKIISAVKGIGRFTNIRQFVKYAGIAPVERQSGKTRKHKQAKGGNRQLNTAIYTIALTQLRCNTKAIVYFQKKIAEGKTKKHALRCLMKRIACIVYAMMKGGEVYRG

SEQ ID NO: 257464 - protein, 355 aa, unidentified
MRTDYHEKRFLAKGQEVFIGMDVHKESWQVTARAAGEEVFHGRLPSQYQALERLIERLPGCTVKVAYEAGPCGFSLYDKLTADGIETIVVPPTLIPVESGNKVKTDRRDSRKIAHLLERGMLKKVYVLSEEDRADRELVRTRRQMNEHRSDTMRQIKSKLLFYGIKAPFTAEQTWSKAYVKWLKEYKFDSDLLRLSLDYLIGIYEYLTSQLVKITKEVVLLARSKKYSKRVKLLKSVPGIGTLTAIEILVELQDVKRFKSSDKLAAYIGLTPSEFSSGQYIRQGRITHCGNTRVRACLVESSWILIGKDPFMRKRYHELKNRKGGKKAIVAIARMLIIRVRRILLDNEPYLLKAA

SEQ ID NO: 257465 - protein, 312 aa, unidentified
MSQKENFIGIDVSKHQLDVAVIPSGDSISFTNNEDGISFLLGFIKPFSPTLIVLEATGGLETSVVGALAADGLPVVVINPRQIRDFAKATGRLAKTDSIDAQVIACFGEAIRPEIRPLKTLEARKLDALNTRRRQIVEMLTAEKNRLGSAPQWIRKDIQNHITWLEKRLKKANSDLNKAVKKSPLWRENEGILQSMPGVGPVLSTSLLSDLPELGTLNRKQIAALVGVAPLNRDSGLFRGRRTIWGGRANVRAVLYMSTLAAVRCNPKIKAFYNRLSNAGKVHKAAMTACMRKLLTILNAMIKNRMYWCADF

SEQ ID NO: 257466 - protein, 412 aa, unidentified
MERVHERCCGLDVHKETVVACLRLPGEHRRRQMQVKTFGTTTPELLALGDWLTEHRCTHVAMESTGVYWKPVFNLLESVCEVLLVNARHIKMVPGRKTDVKDCEWIAELLELGLLKSSFIPPEPIRDLRDVTRYRKTLIQQRAAEANRVQKLLELANIKLGNVATDVLGASGRAMMDALIAGERDAEQLARLARGKLRRKRAVLGPALTGRFTPHHAFLLGQILAHIDELDDHVVQCDRKVDEYLRPFGQEADLLQTIPGIGRRTAEVIIAEVGVEMDRFPSAAHLASWSALCPGNNESAGKRRSGKTRKGNGWLRRALIEAAWSASRTRSTYLASLYSRVARRRGARKAAVAVAHSTLVAVWHILKHHVPYQDLGPSHFDKLHTERLRRHYLRRLEDLGLKVTVEQNTEAA

SEQ ID NO: 257467 - protein, 339 aa, unidentified
MARYVGVDLHRNQFTVCVLAENGREYLSEYRLEQLPRFVSKLRPTDEVAVEVTGNTRLFYDAVAPHVAKVVVVNPTQFKVIRDSVKKTDPHDARALALYLSKGMLPEVRMKDKLHAQLASLTQTRDTLVKQRTALKNKVNNILSAHGINLRKEALTGDAALEKVLGMKFDAIVQTELRVIVGQIRALNQSIAELDQAIKAEGPKLPGHENLRSIKGIGDLGATILLSVIGDIQDFADPGKLAAYFGIVPRVRNSNEVERSGRITKRGTKLGRTALVQCALIAMRYSPYLAKFYRKIVARRGVGKAIIALARKFLGVIYHTLKNNWIFEDFPKFVLAEAS

SEQ ID NO: 257468 - protein, 330 aa, unidentified
MPTYYLGIDVAKQKLDVVLLLDPDTLKKRQKTVPNTPAGYQALGLWYHQQTGAAPAACHVILEATGPYHEAAALALHEAGFVVSVANPKVIKDFAKGLGVKAKNDGLDALTLARFGSLIKPARWQPDPPEYRRLTVLLRRLEALETDRQRELNRLEKARVSQPADADVVASLERSVQFLEAEQERLLVTINDHIDQHPTLCQDRHYLLSIPGIGPVLSVLMVALLQHGQRFQSAAQFVSYLGVIPTEHQSGSSVRDKPHLSKTGPARVRGKLYMAALVAIRHNPDVRAFYERLLAKGKSKMAALGAAMRKLAQICFGVIKHQTPYQSQVA

SEQ ID NO: 257469 - protein, 338 aa, unidentified
MTKNYFIGIDVSKQTLDAAFIIRTNESFSTPVWKQFDNTLAGLQKMKRWLLQLNVPLNQQTIVVVENTGIYHRLLWQFFSKQQIDLCIENAAQVKWSLGIARGKSDKVDIRRLALYAARHSDRLKPSPVLHQHVLALKDLITLRNKLLVQLKSIETAFNELKVVSPVSFIRTSKKLLTPAIKGLKQSLKKVEDQITTLIKKDDQLLHVYQLLISIPGVGPVTAIYLICCSNVFTMCTSGKQLACYCGVVPFDHQSGISIKGKHRVHKMANKELKKLLHMCALSAIQHYVEFKDYYNRKKQEGKHPMAILNAIRNKIVLRAFAVVKNDRPYVNNYEKAA

SEQ ID NO: 257470 - protein, 408 aa, unidentified
MQVLYPRCAGLDVHKDTIVACVRCISPPMHQEVRSFGATTAELLKLADWLAEHDCTHVAMEATGVYWKPVWHVLEDEFELVLTNAAHIRNVPGRKTDVNDAMWIADLLAHGLIRSSFVPPQAIQQLRDLTRTRKQLVREVSQHSLRIQKVLEDANLKLGSVLSDVLGKSGRAMLDAIVAGETDPACLAALAQGTARNKSAELREALRGRITDHHRTMLRLHLQVVDALQRTLAELDAAVGKALASIQERARLLTTMPGISDLTASVVVAEIGVDMSRFPTAGHLVSWAGLCPRSDESAGKRRSARVRKSGTWIKTTLVTAAWSAVRVKTSYLRAQFLRIKARRGAKKAILAVAASMLTAAFHMLRDGTEYNDLGSEHFDRQDKSKTIRRLLKRLQDLGCDVPELAHTA

SEQ ID NO: 257471 - protein, 415 aa, unidentified
MAIDVARYWNAVLIETLGGKRHRFKMANTAADFDRLLGFLRKLQGRCCVALEPTGDYHRPLAHRLLVEGFDVVGINSVAQARYREAMFNSWDKNDPKDAAVILEMLRRGAVQRYVDPMLAGNHDLQELAKTYYQVSRARTKVQHSLINHCLPLYFPEMHRYWATTRNEWFIRFLLQFPTPAHVRSVTRDQFVEAAWEVVGRKVDKRAKLEEMWEMAGATAALPHAPDSLAVETFRVTLRRYQELNTLRADLEARAELALSANADFAHLKTLPGIGSVLAMTILAEGGNLRRFGHHRQFLKYCGFDLAKTQSGTQRGREQLSKRGNARLRLAFWLAAVAAVHMRENSFRAKYERYIHAAPDDADLRRKALTAVAAKMARVAYGMIKKNQPYRQFFEQSLPSGSIPLSVAVGALATP

SEQ ID NO: 257472 - protein, 457 aa, unidentified
MARRSKSKKSGRPSKLNIIHAQAAGIDVGSTFHVVAVPPDLSSEPVQAFQSFTGDLYRLANWLVEIGVTTVAMESTGIYWIPVFDILEAHGLEVLLVNARHVKNVPGRKTDVSDAQWLQQLHSYGLLRGSFQPTQEWAALRAYLRQRERLIEYAASHIQHMQKALMQMNVQLHHVISDITGVSGMKMMRAIVAGQHDPAELATYRDARCQASEETIREALTGHYRPEHVFELRQALELYDSYQARIDACDQEIEATLVFLQDDTISMETLPAARYKKTRKVNEPKFAVREALFGVLGVDLSQIHGFGAYTVLKLVGECGRDMSQWPTVKHFTSWLTLAPSNKISGGKVLSRKTRRSANRAAAVFRLSAVNVGRTNTALGAFYRRLASRVGKAKAVTATARKLAELFYNTLRYGMAYEDPGASSYEERYRERVLKGLRRRAKEFGYELTEMGTAEGVA

SEQ ID NO: 257473 - protein, 331 aa, unidentified
MKKCHRVGVDVSAKELVVAIEASGRREAPIVFSNDADGHRKLIQRATKRGASAQVVLESTGTYGLDLALALHRARRVEVMVANPRAIAPFARASLQRSKTDRLDAETILEFAMRMPFEPWSPPAPQILELRALSRRIEAMSKTVVQEKNRLHANDQSEDLSEFVKQDIRELAALLESRIARLRQQALLVIEQSESLAKAFAHLTTIKGIADASGITILAELAVLPADMTTRQWVAHAGLDPRQYQSGSSVYKPARISRTGNAHIRRALFMPALVAVQWEPPIKAFYEHLLDRGKTQMQANVAVMRKLLHAIHGMLEHDQDFVGEKFFAMSG

SEQ ID NO: 257474 - protein, 381 aa, unidentified
MDTATRDQQCNSEPVLFMAMELSAAKWKLGFTVGLGQKPRERTIDAGDVEALSEAVARAKRRFWLAEDARVVSCYEAGRDGFWIDRYLRGHGIGNVVIDPASVEGNRRRKKRKTDRLDLGRLLRCLVRWHRGEEKVWAVVRPPSEEAEDARQFHRELEVLKGERTRHMARIKSLLVSQGIQVKRVGTGFVTELEAARTWDGSPVPPQLRDRLVRELARLQVLRQQICELEGQRREAIRKVTDRRMEQIRHLMRLRGIGENGAWLLVMELFGWREFRNRGEVGSIAGLTPTPWASGEEDREQGIDKAGNRRVRAMMIELAWCWLRYQPRSELSIWFEQRFGGGGKRSRRVGIVALARRLLVALWHFLQDGWVPKGAVLTAPG

SEQ ID NO: 257475 - protein, 409 aa, unidentified
MSATHQTNCTTESAVLYVALEMGMVNWKVCSTVAVGQKPRCKTVPARRMDLVLAEIARAKKRFRLSEDTPVEVCYEAGRDGFWPYRWLTRQGLNTVLVDSSSIEVNRRNRRAKTDRLDGEKLVIMLVRYHQGEKRLWSVVQVPSLEVEDTRQLHRELKELCRERTEHTNRIKGLLIKMGIDVQGIGSTFPEKLAELRLWWDSQTDASGAPLPDHLRERLRREYERLALVERQIDELEEHRCAAIGQGDSVNIEKVRQLLNLHGIGPVGSWILVMEFFAWRTFRNGRAVGSLAGLAPMPYDSGSSERSQGISKAGNPLIRALMVQLAWGWLRLQPRSTLSRWYRQRFGSGSKRQRKIGIVALSRKLIVALWRYLETGVPPEGAVLTDWRNKIPKRYQKEPAAKSGTTQAA

SEQ ID NO: 257476 - protein, 404 aa, unidentified
MSPAVPLPVVSDRRSFVVIIGVDPHKRTHTASALEPSSHRVLATLQIDATLAGYRQLARWAARFEVRRWAVENARGLGRHLAQWLAARGEQVDDVPCTATARVRELSRGGRRKNDVIDAAAAASVAALAGDATPIQIEDLSTVLALLDERRANLAAHRTRLVNQLHALLRDLIPGGADTNLTATAATRTLAAVRPVGPAEATRKQLARDLVAEVREVDARLAKLSAQMSQTLAEHGSRLPEVDGIGPVVASRLLGRTGRAGRFPTSSAFASYAGVAPVEVASADRARHRLPRGGDRQLNLALHITALTQVRMRGSLGRAYYDRKIAEGKTRNEAMRCLKRRLADHVWRIMAADERRTARAAGPGGQPGATLKSSATGSTPTTSSSDKSLPRPAAPEHTTADPAA

SEQ ID NO: 257477 - protein, 319 aa, unidentified
MAKRIEEVTLGFDVSKRQLELLGSDEGVNRFIANDPVTIARFLDRFSGPVVIAVEATNVYHEHLVDLALARGFTVYLIDGYKLDKYREAVGVRAKTDANDAELIHRYLVSERPHLRPVNPQSQAERRLWRLLKRRAKLVKLKTQMDLSLRDLDVNLPEVGAVLKELDRLIRRLGQLANALARSCGWQGMLSRLRSIPGVGPLNALALVSMYHRGEFRTVDQFVAFLGLDVRVRDSGTFKGRRKLTKKGDPEVRRLLFNGARAAANRYHEWAAMKQQLMARGMSEIQSSVILARKIARIGYALLHNGGSYESARITCTST

SEQ ID NO: 257478 - protein, 475 aa, unidentified
MAATRVGENEKDVPLMSLKGLVSQNSQEDVVVQGSGLSRGDRRRNARLARLRELVPVENAILGIDLADEKQAIVLTDHDSQVLARTRVKAKAWRLGSVLDWARKVSHEHGFADVTVGCEPTGHRWRVLDQLAAQRDMTLVCVQPLLTGRAREAEDYTRDKTDDKDAVLIARLVAQLRCYAPERADETWARLRHLGARRERLISEATACVQQLRDLLECAWPAVLATAVRQFDSVTWCAALAVVLQRCNGRPERLKQLGPARFEAAVRRELPCWGGKQPRRQIIAAVFGALTDPAGVSTQRRGALERAGWVLEDWRAAKVRRMQVQTCMVEILDELELTELADSIPGVSTIGVAAILAETGDPTRFDSPRALVKHAGLCPRENNSGTSTGRSRISGRGRPLLRLAAWRAVWGAQRHNPVMASRYRHLTTRETNPLSDGQAKAALAAALLRWIHVITTERVAWNAAQAGALTLPAAA

SEQ ID NO: 257479 - protein, 333 aa, unidentified
MKDLSKVQHFVGCDVSKETLDFAIHERGKNYRQFKHIRVENSIDGFRKMRKWLRESGIKVTDVVIAMEHTGIYSAALTEWCFGKKIAFVMLHPRDVKNACSRGRDKTDKVDSQFIADYVYTMREKLSPSNPEPAIIRKLRQLCNERKIAIRTRTAYLNIIKTLTDKASLKRTEDFIKALNKQIKTIEKAMVSTVESDPEVSKNYNLVCSVPGIGMINAVATIVATSNFTRFQNARQYAKFSCISPMSFTSGTSVKGGDHVSRVGHGELKALLTEAAKSTIVHDSGIKAYYNRKREQGKSFGCVLNAVKFKLICRMFAVVKRQTPYVNTEKFRN

SEQ ID NO: 257480 - protein, 391 aa, unidentified
MRFTGIDVGSEHHTIAIVDEHGDPIQRSLSITEDADGYRRLRDVLGDPTDCLVAMEATGHYWRNLFASLTTDGFTIALLNPIRTRRFAEEELQRTKTENVDALGIARFAAQKRPKATQLPHQATQELRQLVHLRRQAIQHLGDRVRNLHRAIDLTFPEFTRYVRGLDTELANAILSRYPSALSLAAVTVTKLAKLCFDGRRRVGPTLARALIAAAKQSVGSLQTAPFELEVRYACQDICEMRERCRQLEGDIQRRIDSHDLGKLFTTIKGISTLTAAAIIAEAGDPARFPNAATFASYVGVVPRLHHSGKRKFSGNGAIPLGNARLRHALWMPVLVAIRVNPWLRAYYQRLRAVGKRPKVAIIACMHKLLAAVYSVAKNRRPFVPRLSADL

SEQ ID NO: 257481 - protein, 380 aa, unidentified
MARKKEMFVRDEDTTKTPTIYMALDLGRRCWTVGVLLSGDRDARLFQIAGGDREALLQLIRRQRQTQGDPNVRVVSCYEAGRDGFWLHRWLRDQDVDNRVLDPASLEVPRRWRRVKTDRVDTLGLLRVLLRLERGETEMTRVVWVPAPAIEDERRQTRERERLVSERTAHRNRIQGLLAAQGVTTIKVGGRDWLDQLAVARTGDGRTLGVALLAEIRREAERLALVERQIKEVETAQHAALKADTALATRACKLMRLKGLGEVFANGLTHEAFWRDFENRRQVGGAFGLTPWPWDSGDMHRNQPISKVGNRRARTLAVECAWMWTIHQPDSVLTRWWQKRFAGGGKRLRRIGIVALARKLMVSLWHYLKDDLIPEGAVFT

SEQ ID NO: 257482 - protein, 365 aa, unidentified
MKKLVRPVRKVNTEVVGLDVHQELIVFTRMDRHGDEIEQGKLASTKEALLGLLERCEKPLHIAFEAGGSTFWIYDFLVAELGEEYVHVVQAKKIQAIANSTEKNDFNDSWWLAYLTYEGRLPECYVPIGTLRELRLAVRERFEIVKLITRGKVRLRSHLRQMGIRLPVHKIESVEAWNSLVDLGENHGGVQGQAILHYLGLLQHLLDALHGWEETITELGKDLPAVRTIEDEMPGFGPVLSAVVVAELGPIDRFTSAKAMARYTGLTPSDRSSAGKARPGSITREGSEHLRWAMTQAAMACLRCRSGAGLAVGNWIRTKERRMGCKGKARVAGARKLTESIWRLFHWGERFDMAKPFGGVPAMAS

SEQ ID NO: 257483 - protein, 391 aa, unidentified
MEYYTTIGIDVSDRTSKICLMAKSGAKRHILEEATVPTTRAGFTEYLKDKEPGSVLVTFETGTHSRWMNSLIGDGLGFKVHVANPAKLPTVTKSAAKNDRNDARELARLALADPELLHPVRLRREVCQAMLRIEYIRQDLIACRTKLTNTLRGFAKAMGGRIESCSPEKIVSLNRADWPEELRKLISLVEETLESINADVKKSDDEIKRRTCLSPFKEHMPRAQEVYGVGLHTAATFLAVIDCDVSRFKKARDVGPVVGFTPRQDQSGEMEKQLHATKAGNPLLRKLLVEAANVTMRTLSPDTDLKLKGERICARGGKIAKGKARVAVARGIAVTMLALLKHPEREYVPLTENGAEELARLREQVARQGLAWANHARKAEAAERPEPRPDR

SEQ ID NO: 257484 - protein, 354 aa, unidentified
MIIIGADYHPGFQQIAFVDTDTGEFQERRLQHREEAEKFYRDLAAQGMQVRVGMEASGQARWFERLLSELHFELWIGDAAEMRTKRVGKQKTDRQDAQLILQWMLEDRFPKIWVPSWENRDLRPLLWHRHRMVQARTRIMNQLQAVALNEGLRCKKRLWREAGREQLESFALAPWANRRRHDLLELLDRLTPAIAELTQAIEQEVEKCPAARRLQTHPGVGALTGLAFVLIIGRAERFQCGKQIASYLGLVPLEDSSGQRRRLGHITKQGNSLLRFLLVEAAQVTVRSDPQWRSKYFHLAMRRGRKIAKVAMARKLAVRLDWMWRKGWDYEQWKNFGSHAGQPGNRDGVQSITE

SEQ ID NO: 257485 - protein, 365 aa, unidentified
MKKRIRKGYWEAEWKQKPSLTVGLDLGDRRSHYCMLNEDGEVVEEGSVATTEAGLRKQFEGEPQQRVAIECGTHSPWISRLLKQLGHQVIVANARKVRAISQNESKSDKVDAEMLAQLAFSNPKLLSPLRHRSADRQRDLNLIRTRDALVRARTMLINAVRGLVKSGGGRLPACDAGHFDQHARPALPAELKTAAAPLLNQIASLTSQIHLLDGSIDKLAERYPEIGLLRTAPGVGPIVAAAYVLTLDHADAVHSARAAGAFLGLRPGQSQSGDSDPQLGITKTGNIYLRRLLVQSAHYVLGRFGPDSALRRWGLSLAGDGSKRLKKRALVAVARKLAVILNRMWRDQKPYQHFPQQDQNATAAA

SEQ ID NO: 257486 - protein, 424 aa, unidentified
MKNTAARKRKQVPEGYLVVGVDPHKKRHAAVAITQDFTTQAKFKFDNTREGLEMMLNRARLEMLKSSCRGVMFAIETGGHYWRNIAYYLDERGIPFRFINQYTLKRRREGKDLNRRKNDYRDSEVAAQLLCTGEFVESVIPQGVYAELRTSHNAYQRLVKERTRITNLLKGLLDALFPEFTQVFKDPGGLTALSVLSTCPIPRVIAGMTEDEFMATIEARHKGRRLMRKKLRALHYSATTSIGIDAGARSLSHEIAFLVDKLELIRRQIRIMEGMLVRLVDEAEEGKYLLSIRGLNYIAVAGLLAELGCFKLYRSAKQMIKMAGSNPTESESAGKRRSKTPMSKQGRPLLRYCAWTAVIPMLRFNTDFRAWAKQRRERPAHANPLNGREIVGAALNRLLRLAFALVKNQTYYQELKLSMMPLAV

SEQ ID NO: 257487 - protein, 372 aa, unidentified
MRVVGMDVHVRNSFLCVTDPDGQLLKRGRVGNSLSQIAEFLGALPGGDQPLKVVLESTTNSRAIQRMMLEYGKGAKVDVQAQVLDARKLRVIAESVSKCDKLDAAVLNELARSNLKLPACYIPDDDMFALREHLRARSDLVRMRTMLKNRVHSILHRRGILNPLKDLFTKDGRKWLGEMELDEAGRLILDGYLDTLDQLTETIDNSTAALTKLSRTQRWCKQVALLRTMPGIGPITSLTILAELGDFNRFKSRAAVSNYAGIVPVVRSSNEKSFSGHITHRGPAHLRSVLVEAAWTASGRVPQYGAIYSRVSAKRGKQVAIVAVARRILEDAWIMLKKDEVFRLMTVKSELTDVCIGDSSAQAGVADPNDAG

SEQ ID NO: 257488 - protein, 348 aa, unidentified
MELFAGLDVSIDETAVCVVDAAGEVVMRASVATDPQVIAQALAPFAASLRRVGHEACALSPWLQPGLKALGLPAVCLETRHVRAAMAAQRNKTDATDALGLAHLMRTGWFKTAYVKTDACYRLRQVLTQRRALKRKFLDLENTIRHSLKSFGVRLNKVGRVGFEAAVREACADDPLTAELMDAMLEARAALWRQYLKLHAMVLRLVAGDEVCRRLMEIPGVGPITALTFVTAIDDPARFRRSRDVGAYFGLTSKRWQSGASIDIQGRISKAGDAEVRRSLYEAASAMLTRFKGQTRLKAWGQKLAKRCHKKAVVAVARKLAVIMHAMWRDGTVYEDAPLSAVAARPVS

SEQ ID NO: 257489 - protein, 318 aa, unidentified
MTNITYEFNIGIDVSKQKLDVSFNDKETAIFANTSQGFKQFLKSIKNKSNTRVVMEATGGYERPLAHFIQDQGMAVSVVNPKRVRDFAKALGKLAKTDEIDSHVIRLFAESIDPRIMEQKNELQQLLDSLTHRRGQLIKQRAKEKQHLETATSKEVSNSINRNIKFLDKEIERIENKIKTLINSNQQLKNKVERLETIKGVGSIVALTLMADLPELGTLSNKEISALVGVAPFCRDSGTMTGKRTIWGGRAQVRSILFMAAMSARNHNPPIKAFYERLISKGKPKKTALTACMRKLLITANSMIRNNEDWCPDHGKLA

SEQ ID NO: 257490 - protein, 426 aa, unidentified
MTATHSIAPTLLVAIDISKHRHEVLIGIPGKKRRRRITITNTLDDFQRLSAVLASYDMPVRIGFEATGNYHRTLAHHLGRAGFELKLVSSVGLARTREALHNSWDKNDPKDAQVILHMLEIGAVQFFHDPLIVGTADIQELSKTHEIVSRSKTELWHRILTHYLPLYFPEAERFYRISRTDWFLAFLEKYPSPHMISAMDRDAFIADAWDVVGRKVSKEQLLSDIYATAVGSVGLPVNRDSDAVRMFRLVLAEGRSLVRQRDEIEARAVALLSDLPDYQLLTTIPGVGPINAMTILAEAGDLRRFRHHRQFLKFCGMDLATVQSGMFRGQSRISKYGNAQLRRKLWMAGQTAVLKRTNSFRDKFERYISKDRHNAHLRRKAYTAIAAKMARTVHAVVKHGKPYRPFFEGVSPGGRTTLSRAVEAAR

SEQ ID NO: 257491 - protein, 340 aa, unidentified
MPLYGGIDLHANNSVIVLLNEQDEVIYRKRLSNDLPTIIRQLDPYRVEMKGLVVESTYNWYWLVDGLMEAEYRVHLANPAAMQQYSGLKYTDDHSDARWLAHLLRLGVLPEGYIYPKAERAVRDLLRKRAHLVRQHTANVLSVQNILARNTGARFSVKRIQELTKQELKSLLTEEPQVLAVTSSLAVLDCLRQQIKTLEKTVHKRLHHTPAYEQLLTVDGIGTILAQTIILETGAISRFPTVGNYASYCRCVDSNKISNGKRKGTGNVKNGHPYLAWAYMEAAQFAMRFQPAAQRFYQRKLAKSRNNTVLARKAVAHKLSRACYYIMRDFVPFEAAKAFG

SEQ ID NO: 257492 - protein, 366 aa, unidentified
MEVTTIGIDLAKSVFAVSGADSSGRVVIRRQLRRAQVLGFMRGLPRCVVGMEATGGAQYWARQFTTLGHEVRLMSPALVMPYRKGNKTDRNDADAILEAVSRPSMRFVMVKSVAQQDLLALHRVRAQLVKSRTALCNQLRGLLRERGVAVRMGVAGLKRALPAALAYDSNELSGEMRELLSEMSQWLRTLEQRIASCEARITRKFKHDERCVRLAEVPGVGPLTATALVAAVGNAQRFKNGRELSAYLGLVPRQHSSGGKTVLLGITKRGDRYLRTLLIHGARSALRQCKLEGDARSRWVARISAARGPNVAAVAMANKNARILWALLSRGDRYRSSRVLTRAVLRPGSPPPVERARGAKLRVAQD

SEQ ID NO: 257493 - protein, 419 aa, unidentified
MKPAKDASFAALIGIDWADRKHDVCLQLCDSTAREFSVLPHKPEAIEAWAGELRRRVDGKPVALCLEQCKGPLPYALSKYDFIVLFPVNPQTVARYRRAFTPSRAKDDPRDAEILLDLLERHGDKLTAWRPSSPQLRALQQLTEMRRRLVADKVRLTNRITASLKNYYPQALDWFKDKDTQIFCDFLLRWPSLNAAKRTRKETLLQFFQCHNARYPEINTRRVEQIKTATPLTEDDGVIHPNRLLMQALVTQLKVVLESILTFDKEIQALFSQHDDAALFQALPGAGKQFAPRLLAAFGEDRNRFPNACDLLQYAGIAPVTERSGNKSWVHWRYSCPKFLRQSFVEWAGETVRHSFWARAYYQQQRSKGKAHAVAVRALAFKWIRILHRCWLNRTPYDEARYLMVLQDKGSPLIATLNR

SEQ ID NO: 257494 - protein, 414 aa, unidentified
MTRYIGLDVHKRFVEYCILDAAGKKLSRGQVPCVRTTLETFATTILQPTDHIALEASTNTWSVATILRPHVARLVVSNPLRTKAIAEAKIKTDKVDAEVLAQLLRCDYLPSVWQPDQDTEQGRRLTTQHATLMTERSRIKNRIQSRMARLLLVPPCKILWTKIGMSWLRELPLPSDERLCLDGDLRMLVSLEMELKAIDQLTAITARQDERIQLLMTLPGVNFVGAVGLLAALGDITRFKDGDHAAAYLGLTPSIHQSGKRCYHGHITKAGSNHARWLLTQGVQHLARHPGPLGVFFRRLAKRRNRNVAIVATARKLVTIAFLMLKHNEPYRYAKPELMRKKFRNLHYLATGERLPTQRAKRPRGLKEIYRVIGLPNVSSLSEMPKGERAMLKDRKLADWVRQIHTDQAATPKA

SEQ ID NO: 257495 - protein, 342 aa, unidentified
MEYYVGLDVSLKQTSICVVDHSGSVVREGVVDSDPEMISVYVRSKAPDAVRIGLETGPTSTWLWTELKRLGLPVICIDARHAKAVLKMQINKSDRNDAIGIARIMQTGWFKEVHVKDIDSHSVRALLASRALLVKVKRDLENHVRGLLKNLGLVIGRAKFNVFATRAEELIEGRPELKAAIRPLLEARNAVGQQVGELDRKVMKLARHDAQVRRFMTAPGVGPITALAFKATIDDPTRFARSRSVGAYVGLTSRRHASGEVDWTGRISKCGDAMLRSYLFEAAGVLLTRVPKWSAVKAWGVRLAKRNGLRKAKVAVARKLAVILHRMWIDGTEFNWSKQIAA

SEQ ID NO: 257496 - protein, 359 aa, unidentified
MSHFAGLDVSIEETAICVVDELGVVLMQRPVPTEPEAIASALAPFLATLRRVGHEAGALSPWLHTELKALGVPIVCLETRHVRAVMAAQRNKTDAADALGLAHIMRTGWFRQAHVKSDECYRLRLLLVQRRNLKRKFLDIENTIRHSLKVFGVRLHKVGRAGFEGRVRELVADDSLTAELMECMLNARAALWREYLKLHDLVVKIVAHDELCRRYVRIPGVGPVTALTFRTAVDNPARFKRSRDVGAYFGLTSKRWQSGTSIDVQGRISKAGDPDVRRSLYEAASAMLTRYRGTTALKSWGAKLAKRCHKKAVVAVARKLAVIMHAMWRDNTEYADRPDGAGANEPATQKDRKLLGAHA

SEQ ID NO: 257497 - protein, 407 aa, unidentified
MVDEALFIGIDISKNKHDIAIMDSDKHLVCHAFVIKDNSNGFKQLYSKTIHYCQKNGAKLVYIGMESTGDYWKNLYYFLRQQPGNFHISVINPVRTKAFAKTELRRAKTDPVNAKDIARFMVEKKPADFQAREAVLDSIKDLYRQMDALKKQQAMSINRLRSELSKVAPELERHFSNFGSAQLLSLLSHFPTAEQISQSTLSAIKTVRYGKKDWPLPESFIQKVKKLSENSIAHKRDKGSGYVVQSLVRHIKNIQVEMQTLQQQLKKLYQGISSEDSLLCTIKGIGKETAIFLEVYIGDINRFPNVKTFVAYFGMNPTISQSGKSIRRSSYLEKKGSGQVRQKLFMAVLNIISRRSGPIYEFYTRKVQEGKVKMVAIGAAMRKLLVIIYSMLKNRTPFNPNFKTKNS

SEQ ID NO: 257498 - protein, 414 aa, unidentified
MEVVHQRCAGLDISKSDAKLCVRTPGSRHRTFDKKVTVWGSFSNEVARLREHLIAEGVSLVVMEATGDYWKPFLYRLQDCPFEVMLVNARHAKNLPGRKTDVSDAQWLAELGAHGLVRASFVPPQPIRELRQLTRSRTIFTAERARESQRLEKLLEDSGIKLSSVASQITGVSGRAILAALISGERDPAVLADLAKGRLRVKIPALVQALTGTFTEQHAFMAATHLDHIDRLTVTITAITARIAMVLGPFHAAVDLLVTIPGVSQIIAEIVIAETGADMSRFPTAAHLASWAGVCPGHNESAGRVKSTRPRPGNSYLKGALGIASMAAARTNGTFFQARYKRLAVRRGEMKALVAVEHSMITAIWHMLSNNRPYHDLGHDHFDNINPGRERRRAIAKLTQLGYDVTLTPTGSSA

SEQ ID NO: 257499 - protein, 436 aa, unidentified
MNADIPYLSVGLDVGADFSWMSIMLPNGTLTGKPFKILHSDPSSRELAVTKIKEAQEMYSLESRCFLESTGIYHIPLLCFLRDKGFDCSVINPIITKNSTNLNIRKLHNDKFDSKKAAKIGLDASLKISIVPDDDIIDLRNLVRDYYYFKDLQSAIVLKLNAELKVSFPAYLQVFSKITTQTSLKLLEAYPLASDMLNAPKDEVIETIRTTARFGTKYAFTKYESLCAAAKDAAVFGRALPSNAIRIRLYINSYQEYQKYLDSILEELHKAVDKLQGKPAYDRICILQSLRGGGFLSAVVLIAEMGSFDLFSSPKKLYAYFGLDPAVKQSGKFNGDNVHMSKRGSSLARRILHMVALNNLKVDKGTKLPVNPVIYDYYVRKCSSKKKKVAVGAVMHKICNIIFAMLRDNKPFEIITPEEHCDRYAVEHPEIINKAA

SEQ ID NO: 257500 - protein, 402 aa, unidentified
MIQKACGVDVHADNFVATILTSKGCETRSFEKRLEDIEAFKAWLRAKKCRGVVMESTGVYWIPLYAALEDEFEVKLANAQRTKKVAGRKTDQSDSEWLAYLLRAGLIEASYVPERSIRVLRELTRLRTKMVQNRTDYKNRVHKVLQRCNIRLGSKLSNVFGRGGMEVLNGLMAGRSLDEIIHESHSRVLKEKQGELERVVRSGLDQEDVFQLQRCLRMIRSLDEELKELDARIGMLVAVREKDVRNISKVPGVAQVSAPSILAEIGDAKRFANGKKIASWAGLCPSVYQSAGKNLTGSLKQGSKNLRRIMIQVAHVASRATNSRLRLFFLQVAARRGRKKAYVALARKILCIIHHLLVTGEEYVEEGFTKKVKVGIKKLQALPLNEMARILADAGYLIQAPA

SEQ ID NO: 257501 - protein, 407 aa, unidentified
MDVVLSKCAGLDVHQRTVVACARVVAGSSVKHDVRTFGTTTAELLALSDWLSTYGCTHVAMESTGVYWRPVWHVLEGGFELVLANALHIRNIPGRKSDVNDATWIADLLAHGLIRSSFVPPEPVQELRDLTRTRKQLVREIAQHILRIQKTLENANLKLTGVLTDILGVSGRAILQALVAGESNPERLAKLVRGPVKASQADLMAALHGRVTAHHRFLLKLHLTQIEALEAAVVEVEARLGMALAPFHSALARLTTMPGVSETVARVIVAEIGFDMTRFPTAGHLVSWAGLCPRLHESAGKRLSNRTRHSNPWLKTSLVQAAWAAARTKKTYLRAQFLRLKSRRGPKKAILAVATSMLTAAYYMLKHDVDYRDLGADYFDRRDKAKLAKRLVARLHDLGFTVELRAA

SEQ ID NO: 257502 - protein, 410 aa, unidentified
MEVLYPHCAGLDVHKDTVVACVRHMVNGSVRREVRSFKTTTKELLALSDWLAGEGCTHVAMEATGVYWKPVWHVLSDGDFTLVLANAAHVKNVPGRKTDVNDATWLADLLAHGLIRSSFVPDGQTQEMRTLLRTRKQLVRECSRHVQRLQKTLEDANIKLDSVISDIVGLSGRRMIEALIAGETEPGALAAMAHRRIKATPDELEAALRGRVTRHHRFLLQLHLQQIDAVNAAIDQIDQEVDAYVEPFRATVRLLTTIPGIDELSACVILAEIGRDMSRFPTAGHLISWAGLCPKNDESAGKRRSTRMRKGAPWLKTTLVQCAAAAARKKASYLQAQFHRLRARRGAKKALGALAASILTSVYHMLISGELYRDLGPHHFDQRAKAVNTRRLVVRLQNLGYAVQITPLAA

SEQ ID NO: 257503 - protein, 313 aa, unidentified
MKNDNRYVGLDVHAETIAVAVVETDGEVRFLGTIPNRAETVRRLVKRLGPANRLRFCYAAGPTGYVLYWQLTGLGAHCDVVAPTLVPVKPGDRVKTDRRDAEKLAALYRGGHLTPVWVPDQAHEALRDLVRAREAAKSDQLRARHRLQKFLLRHGRRPLQGIKAWTQKHLDWVRREVHFEALAQEAVLVDHLAEVEHARERIRRLEGAIDTAVEAAPGRMRAVIEALQALRGIATVSAATIVSEVGSLSRFRKPRQLMGYSGGVPREDSSGERVRRGGITKTGNAHLRRIVVEAAWSYTGRRYAASWSSARPG

SEQ ID NO: 257504 - protein, 351 aa, unidentified
MVVIGADVHKRTHTFVAVDDVGRELGRKTVPATTPGHTAAVQWGRENFSGEVIWGIEDCRNLSARLERDLLSAGQKVVRVAPKLMALQRAGGRARGKSDPIDALAVARAVLREPDLPVAAHDAVSRELKLLVDRREDLVVQRTSIVNRFLGRVHELDPDHSPKKRSMDRAKTHKALADWLSTLDGLLAELAADELADIVRLTATINALTQRIGIAVQAVSPTLLALPGCGELTAAKLVGESAGITRFTSEAAFARHNGTAPIPAWSGNSAGRMRLNRTGNRQLNAALHRIAVTQIGMTRSAGQAYYRKRLAGGDSSSEALRCLKRRLSRTVFNRLHADEKSRHHTSEPLAA

SEQ ID NO: 257505 - protein, 537 aa, unidentified
MKRTTKYVGLDIHQATTVTTVREETGRVIARTILPTEAAPIVDWFRGMRGSVHVAFEEGTQAQWLHDLLVPVVDRVPVCNRRGQSSQGNKADQVDADVLSDLLRRGALRAVYHGSHERATLKEPARTYQHLVEDSTRVMQRLKALFRARGITTAGSAVYQRPRRGQWLGQLASAGVRFRAEALSAELEVLQDLRPKAKAAMLAEARRDPAWAVLRTIPFLGPVRVALLLATLQTPWRFPTKRHLWAYAGLAVVTRTSAEYELDGQRAVRRRFTAILGPLAPATVLLEASTESEWVARHLESLGLTVIVADPNYAPMYATRARRVKTDRRDARTLAEACRLGAYRPAHRLSDARRHVRAELAVRDALVRTRTRYIALAKSLVRRDGLRVADSESERVAERIAALELSPTLAGELAPLFALLAPLNAEIAAADRRIAQLTAADPVVALLTTAPGVGPITASALVATIDDITRFRSAHEFEAYLGVVPGERSSGEKRRVGRITKAGNARVRWLLVEAAWRIARSRSEETGALRAWALGIA

SEQ ID NO: 257506 - protein, 348 aa, unidentified
MEHYAGIDVSVKSSCVCVVTASGKIVREATVASEPEALIGWFRSLGLSFARIGLEAGPLSQWLYSALKQAGLAAELLETRRVRKALEIMPIKTDRNDARGIAQLVRVGLFQPVHCKSVAAQEMRALLTARKLVQSKLFDVEMSLRGILRGFGLKVGPTTPRQFSGRIKELVVGHGTLEVIAQALLLLHEVLLREFGGFEKRVRAIARSDARTRLLMSAPGVGAIVALTYASAIDDPSRFKSSKGVGAHFGLTPKKYQSGETEYDGRISKFGDKSVRTALYEAAHIILVRPLKRSGGLKSWAMRVAKRAGMKKAKVALARKLAVILHRMLADGASFMLATAKNPAVAAA

SEQ ID NO: 257507 - protein, 339 aa, unidentified
MRELSLIAVDLAKNVFQVCGMTADHRVIFNKQLRRQELAAFMTQQPTVEVAMEACYSSHYWGRCFQAMGHRVKLIPAQHVTPFVRGNKSDHNDAVAIAEAASRPRLQPVPLKSVEQQDIQCLHRMRERYLAQRTMLSNQTRGLLSEFGIVAPQGHRSFVILLQQCADADCTQLSALLKSELRHIADEYSALNLRIKGLTDTLTKLAASNPLCQLLLTIPGIGVINATALVSAIGNGSQFTNGRELAVWLGLTPRQSSSGERFHSGGITKRGNRYLRKQLVHGARALLFSCRRKTDPLSHWINQLAARRGVNKACVAVAARLARLSWVLLNRQTPYRAAT

SEQ ID NO: 257508 - protein, 353 aa, unidentified
MLTIGVDFSKRTSVYSVWDATGHRMQRCKLDNEPQAMRQFFQTLPDEPIQLAMEATRNWGLYYETVKGYVDRFYLAHPVKMKAITQSETKNDYNDADMIARLTQSGFLPTAHISSLGTRQLRSLLRFRTFCVHERTAVRNQVQTLIDRNVWPAQRPSSFKNPFSRRGLAWLTTLPLPERERFILTQCLATYTHLTRQITAIEQYVQHSAVALPGLAYLKTVPGFHHSKVHLYTVLLEIDDIQRFHKARNLAHYAGLIPREHSSGDTHRTGRLVKQANKHLRTALLESVFGAMLADRGLRAYYQSVKDRRGSGAAIIATTRKLSYAVYHVLKDQTVYRAQACPPVTASGPLAEA

SEQ ID NO: 257509 - protein, 347 aa, unidentified
MNFYTQQHKHYCGIDLHARAMYVCILDQQGTKLVHKNLPTTPEAFLRLIAPYREDLVVGVECSFTWYWLADLGSKEGIAFVLGPALYMKAIHGGKAKNDRIDAHKIAVLLRGGMFPLAYVYPAEMRATRDLLRRRCHLVGKRAELLAHIHNTNRQYNLPEIGKKLAYKANREGVEDHFPDPSVRKSIEVDVSLIDHYDKLLGEVELYITRTAKGHDSQPFTRLQSVPGIGPILALVLLYEMQDIARFPRVQDFVSYCRLVKCAKESGGKRLGTSGKKIGNVHLRWAFAEAAILFLRQNQLGKEYFAKLAHKHGKAKALTVLGHKLARAVYYMLTRQQAFDLQRFVAA

SEQ ID NO: 257510 - protein, 358 aa, unidentified
MITTTERVEPARVVAGVDTHKHLHHVAVLDLTGRVLGNAAFSVNAVGYQEALEWMTEFGVLDRVGIELTGSYGAGLTRHFTAAGITVLEVNTTDKATRARRGKNDTIDAIAAAEKVLSGMATATAKDTTTVVESVRMLTAVRDSAVKARTQALNQIKDLLITAPAQVREQFDGLPLKTVAKNAARLRPDTTRLTDPAQAARLALKRLGNRIADLTAEITDAEKQLDALVQDTVPTLLSRPGIGTLTAAQFLITAGANIDRITSEAAFAHLCAAAPIPASSGMTNRHRLNRFGDRQANKALHLVIIGRMKYDDETKTYITKKLAEGKSKKDAIRALKRFVARRVFHDLATDLRPPRLTA

SEQ ID NO: 257511 - protein, 470 aa, unidentified
MNHRRLVGIDLGIATAHTVRVLDGEGNIVAKRKAWPTVESLIAVEAAALAGCPQDIRLEVVIEPTGPAWLPIAVFFTRRGHRVFRVSSQKAADLRRFLSRHAKSNGIDADTLARLPLFDPAGLRPLVLPGAERAALDRRVRATDRLTRDAAERKVRIKDLARQLLPASPLARDLGIADLAVLERYADPRALANAGQAKLTALIAKASHGHQGADRARQWLDAARASLDLYAGHPAVDFTGLAAEVATEIGLLRAVQAELTAHAAERETRYRAVDPAGLARSLPGLADIGGPALAACMGDPARFANGKQFRSFTGLVPKASETGQTDRKGQPMSKAGSSLLRTTLVRAANTARTQDPQLARIYHQQMTERGKDHLGALCVTAAHLAERAWTVMRRGTPYIICDTDGRPVTAEQAKAIIAERWTVPPDTRARRRSKKTGKAPQKVLEGQCTRGSLPRGTTSPRHPGPVKTAP

SEQ ID NO: 257512 - protein, 341 aa, unidentified
MEKATIIGIDLAKRVFQVHAAAKDGRPVLRKKVSRAQLLGFLAKQPRAIVAMEACATAHEWGRAISGLGHDVRLIPPIYVKPFVRRQKNDAADAEAIAEAASRPTMRFVAVKTEEQQARSMIFRTRDLLVRQRTQLVNALRGHLAEHGIVAAQGLAKVKVLATAMQDTGSLHPLVRELGQRYLDHIARLDAEIAELDKRLRRPSKDDETAKRLQSMPGMGPITAAAIEAFAPPMVTFKRGRDFAAWLGLVPRQHTTGGKPRLGRTSKMGQRDIRRLLIIGAMTVVRWAVRKGAAKGSWLARMLAQKPRLVVAIALANKMARSAWAMLSKGEEYRGSALAPA

SEQ ID NO: 257513 - protein, 403 aa, unidentified
MQDILTCVMGLDVHRDIIVACLVRGAVDAEPEAETRTFSTLIPEMQKLQDWVIEAECRNIAMESTGIYWQPIYEMLESCFDGEISILVVNARHMKNVPGRKTDMKDAQWIATLLRAGLLKGSFIPDKTFRELRHLTRYRKSVVHDITAQKNRIDKFLQSSGFRFTAFLSDTFGASGRNIIRHLIEHGSIDREALDKCLKTKTRNRIDEILVALNGSLSVHQRRFLNMVFLHLEDLEAHKHTIEDEITEEVLKHTDALNLLCSIPGIDVTAAAAIVAEIGTDMSAFPDSQHICSWAGLSPGNNESAGKRKSVHINKGNPYLKSMLCETAWIMASHRKLYLSGWYWKVKQRKGAKRATIALARKVLSIIYTMLKTGTPYSEECFEQRRQRCERKRANRMVNDTNS

SEQ ID NO: 257514 - protein, 353 aa, unidentified
MKRPKEKLIAGLDLHSNNVMIGVINQDGKRVTHRKLDCDLDAIVEFLQPLKPQLQSMAVESTFNWYWLVDGLRARGYPIDLANPAKIEQYSGLKHVNDTDDAFHLADLQRLNILPQGHVYDPELRPVRDLFRRRTKLVHQRTGLLLSFKSLYARTTGQALSLSEAKSLEPKEASKLYEHPANQLIAQVQAEHIGALDKSIARLEKAVLACAREIPIYEKLLSLPGVGRILGMTITMEVGDVQRFKSDGDFASYCRMVDAKRWSNGKCKADNNRKCGNQYLAWAFVEAANFARRYDESCRRWYDRKAAKAGKIIATKALGCKLAKAAWHVMAQQCHYDEKRMFPELANKPMKTS

SEQ ID NO: 257515 - protein, 420 aa, unidentified
MKVVYSTCCGVDVHKTFLVATIIKTTKGVQPSYQKKRFSTFNSDIRRFKQWLLDNSCFDVCMESTGKYWIPVFNLLEDRINVTIANPKWVKAVKGNKDDTKDSKWIGDLFRLGLVPGSFIPCKEIRILREYTRYRFKLTCCKRSEKNRFRNAFTVCNVALDAVVTDMFGKSASSITDYLITSDEFDPETCKSFLQKSLKKKADAVIESIEGYQMTSSQKERMLMVRSHLEFVQQSIDSLDSKLDELIAPYENAVSLLCTIPGVDRACAITIISEIGTDMTQFNSSKRLCCWAGLTPGNNESAGKKKSVRITRAGVYLKPALVQCAHAAVKSTATPYYKNKYERLAKRRGKKKAIIAIARMILTAIYQMLSTGETWNPCDLYKIDMLKEMQDKQKAKAVKQALKLLISQGVISPESAPTVV

SEQ ID NO: 257516 - protein, 358 aa, unidentified
MSNIKRNKLDFTGQPIYVGLDVHKKSWSVSISTQYGQYKTFSQPPEVDKLVDYLQHHFPGALYSSAYEAGYCGFWIHDRLKEKGIGCLVVNPADVPTKNKERRAKRDRVDCRKLSRSLRNGDLEGIYVPPREKVEDRSLIRTRLSMGRKQTRCKNQIKSMLLFYGVVIPEEKEMGHWSRRFIRWIEGIRMERASGDMALKIHVEELGHLRQIIAKLNRAILALSRTEEYRPWVLLLRTVPGISTLTAMILLTEIGEITRFPSIDELTSYVGLIPDTNASGEKEHVGGITQRSHSQLRWMLIEASWKAVQKDPALMMAFDQYCKRMRKTKAIVKIARKLLNRIRYVLKNRSEYVPAVLE

SEQ ID NO: 257517 - protein, 349 aa, unidentified
MQHYVGLDVSVKETSVCIIDEAGKVIREVKVATEPVAIFAVLTEEALAIERIGLEAGPLSQWLYSALAEAGLPVICVETRHMKAALSAQINKSDRNDARGIAHMMRVGLYRPVHVKTLASQKRRMLLTSRQLLQAKALDIENDLRGTLRNFGLKVGMVGTVKFEARIRELVADHPDLATIVEPLLIARRVLREQLGVLHRQLLEIVRHDEVCRRLMTTPGVGPVVALTFRATVDVPSRFTSSKAVGAAFGLTPRRQQSGEIDRMGGISKYGDALMRETLFEAALVLMTHSRKWSWLKAWGMKIARHRGMKRAIVAVARRLAVIMHRMWVDGTEFRWSRKEASGGVTVSV

SEQ ID NO: 257518 - protein, 380 aa, unidentified
MEGSITWVGIDAHKRTLVVAVLQPGQKTAEELAIDNDERSIRKFVRRLERGGSGREIRVCYEAGTCGYTLQRRLEAAGGVVCEVVAPSLISRKPGERIKTDRRDARKLVELYRAGVLTMVTPPTPEQEAIRDLCRCREDVRADLGRCRHRLAKMLVRRGHVYRGSRLWSAAHRTWLSSLAFDNETDRVVVAEYMLAIEQAERRLHALDAELEKAAQLPLYREHVAWLRCFHGIDTTIAMIFVAELHGIDRFESPRALAAYLGLVPSLHASGDSARRGKITKTGNGHIRRALVQACWQYRHRPRVGRGLRARREGQPERVLTIADEAQRRLTSRYRRLIDRGKTPNKVIIAIARELVGFLWAALRDPAPAASAPRSSRAPK

SEQ ID NO: 257519 - protein, 343 aa, unidentified
MTKISTIGLDLAKNVFQVHGIDVSGTVVVRRQLKRAAVEKFFAGLPPCLVGMEACGSAHHWARVIRRHGHEVRLMPPAYVKPYVKRNKNDGRDAEGVCEAVSRPTMRFVAVKSVEQQATLAVHSTRALLVRQRTMAANALRAALSEVGIVAAQGYEGLRELMTRLEEPSEEIPENMRCALLLLAKHWQALDADERVLERQIGKAARGDRDARRLMEVPSVGPIIASTVLAKVPDAKVFRSGRNFAAWIGLTGKDHGTGGKHRPGRISKQGDRMLRALLISGASAHLRQQKRRGVTDPWLRDLLARRPYKVVMVAFAAKTARILWAMLSKGEAYRDRASAPAAA

SEQ ID NO: 257520 - protein, 343 aa, unidentified
MADIFALDVSMGKSYCVWYRGKHCLKEFSLVHTKAGFNALRDMIKKAQKPIIYFEATGIYSRVIEHFCETNGLRFCHLNPLELHLKSESLRRVKTDQKDAHRIALTVQENTFRLIVPWKKDYLQLHELSRFYNQLNADWNYRLNHLHTALEQVFSELKQLFVNRTSKLALNIVELFPHPALVRPYSRVKLKNILMASTDKRISKMKAYKYADRLIDLAQKSYPTVSGDAIQVDEVCYYARQLIALTRKKEEVIKRMESIAQRLPDYILYCSFPGIGKQTAAQLMGELGDISRFDNANQLNAFVGIDIRRCQSGTYLGQDHINKRGNPIARKLLYFTVGNMIRQ

SEQ ID NO: 257521 - protein, 303 aa, unidentified
MYYLGIDLHSDNSYITTMDDNGTIVKRQRVANDDKRVLEYFHSLPDPHKAVVESTTGWYWLDDLLTDNGIELILAHAKYLKAICYAKVKTDKIDSKTLALLLRLGLIPRAHKISRELRGLRDTMRIRLRLVQQRTACLLRLYSIHAKFNGAVPDPYRFQLAALEHTRDTFSDQILALEKSLHPVLVPNDDIQRLLNIPGIGKISAFTIYLEIDGIERFDSDKHFVSYCRLVPAADNSNRTVHHRSSKDGNKYLKIAFSDTAVHAIQFYPEYKRLFQKLARRSGEATARVQLLPRNLLKLSIMS

SEQ ID NO: 257522 - protein, 307 aa, unidentified
MFVGIDVAKDRLDVHVRPADESFVISRDDEGIEELAKRLSAMVPTLVVLEATGGFETVVAAGLAAADLPVAVVNPRQIRDFARATARLAKTDALDAAVIAHFAEAVNPPVRRLADPQQRLLGELMARRRQLIEMMVAEGNRRRLLTARRTLKTVDRVLATLKAQLEEIDHDIDIAVRGTPAWREAEDLLISVPGIGHKIARTLLAEMPELGRLDRRQIAALTGVAPFNRDSGTRRGRRAISGGRIVVRSALYMSVLVAIRRKLPLAQTYHRLRASGKPAKVAIVACMRKLVTILNAILRDKKPWATA

SEQ ID NO: 257523 - protein, 342 aa, unidentified
MQISTIGLDLAKSIFQVHAIDDSGEVVIRKALRRAQVLPFFAKLERCLVGMEACGTSHHWARELINLGHEVRLMPPAYVKPYVKRGKTDANDAEAICEAVTRPTMRFVPVKSPDQQAALALHRTRSLLVKQRTQLVNMMRSLLAEFGIAMPRGLHHALAMARQLADGSANGVPELAQRLATSVACQISAAHEQLSMLEKELVAWHRSSELSQRLATIPGVGVVAATALAASVTDPERFRSGRQFAASLGLTPLQKSSGGKEKLGRISKMGDRYLRQLLVVGMTSLIRRARTAPASVDPRIAAMLERRPARVVTVAAANRTARVAWAIMTRGESYRKPIAVAA

SEQ ID NO: 257524 - protein, 297 aa, unidentified
MERTVIAVDIAKKVFQLHWVEMETGCIERLQLKRAKMLEWFTNRTAALVVMEACGGAHDWGRALIELGHEVRLISPRKVRPFVQRNKTDAADAQAIWTACQQPGMRFVPVKSEAQQIVLSLHRLRAQLMKTRIMQTNELRGILYEFGIVLPEGHAALLKALPDAMCDARTRLPAMLMDSLGEQLRRVQQLQADINLIERRLAQQMREIPACRAVAEIPGIGLLTATAVVASMGTPTAFKDAREFAAWIGLVPRQTGTGGRVRQLGISKRGDAYLRTLLMHGARAILIRSKDGPPGHG

SEQ ID NO: 257525 - protein, 436 aa, unidentified
MAKVFIGVDPHKLSATIEVVDERETVLATGRFGTDKAGYAAMRKHVAAWPERVWAIEGSNGAGRPLAQRLLADGQDVVDVPAKLSARARLFDTGHNRKTDAHDAHAVAVVAVRTQGLRVLSYDEALEALRMLADRREELTRQRVQTVNRLQRLLSELVPGNGKKDLTALQAKAILASVRPRDLPGKTRRRLAVEQLAELVAVEKRIRALTAELKQMVKASGSGLMDLRGVGPVVAARVLADVGDIARFADRNRFASWTGTAPIEASSGEIVRHRLSRAGNRRLNHMIHIAATTQIRLETPGRAYYRRKLAAGKTRAEAMRCLKRRISDVLYRQLLADAKTVDAAGPDAGPRGHRGATLHSSAAGSHPHTGTSDQPLPGPAHPTLPATKPHANPCAASAPRPSRRRAGAVKVERPTGRTTLTATSAGAHSAAPKPPS

SEQ ID NO: 257526 - protein, 380 aa, unidentified
MKKHTIRYVGMDTHKDTIVIATADEGRGEEVRQYGTIPHTMDAVNTFIRKQISQGAELRCVYEAGPTGFGLYRYLQKNGIECSVVAPSMIPKKSGVRIKNDRRDAQDLARLHRAGELTAIYVPEPEDEAMRDLIRARDDARVAARKAKQRLLSFVLRHGWNYSGRTKWTRAHYNWLSDIKMPHPAQQIALQEYIHAIEETKSRVVRLSAEITKLVKEWRFEPVVSAIQALRGVSLLTAATVIAEIGPLGRFAKPTQLMAYLGLVPSEHSTGPSIKRGGITKAGNGYARRALVEAAWTYRFPARVSRHLRKRNCQLPQQVREIAWKAQVRLCDRYKRLMAKGKLKQVVTTAIARELIAFIWAICHEINPPHQAPITSDEHS

SEQ ID NO: 257527 - protein, 343 aa, unidentified
MELSRSHFCILGLQGETLSEGQLQTREAEVAELFQAIPPARVVMEVGTHSAWMQEIIAGEGHEVVVANPRLMEGSKRRKRKNDRIDAKKLARLGRVDPQSLYPIRHRSREVRQDLVVLRAREALVAARTELINATRGLVKSMGTRLPKCSSESFGHKVKDAIPEKVREALLPLVQLADALSACIQSYDQKIAELGSEKYGHTKLLRQVKGVGPITALAYVLTIENPELFAKSRDVGPYVGLVPKQEDSGESQPQLGISKTGDTMLRKLLVGSAQYILGPFGPDTDLRRYGLRLCERGGKNAKKRAAVAVARKLAVLLHRLWVSGEVYEPLGYTASRRIVQQAA

SEQ ID NO: 257528 - protein, 423 aa, unidentified
MISFPKRERAQRAAACVGVDAGKFAHTLVVRPTGQPDSKPLSFPTTRAGFEQAVAFIRQQVPGARTGAVLVGIEFAGNYGFTFAHYLRELGFAVVSVLPAHTKRWKDVAHNQPLKTDAKDAGTITDLLAQGHFVGFPFLEPAYADLRYLVTARERLAVLRRGAITQLRALLQVVFPEYETIFPLVSQRTAVLLLRAFPGPQQLLAAPKAKVLRVLRAGSRGHLGAEIYERLVVAARASLGLPGAQVRLRQEIVLTLDRLALFEQQIRALEVELVAALEAVPETPYLLSIPKVAAVTAAVFLGSIGDPRAYDAGAQILRVAGPSLVERSSGVLHGTKRISKRGRPLLRATAYLFAVRSITTGGLFRADYEALCARNGGQKLKAIVAVMRSGLQLLYSIARDRRRFTVEPPPRRHARPTLEVTPA

SEQ ID NO: 257529 - protein, 316 aa, unidentified
MQTPLVFVGIDVSKAWLDVGLRPSDEQTRVPYDAHGITTLIAQLTQVRPTRIVIEATGGLERLLLRALVDAALPVVVVNPRQVRDFAKATGQLAKTDTLDAQVLARFAEVIQPSLRVIPDAQTAELAALLARRRQVLAMQGAEQNRLDRAPDRVRKRIEVHLRWLRDELARLDADLDDLIQQSPVWRAREELLQSVPGIGPVMSRTVLAELPELGLLNRKQIAALVGVAPFNRDSGRLRGHRTIWGGRASVRRVLYMAALVATRWNPVIRLFYQRLRAAGKAPKVALVAAMRKLLTILNAMVHAGAPWQPVVAQEA

SEQ ID NO: 257530 - protein, 408 aa, unidentified
MEVVHARSCGIDVHQASLAVCVSIKENGKSEKYKLRCGTTTAELLRLVDWLHEHGVTQVAMEATGVYWKPVWHVLEGQFDLLLANATQVKALRGRKTDLKDGERIADFLQHGLLQGSFVPPQPIQQLRDLTRSRTMLKQEQARISNRILKVLEDANIKLSSVMTDVMGVSGRAMLRAMIQGESDPDQLAQLARRSLRGKIPLLQQAARGSLNEHHRFLLEQWTAVWDELAGRIAKFEQRIEEQMRPFEAAVKTWSSLPGISRVTAWTLVAELGTDMGQFPTAAHAASWAALCPGQEESAGKRKTGRTRRGNVWLRTALTQAAWGASITKGCYFKAFYHRLAAHKGKKRAIVAVAHALLVTGYMLLFTGREYKDLGADYFDRLDQERLTKRLVKRLERLGHKVTLQPAA

SEQ ID NO: 257531 - protein, 400 aa, unidentified
MSGLKGGFDSFVGIDVSKDKFDACGITGDAEKLFQCSATMDRKGFEKLKDHLAVVSASSVLIGMESTASYHVNLFSYLVSEGYNVLIINPLLISNYVKMQLRKTKTDKKDAVVIALFLLANGSTLIQRVTPSVISDLRDLSRQRESLVDDMTALKINIKRLLNITFPELEHMTLVFTKSMLKLLQQYPSAFALRSADLVQLSQMLIADSYGRKREAFATELIKTARSSIGINSPAKEIILKQQVTLLLHLEDALQEITGVLIEMSRKLMEEDINILTSIKGIGDKSAVNFLVEMGGDITQYDDSGKIIAMAGLDPAVYQSGQHEGKGRITKRGNRHLRRIIWMMTTRVIHYSDIFKVYYLKRRKEGLPYKMAVLATAHKLIRVIYAMLTQRTTFCPQVNS

SEQ ID NO: 257532 - protein, 485 aa, unidentified
MKAQRAKAYRRSHRHQSGPIRPAASMPVVNPHAAGIDLGATEHWVCVPEDAVPEGQANVRAFGAFSADLDQLVEWLRACGIKTAAMEATGVYWVALVQKLEQAGIEVVLANARHLKHVPGRKSDVKDCQWIQQLHSYGLLNGSFRPTQDICALRSLLRHRQNLIESCGREVQHMQKALQQMNVHLHHAVSDLVGATGLRILDAILSGERDPQQLVQLRDEQLCTKTTREELEKALAGDWREEHLFVLRQALATYRHLLNQVLECDAQIEQALVQVIIPPPAPLESPIPPNPKAKDGAPAQTKKKRFHRLKTGTSLKRDLTQELKRVCGVDLTQVIGLNVLSVLIIISEIGLDMSRWRSAKAFCAWLGLCPGNKISGGKVLDSRTAHVINRAAILLRTLAPRIGKTDTWLGIFHRRLRARLGPAGANTATARKLACLIYHLLKYKEDYIEVDHLVFLEKIRKQRVVRLRKQAQELGMQLTELQQAA

SEQ ID NO: 257533 - protein, 342 aa, unidentified
MNLPVRIGMDTSKSVFQLHGVDENEVVVVGRQFRRAEMIRYFERLPPVLVAIESCGSSHHWARLLQSFGHEVKLIPPQYVKAYVKRGKNDAADAEALCEAVTRPSMRFVPVKSKERQAACMLMTVRERLVSVKSQLSNAFRSYAAEFGIVGPAGRQNVTALIKRVLEDDSLPEMARDLFRLQAEEYAAVQARLAKIEAKLMKWHREDDVSRRIATIPGVGPIGSSMLSMKAPPPETLRSGRDFAAWLGLTPKDHSTGGRQRHGGITKAGDSVLRSTLIVGATALLRHIRKGRHKPTLWLASLLERKPPKLVAVALANKFARIAWRLMISGGVYNRPVAAMPN

SEQ ID NO: 257534 - protein, 380 aa, unidentified
MTATLRDQATTATEVMYMALELSGSKWRAAFATPGDERTPQWSIAAGDLAALARTVERAKAKLGGAAGTVVRSVYEAGRDGFWLHRWLQAQGVDNRVIDAGSIEVNTARKRRKTDRLDARLLLRKLIAFWGGDRRVFSVVEVPPQEVEAVRRLERERERLVGESTGHTNRIRSLLALEGHARVAVDRHLRERLAELRRWDGTALPRCLIEEIEREFARLEQVREQRRSVEAEQQRLVEAGDEEVMQVVRTLERVKGVGPGSAWILSLEMLGWRRFANRKQVAALAGLAPTPHASGSSEREQGIDKHGNRRVRAVMVELAWRWLRWQPHSELSQWFRRRYGGASRRQRRIGIVALARRLLVALWRYVARGELDPDVVLSAG

SEQ ID NO: 257535 - protein, 342 aa, unidentified
MQQYVGLDVSQKETAICVMDDAGKIVFEGKARSEPGALAKVIAKRAPSAARIGFETGAMSSWLWHELKRIDLPVVCIDARHAHAALSVRINKSDPNDARGLAELMRMGWYREVRVKSAESQLVRSLLVARSRLVAIRRDLENQVRSLLKEHGQLFPRAIGHQFRDRVRQMLSESHPLRAIVGGLLSVHERVSDEQTAMDTRVRALAKADQTTRRLMTVPGIGVVTALTFRHTIDDPARFRSASSVGAYLGLTPRRKQSGELDLTGRISRWGDRLLRSYLFEAASVLIHRTKRWSPLQAWGLRLVKRIGLKKAKVAIARKMAIVLHCIWSDGTEFDWGAPKMA

SEQ ID NO: 257536 - protein, 343 aa, unidentified
MDCYVGLDASLKKTSVCVVDGTGKVLCEGVVDSQPSAIAKFLKSRALGAIRIGIETGPTSIWLTTELRALGLPVICIDARHAKAVLKMQINKSDRNDAAGIARIMQTGWFKEVRLKGFDSHAVRALLTSRATLVKIKRDLENQIRGLLKIAGLLVGTARGNAFSQRVLELAEQSPELAVSVIPLLTTREAIGKQLYDLDRKVLRLARGDRQAQSFMTAPGIGPVTALCFRATIDDPARFSRSRSVGAYVGLTTRRYSSGEVDWTGRISKCGDPMLRSYLYEAAGVLLTRVQKWSALKAWGMRLAKRIGMRKARVAVARKLAVILHRMWVDGTDFRWSAKEATA

SEQ ID NO: 257537 - protein, 419 aa, unidentified
MRNSNTKKLKRISEKTLLVTVDMGKVKHTGYYRFPDGTEGKTFEFFNSRKGFEEFWWRICQAKRSLNLTDVVIGFESTGPYAEPLLHFLRKRNVRLVQVNPLHTKRLKELQGNSPNKTDKKDPKIIADIIELGHALTVIIPEGTVAELRRLTQARERSIQRMGILLNQLRDLVFLIFPEFMPVMKDITLKSTQYLLKNYPRPQDIGKEGAESLTQILKKVSRGRLGRERAEALYHAAMDSVGIIEGHDSIVLEIKEIISTIEGIERFVSEIESLMSKHLKEVPYSRFILSIKGIGEITAAGLIGEMGDFKKYRTVSEVIKHAGLDLFEISSGKHKGKRRISKRGRPLLRKLLFFASINVVRKGGILHKQYQHHLKKGMPKIKALVAISRKLLSIIFALVRDHSVYIARYTKTQQLKEAA

SEQ ID NO: 257538 - protein, 336 aa, unidentified
MEQQWVGIDVCQKYLDVYIRPSGKLFQLTNDEFGIAELIQTLKEIKPELIVLEATGGMELNAAIELTKAQLAVAIINPRQVRDFAKATGQLAKTDAIDAKILAHFADAIRPQVREIKDESSRQLQDLVQRRRQISDMITAEKNRRRGKTNSVQASIDEHIEWLEQQLKEIESHPRQLLYEGNPQDRTVSQIKSAIAKCEDWKQKKKLLTSVPGVGEIVATTLISSLPELGKLSHKSISYLVGLAPLNRDSPKGYRFAYGKSRGKRRIWGGRTNIRCMLYMATLVAVRFNPIIKAFYERLLSKGKLKKVALTACMHKLLIVLNAMMKNNQAWQASSN

SEQ ID NO: 257539 - protein, 456 aa, unidentified
MARKRKNSTKKIGAPVLHCLNPNAAGVDVGATEIYIAVPVDRDPQPVRHFSTFTEDLHAVAAWLKACKIETVAMESTGVYWIPLFQVLEARGFTVFLVNARHVKNVPGRKSDVSDCQWLQYLHTVGLLRGSFRPEQAVCTVRSILRHRDSLVQMASSHVQHMQKALDQMNLQLHHVINDITGVTGLTIIKAILAGERNPHTLAALRDRRVKATEDTIAKSLVGDYRREHLFTLGQSLTAFRHYQELIGACDHEIAQYLEAFESKVDPREGSLPESKNEQEPSDDVSRFDLGSHLHRIFGVDLTRIPGIHILTTQTLLAEIGPDLSRFGSAPAFTSWLGLCPDNRVSGGKVLSVKTRKVKNRAATALRMAAQALHRSQSYLGHFYRRMRAKLGAPKAITATAHKLARIIYHMVTMGQAYDETVCAQNEIQNRLRLEARLRKQAREMGFQLVLANTAV

SEQ ID NO: 257540 - protein, 403 aa, unidentified
MYAVGIDVSKGRSTVAVLEPLGKTVAKPFEVRHTKSGMNDLVNYLNTLGGECRIVLEHTGRYYEPVLRWLSGAGLFVSAVNPKLIKDFDNNSLRRVKTDKADARKIGRFALDKWHKLRQYTAMDNIRTQLKTMNRQMSFYQKQQTAYKNNLIALMDETYPGANKFFTSPKRPDGSEKWVDFIEKFWHVDYVCNISLKSFTEKYQKWCKKHGYNFQPDKPAEIYNASKELIPILAKDDMTKLFVQQAVTQLNAISKAVEELRQQMDSLASQLPEYPVVMSMFGVGTTLGPQLIAEIGDVHKFTKRSQLTAFAGVDPGVNEFGDYAQKSVHTSKHGSPYLRRTLFLIMEVLIKNQPEDDPVYRFMAKKRDEGKPYYVYMTAGANKFLRIYFGKVKEYLNNLPPEE

SEQ ID NO: 257541 - protein, 317 aa, unidentified
MIVAGIDTGKGKLHVCLLPTGERFSVNNDEGGIATLVAHCRAAGVVRAGIEATSIYHRAAAQALREAGIETAELQPRQAHGLAVALLKRAKNDTIDAFVIAKLVELLNGPWKQPPAAQLEALAEALTFIDMLDERLVVLKTQRERFTAKRFLAGLDKAIKALEKQRRGELRRLIACLRKDQMLGERLDLLLSIPGLGERTAASLLIRMPELGSLTREQAATMLGVAPFDDKSAERDGQRHIAGGRARLRKTMFMAAFAAAHHWNADLKAFYARLRASGKAHTAAVIACERKLIILANAVLMRGTPWQDRRGMPCLAN

SEQ ID NO: 257542 - protein, 402 aa, unidentified
MHYLGIDWATDKHDLCLMADDGRVLSQFEITHDMAGFSKLYELLKTLPDIRINIERSDGLLVDWLVQQGTDLYITPPHVLAHRRPTRVKDDKGDAFLLAYLLRLGDPDCRPYSRQSQIVTHLRQLARAYDRALGEQRRLSNQLIYNLRQYYPVALTLFSFVRSPLTLAFLEQFPTPQEAEKITYADLEAFLGSQNYRHMHRLDLIYQRLQVPMPHASVQAGYVEHVKMLVPILRTLHHQKAALIREMKKVFLTHPEAEWWLSFPGTKGPLTPARLLAWIGDDRNRFPTAASLQAVAGTVPITRRSGKSKSVEFRHNCSHPLRSAADDLARQSLRHSGWAKAYLQQQLDKGHSTPRAYRALANRWMKILWTLWQRGEMYDEVIHVTNRSRQGLPTVVQLAEAV

SEQ ID NO: 257543 - protein, 400 aa, unidentified
MICVAGVDIHKTFFEVAYRDSNGEIKVIRVDNNAHGLGKLIKLLKAVGVTDVYFESTGDYYCALYYTLKGAGIKPHVLNAYKVRRPEANKTDERDAVWLLKIGESKLFDDSYIPDERIQILRFLTRKKTKITDRMADLKREIGSILSRLGLNIKQLSGKLRARGRLKMLLNLISGKAKIDDVEDEVVRAIYEALTSEASGYYMLVVGVYLKELELLEREVRELDKAILSLIDSIKDKIEILMSVPGIGLDLAIKILAEIGEIDRFPSAKHLVSYAGLAPTAKNSGGRSRSGKPTKKSNKHLRRYMYLVAMGAVRSKNSVVRKWFDRLIGRGKHFKVAIIAVARRLLAIIWHLLMKGEKWFGEDFVKKLRKLPKIRKIKISLKKALEILEKAVYIIKPPNS

SEQ ID NO: 257544 - protein, 320 aa, unidentified
MEMAEEPVFVGIDVSKERLDVAVRPGNTIFSEPNAAAGIQAIVQRLEALHPVVVVLEATGGYETEMAYALDHAALPIVIMNPQYIRSFAKSTGKLAKTDKIDAQVLAHFGEAVKPIPRPLGDLERRELANLMSRRRQLTEMIVMEKNRRHQASIRVRPNIDHHLTVLEQLLKDLEREIDDFVRRTPLWHEKADLLRSVPGVGPVVSCQLLAFLPELGHLSRKEIAALAGVAPFNRDSGKMSGKRMIAGGRKHVRIALYQAVLSGHRYNPVLKAFYHHLIGQGKKAKVALTACMRKLLTILNAMMKHGTRWSPPACLTLSP

SEQ ID NO: 257545 - protein, 338 aa, unidentified
MAQVATIGLDLAKNVFQVHGVAADGKVIIRRQVRRADVIPLFAGLPPCLVGMEACASAHHWAREIAALGHTVKLMPPAYVKPYVKRGKTDAADAEAIAEAVTRPTMRFVAVKTVDQQALLMLHKVRDLLVRQRTMLTNALRGQMAEYGMIAARGLGGVTALVTLLHEEQDRLPVLARTALHALATQLRELASQVKTLEARILEWHRSDEASRRLATIPGIGPITASAIAATVPDASLFRSGRQFAAWLGLTPKAHSSGGKNRQIGISKQGDGYLRRLLVVGATAVLRFARQNNASRAWAAKLLERKRPKVVAVALANKTARIAWAVLARNQVYAAPST

SEQ ID NO: 257546 - protein, 388 aa, unidentified
MNVGADKSEPLTAIRTDLGAIFVSLELSRSSWLITSLSPGGGEKMSKHSVPGGDFAGLMERFAQLQEKARLRTGQSFRIIVVQEAGLDGFWIHRALQNEGIESHVVDAASIATSRRRRRAKTDKIDGETLVRALLAYKRGEPRVCAMVKAPTPDEEDRRHLCRERKALTAERVRHVNRIKGLLFSQGISGYQPLRRDRRQRLEELQTGDGRAFPQHLKALVNRELDRLELLLKQIKTVEAARDALLAVGQTAKPAPAAMLLEIRGIGPEFAAILWSEGLFRHFENRRQIAAYAGLAPTPWQSGAVDREQGVSKAGNPRLRTTLIQLAWLWLRNQPRSALSLWFHERVSRNGGRLRKTTIVALARKLLVALWKYVTAGVVIEGVTMKVA

SEQ ID NO: 257547 - protein, 381 aa, unidentified
MSYHRTPIFWVGLDVHKDSVTAAVFRNRDPEPLRVDRLPYELKKIRRWFERLARDGEVRACYEASGAGYVLQRSLTEWGVACELAAPSLIPRRPGEHRKTDRRDAIRLARDFRDDRLALIYIPTEADEQVRDLVRCRETFQREIIKSRHYILKFMRRRGFVFREGTHWTVRHLNWIRQVLQPGTLSEVDRTVLGEYLALLEYELQRRDELDGRIEELALTPRFKPLVDRICCFRGFKTQAAMVLATELGDVRRFESPRQLMAYLGLVPGEHSSGERRRMGAITKAGNTRVRHVLIQAAWHYRRRPVVGAALRRRQRGQDPAVIAHAWKCQHRLYKLFHRLAERRPSQVAATAVAREMVGFLWAVLRDVDVARLQEDAREAA

SEQ ID NO: 257548 - protein, 336 aa, unidentified
MCLFNSNSYKSDGTPEVLVSSYLQGGVSHVKEHVVYCGIDVAKGQLDGALLGKRWQVPNTKAGIRRLIKMLRQRNTCPQVICEASGGYEQDLVELLHQAAVPLTLVQPQRVHQFARASGILAKTDKIDAQVLVRFGQALAPAPNAAPGAQTLLLRELDRQRAHLSGLLVAEQNRRAQLRDPSLRQLSAQLIKQIQGHIVRIDARTQAIIAADQELKAKAKMLTSFSGVGLRTATMLLAQMPELGQLNRREAAALAGLAPFNRDRGTWRGQRRVCGGRSLVRRGLYMAALTAARRNHILAPFYQRLRAAGKPPKVALTAVMRKLLIALNSALSPTPA

SEQ ID NO: 257549 - protein, 341 aa, unidentified
MSIITVGIDLAKNVFAVHGVNESGKAELVKPKVSREQLLPLIVQLPPCLIGMEACSGAHHWARLFRQYGHTVKLMAPKFVTPYRMSGKRGKNDAQDAAAICEAVTRPKMRFVPVKEEHQQITLCLHRTRQGFIEERTATYNRLRGLIAEFGIVLPQKVTCLRRSIGAHLEDLPGYANRCIGDLLAHADQLDARIADYDKAIAQTAREDARSKRLMERSGIGAITASAFLASIGNGHDFANGRQVAAWIGLTPGQHSSGGKARLGRITKAGDSYLRSLLVMGARAVLNSLGDKQDPFSRWARSLLERRGYWRAVVAIAAKNARVAWAVLRYGEDFRPNQSVA

SEQ ID NO: 257550 - protein, 358 aa, unidentified
MQSNKKSFKGQKIFVGIDVHAKTWAVETLTESGFTKRHAQEASAKVLFDFLSKNFPDGEYLAVYESGFSGFSTYYQLKEYGIHCVVVHAADVPSTQYEQVMKTDKIDAGKLARALRKGDIKPIYIRERENLDDRAVVRLRKTIQKQLSGYKTRVKHLLHTNGVKLPARFDKPGTHWSRAFMNWLKDEVVLLSSTRLSLDLLINQVESIRKNLLEATRAMRILAATDKYKANYELLLSIPGIGFNVAMCLLTEIYDFKRFGNENCFAHYLGLVPTCHDTGDKHSTGGKTFRGNKLLGPMIIEACWVAIHKDYGLSQAYCSYKQKMKPQLAIVKVARKMSNIIFSVIKNGKKYEPYKWEE

SEQ ID NO: 257551 - protein, 412 aa, unidentified
MLFVGDDWAEGHHDVEIVDDDGEVLARRRLPEGLEGVTRLHALIAQQMPSEWADLDPAEAASWVKVGIETDRGSWVGALVAAGYEVFPINPMSVARYRERHSTSGAKSDAADAHLLAEIVRLDRAHHRPVAADSDQGEAIKLTARTHQSLIWDRSRHVLRLRSTLREYFPAALQAFEDLDAPDALELLGKAPDPDQAAALSTATITAALKGARRRNIENRAKELRRVLAAPQLRQPPTLQSAYAAVVASEVAVITALNLQIDRLGAVMGEHFGRHRDAEIYTSLPGLGQILAARILGEFGDDPDRYTDAKARKNYAGTSPITRASGTKKVVLARYARNRRLGDALHQCAFCSLRGSPGATAYYHQLRDRKIGHQAALRQLANRLVGILHGCLKNHSTYDEQTAWSHILKATA

SEQ ID NO: 257552 - protein, 351 aa, unidentified
MVYVGLDVHKEFCQAAVIDDSGRVLSNEKFSSTREELDRFLAGFKDAKFVLESTGMWEFIFEGIEKRGFEAQLAHPLRVRAIAEAKVKTDKVDAETLAQLLRADLIPRSWVPSRDIRDLRQLVRQRAYLVQQSTSFKNRIHAELLRRGVRRPLNFVMPFSKKSIDWMRSLEIPTVISCLNCLESVQVQIEEMNIKLLDEFNRRPDAQLIATVPGIGFYGALLIHAEIDDIKRFSHPEKLCAYAGLVPTVRQSASSVHYGAISKDGSSYLRWMLTEAVHTHVHCEPGSRLSKFHAKIARRRGKQKAVTATSRKLLLIIYWMLVRHEPYHSQGLDPGFPPARNECDIGIGAGP

SEQ ID NO: 257553 - protein, 332 aa, unidentified
MTTHICGIDIGKTVFHLVGLSKEGHIVVKKRFNRKQLLTYTVNLPACLIGIEACAGAHFLARALVSQGHNVKLMPAEYVRPFVKSNKNDYVDAEAIAEAVQRPTMRFVPIKNEAQLDLQALHRVRDRWIGRITAVINQLRGFLLEHGITITAGPAHLKRQLPSILEDAGNLLSTRMRTLLMELREEWEKLEEQIEATNRELAQSAKKDDGCQRLLTIPGIGPLTATALTAAIGNGTAFCKSRDLAAWLGLVPRQHSTGGKARLLGISKRGNPYLRRLFIHGGEKLALFAHEWLGREIDIRRFAGCGRIPANTQTIEREPAASFKLPQDHYQN

SEQ ID NO: 257554 - protein, 451 aa, unidentified
MSKASRLSRGDKRRNDRLTRFRGIVRRDHAVAAIDLASNKQVVAVVDHDSRIVARRTFHCAPPQLATAIEWSRTAAAAAGFAGIVIACEPTGHRWKTVRDLTAAVGVQMVCVQPIAVARARETEDFTHDKSDDKDALLIARLTTQLHIYLPEHADEQWTRLRHLGVRRSQQLTRRGAAQQQARDLLEGAWPHALDCAGQPFKSVTWLAAMAVIGADPTPLTAQGSREQAVAWLREHVRAELPCWGGRRVTTRILVAIVDAAFAVQTETTITAEAGALERARYALADFHHARTACEQVEAAMIEVLTGLGLHELAGSIPGVSAVSVAAILAETGDLTRFDSARAVVKHAGLCPRENSSGAYRGATRISGRGRPLLRVAAWRAAFAALTHNEVYAARYRHLTSREANRLNPNQARVAIAAALLRQLYVVITTATPWNPDIAAGRTRPVERTAA

SEQ ID NO: 257555 - protein, 341 aa, unidentified
MKVSTISIDLAKNVFQVMGFTHRRKTVFNKRLNRVQLAEFMQMHPPCRVIMEACYSSHYWGRTFSSMGHDVGLIPAQHVTPFVRGNKNDTNDTLAIFEASERPFIRFVPIKKQAQQEILMLHSLRERLLKNRTSASNQLRGLLTDFGIIFGLGHKAFSDKMKELLASESLSVTIKWVITDIYKEYSSLITRLKEIEKQLKMDIEVNPLGKILLSIPGIGYLNASAFVASIGSGQAFLSAKDFAVWLGITPKQYASGHKSVMTGITKRGDCYLRKQLIHGARALLSHAGKKQDALSVWICQLRARKSFNCTAVATAHKLARIMWTLLQKQCCYTPQLAKVAV

SEQ ID NO: 257556 - protein, 469 aa, unidentified
MEKAIGIDPDASGFDCVLVGGETGRPVSKRFSMSAGDLQKFLRWVEEQSPSIVAIEGINGQSGPIEKALREAGVVFHSFRPSDTRNYRRGVLGENKNNERDAEAVALYALSLRERGKLDRWRRVWAVDVELQLLTRRYESVGKQMTAESNRLWKLLRTASPDLYLALQGKLEEVDCEPKKLRNRGFLTLLATRPQIGEWQGLSEDELMEAMGGGEYKGRRAFVRQLQSVAGTFPQLSKPMTLMIRWSAQQVERFKREQTELESMLEKVGQERLTVRTLKRRRGIGTITATGMIAEMIDIRRFPAEDNLASYSGLGKVQDNSGERERMKEALKYNRRLKDLFMSAAMNVVRFDPDSHLAGYHRNLVKRGMKELEATKRVARALVRVIYRELMALIEAEPQAVPAAEQQEEGQSDVASGQGRGDKQHLSDTPLRSPRTSKARRQERVKRTTKRRSSGKVVNGRRARLKKSA

SEQ ID NO: 257557 - protein, 343 aa, unidentified
MAYFAGLDVSVKETSVCIVDDAGKIVREVRVASEPEALLQVLTNTIYRFKRVGLEAGPLSQWLYSVLAEAGFPVICVETRHMRAVLKAQINKTDRNDARGIAQMMRVGLYRPVHVKTLRSQKLRVLLTHRKLLQSKAIAIENDLRATLRNFGLKVGMAGTVKFEARIKELVENLPDLAVLLEPLLVVRRVLREQLGILHRRLLAIVRDDDVCRRLMTIPGVGPVVALTYRATVDVPTRFRNSKAVGAVFGLTPAKYQSGENDRTGAISRCGDEMMRTMLYEAAQIMLVRSAKWSWLKAWAMKIARHRGMKKAIVALARRLAVIMHRIWVDGTDFRWTREVAAA

SEQ ID NO: 257558 - protein, 411 aa, unidentified
MQYFIRKEGMPMLSIGIDVSKGKSTVCGMKPGGEIVYTPFEIQHTREGMSELVSLLHNSGEEVRAVLESTGSYHCPVVAALLENGIFVSVVNSLRMKRFCSQSIRKVKTDRIDAMQIALYGLAYWQELQPTKLPEDTYRELQLLARQYYQMTSILIKAKVDFNALCDQVLPGMQELMNDHAGRHKLSDFVLRYRHTAHILEMGETRFRKDYCKWAEKKGYRNCERMAALIFATAQNGIPVLPNAPSTQIVITEAIRVLHTVEASRDAILTQMQALAKTLPEYSLVREMPCIGDTLAPRLIAEIGDVRRFHSKRALIAYAGIDAPPYQSGKFCANNRHISKRGNRYLRKTGYEVMQSYVMHKPANDPIFTFIEKKRGEGKSGKLAMVAGLNKFLRVYYGKVTELYRSLPAIE

SEQ ID NO: 257559 - protein, 384 aa, unidentified
MDVHTSNYTLCSLDPEYGVEKDNYFAEVQFTNNFVTNIVNYVTNLKKKLKDCEFVCGYEAGCLGYSTYKDLTKAGINSVIMAPSTMAVQKGGKKVKNDRRDARVIAQCLAYQTYKEVYVLSEHDEAVRGYLRMRDSHNKALKRIKQQIIAFCTGHGLFSPTKSNWTVAHLKWLKDLKFNDPVEQEILNEYLSSLTFLSDKIKAMDVRIEELASEKQYCENVKKLRCIKGIETNVALTLLAEIGDFNRFSKPTDFASYLGLIPGEQSSGDKVRGTGITKAGNSTLRRKLTESAKGYWRGRIGIKSATFKKLEKELPKEVTEYALKANTRLQRKFFNMTHVKGKNMNVAASACAREMACFVWGLITNHYDKAPAVPKTDEELLDLN

SEQ ID NO: 257560 - protein, 412 aa, unidentified
MDVIHPRCAGLDISKKDAKVCVRINGAGRRRTSETVTTFGATTRQIMAMRDHLAAQQVTCVVMEATGDYWKPFYYLLEDLSGVELMLVNARHVKNLPGRKTDVADATWLAQLGAHGLVRGSFVPPEPIRQLRDLTRTRTAVTRERTREIQRLEKLLEDAGIKLSSVAADLNGASSRAMLGALLAGETDPAAMADLAKKRMRVKIPQLTEALYGRFTSHHAFLTRMHLDLIDQHTAAIEQLTDRIEVVMEPFRGFRDLICTIPGVGGYTADVVVAETGADMTRFPTAQHLASWAGTTPGNNESAGKVKSRRTRPGNPYLQGALGTAAMSISHTRDTYLAAKYRRIATRRGPMRANVAVQRALLVAIWNIATTNTAYHDPGGDYFTRLNPQKARNNAVRQLEAMGYRVTLDQAS

SEQ ID NO: 257561 - protein, 352 aa, unidentified
MKSENLEEIAVIGVDIGKDTFHLVGFDQTGQRVLRKKIKRLALQPTFESFPRCVVGMEACMSAHFVSRMLRKLGFEPRIIPAIYVKPFNKGQKNDYNDAEAIAEAAMRPNLRTVTEKSQDQLDLQAMHRVRSRLVARRTATINQIRAFLIEQGITVRAGRHRLQSPFEAILENRRDEISPRMRSTLLGLYGDWLWVDERIKAISSEIEDISRSEENSANIMTIPGIGPLISTAIVAAIGQGEVFDRGRDFAAWIGLVPRQFSTGGRTILGRISKRGNGYLRMLLVQAANVILMRPHRWDAIGLGPWLRGVTGRMPHNKAAVALANKLAHTAWSVLRYGSKYKVEGDEALAAI

SEQ ID NO: 257562 - protein, 420 aa, unidentified
MKVVYQTCCGVDVHKSFLVATIIKTTSGVQPSYQKKRFSTFNNSILEFKKWLLDNSCRDVCMESTGKYWIPVFNLLEDELNVTIANPKWVKAVKGNKDDTKDSKWIGDLFRLGLVPGSYIPCKPIRILREFTRYRYKLTSCRSSEKNRFQNALTVCNVALDSVVSDIFGKSATSVINYLLEQSDNSINHEEISSRLLRSLKKKSESVIESIEGYQMTDAQKYRIRLVHAHMDYITSTISDIDSMIDSLVEPYENAVQLLCTIPGVDRSSAITIISEIGTDMTQFSNSKRLCCWAGLTPGNNESAGKKKSVRITRAGVYLKPALVQVAHAAVKSNKSPYYKAKYERIMKRRGKKRAIIAVARMILTAIYHMLSTGEAWNPTDLYQIDMPEPLKNKQKEKAVKQAMKLLIAEGLIKESQLVS

SEQ ID NO: 257563 - protein, 337 aa, unidentified
MIVVGVDVHKQSLTAVAVDQAGRALAELTAGSGGELLAWVDSLAAGRLWAIEDCRQLTRALERALIGAGERLVRVPPKLMAPERRAGRMRGKSDPIDALAVARAALREPRLDYPRPGEDRLRELKLLVDHRDDLVDERRRAQQRLRWHLHDLDPQLAVPPGALDRTVWLDRIGRRLARQEQSVQVRICRELVARCRSLTRTILELERELHTQTAETAPGLLELPGCGALSAAKLLGEIGPIERFDTDAQLARHAGVAPLQASSGKHQRHRLDRGGNRQLNCALHRIAITQARMHPPARAYLARKQTEGKSRREAIRCLKRQLARTVHTTLKNGPPLT

SEQ ID NO: 257564 - protein, 342 aa, unidentified
MDHFAGLDVSVKETSVCIVDDMGKIVREVRVASEPEALLQVLSDPAYHFKRIGLEASPLSQWLFTALAEARLPVICVETRHMRALLKAQINKTDRNDARGIAQMMRAGVYRSVHVKTLRSQKLRMLLTHRKLLQSKAIAIDNDLRGTLRNFGLKVGVVGTVKFEARIKELVVNLPDLAVLVEPLLVVRRVLREQLSILHRRLLAIVRDDEVCRRLMTVPGVGPVVALTYRATIDVPARFRNSKAVGAVLGLTPSKYQSGEINRTGAISRCGDEMMRVMLYEAAQSMLNTNKWSWLKAWAMKIAKHRGMKKAIVALARRLAVIMHRIWVDGTEFRWTREVAAT

SEQ ID NO: 257565 - protein, 286 aa, unidentified
MEHFAGLDVSVKETSVCIVDEAGRITREVKVASTPEALMQVLRAPAYHLKRVGLEAGPLSQWLFGALAEANVPVICVETRHMRAVLKAQINKTDRNDARGIAQMMRAGLYRPVHVKTLRSQKLRMLLTHRKLLQSKAIAIENDLRATLRNFGLKVGVVGTAKFEARIKELVGNDPDLVLMVEPMLIVRRVLREQLAILHRHLLALARDDGVCRRLMTVPGVGPVVALTFRATVDVPARFQNSRAVGAVFGLTPCKHQSGESDYTGGISKCGDEMMRMMLYEAAQIC

SEQ ID NO: 257566 - protein, 315 aa, unidentified
MNESESTKVSVGIDVSKSMLDISIHETGESWSCSNDASGAVALVDKLRQLKPTRIVLEATGGFETLVTAMLSAASLPVIVVNPRQVRDFAKATGQLAKTDRIDARVLAHFAAAINPPLRPTKSDEAQHLEALLARRRQIVEMLVAEKNRLANNRDRAVVKDLKTHIAWLGRRLKSSDDELQRVLRASPVWRERDDLLRSTPGVGPVLSLTLLAQLPELGQLNRREIAKLVGVAPFNWDSGKWRGSRHIWGGRAAVRSPLFMATLCAIRINPTIRFFYQRLIKAGKAPKVAITACMRKLLTILNLMIKTQTPWRTA

SEQ ID NO: 257567 - protein, 351 aa, unidentified
MSQTPRTSITAVGIDIGKNSFHIVGQDDRGAIVLRQKWSRSQVEARFANMPPCLIGMEACVGAHHLSRKLKALGHDARLMPAKYVRPYSKGQKNDFRDAEAIAEAVQRPTMKFVATKTADQLDLQALHRVRERLVSQRTGIINQIRAFLLERGIAVRQGQRSLRAELPRILATPPDVLSPGMVRVIEGLAADWRWLDERIEGLSREIEELAKRDAGCERLMSIPGIGPIISSAMVAAIGTGDGFAKGRDFAAWLGLVPRQISTGDRTILGKISKRGNRYLRVLFVQAAWVVLVKVKPTRWEGHGLKHWIEAASKRLHHNVLAVALANKLARIAWSVLARGRAFEASKLQAA

SEQ ID NO: 257568 - protein, 339 aa, unidentified
MKYTPVGVDIAKHLIQIHFINEHTGEVVDKQLKSQDFLTFFSNREPCLIGMEACGGSQHWARELAKLGHKVRLLQARFVKAFSLGNKNDVLDARSIWMAVQQPGKEIAVKTEEQQSVLVLHRSRRQLVKFRTAQINALHGTLLEFGETIHKGRASMDKELPAALERMKSRLPPYLITVLEDQYNRLNELDSLIDGIEKQLISVARQNETCKRLMDIPGVGPLIATAAVATMGEASAFKSGREFSAYVGLVPKQTGSGGKVRLLGISKRGDTYLRTLFIHGARSASLVAKEPGPWITELKKRRPTGVVITAMANKMARTVWAIASHDRNYDKNHVSIRPC

SEQ ID NO: 257569 - protein, 430 aa, unidentified
MEIVYPRACGVDVHKSFIVAVICISESINPRYIKKRFSTFNNQLIQFRDWLIENNCHNVCMESTGKYYIPVYNALEGHIPNVVVANPKWVKAIKGEKDDNKDAKWIADLFKFGIVRSSYIPEKDIRILREFTRYQYKLVNIRSSEKNRFQNALTVGNCKLDLVFTDVFGKSASSIVDTILSDEPYTSEDILSKVHGRCKASSDDILSAVEGTNLNQYQKARIKIVQKHMEYVDSLLDEVQHHIDMMVESYENYIQLLMTIPGVNRKSAIIIISELGIDVSQWSSARKLAAWAGLAPGHNESAGKKKSVKISKAGIYLKPCLVQVAHAAVKDKTCSYYAEKFGRISKRRGKKRAIIAIARKILVAIYHILKTGEVFNPSDMADVETTKEQRIAYITNNFRNAFNQLSRTGLSEEEILSIIIKKSNNSPQTE

SEQ ID NO: 257570 - protein, 406 aa, unidentified
MSAVMIGIDPHKGSHTAVALDGVETKLGEIRVSSSVIQVERLLEWAKGWPERTWAIEGAKGLGRLLAEQLVTAGERVVDIQPKLAARVRLLNTGAVNKNDPNDARSVAVAALRSPSLKEIGPESHAAVMKIWARRHRDLSRTRNRIACRLHAVLCELVPGGFAKEISAVQAARVLENIEVHGASAAARMELAGELLEDLRRIDGQLRGVKRRLAKIVKESKTTLTEIYGVGPIVAATVIGDVAEISRFSSKDRFAAYNGTAPIEASSGNNKVHRLSRRGNRRMNHAIHMAAVTQISHRGTEGRAYYDRKISEGMAHKSALRALKRRISDALYGRMIADARSAAAAIEEGPGGQLGNDSISSVAGSHPQTPTLRSGHSRARSNPRSLRSAANIGNPPRRAKATRRAS

SEQ ID NO: 257571 - protein, 351 aa, unidentified
MKEYIAFDSHKRYTLMEREQVKSGKTTHLRIEHAPGAIRQCLCSREPGTPVAVEATGNWYWIVDEIEQAGLEPKLVHPRKAKLMMGMINKTDKLDAHGLNRLQRNGTLPTVWIAPRQLRDQREITRGRMVMTAHRTRLKNRIQSTLSKYGWAGTEASDLFGKKARKQVNEAIQQLPPETARITEALLKQLDFVQDQIEDLEKRMRELVRDTPEMDLLRTLPGVGWILSAVIGLEIGVIGRFASAERYASYCGTTPRVHASGDKIRFGRLRPDVNRYLKWAYVEAAHSVCLQKGKFPLRHGSRLYERIRKRKGHPKAIGAVARHLAEATFHVLTREEPYCDPVLKAGRSREV

SEQ ID NO: 257572 - protein, 422 aa, unidentified
MLGIGIDWAEEFHDVAFGTPEKGVIEQFRIAHGPDGVAALIERALRLEPDPAEVRVVLETRHGLLVEALIDAGFTVLPVNPDLVARRRGPARKKDDAEDARICCLLALDRHAGLKALVPHGELGGELRAIARDDERAARDQRRLLNRLRADLQTTYPAALVLAGTDLGAPTVLRLLDRWPTQAELATASRAELVEFARAAKHGWPERFADRVAAALATPTLPTRDYLVRAKAAGIRLAAVQLLALHEARRGWEQRMAELLLGGPRSGRDRTVEDPDPGKAFPGGAIYLSFPGLGDRLAARVAGEIGEHIEQFDSPNGLQCYAGQAPVTRRSGKSDFVVARRLAHNRYLGAAVHQWAFCSLTRSSWAREFYDQKITAGKSHHAALRALGNRWLEILWHCLTKGVLYDEAVHVANRNRALAGAA

SEQ ID NO: 257573 - protein, 345 aa, unidentified
MNKSTPASTATVFCGIDVSAGSLAVALIEPNHSVCQREFANSASGHKALLGWLGKYHTLVRVSLEATGIYSLDLALALDAQISVEVAVLNPKLVNRFAQTLRRSKTDAADALVLAEYSQRMPFTAWQRPGVNHLRLRTLGRYIESLVVEQASLKNRLRTAESTATTPRAVLLDLKQAQAALQRRLAKMRREAMKLVQAEDAQRERFALLVSIPGIAEISALQILSELVLLPPGMTVRQWVAYSGLDPMHQVSGSSLHKPSRISRAGNRHLRRALYMPTLSAVRYDPHLRAFYQALRERHKTGLQALMAVARKLLHAIYGIFKSGRPYDGRRLFPQIQLAVELIAG

SEQ ID NO: 257574 - protein, 387 aa, unidentified
MSQVDDLSRSLAAFDQNTTLTVVVELSEASWLVAGLVPGVDRQPLKKQEPDPRALLRLLERWRAEAAKTGRMIERIVLAFEAGRDGFWLARWLRARGIEVYVIHSTSVAVSREHRRAKTDRLDTGMLMRVFLGWLRGERGHCRMVAIPTLEEEDAKRPSRERESLVGERTRIINRMKSALARLGIRGFKPALRKAPQRLEALRTPEDTPIPPNMLDEVRRDMIRLAVVREQIDAIERARLVRLEQAPARGSHPMVRLLARVIGVGIETADMLVQEVLSRKLRDRRAVARYVGLTGSPDESGKRRREKGLAKAGNARVRRGLIQLAWRFLRFQKDSALAQWYRARTEGPKGVRKTTMIVALARKLLIALWRLVMTGEIPVGVVLRAAA

SEQ ID NO: 257575 - protein, 408 aa, unidentified
MEILHRRAAGLDVHSRQVTACVRVQEGSRIEREVQEFATSTRGLLELRDWLAERGVTHVAMESTGVYWKPVWHVLEAGFELVLGNAREIRNVPGRKTDVNDATWIADLLAHGLIRASFVPPTPIQELRDLTRTRKQLVREIARHTQRIQKTLEDANVKLSGVVSDVLGTSGRAMLEAMVAGEADPERLVTLARGRLRDKRGELIEALHGRVRDHHRFMLRLHLRQIDALRAGVSELETRIGGLLEPFRGAFEQLMTIPGVGPTVAAVLLAEVGPDLSRFPSAGHLLSWARLCPRNDESAGKRRSTRTLPGANWLKPVLVQAAWVAVRKRDSYLAAQYQRIRARRGAKKAIVAVAASILTAAYHMLVTQTSYRDLGPDHFDHRNRVRQINHLIRRLEHLGLQVDVRPAA

SEQ ID NO: 257576 - protein, 342 aa, unidentified
MYYIGLDVHKKTISYCVKDVSGRVHQEGKLGATRCELDIWMRTLPQPWTVAMEATIFTGWIYDHLHPHATQVKVAHPLMLRAIAAAKKKNDRVDASKIADCLRCDFLPECHMASTEIRDRRRTLRYRCLLVRQMVQTKNRISGLLMETGVTYNKQRLHKVGYFRELLASNEEVNESIRPLLRLSRDTIARLQKTERALVSSLQRDPLLSERIKRLRTVPGVGPITALTWALEMGEISRFRSIRQSISYCGLCGDERSSAEKSIRTPISKQRNKNIQFVLIEAAKLAPRQDHDLALLYEREKQKGNANRATLAVARKMVAYLLAVDRGQRDFVPADDCRCDAA

SEQ ID NO: 257577 - protein, 336 aa, unidentified
MYNFIGIDVAKLTLQIYIEANESSVEIDNDEKNMKMFYKDLKKLYKNDKPFVFIYEPTANYSVALTRFCAKNNIFAYVVNTFVSSNFSKSLGNRNKTDISDAQMLFNMQMMINKKDIAVPVINPTVDELRGLVGYYRFLQKQKVAFKNYNEAVTTNKSSNYILKDVKKNITRIDKEQKELINKAKAIINGDDTLKKSFAHITSIKGIGTLVGIFLMHLFLNYPNANRQQITALLGLDPITIESGTSVKKRSRISKKGLSMYRGVIFYSILSTVRFNEEFQTYYEHLKDRKKHTTSAQIAVMRKLILLAHSLYKNNIDYNPEQFKLKKMVQKEKYVA

SEQ ID NO: 257578 - protein, 340 aa, unidentified
MSEITTIGLDLAKHVFQVHGVDAQGTTVLRRQLRRGQVLAFFSRLPRCVIGLEACATAHYWARELGALGHEVRLMPAQYVKAYIKRNKHDAADAEAICEAVQRPTMRFVPVKTAEQQATALLHRGREQLVRQRTMLVNALRAHLAEFGIVAAQGLRNVGELIAIVRDDGDTRLPDLARQVLQVLANQIEQIETAVAGLEKQLLAWHKTNPVSQRLASIPGIGPIIATAIATTVADPKVFRSGREFAAWLGLVPRQNSTGGKTRLGGITKRGNRYLRRLLINGASANLLRSKATKADPWVIGLRRRRPPLVVAVVVANKTARIAWAVMLREKEYQPRAVAA

SEQ ID NO: 257579 - protein, 407 aa, unidentified
MNTLYVGIDVSSKSNVVYFMLPNGDKHSNFSVANSHEGSTQLVKRIHSALLAHSLDTVLIGLEATSVYGDNLVYFLREDATLAPFNRKIHVLNPKQVKKFHDTYNDLPKNDYVDSFVIADCLRFGRINKEVYIGDYHYKALQNLTRARYFAVQNLTKEKQRFINVLFKKYSTMTQEKVFSDTFSTTALAVYDEFESAEALANMDLQELTDFIIEKGKNRFPDPDAVAKAIQKAARSSYRLPKTVNDSVNQVLSISITSMKALESQIKEFDKAIKAQMELLPNVLISVPGIGPVYSAGIIAEIGDINRFENQSQLAKYAGLAWRQYQSGGFESETTRLVPSGNRFLKYYLCEAALSLVRCDKEYSDFYHRKYKEVNRYQHKRALALTARKLVRLVFRLLKDKRLYRSA

SEQ ID NO: 257580 - protein, 366 aa, unidentified
MRTLMAGMDLHGNNVMVAIVDADGARLQHRRLGCDLDEIVEFMEPYRPELACIAVESTFNWYWLVDGLRARGFTVVLANPAKVDQYNGIKHADDKTDAYFLAELLRLKILPTGYIYDPELRPVRDMLRRRMGLVRQRTALTLSVKSLHQRTTGQVLDLRRLKAMEPIESSALYTHPANQLIVRVQKEHIDWLDQSIREIEKAVLAVALQQPYYQRLQTMPGIGIILGLTISMEVGDIGRFAGPGQFASYCRTVDSKRVSNGKKKGENNEKCGNKHLAWAFVEAAHGARRFDGTCRKWFDRKAAKKGTTIATKALACKLAKAAWFVMTNGVDYDSGRMFPGLNQTKDAQISGEQSSASNGVGSNPED

SEQ ID NO: 257581 - protein, 345 aa, unidentified
MGPMYYIGLDVHKQKISYCIKDSSGKIYAEGWIPATRHDLDCWMKNLPQPWSAAMEATMFSGWIYDHLKPHATELKVAHPLMLRAIAAAKKKNDRIDANKICDCLRCDFLPECYMAPAAIRERRRTLRFRNLLVRQMVQMKNKIGMLLMEAGVSYNKQKLHKAGYFRELLASSPDINESLRALLRQCRETVVRLGKMEAALTHSLKQDRLLVERMERLMSIPAVGLITALTWALEIGEVQRFTSIKKAISYCGLCGDQRSSADHTQRMPLSKQRNKHLQTTLIEAAKMAPRYSPTLALLYDKERQKGNANRATLAVARKLVAYLMAVDRGQTHFLVLDHDTCAAA

SEQ ID NO: 257582 - protein, 346 aa, unidentified
MEKILKQVTGIDVAQKELVVSLGRMYGDLTIEMYANKTFPNTNKGFQALIGWVTKLSDGDATVRFVMEATGVYHESLAYFLDGNGHEVSVVLPNKISNYSRTLEVKTVTDKTSAEAITRFGLERKLDRWKRPQGIFKKLRQLTRERNQLVEMRTVIKNQLHAEQAEAEPNKSSVERIKKQIIFFNKQLKEIKEEIAALINQDQQTKKAIDIICTAPGVGVLTAVTALAETNGFELIRNKRQLTSYAGLDIKEKQSGTSIKGKSRISKKGNKYLRKSMHLPALTAIRFDERFKAVFARLVSKHGIKMKAVVAVQRKLLEIIYILYRTNTAYDKNYLAKNQQTINSNK

SEQ ID NO: 257583 - protein, 367 aa, unidentified
MKKSSTAAVKASKKISAQRLTIGLDLGDRNSWYCVLDEAGQVRVEQRLRTTAKALREAFGGLPRSRVALETGTHSPWISRLLTELGHEVIVANARKVRLIGESRKKDDRLDAQTLARLARIDPELLCPVKHRSAQAQADLTVIRARAGLVRARTSLVNTARSLAKSYGERLRGCNVRNMNAEKAEGLSPELQAALEPLLTALESLSKQMGEYNERIEKLAQESYPQVALLKQIKGVGTLIALTFLLTLEDPQRFRKSRDVGCYLGLQPGRRNSGQREPQMHISKEGDPYLRTLLVQGAQHILGPFGIDCDLRRWGLKLAERGGRSGKKRAIVATARKLAVLLHHLWVSGDVYDPLHNSRQAIAAAAA

SEQ ID NO: 257584 - protein, 390 aa, unidentified
MQALYPRPDEHVAVRTDLKAIFVSLELSRSTWVITSLAPGGGEKMSKHAVPSGDIAALLARLSQLTEKARARTGQVCPIIVIQEAGLDGFWIHRVLQSEGIESHVVDPASIATSRRRRRAKTDRIDGEALVRALLAYKRGEPRVCAMVQAPTPHEEDRRRISRERETLTAERVQHVNRIKGLLFAQGIGDDEPLHRNRRERLEELITGDGRPLPECLKAQIRRELDRLELLIEQIKAVEAERDTVLARAQASPGVPAPAALLLALKGIGPEAAATLCSEGLFRTFNNRKQVAAYAGLAPTPWQSGSVHRDQGVSKAGNPRLRTIMIQIAWLWLRHQPQSALALWYRARIKRTGGRLGKTMIVALARKLLVALWKYATAGVLIEGAVLKPA

SEQ ID NO: 257585 - protein, 343 aa, unidentified
MQEITTIGLDIAKSVFQVHGIDVSGEGVARRQLRRRQVLPFFRKLPSCVIGIEACATSHHWARELEKVGHEVRLMPARYVKPYVKRNKNDAADAEAICEAVTRPTMRFVPIKNPEQQSVLMLHRTRQLFVRQRTALINAIRAHLAEFGIVAGVGRNGVEKLLELIAEGEDERIPPAAHECLMALAAQLAMVKRQILEADRRVLAWHRASKTSKRLEAIPGVGPLIATALVASVPDPSVFRSGRDLSAWIGLVPKQNSTGGKDRLGSISKAGNRYLRSLLVVGALSVIRRAKQLGYTRHPWLVRLMERRSVKVAAVALANKIARIAWAMMVRNESYRTPLPASA

SEQ ID NO: 257586 - protein, 311 aa, unidentified
MSEFIGIDVSKARLDAAAHSGSGFAVENTEADIGRLCEQLKALAPELVVMEASGGYERLCVAALAAAGLPVALVNPRQVREFARATGVLAKTDRLDARVLAHFAAVVRPPVRPLPDEQHQALEELLARRRQMVAALVAEKNRLGLARTRLVKRTVREAAATYERLLRLIDHELDELIKASPLWREKEDLLRSFKGIGPVSARTLLAELPELGRLNRKQIAALVGVAPIARESGSWHGRRSIWGGRGQVRAILYMATVTAMRANVQIRTFYLRLRQAGKPGKVALVACMRKLLTILNAMVRTHTRWQQPSVA

SEQ ID NO: 257587 - protein, 338 aa, unidentified
MKIVTVGLDIAKQTFQAHGVDGKGRVVMRKRLRRAEVPSFFAGVEPCLIGLEASGGAHYWFRVLSRLGHTVRLIAPQFVKPYVKSQKNDANDAEAICEAVSRPSMRFVPAKRVEQQDLQCLHRVRSRLIGCRTQLVNQIRGLLAEYGIVLPQHVAQLRRHLPALLEDDGNELTISTRHLFHSLYEELVELEAKIGSADQRIERAFRENAECRRIAAVEGIGPVTATAVVAAISDGHAFRNGRQFAAWLGLVPRQHSSGGKTQLLGISKRGDPYLRTLLVHGARSVVYRAKAKTDYRSRWINDKQQRLGTARACVALANKNARILWSLIAKQQAYRPAV

SEQ ID NO: 257588 - protein, 355 aa, unidentified
MKYYTSTTEYNCGIDLHARQMYVCVMDRQGKKLVHTNVLNNDFEYFLKLIEPYKHDLTVCCECMFGWYWLSDACHKAGLPFVLAHALYVKAIHGGKNKNDRIDSEKLTHLLRSNLIPPAYVYPADKRPLRALLRQRVFFVWRRSELLARIYSHQLAHNRTPARQTRRVRDSWEEALLAAEDHPLRQITLKNDLAMIKHFDHQIFQLEEELQRQTKKVAGRDYELLQTVPGIGESLGQTILYEIGDIQRFPTVKDFLSYCRLVKGTVASAGKIKGLRGAKLGNPYLRWAFGEAAVIAKRDHATIRPLAQRLEAKMNGNKFKANTVLAIKLARAVYFMLKNKTVFDAERLVAVLANK

SEQ ID NO: 257589 - protein, 412 aa, unidentified
MEGETVIAGVDTHKDVHVLCLLDGLGRKIWSGSFRADPEGYDRLAEAIGDPGSCMVVGVEGTASYGAGLTRRLVELGYNVVEVLRPKRDKVRPGEGKSDPLDAERAARKAASGRGCSVPKSQDGWVEAVRQLYVARRLAVATSTSCVACAKSMLTTAPGALRERFRGRERPKDLMPLLARGRKAGDALEESVLASLRSVAAVWKEARSQVESLDERIRALLEANAPALLGVEGCGTTTAAALVVAAGDNPGRLKGEAAFSMMCGASPIPASSGKTDRHRLNRGGNRQANWALYEIAIKRMAYDERTRRYVARRTSEGKSRREAVRCLKRYIAREVYRVLMDPNPDGAAPEGPELAKMRKAMRVTQKKAAAELGLSAATLGHLERGKRRSTKLERRYYELLCELKGALPQTAS

SEQ ID NO: 257590 - protein, 412 aa, unidentified
MSQHYKQKHIYVGVDLHKHTHTAVIVNCWNEKLGEIQFENKPAAFEGLLTYVKKFCKRGMTPIYGLEDVGGYGRSLAVFLVENKQKVKEVNSALSYAERKSYPTTQKSDSWDAECVAKILLNKLDILPDANPQDIYWTIGQLVARRNALIKAHISLKNQLHMQLSHHYPSYKKFFSDIDGKCALEFWHTYPAPHHLKGVSLEDLRKVLLKSSHNTCSTKKAEEILALVAADGETKREYQESRDFLIKSHVRDIRFKKAEIQAVEGELRRMMKQLGYQLETMPGIDLVTASALVAEIGDINRFSSPDKLARFAGVAPVKFSSGGKGKEQKSKQGNRTLHGIFYNLAVQQVQVSKGSKLPRNPAFLAYYERKQAEGKTKGQALVCIMRRLVNIIYGMMKNKTPYIAPPLAEQVA

SEQ ID NO: 257591 - protein, 376 aa, unidentified
MQNDITLFVGLDVHKDSITVAYALGSGEVELLGKIGTSARDIDRLCKKLQSKARHVKIVYEAGPLGYDLQRRLAAKGFDCMVCAPSLIPRKAGDRVKTDRRDAVKLVRSLRADDLTAVHVPTVEDEAFRDLARVWAAARDALKRARQALKSFLLAHAVRYTGTANWGPSHRRWISSFSFGNRWQDLAFSELRRAIEDRFAQCERLESALREAVTQWRFYPAVLALQTMRGIRFTTAVGLLSEIVDVTRFAHPRQLMAWLGVTPSEYSSGGSRRQGSITKTGNSLARKLLIEAAWSYRHTAKVSPEIQQRHEGVPKVIVDRAWDAQLRLCGRYRRMVAKGKNKNVAVVAIARELAGFIWDIGRLGIEQAINTPKPAV

SEQ ID NO: 257592 - protein, 372 aa, unidentified
MNYNTVYVGMDVHKESFTLCAYTIDAEKGSHFQRTAADYKNVLKYLEFLRTIYGNDANFICGYEAGCLGYTLYHQLTEHQVNCVILAPTTMLEQRSKRRIKTDRRDAEIIGKCLAQHNYSPVHIPTATDEETKEFLRMRDDHKLALKKVKQQILAFCLRHNYRYDGNSHWTAAHIKWLKSLNPEALYKEILDEYLLTYTTLSDKLERLDKRIEELASKDEYRESVKKLCCFIGIKTHTALSVLVEVGDFQRFASAQNFASYLGLVPGEDSSGDGQTRLGITKAGNRHVRMLLTEASQCYARGQIGFKSKELKSRQAGNSPQVIAYADKANERLRRRYYKMVLGKSKKHNVAKTAIARELACFMWGMMTDRIA

SEQ ID NO: 257593 - protein, 420 aa, unidentified
MKEPNINDFSVLVGIDWADKKHDVCEHVIGTDKYHYSIISSQPESLHDWAMSLKKRYPDQSIAVACELTKGPLIYALSKYNHLILFSINPSTVAKYRKAFANSGAKNDPSDAYIQTEILERHMEKLKSIRPEPAKVRALAQLLEYRRKVVQDKVDLTNRITATLKNYYPHTLDWFKEKDTMLFCEFLTKWPSLSAVKKAHKQTLMNFFNQHHSRYPAVNEKRIESIKSSMALTDDLGVIEPNQILIEILIPQLKCLLEAIARFDKEIKQRYKDQKDKVIFDSFPGAGPQMSPRIFVAFGTDRERFQDANAVQKYGGIAPVIEQSGQKKWTHWRYSCPKFLRQTFVEWAGQSVRYSFWAKAYYEQQKQKGKPHNTIIRALAFKWIRIAFRCWQTSTPYDESKYLNALKRQGSPLLNYAVNG

SEQ ID NO: 257594 - protein, 412 aa, unidentified
MERVVERCAGLDVHKDTVMACVRVSSVDGERVQELREYATTTVELLALRDWLMAWGVAIVAMESTGVYWKPVFYLFEDDFECWLLNAKHLKNVPGRKTDVADAAWIAQLVEHGLVRPSFVPPRPIRELRNLTRYRKALIQERTRESQRLDKILQDAGVKLSSVASRTLGASGKAMLKALVAGTRDPEVLANLARGKLRAKIPQLRDALTGRFSDHHALIVGELLAHLDYLEEATGRLSEAIEELVAPFADHVALLRTIPGVDRRTAEVLLAEIGPDMRRFPTAGHLASWAGMCPGNNESAGKHYSGRTRNGSKWLRDALVESAHAAARSKNNSLAAHYARLKGRRGHKRAIIAVGHSILVVAYHMLTSTQPYDDLGADYYLRRDEQAHARRLVRQLEHLGYDVTIHREDPAA

SEQ ID NO: 257595 - protein, 345 aa, unidentified
MEIHTIGIDLAKTIFHLVGVNARGEVVVRKKCSRNQLLRFTANLRVSLIGMEACGGSHFLGRALREQGHDVRLMPAQYVKPYVKTNKNDYIDAEAIAEAVTRPSMRFVPIKTDDQLDLQSLHRVRERWVGRRTAVINQIRGMLLERGITVTKGRRHIEESLPGILEDCDNKLSGALRVLLTELRLEMQYLGRQIEESDQLILRIASELEPCRRLVAIPGIGPVIATATIAAIGNGAAFKKGRGFAAWWGVVPGEHSSGGKQTLTKTSRRGNRYLRKLFVQGAHAVLQKRRTHSTGLSTWLAQLTTRKRIQVAAVALANKLARMVWAVLYKGEAYRPPLLPQPVVA

SEQ ID NO: 257596 - protein, 401 aa, unidentified
MKRLSGGIDVGSESHHITILDEEDHILYNQKVAHKLNEFTESIKQFKKIERKEKGVISFALEGKNGYSAPFDRILLDQGFTLYNVDNLKLKRFREAFAGEWKDDQRDALMLSKMLKLKEHINSPREKVFIKIEKPSLVTESLKLLSRHQQTLIDEKVRLVNRLRKKLLEVCPEILKLAKLKDKKLIAILAKYPDFSKYKRITLKSLLKIKGIGKRQAPFLLRRLNNVEYMPGLTDIYKTIIFSYAKRISELQEEIKDIDKSLDEIGEKDKEVNHLKTLPGVATKLASRLIGEIGDINRFPSEKQLAIYCGIACVDNNSGKVTKAKAVYKANKICKQTLITMAGGSIRLSLQCRAYYQKKRAEGKSHNHTLRCLARQLIKVIYKMLTEDRDYMVRKELRKVA

SEQ ID NO: 257597 - protein, 402 aa, unidentified
MNAVGIDVSKGKSMVTIMRPFGEIVSSPFEIKHTSSDINSLIELINSVEGESRIVMEHTGRYYEVLAHQLSEANLFVSTINPKLIKDFDNDSLRKVKSDKADAVKIARYALDKWQNLKQYSVMDELRNQLKTMNRQFGFYMKHKTAMKNNLIGILDQTYPGVNTYFDSPARSDGSQKWVDFASTYWHVDCVRKMSLNAFIDHYQNWCKRKKYNFSKSKAEEIYGKAKELVPVLPKDDITKLIIKQAIDQLNSASTTVESLRTLMNETAFKLPEYPIVMAMKGVGPSLGPQLMAEIGDVSRFTHKGAITAFAGVDPGVNESGSYEQKSVPTSKRGSSDLRKTLFQVMDALIKTKPQDDPVYQFLDKKRAQGKPYYVYMTAGANKFLRIYYGRVKEYLAALPES

SEQ ID NO: 257598 - protein, 334 aa, unidentified
MEQITTAGIDLAKRVFALHGVDRVGRVGLRKTVRREQLMQTVAALPPCLIGMEACSGAHEWARRFQELGHTVRLMAPVFVTPYRKSGKNDGNDAEAICEAVSRPNMRFVPVKSAEQQAILALHRVRQGWIEERTATINRIRALLTEFGVVLPNRAQHVRRGAMAAAEGLPALARRALEDLRNHLGTLDERIAAYDRELQAQARQSEAAQRLMQIRGIGPITAVAIVATVGNARDFRSGRQFAAWLGLTPRQHSSGGKQRLGHISRRGDAYLRCLLVQGARSVLLTATRHSDRLSRWVLSVQARRGYHKALVATAAKNARIAWALLSKNQTLRAA

SEQ ID NO: 257599 - protein, 416 aa, unidentified
MNTPSQTTPAGNDTASPKADAYIGIDYHKRYSVYHAVDHAGRSLAKGRIEHHCPQDFLTLVQRWPQCRVVFETSMNWHWLYEVLERGMDGARIVLANSYKTRIIAEAQVKTDKVDAHILAQLLRADLVCSVHIPCKATRQRKEVLRQRCFFVRQRTMLRNRIHRLLGAQHDLQLPQCSDLFGKRGMGFLEKLALPAPAGLLLKQQLEMLKSLQLRVKEDECALGEMMQHTPALAQVQSLPGMGPILAAVVVNEIDDISRFRSAQKLSGYAGLCPSTSSSGGKTCNGKLLRACNKWLRWAFVEAAWVAIGCSPYFGDLYKRKRAAGKKANTAILCVARRMCRIAWQLLTQGREYENIFSTPPTQSQPAPDTEVSAGSAKGSKGREYELRATVGSAQQKKNFPSRSKRRLVGSLAKAK

SEQ ID NO: 257600 - protein, 413 aa, unidentified
MKTWKEITHYAGLDWAKEQQQVAVVDQEGRVVAEFRFAHTAEGWGECRQRLQEFPVLAMAIETSQGAAVEKLLESGYTVYPVHPRRAKSYRERKRPGGDKDDALDAWSLADALRVDGAGWKPLAPEDPVLQQLRLLCRDEVALIAQRTALINQLQQALYEYYPAALEAFDDWTHPAAWAFVVTFPTPQVLVAAGRRKWQNFLHAHRLWRPETAPKRLEVFARAEAFRGGEAVSAAKSLLAVTQAKLLRALQTQLEEYRRRIEQLFEQHPDHDLFGSLPGAAVKLAPRLLGEIGGDRDRFADANGLQCLCGTAPVRYESGQCHRVRLRRACNKHLRYAVHLWADLSRARCPWAQAYYAAHRAKGQSHAQALRCLGNRWLKILWKMWQTRTCYDADLHARNQTQHGSWVLQLQPS

SEQ ID NO: 257601 - protein, 400 aa, unidentified
MLSIGIDVSKGKSTVCGMKPGGEIVYTPFEVQHTREGMSELVSLLRSSGEEVRAVLESTGSYHCPVVAALLENGIFVSVVNSLRMKRFCSQSIRKVKTDRIDAMQIALYGLAYWQELQPTKLPEDTYRELQLLARQYYQMTSLLIKAKVDFNAICDQVLPGMQELMNDHAGRHKLSDFVLRYRHTTHILEMGETRFRKDYCKWAEKKGYRNCERMAVLIFATAQNGIPVLPNAPSTQIVITEAIRVLHTVEASRDAILTQMQALAKTLPEYSLVREMPCIGDTLAPRLIAEIGDVRRFHSKRALIAYAGIDAPPYQSGKFCANNRHISKRGNRYLRKTGYEVMQSYVMHKPANDPIFTFIEKKRGEGKSGKLAMVAGLNKFLRVYYGKVTELYRSSSAIE

SEQ ID NO: 257602 - protein, 358 aa, unidentified
MKTNINEVETKSEITIKLGIDAHARNYWVSRQIDGASPQAAQKFDRTGLLNWAAKQVESGANVHSCYEAGPFGFWLHRKLEKLGIKNMVVQPQKLDERNKGVKNDKFDAKMLAQRLDRYVSGNEYALSTVRVPTEAEEQIRNKVRQCEQVKRLRRSVILQGHGLLMRSGYAENKGWWKPLKWLKLCQELPQNLIEQLGIYGRIIAKLTEEAEALKKEIEANAPRELPYGVGCYTFTMLHSEVGNWHRFTNRQQIGSYTGLCPREHSSGNNKRMGSISKHGNIYVRTALIELAWRLLIWQPNYRGTKNYFKRCPEGKSTSAMRKKAIVAMARKLAIDLWGLFTGRTTPEILELILKEHD

SEQ ID NO: 257603 - protein, 351 aa, unidentified
MHYIGVDYHKKYSYVVVKDKEGKVERRGPVNNTKEEFRQLLQPYHSGKAVLEATRNWGLVYDWLEEILDDVALAHPLKVRAIAEARIKTDKISADILCDLLRSNLLPEAYVPDKETREAKNILRQRMFFVRVQTMVKKRIYTILDRHPEIVTQAPEVSDLFGASGMEWLRQAVLPGQDNQLLASELELLEILKRKISESNGMVRELARGDKGVKLLRSIPGLGSFFSVLVAKEIDDIGRFRDEKKLCAYAGLVPSTYASGGKVFHGRITKLGNKWLRWAFIEAVQPAISCDADLFAYYQRLKMKKGANAAKVATARRLLTIVYRVLSQERLYERRNKRARSRVAPAALVTS

SEQ ID NO: 257604 - protein, 401 aa, unidentified
MKRLSGGIDVGSASHHITILDEEDHILYNQKVSHQLIEFTQTIKQFKKIEKKEKGKISFALEGKNGYSAPFDRILLNQGFTLYNVDNFKLKKFREAFAGEWKDDQRDALMLSKMLKLKEHINSPREKVFIKIEKPSPVTESLKLLSRHQQTLIDERVRLTNRLSKKLLEVCPEILKLGKVKYKKIVTILVKYPDFSKYKRITLKSLLKIKGIGEKEAPFLLKRLNHIIYMPGLTDIYKTIVLSYTKRILELQKEIKVIDKKLDEIGKKDKGVNHLKTIPGVATKLSSRFIGEIGDIKRFPSEKQLAIYSGIACVNHDSGKVTKARAAYKANKICKQTLINMAGGSIRLNPQCRAYYLKKRAEGKSHNHTLRCLARQLIKVIYKMLTEDRDYVVRKELKKVA

SEQ ID NO: 257605 - protein, 410 aa, unidentified
MKTPTSRNNLIDIFVGVDIGKSFHCAAAINGRGNVLLKPLKVIASAEGFAAFEGRLCQLGQKTNVLIGLEASGHYWMSLWRFLLERDWQVQVFNPVLSSKNARTHLRGRKTDADDAFFIARTVRDGDFTPLQPGEEDTEQLKLVCRQRRFITHELANAKRRLTGLIDLSFPEFSRHFDNNHSKAAYAVLKVAPSAAAIARLSLRRLEGLLIGASRGRLGAGQAKALQESAKRSLAVHRQDPALDLLIRPMIAQLEFFEKQRAELDAHIERLFSRMEHPIKTIPGIGSITGPLIAAELGDLRRFEGRRPLHALLAYAGMDPRVRKSGQWCGKIKMSKRGSVALRTALYQAASMARLHEPCLAEIYNRHKQRMNKHHGVAISHVARKLLGIIYAVCARGQSYDPAKICAQPS

SEQ ID NO: 257606 - protein, 404 aa, unidentified
MIFVGLDWAEAHHDLAVMDAEGAVLARARVPEGIEGVARMHALVAEHAEAPEEVVVGIELDRGLLVGALVAAGYGVYAVNPLAVARYRERHAVSGAKSDPGDAKVLADLVRTDRHNHRPIAGDSELAEAVKVLARAHQSAIWSRQRQLNALRSALREYYPAALEAFGTDLGSGDALAVLAIAPTPDLGRRLSRSKIASALRHGGRQRNVEARATAIQAALRAEHLQAPAVLAGAYGAVCRSAVTMLGAYNVEVAALEEALGEGFDQHPDAKIVRSLPGLGTVLGARVLSEFGDDRARYANPKSRKNYAGTSPITKASGRSRVVLARFARNRRLADACERWAFCSLTHSRGARAYYDELRARNKTHHQALRQLANRWVGILHGCLDHSALYDEITAWPATAQQAA

SEQ ID NO: 257607 - protein, 391 aa, unidentified
MIYVGIDVAKDKHDCFITKSDGEVLFKAFTITNNLDGFNELHQKITSVMDDVTKVKVGLEATGHYSYNLLGYLIDKGLPTYVINPLHTNLYRKSLSLRQTKTDKVDARTIASMLMSDVNLKSYSDISYHNEELKSLTRYRFDKVKERAKLKTSVSRLVCILFPELEKLVPTLHITSVYALLSEFPGAKHIATAHLTRLTNLLSEASKGRYGKDTAITFRDAARASIGSNMPAKSLELKHTIKLIQELDSEIDEIENEIKITMDEINSPILSIPGINYRMGAMIIAEIGDFNRFDSPDKILAYAGFSPSTYQSGQLDGAYAHMEKRGSRYLRYALYNATKYVCHWDPTFAAYLAKKRAEGKHYNVAISHAVKKLVRVIYHLEKTKQQYIKAA

SEQ ID NO: 257608 - protein, 330 aa, unidentified
MNNYVDVIGIDVSKLTIDAQIHLRAVHRVFSNTPKGYRALLSWVETYLEEQVYFFCFENTGHYSTNLSVYLSENDIDYVEESPLAIKRSAGIVRGKTDKLDSAMIARYAWLYKEELVLSSPKEQDIQELGRLLSFREQLVRDRTGKMSSLKEMQNLLSSPSTDDCCKIIKKTIHYLTKQIVALEDHIKRLMKKDESLQRNYELLNTLKGVGLILSCQILYHTGNFKRFDSWRQFSSYCGVAPFEHSSGTSIHRKNRIHNIGDRKMKTLLTLASVSAIQCDKELKQYYKKKVAEGKPKMVALNNVRNKILSRAFAVVKRGTPYVELQRFTA

SEQ ID NO: 257609 - protein, 309 aa, unidentified
MKEELVYLGVDIAKSYLDGAIGGEKRRFSNDTIGHRELIKWVKQLSAAVQVICESSGGYERGLVRALVDARVKISLVQANRVRQFARAAGILAKTDCIDAQVLCEFGKVMRPPMVTAATLEQEHLPELESQRRHLTHLLVMEQNRGARVSDVCVRRLNRSLINQIKKQIEQLDLLIKNHIERSKELSAKAAKLTAISGVGARTAALLLAQMPELGELNRRQVAALVGVAPFNRDSGKMRGKRAIYGGRRRVRHGLYMAALVAARHNPILRNFYQRLRAAGKPAKLALTATMRKLLIVLNSALKPDLIYA

SEQ ID NO: 257610 - protein, 344 aa, unidentified
MQIAVIGLDLAKNVFQVHGIDDAGQVVLKRKLRRSEVLPFFAGLDAALVGIEACHTAHYWGREIAALGHDVRLMPPQFVKPYVKSQKNDAADAEAIAEAVQRPTMRFVPIKSADQQAVLMLHRTRDLLIRQRSSLISAIRAHFAEFGIVVGQGIRNVERLLALLETAGDQRLPALAAEMLGILAAQLRYVAEQIKEVEVKLLAWHRADETSRRLQSVPGLGPITASAIVATVGDPKQFKSGRQFAAWLGLVPQQRSSGGKERLGGISKRGDGYIRRLLVHGARAIVGWRKRSATHKTPWIERLLARRPTNVATVAYANKLARIAWAIMMHGNRYNPALAFATIP

SEQ ID NO: 257611 - protein, 506 aa, unidentified
MNGKVNHIENQEVKEGIAKKTRAQYRREEKTDRKKTKPNIKIVGAPMSDAEIERRKQELLGSLTSKTWRDLETQGKFKKDEKLSFVDDDTLIIGCDVGSEKHYIRAIDTRGRELGKNAFGFSNDKDGFEKARDWAADIAARHKKAQIIMGLEPTGHYWLDLATWMVDNGISVVQVNPYAVKQTKEVEDNSQAKNDEKDPKIIANLVKDGNFGMPYLPEGVYADLRRLSMFRDQLNEDHTRTLNRLHRELKIYFPEYKDAFGKIDGAFTLALLEVAPFPDSLIALGEDGIHEIWHERRLKGRGYSKAAGIVRYAKESVGTKDGAEASRDKVAWFAKQLQGLSEKLAEVEGQLEEKFREVPHAENALEIPGIGDNILSGIIAEMGDVARFDEAKEIQKLSGLGLVACSSGKHKGETKISHRGRKRLRYWLFQGAKSVVVHDKHFKKLHEYYTTRNDNPLKKMQSLIVIACKLLRVIYTMLKKGVHYDPEKMMQDIIRPSDGLDIAVAA

SEQ ID NO: 257612 - protein, 367 aa, unidentified
MEKKIAYVGIDYHSETLSLAVMVDGEKDFLSSLTMKNNDKNILKYLKKLSKEFDIKACYEASCNGYSFQRKMKKWGFHCDVIAPSLIPKKPGDKRKNDYRDARHLTQLYANGQLTTVHPPSEEQESIRSIVRCRLSLKENEKSVKLQINSFVLSHGVHWSGSRWTVKHRQWLNALQLRDDFSRKVLDEHLGHLEYLSARINHLDNLIREIAESEVYAPSVKKLKAFKGLDILSAMILITEITDFRRFPNPRSLMAYLGLIPSEDSSGGRQKGGCITKTGNHRCRTQLIESVQHSMKKPIISYKMKHNLEQIDPASASIAIKCMHRLHKRFWALVMKGKSRNKAVTAVAREFVGFIWAMMTQNEPAAI

SEQ ID NO: 257613 - protein, 356 aa, unidentified
MNEGSCVGLDVHARSVVAGVIDVGSGEVRSQRVPPGSEATVAWLKTLPSPVRVVYEAGPTGYGLARACAEAGISCVVAAPSKIRPAADRVKTDRRDAERLARLLRLGEITAVRVPGPEEEAARDLVRAREDARGDLMRARHRLSKLLLRHGAVYDATAWTRAHDAWLRKQRFQGGPLAIVFDECYSRMMDAKTRRDTLDKAITELAASEPYVDVVERLVCLRGVSTLTAFALTVELGDWNRFRPESLGPFLGLTPSENSSGQRRRQGGITKTGNTHARRLLIEAAWHQRSAPRLSITLERRRTGKSLAVRAQADSSARRLHGRWHALEARGKPRLIVVVAVARELAGHCWALATME

SEQ ID NO: 257614 - protein, 345 aa, unidentified
MEQISRIGMDTSKHFFQLHGVNAAEKVVFRKKLRRKEMVVFFDALAPTVIGIEACGASHHWARILRSFGHEVKLIAPQLVKPYVKRGKNDTAGAEALCEAMSRPTMRFVPVKTAEQQAALMMVGLRDRLIRNRTQLSNAVRGYAAEFGFTSARGMAHIDPLLDRIQADESVPVLARELFAAQAEEYAQLQAQIAEVDAKLMAWHKADECSRRLANIPGIGPIGATLLLMKTPAPEMFRSGRQFAAWIGLTPKDHSTAGKVRLGVITRAGDEALRSVLVVGATAVIQHVRRGGRGSPWIVGLLKRKPPKLAAVALANKMARIAWKLMVTGNSYAAKSAPTAWMGAA

SEQ ID NO: 257615 - protein, 386 aa, unidentified
MRGKTFIPRDYDVFAGLDVDKRSISVTFSNHQGFISSLHMPYSAEHLIKHVRKHFGDQKVAFAYEAGPTGYGLYDGIVAQGYRCLIAAPAMIPRAPGQRVKTNRLDGVSLSENLRGGQLKSIHVPTPIYRELRHLVQLRDTVMSEVVATKQRIKSLLLFEGLDFPTAPAGSQWSLKVKRQLQKLTCSKGVRFKLDELLDSLEFLENKVVKSTREIHRFCNDDPELLQCIQYMMSVSGIGWIVASQLLARIGNWREIQNVRQLAGFLGLVPTEHSTGDRIRRGSITHSGDGRLRSKLIQASWSAIRQDGELRDFYRSVCRTHARHLGPRVAIVAVARKLSARIAVVLMQQRPYVVRKKVDSAPLTQEETVPQGTTRRLGEPGETDNS

SEQ ID NO: 257616 - protein, 339 aa, unidentified
MELYAGIDLHSTNSFVGIMDREERKVFKKKLANEPGVILKALDRFKGDIVGVVVESTYNWYWLVDVLMGEGYRVHLANPSAIKQYEGLKHKDDNDEALWLGNLLRLGILPEGYIYPKEERPIRDLLRKRGHLVRLRTSLILSLQGIIMRNCGYKVPANKIKQFREDHVAPMLAGQEDLALSGRVSKETIDFLTREIRAIEKVVEGKVKVKEPFSYLKTICGIGKILSVTIMLETGSIDRFPKVGNYVSYCRKVPTSWTSNGKSKGKGNKKNGNKYLAWAFSEAAELARRYDEHARAYYNRKAAKSNFMVAHSALAHKLARAAYYVMKDCVPFDPYKLFA

SEQ ID NO: 257617 - protein, 412 aa, unidentified
MKDLLEISCGLDIHKEKIVACILTGPLGKPTHSEIREFTTLIPDMLALRDWIISENCHHIAMESTGIYWIPIYEILEDAFSGDITLLVVNARHMKNVPGKKTDMRDSEWISTLLRAGLLNASFIPEKRIREFRDLNRYRKSIIRDITSQKNRVEKFLQSSGFRLSSFISDIFGTSGRNIILHLMEHGQIDKISLDSYLKTKTRKRIDEILMSVNGTLSEHQKSFLKILMCHYDSMKEHLIEIETHLQEDMLPFALQIEQLNTIYGISTTASCAIIAEIGTDMKPFKTAEHICSWAGLCPGNNESAGKRKSTSITKGNPYIKSMLCEIAWVIAGKRNTYLSAWYWRIKQKKGARKAIVALARKLLVIIYTMLKQGTNFDENCFEVRRKNCEQKQLSRYIRELEKHGYTVEAQV

SEQ ID NO: 257618 - protein, 401 aa, unidentified
MLLDHPTAGPTAIRTQLSAIFVSLELSRSKWVVTSLSPGYGEKMSRRNVPACALGELLALFADLRRKAKERTGEDYPIITIQEAGLDGFWLHRALQQEAIESHVVDAASIATPRRRRRVKTDKIDGEGLLRVLLAYKRGEPRVCAMVVAPSPEEEDRRRLSRERQTLLNERVVHTNRIKGLLFAQGITGYAPLRRDRRKRLEGLRTGDGRPLPANLKAQIGRELDRLDLLLDQIKAVEAALAAMLAAECKQARKADKAEENQAELAAQPPHAVATLLAVKGISTHSAAILWTEGLSREFVNRRQVAAYAGLAATPWQSGTIDHEQGLSKAGNPRLRTLMVQIAWLWLRHQPQSALTKWFKARGERGRKVSIVALARKLLVSLWKYVKHGVVIEGAVMKRTA

SEQ ID NO: 257619 - protein, 340 aa, unidentified
MNKHTVVGLDLAKSSFAMVILDAEGRERTRRTLTRGQLLAFMAKQVEAVVAMEACSSAHHWARQLQALGHRVVLLPPQHVKGYLRGQKNDYNDALAIAEACLHNRVRPVPIKTLEQQDEQSFQSIRRTLNADKVRLSNQLRALLGEYGLVVAKGDAALRKAIAVHLSEADSGLTPLARRYLARQYERFVAVLEELAWYDGELRQRVKQDEVCARLQAVPAFGPVVSSAVKHWMGDGRQFGCGRDASAALGLVPRQHSTGGKERLGGISKRGDAYVRSLVIHGARAVVARADGKTDPLSCWIQQIKARRGFNKAVVALANKVIRIAWVVIARDENYRAAVS

SEQ ID NO: 257620 - protein, 319 aa, unidentified
MNSTWVGIDVCKRKLDVAVRPTGEVLSFANDETGVKQITKFLRELAPHRIVLEATGGHEYAVAYALMKSDLPVAVVNPRQVRSFARAVGKLAKTDPIDAKVLAHFGEAVQPPVRPIADQQLTEISQLVTRRRQLVEMMIAEQNRRGVASGLVQRDIAATLRFLQARLDKVEEELQVLIRQHPEWSRKAELLDTVPGVGPVLISSLLADLPELGSLNRKQVAALVGVAPFNNDSGASKGRRRIWGGRGHVRSLLYRCVLSGIRCNPVIQAFYRHLLKAGKPARVAMVACRRKLLVMLNAMLRSQQPWCSDSASCPAAALA

SEQ ID NO: 257621 - protein, 490 aa, unidentified
MKMLYSRCAGLDVHKKSVCACIRISQGQQTSQVMRTFGTFTEDLEGLRDWLREHKVNHVAMESTGVFWIPVWNVLEQCEMEFALTLINPQHVHALPGHKTDRKDGQRIAELLQYGLLKGSFIPPPPIRELRDLSRRRTHLQGDRNRVINRIRRLLETANIKLGSVVSDITGRTASLILGEICRGNQIPEELVKLAQASLKNKRAELISSLKGFYSEHFRWLLTEAVQDLAHLDRKLQPLDRQLAQRLRAHPDLIRRLCTIPGVNFTTAAVIVAEIGSDMSRFPDAAHLVSWAGVCPGNNESAGKRFSSCMRKGNRYLRRVLTQSAWSITHKKDCFLTSLFWRVAARGGRKKAAMAVANRILTIAWHIINNESTAYREIGGNHHDRLHPERSARRLMRRLEQIGFEVSVKSKSAEPPPIPESVTPPTYSEGRRSRRSRTATPAHRPTPKPGVIPADPSICRRCARWRIACIHARNAGRSSPALTQPAESVT

SEQ ID NO: 257622 - protein, 326 aa, unidentified
MEHELHYIGIDTAKEKLDVDVLRPDGRHRTKKFANTTKGHDELVSWLKGHKIDHAHICIEATGTYMEPVAECLYDAGYIVSVINPALGKAFAQSEGLRNKTYTVDARMLAEFCRQKRPAAWEAPHPLERALRALVVCHQALTDMHTQELNRTETAREVQRPSIDAHLLWLEAELKRLEKQIKDLTDDDPDMKHRRKLLESIPGIGEKTSAVLLAYIGLKDRFAHARQFAAFAGLTPRRYESGSSVRGTSRLSKAGHVSLRRALYMPAMVATSKTEWGRVFRDRLAANGKKGKVILGAMMRKLAQVAYGVLKSGVPFDAARHNPVAA

SEQ ID NO: 257623 - protein, 476 aa, unidentified
MLFDAVGRPPALNLNQRNCMAPRHKGNSSKPKSAHPHLPTLHPHAAGIDLGAREIYVAVPPGSYERPVRSFPTFTEDLHVLRDWLQDCGVTTVAMESTGVYWIPLFQILEAAGIEVCLVNARHCKNLPGRKTDVQDCQWLQYLHSVGLLRGSFRPTDQVCAVRTILRHRDALVRGASRCVSHLHKALTQMNVQLHHVISDLTGVTGQAILTALLAGERDPQKLAALKDHRIKASRDVIAKSLQGDWRPEHLFTLKQTHALWQQHQRLIAECDEQIAALLKAFDTRVDVQAAPLPPAKSSHKKAQRNEPQFNAREECYRVLGVDLTAVPGFQTPTVLVLLCELGPEFAAKFPTAKHFGSWLGLCPDNRITGGKIYSVRTRDVKSRVAEALRLAAQSLHRAENYFGDLYRRWRARLGGPKAITAMAHKLARVLWHLLKYKQPFNPEVFAKEEAKMKRKKLARLQNMAASLNYQLVPQP

SEQ ID NO: 257624 - protein, 308 aa, unidentified
MSQNYVGVDISQSTLHVHHFPKDKGFTFPYNDKGITKLIDCCQQWQPALIVMEATGGLERQAANLLSAELFPVAIVNPRQVRDFAKARGILSKTDELDARVLADFAKTMKPAPRSIKSTQLQELTELVTRSKQLTKMLTMERNRLSRSSLGCKESIRKHIEWLDQEQKRLSQCITEFMDSNEELAEKMELLMSVPCVGKVVAQTLVSQLPELGQLNRKEIASLVGVAPHNCDSGTMRGKRKVWGGRSEVRSMLYMACVSALRYNPVIKDFYKRLREKEKPVKVAMVACMRKLLTILNAMVRANAPWHT

SEQ ID NO: 257625 - protein, 434 aa, unidentified
MEEITDEPLYRDRVCGIDIGKAGLVATIRVPSDANPARRAAETRSFGTTRREVLALADWLRCWQVPAVVMESTGDYWKGPFYRLEAEGLECVLADAKQVKHLPGRPKRDPSDSRWLAACFERGAVTACFVATEEFRVIRLHTRYRRDLTEERTREKQRAEKLLESAAIKLSSVVTDLHGVTGRDIMDHLIAGETSPKVLAQLARARARRKIAELEAALEGAEFFTPAHAALLATMLDRIDHLNAEIARLTEMIEHLLAPYEEQLAQAESMPGWGRRSAQDALAETGTDMSRFPTPSHLASWAGRTPLDNSSGKRKGKAKSKKGNRYLAAVTGETAVAAGKTQTREGARYRRLARRRGKAKAQVALGNTQLKVYHALLSHPGTRYQDLGPDYYERQAGTRRQIAHHVGKLAALGFEVTLARLPEPDPTGADNQAA

SEQ ID NO: 257626 - protein, 367 aa, unidentified
MIVIGTDTHKQTHTASAVFAGTGQLVDELTAPARKAGFAELLDWSRELGEQRIWAIEDCRHVSGSFERFLIAAGERSVRVPPKLMGASRKGQRTSGKSDPIDALAIARAALKEGPETLPGAHLDENALETKLLLDHREDLVKARSEDQQRLRWHLHDLWPELEIPAGALDRLIWLDRISRKLARSEQSARVRIARELVRAIRERTRRTAELQREINALVGARAPELLELPGCGTLTAAKLLAETAGVGRFASDAKLARLAGVAPIPASSGKRDRHRLDRGGNRQLNCALHRIAVTQGRVHPPARDYLARKQAEGKSRMEALRCLKRHLARTVWQALRSAEQGRSTTLLAQSAHSPNMSRPAPALALT

SEQ ID NO: 257627 - protein, 353 aa, unidentified
MKVETSYENVQIYTGIDVHKNSWELKSMSDHVSLKQVHMREPSAQKVEQYLRKTFPGAQHVCVYEAGFSGYWLAEQLKDLGVKTLIVHPGDVPTTDKEKRTKTDKIDCNKLAMSLRSGQLRGIFQPDKNQQQARSIVRLRYSFAIDERRMKNRIKSHLAFYGIELSEVETNAYWSKRYINQLLIKAKELNDQTLELMLEKLGSERKYVLQSTKQLRELSRSAKYAEAMALLRSIPGVGVLTAMVFLTELGTDLTRFKNDDHYISYIGLVPNISASGEKAYYGKLSRRGNKRLRTALILSSWMAIRRSGMLLSKYQEYRSEGKAANKAIVKIARKLALVMKAILRDKTPYLERK

SEQ ID NO: 257628 - protein, 340 aa, unidentified
MDKVTIIGIDIAKNVFHLHAAAADGEVIYRKKLTRSRLLDFISKQPSCRVVLEACGGAHHWGREITKMGHDVRLIPPHYVKPFVKRQKNDANDAEAIVEADSRKTMRFVAVKTAEQQGQAMVLKTRDLLQMQRTQAINALRGHLTEYGIVAPQGPAHIHRLEAALSDPQHFIPDVTIELCQRFLDHIHALTVQISELTKQITIMAKTDETTRRLMTIPGVGPIGAVALATLAPPCETFGKGRDFSAWVGLTPKQHSTGGKTQLGRTSKMGQRDIRRLLIIGAMAVIQAAERRGLSENTWLARMLARKPKMLVAVALANKIARTAWSLMARGGVYRSPLTV

SEQ ID NO: 257629 - protein, 338 aa, unidentified
MVSVGIDLHRRRSDLVGVDDLGGVVWKRRIVSSPAEFLRVFGELEPGSFEVAFEATYGWGWLADLLEDVGIPAHMSHPLATKAISSARVKNDTVDATTLAQLLRTHLLPEAWIAPPEARQARRLVRSRAALVRIRSRLRCQVHAVLADHGITPEMSDLFGEGGRRFLAEVSLPPLSRDRVDSCLRLIDTLTAEVESVDKQMRVVFRDHPALPRLMRIPGIGFVGAATVIAEVWDVSRFRGADQLCSWAGLTPTERSSAEHTRRGHITKRGSRWLRWIMVEAATNHTGRDQNLRQFEGRIAHRRGLKVARVALARRLLTLCFYALRDPGGCAAYPLVAA

SEQ ID NO: 257630 - protein, 359 aa, unidentified
MSQDRTFVGLDVHAWSVVAHGLDAVTGEVWQRRLTPDPADILGWVSGLPGPVKVVYEAGPTGFGLARHLRSHGVACLVAAPSKLQRPTGDRVKTDARDAAHLARLLKLDEIVEVTVPSETQEAARDLVRAREDVRGDLMRARHRVSKFLLRQGIVWTGGQAWTGRHDVWLRAQRFELPGRQLAFDSAYEAMTLTLDRRDRLDAAIVEMAEDCEFTDLVHRLCCLRGVSTLTGFGLAVEVGDWTRFSGNTIGAFLGLVPTEYSSGGSRSQGSITKTGNGHARRLLVEAAWHHRKAYRPGAAMRSRWDAAPAAARVRGHQGNQRLHQRWEGFTARRKKPVVANVAVARELAGWAWSLAVMD

SEQ ID NO: 257631 - protein, 346 aa, unidentified
MGAQIVGGVDTHLEMHVAGALDDRGGLLGTASFATTPEGYRELVEWLGSFGEVALVGVEGTGSYGTGLTRYLQAAGIAVVEVDRPNRQRRRRVGKSDTHDAVSAARAAFAGDALGAPKVRDGNVEAIRVLRLARTSACRDRTRALNQMRSLITTAPEELRAQLRGLTIPKLLQTAAEFRPHGRTDVTNANRLALKTLAQRIRELDGEIRSLEGLLTPLVAETAPAMIERLGVGTDTAGALLVAAGENAHRIHNERSFARLCGAAPLDASSGKQQRHRLSRAGDRQANSALWRIVITRLSHDPSTRRYLQRRCAEGKTKTEAIRCLKRYIARELYTCLPQQRLLDNT

SEQ ID NO: 257632 - protein, 421 aa, unidentified
MFSESEDDEQIIERVAALDLGKAELVCCVRLPGKTGTRRVQEVSTHTTMTRSVTELANRLVDLRIERVVMEATSDYWKPVFYLLEAHGLQPWLVNARDVRHLPGRPKTDVLDAVWLCKVAERQMLRPSFVPPAEIRQLRDLTRYRMSLVATRGAEKNRVEKLLEDACIKLSVVASDIFGVSGRQMMAALVAGERDPGRLAEMARARMRAKIPQLREAFTGFFTDHHALLLAQMLSRIDGIEADIELLDERIDAHLVPFADAVERLDEIPGIGATAAAVIIAEIGVDMSRFPTAGHLCSWAKFCPGIKSSAGKSKGRGSTGHGNRYLARILGEAAVTAGRSDTFLGERYRRIAKRRGKKRAQVAVGRSILVIIWHLLADPDARFVDLGRDHYTRSINTETKKRNHIRQLQALGYTVTIQPAA

SEQ ID NO: 257633 - protein, 439 aa, unidentified
MSRKKRTHLRGERGQAFADKIRGIPLDQILCVSLDIHKCFHVVIIHNALGEIVTPTFEIDVFQTGYEQLCQAVARTDAKVVLTGMEPSSHYFENLARHLHERPQPVTLINSFAVKKNRDQQMMQYEKDDEIDTAAIGDLLRRGEGSPFNPPTGIYLQLQHLDRVRISKVKMRTMLQNQIIGHLDRIFPGLVIIGDEAKDRYEPLFATDLWKCQTMQHLIRVCPDPRKLAAMSPHELIEAFHAHNYAMGPVRAARIIAYAQKVLLPDPELVAIRCQLLPHDLALLEDVEHHIAQLEDDLRALLAETPYQVWTKLKGLSDIQVASLAAAIGDPANYKYAAQVFRRSGLVPGRNDSGTRQRKGKGKKIVKVGDVYLRRALMNALATLILHQIVLRDYYNKLKVSKPAGVARVATARRAIGILWAILRDQHSETLTLKKGVKM

SEQ ID NO: 257634 - protein, 347 aa, unidentified
MRFYTQQHKYYCGIDLHARKMYVCILNSLGKIVLHKNIKTDPEIFFELIFPYLEDVVVGVECMFSWYWLADLCHEHRIPFILGHALYMKAIHGGKTKNDKIDSRKIAALIRGGNFPLAYAYPKRMRSTRDLLRRRMHLMRKRAELLSHIQNTNTQYNLDEIGRKIAYKANRIGVAERFEDPSVRKSIQVDLAMIDTYDKLLQDLELYILRHAKAHDANTLYLLQTIPGVGKILALVMLYEINDIRRFPMVQDFCSYCRLIRPEKESAGKKTGKGNKKIGNPNLKWAICEATIILLRESEQAKKLHRKLIKKNGEGKALGILSNKLGRAIYYMLKNKKAFDMNKFFSH

SEQ ID NO: 257635 - protein, 334 aa, unidentified
MCAKKTGSFENLAVVGVDIGKDTFHLVGFDRSGQLVMRKQIKRLALNATFEQLPRCIVGMEACLSAHFVSRTLRGMGFEPRIIPAIYVKPFNKGQKNDYNDAEAIAEAALRPNLRTVSEKDQDQLDLQALHRVRARLVSRRTATINQIRAFLIEQGITVRSGLRALKNSFETILEQRRDEISPRMRGILIGLYGDWLWLDKRIEDISGEIEEISRTEENCANIMTIPGIGPMISTAMVAAVGKGEAFDRGRDFAAWVGLVPRQFSTGGRTILGRITKRGSRYLRMLFVQAAKVIMMRPHRWSDFSFGPWLTEAVARMPRNKAAIALANKLARTA

SEQ ID NO: 257636 - protein, 304 aa, unidentified
MNGIGIDVSKRQLDVGTTNGEILQVSNSASGFAELDLWLRKHPASQIVLEATGGYEQSVLNFLHNAGHPVVRANALRARRLAQGLGQMAKTDRLDACALAQMAALVKLPTYQPLEPWQQKMREFVRARRQTMEALTVARQQQEMVTDRELRRLLQANISRLQGIVGRLGKQIAEQVAQQPQLAVLKSMKGVGPGLQAVLVSYLPELGRISGKRIASLVGVAPMSHDSGTMRGKRSIHGGRAEIRQVLYMASMSAMRHEPRLRDFYQSLRARGKEGKVAIVAVMRKMLVILNARVRDAQGGSIPA

SEQ ID NO: 257637 - protein, 363 aa, unidentified
MLDSMTVTVGLDVHASSVRLAAVCADELLDERTLPYDLETVERSLRRWPAVRCCYEAGPTGFGLYRYLLERGVACAVIAPALVPSRPGDRVKTDSRDARRLARLYAGGLLEAIYVPSPELEAARDLVRAREDARLDRMRDRHRLSKFCLRHGRRLPGMSWGVTRRRWLGEQRFEFAAQQQTFDAYLHTVDLVDRRIEALERSIRETAEQPEWRELVARLRCLRGIDTLTALGLVTEIGDFGRFRSAAELMSFLGLVPSEHSSGGQRRQGSITKVGNAHARRLLVEAAWHARRRPTVGYELARRQRGQDPLVIERAWRCQQRLHSRWQRMAARGKPQQKIVVACARELAGFVWATATDQPLRSS

SEQ ID NO: 257638 - protein, 331 aa, unidentified
MKKFSGIDLHANNSVVVVSDEVDHIVYQRRLPNDALQIRAALAPHREELEGVVIEATYNWYWLVDALLADGYHVHLANPAAIRQYEGLKYSGDFTDAAHLAQLLRLGLLPEGYIYPADGRQVRDLARKRMQLVQCRTAQILAIGNLFARHTGSQMHGPQVKRLDGAQVSRFGFAPDVTLAIRANLAVLGTLQQQIEIIEKRLMQQVKLNPDYALLNTVPGIGPVLATTIMLETGTISRFATVGHFSSYCRCVDSRRESNSRKKGEGNTKNGNRYLAWAFVEAANFAIRTCPQARRFYERKKRMRNGIVAIKATSAQAGSRLVSHASGAQTI

SEQ ID NO: 257639 - protein, 368 aa, unidentified
MREQQNNRQERTIIGLDLGDRWHRFCVLGESGQVVKEGSVANNRVALSELSSRYPGALIVMEAGCHSPWVSRHLEQAGCEVIVSNPRKTRAIYQHERKSDRRDALMLARIARMEPALLYPVRHGSEEAQQDLLRIKLRDSLVRARVGLINSLRFTLKSLGYTIANPSTERFHKVIQSALPESVVQMIAPSVQAIEELSLRIKLLDREIRTLAHTKYPETSWLEQIPGVGPITALYFVLKIGDPARFERVRDVGAFIGLCPRRDQSGENDPQLRISKRGDAYLRRLLVSSAQYILGPFAPPSALRQYGLALAAGATARAKKRAVVAVARKLAVLLLTLWKNKSSYQTFPQHSSREKMRTNDLERLRCIA

SEQ ID NO: 257640 - protein, 360 aa, unidentified
MRLKGGAVQKIYIGVDFHARQQTICYLTTDSGELVLHQLKHQDKAAVRAFYAQFSGDVIVGLEASGYSPWFERLLEELGCEVWLGHATEIRRRARWRHKNDRRDAELILELMLHDEFPRLYLPPLQSREVLRMLRYRQKLIKIRTIGKNSLQALALQAGLAKGPHLFSKAGLQQLRQASMSAAMQWQREQWLQLLEPLEARLLETRLWLKQQSHADQRISRVRTHPGIGLLTALCLVHSLEPVSRFANTRKVTAYAGLDPLERSSAERQRFLGISKGGSRVLRFLLVEAAHTAIRKDAELRRFYQRLAERHGRPKAKVAVSRKLLIRAYIMLRDEIDYAEFQRRAVAARLARQSSRPPCL

SEQ ID NO: 257641 - protein, 341 aa, unidentified
MVTTIGIDPHKATHTAVAIDETETVLGELTVPADRDQTKTLLDWAQNLDGDGRVWAVEAAGGLGYLLSQQLIADGEHVVDVPPVLASRVRVLGSGRSEKNDPNDARSVAIAALRQPGLAVVRPEDHTQALRMLAKRHLELTALRTQAACRLHAVILQLRPGGIARRLSAKQASRMLQGMRNLDVIGEQRRMMARAHLADIRRYDREIKANKVLISKAVVASRTTLTDVYGVGPVVAALLIGYTNNIGRFATADHYAAYNGTAPVEYSSGGKKRHRLSMRGNRVLNHAIHMAAVTQISHDTPGRIYYDKKQAEGKTRKEALRALKRRISDVVYRKLLADQQS

SEQ ID NO: 257642 - protein, 355 aa, unidentified
MSQEKYIGMDVHQATISVAVLDSRGKLIMESILETKAATILEFLQGLHGSLSVTFEEGTSAAWLHDLLKPHVTRLVVCDPRKNALLKDGSKSDRIDARKLAELLRGNQLTSVYHGEHGMRTLKELGRSYVTITQDLVRVMSRIKALYRSWAIPCSGTSVYAPRHRAEWLGKIPEPGVRLRAERFYQQLDLLQPVRQQARRDLLTESRKHHAVKLLRQIPSIGPIRAALLVAQLQTPHRFRTKRQLWAYSGFALETHDSGEYRYLRGKLQRNRERMTVRGLSNNHNPEVKNLFKGAAISASTHPGPLYDFYVALLEKGMRPTMARLTLARKIASITLTIWKKGADFDATQLHRQEA

SEQ ID NO: 257643 - protein, 334 aa, unidentified
MKQVTQVGVDVDSEELVCAMQRAGQRQPLARFANTAAGHKKFIRWATKGGRPARICLEATGIYSLEFALALHHAKNVEVMVVNPRAIKDFTRACMQRAKTDAVDAGGILDYLERMPFVAWQPPAAEVLQLQAINRRIVQLNTELAREKNRRHASEFAGACAHAIAHDIEVNIHHLERRIERMHDSGLKLVRGVPALATKLAHLVSTKGIAEASAMRLLGELLVLPDELAAPQWVAHAGLDPRPYDSGTSVHRPRCISKVGNRHLRAALYMPALVAIQHEPNVKAFYDKLVAAGKKPMQAVVAVMRKLLHAIWGMLKHDQDFDGNKFFKIAPETA

SEQ ID NO: 257644 - protein, 401 aa, unidentified
MIDTGDIDVFLGLDVGKGEHHATAVTPAGKKAFDKRLPNTEPKLRELFAKLQAKHGTVLVVVDQPASIGALPLAVARDMGCSVAYLPGLTMRRIADLYPGEAKTDAKDAFIIADAARAMPHTLRAIDGEDETIAELEMIVGFDDDLAGEATRVANRLHGLLTQVHPSLERVLGPRLQHPAVLTLLERFGSPAQIRKAGRRRLVTLLRPKAPRMAERLVEDIFTALDEQTVTVPGAEAAALIVPSLAGSLTAVLDQRKLLAGRIEELLEAHPLSKVLTSMPGVGVRTGARILIEVGDGSTFPTAGHLAAYAGLAPATRSSVSSIRGEQPSRRGNKQLKRALFLSAFAALGDPASRAYYDKKIAQGKHHTQALPCLARRRADVLFAMLRDGTFYEPQPSAAVT

SEQ ID NO: 257645 - protein, 406 aa, unidentified
MSVYMGIDWSTKKHDIVLLNEAGAIIARQTIPHQAEGFEKLDKMRRELGVPIGECLIGMETAHNILIDFLWGQGYERVYVIPPSVVKSSRGRYGSSGARSDQRDARLLADILRTDCARLQRWRPDSLLTQQIRAKASLIHHLTQSVQRTRQRLRAILVRYYPGALGMFGSLTAQITLHFLRQYPNPQAMSQLSYGQFKDFARAHGYQRRWWPRQYARMQETYPVASETTVQVYQEEMELLAQQLLELVQTRLTQKRALTQLFKQHPDQAIFASLPGAGEILAPALLAKFGDDRERFPDPQSVQALAGTCPVTAASGKRRVVKFRRACDKEFRHIAHQWARASLGKSVWANAYWEQVRARVGYNNDAYRRLANRWLAIAWRLWKSRQIYDEAYHLQQRAQRSKPQVR

SEQ ID NO: 257646 - protein, 387 aa, unidentified
MSQTVTALTPAAVDYERTLVLAIELSNKSWVLAAQVPGLPHTKAKRTVNPEAEALLAAIAGYRARAAATGRSIERVIAVYEAGWSGFWLARRLMGHGVEVHVIQPSSVPVDRRMRRAKSDGIDAELLLRTLLAWLRGEPRVCSMVPIPDEADEDARRCVRERSELIAERVGLTNRIGAVLATLGVSDYNPLLRNRKRRLAELRTGLGEPLPRNAHAKIERLLARLELVLAQIAELERERDAVVETETSDKASKMIQQLTSLRGIGVQSATVLVREAFVRRFANGKALGSYAGLASSPFNSGRMEREQGIGKAGNRRVRTVMIELAWLWARYQPDAAQVCWFRERVGPTGRRVRKIMVVALARKLLIALWRFVTDGTVPEGAVLKPAA

SEQ ID NO: 257647 - protein, 369 aa, unidentified
MTFFIGVDLHKTQFTVHVRTEEKIESLDQIKQYPTTAAGYAEFLTRIETYKASGAAVKIGVESTGNTRFFKNQVEKAGAEVTVINTLKFKVINESTKKTDKHDASTISEFLSKDMLPESYLCGKETENIRRLLKSRERLVRSVVGQKNEVHALLVSMGLPAELRSLQSKKGRRNILDTLESNNDYVLEAQSVQLMFQIIDRMTESVKTIEKQLAELTKDDEMVNRLMTIRGCGKITAWTIRAYTEDISRFASAKKYAAFCGLVPWVQDSNATIHHRKITKRGPQELRTCFVQLVLGIRRCKDTSEWRMMQRYEYMKKNKGSGKSIVAAARKMAEIVWAMLSEKQDFNADKMKGIYKPMTLADEALSAMN

SEQ ID NO: 257648 - protein, 320 aa, unidentified
MDAVLGIDIAKAKFAAALLRPDGKIRHKSCANTPTGFADLADWLQRQQVTRVHATLEATGTYGEALATWLHDAGHVVSVVNPSVIHAYARTQLARSKTDRIDAELIARFTASHQPTPWIPPALEIRPWQALVRRLDALQGMRTQELNRLAAGVTVADVRASIETVIASLDAQIAHVHQLIRDHLDRHPGLRAQRELLTTIPGIGEATAAVLIAELFDKRYASARQAAAFAGVVPRLVESGTLRGRSRLSKIGPGRLRKALYMPAVAALRWNPTIRAVRARLAAAGKPPMVIIGAAMRKLIHIAYGVLKSGRAYEPTCAHP

SEQ ID NO: 257649 - protein, 457 aa, unidentified
MLLFIGDDWAEDHHDVELQDETGRRLERVRLPEGMAGISRLHAMVGRHAGDAEDVQVVVGIETDRGMWVQALVAAGYQVYPVNPLQAARFRERLGVSGAKSDPGDAHTLADVVRTERHQLRPIAGDSDTAAAVKVAARAHKSLIWERTRHLARLRHALLDFFPAALAAFDDLDAPDVLELLGKASDPDAAARLSRAQVRAALKRARRRDVDAKTERILAVLRAPQLRQPAPVTAAYAASVRAQVAILTALNTQIQAMQAQVDAHFGQHPDVEIYRSQPGLGVILGARVLAEFGDDPDRYAEAKARKNYAGTSPITRQSGKMRLIRARYVHNDRLVDALNHQAFAALRVSPGARAYYDRQRARGVSHHAALRQLANRLVGILHGCLKTHTCYDEATAWPGQYTSTRQGKEASLGTIPKKINNLVLDNQTHGMSTGNPHELHYRPRRARRRSSAGAAPA

SEQ ID NO: 257650 - protein, 333 aa, unidentified
MNTIGIDVGCKELVVVVMVNGKARKAKSFDNTPLGHQSIIQSLTKLKEESKVCIEATGVYHFDLAVALSRANDIEVMVINPKAAHNFAKALMTRSKTDAIDAENLAIYAERMPFEAWDRPADECIGLRATARRIAALSKQKTQTKNQLHALKSTVETPTLVIEQTEQLIDILDIQIKTLRDSAISIIHQNEGLKQAYTLITGIKGIAQASAIQILSELMILPEDMTARQWVAHAGLDPRIFDSGSSVSKKPRISKVGNKYIRQALYMPALVASRFEPNIKGYYHHLIDDNGLKKVQAVCAVMRKLLHAIHGMLRTNKEFDGTRFYTLPIATDS

SEQ ID NO: 257651 - protein, 337 aa, unidentified
MTHYCAIDLHSNNNVPVVIDDNDKIMLQKRLPNDLDKVLAALDPFKDTIQGIAVESTFNWYWLVDGLMDHGYNLHLVNTTAVKQYEGIKYTNDQSDAFHLAHLLRLNILPTGYIYPKDERAVRDLLRKRLQLVRHRVTHMLSAQNLIWRTTSINITTKPIKEADFSILNLVDNRNIKMAIKANLIMIRALNQQIELLEKTVKRQIEFKPEFQSLLTISGIGYILGMTIMLEIGDINRFPRVGNFSSYCRCVDSSRFSNGKIKGTNNRKNGNKYLAWAFVEAAHSIIRHNKTAHRFYQRKRAQKNGAVATKALAHKLARAAYYVIRNREPFKQELLFQ

SEQ ID NO: 257652 - protein, 373 aa, unidentified
MEIIYDKCCGLDIHKNLIVACIICGRKKELRKFGAMTDDILDMISWLKENEIDAIAMEATCVYWKPIYNLLEDETFRILVVNAQFIKGVPGRKTDVKDAEWICDVTRHGLVKNSYIPSREDRELREITRYRQSLIEERSRELNRIQATLEGANIKLGSVVTDISGKTSMEILSAIADGNTNPQALSQLAKGSLINKKEVLEKALKGSLGAHQLIMIRHQVEHIKSLNLIISQLDEDISQKTEEKANAIERLDEIPGIGKRTAERILAEIGFSMEQFPTSAHLCSWAGLVPCNNESAGKKKNTRLRKGNKYVKTVLIECALSAVRKKNCKFRDKYKAIASRRGGKRAAVAIAHKLLIIIYHMLKNNSHYIEQLI

SEQ ID NO: 257653 - protein, 368 aa, unidentified
MIVIGTDTHKRTHTCGAVDAFTAAARGELTAPARPGSFGMLLRWARALDAERVWAIEDCRHVSGAFERFLIARGERIVRVAPKHMAGARRSSRERGKSDSIDAFSVARAALKEGIENLPGAHLDGAALDIRLLVDHREDLIAARTADQQRLRWHLHDLWPELEIPAGALDTRKWLGKISGRLARAQQTTRVRVARELVRQITARTSRIRELQAELAALVESYAPQLLAERGCGPLTAAKLIGEIAGADRFATDAKLARTGGAAPIPASSGNTSRHRLDRGGNRQLNCALHRLAINKGKWDPDTAAYLARKQTDGKSRKEALRCLKRHLARRVWKLLQTPVPAAAPTAAPATTPPTIAASAPTPMPCLT

SEQ ID NO: 257654 - protein, 319 aa, unidentified
MFTLGIDVAKDTLEAALFDGRKFKTKTFRNNAVGIASMQDWLIGAGAAGCAVGMEATGSYSEAVACALHDAGYRVSVINPAQIAAFVQAELGRSKTDALDAKRIARFTALHQPAPWQPPAQNVRVLQALVRRLDSLKDLSQQERNRLDTAHLSVQPSIRAVLETLEAQIRTLERTIQDHIDQDPDLGRHRDLLESIPGISQRTSAVLLSHLHALVRCRTAKQWVAYAGLDCAIGQSGTSLDRRGHISKRGSASLRAALFMPAIVAARHNPLVAPFAQRLRAAGKPGLVMVCALMRKLMSIVFGVLKHQTPFAPEGLAPR

SEQ ID NO: 257655 - protein, 385 aa, unidentified
MRNKTFVPREYDVFAGLDVDKKSIAATFSGHQGFIRSLSMPYKVEDLLNHVRNHFADQKVAFVYEAGPTGYGLYDGLAAQGYTCLIAAPSMIPRAPGQRVKTNRLDSKALSESLRGGQLKSIHVPSPLYRQLRHLTQLRDTMMSEAVGMKQRIKSLLLFEGIAFPPAPAGSQWSFIVKAKLRRLPCSNTVRFKLDQLLDSLEFAEKQVFKSTKEIRRFCQTDPELSQCIEYMMTVSGVGWIVASQLLARIGDWRELENIRQLGGFLGLVPTEHSTGDKTDRGPITHTGDGRLRSKLIQASWSAIRKDGELREFFRSVCQRHPRKVASRVAIVAVARKLSVRISVVLMKQRPYEVRKKVHSAPLTQEETSPQGTTRRRAEPGGKNS

SEQ ID NO: 257656 - protein, 360 aa, unidentified
MTSTVRVNQIEVTGGVDTHKDTHTAAAVDSTGRVLGSQQFRADAGGYRALLAWLRGFGTLLLVGVEGTGVYGAGLARFLTGEGVSMVEVDRPDRKARRWQGKSDPVDAEAAARTALAHVRTGVPKQRDGRVEALRSLRVARRSAISQRADAQRQIKALVITAPESLRAQLRGLGDKQLIKTCAGLRPDHGNAGDPSIAAKIALRSLARRHQGLTEEIHDLDALLAPLVEQINPTLLAANGVGVDVAGRLLVSAGENADRLTSEAAFAMLCGAAPIPASSGKTTRHRLNRGGDRQANAALYRVVLCRMRWDSRTRDYVTRRTAQGLSKPEIIRCLKRYVARELFTLINPPATATNDLAPAA

SEQ ID NO: 257657 - protein, 348 aa, unidentified
MKNKSFVGIDISKNVIDVSIFREDTNIKMFPHEVFNNTRKGFGDMCSWLKKSRVVLSQALFGMEFTGCYSLDLEKFLTSKNYSFCMLSTRIVKHHPMGTIDKRDKNDSAKIADFLYRYDGTECAKPYKLPSKAMQQLKQLVNERKFLVEQRTNFMNRMQMFETKEDSAMYESYIKKLNHDIEKIDQEECELMSKEEDVFDTFQNLLTIPGIGFVNATNIIAITRNFTAFDTARQYARYVGVAPCSHTSGTSVKWRARPSAHCNGQVKADLSMAALRAVEYDVEMQMFYNRKLGGRKDSYTKRKALNAVKFKLIRRMFAIGKQKRKWEVLNTSDDRKNLHIEKSKASEL

SEQ ID NO: 257658 - protein, 454 aa, unidentified
MAYYAALDVSTESTSICIVDREGAILHEGKAATEPRAIHEFLQSTGLPLTRVGLEAGNLSIWLYHDLLAAGVPVVCLETRHANAVLKTQKIKTDRNDARGLAQIVRTGWYKAVHVKSHASQKLRVLLNNRRCLLDKRMDVENQIRGTLKVFGMKVRAIKVFGMKVRAIKTRHFEDRVRELLGSDAELEAYIVPLLDARRYLQEQVARLEKMLIASAKQDAVCRRLMTIPGVGVLTALLYKSSIDQPERFRKSKDVGAALGLTPRKYASGEVNYDGHINKAGDKMLRHHRYEAALSHMVRSRKWSALKSWGMRIAKRSSMKNACVAVARKLAAIMHRIWLDGTEFKLTAAPAGGARRSRCARDGQRSAVGCRRCILEGARGAGHSSGPRPAPVRGRSAHDGPRRAAGRRVGRRGGGHGHRRGRRIVRRRRGSLGRRALRFDPPYCRGGAARISRI

SEQ ID NO: 257659 - protein, 457 aa, unidentified
MTRRKHSRPARDIAPVHPHAAAVDIGATLHVAAVRPGCDPEPVRTFGTFTTDLHRLADWFEQCGVETVAMESTGVYWIPLYEILDQRGFEVVIVNARDAKNVPGRKTDVSDAAWLQRLHEYGLLRASFRPKGEIATLRSYLRQRERLLDQAAAHIQHMQKALTEMNLQLHHVVADVTGVTGLRILRALVAGERDPDTLAAYSDPRCKAPAETLRAALVGNDREEHVFALAQALELYDIYQAKVAACDQRIEAVLERLKAANPPPAAALPPARPRRRQANEPGFAVREALHAILGADPTQIDGIGPSLALTLVGECGTDLSAWPSAKHFTSWLSLAPHNKISGGKVLSARTRRSGSRAAALLRLAAVAVGRTATALGAFYRRLAARVGKAKAVTATARKIGVLFYNMLRHGMDYADPGASAYEARYRQRVLSNLRRRAKSLGYVLQRADPASAAIAVS

SEQ ID NO: 257660 - protein, 416 aa, unidentified
MKKHSNSPRKSEPTSKRAKSRGPAQLDPEEVLAELVRKLREKLDPKGVAASTREEHQGRGLRPNLDRLTVGVDLGDRWSQYCILDLEGETLAEGQLRTTQQDIAEFFQALNAARVVVEVGTHSAWVREVICSCGHEVLVANPRLMERSKGGKRKNDRIDANKLARLGRVDPQSLHPMQHRSAEVRQDLVMLRARDALVAARTELINATRGLVKSMGTRLAKCSSPSFAQKVEETVPAEIREALLPVVHMTAALSDCIKGYDEKIEKLASEKYGHTALLRQVKGVGPITSLAYVLTLENPKRFVKSRDVGPYLGLVPQQEDSGDSQPQLGINKAGDTMVRRLLVGSAQYILGPFGPDTDLRRYGLRLCERGGKNAKKRAAVAVARKLAVLLHRLWVTGEVYEPLRHGISATVQAAAA

SEQ ID NO: 257661 - protein, 329 aa, unidentified
MNNCGIDVSNKTIDVVVRKKGKSLDCRKFDNNYTGHMAIIAYLRKHKVTRVGLEATSYYHLDLALEFDDTKDIEVMIINPRASKNFAKAMMQRNKTDATDANMLAEFVERMDFVRWTSPVGEVLDIRACGRRLVSLSKEKTKAKNQLHAFSRTRRTPNFVIEDIQLSIQQIEDQTDKLISHALRLIKQCEFLKERYQRLTSMKGVADKTAIKLLGELGVLAMDMSAKQWVAHAGLYPRSFESGTSVKKRTYIGKVGNRYIREALYMAALSASSHDPYIRGFYLHMIEDNGLTKLQAVCAVMRKMLLAMHGMLKENKPFDGARFYNLKHS

SEQ ID NO: 257662 - protein, 339 aa, unidentified
MSKRSIQVQETMYCGIDVSAKSLTVAIQRMHQPVEQRSFPNTSVGHKALIVWLRKAKLPVRVSLEATGIYSLDLAFALDAAEGIEVAVLNPKVANRFAQTIRRSKTDAADAELLAEYARRMPFTAWVAPSPGSLRLRSIVRHVESLSVQSAQNQNRLHAAHGSTSTPGCIVQDLKRSVASLELRIHKLRREAMTLVRQDDLLRKRFELLVSIPGIAQVSAMQLLAELSTSPPDLTVREWVAHSGLDPAHEISGSSVRKASRISRAGNRHLRRALYMPALVASRCDPHAKAFFESLFARNKARLQALIAVARKLLHAIYGIFRSGLKYEGTKLFPRITSS

SEQ ID NO: 257663 - protein, 337 aa, unidentified
MDNYIGIDVAKSTLQVFIPKNESDIEIENSLDGLKNLYNKLKKQYKKSIEDIVFVYESTGSYSTILEHYCQNKAIKCFKVGAYQSASFSKVVKNRSKTDKLDAKMLSRMHILAKEGEIRVPSRDEKAHQIRSLIKYYQSLVKEERRKANYLEAATYNLEDSYVLKHVKRKIIQLQKEQTEIIDKIIEIISSNSHYLEAYTNILSIKGIGEKSAIILLYLFLRYPNASRQQLTALCGLDPIQRSSGTSVQHKERISKQGLSLIRDILYMPTLVSVRYNNEMKIVYEKLVERGKPKMVAQIAAMRKIILLAHSLYKNKQKYDPDRYLQFHQAKEENNMK

SEQ ID NO: 257664 - protein, 465 aa, unidentified
MTVRSVGIDFHQGLHRVRCLDEQAQACDGFGFQTTPEGLITLEERIFKDSSNPIIVFEPAGIPWLTVAAYLRSRHPDCRLVKAKMQKVAALRKYLKGPVKSDRIDALTLAKMPFIDPEQLEEVYLPSAEIHALQRLTRQRKRLQSDISGRKVRIEAIIDGYLPGVRKTFSAPWSIQFREFLRSRFNPFAIVRDGEKTFVSFLTKASYREKVSKTESQHIFQACQSIAAICKVSEIVSAINEDFFVELQDEVTRELRLMEAEEAESELLEQRISEIYHKLHPSNNLCTIPGVGEHTAPIFLASIGDPTRFRNQSSFANWTGVVPRSRQSSNMEAKGLRMTKAGPSIMRLALFQSGDIGRRWDPQMAAIYYRQMVNHGKNHKQALGAVMSHLGARVWKVLLEDRPYELKDMQGKPITRQNARSLILTKYHVPEEVRKEKRRRMNKTGVVRETATNSICETAKTPQPA

SEQ ID NO: 257665 - protein, 440 aa, unidentified
MKKEKQGFPLLYPNAAGIDISSKEHYVAINPGLHEECIKRFGSFTADLISLSKWLTDNHVDTVAMEATGIYWVSLYLILEEAGFDVVLVNAKHVKNVRGKKTDIKDAEWIRQLHSCGLLSNSFQPDAYIRTLRTYMRHRKNLLEMAATHIRMMQKALEQMNIKLHTVIADITGKSGQAIIHAILGGERNPASLIQLLDGRIKANRDDVRKSLEGIWKEEHIFELRQSYDLYHYYRSKIDLCDLKIQSHLNQKSGSTQSIEIEEKKRLSKSNKNNLNFDARQILYHITGTDLTRIYGITDTNALEIISEVGLNMTKWPTVKHFTSWLHLAPNNRISGGKLLSSKTGRKKNKAGQIFKMAAFAVQRGNHWLSAFYHRIKMKAGTPKAIVATARKIAVIFYKLMKEKTSFNPVNIEQYAASSKEYQIKRLRKQAQKLGLSLTS

SEQ ID NO: 257666 - protein, 458 aa, unidentified
MSKVEEKRVARPRRRLSPVNAAAAGIDIGATFHVVAVGEDRCEPPVRSFPTFTSDLRELADWLSEAGIKTVAMESTGVYWIPVYEILEARGFEVLLVNARDAKNVPGRKTDVNDAQWLQQLHQYGLLRASFRPREALVRLRAILRHRERMVEYAASHIQHMQKALMQMNVQLHHVVTDITGLTGLRIIRAICSGQRDPAILAQFRDSRCKASTDLIRAALTGHYRSEHVFALRQALELYDVYQAKIEECDRELESALVEINRDRLAAEEPLPKRRDAGGRNEPHFDVRTALYTLLGKDLTQIHGLGAYTVLRLVGECGDDMNKWRTSKHFASWLCLAPGNKVSGGKLLSSKTRRSSNRAATLLRIAAVNVGRTQTALGTFYRRLAARAGKAKAVTATARKLALLFYNAIRFGRDYLDPGADYYEERYRSRVIRSLHRRAAQLGLILTQAPAMVESEVS

SEQ ID NO: 257667 - protein, 347 aa, unidentified
MNNSFAVFNPCGIEISYDLLVVALRCQDHDQPLREFPNTPSGHQSVLRFLERAAGPVRVCMESTGLYGLDLALTLHQAGVAVMVANPRAVRSFAQALLERSKNDQLDAGVLREFAARMPFQPWRPPSAAALKLVAVARRLEALTEMMAAEKNRRHAASLSQALPVLIRRDVERSIQTQQRAIHRLTLAAQEFVLADPELARRYELLLSIPGFGATSALHTLAELTLLPAGMDVRQWVAYAGLDPRSYTSGTSVQKKVRISKAGNKHLRRALYMPALVAIVRQPHLRAFYEHLLARGKTKMQALVAAMRKLLHAIYGMFKHDQLFEGQKVYALSATAPAQANCVLEVA

SEQ ID NO: 257668 - protein, 356 aa, unidentified
MTSNIKYVGMDVHKQSISIAVRNAAGKIVMECVIETKANTVLQFFDGLRGEVRVTFEEGTWAAWLHDLLKPHVGKLVVCDPRRNALLLDGNQNDRVDARKLSDLLYMNKLKPVYHGDHGLRTLKELVRSYLTITRDLGRVMTGVKAIYRSWAIPCSGKQVYGSRHRVEWLGKIHEPGVRLRAEFYYQQLDTLRALRQTVRRELLAESKKHKAWKQLCRVPSIGPIRAAVLLGILQTPHRFRTKRQLWTYSGLGSEIHSSADHEVAQGQLRRKKKPVEIRGLNENCNHDLKNLFKGAAVVASTKPGPFEKCYAALVAKGMRPEMARLTLARKIATIVLIVWKKGVRFDANHLKPQTA

SEQ ID NO: 257669 - protein, 356 aa, unidentified
MDKVIREEAVRVGVDLAKRVIQVHAVDATGHVLTSRALPRARFIDWCVRLPAGCVVAMEASSSAHHWARKLVALGLDARIISAQLVEPYRMEGASGKNDANDAAAICEAASRPKMRFIPVKSIEQQSMLCVHRLREGFKEDRTACINRIRGLLAEFGLVFPQSPRELQAVLSDVLEDAGNELGTLARLTLQRAQAQWRELDDHLAWCDERIDAHRRSNPEVQHAATLIGIGPVTASAAIATVGDFKQFKNGAQFGAWIGLTPRQRSSGGKNNLGGITKRGDTYLRTLLIQGAKSAVMTAHRRQDKISSWVLALRERSGWQKAVVALANKNARILWAVMTRGDVFDPNHLSVKPTAC

SEQ ID NO: 257670 - protein, 403 aa, unidentified
MNSVGIDISKGRSTIAVMRPFGEVIISPFEVRHTGSELSKLARQLKSLDGETCVVMEATGNYHASVAKLLHDAGLYVSVVNAKLVHDYGNNELRRVKTDRKDAVKLANYGLDRWLTLPRYIPEEDTRLLLKNCYRQYRQYSKVQTVLKNNLISLLDTVFPNANRLFSSPIRGDGSEKWVDFVAEFWHCRCVSEKSERAFTSKYLRWCRKHGYNFREAKAHTIYAEASGHIGVMPKFETTKLLVEQAVAQLRATSAALAALKHEMQSLASQLPEYPVVMDLFDVGPTLGPQLIAEIRDVRRFYSKKALVAYAGLDAPPNDSGDVTGRHKSMSKIGASSLRRTLFLVMSVYLQTAPLDEPVCQFMDRKRAEDKLYRVYMMASANKFLRIYYATVKAYLESLEHTA

SEQ ID NO: 257671 - protein, 336 aa, unidentified
MVGLNAQGEVVVQRKCSRSQLLRFTSNLPACLIGMEACGGAHFLGQALRDQGHDVRLMPAQYVKPYIKTNKNDYIDAEAIAEAVGRPRMRFVPIKTDDQLDLQSLHRIRERWVVRRTAVINQIRGLLLERGITIRKGRLYIEASLPAILKDADNKLSGILRVLLTQLQLEMQYLGRQIDESDKLIGEIAKSMDSCRRLLAIPGIGPLTATATIAAIGNGAAFKKGRGFAAWLGVVPGEHSTGGKQKLTGTSKRGNKYLRKLFVQGAHTVLLQKTKQSSGLSIWLADLTARKRKQVATVAMANKMARMVWAVLTKGEAYRPPLLLQPAGNGLQMTPA

SEQ ID NO: 257672 - protein, 329 aa, unidentified
MTINKQYIGIDVGSHELVIAQGLSQASSKFIKLPVQTIDNTIEAINQWIETLGENVHIIFEQTGTYNLPLSYALTLHEITFSVITPSQSKGFVKSMKVTHQHDGVDAALLSLYGANYQPAPTSIEDEHLHHLRQKRKHLSTLMTQKQAYENQLHALSFDPRADKLVIESLELLQMTLQIQITKFKEELFTLDDDQHKHLFGLIKSVVGIGDASANALIIASDGFKNFSNVKQVLKFLGIVPIEKHSSKSVHKNYGLAKTGLGYVRAILYMAARSAKKYNLACVAVYQRQRALGKAHKVAMIAVMNKLIRQVFGVVKNQTLFVNDFEFAK

SEQ ID NO: 257673 - protein, 431 aa, unidentified
MKYKLKEKQNQRILDITDQTLVVGADIAKDTHVARAIDFRGIELGKDCVFENSRKGLSKLVSWMKALQRQYAKTDIVFGIEPTGHYWFPLAEFLQDKGIRIVVVNPHHVHKSKELEDNSQTKNDYKDAKVIADLVRNGHYTEPQLPTSVYADLRILMNMREKTMVSLGQVQRRIQNWLDRFFPEFNNVFKSWEGKAALVTLTEFPLPQEIVALGATAILGRWKQDVQRAVGIKRAEKLVEAASESIGLTEGTTAAKLELHTWMQQYALFTQQLEEIMNQVELLLKQIPGTQEMLTIPGVGITTLAGFLAETGDLSRYSHGQQIIRLAGLNLRENSSGKKKGRTTISKRGRSRLRALLFRAVLPMVAKNPEFKAMHQYYTQRQVNPLKKKQSIVALCGKLIRILHTLGTRKIVYNAADVLGPVRRTQLQLAA

SEQ ID NO: 257674 - protein, 407 aa, unidentified
MAGVMIGVDPHKGSHTAVVLDAREVVLGQVRVTARTDQLLRLQQWAQPWPDRVWAVEGARGLGRLLTQQLLAAGERVVDVQPKLAARVRLLNTGHVNKNDPNDARSVAVAALRSCQVSDASLDDHTVVLRVWGRRYRDLGRLRTQVMCRLHTVLCEMVPGGFSKEISAGQTIQVLAGIVADSPMTAARFELAHDLVGDLQRIDEQRREVRRRAARAVTSSATSITQIYGVGPIVAATVLGYVRDIHRFPTRDHFAAYNGTAPIEASSGNRKIYRLSRRGNRQLNYVIHMAAVTQIRNHGTVGRAYYDRKIAEGMTGKAALRSLKRKVSDAIYSRMINDAAPPVPNGLGKDPGGQSGNDSASSVTSSHPESPALRKSHSRATSKPRVQARQAPNSSSLRSSPQPRRNP

SEQ ID NO: 257675 - protein, 419 aa, unidentified
MSFKILKNNCCGLDVHKTWIYACIGITDSFKRTEYKQARFSSFTKGLQELCLWLAKYNCIDVCMESTGKYWIPVFNVLEKNNIFVTLSHPKYTKPQKGNKTDRKDAKWICDLYMCGMVKPSFIPPADIRELRDLVRYRFKLTCMITGEKNRAHNCLTVSNLKLDDVFSDIFGKSSRSITEQILQHPGEVFDVAPFVDSRCKTPIEEIQAAVDGAISHEQAVKLRQCLKHIDELEMHKAEIEREIFRLSDKYESVLSLIRTVPGFDKTPMTAIQVLSEIGGDMSVFPTAKNLVSWAGCCPRNDQSNHKIKSTRISRAGSYFKPVLVQVANALIKSRKHPEFTTRYRRIKARRGHKKAIIAICRMILTAIWHILTDLKPYTPECFLESRPVNESKILTTSQALNLMKQRGYIIKDDVVPVT

SEQ ID NO: 257676 - protein, 337 aa, unidentified
MQITTIGLDLAKHVFQVNGCDAAGNCGVKRRLRRNQVLEFFAGLAPCLVGIEACGTAHHWARELRALGHDVRLMPAHYVKAYVKRGKNDAADAAAICEAVSRPSMRFVPIKTREQQAVLTMHRTRDLLMRQRTQLINAVRGHLAEFGIVEPQGVWHLGRVLRHLEVDDEVIEPARQVIGLLASQLNDLEGRIKEVDKQIALWHKASPTSQRLATIPGIGPVIASAIAATVPDAGVFRSGREFAAWLGLVPRQRSTGGKQRLGRITRDGDRYIRRLLIMGAQAVLQSSKAARANPWIQNLLARCPRLKVAVALANKTARIAWAVMTKGEIYRQAAASA

SEQ ID NO: 257677 - protein, 376 aa, unidentified
MVPPRRWPIESQSDGVIERSQALACSSIIEGTTMEQYAGIDVSLESASVCVVDSTGRIMREAKVVCEPEALIAWFTKLGVSMARIGLEAGPLSQWLYARMREAGLLVELLETRHVRDAFKAMPVKTDRTDARGIAQLMRLGWFRPVHCKSLPAQELRAILTARKLVQNKRHDLEMSLRGILRGFGLKVGQTTPRNFEARVRELADGQPTLLVVADAMLLARAVLVEQLGKLQKRLVSLARQDTRARLLMSTPGVGVLVALTYVAAIDDPARFRSSKAVGAHFGLTPKKYQSGETDVTGRISKIGDASVRTALYEAANVILTRPVRGSLLKSWAMRVAKRTGMRKAKVALARKLAVILHRMLANGSAFVAGKAAAKA

SEQ ID NO: 257678 - protein, 359 aa, unidentified
MRGQRNEISFRGQKIYVGIDVHLKSWSVTVLSETSVLKKFSQRPSPEALHGFLTRSYPGAEYRSVYEAGFCGFWIHERLTALGIDNIVVNPADVPTKSSEKLRKSDAVDSGKLARGLRANELKGIYTPDSVSLEMRSLIRLKNSITKDTTRQKNRIKSQLRYLGIGIPQEFLEPFSNWSKRFFAWLKEVETLTPSGRQALDIQIRHWEELRRQKLEMTRALRTLAKTDRFREPLRLIMSIPGFGQATGMAFLSEICDITRFRNAEQLAAYIGMIPMCHSSGEKDGTGDITLRKHAVMRCNLIEAAWVAVRQDPAMNLFFTEQCKRMPKSKAIVKVARKLVNRLFFVLKHQTEYVNNVVS

SEQ ID NO: 257679 - protein, 322 aa, unidentified
MSVSNHRCAGIDVSKGTLDIAISNNASQFTVPNGSDCFTQIIGELKRNKTRLILMEATGGLESGVACYLQSEGFDVVVINPRQARDFARAMGYLAKTDRIDSRVLLRMSEVINQHPEREKYIRPLPDAHRQILAAMVVRRRQLTIMLTAERNRLHLSHPQSYESIKSIISALKGELARIEGEMAIHIKDHFSELSDLLSAVKGVGDVTVAVLLAEVPELGSLSRREISDLIGVAPVNRDSGTMRGRRTVFGGRATVRTALYMSALVGMRHNPVIKEFYTRLVAAGKPKKAALTACIRKLLTILNAMLKMNEAWDPMYHQHAS

SEQ ID NO: 257680 - protein, 522 aa, unidentified
MATSRTRKRSRPRPQVLQKPSGVIHPRVQKVGPEHFGIVSVDCAKARSKWMLCDFYGNVFVPPTVVEHDRAGLSAAVSQIQRALQKHALHDFLVAVERTGRYHRPVQRAFAAAGFEVRIVHPFATKQFRQPSDPGYKTDDTDLAAIHRAAVNGFALIDTPLDETWKTLQLLIRHRRDLVFKTSLVCCQIREHLEASFPGFAACFDKLWDSACAWHLVRHFAAPQDLAAAGIARLCRSLDEAGVRYQCRTVQRVLEWAAGAAAPDLAAAQHRSIALALNDDRARKTQEILALERDIAARLVCTPYILLLSFPGINVVSAADYAGEMGPMEHYANARAITGRAGLRPCRYQSDQVDHANGPLVKNCNRKLRAAILGIADNLICCNHHFNVLGHHWKTVGKDPRDVRIRVANRFCRISFHMVAGRQVFRHPCLQGRHYILHKLTAFHREHESPGPDLLRDLRAAIAHVPHKEYPAEARPLHEELKKIQEGRRRGPQLLGDILPIVLARLGVGAVQSTASGEQDPR

SEQ ID NO: 257681 - protein, 391 aa, unidentified
MSMYFIGIDISKYKHDCCIISAADQKVVSKVTIKNNKAGFNELLTIIHSLANPADIRIGFESTAHYALNLELFLENSLLTFMEVNPVLISEYKKSKTLRRTKTDSVDCESIARWLMTVEYKPHSKGFYHAYSLKSLTRLRDKLIRQRSFYLVKITNVLDHTFPEFKPFFNERLSKTALYLLENYGSAEKMARMNSASYEKLRSISRGKFSPQQFLRLKELAANTVGVNNSIFDVELNSLLSLYKSLVKEIDTIEKEINKLIEEVHPHYMSVPGIGPLSAAVIYSEYGDISNFTNPGQMLAFAGIEPGINESGTESHGGKMVKRGSSQLRYTLINCCLPLIHFDMTFATYYAKKRGEGKPHRIAITHVAKKLIRVIYALESQDIDFNAQELR

SEQ ID NO: 257682 - protein, 447 aa, unidentified
MEILYTHVAGLDVHKKTVVACCRTPGPTGQPRKETRTFSTMTADLLALSAWLTSLEITHVVMESTGEFWKPLYNLLEASFVVLVVNAQHVKQVPGRKTDVKDADWLAELLAHGLLRGSFIPPLPQRDLRDLTRQRTNLVRERATVVNRLHKVLEWANLKLASVATNIVGVSARAMLEAIVEGHGDAAALAELAQGRMRSKRTALEQALTGRVRDHHRFLIAKHLIHIDFLDEQIAEFDAQILEHIAAQTPAPVPPDAPAPLTDAAGVVISDGRAASEIVPLTWEEAVIIWDEVPGIGRRVAEQLVAEIGTDMSRFPSAAHLASWARLAPGNNQSAGKHFSGKTGRGNQWLRSALIQAAHAAVKVKESYLAAFYHRLVGRRGKKRAIVAVAHKLLTIAYTLLQKRERYQEPGATYWDERRKEELVHRMRNRIERLGYTVQVEPVAVAA

SEQ ID NO: 257683 - protein, 496 aa, unidentified
MKKARSSKRSVGLAKITAREARLVKKVKAPRADASALEPLETIHLHAAGIDVGGSENFVAVPAPAVKPGEPAVRSFGVFTAEQDALVEWLKACQITTVAMEATGIYWMALYDKLERQGLEVVLVEPRSVKQVPGRKSDVLDCQWLQKLHTYGLLSGSFRPDEAIRRLRTLTRHRLELVQDGARCLQHVEKALVQMNLQLHLVVSDIQGDTGRRILQAIINGQRDPKELVKLRDPRCKKSTVAQMEAGLHGHYREELLFVVGQALENWQHYQKQLAACDQQIDVALAALPTAKAATLPTPPKPVPPAPETKKQKKLAHKGNHDVNIDPAKLKAQLQRVCGADLMNVCGLGLSSVLMLIAEIGLDMNRWRSAKAFCSWLGLCPGSKISGGKVLRRRTRKVVNRASVILRLAALAVGKTDTWLGRFYRRKRAHLGAPKAITATARKLACVVYHLLKYQEDYVPLDIAVYELKAAEARQRRLRREAQEMGFELVELKQVA

SEQ ID NO: 257684 - protein, 334 aa, unidentified
MEQITTVGIDLAKNVFSLHGVDAAGKTVLRRTVRRDRLVEVVAALSPCLIGMEACSGAHEWGRRFQQQGHTVKLMAPKFVAPYRKSDKNDGNDAEAVCEAVGRPSMRFVPVKSAEQQALLTMHRVRQGFVVERTALINRLRGLLAEFGVVLPLRSVTVRRQAADAAEVLPELARRAIADLLEQLRLLDGRIDAYDTEIEAQARLSEPARRLMKIRGIGPTTALAIVATVGNAREFKNGRQFAAWIGLVPGQYSTGGKARLGHISKRGDAYLRNLLVQGARSVLQTAAAHQDRLSRWALELQERRGYYRTLVAIANKNARIAWALLAKNEQLHKN

SEQ ID NO: 257685 - protein, 339 aa, unidentified
MNAITIGLDIAKSVFQVHGEDSSSKVVVQKRLKRAQVERFFAELPPCVVGIEACGTAHHWGRCLQALGHDVRLIPAAQVKPFVRRNKTDARDAAAICAALGRPDIRAVRVKTVKQQAARSLERTRALLIRQQVQLCNSLRSQLAEYGVVAAKGRRGFAALIDLVEAGDARIPDELRAVFAALIEQSARLSAQIDALEGRIVAAVKTDPQMRRLCTIPGVGPIVAHAIVAAIGDGRQFGRARDFAAWAGLTPREHQSAGKRRNTRISRAGDVRLRCLFALGASTILRTARTQQHRASPWQRDILARRPVKVAVVAQAAKTARIAWAVLTSGQPYRPQAAA

SEQ ID NO: 257686 - protein, 432 aa, unidentified
MRDTKLVALKYCGIDVSKSSLVCAAIGDLEEHDRHFLPGQANDLGLVGEEPVEKQSFSNSWSGLDKMTRWMESVGVSVAVMESTGIYWCAAYSFLETAGVSVVLANAYQVKSVSIHKTDLKDCVWLAVLLRAGFITPSYVPTGHIKDLRDLTRMRTRIQKDVTQLKNRCHRFLDTVLVQLALKDVFGKRNRTILLRALRGEYKDLSEDQRTAFESVRESQRTIITELMMNIEELESRIERYDGAIVRVVEGMENDGDREVRLLITIPGVGISSAAVIKAEVGRVDRFASAERLSSYTGLAPRVYQSGSVSMTGRTGKMSNSHLRTTMFMVSQVCARYGPEGLKEFHRRVREKKGYHVATIALARRLMVIIWKMLKEGEDFKDVYGKELLERKKKKYESEVKRLRRLSKTYGSEEFMVLVRKVLKEEQSVLIS

SEQ ID NO: 257687 - protein, 369 aa, unidentified
MALSAKETAMQQAKDIILVVDYHAENVEFRWFNEATGEERIGKYATTRDGIVRQVEQATREVERDGQVVWIMESTTGWARVKDLIGTRARFVLANVLQMPLPPKARRRKTDKIDTGRLLREYLHGDLPQSYQPAAWWRQVRRVVDCRQDLVERQTALKNWMGSLLHHETWEDRENLWSAKGRARLQRLGLSASDRALVELKLEQLDQLAAEQEQIEKRMLAIYAAWPEAQRVDEVRGIGMVTAVSVLAHVGPIERFATAEDLISYAGLAPGVRQSDATCHHGRIGGGGTDTHLRYLVIEASMWLRDIPRYRPTYERVLKKRGRKIARIVVARLFLRSLHKMLKDQLRFNPAGPSRTKTVTTTATATAGL

SEQ ID NO: 257688 - protein, 337 aa, unidentified
MRNIGVDLHKNSFLVCFINKEEKKKQRYKIEEIEQFKKELRKTDKVAVESTTNTRYFVEQIKERVKEVVIVNPTQFRLISQSVKKTDEEDAERIAVYLSKKMLPEVRMKEKPNSQINSIANTRDKLVKLRTVLKNKIHNILSSHGILSKKEDFASEKGLSRVLNYQVEGAAKVELEVIVEQIRHLNEGIKKLEDEITDRGENLKGYENITSIKGIGKKGGTILLSIIGDVNDFESEKKLASYFGIVPRVNNSNEKVRMGKITKQGSALGRTTLVQCTLIAKKYSPFLNNFYEKIKQKKGSGKEIIATARKFLGIIYQTLKNNWIFEDFPNFIIKNSA

SEQ ID NO: 257689 - protein, 337 aa, unidentified
MMYSGIDLHSNNSVVAIIDDADRIVAQKRLPNDITKIVGFLARWQDDLAGVVVESTYNWYWLVDGLQDAGLHVHLANTAAIKQYDGLKHSGDETDAQHLAHLLRLGILPTGTILPREHRVVRDLARKRMQLVNCRTTHVLAVENIMARQLGERMTSNQIKQLTADTIDSLPLAADVGLAIKANVAVIATLQSQIEVLEKRLQERVKPRPQYGLLTSVPGIGQTLATVIFLETGPIDRFADVGNFASYARCVDSVHTSNRKKKGEGNVKNGNRYLAWAFVEAANFARRFCPEAKRFHERKKARTNNIVATKALAHKLARASYHILKEGKPFDATRCFA

SEQ ID NO: 257690 - protein, 349 aa, unidentified
MEEISTVGIDIAKSVFQVHAIDNGGNVVVRRQLRRQQMLKFFAQVPPCLIGIEACGTAHYWARELSALGHDVRLMPPAYVKPYVKRQKNDAADAEAICEAVTRPTMRFVPVKSVEQQSAAMLHRSRALLIKQRTMLLHSIRAHLAELGISIGVGASQMVRVVRELAEGERSDLPELARFVLEALAKLVCDLAQRLQAIEKKLISWHYKNDLSNRLETIPGVGFVTASALSSIVPDPQAFKSGRHFAAWLGLVPRQNSSGGKARLGRISKQGNPYIRQLLVLGATSVLRYIRRDGGSGTGWIGGLLRRRPPKVAAVALANKMARIAWSIMTRGGEYEEINDLRAVQPANS

SEQ ID NO: 257691 - protein, 320 aa, unidentified
MRNAVGLDISKLTFDASAMVGKTEHSAKFDNDSKGLDQFSDRLKSLGCQNLHICMEATGNYYEEVADYFAQYYSVYVVNPLKISKYAESRFKRTKTDKQDAKLIAQYCRSAKESELVKRQKPTDEQYRLLRMTAAYAQIKSECAAMKNRHHAAKDEEAAKAYAEIIKAMNEQLEVLKEKIKEQTEKPNCKEGVKRLETIPAIGRMTAAVLFHHLTSSKFETSNKFAAFAGLSPQQKESGTSVRGKGKLTKFGNRKLRAVLFMPAMVAYRIRAFPDFIKRLEEKKKPKKVIIAALMRKLAVIAYHVHKKGGDYDPSRYKSA

SEQ ID NO: 257692 - protein, 335 aa, unidentified
MNKITLIGIDTAKNVFHLVGIDSHGHYVYRKQLSRKRLLPALAQLGPCEVVMEACAVSHHWARCIGGLGHRTRLIAAQHVKPYRRGQKNDYRDAEAIIAAALSPGMYFVGVKSMEQQAEQALHRVRSRILSQRNATANELRGLLGEYGLAFGLGIKTLRSGAIGFIDSGQALTLGLSELVHDVLDELDQLQQRLDAYSQQIEQRVSNDVISRRLRTELSGVGPLSASALRVKVADVRDFTNGRNFAAYLGMPPAHRGTGGKVKMGGMRRGHDLYLRQLLIHGARSVIRHLGDKQDEQSRWLRGVLERRGFNIAAVALAHRNARQAWAILAREWAA

SEQ ID NO: 257693 - protein, 372 aa, unidentified
MDQHSKIHLGLDVHKASITIARADPGRDPARVVSKVAHDVSKLLKVLAKIGTPEQLHLVYEAGPTGFGLQRRLSELGYGCDVIAPSKMPRAPGARVKTDGRDAIALAQSSRAGELLAIWVPDGADEAIRDLSRVREDAVKSCTQAKQQLGGFLLRRGLHYPGKTAWTKTHFAWLATVKFDADAAQVTLTEYLLAVQAAIARVQRLDKALAQSITGWRFEPVVAALQALRGVAHVTAIGLVAEIGELSRFAHPRQLMAYLGLVPSESSSGQRVRRGSITKTGNAHARRLLTEAAWCYRHPARIGRAALQRQDQLSQPVRDMAWKAQLRLTKRFANLNARGLQPNKACVAIARELAGFVWAVGMQALRETHGAT

SEQ ID NO: 257694 - protein, 315 aa, unidentified
MSESGKEVFIGIDVSKEKLDVAVSSTGEFMSFSNNDVSIPCVVDFVKSFTPSLIVLEATGGMETAVVGVLADKGLPVVVVNPRQVRDFAKATGTLAKTDEIDAHLIARFGEAVRPEIRLLKDQEAQKLTALLARRRQIVEMLTAEKNRLHAAPRWTNKDIQTNIAWLEKCLKKIDKDLKNLLKKSPIWREKDEILQSTPGVGPVLSMTLLSGLPELGTLNRKEIAALVGVAPLNRDSGLFRGKRIIWGGRASIRSVLYMSTTCAMRFNPTIRIFYERLRKAGKQHKVAITACMRKLLVILNTMIKNRTYWSTVKI

SEQ ID NO: 257695 - protein, 375 aa, unidentified
MKEKVRFLGLDVHAQTIAVAIAEPDGEVRSLGTIANHADSIRKMVKKLGPVEQVKACYEAGPTGYVLYWQLAELGVPCEVIAPTLAPVKAGDRVKTDRRDAERLARSYRSGDLTPVWVPDAGSEALRDLVRARESAKQDQLRARHRLSKFLLRTGQRPAAGVKAWTLAYMAWVRQLRFPQVAQESTRLDYLHEVEHMGERVVRLEQAIVEAVKLAAPAVQEVVRGLQALRGIAQISAVTIAAELGNITRFKGARQLMGYSGAVPSEDSSGKRMKRGSITKTGNAHLRRIAVEAAWSYRLRPGVGPALRKRQEGVPEEIKEIAWKAQQRLHKRYSRLAAAGKDQRKIITAVGRELLGFVWAIGIKAEAAASERMAA

SEQ ID NO: 257696 - protein, 395 aa, unidentified
MFIVVCDIAKRSHEAIIIAEDGQVVRKAFSFRNNCTGYNLLLEQVRRLTLVKSQIVFAMESTAHYWLALYARLLKDGYTVMVLNPIRSHSLRELYIRKAKTDARDSLIIADLVRFGRCKASNVPQDKILALRELCRSRAYLVDMAADLKRKLIALLGRIFPEYESLFDSVFSKASIAVLSKYSTPQKVKNANLRKLTDLLMESSNGHFGEWKAHQLKEAACSSFGIDDSGGVYSTLLGMFLEQILSLTAQADSLEKQISIFFQEFNNPLTSIPGVGTVLAATILSEIGDITRFSSADKLLAYAGLDPSVKQSGEFKSNQNRMSKRGSPYLRRAIWLASTVAVHRDPMFQTYYEKKISEGLHYMNVIGHVSRKMTAVIFAVLRDGQPYQPILQSAG

SEQ ID NO: 257697 - protein, 344 aa, unidentified
MNNVSILSIDLAKNVFQLLGIDQFGKPCLSKRLSRAKLHEALFNLPACEVVMEACSSSHYWGRVCLAAGHQVHLIPAQHVTPFVRGNKNDKNDCLAIYEASRRPNIRFVPVKTEQQQAVLILHRMRERVLASRTACINQTRSLLLEFGIHIPKAYSIFKRAIHELLSESIQPVIRLMLLEVLEELEGYDKKIRLLDSLFRQSNAQNSSAEIMQSIPGIGPIIASAFSASIDKGQAFKCAKDFSVWLGLTPKQYASGETNRLGGITKRGDCYLRKQLIHGARTVVNHAHKKDDDLNRWITALKQRRGVNKAVVATAHRLARLMWILLQKNEFYRPMFNNTVKQNA

SEQ ID NO: 257698 - protein, 341 aa, unidentified
MSDYSYFCGIDLAKNHFSLHAVDQNGKVILHKSVTRSKLLTTIANMPLMRIGVEACGGAHYWARTLSKLGHDARIMAVKYVIPYRTKGKNDLNDAVAICEAVQRPSTRFVPVKSPEQQAILSVHRMREHWVRERTALMNRMRALLSEFGLIIPVGRSSLMKHVTLMLEDAENELPHLARTVIADAYHHLGELNQRIADTEQVFESFAKVSANVQRVMKVRGIGPQTATAILASIGNGSQFDKSRDFSAWLGLVPKQYSTGGKPRLGRITKHGDKYLRTLLVHGARTVIANLGDKQDKLSQWCRGVLERRGMNRAIVALAAKNARIIWSLLHNQTEYENYAA

SEQ ID NO: 257699 - protein, 340 aa, unidentified
MNLTVFGVDVAKRVFQVHSVDRETGEITSKQLKRAVFLEHFANRAPCLVGMEACGGAQHWARRLMEMGHQVKLMPGKAVKAFVSGNKNDVADARAIWIAAQQEGVKSVAVKSEAQQAVLALHRMRQQLVKFRTMQSNGLRGLLTEYGEVMAVGRAALDRAMTDVLARLNERLPAVLIDTLREQWEMLGKLDKQIAEIERRLSAWMKQDKACKTIAEIPGVGLLTATAAVATMGDAKAFKSGREFAAWLGLVPGQIGTGGKVRLLGISKRGDTYLRTLLIHGARAVLTHAKEPSAWVQEISKRRPPNVVTVALANKMARTIWALLAHGRQYEKSYVSVKPA

SEQ ID NO: 257700 - protein, 358 aa, unidentified
MMYVGVDVHKKVCRAAMVNDEGELMEEFSFTNSKKGIEDFMMKIEAFGDRVLVAVESTANLWIRLYDSLEDHGVQVVLSNPSKTRLIAEAKVKSDKVDARILAQLLRSGMLPLCWVPSREQRDKREFIRHRMGLVKTRTEVKNRIHALLEKHGLRCPCSTLFSQKEMKWLQGLNLGFMDDAVLKSDLALLETLDGQIALMEAKIAAVAVDDERVKLLMTMPGLSYFAASLLVAEICDVNRFSSDRKLVAWAGLAPSIRQSGEKVRAGGITRQGNKRVRWVMVQAAQTARLHDERFKEFYQRYSGRKDPQKAVVAVANEMLRIVWFMLKKNESYRGEKRDLSWRKLKSLKRDASVGLQV

SEQ ID NO: 257701 - protein, 341 aa, unidentified
MGEVITIGLDLAKSVFQAHGADASGAVVFRKKLRRGQLLAFFAGQPRCLVAMEACASSHYWAREIAALGHETRLIPPAYVKPFVKRQKNDAADAEAICEAAQRPTMRFVTPKTAEAQAAGTVFRARDLLVRQRTQLINALRGHLAEYGMVVRQGAENAPKLIDLVVDPVSDLPEEARSTLQVLTQALAFLQTRIAVLDVEIARRAKTNALAKRLMTIPGVGPVVATALVALAPAPQTFRRGRDFAAWLGLTPLQHSSGGKERLGRTSKMGERTLRRLLIIGASSAAKAAAAKGAPTDTWLGRMLSRKPRMLVVVALANKMARIAWALMAHGGLYKAPAAAA

SEQ ID NO: 257702 - protein, 411 aa, unidentified
MRSADPHRDVVDRIRHNVLQRERVERMSTSRSGLGPSSVLVTPDHAGNVVGVDPHKRTLSATVADPHGGILASGHFRVSGDGHRALEAWARQFGQIARWGVEGASSWGRHTAVFLVARGYDVRDVCANRTPRSDRARQRGKSDTLDSERIARETLAHPLLPRAFKRAGQDSGPEELHELLSLRHNQRRSILTSRQHLLNEAEHLLSSLPLEQREQLPDTKAVRPRLAALAARNRRRRHDQPTTLRLKLLDDYRAQIANLDAQDKQVTAELAALVKTSGSTLGELCGLSTVLVAELLVEVGDPRRFTIGGFARFNASAPLAASTAEGPGEPVRHRYNPGGNRRVNRTLHLMALTQLRCEPRAQAIYTNARKRGHTKKEARRILKRHLSDVIYRRMIRDLAQPAADHPLLIAA

SEQ ID NO: 257703 - protein, 339 aa, unidentified
MNIITVGLDLAKNVFHVVCLNEHNKEVRKKMLRRNQVRQFFAQLPACTVAMEACATSHYWGRELMALGHDVKLIPPQQVKPMVQGNKNDYNDALAIAETVNRPKTTFVAVKTVEEHDIQAIHRIRSQCIRDRTALSNSTRGLLGEYGISFSKGLAVLRRKIPELLEDADNGLSLRFRNLLARRYEQLVELDEHIAFYTKELETLSRQDEACQRLQTIPGFGPIVASAFRSTIGDGSAYARGRHAAASLGLVPRQYSSGGNNLLLGISKRGDRYLRKLLVHGARTVVRHAVGRDDPFSRWINRISERRGKNRAAVAVANKLARVGWAVLRYNTEYDPTLA

SEQ ID NO: 257704 - protein, 410 aa, unidentified
MEVLHAHCAGLDVHKESVVACLRHMVDGKVRTSVKTFKTTTQELMALSDWLSAEGCTHIAMEATGVYWKPVWHILSDGEFELVLANAAHVRNVPGRKTDVNDAMWLADLLAHGLIRASFVPGEATQQMRDLLRTRKQFVRERSSHVLRIQKTLEDANIKLDSVITDIVGLSGRRMIEGLIAGQTDPQALAALAHGRIHASKEELESALRGRVKAHHRFMLRLHMNHLQAVDAAIACIDQEVSAQLEPFRVAVEMLTTIPGISNLAAEVMVSEIGIDMSRFKTEGHLISWAGLCPRNDESAGKRRSNRMKKGAPWLKTALIQCAWAATRTKGTYLQAQYLRIRSRRGPKKAIGAVAASILTAAYHMLKNGTLYQDLGANHFNDRDRGKQALRLVSRLQSLGFAVQITAAAA

SEQ ID NO: 257705 - protein, 382 aa, unidentified
MLLLQTGLYITALNYERANFSYYRTLNKGKTMIDFTGKTIYAGIDVHKIDWQVGLFYSGLVLGNHRITGNIGDLIIFFKKQYSGAVIKCVYESGAWGFTLQRQLSAAGIECIVVHAGDVPGSDKEKKNKTDKVDAVRLARHYAAGLLEAIYVPDEELQKERNLIRFRKKLIGDLNRSKNRVKSLLKFQGIIIPENMDNPNWSKNFIVWVEEQAAKDTLLRDTVELMLEEVKLQRQLLLKTERKVRALMSSEKYAGKAKLLRSVAGVGPITSTLFLLEVGDIKRFKSFDCLNNLIGFYPGSNSSGEKDIDTGISSRKHKQLRSMLIEAAWIAIKKDPAMLEAYEQLTKRMKGNEAIIRIARKLLRRMRAVLISGVEYQKGVVK

SEQ ID NO: 257706 - protein, 411 aa, unidentified
MSESDKSIVAAYAVYCGLDVGKSDHHACALDPAGKRLHDKALPNDQAALLEVFIRLSAHGPVLVVVDQPASIGALSIAVARSLSIDVAYLPGLSMRRIADLHPGEGKTDARDAYIIADAARTMPHTLRRVGTDDETLAGLSVLAGYDDDLAAQSTRLSNRLRDALLHVHPALERLLGKHIDRGGVLDLLTEASTPSQLRELGVDAITATMRVRSPRLAKSLPAKIIAALDAQTVTVPGTTEFGRVIGGVAAQLRDVRTERAALAADLEARLEAHPLAEVLTSMPGLGVRTAIKILTILGDGSAFPTAGHLAAYAGLAPITRRSGSSIKGETRSQRGNHALKSALFLSAFASLGDPTSRVYYDRKRAQGKQHNAALICLARRRVDVLFAMLRDTKPYHHPNPEGSNTGTLAA

SEQ ID NO: 257707 - protein, 377 aa, unidentified
MRNVRFIGLDVHAETIAVAVAEPGGEVRSLGTIPNRPESVARLVKKLGKPEQLQACYEAGPAGYVLYWQLTQVGVKCEVVAPTLIPVKAGDRVKTDRRDAEKLARCYRGGDLTAVWVPDAAHEALRDLVRARLAAKRDQLRARNRLSKFLLRHGRRAPEGTKAWTAKHLLWIKTQRFEQAAQQATLEDYRHEVEHAAERIARLERSIDASIETLPLKMRAVVEGLQSLRGVAQISAVSIVAELGEVSRFARARQLMGYSGAVPWEDSSGQRVHRGSISKAGNAHLRRIVVEAAWSYRHRPAIGHALKVRQRHCSATVCELAWKAQHRLHQRYARLTARGKSKQHAVTAVARELLGFIWAIGIEVERNQQTKEQRRAA

SEQ ID NO: 257708 - protein, 407 aa, unidentified
MLFVGDDWAQDHHDVEVQDEAGRRLAKARLPEGAAGMARLHALVGEHLGEDAAPGQVVVGIETDRGPWVSALVAAGYQVIAVNPVQAARYRERYSTSGAKSDAGDAHALADMVRTDRHQLRPVAGDSPLAEAVKVTARAHQTLIWDRTRAVQRLRSALLEYFPAALAAFDDLTAPDTLELLGRASTPQLARRLGVATISAALKRARRRDIAGRARAIRAAFQGEQLPVPAVVTDAYAATARAQIAVLTTLNTEIAQLETVVAGHFGQHPDAEIYLSQPGLGPVLAARVLAEFGDDPTRYTDAKARKNYAGTSPITRASGKKTIVMARYARNDRLADALHQQAFSTPRVSPGARAYYDALRARGIGHHAALRQLGNRLVGILHGCLRTGTPYDEVTAWPLKVTEKIAA

SEQ ID NO: 257709 - protein, 352 aa, unidentified
MERYVGLDSHARSCTLGVMSAGGRRLQSLVVETNGRELVEAVRGIGGRVHLCLEEGTQSAWLYELLKPHVAEVVVAMAPERKGPKDDQRDAWARANELRTGAIETRVFKAPEHLAGLRNAVRAYGFAVTDVVRAKNRLKSVFLSRGIGTDASVYDATKRTAWLKKLSSPHRELAEWLGRQLDQLEPLRAEAERLLLAESKKHPIIRKLSTAPGMGPIRTAQVVAIVATPERFRTRRQLWSYSGLGIVTRSSADWVQDRTGKWVRAQHAQTRGLSRKRHPRLKAVFKGAATTVIAQLADDPLHADYERMLKSGIKPNLAKLTLARKIAGTVLSMWKHQEVYDPKRHRPTPEQK

SEQ ID NO: 257710 - protein, 374 aa, unidentified
MTSIADTAQPGQPRAKTGLDRVVYGGVDTHKELHVAAVIDAGETVLGTRSFSTTRAGYRALLAWVGEYGQLARIGVEGTGSYGAGLTRHLAKAGVTVLEVDRPDRSDRRRKGKDDDLDAINAARAALHNHRTSIPKSKDGAVEALRVLRTARAQAVRERRNALQLLRMTIIAAPDEVRDQVRNLTRMQLIRVVAAWRPDVSNVADPVTAYRVGLKSMARRYLELSDEITDLDDLINPLVEALAPQLLARLGIGIEIAGQMLVTAGDNPARMKSEAGFAMLCGVAPLPASSGMTQRHRLNRGGDRQANRALHLAVVSRIRIDAKTQAYVARKTAEGHSKLEIIRCLKRYLAREIYYLLNPGQQHIARRPYRRQAA

SEQ ID NO: 257711 - protein, 357 aa, unidentified
MVESKTEAKSSEVGVTNPYRRTEHCGKIHRYRCDKGVGVIGIDVSKDHLITSRGRVRKYKNNKKGYEEILKMKPCTIVLEPTGVYAIRPCQYFKEKGIKVLQVSPNILSREKEFRGKKTDFYDAEKLENMVDKAKEYEYNPLRELVTLYLFLKDIEVKYRNRLKRALFLVSDNDKISKERLEKLAKGDFTQEELYQLEYTPIVLEEIKVLAKTLLETQEKLEEVRRMIEEQVPQDHVLLSIPGVGKLAAGVIIGIVGDIKRFPKPESFIAYCGLDPLVERSGKVVVSKGISKRGNKYLRSLFYFLAEMNYSKNPTLLKFYEAHKDRLQGKKLYTALARKLARIVWSVWYNNKPYEPK

SEQ ID NO: 257712 - protein, 430 aa, unidentified
MEPQANMKEVPFQEQFRAFAGFDWAGDHHDLVVLDAAGTILLELTFADDAAGWADLGKRLTEGLGLEPSGLAVAIETNNGPAVERLLALGCAVYPLNPKTAQRYRERKSNAGCKDDHLDALSFGDALRTDGHGWRPLKADDPITQELRLLCRDEIQLIAQRTALVNQLQAALREYYPAALEAFDDWVSEGPWAFVQAFPTPQDLVRAGKRKWEKFLHANKLYRPQTYAKRLEIFARADQFCGTAPVTRAKSQLAVTLAGQLRLLETQLTRYRQRIEALFAQHPDHDIFGSLPGVGPKIGPRLLGELGNDPNRFATHESLQCYGGSAPVTKQSGKNRWVGFRRACNKTLRTTLHHWANKSRDKCAWAQAYYRHKRDHGQSHAAALRCLAQRWTKILWKMWQTGTCYDEALHARNQIKHGSWVIQPCQGAPC

SEQ ID NO: 257713 - protein, 390 aa, unidentified
MNLNESKRIIGLDMHPDVFAAAALSVDHKQQNAFWVQDRLSTAQLEDWAKKQLKKEDVVVLEASGNSFEIASRLHALGHTALVLESAQAGKIRDNFCNDDRHSAVKLAKVYRSGLAKEVWQPDAKTRACREVFFAHRNAVKDATRCRNRIHSFLNEHCVRLKAGVRLTEASGEATAKAAKNWTPLQAELLTDAFDQLRHVEARRKRLERIMVKELIANPRWASLWRLMGIRHRVAFALMAMLGDVHRFATAKKLVGYLGLAPRKDQSGNDKNGYDSGVGKFGRGDVRGLLIQSAHNTLIQCDSPFHKWGWKLLVKKHRNQAAAAVARKLTVSVWHLLMGHFTPLIEVTDHLRVKLLRLATVIGKDGIKALGFDDRDAFVETQIKSIQLSP

SEQ ID NO: 257714 - protein, 398 aa, unidentified
MRSVGLDLALGKIVFCEVAGGCVVKRATVREVDELQGLLGPARGKASVAVEASRSAWHVCDWLKARGHEAVLVDTTKLAQIGIGDHGRKTDRIDAEVLARSIEKGTTPRAHQLSPARRLLRDRLNQRGLLVRTRASLIVAARGIARSQGVRLPIAGTEDFARAMKDAKLDDALATELAPMIAVVTTLDAQIATLDTRLVEICKNDRAMQICATAPGVGLIVGAAFVCVIDDPSRFKNAHQVEAYIGLVPREDSSRTRRKLGSITKEGNAYLRTMLVQAAWTILRSKGADDPLVEWAHQLKRRRKGAIASIAVARRLAGILYAIWKKDRPYDPAWLAHQSADGKHVEAAWTEAQASRFEAAGRKLAGRAIKKIEPLTRSRIEPKSRTASPRKRRVAEVA

SEQ ID NO: 257715 - protein, 412 aa, unidentified
MVKKECFIYVGIDLHKETHTAVILNCWNEKLGEITFDNKPSEFSKLTRKVNKYCNDGMEVVYGLENAYGYGRALAVWLIEKGYQVKDVNPALSYAQRKSVAMYQKSDSYAAGAVALALIVHLNKLPDAVLDDAYWTLKQLVNRRDNIKTHQTRLKNQLHEQLCVSYPSYKKFFRDISRQTALHFWETYPSADYLKGKTPEDLAKELRVVSHNNCSINKAKIILDSVRADGSIKRDYQEARDALTRSIVGDLKHYNKQLEDVEKAIENLYPVFGCTLMTMPGINITTATNILAEIGDINRFSNADKLAKFAGVAPVKFSSAGKGEDRASKQGNRRLQSIFYFLAIQMIQVTKNGTPRNAVFREYFIRRTQNGKNKQQVLICIARRLVNIIYGMLKTKTEYREPMLDESFLKNQ

SEQ ID NO: 257716 - protein, 332 aa, unidentified
MTGLPNSVSEQPASEQQGLPVGIDVAKQSVEVSLGVQASTFALSNDAEGVEALLARLKTEPVSLVVLEATGGLESLMACALQAAGYAVAVINPRQARDFARAMGQLAKTDHIDAQILAQLAGVLDRHPERERYVRALPDAQQQELAALVARRRQLVGMLVAERNRLPGAHPKTHPSINAVIKALMRELEQIDGDMDRHVKAHYASLSTLLDSAKGVGRSTIATLIAELPELGKLWHREISALVGVAPINRDSGKMRGRRTIFGGRASVRQALYMAVLSGTRYNPAIKVFYQRLLKAGKPKKLALTACMRKLLTILNAMVKSGKPWQESLHDA

SEQ ID NO: 257717 - protein, 352 aa, unidentified
MPRNPTTESIATLGIDIGKNVFHLIGLDKRGAIVLRQKLSRSQIEVRLANLPICLIGMEACVGAHHLGRQLREMGHDVRLMPANYVRPYSKGQKNDFRDAEAIAEAVQRPTMKFVAIKSVDQLDLQALHRVRERLVSQRTGVINQIRAFVLERSIAVRQGAAALRMALPRILAATEKLSPRMIQIVQCLADDWRHLDQRIKAASSEIETIAKSNADCERLMTVPGIGPIVSTAMVAAIGGGDLFTRGRDFGAWLGLVPKQRSTGGRTILGRISKRGNRYLRVLFVQGAHAVLLRPACWERHGLKPWIEAAAKRLHRIKLIIALANKLARIASGVLRSGRNFEVNPILPSPQP

SEQ ID NO: 257718 - protein, 312 aa, unidentified
MHGHFVGIDVAKDTLEVHERPSGEGVTVANEEGGLRELVARLTARAPALIVLEATGGYEVVVAATLTSAGLPVAVVNPRQIRDFARATGQLAKTDALDAAVIARFAEAVRPPVRPVATGTAQALGELVARRRQLVDMLGAERNRQAQVRDRQVQRQLGAHVKWLTKALADLDRDLQDTIRSSPVWRETEELLRSVPAIGPVTAHTLIADVPELGHLGRHQIAALMGVAPLNRDSGTFRGRRMIGGGRAAVRRVLYMAALVAVRHNPRIAAFYARLTAAGRPKKVALVAAMRKLLIILNAIVRDQRPWQPEPA

SEQ ID NO: 257719 - protein, 368 aa, unidentified
MGQKSSKLYVGMDVHKESIDLAVAEEGGELRHHGQIGGDMNALWRAVRKLESLGRELVFVYEAGPCGFGIYRGLTARGHTCWVVAPSNTPRRVRDRIKTDRRDSLKLAGLARAGELTPIYVPDMRDEAMRDLVRAREDAVVMQRQARQRLAALLLRNDVRYAGKTAWTAAHRRWIAELKLPQSAQRLAFEEYVQAVEEASARVQRLSQCIEQELATWRWRSVVAALQACRGIQLIHAVRIVAELGDLCRFSHPRRLMAYLGLIPSEDSSGEHRHQGAITKAGNSSARRALVEAAWAYQYGAKVSALIARRQADVPKTALDIAWKAQVRLCARFRRLAARGVNRNKIVVAIARELAGFVWAITQHVKPV

SEQ ID NO: 257720 - protein, 337 aa, unidentified
MTLYCGIDLHANNSVVAIIDEQDNIRFEKRLANSLEAILSALSAFASELAGCVVESTYNWYWLVDGLMDAGYRVHLAHTSAVPQYAGLKYTNDHSDARHLAHLLRLGIVPTGHILPKEQRAVRDLLRRRLLLVRQRTLHHLSLQSLIARYTGERLSANEIKKLDVDAVLARLGEPIGLGGQISCLGIQWLDRAIGLIEHEVYKQLKPRPEYRFLTSVPGIGQALGSTIALETGSIERFPGPGNYASYARCVKTEKISNGKLKGRGNAKSGNKYLAWAFMEAAHYAAIWSPEIKRYYQRRQAKSHILVAKKAVANKLARACYHMLKNQEPFDVKRAFG

SEQ ID NO: 257721 - protein, 328 aa, unidentified
MENLFIGIDISKDVFDYCFLTSDNEVIEKGKCQNTKEEILDFCKKVKTYKQYETWICMEHTGHYGYLLSSIFTEKDLRFSMLNPLNLKRSLGLVRGKNDAIDAYRIASYALSNKHKLSPFELPTKELQKLKVLLKTRNRYSKIIVQLKNGIKANKIASKSIDLVDVIEEDQETIIYFTVKIKSIEKKMVDIVKATKELKVNYDKIKTVIGVGPLTSIHCIVETQNFTKFIDPRKFGCHCGLAPFEYSSGSSIRGKTRTSNLCNKVIKGILYKSAWTAIQHDPQLKAYYNRKLNDGKHKLSVANAVAFKVLLRIFAVVKREEPFVKLAA

SEQ ID NO: 257722 - protein, 394 aa, unidentified
MYIIGIDIAKKSHEVCFMNQDGDVLDGNSFNIPNTLSGLEKLQKMLTKYGLNSDNSIVGMEATGHYWLVLYSWLTEQRFDVKVINPIVTDAYRKMHIRKTKNDRIDAEVVARVIMLGEYQETPVSEETTLSLKQLCRFRLSQVQTCGDLKRKCIAILDQIFPEYSQLFTDTFGISSKTLLKEYSTPEELASIHTIKLTNLLKKASKGRFGKEKALEVKAVAKKSIGISFATDAFAFQMKQILEQLEFIEKQIRLLDQQIEDYMNELDSPITTIPGVGPVYGAVILSELGNINRFPSGKQIVSYAGIDASVNESGSFKGNQASMSKRGSAYLRRAIFGAAFIASWADPELSEYYQRLRARGKHHYVAVGAVARKLCYIIYAVLSENRPFEQRTPM

SEQ ID NO: 257723 - protein, 344 aa, unidentified
MMTHFVGLDVSQKMTAICVVDNAGRRLWRGQCPTTPEQIAAMVRRHAGDDSRIGIETGAMTPWLVHELRALGLEVICLDARHARAALKMQINKTDQNDAEGLAQIVRTGWFRSVHVKSFDSHRARALLGARAQLVGMTTRLSNHIRGVLKTFGLLLGAMRGLRFDRKVEVLLEDRSDVAPIVRPMLVAWRQLREQISAFDKAIRVLVKSNSPCRLLMSVPGIGVLSALAYVSTVEDPARFSQSRSVGAHLGLTPRQYQSGDVDRSGRVSKCGDTLARTLLYEAAVVLMTRVKKASELKDWALAIAKRSGIGKARVALARKLSVILHSVWRSGKPFRWTEQAITG

SEQ ID NO: 257724 - protein, 433 aa, unidentified
MNPSHPYDIVIGLDRSDQKADLCLIDTRTGQRRAEVIATTPEALWEWLLELRQQHPQARVGLCLEQPAVHLIPFLEAYHWITLHPINPITLQKYREAFVTSRAKDDTKDADFLADLLLMHHAKLPVWSPEDSATRAVQQLVFHRRAVVDERTGLSNRLIALLKSYFPQALVLCGEDLWRPLATAFLLKWPSLQAVQKAKPATLSQFYYLHGSRSAKLRAQRLALLEKAVAVTDESAVIESFVLRVQLVCRQLQLVQRSVSEFDRQIAAAYAAHPDRPIFASLPGAGAVLGTRLLASLGSQRERFGSAADLQRYTGVAPVTKRSGGSCYIHRRYLCPKFHRQSFHEYAKESILWSRWAAAYYLQQRNKGNPHHTAVRALAFKWQRIIWRCWQDRQAYDEPKYEAALRQHGSPLVALFDRVELGKSPFKNPAKKN

SEQ ID NO: 257725 - protein, 314 aa, unidentified
MAETSGIFMGIDISKSWLDIAIHESNISWRLGNDEIGIADLAKRLKELKPTLIVLEATGGFEMQLVAQLAHARLPVVVTNPRKVRAFARSTGKLAKTDKLDAKMLAHFAAAIKPPVRPLPSEEEELLTGLMVRRRQLVDMLTVEKNRLHTVRPSLRDDIREHIAWLQDKLSKLDKEIDLFVKKTPLWREKDVVLRSSPGVGRVTSCTLLAMLPELGTINRQEIAALVGVAPVNKDSGRKQGKRRIYGGRETVRSVLFMAALSATKCNPRIKQFYEDLLRRGKEKKVALTACMRKLLVILNAMLRTNQPWRTEIS

SEQ ID NO: 257726 - protein, 359 aa, unidentified
MQTQSNKLDFSGQNIYVGFDVHLKSWKVTIMSETLVHKTFVQPPEPKALHRYLVSNFPGGIYHSAYEAGFCGYWIHNQLVSLGIKSIVVNPADIPTTNKEKVQKEDKRDSRKIARSLRGGELTAIYVPSEKTLEDRAFLRTRKMLTKDLSRYKNRIKSFLYFHGIEFPPVFKNPQTHWSKRFTVWLESIPMEHDSGKQSLLALINESKHLRESLLSVTRQVRAMSRTEAYQENVKLLQSVPGIGLVTAMTLLTELETMERFSNIDQLCSLIGLVPSTNSSGEKEQVGDITPRGHNVLRSAIIESAWVAARIDPALMICFQDYTKRMEPNQAIVRIAKKLISRIRYVLKNKQPYVCSVVK

SEQ ID NO: 257727 - protein, 335 aa, unidentified
MEFEFFIGIDVSKNELDFSVQQGKTFLFHKEINNDPDVIYVLLKELCKLKGFSMNNAVFCLEHTGIYSNHLLSCLYKKKANICLESASQIKKSLGNLRGKNDKVDAMRIAAYAYKNRDELRLWSPRRDEVEQLAHLSSTRSRLIKTKKILKTPLKEYGSFVKKKAVKQNTSLCNKALNGIEGSLEGVEKEIMNIVNADPELKRLFTLITSVVGIGKVTAIQLIVTTNEFKDINNASSYACYAGLVPYLEESGMFKGKGRVSHMANKKVKTLLHMAAMVAIQYNDELKAYYERKVTIEKKNKMSVINAVRNKLVQRIFSCVNQNRKYEKNYLKLVA

SEQ ID NO: 257728 - protein, 453 aa, unidentified
MKKGTVKKGVIKLGTGLPVFNHHAAGIDIGDTLHCVAISDGAGGHEVKTTSAFTCDLEEIVDYLKRNGITTAAMESTGVYWLPLYIMLEDAGIEPYLVNAKHVKNVTGRKKDDTDSIWIQKLHTCGLLQKSFQPDNEIRLLRSYTRQRKNLILLSSDSVRRMQKALELMNIKIHTVISDILGKTGMSMVKAITAGERDPQILSTLCDPRIKASQEEIIKSLQGIWREEHLFMLEQALENYEFHQKQIKSCEEKIKLQLLKQVAIIKEGDITDLEDTLKKKSKAKAKKNQFDFAVAPYLKIIAGVDLCKIPGISEVTALEFIAETGVDMRKWVSGKHFDAWLNLTPNTKITGGTIVSSKMMKKKNRAGQCLRQAASTLSTNKTPLGAYYRQMRAKLGGKGAALATAHKLARIIYTMLLKKIEYNPGILTDNEEKTKLEKIKKLEKQLARLKRAA

SEQ ID NO: 257729 - protein, 409 aa, unidentified
MDKVYERCCGIDVHKKMIVACLKCGDQHEIRRFDTTTAELRTLTAWLLDAQCQMVAMESTASYWKPLYNIFELSGLDAMVVNAQHMKAVPGRKTDVKDAEWIADLLQHGLLKASYVPDREQRELREASRYRKSLVEERSREINRLQKMLEGGNIKLASFASNINGKSSRNVLDALLAGKKLDEEQLKELLHGSMHKKIPEIMAAIDGILTPMQKQLIRNIIDHIDDMSKRIEDMDDLLNDHLQDYQQAIKRLDEIPGIGRQSAETILSETGLDMSRFPTEAHLSSWAGLAPGNNESAGKQKNGRTTRGNKTLKTTLVQCAKTASKKEGSYFHAQYQRLVVRRGKNRATVAVAHSMLIAIYHMLKNNEGFKDLGESYYMQFNREGKINAYLKKLKELGWKENTGIRLAVT

SEQ ID NO: 257730 - protein, 347 aa, unidentified
MTESVFAGIDLHSNNVMIGIVDQSGQRLKFQKLECDLQKVDQLLSSFKAQLKNVAVESTYNWYWLVDGLQRAGYPVVLANPAQIDQYSGLKHGDDKSDAFFLAELLRLNILPRGYIYDAQLRPLRDLLRRRLSLVRQRSALLLSFKSLYTRTTGQDLELRTVKSMGPLEASKLYEHPANQLIAGIQIEHIGQLSQSIGRIEKVVLKVSQKLPYYEKLTTLPGIGIILGMTITMEVGDISRFADAGHFASYCRTVAAQRFSNEKKKGENNRKCGNKYLAWAFVEGSQFAKRGDKQCRQWYDRKAARCGSIVATKELACKLSKAAWFTMAQNTVYEPQRMFGGGPAVKS

SEQ ID NO: 257731 - protein, 483 aa, unidentified
MRTIGIDLGKRESQFVEIDGAGKEIGGGRFATDRDVFAQLFNAITEDGEVRQDRAARIIIESGTPSPWIAEQLRAVGNDVVVCDPTYLPTYGDRKSKRRKNDHIDALLLARALMTGNFRKAYERSRGEMIRKQEVDARARLVRSRSKHCTAIRSALHQLGLKVESCEPELLPSHLVKVLESVAGTPQEFALKMEREAVQDLNFRIALFDDRFASTAMSDERIARLMTLPGVGPVLATTFVAVVDEPDRFGDGHQLAAYLGLVPSERSSGDTIYKGRITKVGPAELRRLLVSAGWSIWRSKDSGLADLRNWAKRISKRSGMKAKGAVALARKLCGVLLAMTKKKETFRGAAVVVESSTETKPVKKPRNKLQDNATKSRRNLERAQKELAARTVVAGDKAGGVTATAAAPQVPSESPPPSRKTASSAKPKPRPPAAGTVTRLSAGDADAPHTASAVDADGAPPTRTFVLNPSTTTPNEHSHVRPA

SEQ ID NO: 257732 - protein, 279 aa, unidentified
MEHIGIDVHKNQSQICILTDNAELIEKRIRTDHARFAAVLGVRSPARILIEASTESEWVARCLEAQGHEVIVADPNYAPMYAQRSRKIKTDRRDARALAEACRIKAYRKAHRATDKQRHVKGRLAVRESLVQTRTKYISLVRALLRREGLRVRPGSSSSFRERVGELEIPKHLQREIAPILKLMIPLNRQIERATKDVEKIAHKDPAVRRLCTAPGVGPVTAASFVATIDTPERFQGAHQVEAYLGLVPRELSSGEKQRKGHITKAGNRRTRCLLVEAS

SEQ ID NO: 257733 - protein, 348 aa, unidentified
MAVYIGVDFHARQQTISYLTTEDGEIQQLVLLHEDPAKVRAFYEQFAGQRVIVGFESSGYAAWFEELLEELGCEIWIGHATYIRKFAKRRQKNDRRDADLILELLLSGDFPRIHRYSRTTRQMLQQLRYRQRLVKMRTMVVNMLLFMASSRGHSFRTQLQSKRGQARLGQLQLPEPLAQQRDELLSLLAQLDQKITTIEQWLEQQTAAEVAVQRLRTHPGIGLLTSICVRYTLEDVGRFATTRKVSAFAGFDPMEDRSDERRHMGAISKQGSRWLRFFLVEAGQVAMRKDADLARVYQRVSRRGGHAKAKVAVARRLLVRAFIMLRDEIDYAEFLRRGVAARSSRGSA

SEQ ID NO: 257734 - protein, 341 aa, unidentified
MNVTTVGLDLAKNVFHIVGLNAQGQEKMKKRLSRGQVLKYFANTPSCLIGMEACAGAHYFARELTQLGHEAKLIPPQYVKAYVRGQKNDTNDARAIAEAVRAPQMRFVAAKTVAQQDLQALARLREGTLRARTALANRLRGLLGEYGIVMAQGVNTLRRAVPDLLEDASNGLSERFRRLLAQGREQLTELDAHIEALTTELKAAAQEDDRARRLQTIPGFGPIVASVFTGAMGDGSQYRRGREASAAVGLVPRQHSTGGKSRLLGISKRGDRYLRCLLVHGARSVVIAAKRKDDPLSRWINRLRETRGINKATVALANKLTRIGWAVLRNNAVYQPACRAS

SEQ ID NO: 257735 - protein, 309 aa, unidentified
MEHFVGIDVSKDRLDVHLRPSGESFAVARDGEALAGLVERLRTLAPALVVMEATGGYETVVASAIGAAHLPLAVVNPRQIRDFARATGKLAKTDRIDAAAIAHFAAAIRPPARPIAEPEAQALGELVARRRQVIEMIGAEGNRRRMARQRRVIGAIERHLALLQTELSELEDDIDGAIRGSPAWQADADLLTSVPGIGPATRRVLIAELPELGRLTRRKIAALVGVAPINRDSGTLRGRRTIAGGRSAVRAALFMAALVASRKNPIIAPYYDKLRAAGKTGKQALTACMRKLLVILNAILRDRKPWQPA

SEQ ID NO: 257736 - protein, 345 aa, unidentified
MSGTLNHHWCVGIDLHKDTLTACVFCRCCGEISFQKLPCKCRKQIAEYFAALPRPHTVAIETVGFYRWLWEMLEPIVEKLVLADATQARALAGRRLKTDREDAFNIAELLAAGRLPTAYAPPLEVQFLRDLTRHRNGFSRQHARVLCRVKSIMNANNRPGPARLESDGLIRYLKAQGEKLPTRHVAMLWQCVDQLALTERQIAEAERTIGEVVQRDSFQEVYPILTSFPGVALVTAATVMAEVGDFRRFTHRKAIGRFAGLNPRVFASGGKQRIGHIAKTGSPQLRWILQQAAAIRTDEAIRRVFLRIAKRSGRKAAAVAIARKMLTWMWVAVTKGEPYRTRIAA

SEQ ID NO: 257737 - protein, 330 aa, unidentified
MNLGIDTHTRYAQVAVVDDDGNLQDELRVPNNQLEQLAEQYAGSDAVIEASGNYRPIYEVLDEHLNVTLANPSKNRLIADATVKTDRLDAKRLAHMLRSGMLAESYVPTDEIRELRDLVRTRKGLVDERTAEKNRVRAVLKRTDNAYDSELFGPNGREFLAELSLSTPDRTIVEAHLSVIDEYDAQIASLEDEIERHVLESAAAQRLLSIPGVGQFTAAVVVAEVGDIDRFDSDNALVSYAGLDPVVHQSGEKEIHGSISKEGSAQLRWALVQAAHTAVRCDDYFGNFYTRLKRRKNHQVAIVATARKMLVSIYYMLTRKEVYDPPEVSA

SEQ ID NO: 257738 - protein, 320 aa, unidentified
MTILTSPTVIGVDVAKAEIVVYREDLEITQVINNDRTSVGRWLKTFPAQSSIALEATNLYHLDTAELAHGMGHRVYVVDPYRVSHYRESIGQRAKTDPCDARLLARYLTSEQHRLRVWSPPPRHYTVLKSLLNKRAQLMKARVSIMLSWSNEPLLEDLLAHGLEHFKQLDQAIQELLRKVSQEAGISENIRRCKAIEGIGELTATGLATTYMRGEFASADAFIAFLGMDLKAKDSGKKHSPRHLSKKGDGELRRLAHNAAMAACRSPVWKPFYESYLARGLARTQALVILARKLCRVAFALMKNQSEYQPNLRLQGSPAT

SEQ ID NO: 257739 - protein, 413 aa, unidentified
MNFIGADLHKKSITLCVMDQNRKVLARKTLSCQETNEIVEFCQQFRPFKVVVEATASYPWFVRLVEPLAEEVVLGNPKKLRVIAESTKKTDNLDAQVLAEFLALDMIPKSYQPTARQREHRILVRHRQYLQRRITSVRSKIRHILSNYNADRKDLFSAHCGLSYIKGVPLSNADQFVIKQLWSEWQEHLTQRLALTKKLKAFVAKAPQREAEARAILKTAPGVGFVTAEVILSELGDISRFRNAKAVCAYAGLVPAVRQSGGKKSKDLHITKEGSGILRWALVQAAWRLVVKSPKWVIVYARLKERKGSKRAIVAVARKLLCVLYAMLRTSTPYKITAQAPAPRRTGKRRLVLVRTSTPEPATTPATLAPKTTCSQPVRTSAPARATRTQTTARRTARKSAAGTSIPEPATTP

SEQ ID NO: 257740 - protein, 383 aa, unidentified
MKSVCGLDVHKDSVYLCILSEFGELIEKVFGVLTYQLEEMRDLMLHHHVVEVSMESTSVYWIPIWRVLSPHFKLNLANPYFIKQLPGRKSDVKDAQWIAECTMKELIRGSFVPPEIIQQLRQYDRRIFDLNEEIVRKLSKLDAVLQRCNIRLSNYVSNVDSKSYKAVVRAISQGITAPEELVKLIHGRIINHHGMDVITASLKGVVSLAEIDMISQLRDELDMAEAHKEKCQARMLEICERDFPEELRRLQTIPGIKERAATSLIAEIGTDMNKFETANHLASWSGLKPRNDESNKKIKSRSITHGNVYLRKTIIECAWAASRTKDCFFSRFSFHQTQVRKKNKMKVLVAVARKMLIAVWHVLHDNTIYIDFTTDRKTSRTKG

SEQ ID NO: 257741 - protein, 385 aa, unidentified
MKNTIVHHEGAASLEAAVKKVKLSGSIIKIGLDVHARLYVAVAQYDCLLPKPVRRLGPSEFVPWVKQLLRAGHTVHVVYEACGFGFGLYRELKAAGAHCYVIAPRKLDEQCTRVKTDPRDATTLCQRLSRYLEGNTRELAVIRVPTEGEEQARHVSRQREQLVCLRQKLEAQGRSLLVNHSLPSPAHWWKNQTWSRLLKLLPCWICLRLEVHRPVLLGLEQQIGALSAQLEATAPADVPAGVGKLTTVIMTREICSWERFTNRRAISSYTGLCPGEHSSGSKRVSGSVTKRGNPRLRAALVECAWRMVRFQPQYPPVKKRLAILAKGAHATGAQRKKAIVAVARHLAVDLWRVHTGRCSAAQLGLKSAETLIVRGEQKAELNALA

SEQ ID NO: 257742 - protein, 359 aa, unidentified
MDIQGTSVGLDVHALSVVAHAVDEETGKVSKARLCPDHGEVLGWLHQLRAPVRVTYEAGPTGFGLARAINEAGMECVVAAPSTLQRPAGDRVKTDARDAAHLARLLRLGEITAVTVPEREIEAVRDLVRAREDARVDLMRVRHRLSNCFCGRGSSIFGGTPCTCAHEKWLRRQRFDDAHLKAAFDHGFDAVLAATAARDRLDEQITEVAASPRFADPVNRLGCLRGIAALTGLALTVEIGDWSRFTGSSIGAYVGLVPCEYSTGTSRVQGSITKAGNTHVRRLLIEAAWHHRKSYSTSGPTLRARWDNVDPALRARGHAGNRRLYKRWRHFTERGKNPLVANLAIARELAGWCWSLATM

SEQ ID NO: 257743 - protein, 319 aa, unidentified
MAQNDSVVVGIDVAKDKVDACIRALALRQTFTSTVQGHRKLVRWLRKHRVNKAVMEASGGYERVWARVLREADIEVRIVDPKRVRNFTLSAGRLAKNDAIDAEMIAWFAEIFSEAPSQRHDAAREELQALVKARLSLIDSRMRLVSQSEHVAPGLVQKAHGRILKSLASEIARLEAAISIKIKSTPDFAERAEIIESVPGFAKTSSANLVAGMPELGQVSDEIAAALIGVAPYDDDSGKRRGERHIKGGRRWVRNAVYMPCVGAATQNNPVLQAYYQRLIAKGKEPKVAIIACMRKLIVILNTMIARRQKWDPSRYSLT

SEQ ID NO: 257744 - protein, 310 aa, unidentified
MDSIHAGVDVSKATLDVAISNRKVVKSFPNDESGVAQVVSYLMELAPALTVMEATGGLEKLLAVSLVEAAVPVVVVNPRQVRDFARAKGKLAKTDNIDASILAEFACDIHPEVRALTDKQTEGIKAMMARRQQIMAMITMEKNRLHSAGSMVKPSIQEHLKWLKQELKSLDKDLANMVKDSPVWREKDRLFQSVPGVGPVLSVTLLGIFPEIGKLTRKQIAALAGVAPFNRDSGIFRGKRTIKGGRVRVRPPLYMATLSATRSNPVIKEYYNHLLEKGKATKVALTACMRKLLVILNAIIRDNRPWRYAY

SEQ ID NO: 257745 - protein, 455 aa, unidentified
MQGCLTFFFSGCSDLYCSKGRVLLSQFLNDFVVGIDVSSEFSIVAMLAPTGELIRKPFRIDHNPAGFNKLLDILKKEEERLNRKPIYFVESTGIFHLPLFFFLKSNDLKGFVLNPLCVHSTKNFDLRKVKNDNKDAEAIARLAKYQDIKVSMMPEPQILALRMMTREYYAVSDMLTEMKNRLCTDLYLLFPGFLNVFSGPFGKTALAILRSYPSPRAVSEADTDVLTLLISKTSRKGLEWASKKVVLLRDCAQLASSMPSEFSLLDTKIKFHIDGIEHMQSSLDGIEAQIHKMIDSKEFPAKAKKNVELLDEIPGVGFLTAATLIAEIGDFSLFNSPKALTAFFGLDPSVNQSGKFNGDRNKISKRGTRIGRRILFTIAMASIRTTRNGAEINPVLREFYKSKCVSKKKKVALVAVMHKLLHYIYAVLRDQKPFVIKRPEDHQTWRTTKPQPAAA

SEQ ID NO: 257746 - protein, 368 aa, unidentified
MRAILRFVGLDVHKDSVVIAVAESGTAPASVLAVVPNQRLAILQVLDRLGPARRLRVCYEAGPTGYGLARFLCEGGIRCSVVAPSLIPVRRGCRVKTDRRDAVRLAQYLRSGDLVEVSIPTPQTEALRDLARAREDAVCAGRAARQQLDKFLLRHERSWSQGTKWTQRHWRWVRAQTFPDPVLQRVHEDYQQAAQAAALRIVELTQQIEGLVEQTPLAAMVRALQALRGVALVTAVTVAAEIGDFCRFAQPRSLMGFVGLVPSEHSSGARRRQGAITRTGNKHVRWILTEAAWNYQHGPRPSKAIARRRAAVSPEVREIAQRAEQRLHRRFQRLLQRGKTKNKVVTAIARELLGFIWAIARVEKKLAA

SEQ ID NO: 257747 - protein, 390 aa, unidentified
MHVVAHQPEAPGAIRSDLGAIFVSLELSRSTWLITSLSPCAGEKMSKHGVAAGDIGALLARFSEFKQKAFARTGKSFPIIVIQEAGLDGFWIHRVLLSEGIESHVVDPASIATSRRRRRAKTDRIDGEALLRALLAYKRGEPRVCAMVKAPTPEEEDRRRLSRERKTLIGERVEHVNRIKGLLFCQGVSDYEPLRRNRRQRLDELKTGDGRALPDHLKAQISRELDRLELLLEQIKAVEAGQNTLFAAAKAEAPTPAPVTMLLDIKGIGPEFAAILWMEAFFRSFANRKQIAAYAGLAPTPWQSGAVNREQGVSKSGNPRLRTTLIQLAWLWLRHQPQSALALWFKERVTRNGGRFKKTTIVALARKLLVALWKYVTAGIVIEGAVMKAA

SEQ ID NO: 257748 - protein, 400 aa, unidentified
MEPCIRVGIDVGCKGHRVGVAGPDGVLLDEFDISHTREGFEDFFRRVGHHEQERKLPVAVAMEGFNGYARPLDREIRTHGWRLYNVNNLKLARFREVFPGPAKTDALDARKILELFHLQDHLPLAKDVLQEVGEIPAENEKLKRLSRRRRVLVEEKIRVMDRLQADLQAVSPGLLSITKNVGNLWFLRFLTSRDDLTELSRLRRSSVLAIQGIGERWTGVIAVWQKRAAFSSEVDYVGPMILADAKRILALLQEIRALDQAMAELTDVSSIGRRVRTIPGFGKTSAAELAGEIGTLDRFASESSLALYLRMATLDNQSGQYHGTKRPRQVNGRAKAAMMTAVARHIGCVPQSRAYYDKKRAEGKRHNQAVRALGRHLVRVIWSMLRQERDYELRDLPPAP

SEQ ID NO: 257749 - protein, 455 aa, unidentified
MMAAWKLPITRMWKVILVSRRKAYSGSDVNKVDVARLIAGRQGQQAWIGLDVGKFEVMAVVRWSDERFERPWKIKNPEQLGQFLLVVKELSAALKSSGGELLGVGLEPSGTYGDAFRQALFDNGIATRRVSPKIAHDYAEVFDGVPSQHDGKDAALVADLCAIGKSDPCPYAEPGEVEQEIGYWVDRLDAQRRLAQIWHGRLEGRLARHWPEVTRLLRTSSATLLKALVEFSGPAALAAHPDAAGKLMGFGGHRLTEQRAQKVVASAKSTVGVRMTAWDRRRLKELAEHAVDARKQMGKARRELRRVAKDHASIQAMAAVVGLPTACVLWVCCGNPAAYSCASAYNKALGLNLVERSSGTFKGKLKISKRGKAMSRRWLFFAAMRWINKPEVRPWYERKKARDDTGMLALIAVMRKLGKTVYHVGGKSSTFDPARLFPGLTAGKKASARQKVATT

SEQ ID NO: 257750 - protein, 421 aa, unidentified
MKELRVIRMTMVKEGTLIAAVDIGIATNTGYCTTLDGRDTKSFRFDNTKQGFEKFWWMIMASKNRFGCDEVVIGYESTGPYAEPLVHYLANKRVKIVQVNPLHTKKMKEVNDNSPLKTDDKDPRVIADIIRLGRALTIVVPQGDAAHLRRLNNARERHVGEQTALLNQLQQLVFLIFPEFKTVLKNMKGQTAQYILKRYATPETIGSLSKETLGEEMRKRSMGRFSVKDAEALINLARETVGIKEGISGIVMDIRHILMQLEAEGRFISEIEAEMRVTLERIPCSNRLLSIKGLGTVSVAGLIGEVGDFSKFSTQSEIMKLAGLDLYEISSGKRKGQRRISKRGRSLLRKILFYAAIQMIRKNGIMYEYYARLTGRGMGRMRALIAVSRKLLGIIHALVRDNRDYVGQYQVPERRVIKEAA

SEQ ID NO: 257751 - protein, 343 aa, unidentified
MQTVTTIGFDIAKSVFQVHGVDAVGQVVVRRQLKRRHVLAFFEKLPPCLVGIEACASSHHWSRELQALGHTVRLMPPAYVKPYVKRQKNDMADAEAICEAVTRANMRFVPTKTPEQQSCLMLHRTRHMFIRQQTAVINSIRAHLAEFGIVAPVGRKGVTELLNVVADPNDKRVPEVARACLAALGNQLLRLKEQILGFDRLIMAWHRSNQTSKRLHYIPGVGPMLATALVASVADPRTFRSGRNFSAWIGLVPKQHSSGGRERLGSISKQGDRYLRSLFVAGALAVIRYAKIHGVGHRPWLTALLARRPTKVAAIALANKIARMAWAMMARGERYKQPAALAR

SEQ ID NO: 257752 - protein, 341 aa, unidentified
MSGVIIGMDPHKRSATIEVMASDETVAGGGRYGTDAAGYRAMLAEVKRWPERTWAAGGCQGIGRPIANRLLAGGKDVVDVPPGLSARTRVFATGQGRKTDATDAHSVALAATRMPGLRRVIEDQQLAVLRILADRRRSLGEDHTRMVSPLPQLLPGLIPGGARKSLPAAQARALLARVRPRDAAGKTRRRVAAELISDLKAAGKELNDLLKDTATTLTGLHGIGPSGAARLLAEAGDITRFPDKAHFASWNGTAPTGASSGDQVRHRPSRAGNRQNGRVLHIMAVVQLRHPTEGRAYDDRKVAAGKTPMEAMRALKRRLSDVACRQMITGTRAAATAREDT

SEQ ID NO: 257753 - protein, 443 aa, unidentified
MSNRKPVFELAHPNAAGIDIGASSHFVAVPPDRDDQPVREFPSFTEDLGRLADWLSECGVDTVAMESTGVYWIPLFELLESHGFTVYLVNARHVKNVSGRKSDVLDCQWLQQLMSFGLLSGAFRPKGDFCALRCVARQRAMPLTYQSRHVQHMQKALTQMNLQLGQVISDVVGETGQKIIRAILAGERDGQVLAQLENNHIRASEADIAKAPQGSWREEHLFALKQAVALYDAYAGQLAECDRQLEKMLAALAAHEGQPKPAKRKGGKGKNAPAFDMRTYLFQLCGVDLTRIDGIDVTTAFKVLTEVGADLSRFKDAKHFASWLGLCPGTKISGGKVISAATKPTANRAAQALKLAAANLRSSQSALGAYYRRLCARMDKPRAVTACAHKLARLIYTMVTKGEEYVDQGQDQYEERHRERVVKLLAKKAEQLGLQLVPAAENA

SEQ ID NO: 257754 - protein, 390 aa, unidentified
MDVLYQSCAGIDVHQATVVVCILHGPLTSTRPKREMAQFDTTTKGLKACHDFLTQFHVEAVGMESTGVYWRPVWHELCDDFELILAQPAHMKAIPGQKTDKKDAHWIAQLTRIGLLPRSFVPDETIQELRELTRQRKHYVESRNRETNRIHKILQSGGIKLTTYIEDIMGASGRNLLQLLIDETPLTPRMIHQSVYTSLKRKVPQLLEALDGYFSAHHRFMLGQSLEIYDFYQKQIDCLEERINGYLNLYERPVEILDSIPGMDLITASVIIAEIGVDMSQFPTAGHLASWAGLCPGNNESAGKKRSTKIRHGNSYLKRCLCQAVFAAKRQKGSPLAERYYQIQSRRGPQKATIALAHQLLKIAYILLKENLTYQEFVLQKKATRDEPVA

SEQ ID NO: 257755 - protein, 353 aa, unidentified
MGIVVALDVHRKQITYKTLDRETGEVERGRIAPAARADVRAWLARFAGFEAEFALEGTTGWRFVVEEIERAGHRAHLADPAETAAKRGRKRRAKTDSADCDLQLRLLCAGELSESWIPPAHLLELRTRVRMRKTLIDQRTAWQQRLQAQLFHQGVPAGLRPRTRAGREALARVELSPAGRELVSLALRMIDAIDRELAPLDRDLHAFARRQPGCRALIARLYGVGPVSATAILAELGDARRFARSDDAVRHSGLDVTVYQSDEKRAPGHLSHEGPELLRWALFEAALSAARAGSPDHADYLQVAERIDHNRACLSVARKLCRRAYHILRELGDEALAPVEGDPHAEEAIAAAA

SEQ ID NO: 257756 - protein, 336 aa, unidentified
MKHCGIDLASKASAVCVMDAEGRIVREEMVPTDEDGFRTCLGDCEPMQVIIEASPLAEWTARVLESLGHEVTVIDPRRAKAVICTKKKTDRLDARNLARMSCTGWYTPVHRKSDEARLARSELKARQGLVETANAMGARIRGLLRAHGIRLGKFGAGEFEARVKDRVSSEAPELKPLLRPLLKIWREATQAADRLYRDLGRRSRRDPLRGLLMSVPGVGPAVATAFVATVDDPRRFRRSDQVSAYLGLVPGVQQSGEVEVRSSVTKEGDGLLRWLLVEAAHVLLTRTRRSCALKRWGWKLQTRKGAGKARVAVARKLAMILHRIWLTGEPFDWQRT

SEQ ID NO: 257757 - protein, 342 aa, unidentified
MGQVTTIGLDIAKSTFQVHGIDAAGEVILRRRLTRARVVPFFTKLAPCLVGIEACATSHHWARELRKLGHEVRLMPPSYVKAYVKRQKNDTADAEAICEAVTRPTMRFVEVKSPEQQSIMVVHGTRTMLMRQRIQLSNAIRGHMAEFGVVAPVGREGLLTLTDTLHDEADDRVPVEARDCLQMLAAQLRLVNAQILENDRRIRLSARATDVGRRLMGIPGVGPVLASAFVATVPDPHAFRSGRNLAAWIGLVPRQNSSGGKERLGGITKQGNRYLRQLLFVGAMAVIRYAERHGTRRPWLVRLLARRTTKVAAAALANKTARMVWAIMTSGQSYREPELRTA

SEQ ID NO: 257758 - protein, 410 aa, unidentified
MEVLYPHCAGLDVHKDMVVACLRHVVDGTIKREVRTVKTTTKALLDLSQWLASEGCTHIVMEATGVYWKPVWHILEDGDFDLALANAAHVKTVPGRKTDVNDATWLADLLAHGLVRGSFVPNAQTQEMRGLLRTRKQLVRERTSHVQRLQKTLEDANIKLDSVISDVMGVSGRTMIEALIAGETDPNTLAALAHRRIRAPAEELCEALRGRVTKHHRFLLRLHLQQIDIFDAAIVAIDQEVDANVEPFRAAITILTTIPGVSDLSARAIVAEIGTDMSRFPTDGHLISWAGLCPRNDESAGKRRSNRMRKGAPWLKTTLIQCAWAATRKKGSYLQAQFHRLRARRGAKKAIAAVAASILTAIYHMLTNGTLYQDLGADHFDRRGKTAQTKRLVAKLQNLGYAVQITPLAA

SEQ ID NO: 257759 - protein, 341 aa, unidentified
MNITTIGIDLAKSVFQVHGTDERGKAVLSKVLRRAHMMRFFTQLPPCLIGMEACGGAHFWARKLTELGHTVKLMAPQFVKAYVKTNKNDARDAEAICEAVGRANMRFVAIKTPEQQALLALHRARQGFVKARTAQGNQIRGLLTEFGCAIPKGRRQVHSQVADILEDAQNGLLGMSRELFAQLLEHLRHLDAQVKALETQIKAWHKEDAASQRLEQIPGIGPLSASALVASIGDARHFKNGRQLSAWLGLVPQQHSSGGKPTLLGISKRGDVYLRTLLIHGARSTLRHAKPSDWGAALAERRNPNIAAVALANKNARIVWALLAHGRCFQANYHGAARQAA

SEQ ID NO: 257760 - protein, 368 aa, unidentified
MPGFRINCEERRWEKYFVFFNSTNYNMKNKEVVKQVSGIDIGKESFYACYKIQYADKYVVIKGSKKFKNDPSGMKAYYQWCEKRNKNLEIELVHVMEATGVYYEDLAYFLHESEETVSVQLAQKIKYFAKSCNLKTKTDKVDAGMIAEFGVEKNLTGLGLWTPPSDDFKMIRDLAREHTSLKKAQATAKCQLHALNQAHITNAEVKNMKEAQISFYENQIALLESETIKLVKQDSELHSKIENIATVKGLGYITIIKIIAETNGFLLFTSIRQLVSYAGLDVVENESGKYKGKTKISKKGNVRIRTALYMPAISAAVHNKTLKAFYNRVNEGRTIKRQGLIAVMRKLLILIYTLWKKEEAYVENYQAI

SEQ ID NO: 257761 - protein, 360 aa, unidentified
MAKTKAVHSSYVIGGVDTHKDLHVAAVVDQNNCVLGSEFFATTRQGYRQLLAWMASFGTVKRIGVECTGSYGAGLLRYLQSAGVDVLEVTAPDKMERRRRGKSDTIDAESAAHAAFSLIRTVTPKTRGGMIEALRVLKVCRKTAVAARRTALQMIQMNIVSAPDELRDQIRSLTRMQLIRTLASWRPDVTAYRNVQDAYRIALKSLARRYLELHDEIADLDVMLASIVDELAPELIKRNSVGYECASQLLITAGDNPLRLHSEAGFAALCGVSPVPASSGKKNRHRLNRGGDRAANSALHIIAIGRLRTDTKTQEYIGKRVAEGHSKMEALRCLKRYISREVYTLLRNQNRQINSTQITT

SEQ ID NO: 257762 - protein, 342 aa, unidentified
MGDVTIIGVDLAKNVFQVHGAAADGSVVFRKKLSRPQFARFMAEQRPCLVAMEACASAHHWAREMTRHGHEVRLIAPHYVKPFLKRQKNDAADAEAIVEAALRPTMRFVEPKSADQQARAVAFRTREQLVKQRTEAVNALRSHLYEFGHTAPEGIGYLPRLAKVVDDPDTDVPDLARDICRMLLEQIAHLTERVDTLKAKIAAMSNEADLPRQLQTMPGVGPITALAVETFAPPMEQFRRGRDFAAWLGLVPRQHSSGGKQKLGKTSKMGQRDIRRLLVIGATAVIRWASRRGAPKGSWLARMLECKPVPVVAVALANKMARGIWAMLTRGESYRGPVLIGA

SEQ ID NO: 257763 - protein, 322 aa, unidentified
MQGKAMPEPNAMPVYAGVDVCKEWLDVHVHPSGLKLRVSNDGFGLKRLKRVLAALPVARVVMEATGKHHRATQRSLHAAGLVVEVVNPLRARLFAEATGKIAKTDAIDARLLAVMGAALEPAATPPQPAALEEVGELINARAAATAERTALSNRLAAAATPFLKAELRRRRDACQRHVERLGAEIERRIMADPDMARRHAVLCSIPGIGPVTAAAFLAGLSELGTCSAKQAAMLAGLAPLANDSGDRNGRRAIRGGRRPVRNAAYMAALSASRHNPDLAAFADRLRKAGKKPKVILTAVMRKLVVLANTLITQNRTWTPIHP

SEQ ID NO: 257764 - protein, 363 aa, unidentified
MIIIGVDFHPSGQQIAFLDQETGECGERQLNHSDGEAEKFYRELQQRGVSVRVGMEATGHSRWFERLLAELGFEVWIGDAAEIKRQRVRKQKTDREDARLVLKLLLENRFPRIWVPSPENRDLRQLLWHRHRLVQMRTRIMNQLHAVAMNEGYRWKKKLFSAQGRALLEKLSLAPWASRRRKELLELMDQLDPKIAELTAAVEREAQQRPEVVRLMTHPGVGPITGVAYVLVIGTPERFPCGKQIGSYTGLIPCEDSSAGKQRLGHISKQGNTLLRYLLGEAAQAAARCNPDWRRRYVHLAMRRHKNIAKAAMARKLAVRLYWMWRNGWDYSQLVEFGSHAGKLGTGHGVEQSVVHLIGHPAP

SEQ ID NO: 257765 - protein, 367 aa, unidentified
MKKVSTAVAKQSRNISRQKLTIGLDLGDRNSWYCVLDEAGTIQLEQRVRTTAKALQEVFGAMPRSRIALEIGTHSPWISRLLSELGHEVIVANARKVRLIGESRKKDDRLDAQTLARLARIDPELLYPVKHRSAQAQADLMMIRARAGLVRARTGLVNTARGLAKSYGERLRGCNVRNMDPEKAEGLSPELQRALEPLLATIEEVSERIVEYNDRIEALAQTRYPQVELLKQIKGVGTLIALTFLLTLEDPHRFGKSRDVGGYLGLQPGRRKSGESEPQLHISKEGDPYLRTLLVQGAQHILGPFGIDCDLRRWGLKLAERGGRNGKKRAIVATARKLAVLLHHLWVSGEVYEPLHNSSRLTVAAAA

SEQ ID NO: 257766 - protein, 343 aa, unidentified
MKATRVGVDLAKSVFQIHGVDRWEKAVLKRRLQRGTWIEDLIGCVEPRCEIGMEACAGAHHWARQLQALGYVVKMVAPQFVKPYVKSNKNDANDAEAICEAISRKSMRFVAVKTVEQQDIQAAHRIRSQLIAERTAKANQIRGLVAEYGLVAPQQLAQLRLAVPLWLGDEENGLTSRFRRLLTGTWGDLRALDARIKELDHEVEQIAQTDPLANRLMQLRGVGPVTATTLVATVGDGSQFKNGRQMAAAIGLTPKQHSSGGKDRLLGISKRGDAYLRSLLVHGARAVLQTAKNKDDRLSRWVTSLAQRRHPNVAVVALANKTARIAWAMMRSGEDYRPYHAMD

SEQ ID NO: 257767 - protein, 353 aa, unidentified
MEHFIGCDAHKKFSIFASINEKGEYGPTFRVRHDLEVFRKFLKELPAGSKIALETSGCYYWMVDEMERAEHIPLLAHALTAKRRMEGRHKTNERDARGLAMLLRNGTLPVVWIPPAELRDQREMLRWRMCLSRMRTRVKNRIHGVLQRYNVDIAVSDLFGDAGRVELLARLHELPPYSRHSLLDQLQMVDTVETQISECEQVLEEMLYPSADRDLLDSLPCVGKILSAVMALEIGDVQRFGGPDRLVSYAGLVPVARESADWKRKDRCPRDCNMYLKWAYVEAANLISIHRGHWPERHVAQLYERVKQSTKMHGKATMAVARHLAEASYWMLRKQKVYQEPNSKRKVLSSTHG

SEQ ID NO: 257768 - protein, 424 aa, unidentified
MKPHPDVEFAAFAGIDWADAKHDICLQAANSEDREFVVLAHRSAAIEAWAGALRQRFGGQPVAVCLELAKGPLVYALQKYDFLVLFPIHPATLAKYREAFAPSHAKADPTDAQLALELLLRYRAKLKALTPQSVPMRMLLRLVEQRRRLVGDQTRISNRLTDALKQYFPDVLAWFPDKDTLLFCDFLSRWSTLKQLKNARRATLLSFFHEHHVRSQARIEERLRAIKAATALTDDLAVISPNQLLVLTLVEQLRVTLQAIERFDAEIATVSESLPDYSLFRALPGAGASLAPRLLAAFGEQRERYQSAAEIQRYTGIAPVTESSGKKRWVHWRLQCPTFVRQTFVEWAGATIPRSFWAAAYYRQQRDKGCSHQAAVRALAFKWIRILYRCWQSRTPYDEATYLNALSRRGSPLLASITTTAKNT

SEQ ID NO: 257769 - protein, 345 aa, unidentified
MADTGKAYQLYVGIDIATETFTASWLAPGGTPTAPLTCDQAPQGYAALQQRLDRAAGSPPPARVALEATGTSWVALAVTLHEAGYRVAVVNPRQAHHCAKAQLRRAKTAALDARDLAQFAAALRPAPWAPPPSAYHEVRQRLVARDGLLAMRAQARHQRHALLQWPVVVEAVRQHLDALIADLDRRVASRDREIAAVLAQSAWAASLTCLTSAPGIGPVTAAWLLVGTRNFTLCAGPEALAAYAGLAPMPRESGRSVRARPAIGHDGNGRLRTALYMATLSATRHNPAIRAFYQRLRAAGKPMKVARCAAARKLLHQAWALGSTLQHFDPDHKQQQHDTLPALAA

SEQ ID NO: 257770 - protein, 411 aa, unidentified
MPDAIEEIVYRRCCGLDIHKAEVVACIIVNGRKEIKTFSTMTENLLLLAKWLKDKKIQMTAMESTGSYWKPIFNILEIEEIPAILVNAQHIKTLRGRKTDVKDAEWIASLLRHGLLSASFVPKRDVRELRELIKYRGSLTEDSVRALNRIEKILQGANIKLSNVISKTGTKTELSIIEALASGENDPEKLAQLAQGTLKNKKGEIKRALNGFLGDHQRLLLKSMYKHLKQIEEEKAVIEAEIDKRMAKDAAIIECLEAIPGVGKTTAQSILAEIGTNMDQFPSEKHLASWAGICPGQNESAGKRKSGKTRKGNSHLKKTLAQCANSASHTKNTYLSAQFKRISARRGRKRAIIAVAHTILVICYVLIRDRVNYRELGADFFDKRDKAGIVKRSVKRLEALGYEVSVKPKAA

SEQ ID NO: 257771 - protein, 406 aa, unidentified
MKQIVSVGIEVSKGKSTVCAMIHPNTIIKESFEVLHTVEEMSMLADYIGSLDGEIRIVMESTGHYHLPVAQFLYQKGFFVCVENAYIIRQFSRIMLHGAKTDPLDAKKLAKYGLAYWSELKPYKFHPSCYTELSLLSKQYQTYIKLLIAAKQNVIHLMDEMLPGFKEALDTASSVQFSKVKYVDFAKEFYHVDMIKSMGKEIFRENYKQWCKEKGYRFQSEKADELFHLAEDGIPTLPTEFPSTRLCMEVATEQVSQLGYALEQILSQMQNLAKTLPEYQTIRQMGGMGEKLCVRFIADIGDVRRFHNGKALVAYVGIDAPPYQSGQYTGTKRRISKRGNSALRKTGYEVMKSLKSHPPKTDTRVYDFIIKKENEGKSKKQAKIAGLNKFLQIYYARVIEIYKNIV

SEQ ID NO: 257772 - protein, 360 aa, unidentified
MAIVAHAHPFVIGVDTHARTHTLAVLVAASGELIATEQFPATGAGINRAITWAARRTDATPETLWVIEGIGSYGAHLAAAVNRSGYEVTEAARMDARAHRGTGKSDPLDARRIAAAVLPLEPEQLRRPRSDDGTRAALRTLVTAREHMTNERTATVNALTALLRVATLDIDARRPLTAKQISEVASWRRRAEDVATLTARAEAVRLAKRVIDLNEELSANQTHMLTLIRDSKAAELLHKTGIGPITVAVVYTAWSHAGRVRSEAAFAALAGVNPIPASSGNTTRHRLNRGGDRRLNRALHMAVITRMTHDPETRAYAERRRAQGRTTKEIRRCLKRYLARQLYRTLERLHAQPEPLPQAA

SEQ ID NO: 257773 - protein, 332 aa, unidentified
MENFYFIGVDVSKKKLDFCVMFEGKVIHEEVTTNHQSAIMSLLHHLAEDYGIDSNQMLVCAEHTGQYTFPLACACKAIECRLWLENPAEIKYSSGVQRGKNDKVDARRIAIYANRFQDKVQYYERPTEDIERLKQLESERTLYVTDLAKYKGQMKDQKDYMPKALYERKMKRLQALMDDLEKAIQAITDEMDEVIVSCPVLFRQRELLMSIDGVGRVVATNMIVTTEAFTRFDDPRKFNCYAGIAPFSYSSGSSQHSKSRVSHRADKVMKRLLHLAAVAVTHRIGGELKKYYERKVAEGKNKMSVINALRAKIVARMFAVIKRNEKYKPILS

SEQ ID NO: 257774 - protein, 316 aa, unidentified
MKPSDADTFIGLDVSKQYLDLAVLPSEETWRTLNRPDELPALAGRLAALRPRRIVLEATGGLELPALIALAAEGLPVVAVNPRQVRNFARALGVLAKTDRLDSRVLAHFAQAVRPPLKPIPDQEALLLKELVSRRRQLVDMLVAEKNRRASALPALHKTFDEHIRYLEEELKKLDREMKQRILESSAWREKERLLLTVPGVGPVIARTLIADLPELGLLSRKEIAALVGVAPLACDSGQFRGKRRIWGGRASVRQKLYMAALVGTRCNPIIRSFYQRLLAHGKPKKLALVACMRKLLTILNAMVRYQQPWQQPLPA

SEQ ID NO: 257775 - protein, 378 aa, unidentified
MRFYNQPHRFYCGVDLHARTMYLCILDQAGAVVLHQEVSAEPAAFLEAIAPFRDGLVVACECLFCWYWLGDLCATEKIAFVLGHALYMKAIHGGKSADDRIDSQKIAQLVRGGNLPIAYVYPKGLRETRDLLRRRMYLVHKRAEVVAHVVNTNSQYNLPPFGKKLIYARNRQALKITDRFADASVRKSIELNLRLLDALDDLLGDVELYLERTVKVDDADTFYRLRSIPGVGKILALVFLYEIHDIHRFASEGMFLSYARLIRPLKTSAGKVKGGGGAKIGNAHLKWAFSEAACLLARESDQAMRFLARQQKKHGKPKALGILAARLGRAVYQMLRQKKAFDPKRFWNGEPGVSPAQLHKAAVKRPRRAKGSSCVLEA

SEQ ID NO: 257776 - protein, 340 aa, unidentified
MEFRFFIGIDVSKETLDIGLLDAEISETVTHQQVGNNDSGIAAMVSWLQQHNEFSIESSLFCLEHTGMYNYPLLQFFSKQGASVWVENPIQIKRSLGLQRGKNDKVDAVRIAQYAYRSKQQIKLWQPAREVIERLKHLSGLRERLVETRKRLLTPVEELSKVGNEAMAKILEKAMSKTMKALDKDLEAIEAQMKEVIDRDDNLRNMYELITSVVGIGFVTAVNLIVFTNEFKLFSCHRQFACYSGIAPFEYRSGSSIKGKTKVSHMANKKIKRYLHMASLTGIRLDEGLKSYYKRKVEEGKNKMSVLNAVRNKLLARIFAVVNRRSVYQKINYQTSLVLS

SEQ ID NO: 257777 - protein, 367 aa, unidentified
MKKVSTVAAKQSRNILQRKLTIGLDLGDRNSWYCVLDEAGQIQLEERVRTTAKALSEVFGAMRRSRIALEIGTHSPWISRLLSELGHEVIVANARKVRLIGESRKKDDRLDAQTLARLARIDPQLLYPVKHRSAQEQADLMMIRARAGLVRARTGLVNTARGLAKSYGERLRGCNVRNMSPEKAESLSPELQAALEPLLNAIESLSERIVEYNDGIENLAQQSYPQVALLKQIKGVGTLIALTFLLTLEDPHRFRKSRDVGGYLGLQPGRRNSGQSEPQLHISKEGDPYLRTLLVQGAQHILGPFGVDCDLRRWGLKLAERGGRNGKKRAIVATARKLAVLLHHLWVSGEAYDPLHNSNRVTVAAAA

SEQ ID NO: 257778 - protein, 363 aa, unidentified
MTVYIGVDFHPYEQSVAYASDEDGEIGYRRFLHSDKQSIRAFYRKCGADAVIGVEATGCLWWFEKMLADGGHQLKIGDPRMIRRAALSRHKNDFRDAETILDLLMRGAFPSIVPRSEESREVLDLLHYRQTLVQKRTSIANQLQAFARGKGLARFRMPAVKGRRKLVAAPVTEIETLLVTSRLVLFDEITAQMKALESRLEQLAAADERARLLMTHPGIGVINALALVHTLGEVRRFRRKEEVVAFVGLDPLEKSSGQTKRIGQISKHGSRLARHLLGQAAQACRDHRIRKFYLEVSRRRGRPKAKVAAARKLLINCYVMLRDDIGYEEFQRRGEVGLCEGSGEVRAKASVSGGLRARPAISR

SEQ ID NO: 257779 - protein, 427 aa, unidentified
MHCTLNDRIAQVTDETLVVGIDIGSEKHYARAFTNRAIEVSRKPFSFANSGAGFQRFGEWVEGLRAAAGKARVMVGLEPTGHYWFTLADDLRQRGYELVLVAPQHVKHSKEMDDNTQRKDDRKDPGVIAKLVTEGRYLKAYRPEGVYAELRVAFTRRCEVTEQMTRISNRIRRWFDINFPEYREVYGTITAMSGLMVLRKAPLPKDIVSLGAEGVNRIWRDAKLRAIGMKRAKTLVAVAERSIGSRHADAAVRMDLWQLLDEWELCEKQQTTITELLTGLVAQVPNADKLLAIPGIGLVTVAGFLAEVGDISRFDDPKEIQKLAGLAIVENSSGKHKGMSQISRRGRSRLRKVLFQAAMSAVKSNAEMRAIHQYFISREKNPLRKMQSLMAIAAKLIRVFFGILRSGKAYDPERLLKDIRHPGTQAA

SEQ ID NO: 257780 - protein, 356 aa, unidentified
MDKYIGFDIDSKKTVACVVEKGKKERYATIGSDVQSMRNYLKGQKSDGSRIHLTFEVSGQAGFIYDSLIDCADTITVSNPSKMTWIYRTAKKNDRIDSRKQAILLSIGEIPKVHMPEAEIRQWRNVILHRRNLVNKTTEVKNRIRAVLKSQGFSRPEQKGSWWKRSNRLWMRSLSEQQVSSIGLWRMNLCNLMEQLELLDGQVKRVTEYLDNYLGRHGGGKLLMSIPGVGPRTAEAILAYTDDVRRFGRTKQYCSYFGLTPRLDESGTSRRLGHISKLGPSVVRWLLCESSWKVIRKSSALRAFYERVMAGQAGRKKIAIVAVCRKLLSIMRAMLETGELFNEELVCRECEVKRAC

SEQ ID NO: 257781 - protein, 355 aa, unidentified
MNDAKYIGMDVHQATVSVAVLDSAGKLVMEAILETKAETILQFIHGLRGSLHVTLEEGTCAAWLHDLLKPHVTQVLVCDPRKNALIKAGNKSDRIDARKLADLLYLNKLNPVYHGETGIRALKEVARSYLALTRDTTRVMNRLKALYRSWAIPCAGQRVYAPRYRSEWLVKITEAGVHRRAEIYYQQLDALRSLREQVRRDLLAEGRKHSAMKLLRQIPSIGPIRAVLLIALMQTPHRFRTKRQLWAYCGLALKTSTSGEYRIVEGRLKRSKKFLAIRGLNANHNHDLKNIFKGAATRAAAVPGPFQEFHAGLVARGMKPTMARLTLARKIAAITLIVWKKGVGFDAEHLKQQAA

SEQ ID NO: 257782 - protein, 386 aa, unidentified
MAHSTNILPRSVDYDQTLVLAIELSNKSWVLAAQVPGLSQTKAKRTIDPDKNDLLAAIDGYRTRAAAAGRSVKRVITSYEAGWCGFWLARWLMAHGIEVHVVQPSSVPVDRRMRRGKSDGIDAELLLRTLLAWLRGEPRVCSMVPIPDEADEDARRCVRERSELVSERVGLVNRIGAVLATLGADGYNPLLQSRRRRLTELRTGLGDPIPPNALAKIARLLTRLELVLAQIAELELERDAVARTDAPDQAAKMIQQLVSLRGIGVQSATVLVREAFVRRFANDKALGSYAGLTSTPYSSGSIDREQGIGKAGNRRLRTVMVELAWLWQRYQPGTSQVVWFRQRVGSTGRRVRKVMVVALARKLLIALWRFVIDGVIPEGAITKPSI

SEQ ID NO: 257783 - protein, 343 aa, unidentified
MNKLNVIGVDLAKNVIQVSVLSPSNRELRNSALTLRKFAEFLGRQRSSLVAFEACATSHYWARVAQRYGHEVKIIPAKAVFPFRQGHKTDENDALAVAEAARRPNVKLAPLKTVEQQGMQAVQRSRELLVHERVSLSNHLRGLLMEFGIVIPQGFASLYRQLPEILEDGENELPDLYRPTLNLLYRRLCALRNDLEQLNGEIETLVRQNPMCQRLTELEGVGPISSVLLYATLGTGEAFVNGRQFSAYLGLTPKQFSSGGKVNLVGISKRVANKRLRAVLIQGARAYVYHMKEPKTTKDRWLWAIVERSGKCKAAVALANKNVRTAWAMLTQNTEYHRYPLAT

SEQ ID NO: 257784 - protein, 293 aa, unidentified
MNITTVGLDLAKNVFQVHGIDDEGKVIVCKTLRRRQMIPFFTKLEPCLVGIEACGTSHHWARQLSALGHEVKLMPPVYVKPYVKRGKTDAADAEAICEAVQRPTMRFVAIKSPEQQSVLFLHRTRDLMIRQRTQVINMIRAQLAEFGITLAKGIQHILKIVPQLIDGKVPDVPELAIKILSTLATQVEDLQVLICGLDKELKVWFRGSRVARRLETIPGIGLITATALAATVADPHQFTSGRKFAAWIGLTPKSNSSGGKELSKGMDDAADSGQTRRGTTRHRVDVQPTVHSL

SEQ ID NO: 257785 - protein, 322 aa, unidentified
MSDNSMIVAGIDTGKAKLHVCLLPAGERFSVSNDQAGIAKLAAHCRAAGVMRAGIEATSIYHRAALKALREAGIETAELQPRQARGLAVALLRRAKNDTIDASVIARLVEVLNGPWRRPPPAHLEALAEALTYIDMLDDRIVVLKTQCERFTSKRLLDRFDKEIKALEKRQRNELRRLMARLRIDQATSDNLDLLLSIPCLGERTAITIAIRMPELGSMTREQAASLLGVAPFDDQSAERDGRRHIAGGRARLRKTVFMAAFSGSQRWNEDLKRFYERLRAKGKTHNAAVVACARKLIILANAVLKRKTPWQDRRGTPCLES

SEQ ID NO: 257786 - protein, 391 aa, unidentified
MFLLGIDIAKLDHVASCIDSSTNEVVFSNFKFKNDFRGFCSLLDKIRTFDDENLIIGMESTSHYGENLISFLFKQHFKVALINPLQTSHLRKANIRDAKNDRLDSLNIAISLIFAKLNFVSEKNIDCFSLKKLTRFRSNLIKQRSKAKIQLTSLLDLLFPELQYLFKSKIHSKAIYSLLKKYPSAEEIAALKDDEISNLLYASSKGHFRKEKSIELKSLAKTSVGIKDTSISLHVIQLIELIELYDRQIKDIVTKITDTVDKLDTKLLSVPGINIISCAIILGETGNLDNFSDSKKLLAFAGLDPKIRQSGNFYASSCRMSKKGSPYLRYALVFTAWNIVRHSEKFNRYYCLKRSQGKSHYNALGHVAHKLVRVIFTLIKKDIIYQEESLK

SEQ ID NO: 257787 - protein, 344 aa, unidentified
MNEIKVIGIDLAKSVFQVCVWMNDGSIASNRKVSRAKLLDTIRQFPAGSMIAMEACATSHYWGRTFQSIGFQVRLIPTQHVKALTHHQKNDANDALAICETAFRPGIHFVTIKTVEQQDIKALRAARQLMVEQRTALANQARSLSAEQGVEIPVGIHILQQRLPDIIEDAGQLISPVLRQLLFSLLENIRSLNERIFSVEHSLAALCKQQPKYKVLMTIPGIGPLIAAAFLSEVNAGQFTNGRQLSAWCGLVPRQHSSGGKNSLSSMTKNGNRDLRTLIIHGARSVMHWAHKRDDALGVWLKRLTERRGKMKATVALANKMTRIVWRLLTEPTSFNINRAFAMN

SEQ ID NO: 257788 - protein, 403 aa, unidentified
MNMNAVGIDVSKGKSMVAILRPFGEIVSTPFEVKHTVSGIRSLIEHIKAIDGESRIVMEHTGRYYEPLIRELSQADLFVSAVNPKLIKDFGDNSLRKVKSDKADAVKIARYTLDSWTELRQYSLMDEIRNQLKTMNRQFDFYMKHKTAMKNNLIGVLDQTYPGANTYFDSPAREDGSQKWVDFATTYWHVDCVRKLSLNPFINHYQKWCKRRKYNFSQSKAVEIYEASKEIVSVLPKDDLTKLIIKQAVEQLNMASQTVEQLRTMMNDAASKLPEYPVVMAMKGVGKSLGPQLMAEIGDISRFTHKGAITAFAGVDPGVNESGSYEQKSVPASKRGSGTLRKTLFQVMDALIKTKPQDDPVYLFMDKKRSQGKPYYVYMTAGANKFLRIYYGRVKEYLSSLPK

SEQ ID NO: 257789 - protein, 423 aa, unidentified
MMKLKYSICCGLDVHKNVIVATIVTTNKDGISEYLQKSFSTINSDIQRFHNWLIENNCYHVCMESTGKYWIPIFNYLENDIDVCLTHPKYVKAIKGKKTDKKDSKWIADLYKFDLVRCSFIPPKDFRQLRELSRYRFKLVCMKFSEKNRIQNCMTISNVGIASVLSDPFGKTATEIISYLLEHTADSMDEKAVRKLIKKGAKSKSDEIIEAIKGYTIETDQAKKPELARGHLEYLDDMITQTEVELYVRIKPYYEFVEFVSTMPGMTELSSTIVLAETGVDMDIFDDAKHLCSWCGLSPANNESAGKKKSVRIAKAGDYLKPMMVQCALAAIKSKKQPYFAIKYGRIKKRRGHKKAIIAIARMMMVCIYHMVSEKKPFTPTDYEELMDPQNHVESVVLNENNVFAYLESLGYDSSKLVKRNDN

SEQ ID NO: 257790 - protein, 341 aa, unidentified
MKLSRVGVDLAKNVYQLHGVDRHGKTVWKRRLRRAQWLQALLDKTDPGCEIGMEACTGAHHWARELQSRGYTVRLIAPQFVKPYVKSNKNDANDAEAICEAMSRPNMRFVTVKCVEQQDIQATHRVRTELKNHRNAKGNQIRGLVAEYGLVAAPSLLALRRAIPEWLEDAENGLTDNFRCLLHGLWDDLLALEERFKELDKAIEKLARSNEVTQRLQQLRGVGPIVATALVATVGNGEQFNNGRQMAASLGLTPRQSSSGDKRRLLGISKRGDVYMRTQLIHGARSVVSHAKHRDDPLSRWATDIAKRRHPNVAAVALANKTARMAWAMLRNEYDPSLAVG

SEQ ID NO: 257791 - protein, 331 aa, unidentified
MMQEYIGVDLHKSFFRACAMTSTGERAWEGRFPRTAEGVARFIARGVSEGQAVAVEASGPTWAFVDALQPTGARVWVVDPRKTKLKAGFAAKTDRLDARRLADALRRDSVVSIYIPPPAIRELREVCRGRHQLVRLRTRVAQMIRALLLRCDAGEPPGTRLYAPRALAWLAAAQLPPDADQTLRRLERLYRAIHVDAQAADAEVRRRAQDDPIAVALTELVGIGPVMGLTIRAEIGDITRFRRGPALACYAGLVPRVDSSADRVYRGRITRDGSPWLRWALVEMARHAIKRPDAIGRWARRVAVRKGLYKARVALARVLCDQVVTTWPKTV

SEQ ID NO: 257792 - protein, 420 aa, unidentified
MKVVYQTCCGVDVHKSFLVATIIKTTSGVQPSYQKKRFPTFNNSILEFKQWLLDNSCRNVCMESTGKYWVPVFNLLEDELSVTIANPKWVKAVKGNKDDTKDSKWIGDLFRLGLVPGSYIPCRPIRILREFTRYRYKLTSCRSSEKNRFQNALTVCNVALDSVVSDIFGKSATSVIDYLLQQSDNSINHEEISSRLLRSLKKKSESVIESIEGYQMTESQKYRMRLVHAHMDYITSTISDIDSMINSLVEPYENAVQLLCTIPGVDRNSAITIISEIGTDMTQFSNSKRLCCWAGLTPSNNESAGKKKSVRITRAGVYLKPALVQVAHAAVKSNKSPYYKAKYERIMKRRGKKRAIIAVARMILTAIYHMLSTGESWNPTDLYKIDMPEPLKNKQKEKAVKQAMKLLIAEGLIKESQLTS

SEQ ID NO: 257793 - protein, 315 aa, unidentified
MSKAHLDLVFLKAGKAQHHKVTNDKAGHKKILSLIPNSSCVVMESSGPYFLSLAAFLKAHEVSVSVVNPLSVKRFIQMKGERNKSDKKDAYWIMSYGQEQPLKEWELPNELQLKCARLYSLRALYVKQLTMLTNHSQSVTITGMVDKDVKQSIAPMIKHFKLACEKLDAKLDKLLKEWQPEQYRNLQTIPGVGKQVAMVLIIKTNGFSNLENYRQLISMAGLTPREYSSGSSVRAKVRICKNGGSEIRRIVYLSSMTAIRYNRQCKTLFDRLKCRGKNGKVALIAVCNKILKQAFAIAKSGVPYHADYTSKLVVN

SEQ ID NO: 257794 - protein, 320 aa, unidentified
MKFNNALGKIFVGVDVSKATLDVYRPDTKEMLQIVNSDEGIAILCSQLEKKKRKVMVVMEGTGGYEHLLVKHLSSCKIEAAVINPRRIRDFAKGIGLDAKTDPIDAKVISRYAEVVVPQPMATKSDHELKHGALVTRRNQLLELINQENNRLKQSWDDDAKQSIRSVLEVLKKQLKDVDSKLAKMLQVDTQNKRTIEVLQSVKGVGPVMISTVLAELPELGKLNRGEVAKLVGVAPINRDSGTKSGKRFIGGGRGQVRRVLYMATIVAIRHNSAIKAFYAHLKSKGKESKVAIVACMRKFITILNLLIKTDQLWENKMSA

SEQ ID NO: 257795 - protein, 342 aa, unidentified
MKDMMIGVDLAKNVFQVHGALRTGEVQFRKKLTRKQFPAFMAKQEPCLVIFEACGSAHYWAREMETLGHEVKLIAPQYARPFVKRQKNDAADAEAIVIAARQPEMRFVELKTVEQQSRAAVFRGRERLVYQRTADVNALRALLYEHGHVFPAGIRYLDRMKALVEDAASELPGLIREECQDLVTQIAEKTTRIIERTAKLKTLAAQSDRARRLQTMPGVGPLTAVAVEAFGPDMAQFKKGRYFAAWLSLVPRQHSSGGKERLGRMTKAGQADIRRLLIIGAMSRLNWLGQRSIVEGSWLSRMLARRPKMLVAIALANKMARQLWAMLTKNEDYKDPALAGTA

SEQ ID NO: 257796 - protein, 355 aa, unidentified
MLYSGIDLHRDNSMITTINDSGTIVRQQKLPNEESVILDYFFSMGNEHRAVVEATANWYWLSDLLNDHDIELVLAHAKYLKAISYAKVKTDKVDSQTLANLLRIDMIPAAHQIAPSIRGLRDLMRARLKIVSKNTSCQNSIHRLIGKYNLTIPDGKKLHNISTLDLLKDLQLPTEARLQLELHIEQIRLLHRQIYDLEKSLYPKLIPNPDIQRLLWIPGIGKILAFTIYLEIDGIKRFPGTPQFLSYSRLVPGADNSNRKIKHKSGNKDGNRYLKMAFTEASIRAIQYFSEIKAFYQSKERRKHKAIAKTLVAQEIAKICYYVLETKTDFNNTFKGNVLSRRKSMQWPRLTSPGA

SEQ ID NO: 257797 - protein, 419 aa, unidentified
MRRLLERCAALDVHKASVTVCARILGPGAEIEEFMAEFSTMAADLLALRDWLKELGVTHVAMEATGVYWKPVYYALEDDFELLLVNAQHVKNVPGRKTDTLDAQWLSQLLECGLLRASFVPPKPIRELRDLTRYRKALIKERQQEANRLHKVLEDAGIKLACVATDVLGVSGRQMLEALVSGTRDPEILANLAKGKLRNKLPALKQALAGSFKPHHALIVSHILAHLDYLEETIAVLSEEVERRLAPFAHKAENLCTIHGVAERTSHVILAELGPDMSRFATDRHAASWACICPGNDESAGKRRSGKTRKGNPYLRAALIEAANGAIRTKNTYLRAQYEQVKRRQGHKKAIVAVAHSILIAAYHILKDDIPYQDLGGDHFARHADPERITKRLVAQLERLGHTVTLQTSTATEATAIPA

SEQ ID NO: 257798 - protein, 458 aa, unidentified
MAKRRKKKTKNVKTLHVIKLNAAGIDIGATEIYIAVPGDRDNEPVRHFDTFTADLHAAAKWLKSCDIDSIAMESTGVYWIPVFQILESYGFDVVLVNARHVKNVPGRKTDVQDCQWLQYLHSVGLLRGSYRPPQEVCAVRSLLRHRDGLIKTASSHILHMQKALTQMNLQIHNVISDITGVTGLAIIDAVLSGERNPQKLAALKNGRIKATKDTIAKSLNGDYLPEHVFTLKQSLQVYRHYQKMIAECDQEIENHLNNFDSLIDVAKKPLPPATSTSRRGKGNEPNFDLRTHMYRIIGTDLTQIEGISAVTAHVFFSEVGCEVSKFPKAGNFVSWLNLCPNNKITGGKVLSSRTLPGKNRLAKALQMSAMSLWRSQSYLGNYYRRKRAKNGAPSAITDTAHKLARIIYYLVKTGKQFDESVFYAQEEAHQKRTLKNFTKRAKRMGFQLVESETGSFVT

SEQ ID NO: 257799 - protein, 308 aa, unidentified
MPQAVIGCDLSRAVIDICELPSGRIRQIANTYDAIAVWLDTLDHDIRLVFEATSGCDGDLIAALATRGQPFSRVNPRQAREFARATGTLAKTDRVDARVLTQMGAALNLPATIPLSPARSRLANFLRRRKQLVDMRKAKKLHRHSAGQPEIAQAIEAMIDLLSQQIAELDRQIAGFIAQDQVLSEQAHLLNAVPGIGPTVLATLLGELSELGTLCRRKIASLAGLAPHARESGTWRGARRVWGDRRKVREALYIAALNTSRRIPVLTAMRDRMRAKGKAPKTILIAVARQLFIILNVMIRKRQPIALA

SEQ ID NO: 257800 - protein, 399 aa, unidentified
MLAVGIDISKSKSVAAILNQDGSMHTSPFEFPHTQPELDAFIKYILNSNQSATILMENTGHYHYPVLKAFQEAGLPVCIVNAYQIKKFGDMDLRKAKTDKKDAVRIARYALEKSYSLVPYTSMEQKYEDLRFLARQYNQRMLTLKTNKVFLLNLLDETMPGITNILPLTSRTPETSLSVLFINRFKSYDRIKKMGKNRFLDAFEKIARKSRNRQTKTYGLAIYEAALRNITTRGENEYILAAQDQCLELVCESQKAADSIILKMQTLAETLPEYAVLRSMAGGGDRLGPLILAEIGDIRRFHSGKALNAYAGNDAPPYQSGTFESHNRHISKRGNAALRKYCFEVMQALKLTQPQDDPVYLFLLKKEQEGKPYNVAKMAGVNKFLRIYYARAMETLKQQ

SEQ ID NO: 257801 - protein, 347 aa, unidentified
MVIVGIDAHKRSHTAVAVDEVGRKLGQHTTGTTSEDHLALLAWAEQFGAERLWAVEDCRHLSRRLERDLLGAGEPIVRVPTKLMARERNSARSYGKSDPIDALAVARAAVREPDLPKAQLDGPARTVRLLIDHREHLVAERTRVINRLRWHLHELDPGNEPPARTLWRPKHLTAVSAQLDQLDGVVARLARALVERCRQLTEQIHVLDDELEPLVKHLAPALLDLCGCSTLTAAKILGETADVRRFRSRHAFARHNGTAPLPVWSSNHARHRLSRTGNRQLNTAIHRIAITQARHHEPARQLLQRRRNGGKNKAESIRILKRRLSDVVYQALRADARPSAPSRLKAA

SEQ ID NO: 257802 - protein, 410 aa, unidentified
MKVYIGIDWSSQKHDIMYLNEEGGIIAYQTIPHTPLGFEAFDDQRMKLGVGVEDCLVGIETEHNLLIDFLSSRQYRQIYVIPPTTIKGSRGRFGASKANTDRSDAHLIADMLRTDRARLHVWHADSLLTQQIAALASLEQFLTHMIIQTNNRLRNVLWRYYPNAAIVFSALDLQISLEFICAFPTPQAAAQLTFEQFKVFARSHHYPQPSKLPACFARLQKPQPEARQQTVLAFQSEAVRLARLSFHAVQDKAATIREIQELFLEHPDYPIFSSLPGAGKILAPALLAKFGDDRLRYPTPQVLQSVAGTCPVTRASGKHKVVSFRYACDHEFRSVVQQWAKCSIDASVWAYTYFQSIRPHCDSLSHAYRRLANRWLEIAWRLWQDRVPYDEERHLRQHALRVKPKYFCSE

SEQ ID NO: 257803 - protein, 359 aa, unidentified
MDTIVAHTHPFVIGVDTHARTHTYAVLTAAGQHLGTETFPNTAAGRSRAINWAGRRSGGVTDALWVIEGAGSYGAQLARNVADAGYRVVEAARMGRTGRRGIGKSDPLDARRIAAAVLSLPVNQLRTPRQDEGVRAAAQILLTARDGLAAERTRAVNALTALLRIIDLGIDARRPLGARKIAEVARWRTREEALAATTARTEAIRLAKRILELDTELGQNMTRISDLVTASPAVELLEKTGIGPVTAARTLVAWSHPGRVKSEAAFAAIAGVNPIPASSGNTTRHRLNRGGDRQLNRALNIIAMVRMVHDPGTHDYVERRRAEGKTDREIRRILKRYLARSIYRHLNTASATKLRVDEI

SEQ ID NO: 257804 - protein, 437 aa, unidentified
MICAAVERCAGIDVGKTFLAVCVMMGPLNGEAEMQKRRFGTTTAELEALRDWLTQQGITHVVMESTGSYWKPVYNVLETSVKVCLANPQEVKNRKGHKTDDKDGWWLAHLLRHAMIHPSFIPPRSIRELRDLTRRRKRLLGNATAEKNRIQKVLEDANVKLGNVLTDVFGVSGQLMLDALLNGKAEPEQIAQFARKSAKRKIPQIIEALQGHRMSEHHRRMIRYSLKHMEFLEEQIADIDADIVEQIKRAGLVQEWELLQSLPGVKDRSAASILAETGGDMEQFPTGKDLSSWAGVCPGNNRSAGKNKSSRTTGGNPWLRGALTECAWAAAAQKNCFLKDRFWRITSKSGGKKAPAVVAVAHTLLLLAYEVLRTHQPFKDRAAPPMDECQKQRLIRHHIRRLGKLGIAIRRYATSDQAPITASKPVKGHRKRSSANP

SEQ ID NO: 257805 - protein, 410 aa, unidentified
MEVLHQRCAGLDVHKKTVVAAVRLVEGNKVITEVRTFATTTAGLLALADWLTQNGCMHVAMEATGVYWKPVWHVLSDGEIELVLANAAHVKNVPGRKTDVSDAAWLAELLAHGLIRASFVPDGQTQELRALLRTRKQLVRERSRHVQRIHKVLEDANIKIDAELSDMLGKSGRAMLNAMVAGETDPVRLAALAHPNVKSPQAKLAEALRGRVTHHHRFLLQLHLQQIDGLNTALGTMDGEIEANLAPFRTAVELVSTHPGISTLSAQAIVSEIGTDMSRFATAGHLLSWSGLCPRNDESAGRRRSNRLRKGAQWLKTTLVQCAQAAKNKKGSYCQAQYLRLRSRRGPQKAICAVAASILTAIYHMLKNGTVYQDLGADHFNRRSKITQTQRLVKRLEHLGYAVEIQPLAA

SEQ ID NO: 257806 - protein, 425 aa, unidentified
MEKQKLMSKDSVEIAAFVGLDWADQKHAVTLQESGSDQRDRFTLDHTPEALQSWIQSLRERFGGRPVAIAVEQKRGALIYALMHVEFLHLYPVNPITVAKVREAFYPSGAKGDPSDADLLLDVLISHRRHLRVWTPDDALTRSIQLLTEDRRRVVDERTALTNQLTAALKTYFPQALNWFGDLHTPRACAFLHRWPTLQQFQQASPSSIRKFYKAQGYRGDDKREQLIANIKKAQPLTQDSAVLLSCSMKVETLTQQIPLLTEAIERYDQKIAALFDQHDDSTLFGSFPGAGSALAPRLLAAFGSNRDRFECASQLQELSGIAPVTEKSGEAIWIHWRLACSTFLRQTFHEFAGCSIVQSTWARACYDQLRKRGKSHHAALRALAFKWIRIMFRCWKDGKPYNEAVYLKSLHSRRSPLAPDLTAQ

SEQ ID NO: 257807 - protein, 401 aa, unidentified
MSKKNTRNALDPSLSYAVIGLDLAKADCAVAAVPCSDDELGLIDRMDYESLFEQAEKREPTLFAMEPCCGYSQISLRLQNMGHEVKVISGHAVKNWIATHKSNQKTDLNDATALAKLALYDHDLQPIRVKNVEECRIASVQAIRIQLRTQATKSLGCFKSLCQCWGIVIRRGSLNTKKMAEAVAAVEKLLGAEVTSSLMILRDAYKFTMKKINALDKLLDALVEANEQARTMKTVLGIGTQTAARLAVTTGDIKRFPMPRSYVAYFGLAPRNIITGHSGTPSPSKRGALKPVSSRGQGKVSRRGDRVARSFIIQGAATIYMLYCKDMLPECQLRRWLHEQIKRGKPYGKIIVSLAAKLLRIVWALLTYGEKFDSHKAGVPRSVLAAMEKPLKHDAAAESAA

SEQ ID NO: 257808 - protein, 415 aa, unidentified
MVVCRANNTSCRTEKDVAQPTLWAGIDAGKAAHHCVAINTGGQRVLSERVINDEGALLDLIRAVKELADGGSVQWAIDLNSGGAALLITLLLDDDQDLLYIPGRTVHHASGACRGDGKSDAKDAAIIADQARMRRDLLPFRHRDKTAVDLRILCARRTDLASDRNRAINRLRAQLLEYFPALERAFDYAHRKAALILLTGYQTPDGLRRMGAPRLERWLRDRQAYNAGDLAARAIEAANLQRTTVIGQHVAAAVVARLAQTILDLNTELADVDTMIEETFQQHRLAAIIVSMPGFGSLLGAELLAATNGDLASFNTADRLAGISGLAPVPRDSGRISGNLKRPRRYDRRLLRVFYLAANNSIKTSPESRDYYDRKRSQGKRHSQAILCLARRRLNVLWAMQRDQTSYQPGMPRAA

SEQ ID NO: 257809 - protein, 411 aa, unidentified
MDKIYDKCCGIDVHKKLIVACFRYGKKQEVREFGATTRELLELADWLKESGCEMVAMESTASYWKPLYNILESSDLNAMVVNARHMKAVPGRKTDVKDAEWVADLLQHGLLQPSYIPDKDQRELRELVRYRKSLVGERTRELNRLQKMLEGANIKLSGTVSDINGKSARSILEYLLTGKAIDGAKYDEMYEQKIIAHNLKATKEQIVDDLNGVMSPLQRRMMKELLVHLDELNIHIKNLDDEIDNFMKPEEKQASQAIQDVTGIGNTSAQAIISVIGSDMSRFPTDRHISSWAGLCPGDNESAKKRKSGKTRKRNALLRTTLITCAHAAVKNKKSYFYAQYMRISAHRGPKRAYVAVAHSMLISIYHNLKDGVIFKDLGADYYNQFNKERKINAYLKKLKALGWEVPIVAA

SEQ ID NO: 257810 - protein, 439 aa, unidentified
MSASTGRTLATEVEHYHQGGLVVKEEFCFYVGVDWGVEFHQACILDAHGEKICQRRIEHSGPGMLEFCDFLQALTNGEASALAVAIEVPRGPIEEALLEHNYAVFSINPKQLDRFRDRHTVAGAKDDRRDAFVAADSLRTDQHCFRRVRSDHPDVIRIRELSRTEENVGIDLRRCVNQLSQLLLRYFPQLLRLCSTPDEPWLWALLELAPTPQRAAKLTEKRLKQLLAKHRIRRWTAEEVSEILTAPPLPLAAGSAEAISEHALLLLPQLRLLHLQRKQVADRTQQLLDHMAASTADFPESQEHRDIPVLLSLPGVGRIITATMLAEGAHILSLRDYHALRAHAGIAPVTKQSGKSRQVLMRYRCNQRLRNAFYHWARTSIQHDPRSKHHYARLRQVGHNHGRALRGVADRLLAVLIAMLKSGQTYDPNRRSTADVTAA

SEQ ID NO: 257811 - protein, 438 aa, unidentified
MSNNVIFNFDELFISVGIDVGADFSWMSIVLPNQQFVGKPYKILHNSMDSLASAVSKIKEAEEMYSLESRIFLESTGIYHYPLFCYLRDKGFNCSVINPIITKNSTNINIRKVHNDRFDSKKAALVGLKPDLKVSLMPSDLALNCRNLCREYYDLMDSRNAYVNKLIDELRMVFPQYLGIFSKVTIDTSLILLETYTSPSAFINADKQEIIDLIRSTARFGLTYACNKYNAIIQAANDADEFGYILDSNIKRIRLYIGFICKYDEEINSILESMHELAAANEDTDFVKQIRLIETFKGAGFLSAMSLMGEIGDFSAFSKPKQLFAYFGLDPAVKQSGKFEGTKIQMSKRGSAIARRVIHTLTLQSISASRTGESKNPVLLDYYLKKCESKPKLVAMGAVSHKVCNMIFAILRDSKPFEIITPQEHIKKYNAAKCDVAA

SEQ ID NO: 257812 - protein, 405 aa, unidentified
MGKVFVGHDWAEAHHDVYVEDEEGKRLARARLPEGVEGVARFHELVGPFAEDPGEVVVATETDRGLFVAALVAAGYQVLAVNPMSTSRYRERHSTSGAKSDPGDAKVLAELARTDAHNHRPIAGDSDLAEAVKVLARAHQSMIWTRQRQANQLRSTLREFYPAAVEAFDELTSGDAVAVLAIGPTPALGRGLSRSKIASALRRGGRQRRIEDRADEIQGALRSPQLEAPMLLAEAMGASVKALVAVIGELSEQISCLEAELAERFEQHPDAKVIRSLPGLGTILGARVLGEFGDDPNRYGDAKSRKNYAGTSPITKASGTRRVVLARYARNRRLADACYMWAFAALNTSPGARAFYDQRRAAGDTHHRALRALGNRLVGVLHGCLRHNTPYDEHTAWDHRIANAA

SEQ ID NO: 257813 - protein, 412 aa, unidentified
MKDLLEISCGLDVHKEKIVACILTGPLGKPTRSEIREFSTLIPDMIALRNWIVSKNCHHVAMESTGIYWMPIYEILEDAFYGDITLLVVNARHMKNVPGKKTDMRDSEWISTLLRAGLLNGSFIPEKRIREFRDLNRYRKSVIRDITSQKNRIEKFLQSSGFRLSSFISDIFGASGRNIILHLIEHGQIDKTALDSCLKTKTRNRIDEILMSVNGTLSEHQKAFLRILMTHYDSLKKHLAEIETSLEEDMAPFTLQVEQLNSIYGISTTASCAIIAEIGIDMKPFKTAEHICSWAGLCPGNNESAGKRKSTSVTKGNPYIKSMLCEIAWVIAGKRNTYLSAWYWRIKQKKGAKKAIVALARKLLVIIYTMLKQGTLFVESCFETRRKHCEQKQLSRYIRELEKHGYHVEAQS

SEQ ID NO: 257814 - protein, 320 aa, unidentified
MFYGLDIHKKFIQVCRLDTDGRNRCDFRIDADRPAILKFAAALTREDAAVMETTFHTWAIWSLLKEHGNGARIEVANSMQVKAIADARIKTDKIDAHILAQLLRTDFIPAVVMPDDQTWQLRQLMTHRQLLARHRTATRNAVCGILHRKLLTAPVGELFGPTGRRWLQEQHYSDIERLMLDSALAHLDSLDTRIAAVDARLREVSCRSTQVKLLMTIPGVNVTVANGLIAAIGDITRFDSAQKLTAYFGLVPRVSQSAGRCCYGPITKDGRSQARWLAVEAAHGLVTCGSPLTASYHRIRRKKCHNVAVVALARKLVIVV

SEQ ID NO: 257815 - protein, 412 aa, unidentified
MDVLVERCAGLDVHRDSVMATVRLPGKRRRQREQHKRAFGTTIAQLQELEEWLQGFGVTLVGMEATGVYWQPVFDVLERRFECWLLNAQHLHNVPGRKTDTIDSAWICQLVEHGLVRPSLVPPPEIRRLRDLTRLRKAQINERARAIQRLEKVLQGVGIKLTSVASAAYSVSARAMLEALLAGTTDPNELAELARGSLRGKIPQLREALANRFELTHHGVLVSGLLAHIDALDQGIAALDARIVEATEPLAELVELVSTIPGVKQRNAQVLIAECGIDMSVFPTVHHFASWARICPGNNQSAGKHRSGKTLRGSRWLRQALTESARAAARTKGTYLASHYWQIRGRRGEPKAIGAIRHDILVAYYHIARDRVPFRELGADWLARRYSPEHRARRLVRQLEALGLKVTLEAAA

SEQ ID NO: 257816 - protein, 334 aa, unidentified
MKKFNVFTGIDVSKSTLDFCIIDAKANVLIQGKTENNSQGIKLLLNHFKKLKVSLNEVLFSFENTGVYSMPLNIFLSERKCDFAEIPALEIKKSKGITRGKSDKTDAKDIALYGLRNLDKITLSSAPQIEILQLKFLFAEREKVIEAIKTFDSTNEAEGFLPNSVFKIVSPINRKILAHLKKALKSIEEKINKIIEQNEKLKQQKALLKSIPGIGDVTALYFLLATKGFSVFKDWRKFACYSGIAPFEYSSGSSVRARTKVNHFADKKIKSLLHLVALNAIKYDNELKEYYQRKRDEGKHTLLVLNNIKCKIVSRAFAVISRESPFVNTYKFAS

SEQ ID NO: 257817 - protein, 355 aa, unidentified
MSSEKYIGLDVHQATISVAVMDSQGKVIMESILETKASTLLEFLAGLSGSLFVTFEEGTWAAWLYDLLKPHVTEVLVCNPRKIPLQKQGNKSDKIDARKLAERLRLHDLKPVYHGENGIRMLRELARSYLTVVKDLSRVMNRLKALYRSWAIPCAGRDVYYRRHRSEWLEKIPEAGTRRRAEQLYEHLDLLRHLRQQARRELLAESRKHAITAKLRKIPSLGPIRSALAVALIQTPNRFRTKRQLWTYSGLGLETRDSGEYQFVKGQPRRRKKQATIRGLNKDYNRDLKGLFKGAATRASIKPGPLQDFYQRSLAKGIKPTMVRLTLARKIAAITLTLWKKGEDFDINKLNSQAA

SEQ ID NO: 257818 - protein, 358 aa, unidentified
MEERKTRVVGIDLAKRSYVAHAIDPAKKAAVIWDGRTDDEGIRRLCAKLRPTDRVGIECCSFAFYLAKVLAAKVGCRVLVLNAGDLPLIYKSVKKTDLEDAGKLAWLLNKMADEELPVVASPSEKEEYRRALVSELASKKKARTALINRLHSLFVRQGIVTIGKENLRTVENREAYLVNLNGYTAWEAKRVQEELILLERHIEEIEAEIKLDLKGESKVSNLMSIPGVGPTIAMAFLAYVGDGSRFSHGRQVSHYVGMTPRVDSSGETTRIGRITKRGCTAIRALIVQSAWAAVHTSKDHKLKQKYQELAARRGKGKAIVAVARRMLELMWVVVRTDSYYWDTTKEELDIKMSRSKVA

SEQ ID NO: 257819 - protein, 405 aa, unidentified
MMLDMEIIFGIDVSKHSSNVAILIDGRTFKEFKITNNRPGYKILDDALNSFRSPKVIFESSGIYSRSIRSFLQRENWNYTEINPLAAKKDMDGFRHNKNDRLDAVSLAMAMAQHHYQSTFKEKAVYGELHDLERTYQEFHEDIVRAKNRLHQKLQLTFPEVEQFISTTDGALYWHVVQQFPHASLVLAIELPALAQFILKATPKNMSEKRAFALARHLHDLASQSAPAVDYNAHAVHSVIYPANEVEHLSGLKADIIEEMTKISSLLAEIPILESIPGFGIKTAVCLLAELGDISRFHSSNAINAYVGIDLIQYQSGDFEMMQHIRKRGNPYARKILFKAVLNMMSVAKYHPSNISIFYQRKKQSSSESHTKKIAIAAMGRLIRTIYHLIKNNELYDSTQFSPEK

SEQ ID NO: 257820 - protein, 364 aa, unidentified
MKRKVYVGMDVHKETIQIASLTSNTKDLVKEQQIKHEEVQIKKFIQKLKLEKSEIHCCYEAGVTGYPLYRYLKTLGVNCTIVAPGKIPRQSSDKIKTDKRDAIKLARLLRSGELESIHVPSEEDEAVRDYLRSRDSLRLDLGRNRQRLMKFLLRKGIKYSTTKYWTTSHYKWLNNLHFENEILQTTFNDYYSRVRVQEENLKAMDKKVQEIAESEPYREKVGILRCFRGVDYLTAMFLLSEVNDFKRFKTAGSFMSFLGLVPGEYSSGSKRKQTGITKTGSPRLRRILTEAAWQHRFSGTGSKVVVARRVGQSALVVSLAEKASLRLHKKFKNLQLRGKSPQVMITAVSRELSGFLWAAMNLVV

SEQ ID NO: 257821 - protein, 447 aa, unidentified
MAQRKRPTTQSAITLTHPNAAGIDIGSAAHFVAVPPDRDEQPVREFASFTTDLHRLADWLEACGVDTVAMESTGVYWIPLYELLESRGLTVLLVNARHVKNVSGRKSDVLDCQWLQQLMSFGLLRGAFRPAEQVCVLRSLSRQRTMLLRSQGRFVQHMQKALTQMNIQLANVISDVAGETGQKSLRAIVAGERDGHALAQLRNARIRASEDEIAKSLQGSWRAEHLFALKQALDAFDFCGTQLAECDVQIQAQLQALHVREDEPAQGKKRGRARNAPKFDLRTQLFQMCGVDLTRIDGIDVTTALVVVSEVGADMGKFPSDKHFASWLGLCPGTKITGGKVMSGKTKRCANRAAQALRLAAAALRSSQSALGAYYRRLCARMDKPKAVTAAAHKLARLIYAMLTHGQEYTDQGQDYFEERYRQRVLHNLAQKAKAMGMQLVASDNPA

SEQ ID NO: 257822 - protein, 402 aa, unidentified
MNAVGIDVSKGKSMVAIMRPFGEIVSTPFEIKHTTSDIRSLIELINSVEGESRIVMEHTGRYYEVLAHQLSEANLFVSAINPKLIKDFDNDSLRKVKSDKADAVKIARYALDKWQNLKQYSVMDELRNQLKTMNRQFGFYMKHKTAMKNNLIGILDQTYPGVNAYFDSPARNDGSQKWVDFASTYWHVDCVRKMSQNAFIDHYQNWCHRKKYNFSKSKAEEIYGKAKELVPVLPKDDITKLIIKQAVDQLNSASATVESLRTLMNETASKLPEYPIVMAMKGVGPSLGPQLMAEIGDVSRFTHKGAITAFAGVDPGVNESGTYEQKSVPTSKRGSSDLRKTLFQVMDILIKTKPLDDPVYQFLDKKRAQGKPYYVYMTAGANKFLRIYYGRVKEYLASLPES

SEQ ID NO: 257823 - protein, 347 aa, unidentified
MRFYTNQHPFYCGIDLHARTMYVCLMNHNGEILLHRNMKAAPEPFLKAMAPYREGLVVAVECIFTWYWLADLCAQEGIACVLGHALSMNAIHGGKAKNDHIDAQKSAGLLRGGMLPQASGYPAPMRATRDLLRRRIHLMRKRAELLAHVQNTNSQYNLPEIGKKIAYKANRAGVAERFADLAVQKSIEVDLALITHYDQLLTDLELAILKAAKHHDANTLYLLQTVPGIGKILSLVLLYEIHDIDRFPRVQDFVSYCRLVKCAKESAGKRLGTAGKKIGNAYLKWAFSEATVLFLRNNPAGQKHLARLEQKHGKGKALTILAHRLARAVYHMLKRQTAFDMEQFLHG

SEQ ID NO: 257824 - protein, 355 aa, unidentified
MYGLKHQKEKRSMDHFAGLDVSVKETSVCIVDDTGKIVREVKVASEPEALLAVLKNLAYRFKRIGLEAGPLSQWLYSAFAEAELPVVCVETRHMQAVLKAQINKTDRNDARGMAQMMRVGLYRPVHVKTLRSQKLRMLLTHRQLLQSKAIAIENDLRGTLRNFGLKVGMVGKVKFEARIKELVENQPDLAELIEPLLIVRRALREQIVVLHRRLLAIVRDDEVCRRLMTTPGVGPVVALTYRASVDVPARFRKSKAVGAVFGLTCSKYQSGEIDRSGRISRCGDEMMRVMLYEAAQSMLRSKKWSWLKAWAMKIARHRGIKKAIVALARRLAVIMHRIWVDGTEFRWTREQAVAA

SEQ ID NO: 257825 - protein, 403 aa, unidentified
MNAVGIDVSKGKSMVAIMRPFGEIVSAPFEIKHTASDIHSLVELINSVEGESRIVMEHTGRYYEVLAHQLSKANLFVSAINPKLIKDFDNDSLRKVKSDKADAVKIARYALDKWQNLKQYNVMDELRNQLKTMNRQFGFYMKHKTAMKNNLIGILDQTYPGVNTYFDSPARSDGSQKWVDFASTYWHVDCVRKMSLNAFIDHYQNWCKRKKYNFSQSKAEEIYGKAKELVPVLPKDEITKLIIKQAIDQLNSASVTVEELRSLMDKTASKLPEYPIVMQMKGVGSSLGPQLMAEIGDVSRFTHKGAITAFAGVDPGVNESGSYEQKSVPTSKRGSSGLRKTLFQIMDVLIKTHPQDDPVYQFLDKKRAQGKPYYVYMTAGANKFLRIYYGRVKEYLSSLPESE

SEQ ID NO: 257826 - protein, 391 aa, unidentified
MTKRKTETVNDLSRCLDPLDMDATLIAVIEMSQSSWLVAGIVPGVERQPLKKLAIDEHALLKLLSRWRAEAEKKGHKITRVTVAFEAGHDGFWLARWLAALGVEAHVIHASSVAVTREHRRAKTDRLDTELLKRGFLGWLRGERGHCKMVAVPTLAEEDAKRPSRERETLVGEASRIITRLKAAFVRLGIRSFNPKLKAAAERLGILRTPEGEPIPPNTLAALKRDLERHQIVKRQIREIEQTRLEHLAQAPAEGPNAMVLLLARVVGIGVETADMLVQEVLSRNMRDRRAVARYAGLTGSPDESGAKRREKGLARSGNARVRRGMIQLAWRFLLFQKDSALAEWYRQRTAKAPSTRKTFVVALARKLLIALWHLARDGVVPEGVRLRPAA

SEQ ID NO: 257827 - protein, 307 aa, unidentified
MFVGIDVAKDRLDVHVRPAGESFVISRDDEGIEELAKRLSAMVPTLVVLEATGGFETVVAAGLAAADLPVAVVNPRQIRDFARATARLAKTDALDAAVIAHFAEAVNPPVRRLADPQQRLLGELMARRRQLIEMMVAEGNRRRLLTARRTLKTVDRVLATLKAQLEEIDHDIDIAVRGTPAWREAEDLLISVPGIGHKIARTLLAEMPELGRLDRRQIAALTGVAPFNRDSGTRRGRRAISGGRIVVRSALYMSVLVAIRRKLPLAQTYHRLRPSGKPAKVAIVACMRKLVTILNAILRDKKPWATA

SEQ ID NO: 257828 - protein, 446 aa, unidentified
MVETQAEFVVGERRCIGLDVHREFAQVAVWQGGLVWQAGRFATTPDGVRAFAEQLGPADEVALEATGNTWAIATVLASRAGRVVVSNPAKTRAIAEAKVKTDKVDAEILAQLLAADYLPAVWRPDPATAALRRQVLRRAHIVRQRTRLKNQVHAILHRNLIPRCPAADLFGHKGRRWLAEQSLPPDERGAAIALLRQLDFHAQELREIDTDLGKVALDRPEVLRLMTVPGIDATVALSIVAAVGDFTRFRTPEKLVAYLGLNPRVRQSGGQPASHGRITKAGPAHARGMLVEAAWSACKAAGPLRAFYQRVAARRGMQVAVVATARKLTVLCWHLIIKGEDYAYAQPSLVAHKRRKLELRAGLPSARGQKGKSAGYSLQAVRAAERDLAAQAETAYRTMVAAWQPTRPATRTTARKKIAARSGVDVAATTGARLPRPSRGDAARQG

SEQ ID NO: 257829 - protein, 426 aa, unidentified
MKYTQNEKILQIKEATLIIGIDVGSEKHYARAFNFRGVEYGKLLIFDNSAEGIAKLKGWTAKIAKSNGFTEVILGMEPTGHYWFNLAENTMKSGMRIVLVNPHHVKKSKELDDNNPTKNDRKDPKTIAMLVKDGRYIEPYIPEGIYKELRSAMDSRWRLVKELSAVRNRISRWICIHYPEFTKVFEDWEGKAALLILNECPTPKKVVEKGIEGIIAIWKKHKIRAVGIKRAVRLFESAKTSIGTSEGLISAENELSMLLEDYESKMRQHERTMALIEEMAMQIPGFEKMLEIKGVGLVVAAGFLAEVGDIFRFSHPKQIQKLSGLSLKENSSGKHKGQTTICKRGRKRLRYYLTFGIMPLLSKNEEFRALHQYYTTRKERPLKKMQSLVALSNKLIRIFYAILTKDIAYDPQKMMSDIKRPEVKAA

SEQ ID NO: 257830 - protein, 358 aa, unidentified
MRMVVYVGIDVHKKYCQAALMNDNEKLERELRFDNTTEGAKSLVNLAKSIDPEIKAVLEPSANFWIRIYDQLEDESVEVKLSNPLRTKAIAEARIKTDRIDAKTLATLLRGDLVAESYVPNHKNRERRAIIRHKASLMHMRVEIKNRIHALLDKHELTHSYSDLFGKEGLEWLRNIQLPTIDHQILQSNIQILETITTEIDNADIQIAKDAVNENQAKLLMSMPGVDYYAAMILLSEIGDVKRFPTPDKLASWVGLTPQVHQSGETNWTGHITRKGSKRARWILGQCAQSARQHDPRMRNFYERIERKHGSSKAIVAVAHKMVTIMHVMLTRNEPYRGQNIQLTEKKHKRLNNIANSA

SEQ ID NO: 257831 - protein, 414 aa, unidentified
MSYKIAGIDVHKRVLMVVVMDASTPEEKPERRRFTTMPSDLHRLSIWLREQGVEEAVMESTAQYWRTVWLELEPYLRLQLAQAFSNRAPRGRKHDFKDAERLVRRLMANELILSFVPDGEQRTWRNMTRMKTQLRRDRVRLQNQMECLLEEMRIKLSIVVSDLLGASGLRILRALAQGETDPKKLALLGDDQLKCSEEQLVDALTGRPQPMHREMLGLQLERLRLIDGQIEKLNGLIAQAMKPHQEAVIRLAEVPGLGVDSAQQVISEVGVQASTFPSAAELTSWVGTCPGKDESAEENHSSRSAKGNKYLRRILNQSAHAAVKKKGSHFQAVFRRLLPRLGYKSAIWAIAHRLCRLIWKILHEGVRYIEQGSESDPKVRERRARTLARALRKLGYDVAITPINPATAEKAMQT

SEQ ID NO: 257832 - protein, 374 aa, unidentified
MSVYVGIDVHRKRSQVAVVAEDGKVQLNRNVVNGVEPVLKLLGGLPAGTPVAFEAAFGWGWLVQLLEDYGFEAHLVHPLRCKAIASARLKNDKVDAAILAQLLRADLLPEAWIAPPQVRQLRALLRHRASLVRVGTQARNRIHAVVADFGYDRAGTYWTGPGRGWLAELDLPPVSRQIVTDCLAVIDALEVTIGGLDGQLRARAKADPRVKTLTALPGVGQFTALVMLAEIGDITRFGSARKLASWAGLTPTVRGSDLSVRHGHISKQGSAWLRWVLNQAAQTAKRSPEFTATYAAIAKRRGKKIATIAISRKLLTRAYHLLAAEAARAPAAAAATSATGTAGGAPADGGGSPGPGHARSSGMSRPPGRARSSD

SEQ ID NO: 257833 - protein, 429 aa, unidentified
MNERTLCFGVDVHREQLVLRAADQATGLERGSLLRVPNNRLGAEQAITWLRQLAAGTDGGSYDRLVGGLEATGLLWLPFHVYLTESAALQPFHLQLVCFNPKLIADFKKGVVLADDKDDARDAWGIVERVRFGRLPTSYVPGAFWQGLRRLTRYRFHLAQMIARESTRFGTHVFLKWSDWQRLAPFSDLLGATSATLLTQYSTADLMALSLPQLTDLIDQLGKRRFSDPQATARKVQQALAQSYPVPPPLEEAIMTVLTVQLDHIHAGEKLIKRLDHDIAHFIQAVPNPLLSVRGLGPIITAGILAEVTDIARFPGDPQLAKYAGLAWRKHASAGFVAQDTRLSKVGNVYLRYYLVQGANLLRQYNLDYQAYYWRKVEETPKHKHKRALVLTARKLTRLVYALLTKNQPFVARRTDDDSPEAVGVPQAA

SEQ ID NO: 257834 - protein, 343 aa, unidentified
MDEYIGLDVSMKETAVSIRRDGVRVWRGKCASDPHVIAELIRKRAPTVKRVVFQTGPLSVWFYHALRAEGLPVICIDARQAKAALDMATNKTDANDADWLAHLAEVGFFREVRVKGFDSMLARTLIAARTRLVHMTTELSNQIRGIMKTFGLVVPAGKGNVFEKNVRDLVSSYHDLAHIVLPLLDAWKGLRARAADLGRQLVADARQSQACRILMSIPGVGAITATSFATAIEEPGNFRKSRSVGAWIGLTTRRYQSGEVDYDGHISRRGDRHLRGLLYEAASVILTRSAKQSSLRTWGLQLRERIGFKRAAVAVARKLAVIMHTMLKTGELFNPTAGVIVAA

SEQ ID NO: 257835 - protein, 318 aa, unidentified
MSDTSVTVGIDVSKSSLDVSILPARICLTVTNDGAGFSELKKTLSLYQVSLVLLESTGGYENAVVCYLQTLGYSVSVINPRQARDFARSMGRLAKTDRIDAELLAQLAKVIDSRPDRDRFVKPLTDEKRRALADMVARRRQLVNLISTERQRKAVSSKYAVGSVDRVISFLRDELKRTDEDIALHVRSYFTDLSSLLVSFKGVGPATVGVLLGEVPELGKLNRRQISALIGVAPFNRDSGCMRGRRAVYGGRASVRNALYMPTLAAVRFNPVIREFYERLVSRGKSRKVAMVACMRRIVCILNAMLRDGSRFGVVMED

SEQ ID NO: 257836 - protein, 366 aa, unidentified
MKKISTVAMERIDIFKQNQLTIGLDLGDRISHYCVIEEAGQVILESKLPTTPKGIEEVFGRIPRSRVALETGTHSPWISRQMIQLGHEVIVAHARNVQMISESSRKDDRLDARTLARLARIDPALLGPVRHRSAKAQIHLTVIRARATLVGARTALVNTARGLTKSYGARLPKCGSEQMGREIAKELSQELRDALDPLLAEIESLNERIAEYDRRIARVAKEVYPQVALLQQVKGVGTLIALTYILTLDDPHRFRHSRDAGCFVGLRPGRRNSGMSEPQMHISKEGDRYLRTLLVQGAHYILGPFGQDSDLRRWGLKLAERGGKNAKKRAVVAVARKLAVLLHRLWVSGEVYEPLRNNHKVESPAA

SEQ ID NO: 257837 - protein, 350 aa, unidentified
MTIIGCDYHPGFQQIAFVDTETGDYGEQRLGHSEGAEKFYRELAAQGKKVRVGMEASGHARWFERLLTELNFELWIGDATEIARKRERKQKTDRQDAQHILQLLMENRFPKIWVPSGENRDLRQLLWHRHRMVQTRTRIMNQLQAVALNEGLRCKKKLWREKGRQQLEAFRLAPWASRRREDLLQLLDRLNPTISDLTQAIEQEVEKCPEARRLRTHPGVGALTALAFVLIIGRAERFQCGKQIAAYLGLVPLEDSSGNRRRLGHITKQGSSILRFLLVEAAQVTARSIPEWRNKYVHLTMRRGRKIAKVAMARRLAIALYWMWRKGWDYEQLRKFGSHAGQPGNRDGVK

SEQ ID NO: 257838 - protein, 348 aa, unidentified
MNFYNPQKLFYCGIDLHARNIYICIMNKAREVLVYRKISNNSTDLFLKILQPYKHDLVVGAETTFAWYWLADFCADNDIDFVLGHALYMKAIHGGKAKNDRIDSKKIALLLQGGMFPLAYVYPKEKRALRDLLRRRLHFVRLRGELFAHVQIVNYQNNNSPLPRLGNNKSIRDDVPELFENETTRKIVESDLDLIKYYDEFIPKLEWHIFSKTTQLYQKELAILSSARGMGRIIALTILFEVDSIDRFPSVQDFASYARVVKCTHESAGKKYGTGGAKIGNPYLKYVFSEAACLMAKYNPGIKIYLQKMERKHGKGKSKIILAHKIARAVYYMLKRNTVFDINKFLNN

SEQ ID NO: 257839 - protein, 310 aa, unidentified
MESIIVGIDVSKDRLDIAMRPSGAAFVVARNARGLEELIARLREVSPHIVALEATGGFETVVAAALAGAKLPVVIVNPAQVRAFAKALGKRAKTDPIDAAVIAHFAEATKPQVRPLPDEATRLLADLVARRRQIIEMIGAEHQREQRMTIPRVKKSISRLLKALEKELASLDDDIDNAVRGSPAWREKENLLASVPGVGPVIARTLISELPELGTLGRKEIAALAGLAPFTRQSGKWRGKSFIGGGRTAVRCALFMGAMVAKQHNPILKAFFERLVAAGKPKMVAIIAVARKLLTMLNAIIRDNRPWQIA

SEQ ID NO: 257840 - protein, 392 aa, unidentified
MPILVSSLVGGKVLVQSLSKLNVRSGRWAAAHLPATASRSSHPRALSPIVAGSDVVSFVQPEQSLGPLYSVSPYMQGRDNTMERFVGIDVAKETFDLCILPEGTIQHRENNPQGIHQTVETLLALNPTLIVMEATGGYEILLAAELQAANLPVAIVNPRRVRDFARARGRMAKTDQIDARIIAEFAATLRPSAQGVLDSQSRNMKALVARRWQLIEIRVAEANRMEHASEKAISQSLQRVLKTLDREIQKIEKQIRDQLAQMPELQSKAQILQSTPGIAETTATMLVTEVPELGRLNRRQIAMLMGVAPINRDSGTFRGKRMTGGGRKEVRTRLFMPTLVAIQHNPVIRVFYERLLKAGKTKMVAIIACMRKLLVILNSLVAKNQSWNPKIA

SEQ ID NO: 257841 - protein, 404 aa, unidentified
MSVHVAPVTSSTIVVAVDVGKTSAMLSVTDCARKRVFGPVEFSMTRSGLVATVHRVEAVVVASAQVKVGVEAAGHYHRPVLDYGWPTGWEVLELNPAHVAEQRRVVGRRRIKTDAIDLEAITDLLLAGRGQLITEREVLIGELSAWAGQRSRRVATRSATKNQLLAQLDRAFPGLTLALPDVLGTKIGRLITAEFADPARLCALGVSRLIRFAAARDIQLRRAVAERLVTAAREALPTRDGVVARRVLAADLGLLADLDTQIETAERELAALLPASPYATLTSVPGWGVVRVSNYAAALGDPDRWPGPRQIYRASGLSPMQYESAGKRRDGTISREGSVALRRALIDLGLGLWLTEPAAKAYAAELKSRGKPGGIIGCALAHRATRIAFAMVRDHTSYDPSRWA

SEQ ID NO: 257842 - protein, 462 aa, unidentified
MRTIGIDLAITGTHKAVVVDGQGNAIGSLIRFRTDPAELETLLRRAQEGTDEDEELRVVMEPTGLAWLPMASYFIQRGVTIYLVNTQQASDLRKFYSKYAHSDRISARVLARMPWVNPDGLHPLSLADADHLSGQRWCKQQEELAQQMTAIKNRVQAWERAFWPGLEEVVGDLFAPWVRRWREQWYDPWQLQSLETGQLAAFLAEAGADPEKAEGLAAGLQTVARQAVALFGTPQGRPSPYVDYAALQDQVLRELYLLACCEAEHRAVRCQVRQLYRQVHPDRQLETLYGVGENGAAVYVFFIGQIERFTSQKKFRGWSGLVPKSSQSGSGEKKGLRITHAGPDLIKKYAYIDAEVARQWDPQMAAIYYDQMVHKGKHHTQAVCCCATHLMDRVRAVLRDGRPYELRDVDGTPVTWQEAQAIIAERYQVPEEVRKRNSKRARKARRDEQAERKRKRRSRPGR

SEQ ID NO: 257843 - protein, 366 aa, unidentified
MAITHVALDDSKRVIVAGILRADATQPELREIPNDPRQVRRLFQRLLQEAPVRACYEAGVSGYDLYRQLTALGVDCAVIAPALTPRKPGERVKTDRRDAAKLVRLFRAGELTAIHVPTEAEEGVRDLTRCRDDVRADVVRWRHRVLKLLARHGRVYQTGKNWSQAHWSWIRAQRFEDGALARTLDASLEALEQALRRRAELDRAIEGLADDPRYREAIGALRCFRGINTLSAMILVAEIVDFQRFRRPRALMGYLGLVPSEYSSGDRHRRGALTKAGNSHARRVLIEAAWHYRHRPALSGRLARHTADQPPAVVTEAWRAQHRLHRRYRHLVGHGKRPTVAVTAVARELAGFVWAALTRSAVDVAA

SEQ ID NO: 257844 - protein, 352 aa, unidentified
MENSSRVASGSVVGMDLGDRSSQICRLDWETGAIQEERRLSMSVSSLQRYFSGLSSCRVILESGTQTPWVRRLLESLGHEVITANASKVQAIASSQQKTDERDARCLAQLGRVDPRLLSPVHPRSAESQQALAVVRAREGLVKARTMLINQVRGTVKSFGARLPGCSAKSFARKVPEALPQALKAALEPLLAVIADLSERVRVFDHDVEAWAQRFPVTQRLRQIRGVGALTALTFVLTLDDPHRFARSRSVGSYLGLVPASRSSGRSTPQLPITRQGDRLLRRLLVQAAHYILGPFGQDSDLRSFGLTLAQRGGKNGKKRAVVAVARKLAVVLHRLWISGEDYQAHRRAVAA

SEQ ID NO: 257845 - protein, 411 aa, unidentified
MQVVHPRCCGLDVHKKILVACLMILGADGRLTKEIRSFGTMTQDIMALSDWLVAAGCTHVAMESTGSYWKPVWNILEGKLELLLVNAQHIKAVPGRKSDVRDCEWIAELLRHGLLRGSFVPDREQRELRELTRYRTSLIDERSAEVNRVQKTLEGGNIKLAAVAKDIMGKSGREILEALVAGSTEAEAMAELARGKLRSKLPELTQALAGQMGAHQRFMLTEQLAHIDDLDQTIARLDAEIEERMRPFEEVITRLDAIPGVGRRTAQVIIAEVGTDMGRFPTAEHLASWAGMCPGNNERAGKRKTGKTRKGDSALRRALIEAAHAAGRKRNSYLRAQYQRLAARRGKKKAAVAVGHSILVIAYHLIANKESFYQDLGAHYFDERDRQRLERRLVHRLEALGYTVSLQPVAA

SEQ ID NO: 257846 - protein, 408 aa, unidentified
MTATNQFAAHVGLDWADKKHDVCVQFKNGERTFHVIEHTPEALDVWLTELHQKVKGRIAIAVELKKGPVVYALQKYPFITVFPVHALSLARYRQAFSPSGAKDDPQDAELALELMLRYPQKIKAIEPDNADIWLLQQLVEQRRQLVADKRRFVNRIINTLKQYYPQPLEWFSHRGSLLLCELIIRWPSLQQLKRARRDTIRNFLNAKGGRAMALTEQRVASIDNAILLTTDPSVIEANALMATALATQFKVVSEIIKTYDERIEALFDTLPDAELFKSLPGMGPRMLAALGDNRDRFNSAEEIQNYAGIAPVTERSGQKTWVHRRWQCTKFVRQTFVEWAAKTVNSSYWARLYYQGLREKGKSHQSAIRALAFKWIRIIYRCWKTRTQYDEAKYLLALEASHSPLLKP

SEQ ID NO: 257847 - protein, 460 aa, unidentified
MKVRLGVDIACRAAHRAACADETGRIMWSGHRFHTCPEELEALWRRLPADAAEVMVVMEPTRNAWVPLAAWFRRRGATVVMVPAEQSSDLRAYYTKHTKTDRLDAELLARLPVLHPDGLHPQAADGPGDPLKRAVKIRSGLVHRRTTCMQRLDALLEILGPDWVAALGSDMTQTSFKFLAAWANPHQVKRMGRARLARWFQRETRKAWGDRRADAVVSAAEASLALWGSDGLDYEALAADIAVEANIALELTRQIARLDERIFDLYHEADPDHIVLSAPGVGKILSAQIRGRLGDPHRFTSLAAVRSFSGLVPRQNSSGLTQSSGGPVKQGDACLREALFMAADHARKIDPQLAARYRRLMCDTGRHHSSAVCTIATVLLTRIAACLRNGTPYHLRDVDGRSISAAEGRSIVSERYQIPPEIRAVRRTISNARSRQRGWDERTKKGVAERSKVAPVPQPA

SEQ ID NO: 257848 - protein, 381 aa, unidentified
MTTTATHPEYGNTAAGILFMAFELSDKTWKLGFTTGPGQKPRERNVAARNQERVLEEIASAKRRLGLPETAPVVSCYEAGRDGFWLHRFLLAHGITNHVVDSSAIEVSRRQRRAKSDGLDVRKLLSMLMRYHHGEQKVWQVVKVPSVEAEDQRHLHRDLETLKRERGSTTTRIKGLLSSQGLQVQSLSKLPEQLDAMRLWDGSPIPPGLRQRVLRVYAHYTFLSEQIAEVEAERRSLLQTSPDASIDKVRQLMMLKGIGINGSRLLVMEFFGWRECKNRREVGGLAGFTPTPYQSGESAREQGITKSGNRHVRWMTTELAWSWLRFQPDSALSIWFRERFGNGGKRLRRIGIVAVARKLLIALWRFLETGVLPEGAVLKEG

SEQ ID NO: 257849 - protein, 353 aa, unidentified
MVIGDQARKEASVEKVSIIGLDLAKNSIQLHAADGNGAVLVRKKLPRNKVLPYLTALDPCIVAMEACASAHYWGREIEKLGHQVRLIAPIYVKPFVKRQKNDAADAEAICEAALRPTMRFVAVKSEAKQASAMIFKVRDLLIRQKTQMINALRGHMMEFGILAATGPAHVQGLIERLEDPTSDLPDVARLTCRPLTGILKALKEQIKLIDLEIARRAKTDDVAKRLMTIPGIGPVIATAIEALAPPHDSFDKGRDFSAWLGLTPRQNSTGGKTRLGGTSKMGQRDLRRLLIIGAASVVRWAVRYGAPAGSWLSRMLGKKHPMLITVALANRIARIAWALITKGGVYVPAGAPV

SEQ ID NO: 257850 - protein, 393 aa, unidentified
MPRKRILVKSIDTLISYQVIGIDLAKHLVSACLITGAGEIFGIDRLTYDDLLKSAERMSPTLFCMEPCPEVHYLAEKLQGYGHHTKVIDGAAVKEYIKTHFGGQKTDLNDAQAIAFLSLDTNLPEITPKNTSNSVLSSIQAVREQFRKEYIQSFVSLKGICQRWGLPISKGVMNKNKVEELVSESKKIPQEVKDWLLELLQSCRELQKRLNKISKYLKEYADNDEICQKIMSVPGIGPITATRLKATIGDIQRFEKPKSIVAYYGLVPKSKATGHNEKKGGITRRGDRVARSLLIEGAGVVLNLAAKGFLRSKPLNKWIEKKRKLKMPWGKLCCALAAKMLRIVRAILIQGTSFNAKIAGVARCSLPKESRNNVMGNNKLSEIPSPNGSVYIH

SEQ ID NO: 257851 - protein, 456 aa, unidentified
MAKIRSWVGLDVHAAKVVACVVDAESGEMTLHRLSGETAEVVAFCAGLPAPARAAYEAGPTGYGLARALVAARVGCVVAAPGKIERAAQDKVKTDARDAERLVRLLMINALHAVSVPTPEQEALRDLVRAREDIRVDLMRARQRLSKLLLRHDVRYDDTTSRWGERHRHWLAKVDLGQSGAQATLADYVGAVEALELRRGTLEAAIAALVPETPCALAVARLRCLRGIDTLSAVGLAVEIGDFERFQRPGQLIAYVGLVPSEHSTGQTRRQGHITKSGSQHARRLLVEAAWHYRRAPRLGTTLQRRQQDQSHVVVAIAWKAQQRLHHLWRRLDSQRHMRRTIVAVAVARHLAGFCWAIVNHDEHQELADQPPRRSGPPRARQRRQVADAGLLSSASRSACGRPPGDSSAGHPLNGTQVGPGGPTTGKAVAASNTSHAARRQPVRARRSQPPRSTAR

SEQ ID NO: 257852 - protein, 460 aa, unidentified
MNQFYLGIDASKGYSDFVMLNAKKQPVIENFQLDDTFQGHARLYERLGSFHQDHPEATIYAAVESTGGYENNWFQALLKFQGSLPIKTAHLNPLGVNYNHKADLKRNVTDKISAQNVAEYMIAHPEKVSYQHQDSLASLRKQWGFITMLTKQSTQLLNQLESLVYNANPEILMYCKDGTPQWVLKLLTRYPTALRLSKAKAKSVARIPYVSKERAQQLVATAKKSVASADDEVTEQLIVATVKQILDLSNTIKAQTKILADKCAVPEVELLKTFIGISDYSAIGLMLEIQSVQRFLSSKKIASFFGIHPAYKKSGDGIWKYRMSKKGRKEPRRILFMVAMSAIKSNPLIRSIYQQAEKRGMKKKAAVGLCMHKILRIIYGMLKHNKAFDPEIDRKNRQKKPLRQRRVRQDKDRRYQDFDSKAPISRRQKMKRKERKQSQNVNNVEYGINEASVPVTELAN

SEQ ID NO: 257853 - protein, 314 aa, unidentified
MSIQESKVYVGVDVASKHLDLFFPDTRKHERIANDAEQVKSLCTRLKSNSQYMVVMEASGGYESILCTQLGNHAISYAVVNARRVREFARSMGADAKTDEIDARVISQFASVLKPIATEAQSDEERRHSALVTRRSQLVDLITQERNRLKQTWDAYAKKSVQKTLKHLEKELAAIDKLLVKMLKSDTKNKRKIEILQSAKGIGNVSTSVLLAHLPELGKLNREQIAKLVGVAPMNRDSGGTTGKRFIMGGRGNVRAILYMSTLVAIRHNAKIRAYYTHLKAQNKESKVAIVACMRKFITILNYLIKTDQVWTTQ

SEQ ID NO: 257854 - protein, 340 aa, unidentified
MEIATIGLDIAKHVFQVHAVDAVGAVVIRKRYSRAQLIALFEEIPPCLVGIEACGTAHYWGRRLEALGHEVRLMPAHYVKPYVKRGKNDAADAEGICEAVTRPTMRFVPIKTPDTQALALMHRLRTQFVGQRTGMLNALRAGMAEFGIVTNQGLGGATEILRIASAGDDRLPELIRDPYRLLADAIRAVESRLATLDHQIAASTQFDDTCKRLSTIPGVGPVTSTTIIALAGDVSRFPSGRDFAAWLGLTPRQNSTGGKARLGRITKAGDQTLRTLLVLGAFSVIKRARVAPEKASPWLMALMERRPPLVAAVALANKTARIIWAILTRGGTFRAQAMAS

SEQ ID NO: 257855 - protein, 403 aa, unidentified
MKIYVGVDWGSAQHAVCVLNDQGHRLAQFLIDHDQAGLRQLCERLQKIAEPQQLLLAIERPSGLLVDTLLEAGYCVVPIHPNIVNATRPRYSVACGKTDRSDAYLLADLLRTDAHRFRTLTPQCDELKALRARVRTRDDLMGTRLVLANQLRALLESFWPGAAGIFADIDSPIALAFLARYPTPQAAAHLGQKRLASFLAQHHYCGRRSVLELLARLRSAPEGHCGALECEAKGDLVQALAGVLRSLLEQLRQLSARIEHEVAQMADGQLLMSFPRIGRINAAQLLCELGCVRERFPSDAALACEAGVSPVTRQSGKSHAVVFRWACNKRLRVALTTFADNSRHASSWAASVYSRARARGIDHPHAIRVLARAWVRVLWRTWTNHEPYDPAKHRAATPLLVAA

SEQ ID NO: 257856 - protein, 351 aa, unidentified
MKIVPVFYIYAFLLTFCCLFSISIKVKQTNMETVEFAQVVSRGCGLDVHKKTVVATIDGEGLKRETREYGTFTNSLTELKDWLLENGITHVAMESTGVYWKPVYNVLEPSGIMVWIVNARHVKNVPGHKTDKKDSAWICKLLLAGLLKPSYIPPKEQRELRDLTRYRRQLIQDIASNKNRIIRILEDCNVKISSVLSNTSGVTATKLIEKICDGKSITMEDIDAVYHKKIEATKEELWEACNGIISDHHIYMLQTIRENNRHIERLINELNQQIKKVLSPYDNALERLREIPGLSRKTVEDLIAEIGLDMNVFPTEHHLASWVGVSPGNNESAGKKKVDELRMETSKPNLH

SEQ ID NO: 257857 - protein, 429 aa, unidentified
MNNVDSIRLEQFRQIRKEIRGSIEYLIVGIDVGKDKNYAFYGTATGKTLLKRLIFENSIAGFEKLLIQEDSLKVRYGFEKVIYGLEPTGNYHKPLGEHLIKCSRNVVLVSGSAVKNNRKMMDGRWDKHDTKDAAVIADLISQGKFLFYEYASMPLRDLRNLLSLKRRLKKQEHSQKVRIKNNLLAQYFPELDRYYKNWGKEGLAIVRWCLDPSVIAGLEYDEFTRRVAPNGRGGIPQQERLRAIWKKAIESIGCMVGESLDVEAKLMVEGLQYIRDAISYVEEKIEEICLDLPEYHYILSIPGFGPDISSKVVGAIGYPFRFDNGRQVLKMAGMDLSAKRSGKNSDHVTPKLSKSGKSDLRYALYQAALIASSKNRDFVRYYTEKLRGREREKGIKIKMRVKLAAKLLIIAWTLMKKQEYFDPGYLSIE

SEQ ID NO: 257858 - protein, 364 aa, unidentified
MLYVGIDQHRKQLTVSVRDESGSVLIRRQVSTEWQKVRTFFNELCEMAESHGGYLAVVEICGFNHWLLKLLPEHGCAETIVVQPGEQSSHKTDRRDASGLSEILWINRDRVMQGLPIRGLRRIQMPGAAEQGDRRLTSLRHDVGRELTRAINRVKAILRRHNLEQECPTKGIQTQRARKWLDRLPLSPVERAELSHQLARQDLLRRQHTQLQLEIALRYEINPAARLISTIPGAAAYSALGLACRVGDIRRFKHPRSLANYWGLTPGSRNSGEATQRLGSITKQGSALARFLLGQLVLHVLRDDVWMRTWFRAIKRRRGSKIARVAVMRRLATIIWHILSKNEAYVCGGPPRTRLPRPVSAARN

SEQ ID NO: 257859 - protein, 340 aa, unidentified
MGDATIIGIDLAKRSFQLHGARADGSVAFRRKLSRGKVLGFVASQPRCVVAMEACGSSHYWGREIGKLGHEVKLVPPLYVKPFVKRQKNDATDAEAICEAASRPTMRFVAVKTQAQQSRGMLFRTRDLLVRQRTQTINALRGHFAEFGVVAPRGPAHVERLAEAIEDADSGLPGPVRELGALLLVQVAELDEKIGELEKELRARAREDEQTVRLMSIPGIGPLCAMAIQAFAPPMESFRRGRDFAAWLGLVPRQSSTGGKSKLGKISKMGQRDLRRLLVSGAMATVAWTVRRGTKDPWLARMLARKPRMLVAVALANRMARIAWALLTKNEHYRSPAVTA

SEQ ID NO: 257860 - protein, 360 aa, unidentified
MNDNRVHVIGIDLGKNWFHLVAIDERGTELFRKKLNRRQLAEFADTAPQCLIAMEACPGSQFWGRRFQAAGHELRIIPAQFVKPYLKSNKNNFNDAQAIAKAASRGSMRCVPLKTTDQIELQALRRVRQRFIVERSAVVNQIRALLLEHGIVIPVGRALFARRLPAVLADAESGLSPRLCQLIARLRQRWLALDEEIDTASTEITQIARESELCRRVSTVPGVGPVVSTALIAAVGNGTAFKRARDMSAWLGLVPKQYSTGGKSNLGGISEHGNAYLRMMVIQGARALMIHMKRDQSRMGLWLREVEQRSHPHVALIALANKIVRICWKALTSQQPYRPWKYPQPPEQPRARPSCFASPE

SEQ ID NO: 257861 - protein, 473 aa, unidentified
MARKKGKDPAGTGGLELTGEPVEVSDEPAEVIARAAAIDVAKGSGMVCTRVPHESGPRRRVQRVWQVSARYSEIAALMAELAKLGIQRLVLESTSDYWRIWYYLAEAAGLEVWLVNARDAKHLPGRPKTDKLDCVWLCKLNERGMLRRSFVPPEAVRDLRALTRLRSRLAQDQARHQSRIEKILEDALLKISSVISDLMGASGRRFLAALVAGERAPDKLAALGDRRLKASPAQLEEALAGRFRDIHALEIGMLLELIDDITAKMARLDAEITARLARIPGIAPACAGCGEIGGGHAPSCPQAGAPVLSVIERLDELTGIGIDAAQVIVAELGTDKTTFPTPGHAAAWAKLASRTIQSGSTSKDGRTGKGNPYLRAVLGRAAMTAAKTDTYLGERYRRIARRRGKQKAIVAVSRTICEIAWMIITDPSVRFSELGPDYYARLDAGRQTRNKIRELERLNPGMKVTLTPAATAA

SEQ ID NO: 257862 - protein, 314 aa, unidentified
MNRVIGIDVSKKTFDVSCSRDERAVFGNDTPGVAAFIATLEPSDHVVMEATGTYFLKLATRVHDAGFTVTVVNPAVITYFARMRLARAKTDRADADIIRQYGERADLPQWAPTDGIFIELNQLDSHLNGLQRDRNAVIGRLEALQQCETISDLVAEDLQSQLDDLVERIKRCEKALVRQTERHFPELISLLRSIQGIGKRTAVMFIVLTRGFTRFESAKSFVAYLGLSSFIKTSGTSVRGSGAISKMGNPRMRQLLYMAALTAKRRNLACQAFAQRLTDNGKPPKVVRIAVANKLIRQAFAVCSKQQPYSECYA

SEQ ID NO: 257863 - protein, 436 aa, unidentified
MTLINFVAANQKYYAFNLLSVFIMVFWSVQYLLQHLLVQTQVSHQLLQPLILILQLPQTPQFRHARPGKFFLPVNGMDYFLPLRLTVRNVLTRRITMNIVFLGIDLAKNVFQLCGLNQAGKPVYTKRTGRKELLQTLANIPACLIGIEASTGAFYWQREFEKLGHKVKVISPQYVRPFVRGQKNDGNDAQAIAVALMQPTMQFVPPKSPEQQDIQALHRARQRIVNHRTATVCQIRGLLLDRGIPIGSAVSRARRAIPLILEDAENGLSSRMRRTIAELYDLFNDLGRRIHFFDKEIETVFRQSEACPHIAKVKGIGPKTATAVVAAIGKGTEFKNGRHFAAWLGLVPRQHSSGDRQVLMNMTKKGDKHLRTLFIHGARAVVRVATNNNDGHMNQWVNQLKERRGFNKTTVAVANKNARIIWSMLRNDTGYQVVCN

SEQ ID NO: 257864 - protein, 351 aa, unidentified
MPHKSTVHAVTAIGIDMGKNTLHMIGLDLRGAIVLREKVLRGRIASRLANLQPCLIGIEAGMATHYVARELAALGHDVKQVPPTYAKPFRQGHKNDFRDAHAVAEAVQRPTTRFVPAKTNEQLDLQALHRVRSRLVSERTAVINQIRGFLLERGIIVRQGLRFLRQQLPDILAKRTDVLSPRMVRIVADLAGDWRQLDERIETVTDEIETLAKSDDNCRRVMTVPGIGPIISSAMVAAIGNGAAFGRGRDYSAWLGLVPKQMSTGDRTILGRISKRGNGYLRTLFMQAARVILLRPANWPKHGFGAWLIRAAQRLHPNVLAAALANKLARIAWTVLAQERSYEARVTKAAA

SEQ ID NO: 257865 - protein, 348 aa, unidentified
MAVYIGVDFHARQQTISYLTTEAGEIRQLELLHEDPAKVRAFYEQFAGQRVIVGFESSGYAAWFEELLEELGCEIWIGHATYIRQFAKRRQKNDRRDADLILELLLSGDFPRIHRYSRSTRQMLQQLRYRQRLVKMRTMVVNMLLFMASSRGHSFRTQLQSKRGQARLGQLPLPEPLAQQRDELLSLLAQLDQKITTIERWLEQQTAEDVAVQRLRTHPGIGLLTSICVRYTLEDVGRFATTRKVSAFAGFDPMEDRSDERRRMGAISKQGSRWLRFFLVEAGQVAMRRDADLGHVYQRISRRGGHAKAKVAVARRLLVRAFIMLRDEIDYAEFLRRGVAARSSRGSA

SEQ ID NO: 257866 - protein, 396 aa, unidentified
MEVVAESVAGIDVHQKEITVTVLIGSAESAKPKKVHARFQTVTFDLKACGAWLKQQDVKQVLMESTGQYWRPVWQILEPFGFNMILCNPRIIKNIPGKKTDQKDSEWLSELARYGLVSASYVPPRQIQELRESTRLSKSITQQMTRLKNQVHDILQRSNIKLTTYVSDIFSGSGRRILALLENGEVINLASIEQVGTGKRGYRLKATPKQILASLDGALSYNDRFLMAMNMNLLASYQRELINLESRIYGQLEAFSELYHRLQAIPGVGEGTAQIIIAEIGSDVSPFPDAHHLASWAGLCPGSYESAGKKHGAHTLHGNKYLKTAMITAAMAAKSTKQTGLRDFYWRLCSRMGKQKANVALAHKLLRIIYVMIQTGATYQEYKKSQRTEDTLTPKI

SEQ ID NO: 257867 - protein, 418 aa, unidentified
MKIVFPTCCGVDVHKSFLVATIIKTPQDSLQPSYQKKRFSTFNSDLNRFADWLHENDCLDVCMESTGKYWVPVFNILEKRGIRVTIANPKWVKAVKGNKDDTKDSKWIGDLFRIGLVKSSFIPAKDIRILRELTRYRYKLTSMKSSEKNRFQNAFTVCNVALDSVVSDMFGKSATAITDYLTSDENFDAKHCISLLHHSLKKKADDVFQAIEGYEMTAEQKTRIGIVRDHLHYIDALIERVDSCINTMVDKYEGYIALLCTTPGIDRSSAITILSEIGIDMTQFNSSKRLCCWAGLTPGNNESAGKKKSVRISRAGVYLKPVLVQAAHAAVKDKLNPYYALKYERIAKRRGKKRAIVAIARMILTAIYSMLSTGEIWNPVDLFKVDMPEHLKEQQLQKAMKQAVRFLKAQGLTVLDSA

SEQ ID NO: 257868 - protein, 340 aa, unidentified
MEKRYIGIDLHRNRFTCCIRLENERTYLTEWELEDLGKFVKKLRPGDEVAVEITGNTRMFFDAVAPHVARVAAVNTSQFRVIRQSVKKTDPNDARTLALYLSKNMLPEVRMKDKELGQLASLTQTRDTLVKLRTALKNKINNILSARGLNLPKEALSSEKKLAEVLELPFDEIVRIELRVIVEQIRSLNKSVAELEKTIGEAGSKLEGHQGLTSIKGIGKTTGAILPSVIGDVNDFADEGHLASYFGIVPRVSNSNETEHSGRIHKRGTKLGRTALVQSALIAAKYSPYLKRFYEQVKARRGAGKSIIALARKFLGIIYRTLKNKWVFEDFPNFVLSEQP

SEQ ID NO: 257869 - protein, 360 aa, unidentified
MTSMATTAVFVTGGVDTHGHTHHAAVLDCMGRQLGDREFPTSPAGYRALLQWMSGHGVLDRVGVEGTGTYGVGLARHLREAGVHVVEVDRPDRRARRAQGKSDPLDAYSAARAALSGRASVVPKVRDGKVEAIRAIRVARSSAVKARTQATNQLKALIVTGSPGFRQQLRHRSTPLIIAHCARLRPSPDLGDPEQATKTALRRLARRHQQLTEEITEADRELHQLVRDVAPALLDLPGVGSEVAGQVLISIGDNADRLKSEAAFAHLCGAAPIPASSGRTHRHRLNRGGDRSANNALYVVVLGRMRHGPRTRAYVERRTHEGLAKPEIIRCLKRYVAREIYHTLKLATPTKKPEQLLARP

SEQ ID NO: 257870 - protein, 415 aa, unidentified
MTCRSDTGGGTLFFVGVDWAEKHHDICVMDEAGTTLESFRIEHGVKGIERLHAAIADRSEEPGEVVVGIETDRGLLVAALIAARYEIFAINPLSVNRYRDRHSNSGAKSDPGDAKVLADLVRTDRHNHRHVAGDTELAQEVKILARAHQSFIWDRQRQVNRLRSTLREFYPQALEAFGTDLAAREAVAVLSVAPTPELGKRLSRSKIAGALRRGGRSRRIEASAVKIQQALRAPQPQASAGLSAAFGTVVASLVEQIGSLNARITALGAELQEHFESHPDAEILTSLPGLGVVLGARVLGEFGDDRTRFKDARARKNYAGTSPITKASGTRRVVLARFARNEHLFDACYRWAFCSLTASPGARAHYDRQRAKGKTNSQALRTLANRLVGILDGCLRHRQTYREDVAWEQSLDVAA

SEQ ID NO: 257871 - protein, 337 aa, unidentified
MFVLGLDVGKSELYACLLQVHGPGSLTLIGVIKAVANTVKGHAQLLAWLTKSVAVREDLSVVMESTSVYWERGAMTLHDAGDGVSVVNAAQIKFFAKSTLRRGKTDKLDAALIARYGAVMQPARWLPPEAELIKLRTLLHARDTIVELLTLEAGRHHAMDHQHQPHPRAIGFCEARQKLLEQQLEEVNGAVKALVLGSEKIQEQVTLLASIPGIGPLTASILLVESMHLSRMESSNQWAAYAGLSPVPRQSGSFTGRTRISKIGNGRLRRAFYLCVLTASRMKNTFGGFYRHLIVQGKPKKVALIALARKLLRVASAVLKSGQEFNPDDRRQPPVAA

SEQ ID NO: 257872 - protein, 369 aa, unidentified
MMDTTLFVGLDVHKKTISVAMVEAAAGAQVRFYGTIANTPDAVRVLCKKLSKEGQQLQFCYEAGPCGYGVHRLLCRLGHCCEVVAPALIPRKAGDKVKTDRRDAMMLAQTLRAGQLTAVWVPDEAHEAMRDLVRLRAQAMRDLRKARQQLLSFLLRHGLTSPYGHWTKMHRRWLGELSFAHPAQHLAHEEMLQRIERAEALCDRLKRAILELVPQWSLAPVVQAIQALRGVSLIVAAVIVAEVGCFGRFDSPRSLMAYLGLNPSEHSSGAIIRRGSITKTGNALARTCLIEAAWTYRFPARVTQIIRDRLKGLAEPIRNVAWKAQVRLSARYRKLIAAGKAAPKVAVAIARELVGFIWAIARMVEPKFA

SEQ ID NO: 257873 - protein, 350 aa, unidentified
MIIGVDYHPSFQTIAFLMEETGECGEQELHHSDGQADKFYRDLKQRGICVRVGMEATGYSRWFERLLAELGFELWIGDPAEIKAKRIKKQKTDRNDARLLRRLMLENNFPQIWVPSPENRDLRQLLWHRHRLVQMRTRIMNQLQALAMNEGYRWKKKLFREQGRAQLEKLTLAPWASRRRRELLELLDRMNPTIEELTAAVEREARKRPEVQRLMTHPGVGPLTALAFVLIIGTWERFPRGKQIGTYVGMIPSEDSSAGKQRLGHISKQGNSLLRFLLVEAAQAAARVHPGWRRRYIHLAMRRHKSIAKVAMGRRLAVRLYWMWRNGCEYSPSLEFGSYAGQLGTGHGGR

SEQ ID NO: 257874 - protein, 380 aa, unidentified
MRRASTERRGPGPSHVLLTPDHAGNVVGIDPHKRTLTAAVVDARGGIVASEHFRVSGDGHRALEAWARQFGPIARWGIENATGWGRHTAVFLSRRDQDVRDVCPNRTPRSDRARQRGKSDTLDAERIARETLAHPLLPKAFKRAAGDQTGPDEQTELLTLWHRTRRSILTSRQHLLNEAEFLLCELPLELRDQLPDTKAVRPRLAALAGQRRRHWDAATGLRLRLLADYRQRIAALDRDEQEVCRELAALVQASDSTLDQLCGLATRSVAELLAEIGDPRRFTTPGFARFNGSAPIPASTAEGPGEPVRHRYNPGGNRRVNAILHRMAVTQLRCEPRAQAIYANARARGHTKKEARRILKRHLSDVIHRHMLRDLAPQPS

SEQ ID NO: 257875 - protein, 437 aa, unidentified
MAKKGKKNKSTPDNLPILHPHAAGIDVGAEEHWVCVPADRDAQPIQTLSAFPCDLHRLADWLTTCRVTTVAMESTGVYWIPLFQMLEARGFEVALVNARHVTNVPGRPKTDRFDCRWRQKLHTYGLVAPSFRPPEDICRLRSLLRHRDNLIQMTVKPIQHMHKSLDQMNLHLHHVMSDVTGVTGMRILRAIVAGERDPKLLATYRDSRLKSTQDTMTKALEGDYRPEHVFTLTQSLALYDFTQQHIADCDQEIERVLSTFDSLVDPEEHPLPPPTTAHRRPQRNEPAFDLRTHLSRITGVDLTHVPGLQAPTIPIVLAEVGLNRHQWPTDKHFASWLGLCPDNQISGGKVLSTGSRRVQNRARRAWRMAAQSLRTSPSSLGAFHRRMRSKLGPAKATTATAHKLAKILYHMLKEKAPYRARSAEDYLHKDHERQLRQ

SEQ ID NO: 257876 - protein, 386 aa, unidentified
MVFVGIDVAKDKHELYAVDSDGVVLCDHLTFANSAVGFASLLERVSAWGKIKVGIEATGHYSSNLLSFLKAHDFEVVVFNPLSVSRLRSANSLRRTKTDKNDSRYIARLLMTGNANPYQSQSYDISVLKSLTRARFRLFQEIQPLKNRFRRLLHILFPELQGFFSNLYGNTSLNLLSALPSAKDIAECNILKLTKILSVSSRGKLKRSRAEQLKSLAKSSIAAYNYGDAFELKQTVQRILFLSSQMSEIEKEIDSVMAELNSPITSIPGIGNLLGATILSEIGDIKNFNNPDKLLAFAGCEPSTYQSGKYTASNTPMVKHGSRYLRRALYCAADMAYVNSISFRTYIDRKRAQGKHYYVAMSHGMKKLVRIIFAVLSRNIPFSEPA

SEQ ID NO: 257877 - protein, 460 aa, unidentified
MRTIGLDLAISGTHKAVIADEQAHIISPVIRLNTDPDDLDGLVRRAREGAEPDEPLRVVMEPTGSMWRPVASYFIQRDATVHLVKTQQVADLREYYSKHSKSDRISAEVLVRLPWVDPESLRPLHLVGADLLTGQRWCRQQKELADLITAVKNRVQAWERAFWPGLEAVVDDLWAPWMRLWREEWYDPWQLQDADTTQLATFLAEAGADPQRADQFAAGLQDVARRAVGLFGTPQGNRSSYVDYATLQEQVLRELRVMALYEAEHDAVEQKKHKLYRQLHPSGHPESLRGVGVGGAAVYYFFIGDASRFALQKQFRGWHGLVPKSDQSGDAEKKGLGVTKAGPALVKYYAYVNADVARQWDPQIAKIYYDQMVNKGKPHSQAVCRCATHLLDRVRAVLRDDRPYELRDVDGSPVTWEEARAIILKRYQVPDEVRERTSTRARKARRERRAERKRRSRLGR

SEQ ID NO: 257878 - protein, 499 aa, unidentified
MKTTKAKRSQHLSKSVSPASALSAGKRQRRGKKAAAVLDNLEQINLHAAGIDVGAAENFVCVPSLSVKPGQPNVRSSGVFSQEQDDLVEWLKDCGVTSVAMEATGIYWMSLYDKLEAAGLEVLLVDPHSVRHVPGRKSDVLDCQWLQQLHTYGLLRGAFRPEAAVRRLRALSRHRADLVAEGGSHLQQAQKALVQMNVQLPLVVSDINGETGLRIIDAILEGERNAQVLVKLRDPRIKKSTVAEMEAALSGHYSEELLFVLRQNIEAWRFYQKQMEGCDQQIEAALKAMESANKAAVPPVPPKPVPPAPAGSPGAKPKRQRPLHGNNAPKVDFSEQIRRICGVDLMQVCGLNLLSVLMLIAEIGVDMSQWRNAKAFSSWLGLCPGTKISGGKTLSRRSRHVVNRASVILRLAALAAGQTDTWIGRFYRRKRAHLGAPKALTATAHKLACVIYHMLKYQEEFVPLDVLVYEFKAQERRMRHLRKQAEELGCELIEKQQAA

SEQ ID NO: 257879 - protein, 432 aa, unidentified
MNELDVGSGLPFSSNISQGCVPSFQRHSFCNSSPKKVNTMFFVGIDIAKNSHEAAVIDGSGKIVVKPFKFPNSIGGFEKFLAAVKGVSEDLSQFEFGMEATGHYWLNLYTKLMDFNVVVHVINPVQSDALRGLYIRKTKNDAKDAFIIAELIRFGRYSETTLSDSDLLSLRELTRQRFYLVDCVSDAKRKAISFIDKIFPEYQTLFSDTFGATSVELLQTYTSPDVIAELDTELFTHFLKSVSHGRFGKSKAEEIQSVAKNTFGSFLFADSATLAIRQFIQQIKLLEEQIAEIEDFISEKFASFDCKLDTIVGVGTTLAASFLAEIGDITRFESPDKLAAFAGIDPSVKQSGEFNGTRNKMSKRGSPYLRRTFWLAAISGIRFNPALKSIYDKKCAQGKHHAVAVSAVMHKLCNIVFAMLKTNEPYKIILPE

SEQ ID NO: 257880 - protein, 338 aa, unidentified
MNYMGIDHHKQYSHLTLLDNGGKQVKSGRVWNTEREVRGFLEGKEGETRAVIEAGRTSYVMVDLMKDLGVDIRMAHASEVKAIAKAKIKTDKRDSKILADLLRADLIPEVYLRSQANRVAQRVLRHRAFYVGMRTRVKNKIRVLFAQQSLEAQEASRIESFFSRKGLEVLKGLEMPSFDRDLLDNLLSLYQHLEERIKESDGLVEQLYEQLREAQLIRTIPGFGPFLSVLAAVEIADINRFKSVSKLHAYAGVIPSTHSSGARTYHGKIIKAGNVWLRWAAVEAVYPACVGDFDIRLFYQRKARRKAANIAKVATARRLLTIIYRVLREQREYILYKR

SEQ ID NO: 257881 - protein, 346 aa, unidentified
MLYAGLDLSRKRLDFHLLDGEGATVEVGAAPPDVDGLRRLTQRLEWHGAPIRAAIESMNGTRFVHDRLELAGWQVEIADAQKVKGLAPLACKTDRIDAWVLAELSRRDLVPAIWLPDPLVRAERERARWRLHLVRHRSSLKQRVHAVLLTHGKPCPVSDLFGVRGRQLLARLGLPEPWQATIDASLRLIDELDREISECERELRRLGADHRYVPLLCTVPGISWVLAYTIAAELGDINRFPTPRKLAGYSGLCPRVYQSGERDLRGPLSKQGPRYLRWALVEAATHACTHPLYRERYQQTKARIGKQRGAKVAQVDLARRLSEAIWHMLSRGEAFAPKGATDPLAA

SEQ ID NO: 257882 - protein, 358 aa, unidentified
MESQEVKYVGVDCGKKSIEVVRINSENSLERRQFSTTESGINNLLQWLTLNDIVGLEAGSQSFRIAKSILNKGVQVIVLNPGNLATIYQSLKKTDKEDSLKIARLIQRFPIEELPVVPIPNDEEEDNRRLCTEQENWTRQLTQSKNRLHSLFTQAGLTHITKKHLRTKANREISVALLPSRYQKEAERILKVLDLVEQNLKTHRKRNSRSSQKNQSLMFRRSCLCLELEMITSLAIMSYMGDCKRFSSAKQAAYYAGLVPRVDISGDTVRYGRIINRGCHSIRRVIVQAAWSLVRCQHGGKVKEFYQRLYLKKGAKKSIIATSRKMIEVLYVMIRTGKLFDSMPENILNRKLAQYGLM

SEQ ID NO: 257883 - protein, 337 aa, unidentified
MDIKVIGLDLAKNVFQVHGVDGSGRALLRRQLKRREVCGFFAKLQPVLVGMEACGGAHYWAREIAKLGHMVKVMNPRYVKPFVKTNKNDRTDAEAIAEAASRRNVPEVAVKQAWQQDLQSLHRVRSQLIRERVGLGNQMRGLLSEYGIVLGKGATALKRALPQVLEDAQNGLSGVMREVLAEQCERLRTLEHKIAEYQRKLTIAAREHEGCSALMEVPGIGVLGATALVAQVNDARSLKNGRELAAREGLVPMHSGSGGRERLGHISKRGDGYVRTLFIHGARAVLNHAPRKTDRLSRWATEVMRRRGRNVAAVALANKMARIAWVILARGQRYQPQ

SEQ ID NO: 257884 - protein, 416 aa, unidentified
MHIVDARCCGVDVHKRTITACVLLQEASGQGQQEIRRFGTMTRDLLELADWLQDQQVTHVAMESTGVYWKPVWNILEGQFATVLVNAQHIKAVPERKTDTRDCQWIAELLQHGLLRGSFVPPTPIRQLRDLTRLRTSLRQDHTTVANRMQKILEDANIKLASVASDWLGVSGRAILTQLLAGEEDATKLADLSRRRLRAKLPQMQLALEGRLTDHHRWMLRVLWDQLEFLEAQLTKVDAQIQVHVQEYQEALTLCLTIPGIEEVAAANLLAEIGMNMEQFPSAQHLASWAGICPGNHESAGQRLSGKPHKGNTWLRRSLCQAAWAASHTKATYLSARFRRLAARKGKKRAIVAVAHSILSILYHVLKTKQPYRELGADYLDRINAAQLKRYFVKRLENLGLQVTVQDIEKAAPLPT

SEQ ID NO: 257885 - protein, 346 aa, unidentified
MEYYAGIDVSLEWSSVCVMDGSSKIVREAKVLSEPEALIGWFGSLRFGLTRVGLEAGPLSQWLYAAMQQAGLAVELLETRHVHDAFKAMPVKSDRNDARGIAQLMRLGWFRPVHCKSIGAQEVRAVLTARKLVQTKCQDVENSLRGILRGFGLKVGKTTDRSFAGRIQELVKGQPNLETIADALLAVRAVLLREFNAFEKRVRALSRLDANARLLMSTPAVGPIVSLTYAAAIDDPARFKSSKQAGSHFGLTPKRYQSGQTDCSGRISKIGDAAVREALYHAAHVMLTKPVKGCTELKSWAMRIAKRAGMSKAKVALARKLAVIMHRMLKDGVPFNPVTKATTATV

SEQ ID NO: 257886 - protein, 339 aa, unidentified
MNRIVVGVDIAKRVFQLHWVEPETGEIVARQLKREKFLEHFANRSSCLIGMEACGGSQHWARSLQKLGHEVKLLSGRMVKPFVVGNKNDAADAHGIWMAVQQPGIKAVAVKSEEQQAVLALHRMREQLVKFRTSQINGLRGLLTEYGEVMPLGRAGIKRDIAGALGRLSDRLPAIVIETLREQYARLSALDEQISQIERRLRQWQNQDSATQRIAAIPGVGLLSATAAVATMGDPKAFKSGREFAAWLGLVPRQTGTGGRVRLLGISKRGDKYLRTLLIHGARAVLTHSKSPPEWLSELVKRRPKNVAVVAMANKMARTIWALTAYERAYQSRYVSRPA

SEQ ID NO: 257887 - protein, 420 aa, unidentified
MKVVYQTCCGVDVHKSFLVATIIKTSSGVQPSYQKKRFSIFNNSILEFKKWLLDNSCRDVCMESTGKYWIPVFNLLEDEINVTIANPKWVKAVKGNKDDTKDSKWIGDLFRLGLVPGSYIPCKPIRILREFTRYRYKLTSCRSSEKNRFQNALTVCNVALDSVVSDIFGKSATSVIDYLLKQSDNSINHEEIASRLLRSLKKKSDSVIESIEGYQMTDSQKYRMRLIRAHLDYITSTINDIDTMLNSLIAPYENAVQLLCTIPGVDRNSAITVISEIGTDMTPFSNSKRLCCWAGLTPDNNESAGKKKSVRITRAGVYLKPALVQVAHAAVKSDKSPYYKQKYERIMKRRGKKRAIIAIARMILTAIYQMLSTGEAWNPTDLFKIDMPEPMKEKQKEKAIKQAMKLLIREGKISESQLAS

SEQ ID NO: 257888 - protein, 346 aa, unidentified
MKFYTGQHKFYCGVDLHARTMFLCVLDHRGYPLLERNIKTEPELFLKSIAPYREDLVVAVECMFTWYWLSDLCSREKIPFILGHALYMKAIHGGKAKNDRIDANKIAVLLRGGMFPVAYVYPPKMRSTRDLLRRRMFLNRKRSALITHIKCTFAQYNLPEPEQNVSRVSQREGVAEQIPDPGARRNVQLDLDLLDFYDQTLTKLEQELTVIAKDHDPDSYFRLRTVPGIGKILSLVILYEIHDINRFPSVQDFASYCRLVKPAKESGGKRLGSGGAKIGNVHLKWAFSEAAVLFLRKNEPAKIYRARLVKRHGKAKSLTILAHKIARAVFFILKRRTVFEAESFFA

SEQ ID NO: 257889 - protein, 429 aa, unidentified
MSYRIAGIDVHKKMLAVVVSDVEVDGEFRFERRMFGSNPEQLRTLAAWLLEQEVEEVVMESTAQYWKPVWETLERYWKPIREKREGASRKSGTLHLALAQSNRGRRGRKRDFPDAERLVKRLVARELTLSFVPDAEQRLWRTVTRRKYQLTRDRVRLQNQLESLLEEAHIKLSSLVSDMLGASAQRMLKALADGETNPAALAALADRKLRATPEQLCDALGACTDLKPVYRRLLKMALEQLQFLEQQIGQLDQEMASLLSPHQDAVERLAEVPGLGVDSAQQIIAEVGPTAATFPSKKCLSSWVGACPGDDESAGVNYSHRSPKGNRHMRRVLNQCANAAARTKGSIFEIVYRRSVPRLGHNQAIGAIAHRQCRLIWLILHQGVHYEERGPAVTKQSKQNRTARMIRQLRSLGYRIEQTNPQPSQAQAQ

SEQ ID NO: 257890 - protein, 408 aa, unidentified
MEVLHARCAGLDVHKDTVEACVRLATGDEVQQEVRSFSTTTQGLLALADWLLASGVTHAAMEATGVYWKPVWHVLESACELVLANSAHVRNVPGRKTDVNDAVWIADLLAHGLVRASFVPPTPVLELRDLTRTRKQLVREISQHTLRIQRVLEDANLKITGLISDLLGLSGRAILDAIANGETDPERLVALTDRRLKPKRPALLQALQGHVAEHHRFLIRLHLGQIDALQRAVAEIESRLGEALIPFRWATRLLTTMPGVSDVVAQVLVAEIGVEMGRFPTAGHLVSWAGLCPRMDQSAGKRRSTRVRHGAPWLKTVLVQAAWAGSRKRDSYLRAQFLRLKGRRGAKKAIVAVAASMLTSAFYMLRDGVGYQDLGPDHFDRRDRTRIANRLVRRLEELGLKVQIEAAA

SEQ ID NO: 257891 - protein, 404 aa, unidentified
MQHHIFSLEVFVMMISVGVDVSKDKHDCFIQSSEGEVLADVFTIPNNAEGFHFLLQRIRDCTTPQDKIKVGLEATGHYSYNLLGFLLDNGLATYALNPLRTNLYRKGFSLRKTKTDRVDARTIAAMLLSDTGLKPYTNTAYHNEELKSLTRYRFDKVKERAKLKSSISRLVCILFPELEKLVPSLHITSVYALLEEFPGAKQIANAHLARLKALLESSSRGRYKRDMTVEIRDAARNSIGSRMPAKSLELQHTIRLIRELDVEIAEIEEQIQSLMEELNSPITTIPGLGFRMAAMILAEVGDFTRFDSPDKLLAFAGMSPSTYQSGQLKNCYPHMEKRGSRYLRYALYNATKYVCHWDPTFAAYLAKKRAEGKHYNIAISHAAKKLVRLIFAMEKSRTTYHLAT

SEQ ID NO: 257892 - protein, 344 aa, unidentified
MYIVGIDIGKNHHEASIVSPEGKQIGRSLRLATTHKGADSLMRFIFKNIGNSPCVFGMEATGHYWYPIYSFLKAKGYTIYVINPIQSDSLRKMYIRQTKNDSIDSFLIAEVIRFGQFGTTSMADENILAMRQLCRYRDSVISSRTEIKLRIGTIMEQIFPEYEKQFSSLWVSTSMGILEKYLTPENIENTPIDELFEIIKDKSHNRLTKAKAISIKEAAADTFGIKIAQDAFSFQLKQLIDRMNFLDKQIEALDIEIMKYYEQFDCYLHTIPGIGIIGAATILAEIGDISRFKNSSALVAFAGIDPTVRQSGEFNSTHNHMSKRGSPYLRHAIFSCGYNLLFSQ

SEQ ID NO: 257893 - protein, 410 aa, unidentified
MNPLYVGIDVASHSNVAYLMKPDGSKHSVFPITNSKAGCQQLVKRIVSAMTGNGLSEMKIGMEATSIYGSHLVYTLKEDFSLSAYTKEIHVLNPKQVAKFKESYDDLPKNDYVDAYVIADCLRFGRINNEVYLGDYRYEALKKLTRARYTAVVNLSREKQRFLNTLFLKYSTFAQEKVFSDTFSTTALAVYEEFESADQLALMDLHELTEFIKEKGKNRFPDPDAVAKAIQKAARSSYRLPKTVNDSVNQVLSISISSMRALEASIKQYDKAIAEQMNAISNPLISVKGIGSVYSAGIIAEIGDIHRFKNQASLAKYAGLAWKQHQSGGFEAENTPLIHTGNRYLKYYLCEAVMSLVRCDTEYNSYYHLKYKEVNRAQHKRALVLTARKFVRLVYCLLSENRMYITPEER

SEQ ID NO: 257894 - protein, 314 aa, unidentified
MIVGIDISKLKFDAMVLLDTGKEKHKVFSNNQEGFKKLETWLNSFEEKEAHICLEATGSYGEKVALFLHNLGYKVSVVNPTRIKAYARSEGARVKTDKVDSGVIARFCKAQSPSLWTPPSDAEQTLRDLYRCLQNLIEDKTKLSNRMGNLDENKSSYKIWEEMKSSVDKRIKDVEEQIKTLLKDHEEFGKKAALLETIPGVSQETAVAILSELPDVKTFESAREAAAFAGLTPSIRQSGTSVNGRGSLSKAGNAELRKALFMPTLVAKRYNPAIEKFCEQLTKKGKAKMVVVTAGMRKLLHIIFGVLKNNKPFA

SEQ ID NO: 257895 - protein, 311 aa, unidentified
MSEFIGIDVSKARLDVAVHGGNSFAVENTEADTGRLCEQLKALAPELVVMEASGGYERLCVAALAACGLPVALVNPRQVREFARATGVLAKTDRLDARVLAHFAAVVRPPVRPLPDEQHQVLEELLARRRQMVVALVAEKNRLGLARTRLVKRTLREVVSTYERLLELIDRELDDLIKASPLWREKEDLLRSFKGIGPVSARTLLAELPELGLLNRKQIAALVGVAPIARESGSWRGRRSIWGGRGQVRAVLYMATVTAMRANAQIRVFYLRLRQAGKPGKVALVACMRKLLTILNAMVRSHTRWQQPVAA

SEQ ID NO: 257896 - protein, 373 aa, unidentified
MTTIGASEDSSNAVYAAIELSKKTWVLGIARPERDRPSIHRISGGNLRELVARVRAAAKGGSRILVCYEAGYDGFWIARSLARENIECRVLDPASIQVNRRARRVKTDRIDVLMLLRALIAIDRGERHVCAVVRVPSIEEEDARRSHRERQRLVRERTGHINRIKGLLFAQGIRGIEPKLRSTRIDFSALTTAEGHPLPDRLQRELEREYARLELIQSQIREIENERDAADAQEPAVERKRQMLIALHGIGGAGAAILAREVFARTFGNRRQLGSYLGLTPSAYDSGSTTRCQGISKAGNSWARRVLIEIAWLWRKYQPDSPLSRWYAARTREQSPRIRRTMLIALARKLAIALWRYVETGVVPQGAIMSNAA

SEQ ID NO: 257897 - protein, 357 aa, unidentified
MKMYKIVSTRATEEDNHELYVGIDMHLKTWHITILHDGVIIFSHGIAGNWDTLRKLLDRYKGFRIHAVYEAGYFGYSLYDRLLEYGASCLVAAPSLLPRQYGNRVKTDRRDSVKLSLWLSQGSLVGVAVPTLEERSHLAVIRRRHQLMKDCIRVQHRIKSEFRFHGLTFPDMKGTWSKAFVENLHRFQFTDRWLTESFQRLLAQYDHLVEEIALQKKLIEALANTDRYRENVTILRTIPGIGLLIAMEFLVELQDIQRFRTADKLAAYVGLTPAQYSSGEHIRMGNITHIGKGQLRAYLIEASWILIGKDPAMGQKYQTLKYRCGSKRAIVAIARKLLVRARRVLLDRAPYVPGKAA

SEQ ID NO: 257898 - protein, 341 aa, unidentified
MMLIGIDPHKGSHTAVVVDRDERVVDEIRVRASSDQIGELREWASGYDDRCWAVESARGMGYLVSQQLVAAGERVVDVPAMLASRVRLLGSGKSQKSDPNDARSVAIAALRHSGLTLVGRDDHARVLALLAKRHRDVARFKNKVACRLHALLMELAPGGLASEMTVNKAISLLDQVDVTDQVTRQRVEIATELIDDIGRLETQMKASKQRIGVAVAASGTTLCDIRGIGPIGAAIILGSVGDIGRFPTAGHFASYNATAPIEASSGDRRRHRLNPRGNRKLNHALHIAAVTQLRYPSEGRDYYQKKLAEGKTSKEAIRALKRRISDVVYRRLLADARRSTN

SEQ ID NO: 257899 - protein, 342 aa, unidentified
MEIDLLGIDLAKRVFQLHGADVRGRAVYRNKVSRTALIETVRALRPQVIAMEACGSAHHWARRFQEAGIEVRLISPHYVSPFVKTNKNDRNDAEAIVEAASRPSMNFVAVKSVEQQDMQAAHRVRELLVQQRTAIINQARGLLGERGIAIARSPAAFRKAIPEILVQSEGELTSFCQSLILALVQHLCVLEEEIAVAEGWIRSFMNRSALCQKIAAVPGIGPITATAIVAAVGRADGFRNGRHLAAWLGLVPRQHSSGGKSQLYGISKRGDKYLRTLLIHGARSVLIRVSGKLDARSRWLQELIARRGYNRACVALANKNARIIQVLLSTEATYKPVALADA

SEQ ID NO: 257900 - protein, 423 aa, unidentified
MEIMYERVAGLDVHKATIVACVRLGAGRNVTRECRTFDTTTDGLRALLAWLEECRCSHVAMEATGVYWMPVWKILGEGDFALIVANAAHIKNVPGRKTDLNDAMWIADLLACGLIKPSFVPEEDVQELRSLLRTRKQLGREQTRHVQRIQKTLAEANVKLDSVLSDIMGASGRRIIEAMIAGVRDPRRLAALANTRIKATPKQLYDALHGRLTDHHRFLLTLHLRQWDNLDATIREIDQEVEARIARMDEEVKADEAPFRDLIGLLCTIPGVSTLSATTILSEIGRDMSRFPTAGHLVAWAGLCPGQNESAGKRKPVRLRKGAPWLKTMLVQCAWAAKRKKDSYYKAQFFRLQARRGPQKAICAVAASILTAIYHILKNGTEHHDLGADHFNRRSTEGQTKRLVAQLTRLGFEVQLQRTAEAA

SEQ ID NO: 257901 - protein, 300 aa, unidentified
MQSKQKEILKGEKIFVGIDMHKRSWHITIRTNSIELFNGSIPGRWEALRKLLHRYKTQNIYAVYEAGYFGFWLHDHLIQYGVNCVVTPPSLVPQEYGNRVKTDRRDSSKLAHLLAKGLLKSVWVPSAEERFHRQVIRRRRQLVGDRVRVQNRIKSELYFYGVDLPAPRGSWSQVYFTNLQRIKFKNHWMQASFKRLLEQYEFLCGQIDKQTKLLRKLAQLPLYHQRVGILCTIPGIGLISAMQILLELQDVSRFRRAEQLAAYVGLTPSQYSSADKIRMGRITGIGKNSVRATLVESAWK

SEQ ID NO: 257902 - protein, 307 aa, unidentified
MNFYTQQHKHYCGIDLHARAMYVCILDQTGTKLVHKNLPTTPEAFLRIIAPYREDLVVGVECIFTWYWLADLCEREGIAFVLGHALYMKAIHGGKAKNDKIDAHKIAVLLRGGMLPQAYVYPAEMRATRDLLRRRGHLVRKRAELLAHIQNTNSQYNLPEIGKKLAYKANREGVEEHFPDPSVRKTIEVDVSLIDHYDKVLGEVELYITRSAKAHAVQTFSRLQSVPGIGQILALVILYEIQDIPRFPRVQDFVSYCRLVKCLTAQSTGQGVFYEIGTQTRQSQSADRTRSQARACRVLPAFAGTGV

SEQ ID NO: 257903 - protein, 409 aa, unidentified
MLFAGIDWSEKCLEFHLRTAEGKVLAQGRVKPSVEGMTDLFATLETHALPSEIGIAIETAHGAWVQALLDRGYHVYPLNPKTVDCFRQALSANHVKTDKIDSKVLAMFLVTFHQENKPLRPDDPEIIQLRILCQDRLRLIEEHTAKVNELQAILKGYYSAFLGLFGGVDSDIALDFLQQFPTQKQMQRLSERRLRQWLGRHHYPCPRRLEEMVGLLNKPVLRVAEHLQEAKKTLIVYLARSLRMLNAEIAARDKQIDHHLSGLPEADWIRSLPGAGKVLSPALLACLGRDPGRFVFVGEARALMGTAPVTKASGRYRVVHFRWGCWKFARRTLQMFAEQSRYRCAWAQAYYDKQRARGHKHHAALRALAHCWLKILLAMRQSGSAYNEDIFVNSQRRYLLKTPILRTSK

SEQ ID NO: 257904 - protein, 415 aa, unidentified
MAEEIEWFVGIDWASQSHQVCLIDAHGECLGERAVAHGGAGIEELCDWLIARTGATPEVIGVAIEITHGPVVEALLERGFSVYGINPKQLDRFRDRFTVAGAKDDRRDAHVLADSLRTDRHAFRRLSNDEPVIVQLREWSRMADDLQQERARLASRMREQLWRYYPQMLELADDLAANWFLDLWSHAPTPAKAVRLRETTIERFVKAHRLRRWQAPEVLRILKQKPLSVAPGVVEAASDHIRTLTVRIRLVNQQLKAAHHKLDELCAQLVPSEENEPGQQCEQRDVVILRSMPGLGRIILAVLLAEVWQPLRRRDYHALRSLSGVAPVTRRSGKTCVVVRRYACNKRLANALYHWARLATQHDALSRRRYAALRQRGHSHGRALRTVADRLLSVACTLLEQQTLFDPSYEVAAGA

SEQ ID NO: 257905 - protein, 343 aa, unidentified
MYFIGLDVHKKTISYCVKDAAGRVFQEGKIGSTRRELDEWIRTMPQPRTIAMEATIFTGWIYDHLLPHAEKVKVAHPLMLRAIAAAKKKNDRIDAGKIADCLRCDFLPECHMASTEIRDRRRTLRYRSLVIKQMVQMKNRVSGLLMETGVSYNKQRLHKVGYFAELMTGNEDVHESIRPLLKLSRDMISRAQKLDYALVSSLERDPLLKERLRRLRTVPGVGPITALTWALEIGDFTRFSSIKQAISYCGLCGDEKSSADKVMRMPISKQRNKHIQRVLIEAAKLAPRESPELAVIRARELERGNPNRATLAVARKMVSYMLAVERRKQDFVPAEEFSRTAAA

SEQ ID NO: 257906 - protein, 342 aa, unidentified
MQSVVTVGLQIAKNVFQAHGVDAEGEVVFRKRITRAKVRDFFASLPKCLVGIEACASAHHWAREIGTLGHTVKLMPPAYVKPYVKSQKNDSADAEAICEAVTRPNMRFAEVKSVEQQSVLAMHKLRATLIRHRTRVGNSIRAHMAEFGLIAPIGRIGLESLVQIICDEKDERITSMVRRALGYLVNQYDQLQAQILDCDRQVLAWHRSNETSRRLATIPGIGPLAASALAATIGDASTFKSGRALSAWLGLVPKQSSTGGKERLGAISKRGDNYLRWLLVAGSLSVIRYAQRHGTKRPWLVKLLERRTSKIAAVALANKTARMVWALMTKGEKYREPQLQAA

SEQ ID NO: 257907 - protein, 478 aa, unidentified
MGKPTNINIRGLKGERRAKELNGLNLSRVLILAIDPARDFPKALICDYFGTVLEKPFFFAVNTEGVLLLHTKLQHWVSCVKAVRVFVGIEVAGCYHDAIGKALAKYGYDVELVNAYTTSSNRKMMLDYSKTDDKDLLAIAQALISNNGVSSKRVTGIYEQMQAVCRTRRQLVKEASAVKTQIRQLMSMVFREFQGLVDTDTLTQQKVFGSFWSPKSRLVMSYFPLPSQILELGESGLKELADFKGFRFSEREIELLLQAARRDLMSSSAELTHFNGEQIKFRLRQLTFLEKQIDALAFKMEKMLITTPATLLLSIKGINVVTAAEFIAEVGSMVNYTYNRQLVKLAGINPVMSQSGGKKGKAYQISRQGNPALRYIVTLIGKNLCNKKCCNHYFIDYYERMVQRGKTPTQIYAAAGNKFLRIAYAMLKEQRLFHIPGYEQCTSDITGKLSNKETKEIAGQVLALLTAETASEKTAVAL

SEQ ID NO: 257908 - protein, 344 aa, unidentified
MTIVEERTAITGGVDTHSEVHVAAALDSVGGLLGTREFPATAAGYAGLLGWLGKFGDVALVGVEGTGSYGAGLARYLAAHGIRVVEVDRADRQDRHRNGKSDPLDAVSAARAALSGRASGAPKGRDGAVEAIRALMVAKRSARHERTQAINQARALVLTGPDELRVRLAGKRAAAFAEAVAALRPRPGDAADYALPVALREPGRRVQFLEDQVARLDELIVPLVTARAAALLSLHGAGPDTAALLLIAAGDRPERLRSEAAWAHMCAVAPIPASSGKTRRHRHCRGGNRDASHALWRIVITRMSSHPATRAYVQRRSAEGLPKKEIIRCLKRYVAREVCPYLRG

SEQ ID NO: 257909 - protein, 467 aa, unidentified
MTPHKDFCLDPCPPAPTPTFPQSPVLADALQVCHPHAAGIDIGEAEHWVAVPPGCDPQPVRRFGTFTADLDALADWLIDCGITPVAMESTGVYWIPLFELLEARGVQVLLIDPRQAKRAPGRPKTDRLDCKWLQRLHTYGLLAGAFRPEPQVCVLRGSLRHRQMLLTSAAHHIQHMHKALQQMNLKLTQVVSDITGATGMAIIKAIIAGERDPVTLATLRNPHCHHAEDDIAKALQGTWHAEHLFALQHAVALSAFSHQQLALCDQQIKAHLETCADTSAGQPLPPKARRHKQTNEPRFDARTPLSRMAGVDLTTIEGIEANTALLILSAIGTDMPRWPSVQHCCRWLGLCPQHKISGGKILSRRVRPGAHRVTVALRLAARSLHHSQSAFGAFFRRMKARLGTPKAITATAHKLARLVYSLLKHGTAYVQQGMEAYETHYRERTVKAMARHAKTLGYALVPLAEQG

SEQ ID NO: 257910 - protein, 314 aa, unidentified
MSTDGTWVGIDVSKAHVDVAVYGGRQWRETTDTAGLARLTSQLVEVRTTLVVLEASGGYEVAVAAALAAGGVAVAIVNPRQVRHFGRATGVLAKTDRLDARILAHFAALVQPEPRPLPDAAQMELVELVQRRRQVVEMVAAEKLRRRAASGRVGQQIQAHIRWLEAQLHDLDRDLNNAVRSSPLWRDKDDLLRGVPGVGPTVSATLLAELPELGHLNRRQIAALVGVAPLARDSGTYRGRRHCWGGRASIRKVLYMAALAATRWNPCIQATYQRLLQAGKLKRVALVACMRKLLVILNAMLAQNTAWHTEVQTP

SEQ ID NO: 257911 - protein, 346 aa, unidentified
MDIYIGLDVSLASTAVCVLSSHGKVVKEITALSEPDDLERVLRSLLGTVVAVGLEAGPLSQWLYRHLTEAGFDTVLMETRQVKGALKAMPIKTDRRDAEGIARLLHTGWFRPVHCKSISAQEMRALLSSRKAILQAIVALELSIRGVLRNFGLKMGRIAKGGLEDRVLELADGNVMLQAAARPVLSARAALRLELAGLEKRVRDHAKSDPVCRQFMTMPGVGPIVALTVKSAIDDPERFRSSKDVGPWVGLTPRREQSGERDIMGSISRAGDAGLRTALYQAAMVMLHKGRPNWLTAWAWNVAKRRGKKRATVALARRVGVVLHRMWLDGSTFRFTQAEAAAVSGA

SEQ ID NO: 257912 - protein, 351 aa, unidentified
MIVIGIDPHKRTHTAAAVEQVTGELVDELTRPAREQGHGELVAWACSLADERLWALEDCRHVSGQLERFLLARGERVVRVPPKLMAGMRRSARSRGKSDAIDALAVARGALREPSLPAAQLEGRSREIRLLCDHRDDLVGERTRIQQRLRWHLHELCPELELPAGALDRQVWLQRVARRLARLEQTTQVRIGRELVRRISELSRRANELERELEALVRSEAPSLLELIGCGTLTAAKLVGETAGASRFASDARLAMHAGVAPLDASSGDQRRHRLNRSGNRQLNCALHRLAVNQGRWHPGAAAYLERKQAEGKSRREALRCLKRHLARVVYKLLVDVNQPTAAPPAALALT

SEQ ID NO: 257913 - protein, 423 aa, unidentified
MSYRIAGIDVHKKMLAVVVADVEVQGEYQFERIRYGSNPEPLRLLAAWLIEHEVEEVVMESTAQYWKPVWGALERYWKPSCQKREGAGPMSGTLHLAQARSNRGRRGRKKDFPDAERLVKRLVAEELILSFVPDAEQRLWRTVTRRKYQLTRNKVRLQNQLEALLEEAHIKLSSLVSDLLGVSARRMLKAIADGGTDPAALAALADKKLRATQAQLCDALGACTELQPVYRRLLKMFLEELHLIEQQIGQLDQEMAALLSQHPESVQRLSEIPGLGVDSAQQIIAEVGATAATFPSGKHLSSWVGACPGDEESAEVSQSHRSPKGNRHMRRILNQAANAAVKAKGTIFEIVYRRLVTRLGHNQTIGAIAHRLCRLIWIILHQGLRYEERGPSVNTKSRRQRTSRMIRELRNLGYRVEPLGTPA

SEQ ID NO: 257914 - protein, 346 aa, unidentified
MMIIGCDFHPSWQQVSWLDTETGETGERKLVQASGDAEQFYRQLPVPSLIGMEATGNCHWLVDLLAEIGHELWVGDAAQIRASCVRQQKTDQRDAEHILKLLVEGRFPRIWMPSSEVRDLRQLLLHRHKLVTIRTRVKNELQHLCLNQGVQRKHKLWSKAGQQVLRELPLKPWAARRREDLLGLLAMLDQQMEPLDRAVKEEAQRDKMALLLQTQPGVGAVTALAYVLTMGDVSRFARGKQVASYLGLIPREHSSGGRQKLGAITKQGNRMLRTLLVEAAQMAVRCDPGLRREYLHRCHQKPKAVAKVAVARKLAVRLYWMLRTQKPYPEVVRIESSSTEALVSES

SEQ ID NO: 257915 - protein, 417 aa, unidentified
MNEPRWFVGIDWARKMHRVCVVDAEGNRVQERDVDHDGAALNEFCAWLLQTTGAAPGEIAVAIETPRGPLVELMLERGFQVFSLNPKQLDRFRDRFTVAGAKDDSRDAYVLGHSLRTDRRAFRRLSIDDPRVIELREWLRMHEELKQERTRLTNRLRDQLWRYYPQAAELTEDVTDNWFLDLWELVPTPAKAVRASEKAVARILKSHRIRRLDAAQALSVLRRPPLTVAPGTVEAATAHIRSFVARLRLINQQVKETEQRLNQSIEAIEAAAETTPGQRCEQRDIAILRSCPGLGRINIAALLSEAGQPLRWRDYHVLRALSGVAPVTRRSGQSWITVRRHACNNRLRTALYHWARVAVQRDPISNGQYKRLRNCGHSHARALRGVGDRLLWLLCTLLERQILYDPKRREVSALKAA

SEQ ID NO: 257916 - protein, 353 aa, unidentified
MRKMRESLVEGKRIFIGLEDSKTTWRLNVRYNRMEVHQASMPSGYEHLKGYLANRFPGCDITVMYEAGFKGFDLHDRLAADGMKCVVTPPNKVTQAKDTRVKTDTRDARRLAKNLENGDYVACHVPDRERREDREVSRAHEQVKKDIARTKNRIRGLLKFHGIEGCRSKGAWSDREYLAVVNIDVSRSLKFSIRIKVKHLAALFELRNELRKELQVLSCKERYRAAVKAKKSVPGIGWLTAIRLTLEWGDMSRFASGKHIASFSGLTACEFSTGDTQHRGRITGQSAEFVRSWLIECAWRAIKKDPVLFDKFHRVWQNSGNKKKAIVAVARKLAVRMRALEVNNDTYQIGLIA

SEQ ID NO: 257917 - protein, 391 aa, unidentified
MGCGRAGETDLIGDSRQCGCIDTEASLAGPASTLTNRQEATLIVGIDVHKHNHAAALIDDRGGEIATLIIANTPKGYRGLIDWLVDHGAAGAVIGVENPGSYGRCLVTALAGAGFEVLQVPAWRTHRERPRRGPGKTDPGDAISIAHVVRTKREDLGPAEEPEIVRALGMLELQRRRFVRDRTQAIQRLRSDWTQHDPVAEASVIRCDRQRELNKLRRLQLGPSLAARTAARCIRELARDITDLNARIADLDREIAQLLAEHDNPLADLHGAGSNLAATIIAQAGDVRRFRNASAFARFCGAAPIPCGSGKTANRHRLHRGGNRQLNAALYRIAVVQQRHHPQAKTYLARKIAEGKTPREARRALKRHLANVLYRRLYAWANAAPSMNLLT

SEQ ID NO: 257918 - protein, 466 aa, unidentified
MKDHRRRRTGKPRVSPSVLDRINPKAAGIDCGSAEHYVAVPPDRSPSPVQSFKTFTSDLVRLADWLVACGVTSVAMEATGVYWIPVYEILEARGIDVLLVNARHIKNVPGRKSDVSDCEWLRDLHSVGLLRGSFRPTEAIVALRAYVRHRQSLVESAGTYVQRMQKALVQMNVQLPLVVSDITGVTGLKILRDIVAGQHDPQHLASHRDYRCRASQTEIVAALTGNYRPEHLFVLQQNLELFDACQVQLAACDRAIEAHVLVLTATLEVPTTPLPAPRVNRKRADNEPHFEIRTPLHQLTGGVDLTQIDGIGPYTALKLIAEIGTDMHRWPTEKHFTSWLTLAPRNKVSGGRLLSSRTQPSANRAAVVLRMAAMTLGRGQTALGAFYRRLAGRVGKAQAITATARKLAILVYRALKGELVYRDPGADAYDLQQRTRVLRRLRHRAATLGFDLVNRDSGEILHTPPA

SEQ ID NO: 257919 - protein, 410 aa, unidentified
MQMYCGIDWATEHHDVAVVDADGRVVARRRVENDAAGFAQLLTLLAEAGDTPEHPIPVAIETDRGLWVAALRATGRAIYPINPLAASRYRARYAVSGAKSDATDAVLLANIVRTDPGAHRPLPADTELAQAIRVLARAQQDAVWSRQQIGNQIRDLLKDFYPAALAAFAELPDGGLARRDARTILAAAPTPTQAAKLTPARLHRLLIKAGRKRYLDRDVDRLRGIFADTYLHQPPVVENAMGIQLTALLGQFDAACTAADELAEAATDHFERHPDAEIITSFPGLGTLTGARVLAEIGDDRARFADARGLKAYAGSAPITRASGKKTVVLHRHIKNRRLAAVGPIWALASLRASPGARRHFDARRATGDWNHQAQRNLFNKFLGQLHHCLQTSQVYNEHQAFPPPLDLAA

SEQ ID NO: 257920 - protein, 344 aa, unidentified
MKVTRVGFDIAKEVFEVHGVNDHGKVQVRKQLRRARVLEFFANFEACLIGMETGSGAHYWARELTKLGHTVRLMAPRFVKPYRKNDKSDENDAEAICEAVGRPNMRFVAIKSEEQQTMLSVHRMHAGFKSERNALANRLRGLLAEFGIVLPKGLERLRRGLPAILAQDRVPALMGTILADGLTRLRELDERVGEHERQIKALARQSEPARRLMAARGIGPMIATAAVATIGDAKLFKNGRAVAAWLGMVPRHSGIGGKIWMGPITGKGDTYLRTLFIQGARSVLNTTRGKNDPLSLWVERLRARSGDNVAAVALAAKNARMVWAMLARGEAYRPAMNAAQDTQA

SEQ ID NO: 257921 - protein, 402 aa, unidentified
MNKFNPATTKVSTVSALENIQAQPSVLDKYAAYIGLDTHKDNIVVAIALPGRALAYIDSELANNEKNISKLIRRLSKQFAGQLLLFCYEAGPCGYGIQRQIMASGHDCEVIAPSKIPKKPGEKVKTDRIDACKLAQYLRSGDLTAIWIPDHEQEAMRDLTRARSDMKSQELKARQQLNAFVLRHGHSWPSNKTRWTRSHYNWLESLKFNHDWLQVVLQEYINAVKAASGRVKDITDQMERVLPQWSMAPVVDSLIALRGIDKLAAMVLLAELGDISRFDSPKQLMAYLGLVPSEHTTGSKRRQGSITRTGNSHARRMLVESAWSYRFPARQTMHLKRKAMKASDEAKTIAWRAQKRLCGRYTTLIQAGKNTKQTTVAIARELIGFIWDIVCHEMPKVKIDVQ

SEQ ID NO: 257922 - protein, 411 aa, unidentified
MPDGVVCAGVDWAKDTHEVLVEDADGERLWGETVTHSETGISRLCATLVSLNVTRVAIERPDGLLIERLLDAGLTVLAIHPNKVAAARDRFRAAGGKSDRFDAFVLCELARTDSHRFPALSPDSDQTKALRALTRGREVLVEQRVALCNQLRAELERFWPGAAVIFADLDSPTSLAFLERYPSPIDARALGEKRLAQFLARHHYSGRRPASELLTRLRNAPTGRAGEIEAEARRGIVLALVAALKPLVEQIRLLTSEIAHAVHTHPDGHIFLSFFKDPKSVICAATLLAEIGDDRARYPTAEALAADAGMAPIAIESGRKKVAGFRRGCDHRLRDATSTLADATRHWHPWAQDHYLRARGRGHDHPRAIRTVGRAWTRVLWRCWQDRVTYDPTLHNGLQNHLKISNPDLRG

SEQ ID NO: 257923 - protein, 400 aa, unidentified
MLSIGIDVSKGKSTVCGMKPGGEIVYTPFEVQHTRKGMSELVSLLRGSGEEVRAVLESTGSYHCPVVAALLENGIFVSVVNSLRMKRFCSQSIRKVKTDRIDAMQIALYGLAYWQELQPTRLPEDTYRELQLLARQYYQMTSLLIKAKVDFNALCDQVLPGMQELMSDHAGRHKLSDFVLRYRHTTHILEIGETRFRKDYCKWAEKKGYRNCERMAALIFATAQNGIPVLPNAPSTQIVITEAIRVLHTVEASRDAILTQMQALAKTLPEYSLVREMPCIGDTLAPRLIAEIGDVRRFHSKRALIAYAGIDAPPYQSGKFCANNRHISKRGNRYLRKTGYEVMQSYVMHKPANDPIFTFIEKKRGEGKSGKLAMVAGLNKFLRVYYGKVTELYRSLPAIE

SEQ ID NO: 257924 - protein, 355 aa, unidentified
MSQEKYIGMDVHQATICAAVVDAQGKVLMECVLETKASTIIEFVQGLQGTLSLTFEEGTWAAWLHDLLKAHVSRLVVCDPRKAALLKEGNKSDRIDARKLAEMLRTNQLRPVYHGEHGFRTLKELGRCYLTLSKDVTRTMNRIKSLYRSWAIPCQGSSVYAPRQRAEWLAKIVEPGVRMRAEYLYQQLDGLQPLRLQARRELLRESHKHAAVERLRQIPSIGPIRAALLVALLQTPHRFRSKRQLWAYSGFAVETHDSGEYRWVRGKLQRNRERITVRGLNDNHNRDLKNLFKGAAISASTRPGPLQDFYLARVAQGIRPTMARLTLARKIATITLTMWKKGASFDPEQLRRQAV

SEQ ID NO: 257925 - protein, 347 aa, unidentified
MRFYTTQHPFYCGIDLHARSMYVCILNQEGEIMLHRNMKASPETFLQAIAPYREALVVAVECIFTWYWLADLCAREGIPFVLGHALYMKAIHGGKAKNDKIDAHKIAVLLRGGMLPQAYVYPAAMRATRDLLRRRMYLTRKRAELLAHIQNTNSQYNLPEIGKKLAYKANRDGVAERFPDPAVQKSMEVDLALLGYYEPLLRDLELHIVKAARQHDAHTLYLLQTVPGIGKILSLVLLYEIHDIQRFPRVQDFVSYCRLVKCAKESAGKRYGTAGAKIGNAYLTWAFSEAAVLFLRDNPAGQKYLTRLEKKHGPGKALTLLAQKLGRAVYYMLKRQKAFDLDQFLQG

SEQ ID NO: 257926 - protein, 374 aa, unidentified
MTTTTTNHDKETIVMAIEVSNSNWLLGFSNGEKKSIRNVKAWDIEHFEKEVEKAKTKLKVDGKAVIHCCYEAGRDGFGIHRYLESVGIHNNVIDPSSIDRDRRWKHKKTDRIDVKKMIELQEMRYYMDNKKYRVVRVPSVEAEDERRLHREWDRLKKERTGHINRIKSLLVMHGIKVKSVQSLDIVEIRDWANNPLPPMLREEIVREQERLALVEKQIRTIRQKREQRIKHPENRSDEIVCRLLMLKSIGPQISWTLVKEFFGWRTFKNRKQVGSLAGLTGCPYNSGTMNHEQGISKAGNCQVRTLAIELAWLWLRWQPNSKLSKWYNERFGDSGDRLRRIGIVALARKLLVALWKYIEFGIVPDGAVFKTVAK

SEQ ID NO: 257927 - protein, 320 aa, unidentified
MKKVSTIGTKASGKISEQRLSGQKLTVGLDLGDRSSWYCVLDETGAIVLEQRLNTTAKALGEVFGWMPRSRVALETGMHSPWVSRLLNGLGHEVIVAHARNVRLIGESRKKDDRLDAQTLARLARIDPELLSPVKHRSAKAQADLTVIRARAGLVRARTALVNTARGLAKSYGERLRGCNVRNMKPEKAEKLSPELQAALEPLLEASAALSEQIAEYNQRIEHLAERSYPQVALLKQIKGVGTLIALTFLLTLEDPHRFQRAATWAAIWDCSRDDGTRARANRRCISARKAIRICARCWCKEHSTFWDRSVWTAISGAGG

SEQ ID NO: 257928 - protein, 363 aa, unidentified
MTVQYVGMDVDKQKIVLARLGAGRDTSAIEQVIANTPSAVKKYFTPLLGSGEIHATYEAGCFGFGLYRQLSAMGVTVVLAAPGLIPRKPADRIKTDRRDAHSLALALRAGQLTGIHVPTEQDESVRDYLRMYESLRGDLRICKQRVLQFLLRRGLSYGGGGPWTVKHRHWLSALQFSQARDRQTLDMYLSQMQELEAKCAEAAAEVESIAAQDDYRQQTKKLTAFKGIKTLIALSFVTDIGDFRRFTNARQFMAYLGLVPSERSSGNKRRQGGITKAGNSHLRRLLVEAAWHYHSYHPSSRDLIERRRGVDPSVLSYANRAGRRLNRKYLHMLLRGKRSQVAVTAISRELAGFLWGAMTDHVA

SEQ ID NO: 257929 - protein, 360 aa, unidentified
MRALYAGFDLHGNSNYLGIIDGDGQRVFGKKLSNDLEWIREVLVAFKEELVGIAVESTYNWYWLVDGLMEEGYKVHLANPSAIQQYSGMKHSDDRHDAFWLAEMLRLGILPEGYIYPKEERPVRDLLRKRGHLVRLRTSLVISLQNILSRNLGRKVNVNDVKALREDRVTPLLESSEDLALAGRVSKEAIDFLTHQIRRIEGVVEKRIELREAYRYLLTLPGVGKILALTMMLETGPIGRFATVGDYVSYCRKVPSQWTSNGKRKGSGNKKNGNKYLAWAYAEASELARRFYPEPRAYYHRKMQKTNAPVAHSALAHKLARAGYYVMRDQVPFEPQKLFGTRGRGWDGEPELGLVKSHEA

SEQ ID NO: 257930 - protein, 407 aa, unidentified
MKETDTMNIRPQLMRACGIDIHKNKVSICYYISNSTEEVKEYGTFTLELEQIRDEILSHQIKDVIMESTGVYWIALCSILMAAGIKVCVVNPKFIKNMPKEKTDKKDARWLCKLLVNGLVRNSFVVSEDQRAFRDLCRMRTKYRNHITQSQNRIVKNLERRNIKLRSVVSNMDTVSAMEIVAAIAAGETDIEKLVSLCRTKLKKKKKEMRKALVGVITPHDRRMLQSLLDDIAHYRKQIKSIEEEIKAHTEKINEELIKNLREVKGIGEQSTQIILAEIGDNVKPFATPDKLAAWVGVAPGNKESAGKSYYSGTRKGNVYLRTAMIQVAWAAVRTKNSYWRALYYHLTRRMPMKKAIVAIARKLVRLIYKIINGTKTYVEYGAEYFMQHLQERLAQKRNHNIVIKPA

SEQ ID NO: 257931 - protein, 344 aa, unidentified
MEHYAGLDVSLELTSVCIVDARGEIICEAKAPSDPEALIGFLNGQQLEIGRVGLEAGPLSQWLHAGLIAAGFEAVLLETRHVKAALSAMTVKTDRRDARGIAQLLRLGWYRPVHAKSASAQEVRALLTSRKLMQGKLLDIESGIRGVLRGFGLKVGLISRGRFETRIRELVEGHLILETVSDAMLGARAALETEFKRLHRALLALVRDDPVCRQLMSVPGVGAIVAITFKSGVDDPTRFRHSRDVGPHFGLTPRKYQSGELDVTGSITKVGDRMVRTALYEAASVMLTRTVRFSTLKAWGMAVARRRGTKKARVALARKLAVILHRMWVDGTDFRWTNQENAIA

SEQ ID NO: 257932 - protein, 424 aa, unidentified
MKVTFQTCCGVDVHKSFLVATIIKTSSGIEPSYQKRRFSTFNNSILEFKKWLLENECLYVCMESTGKYWIPVFNLLEDEINVTIANPKWVKAVKGNKDDTKDSKWIGDLFRLGLVRGSYIPCKKIRILRKFTRYRYKLVSCHSSEKNRYQNALTVCNVALDSVVSDIFGKSSTSIIDYLLEQSGTSIDHEVIASKLLKRLKAKEDAVIESIEGYQMTDSQKYRMHLVRAHMDYITAVINDVDSEIESLIASDPDYENAVELLCTIPGVKYDSAITIISEIGIDMSQFCSSKRLCCWAGLTPGSNESAGKKKSVRITRAGVYLKPALVQCAHAAVKSDKSPYYKKKYESLVKRRGKKRAIIAIARMILTAIFQMLTTGETWNPCDLYKIDMPEALLEKQKQKAIKQAQKLLIREGLLPPTEPIAS

SEQ ID NO: 257933 - protein, 423 aa, unidentified
MSYRIAGIDVHKKMLAVVVADVEVQGEYQFERIRYGSNPEPLRLLAAWLIEHEVEEVVMESTAQYWKPVWGALERYWKPSCQKREGAGPMSGTLHLAQARSNRGRRGRKKDFPDAERLVKRLVADELILSFVPDAEQRLWRTVTRRKYQLTRNKVRLQNQLEALLEEAHIKLSSLVSDLLGVSARRMLKAIADGGTDPAALAALADKKLRATQAQLCDALGACTELQPVYRRLLKMFLEELHLIEQQIGQLDQEMAALLSQHPESVQRLSEIPGLGVDSAQQIIAEVGATAATFPSGKHLSSWVGACPGDEESAEVSQSHRSPKGNRHMRRILNQAANAAVKAKGTIFEIVYRRLVSRRGHNQTIGAIAHRLCRLIWIILHQGVRYEERGPSVNTKSRRQRTSRMIRELRNLGYRVEPLGTPA

SEQ ID NO: 257934 - protein, 355 aa, unidentified
MPVYLGVDFHARTQTVCWCNTADGVTGERTLDHQLDDVRAFYAQFPAPAVIGLESSGYARWFHRLLHQLGHQVRVGDAFAIRQCARRRQKNDRRDAALLLELLLRDEFPAVHIPSPASQDVLLLLRYRHRLVRMRTMLYNGLHAVALNHRLVLGPRLRTARGRQRLMDLPLVGADALQREHSLSLLTTLEARIETLEEELLRRGAQDARVQCLCTHPGVGLLTALAVVHTLEPVSRFDRARRVAAYCGLDPQEHSSGDTVRFGHISKQGNRLLRFLLVEAAHRAVQPEQDEDLRRFYYHLVVKKSAAVAGVAVARKLVLRLYRMLREGIDYDEFRRRGRDAGRARGMRSSVPGPN

SEQ ID NO: 257935 - protein, 418 aa, unidentified
MYYVGIDIAKQFHIACILNESNKYIVKNLRIESEISDFSLLQSELINITEDKSQFIIGMEATGTLFENLYLFLQHQGYNVVLLNPYQTTKFREMDTMKYVKNDNIDSQMIAALLKSGRYSEAYVSEELYQSIKFLYRHKATLMQEIKSAKRQVSTTLVVVFPEFEQIIKDPFSVSGMALLEKYPTAKHYKGASADRILKVFRNIKGNNFNLQKANDLLDLARLTIYQGNASDERAYVIHSNLRRIRFLKDEIEACESQMFTLLNDVNKTIETSQDEEVYIADLVDNLRSIDGVADKTIFAVLSECGDIARFRSGQAFIGFLGLYPTLYQSGNSTKYGKLAKRGAKLAKLAIYQAAIACVRHNDELKKVYLDKKSSGRAPKECVVVVARKLAMIIYSIYKNNTPYNPARVFNTQASLSH

SEQ ID NO: 257936 - protein, 387 aa, unidentified
MTVLTVNNLPAATHGETVRCLFAIELSGMSWVVAFNTPLSEKISRRTLIGCKWKKLLELIEEVRARVSRETGRVVEVISCYEAGYDGFWLHRQLSAHGIRNYVIDPASLQVDRRARRVKTDRIDTERLLRSLMAYLRGEPKVWSVVRVPSVAEEDARRLHRERDRLVSERVQHVNRIKGLCALQGIYDYNPLRPQAMVRLEQLRTTQGGVVPPRLKSEIKRELQRLELVVEMIATLEAERNAIVADEASTHPNANKIQTLHKLKAIGPEFAAVLVGEIFHRDFSNRRQLASYVGFAPSPFQSGNVAHDQGISKAGNRKGRTTGIELAWLWLRYQPDSDLSVWFRTRVGTTKGRIRRIAIVALARKLLVALWRYLETGVVPQGAVLKG

SEQ ID NO: 257937 - protein, 442 aa, unidentified
MSVRKRVFELTHPNAAGIDVGAASHFVAVPPDRDEQAVREYPSFTEDLNRLAEWLRACEVDTVAMESTGVYWIPLFELLESRGFTVYLVNARHVKNVSGRKSDVLDCQWLQQLMSFGLLSGAFRPQGEICALRSVARQRAMLLSYQSRHVQHMQKALTQMNIQLAQVISDVVGETGQRIIRAILAGERNGQVLAKLKHFRIRATEEEIAKSLQGNWREEHLFALKQAVSLYDAYAAELAECDRQLESMLAALARHNREPGKAKRRARAKNAPRFDMRTSLFQLCGADLTQIDGIDVTTAFKVLAEVGADLSRFKTAKHFASWLGLCPGTKISGGKVLSGATKRTANRAAQALKLAAASLRSSRSALGAYYRRLAARMDKPHAVTACAHKLARLIYALLTKGEAYVDQGQAHYEERYRQRVLRHLTKTAQKLGFQLIPNPQSA

SEQ ID NO: 257938 - protein, 453 aa, unidentified
MPQDRTRSKPAGLPIIHPFAAGIDIGARFHVVAVSPDLCDEPVQTFQAFTSDLQRMADWLVATGTKTVVMESTGVYWVAAYEVLESRGLDVVLANAREARAVPGRKSDVNDAQWLQRLHACGLLRASFRPGRAIAELRAYLRARERHTDYAAAHIQHMQKALTFMNIQLHHVISTITGVTGMKIIRAIVAGERDPDKLAAMRDVRCQASAETIRGALVGNYQPEHVFALKQALALYDFYQHCIDECDAEIERSVAQLNMERPMPKAPLPKAKHRTRQPSDPNFDVRSAMYQLAGTDLTQIHGIGPFLALRLIAECGTDLSRWPTAKHFTSWLTLSPGCKISGGKVLSAHTRKTSSRVTVDLRLAAVNVGKTNTALGAFYRRLAARIGKAKAVTATARKIAVLFYNAMRYGMDYCDPGADHYEQQYRDRVIKQLHRRAAQFGFTLQPQNSQASG

SEQ ID NO: 257939 - protein, 419 aa, unidentified
MSFKILKNNCCGLDVHKTWIYACIGITDSFKRTEYKQARFSSFTKGLQELCLWLAKYNCIDVCMESTGKYWIPVFNILEKNNIFVTLSHPKYTKPQKGNKTDRKDAKWICDLYMCGMVKPSFIPPADIRQLRDLVRYRFKLTCMITGEKNRAHNCLTVSNLKLDDVFSDIFGKSSRSITEQILQHPGEVFDVAPFVDSRCKTPIEEIQAAVDGAISHEQAVKLRQCLKHIDELEMHKAEIEREIFRLSQKYESVLDLIRTIPGFDKNPLTAIQVLSEIGADMSVFPTAKNLVSWAGCCPRNDQSSRKIKSTRISRAGSYFKPVLVQIANALIKSKKHPEFTTRYRRIKARRGHKKAIIAICRMILTAIWHILTDLKPYTPEGFLESRPVNKEKVLTISQALNLIKQRGYIIKDDVGPVT

SEQ ID NO: 257940 - protein, 351 aa, unidentified
MKTQQTALSKLFIGIDIHKRSWKVHCSTDLFCGKSFSMSPDPEQLLNYVLKHFPGHEIIVAYEAGCCGYSAHRCFEGYGWRSLVVNPADIHRKGKERHTKTDRIDAQLISRELKDGRLDSIVVPDKKREELRSLFRRRNDLVKDFRKIKSYIKMQLLYFGIKEPEEFDNDHWSHKYREWLDAMVFEHPTAKSTLESRMRFFRFVDQELRDVSTQLRRYCKTHYKKDYMLLRSIPGIGGIVACGILCELGDLRRFNNVKHLAGYIGLAPSVHQSGGNQKVMGMTPRAHRLIRSYFVEASWQAIRADPVMQGYYRKHMGKNVKSIIIKVARKLLSRTLAVIKTEIPYTIGVIE

SEQ ID NO: 257941 - protein, 346 aa, unidentified
MTKVTIGMDLGDQHSQVCVVDAAGAIAQTARVRTTPTGLTRWFGAQPPTRVVVEAGTHSPWVSRLLTALGHAVLVANPRRLRLIYASDRKDDRVDAEYLARVGRLDPRLLGAITHRGAEAQAALAVLRSRDALVRTRTGLINHVRGVVKAVGGRLPACSTEVFPRKVAAAVPTALAPAIAPVLAQLTLLTQQIHAYDGELARLSTEAYPETARLRQVAGVGPVTALAYVLILEDPRRFRHSRAVGAYLGLQPRRRQSGARDPQLRISKAGDPLLRRLLVQAAQYILGPFGPACALRRHGERIAAAGGGNAKKRAVIAVARKLAVLLHRLWVSGARYEPEYEMTRAA

SEQ ID NO: 257942 - protein, 343 aa, unidentified
MERYVGLDVSLKLTSICVVNQTGAAVREGVVDSDPEAIASFVRSNAPRVVRIGLETGPTATWLWTELKRLGLPVICIDARHAKAVLKMQINKSDRNDAAGIARIMQTGWFKEVRVKDLESHSVRALLASRALLVKIKRDLENQIRGLLKNLGLVIGRAKFNVFAVRAEELIENRPELIAAVGPLLAARKTIERQVGDLDRKVHKLARHDLQVRRFMTVPGVGPITALCFKATIDDPTRFKRSRSVGAYIGLTTRRHASGEVDWSGRISKCGDRMLRMYLFEAAGVLLTRVPKWSALKSWGTRLAKRNGLRKAKVAVARKLAVIMHRMWIDETEFNWSTKKAAV

SEQ ID NO: 257943 - protein, 417 aa, unidentified
MDVLHDRCAGLDISKRDVKACLRTPGTRRNQRRSEVRTFATTTNDLLALRDWLVAERVSLVVMEGTGDYWRAPYYLLEDALNVELVNARQVKAMPGRKTDVADAVWLAQLAECGLLRASFVPPEPIRQLRDLTRYRTVLAEERTREAQRLEKELEDAGIKLSSFATDILGISGRAMLEALIRGERDAQVLAEMARGRMRSKIPDLVQAMIGRFGEHHAFLCRMHLDRIDAISRDITTLSTRIEQVMAPFRDQLTRLDGIPGISLRVAEVIIAETGGDMSRFPTAGHLASWAGVSPGNHESGGRRKSGKTTKGNRWLRDALGTAAMAAARSKNTYLGAQYTRLVRRLGSRPKALVALEHSILTSVWHMLTTGAGYQDLGADHFLRRDPERERRRAITALNKLGYTVTLNPIEPTTAAA

SEQ ID NO: 257944 - protein, 348 aa, unidentified
MTITTVGIDLAKNVFAVHCVDQHGKTVLVKPKVSRAALPELIASLPPCVIGMEACSGAHYWARLFRQYGHEPRLMAAKFVSPYRMAGKSGKNDAADAQAICEAVRRPHMRFVPVKDESQQAMQCLHRIRQGFIEEKTATYNRLRGLISEFGVIAPQSTDALRHMVSEQKSSLPLQVQQCVNDLLEHIDRIEDNITEYDRILSRMAKTDHRSQRLMELKGIGPTTACALVASIGNAHDFKNGRQLAAWLGLTPSQYSSGGKSKLGRITKAGDSYLRTLLVQGARSVLIGAEKRTDLFSRWVCSLVDRRGYWRAVVAIAAKKARLCWHHCITVMISGCTQPAKARNKITI

SEQ ID NO: 257945 - protein, 621 aa, unidentified
MGRGYRRAGSRGRSPSPKGHNIARRLSERGITAFVLKYRLARETNSTYTVDDHALADMQRALRLVRSRATEWGIATNRIGVMGFSAGGEVAFLSAQRFNTDDPDTTSNVVHERAERCHQEQERSAFVNNLAASQNDMGSRRFAPAASRSFDTCLAKARVRPPVAAGASEPTSERTLPHEGPCIRSRPSRKNGKASAAMKGSSMKTWQELTHFAGLDWASDHHDVMIVDQRGAVAAEFSFPHSAEGWAAFRQKTAGYGALGVAIETRSGAAVEELLRCECTVFPVQPKAAARYRERKAPSGVKDDQLDAWSLADALRMDGRAWRALAPEDPLIQELRLLCRDEVALIDQRTALVNQLRAALREYYDPALEAFDDWTQPATWALIVQFPTPAELAQAGKRKWEKFLHVHKLWRPETAQKRLELFARAADWKRSEPVTRAKSRLAVSLAKTLQTLERQLEEYRQAIEELFGRHPDHDLFGSLPGAGSKLAPRLMSELGADRQRFDTPQSLQCLAGTAPVSFQSGQIHRVKMRRHCNTHLRHAVHLWANCSRAMCGWAQAYYQAQRQRGKSHACALRCLGHRWLEVLWKMWQSRTRYDGELHMRNQQKHGSWVINILTVPAAKPA

SEQ ID NO: 257946 - protein, 404 aa, unidentified
MNHGLKSRFPEWSRPPEPPPPQAGYWCSRFARRPNVRLIWRGKDQVVQSGSDLGCRKQSLEYCSCVDESHPLTRTSPCEVHAIDSDEKVVVRKQLRRGQVLRFFEELPPCLVGLEACATSHYWARELTKLGHEVRLMPAKDVKAYVKRNKNDAADAEAICEAVRRPTMRFVQVKSVEQQAQLMQHRARDLLMHQRTQLINAMRSHLAELGIIAPQGREGVKELLVIVTKDANAHLPNDARASLIVLAAQLQALQTTIGAIEKRITVQHRANKDSKRLQTIPGVGVIGASAIAATVTNPRIFRSGRDFAAWIGLVPRQLSTGGKPKLGPISKQGDRYLRRLLVVGAVSTLRRAKLNLQKYPWVTRLLARRPFKVVAVALANKMARIAWALLISGKTCRSAWFAAA

SEQ ID NO: 257947 - protein, 406 aa, unidentified
MSMNAVGIDVSKQKSTVAILHPGGEVVTSPFDVPHLSGCFQPLIQHIRALNGQTRIVMECTGRYYEPVARQLSQAGFFVCAVNPQIIHGFQGQDNTLRRVKTDKADSIKIARYTLDNWVNLKQYTLMNELRTQLKTMNHQFDFYMKHNTAMKNNLSGLIDLAYPGANTYFNSPAREDGSQKWVDFLDTYWHVDCVRKMSCNAFTLHYQKWCCRKKYNFSCLKAEEIYETAKELIPVLPKDDFTKRIIKQAIQQLNAASQTVEQLRILMNETAAKLPEYPIVMAMKGVGPSLGPQLMAEIGDVARFTHKGAITAFAGVDSGVNDSGDYSQKSVHVSKHSSPTLRKTLHQVMDVLIQTKPDDPVYLFMDKKRTPSKPYYVYMTAGANKFLRIYYGRAKEYLASLPVSE

SEQ ID NO: 257948 - protein, 368 aa, unidentified
MKKPTKNTPSVVLTSPAAVVSGFTIGLDLGDRSHYACVLDATGQFLHEGTLLNDRVALGLFLSKYPAATVALEAGTHSPWISRYLTGLGATVIVANPRKLHAISRHERKCDRRDAVMLARLARADVALLHPIQHGSAQAQHDLLGLKLRDSLVRTRVNLINTVRFTLKSLGHTVSNPSSEAFHKSILTAVPADCLPVVQPVLAVLTLLTAQIKTLERNLVARSKKDYPVTQRLQQIAGVGPLTALCFVLKIGEPARFGRSRDVGPYLGLCPGRDQSGGTDKQLRISKCGDGLLRRLLVSAAHYVLGPFGPACALRAYGQHLTGVSAREKKRAVVAVARKLAVLLLSLWKHGTDYEPRPDPVPLVLVAA

SEQ ID NO: 257949 - protein, 338 aa, unidentified
MDHYVGIDLHSNNSYLGIIDTDNKRIFKKKARNDLSTIIKLLAPFSTQTKGIVVESTYNWYWLVDGLIDNGYRLHLANPSAIKQYEGLKHSDDITDAFHLANLLRLGILPEGYIYPKEQRPVRDLLRKRMQLVHQRTAQILSFQNLAARNLGRQMHVQTINKLNEEDMGNLFKEDHLILSGKACIATIHFLRTRIIQLEKAIQRAAKLKNEFKLLKTAPGIWNILALTIMLETGPIERFEKVGNYASYCRCVQSNRFSNSKSKGKGNRKNGNKYLSWAYVEAANHALWNYEYVKRYYQRKAAKTNNVVAIKAIAHKLARACYYIIRDQKEFNPGKAFA

SEQ ID NO: 257950 - protein, 327 aa, unidentified
MNTTQNSTKSKIVKVIGVDLAKDHCDVIAYDENGKICLRLDGCSYAKLREILSNLPQAVVLMEACKGSMFQARSIADLGHEVRLVKGADVKALRNINHKNDLRDAAYIAKLYFVPGTTYVYIKSQQQQSLQFLQNEYKSLQELRIQAGNQIHAGLEEFGCPVRKSSKFIKTRMVAHLEKHAELIPEDVMASFKRRREIWLNLLQQEEDAKRRLEQVAATDANAKRIMTVPCVGPQTAVGLLVHVGVDFGRFKNSRQFAASLGLVPKQNSTGGNNTLNHITKCGPKRLRSNLVQCAQLVLMYAEKWKGNFGDWVRKMRDSGMNQGVIV

SEQ ID NO: 257951 - protein, 308 aa, unidentified
MALLQHAPSTCLGCDVAKDTITVSDGVSKAVSIANTPAAIRGLLKRIAPDFLVCEPTGGHELVLLDAAMRMGIACHRVDIARFKGFIRSLGALAKTDAIDATMMAAYGRERWRTLALWRAPDAEQARLKLLVRRRQELLAFRNAEQNRAKTPGHATLAASFKALIRTLEAQIKTLERAIADIIEQSRPLKQRAAILTTMNGIGPISAATLLALMPELGALSRRKAAALAGLAPHPSDSGTRQNYRKLRGGRPDVRTALFMPALRAAAGHGEFAATYTRLCANGKKPIVAITAVMRKIVVTLNARLRDA

SEQ ID NO: 257952 - protein, 337 aa, unidentified
MNYSGIDLHSNNSVITVTDETDRVVAEKRLPNDLAKIIGFLLPWREGLAGVVVESTYNWYWLVDGLQAAGFVVHLANTGAIKKYDGLKHSGDEADARQLSHLLRLGILPTGTILPPAHRAIRDLARKRMQLVRSRTSHILAIENIMARQQAVKITSNVIKRMTASDVDRMGLPEDVGLAVQSNLAVITTLSAQIDLLEKRLQERVGERPDYALLASVPGIGRILATIILLETGPIGRFAAVGNFASYARCVDSQRLSNGKKKGEGNTRNGNKYLAWAFVEAANFALRFCPEAKRFYERKKARTNTVVAIKALAHKLARACFHILKERKPFDVMRCFA

SEQ ID NO: 257953 - protein, 411 aa, unidentified
MNPVVGLDVSKGESQVQAFLEKGKPFRKSFKVSHNLEGLSLLVEFLEEVKNETGQKPPIVLEATGHYHSPVVQYLEDRGYLLIIINPLISYKAKSSSLRKVKTDAIDAYHLCELFYKEDLEPYKKRGVQLLNLRNLTRQHENITGVLIQTKLQFQAILDQVFPEYRGVFGDLYSIVSLLTLLTFTSSQDILEASVETVADKINELCKSRSSRWAKEKAIQLKAAAERNPFEKTVYQSHILSLGMYINIILQYKGHLSKLESEIDALAKEVEEYTIIKSIPGIGEKIAATIISEIGEIDRFTDPKKLVAFAGVDPSVFESGKFTATKNRITKRGSSRLRHALYMAVRCAIRDCRKSKTSDEIIPRNKKLREFYDKKRAEGKPFKVAVIACVNKLLHWIYAILKSKTTFQDIA

SEQ ID NO: 257954 - protein, 356 aa, unidentified
MTTMTNLTTAVGGVDTHGQTHHAAVLDHVGRELGDHEFPTTPNGYRALLTWLRGHGRLERVGVEGTGTYGAALYRHLRAAGVEVVEVDRPDRKERRAKGKSDPLDAFSAARAALAGRATGTPKARDGRVEAIRVLRVARNSAVKARSQTTNQLKALLVSAPAELREQLRALTATVLITACARLRPAGEVADPEHATKTALRRLARRHQFLSEEISDADAELRTLVTTVAPGLTALPGVGTQVAGQILTTVGDNPDRLHSEAAFAHLCGVAPIPASSGRTRRHRLNRGGDRGANNALYVVVLGRLRYDPRTKAYAARRTTEGLSKPEIIRCLKRYVAREIYNALQAINPPKTSSDAA

SEQ ID NO: 257955 - protein, 343 aa, unidentified
MEYYVGLDVSLKQTSICVVDQTGSVVREGVVDSDPEAISVYVRSKAPDAARIGLETGPTSTWLWTELKRLGLPVICIDARHAKAVLKMQINKSDRNDAIGIARIMQTGWFKEVHVKDIDSHSVRALLASRALLVKIKRDLENHVRGLLKNLGLVIGRAKFNVFAVRAEDLIEGRPELIAAIRPLLEARDAVGQQVSELDRKVMKLARHDAQVRRFMTVPGVGPITALAFKATIDDPARFARSRSVGAYVGLTSRRHASGEVDWTGRISKCGDAMLRSYLFEAAGVLLTRVPKWSAVKAWGVRLAKRNGLRKAKVAVARKLAVILHRMWIDGTEFNWSNKEVAA

SEQ ID NO: 257956 - protein, 342 aa, unidentified
MKDMMIGVDLAKNVFQVHGALWTGEVQFRKKLTRKQFPGFMAQQEPCLVIFEACGSAHYWAREMEALGHEVKLIAPQYARPFVKRQKNDAADAEAIVIAARQPEMRFVAPKTAEQQSRAAVFRGRERLVHQRTADVNALRALLYEHGHVFPQGIRYLNRMTALVEDETTDLHALIREECLDLLAQIAEKTARIIERNTKLKTLAAESDKARQLQTMPGVGPLTAVAVEAFGPDMAQFKTGRDFAAWLGLVPKQHSSGGKQRLGRMTKAGQADIRRLLIIGAMSRLGWLGQRKIVEGSWLSEMLARKPKMLVAIALANKMARQIWAMLTKNEDYRDPALAGAA

SEQ ID NO: 257957 - protein, 403 aa, unidentified
MNSVGIDISKGRSTIAVMRPFGEVVISPFEVRHTGSELSKLARQLKSLDGETRVVMEATGNYHASVAKLLHDAGLYVSVVNAKLVHGYGNNELRRVKTDRKDAVKLANYGLDRWLTLPRYIPEEDTRLLLKNCYRQYRQYSKVQTVLKNNLISLLDTVFPNANRLFSSPIRGDGSEKWVDFVAEFWHCRCASEKSERAFTSKYLRWCRKHGYNFREAKAHTIYAEASGHIGVMPKSETTKLLVKQAVSQLRATSTALAALKQEMQSLASVLPEYPVVMDLFDVGPTLGPQLIAEIGDVRRFYSKKALVAYAGLDAPPNDSGDVTGRHKSMSKIGASSLRRTLFLVMSVYLQTAPLDEPVCQFMDRKRAEGKPYRVYMMAFANKFLRIYYATVKAYLESLEHTA

SEQ ID NO: 257958 - protein, 307 aa, unidentified
MNGIGIDVCKAMLDVAVHRGPFERFHNTPAGHRKLLSWLATQKAGQVVLEASGGYEQQILDALFDAGHQVVRADAYRCQAFAAATGLPAKTDRLDATNLACMAATLELRAYQPMEPWRRKLREFVRAREQLVDLTTSAQNQLEQGTDTSLRRLLQANITQMKKNCVRLEKHIAEQVRQQPQLETMRSFKGVGAILQAVIASYLPELGTLDGKAIAKLVGVAPIAHDSGTTRGIRRIGGGRIEVRNVLYMACLSAIQYEPRIREFYRSLRARGKPGKVAVVAAMRKMLVILNARARDALAGEAQAIPT

SEQ ID NO: 257959 - protein, 343 aa, unidentified
MVRRSRSTWRSRYSRSPSRNTPGRVRERHRLTRERFHRFLAEQPPALVLMEACGSAHHWARHAQASGHRAILVPPHVVRPYVLRNKTDRSDAKGLLEACRNEDLRPVPVKSETQQALAALHRLRSTWLATRTARINTVRGLLREFGLVIPTGARQVVPHVWTLLEDVDSGVPGLLRPALAAAVREIREIEERLHAVERQLETAAAETLIVRQLRTIPGVGLLTATALVATVGDVQRFPSGRHFASYLGLTPRESSTGQRRRLGAISKRGDTYLRMLLIHGARAVLCHAKAKTAPTPDRLRTWALQRERLRGHNKAAVALANKLARIIWAVWKHGTSFSGVPTM

SEQ ID NO: 257960 - protein, 430 aa, unidentified
MKSITQNKKIEAITETTLVIGIDVGSETHYARAFDYRGIEFSKKPLKFSNSEVGFEMFKAWILDIKEKHEKDKVVPGMEPTGHYWFNLGKYLQDNEMKPVLVNPHHVKKSKELDDNNPTKNDRKDPKVIAGLVREGRYMIPYLPDGVYADLRTASNIRFQLQSELTRIQNRISRWFNIYFPEYKTVYGKPDAKSGMLILKEAPLPEDILTLGIDGVDQIWRDAKMRAVGKARAKTLIEAAEHSVGSKEGAVSARMEIRMLLEDYESRNMRLQEVMVLIEELVKQIPMAEKLLEIKGVGIKTVSGFLAEVGDISRFNSPKELQKLAGLALVENSSGKHKGETTISRRGRKRLRYLLFEVAMSLVAKNPEFRELHNYYTTRRLNPLKKMQSLMAIAAKLIRVFFAMLTKGVDYDPKKMVSDIKRPAVYLQAA

SEQ ID NO: 257961 - protein, 347 aa, unidentified
MDKIIRIGMDTSKHVFQLHGVNAAEQPVLRKKMRRKEMVDFFAKLPPTVIAIEACGASHHWARLLEGFGHEVKLIAPQLAKPYVKRGKNDAADAEALCEAMSRPTMRFVPVKSAEQQAALMLVGMRERAVAARTQLANTIRGYAAEFGVTAAQGLCHIPRLLDRIMADETIPALARDLFASLAAEFAQMKERLKEIEAKLMAWYRSDECCRRLATIPGVGPIGAVLLVMKAPAPEQFTSGRQFAAWMGLTPRDHSTAGKVRPGVITRAGDEMLRKTLVVGATSLLRQVRAGRGSNASPWLTDLLRRKPPKLVAVALANKIARIAWKMMISGEAYKNTNARPVVACAA

SEQ ID NO: 257962 - protein, 422 aa, unidentified
MLAESHDEEQIIARVSALDIGKAEVVCCVRVPAPAGGRRRVQEVSTHSTMTKSLADLANRLVGMGVERVVMEATSSYWKPVFYLLEAHGLDPWLVNARDVKHLPGRPKTDVLDAVWLCKVAERQMLRPSFVPPWPIRRLRDLTRYRTDLVAARTAEKNRVEKLLEDACIKLSVVASDIFGVSGRAMLAALVAGERDPKVLAQLARARMRGKIDRLEQAFDGHFADHHRFLLSRMLSRIEALDADIAAVDAQIEAQLAPFAKAAAHLDEIPGIGPVAAAAIIAEIGVDMSRFPTAGHLCSWAKFAPGINSSAGKTKRSASSGHGSPYLARVLGEAAVGTSKTNTFLAARYRRIARRRGQPRAVVAIGRSILVIIWHLLHDPDTRYHDLGADHYTRHVDPTAKKRSHIRQLEALGYTVTLTPAA

SEQ ID NO: 257963 - protein, 324 aa, unidentified
MIYIGIDISKLTFDAAYILNSRTIHKQFSNNFKGFGEFSLWANKSKKEVYTCLEATGIYSFDLAQYLSQQKVNVMVVNPIITHAFFKMELNRNKTDKADAQLIARYCEHVVLTGDYKKRSYQPKGADYEAIQRLVTRCDQLEKSKTQENNRLEASVNKQTSRSIKRLQKAIDKEIVRIKKTIADIVKNNQSLSQQVDLLVSINGIGERTAWSILAYIGDINFFSNSKQIASYAGLTPKIIQSGTSIDKSSLSKLGHKRLRKSLYMPALVAIRHNPVLKALYERLVNNGKPKKVAIVAVMRKLLILSYGVLKSEKPFDINYQMAD

SEQ ID NO: 257964 - protein, 343 aa, unidentified
MTQYVGLDVSLKETKVHVLDEAGNRIWRGRCATEPTAIAAAVRRYAPTAVRIGLETGPLTTWLWTALTAEGLPMVCLDARHAKKALDMKVNKTDANDAEGLAHLVRAGWYREVRVKSRSAMLAKALLGARSQLLGMSLALENQIRGILKTFGRIVPKGGGGLFEKNVRALITDDTEIAAVIMPLLQARQVARGKCAALDRRLIRSVQGDASCRMLMTMPGVGPITAVAYVAALEKADNFKQSRAVAAWIGLTPRRFQSGEVDYDGHISRRGDSQLRALLYEAAAVLLTRVRRESALRRWGLMLWKRLGFKRAATALARKMAVVLHAMWKSGTAFNPTLSAVTP

SEQ ID NO: 257965 - protein, 497 aa, unidentified
MNRIYRRCAGLDIHKKSISACVRIQPRGQQEPEIHEAVFGTFTAELENLRSWLKQHKVKHIAMESTGVYWIPVWNVLEAECWRFHLLLVNPARVRAIRGHKTDRIDAARIAEYLQEGRLSGSFVPSPRMRQWRDMTRLRVHLQQDRNRVINRIGGLLEKANLKLGSVASNIVGKTGRAILEAIAQGRSKPEYLANLAVGSLRHKKAELLQALNGRYTEHFRWMLQQLLGELRWLDGRIAELDARISDALQPHADLIRRLCTIPGVSRLTAWTLIAEIGTDLSEFPDAAHLSSWAGLSPGNEESAGKRKSGATSKGDRYLRRLLVQDAWAVSHKENCYLTAVFYRTAHRRGLKKAAVAVAHRILVIAYHIIRDGTEYRERGGDYFDRKDPARTALRLTRRLERIGFDVVLSPRTSATVMPKATSEQTSPTPSKRRRGRPCKCQERGIPCTHATPTSDCRLPAIPDHCPRCHKWGIPCIHVRKHILHNDSPQDPSDTST

SEQ ID NO: 257966 - protein, 387 aa, unidentified
MNEPTHNKHTMKKELLFVGLDVHAQNIAIALAEGGGGEARTYGTIPNDLHALEKVFARLRKAHPGAELRVCYEAGPTGFVLARRLAQLKVHCTVVAPSLIPSRSGDRVKTDRRDALKLARLHRAGELTAVHVPDASDEAMRDLCRARTDAVQDLRRGRAQLKAFLLRHGYRYTGKSAWTEAHRRYLRELVLPHAAQRVVLEDAIAAIAAAGERIARLEDQMHALLESWPKKPVVEAVMGMRGFALVGAMVLVSELGGAWRFGHPRQLMAYLGLVPTENTSDERRRQGGITKTGNSHARWLLIEAAQHYRLVPKVSKELSVRQQGLSPEIKACSWKAQTRLHKRMMQLLARGKQRNKVTVAVARELTGFVWQIFQLMAPRMTADAVTV

SEQ ID NO: 257967 - protein, 317 aa, unidentified
MNEFNPEQHRIETASALEVVHKAGVVERHAAYVGLDVHKETIAVAVAEPGRAEPIYRGEIANKPKTVEKLLAKLSEAYGGGLLLFCYEAGPCGYVLYRQILACGHDCQVVAPSKIPKTPGERIKTDRRDALKLARLLRGGDLTAVWVPDQEQERMRDLSRARDDMKAQERKARQQLNAFLLRHGHHWPRGKTRWTPAHENWLAELKMDHPWQQVVLQEYIDAERAAGARVAQLTDHLMRALPEWSLAPVVDSLIALRGVDKLAAIVLLAELGDISRFDSPKQLMAFLGLVPSEHSSGPRRRQGGITLTGNGHARRQV

SEQ ID NO: 257968 - protein, 313 aa, unidentified
MSQNNPNILYVGLDVAKLSLQLHLAGRFHLLANDAKGHAQLLKRLRGHPPAHVVCEATGGYEQAVVRTLQAAGVPVSIVEAGRVRYFARAQGQRAKTDPIDAAVLSEYGTTFQPAATAPASPQQQQLADLAQRRRQLIQLLVSERNHAEHYTDSFRVRQSRQLVKALEKQITQCDEAITTLIAQDTELARTAERLKAIPGVGPVVAATMLAEMPELGKLTTQTAAALAGVAPYNRDSGGQNGVRRINGGRAAVRCARYMATLSAVRHDRILKEFYLRLRAAGKKPLVAMTACMRKLVILMNRLLKNNDFQLAN

SEQ ID NO: 257969 - protein, 408 aa, unidentified
MKRYYMGVDWGDRLHQVYVGDEEGKKVREMKVQESPEGLAEIGRWLDESRVAGIELWAAIEKPAGRIVDFLLDHGVEVYPVNPKALDRVRDRYRMSGSKSDAFDAYVLAEFLRTDQAHLRVLRPNSEKAQELKILSRDQRRVGRQKTRLLNQLTTTLKEYYARPLEVFEDLETEIALDFLKQYPTPAHLSALKRKEFNRFATKQHHLSKQRCEQLWEKLQKPQLAVPAHVVRAKAQLLEVLIEQLRASIKAVKIYSHKVESFFASSPAAQFAKTLPGAKSGTLVAAIWAELGDAQDRWQSSRHLQAEAGAVPVTKASGKSRVVHFRFACNKHLRHTMYWFSFVSVNHSEWAKLYYRGQRDKGHSHHQALRALGAKWLKIIFVMWRDHKPYDENYHLANIARQKMRQAA

SEQ ID NO: 257970 - protein, 346 aa, unidentified
MLYAGLDLSRKRLDFHLLDAEGETVEVGAAPPDADGLRRLSERLECQGEPIRAAIESMNGARFVHDRLELAGWQVEIADAQKVKGLAPLACKTDRIDARVLAELARRDLVPAIWLPDPRVRAERERARWRLHLVRHRSSLKQRVHAVLLTHGQPCPLSDLFGLRGRQLLAGLGLPEPWQGTIEASLRLIDDLDREISECERELRQLSADHRYVPLLLTVPGIGRVLAYTIAAEIGDIGRFPTPRKLAGYSGLCPRVYQSGERDLRGPLSKQGPRYLRWALVEAATHACTAPAYRDRYQQTKTRIGKQRGAKIAQIDLARRLSETIWHMLTREEPFAPKGATDPLAA

SEQ ID NO: 257971 - protein, 352 aa, unidentified
MKNDRISFEGKTVFVGLDVHKKTYSLTAIVESSVVFKMTMKADFKALATMLLDRFKGAKLIHVAYEAGFSGFGLQRYMQFKGITCSVVNASSIHVAVNDKVKTDLRDSRKIAGELSCGRIKSIYIPSRKEELKRQITRRRGQIVQMRAQTSQQIKSFLMFNSLMDIDDSRPISRRYLKAIQEKVEGIDELEYVVRSYVHQWETFTLQLLEFRKVLQKQGDDEKHVHAIYESTPGIGLISARILANELGDMSRFSNEKKLFCFLGLTPCEYSSGENVRRGHISRQGPSRLRALLVEVAWRAVTVDGGLKLTFDNLKKRIGAKKAIVAMARKLIGKVRACFRTNTPFRLSVATP

SEQ ID NO: 257972 - protein, 365 aa, unidentified
MKKVSTAAAKQMRNFSQQKLTIGLDLGDRSSWYCVLDASGDVVLEQKVGTSAQAMQEVLGAMPQSRIALETGMHSPWVSRLLSGFGHEVIVAHARQVRLIGESRRKDDRMDARKLARLARIDPQLLCPVKHRSAKGQADLTVIRARAGLVRARTALVNTARGLAKSYGERLRGCNARNMNPEKAEGLSPELQTALQPLLAGIESLSERIRECNERIEKLGQESYPQVALLKQVKGVGTLIALTYMLTLEDPHRFGKSRDVGCYLGLQPGRRNSGQSEPQMHISKEGDPYLRTLLVQGAQHILGPFGADCDLRRWGLKLAERGGRSGKKRAIIATARKLAVLLHRLWVSGEVYEPLRNSSPIATAA

SEQ ID NO: 257973 - protein, 387 aa, unidentified
MPSTPPKTSAQSRAATHGDTAMLYASLELSSTTWLVTSLAPGSDKMSKHKIEGGDSCGLLELLRHLQSKAAKRLGAPVRIVTIQEVGFDGFWIDRLLKSEGIESHVVDPASVAVPRRRRRAKTDKIDGELLLRTLLAWLRGEPRVCSMVVPPSPEEEDRRWLARERDILVEERTGHTNRIAGLLATQGIRGYRPLRRDCRARLEDLKTGDGRPLPPRLKAEIGRELDRLELVKRQIAEVEAARDALLVAEDRSPGKLLLQLRSIGPEIASVLWLEGLYRSFDNRRQLAAFSGLAPSPWRSGKIDHEQGIAKSGNAKLRSTMIELSWLWLRYQPDSELSCWFRTRVRGNNTRRCRKITIVAMARKLLIALWRYVTEGVVPQGAVLKAA

SEQ ID NO: 257974 - protein, 397 aa, unidentified
MTATHKPDCTVASAPVLYMALELSSGTWKLAFTVGLGQKPRLKTVTARSTVGLIFEIKAAKKRFGLPEDAPVLSCYEAGRDGFWLHRFLLAHGVQNQVVDSASIEVNRRQRRAKSDGLDAVKLVEMLIRWHNGERKVWKLVRVPSVAEEDQRQLHRELIELKAERTAVSNSIKGLLATLGLVVMVDETLPKELENLRQWDGAKLPPSLHQRLLREFARWQLINRQIDDLERERSAKIRDDKTPQIEKVRRLMNLKGVGQNGSWLLVYEFFGWRQFKNRRELGSLAGLTPTPYDSGESRREQGISKAGNRRVRWMMMELAWGWLRYQPASELSRWYQKRFARGNTRLRKVGIVALARKLLVALWKYVEGGEEPPGAVMVGWKNKRSYKGVQARQKKAS

SEQ ID NO: 257975 - protein, 330 aa, unidentified
MNYVGLDIHTKNIVYTVLSEDGNVIMRGKIENSEEEIYEFLDRFERGDSFVMESTGFYEPIYDAIESKGFKVKLANPLKVRLIAESRIKNDKIDSEILAKLLKNNWVPESYVPVKNIREIRKIVRTRISLKRVSTGFKNRIYMELRRLKIEYDGNIFTSNGRYILRSLNNFRINIYLRSLEEIEKEIKTIDNELLKYSDIEEVKLLMTIPGIGLLSALIIYSEIGDIKRFSNSRKLVSYAGLNPTTRQSSDVIHHGHITRQGSPYLRWILTECLHIHLMSDSHSNLSNYYRRMARRIGKKKAIIASASKLLKIIYWILKEKRPYMEIHAQ

SEQ ID NO: 257976 - protein, 342 aa, unidentified
MFYAALDVSLRSVAICIIDHDGKICLERSVRSDVSDVLLGLAGFDQPIHQVGFEAGALTQPITYGLTEAGYDVVCMEARQVAAALSAMRNKTDKHDARGIAQILRSGWYSRVHVKSVESHHMRALLTSRKVMQRKCIDLENEIRGLLRIFGVVLPLRLSRGAFDAAVRETIETDPALSHALLPMLEARAMLFETFSELDRRVKRAAREDTICQRFMTVPGVGEITALSFKAAVDDPARFKSSRTVGAHFGLTPRRFQSGETDNPGRISHAGDVDVRAALYAAANAMLMRSITWSSLKAWGVRLMKTKGRRRAIVAVARKIAVVLHRMWADGTDFRLGSEAAA

SEQ ID NO: 257977 - protein, 318 aa, unidentified
MMDLERFIGIDVSKELLEIAILPEKETWSSRNDEAGVEALVKRLKGLSPSLIVLEATGGLETLVLASLAAAGLSVCVINPRQVRSFAKATGTLAKTDRIDANILAQFGQKLRPEPRALKDHELQQLGALTVRRHQLVTMLTAEKNRLGAAPKSVRRNIQAHITWLEQCLKEINKDLEQSIKATPLWCEKDALLRSVPGVGPVLSATLLTGLPELGTLNRKQIAALVGVAPLNRDSGQLRGKRGIWGGRALIRTTLYMATVVAVRCNPVIKAFYTRLIAAGKGVKVALTACMRKLLTILNAIIKNHKPWQQSFAATVDN

SEQ ID NO: 257978 - protein, 342 aa, unidentified
MQIHSVGIDLGKTTFHLVALGAAGKVLVRKKFTQKQLLAFTANLQTSLIGLEACSGAHFLGRALRDQGHDVRLIAAQLVKPFVKSNKNDFVDAEAIAEAVERKNMRFVPIKTDDQLDLQAIHRVRDRLVSRRTAVINQIRPFLLERGMVFAQKPAKLKAAMADILENAEANLTPTMRNLINMLWGEWKTVEQQIEELTDKLEQISASDAGCTRIRKIPGIGPIVATAIVAAIGNGAAFRKGRDFAAWLGLVPRQYSTGGKAKLLGISKRGNIYLRKVLIHGARAAAMRIKRDRAPIGAWMDALEARAPRNVLVVAMANKLARIAWAVLSSGGEYRPLASTPA

SEQ ID NO: 257979 - protein, 384 aa, unidentified
MEALLYCCCGLDVHRDVIEACILRGVDAKPEIIRQSFGAAKPELQRLMNWLSQNGCYSVAMESTGVYWKPIFQTLELGAEYMEQLWVVNANHMRNLPGRKSDVADAEWIATLLRHGLLEKSFVPSVPIRDLRECARLHRTFVQERSRYVNRLEKFLQAHGFKFSSVMKDILSVSGRKLLDILQQTGSLTRADVEKNCRRLRRSTDEISAAVCGNLSVAERRLLGRLLHKLDSSQEDINGILEDMRLLCSPFQEQLAIVDSVPGFDQESSMEIIAEISAAPQEHFSSAEKLCSWAGVVPRNDESAGKVKSRKTLHGNCYVKSILCQAAWAAVSVRNSPFHAWYWSHQHKLGRKKAIIAVARKLLKLIYLLLSTGRLYQPPVPVKT

SEQ ID NO: 257980 - protein, 494 aa, unidentified
MAKSKSKAYRKRQHIQKVKGRRFTDEIRNLDLEKVLVVPIDGGKNSHKALVADYFGDILHDPFEFSNLASGVKMFHATVKRVSSSVAAQKVIVGMESTGHYYENLYRTLTNLGYDVAMVNPASVYAQRSGQLNWCKTDEIDLCAIGQVLIDNQATETRLSEGLYYNLKQLTRLRRDEIRKRARLKIQIRVLCDHIFPGLQHSGIFSDFWGKSSMLLLEDYPTPSSLIRLGTSRLARFFKKHNTKLGLYTAERLLNLARNTLCSNKVNLEAHLFNLRFKVADLKMADEKIRKLHIELARYLVQTPGIVLLSIKEINVPSAAEYVAEVGPLEQAGNAKKIISRAGLNPSKFQTSEYERSDTPITKHGSNLLRNICLIISQNLIRVDPHSSQPHNPYFREFFERLVEGGKDKRVAKVACANKFVRVSSRMMREGELFSPPTLRKHNVSDDPLVKLKAFLCLNKSEELFEELAENAKEQLPSRYRSSFQKYSIVEKGN

SEQ ID NO: 257981 - protein, 363 aa, unidentified
MGEDRTVTVGLDVHKSSIRLVAVRRDELVDERTLAYDPVAVERALARWPGVSCCYEAGPTGFGLYRYLVERGIDCRVVAPGLVPVRPGDRIKTDRRDARKLAVLLAGGLLESIWVPSREVEAARDLVRAREDARLDRMRDRHRLSKFCLRHGRPLPGTSWSVVRHNWLSQQRFEHPAQQHTFDTYLHTVDLVDHRVQQLEAAIRQTAEAGPWRELVARLRCLRGVDTLTALGITTEIGDFHRFASAEELMAFVGLVPTEHSSGDHRRQGSITKVGNSHVRRLLVEAAWHARRRPKVGYDVARRQRGQDAVTVERAWRCQQRLYTRWQRMAARGKPHQKIVVACARELAGFIWAIATDQPLRAA

SEQ ID NO: 257982 - protein, 391 aa, unidentified
MTKRKTETVNDLSRCLDALDMDATLIAVIEMSQSSWLVAGIVPGVERQPLKKLAIDEGALLNLLRRWRAEAEKEGHRITRIAVAFEAGHDGFWLARWLAAQGVETHVIHASSVAVTREHRRAKTDRLDTELLKRGFLGWLRGERGHCKMVTVPTLADEDAKRPSRERETLVGEASRIITRVKAAFVRLGIRGFNPKLKTAAARLETLRTPAGEPIPPNTLAALKRDLERHRIVKQQIHEIEQTRLELLEQAPAEGRHAMVLLLARVIGIGVETADMLVQEVLSRNMRDRRAVARYAGLTGSPDESGAKRREKGLARSGNARVRRGMIQLAWRFLMFQKDSALAEWYRQRTANAPSARKTLVVALARKLLIALWRLARDGVVPEGVRLRPAA

SEQ ID NO: 257983 - protein, 332 aa, unidentified
MTIIRIGLDTSKHVFQIHGVDENERPVLRRQIRRQDVAKFFAKLAPTRIGMEACGASHYWARVLRGLGHEVVLMPPQYVKPYAQRNKNDKIDAEAICEAMSRPMVQARFVPIKTVEEQAALTMLSARDLLVKQRTMLINAIRGHAAEFGVTVAKGPQQVTELLRRLASDECVPALAREMIGVLASQLPVLEARLKAIEARLVAWHRQNATSQLLATIPGIGPIGGVSFALKVPQPRVFRSSRHFAAWIGITPREHSTAGRQRLGHISKEGDEDLRRLLVLGATAVIQQAKPGRASPWLLGLLARKPKKVATLALANKACPGAGRGWHGPSGH

SEQ ID NO: 257984 - protein, 342 aa, unidentified
MEQVTIVGLDLAKRVFQVHGATADGGIAIRKKLSRGQVLAFFTDLPPCVVAMEACATAHYWAREIGALGHNVRLVPPAYVKPFVKRQKNDAADAEAIAEAASRPTMRFVEPKSPQQQARAMVFRTRDLFVRQRTQTINALRAHLAEHGLIAPQGMSNLANIRRLIDEAAAEVEPLVVETAHTYLEQIDDLSSRILKLEATLKQEAARTDASSRMMTMPGVGPITAMAIEAFAPSLCVFRRSRDFAAWLGLVPRQHSTGGKQVLGRTSKMGQRDIRRLLIIGAMSVIRWATRKGTTPGTWLHSILLRKPRKVAAIALANKMARTLWAMETRKEDYRDPPLTAA

SEQ ID NO: 257985 - protein, 366 aa, unidentified
MSEHTKTLYVGIDAHQESLSIAVLEEYAQECEPVVTLPNRAPSVRKWFRRLAQRGSIVCTYEAGCLGFVLYRLLSSLGAHCIVAAPSHLPRIPGDHRKTDRIDARRLASFLRAGQIVSVSPPTPEIEGLRGLTRARQAVREDLVRSRHRVSKFLLLRGQVYRDGQNWTAKHLRWLRDLELPLEEDRKTLDFLVDELEQRQTSLGLLDQRIERRAEQPDIEEAVRSLRAFRGVDTLTAVSVIAELGDPRRFRAARQVAAYCGIVPSEHSSGMKVKRGAITRAGNARLRRLLVEAVQHYARPFPANSAVLARRARAPERAQSIAATAERRLRARYRSLSARKHTNIAKTAVARELVGFLWAALLPAEA

SEQ ID NO: 257986 - protein, 405 aa, unidentified
MSQSNVVDQQNDNGNNTSSARHTAESVHYAAYIGLDVHKDTIAVAVAEPGREKPAFRGECANTPKKVAKLVDKLALEFDGCVLLFCYEAGPCGYTLYRQIVSMGQDCMVVAPSKIPRKPGDRIKTDRRDALKLSGYLRSGDLSAVWVPDHEQEGMRDLTRARGDMKAQEHQARQQLNAFGRRHGHHWPSNKVRWTKTHYNWLESLDFEHPWQRVVLQEYVNAVRAATSRVTEMMNQILAALPSWSMARVVDSLVALRGIDKLAAITIMAELGDISRFDSPRQLMAYLGLVPSEHSTGLSRRQGGITRTGNTYARRMLVESAWSYRFPARQTMHLKRKAVNASDDAKAIAWHAQTRLCGRYRRLIETGKNQKTVCVAIARELVGFIWDIVCHEIPRVPAQQSSIQH

SEQ ID NO: 257987 - protein, 408 aa, unidentified
MKVLHAQCAGLDVHKETVVACARLQDGGEVKRELRRFATTTQGLLELLEWLLERGCSHVAMEATGVYWKPVWHVLEGHVELVLANAAHVRNVPGRKTDTNDATWLADLLAHGLVAASFVPPTPIQELRDLTRTRRQLVREISQHTQRIQRVLEDANVKLASVLSNVLGLSGRRMLEAIVSGEDDPETLAALGHERLKCSREQLREALRGRVTDHHRFLLRQHLATLDHLQRVVGEFDAQIARGLEPFRAELERLVTIPGVAETAAAVLIAEIGVEMSQFPSAGHLISWASLCPRLDESAGKRRSTRLRKGAPWLKPVLIQCAWAAARSRGTYPQAQFLRLKARRGPMKAAVAVAGTILTAAFHILRDGVSYQDLGSDHFVRRDRARVAQRLTRRLRELGYEVTISQAA

SEQ ID NO: 257988 - protein, 412 aa, unidentified
MQIVHQRCAGLDVHQKTVVAGLRVQQEGGRTEQTVRTFGTTTSELLKLHDWLWESKCTHVAMESTGVYWKPVFNILEGNFEVVLVNAQHIKAVPGRKTDVKDCEWIADLLAHGLVRGSFIPPEPVRELRDLTRYRKTLIRNRASEVNRIHKLLESANIKLGSVATDIVGVSGRDMLRALIEGERRAEVLSQLARGTLRKKTPQLVEALTGRFTAHHGFLLRQILDHLEFLEQAIAHCDRRIVELARPFEPELELLRTIPGVAQRSAEVLVAEIGIDMSRFPSAAHLASWGRLCPGNNKSAGKRHSGRTGHGNPWLRTALAEMGWAAGRQRNSYFSAQFRRIARHRGRKKAVVAVAHSLLVAVYYILRDRVPYRDLGADHFDRLNTQGLTRYHVRRLEELGLQVTIQPKEEAA

SEQ ID NO: 257989 - protein, 374 aa, unidentified
MDEGKNRKVWSLADFRHHRAQYGMHKAPSDWRLHSMKYTPVGIDIAKHLIQVHFINEHTGEVVDKQLRRQDFLTFFSNRESCLIGMEACGGSQHWARELQKLGHKVRLMQGRFVKAFVMGNKNDVMDARAIWMAVQQPGKAIAVKTEEQQSVLVLHRSRRQLVKFRTAQINALHGTLLEFGETIHKGRSAMDRELPAALERMKTKLPPYLITVLEDQYHRLNELDMLIDGLEKQLISVARQNETCKRLMDIPGVGPLIATAAIATMGEASAFKSGREFAAYVGLVPKQTGSGGKVRLLGISKRGDTYLRTLFIHGARAASLRAKEPGPWITELKKRRPAGVAIVAMANKLARTIWAIAAHERAYDKNHVSIRPY

SEQ ID NO: 257990 - protein, 354 aa, unidentified
MNEKQLKVYGGIDTHADTHHVAVVDTTGRRLADVQVPATAAGYEAALRFLGSWPTLVSVGIECTGSYGAGVTHALREVAIDVYEVNRPNRFDRRIRGKTDVFDAYSAAEAVLSGRATAAPKGSDGLVESLRVLRTSRSSALSARTATINQIKGLLVTAPEQLRARYRGMSNTKLIASLAATRPTVTPTTTTEATAYSLRLLARRWLALTEQVEDLAGHMRRLLDTHAPALMSVYGCGPDTVAQLLITAGDNPARLRSEAAFAALAGACPIPASSGKTNRHRLNRAGDRKANSALYHIIIVRLRYDKETQDYAERRTAEGKTKMEIIRCLKRYLVRQLYPLIVQTLQPQHSTLTA

SEQ ID NO: 257991 - protein, 369 aa, unidentified
MTSILYVGLDVHTTNYTICSYSFPEDRFFAEIQVAPDYHQILKYLDRVRSMRGGDCKFLCGYEAGCLGYSLYHQLTYHGVDCVILAPSTMGKFDNLVHKNDYRDARTIAKCLAFNTYKAVHVPTKIDEAVKDYMRMRDDANTALKTVKQQIIAYCTRHGFLFDGKSKWTKRHLDWLHGLDLGNPIMNEVLQEYMIRYYQLSEKVDMYDVRIEEFSQMDEYREDAAKLQCFIGVKTHTAMALLSEVGDFKRFESAERFAAYLGLVPRDHSSAENGKRLGITKAGNAHLRRLLVESANSYAKGKIGHKSKALMARQKGNSPQVIAYADKANERLRRKYYRLSSHTKRNIAVTAVARELACFVWGMMTEHYD

SEQ ID NO: 257992 - protein, 355 aa, unidentified
MTSVKYIGMDVHTESTSIAVRNSLGKIVMEGVIETRANTILQFLDGLRGDLRVVFEEGTWATWLYDLLKSHVTEVLVCNTRKNAVRKGSKSDRIDARKLAEQLYMNNVKSVYHGERGLRMMKELARSYLTITKDLVRVMNRLKALYRSWGIPCAGTEVYAPRYRAEWLAKISEAGVRRRAEHYYQQLDALWPLRQEARRDLLVESRKHKIWKLLRRIPAIGPIRAAILIAVMQTPHRFRTKRHLWTYSGLGLETYDSAEYRAVRGQLERSRKQATVRGLNKDYNHDLKDIFKGAAMRASTATGPLRDFYDNLLAKGRKPTMARLTLARKIAAITLIVWKKEVSFDANYLKPQQAA

SEQ ID NO: 257993 - protein, 400 aa, unidentified
MTVRTVNNLPAATHGETVRCLFAIELSKQSWVIGFNTPLSEKISRRTLSGCDWKGLLELIEDVRARVSREMGRAVAVMSCYEAGYDGFWLHRQLEAHGVRNYVIDPASLQVDRRARRVKTDRIDAERLLRSLMAYLRGEPKVWSVVRVPSVAEEDARRLHRERDRLVLERVQHVNRIKGLCALHGIYDYHPLRPQATARLEQLRTAQGGELPPRLKSEIKRELHRLELVVEMIATLEAERDAIVEDEASTHLNAEKIQNLHKLKAIGPEFAAVLVGEIFHRSFDNRRQLASYVGVTPSPFQSGSMAHEGGISKAGNRKGRTTGIELAWLWLRYQPDSDLSIWFRARVGIMKGRIRRIAIVALARKLLVALWRYLETGLVPRGAVLRGDERKSNTIERRSL

SEQ ID NO: 257994 - protein, 433 aa, unidentified
MGLIVPTVMPPERADQPPSYDGFVGIDWGSQQQQVSVLDRDRRRMGERVVDHDGASLAQFVAWLWGLSAGQPQRVAVAIEVPRGALVEGLVERGFHVFAMNPKQLDRFRDRHSVAGAKDDRRDAFVLADSLRTDQPSFRRLRLDDPQLLVLRELSRAEETLLEAFRRSANQLRDQLHRFYPQMLQLCSAADAPWLWDLIDLAPTPAHAARLREEQVQGVLKAHRRRRLKAHEVLACLQTPARPVAPGAVQAAQAPCRFLLPCLRGLAEHLQACGQQVGALLHTLAEMPGEGEGPSDVAIVQSLPGVGRKMTAWLFAEAAQPLAERDYQVLRTHGGVAPVTKQSGKRRVVVMRRGGNPRLRHALYHMARVAMQRDAHFNSVYAALRAKGQRHGQALRSIGNRLLRILMAMLRHRTCYDASRIHREPVVQMGETI

SEQ ID NO: 257995 - protein, 355 aa, unidentified
MAVMIGIDPHKRSHTAVALEGADEVLGELRVTADRRQLERLLAFAKRWPQRVWAVENANGLGRLVSRQLLSAGETVVDVPAKLSARVRALSGAGHKTDAHDARSTAVAGRHGTGVTTVTVDDPLLVLLAVVIERRWQLVSARQQTLCRIHEQLTCLVPGGAAKRLSAAKTAAMLRRIRPTDPVGLRRRLIVRELLAELRAVDRKIAPLDADIAWMLDEHGTTLTDIVGIGTTGAATILAITGDPARFTTRAAYATFAGTAPIAASSGDTIRHRLSRGGNRQLNKVIHTAAKTQVRLPGPGRDYYQRRRSDGKTNAEALRALKRHITNAVYRTLQTDAAGRAAKGGKQASEEDTRS

SEQ ID NO: 257996 - protein, 401 aa, unidentified
MTDTRDVAVFLGLDVGKGEHHATGLTPDGRQVIDKPLPNSEPKMRAMLNKLTAKYGRVLVVVDQPASIGALPLAVARDAGCEVAYLPGLTMRRIADLYPGEGKTDARDAAIIADAARTMPHTLRSIELDDQTIAELHMIVGFDDDLAGEVTRVANRLRGLLTQIHPSLERVLGPRIQHPAVLRLLDQFGSPAQIRKAGRRRLVTLLRPKAPRMAERLVEDIFTALDEQTVVVPGTDAAAVIVPKLAANLSALLDQRKQLAVSIEELLESHPLSELLTSMPGIGVRTGARILIDVGDGSAFPTAGHLAAYAGLAPVTRRSGSSIRGESPSRRGNKHLKRAFFLAAFASLADPASRAYYERKKTEGKRHKQALMCLARRRVDVLFAMLRDGTFFEPHAVHQTA

SEQ ID NO: 257997 - protein, 332 aa, unidentified
MYLGIDVHKRYAQVAVMDEAGKIVEEVRVENANLDDLAQRYAGAQAVLEATSNYYHIHDTLSEHLDVTVAHPKKINQIADTDKKTDRVDAKELARMLRLNSVPESYVPSEEVREARALVRGRQTLVENRTKYANKVHGLLSDHGITEDVKPLTVEGREFLRELSIPTPWDELLDSYLDLIESLTEEIQKLEETIEERAGSLKETQLLMSIPGVSYFTALTIYAEVGDIRRFDRDKEVVSYVGLNPVIRESGDSRIEGSISKRGSGRVRWLLVQAANTAVHTCNDEYLSRFYDRLASRKNSQKAIVATARKMLVSIYHMLDRGEVYDPPGVSA

SEQ ID NO: 257998 - protein, 349 aa, unidentified
MTIVGTNPDAVIGGVDTHADTHVAAVVNHVGGVLGIESFRTTQIGYRQLVSWLQSHGELILVGVEGAGSYGVGLARYLQRAGIDVVEVDRPNRQTRHRKGKSDPIDAVAAARAALSGTASGIPKRRDGNVEAIRVLMIARRSAVDTRIETLNQLRHVVFTATSEIRAKFTGLTAISVANKASALKPRKSDDDPVRHMTLVTIRILGQRIQYLRQETKHLNRLIRPLIRQTAPGLLEVYGVGFNTAAKLLVAAGDNPQRIRSEAAWAHLCGVAPIPASSGKTTRHRLNRGGNRQANSALYHIVLTRMKHDQATRNYVARRLGEGKTMGEISRILKRYAAREVFKHLPRPT

SEQ ID NO: 257999 - protein, 370 aa, unidentified
MLYAGLDLSRKRLDFHLLDYEGATVEVGAAPPDADGLRGLTQRLERHGEPIRAAIESMNGARFVHDRLELHGWQVEIADAQKVKGVAPLACKTDRIDASVLAELARRDLVPAFWLPDPRVRAERERARWRLHLVRYRSSLKQRVHAVLLTHGKPCPVSDLFGVRGRQLLTRLGLPDPWQGTIEASLRLIDELDREISDCECELRRLGADHPYVPLLCSVPGISWVLAYTIAAEIGDIGRFPTSRKLAGYSGLCPRVYQSGERDLRGPLSKQGPRYLRWALVEAATHACTHPIYRDRYQQTKARIGRQRGAKVAQVDLARRLAEAIWHMLSRGATLRSQRRHRPPGRLTALKEMRHRSETPIGLVLFIRRR

SEQ ID NO: 258000 - protein, 376 aa, unidentified
MKKVRFVGLDVHADTIAVAVAEPGGTVRSVGMIPNRPESIRTLMKRLGSPEQLRVCYEAGPTGYVLYWQLTALGVRCEVVAPTLVPVKAGDRVKTDRRDALKLARSYRAGDLTPVWVPDAAHEALRDLVRAREAAKKDQLRARHRLGKFLLRHGRCRPPGMTPWTQRHLLWVKGVRFAHAAQEATFLDYLHEIEHMAARLERLEDALDEAVQTAPAPMRVVIEALQALRGIAHVSAATIVAELGQVSRFGRPSQLMSYSGTVPSEYSSGPRTRRGGITKTGNAHLRRIVIEAAWAYRHRPARGRALLKRQQRTSDEVNAIAWKAQHRLHRRYRTLTARGKSKQQVVTAIGRELLGFIWAIGTTAETAAGPARGIAA

SEQ ID NO: 258001 - protein, 315 aa, unidentified
MSDVPCCIGIDVAKAQLDIALRPSGERWAVPNDVSGVTMLVDRLQALHPALLVLEATGGLERLVTSALATAGLPVVVVNPRQARDFARATGQLATTDALDARALAHVADVIRPTPRPLPDAQTQELRGLLGRRQQLIVMRTAEQNRLAGTSGRLQTDIAAHITWLNERLATLDDDLETVLRGSPLWRENDDLLQSAPGIGPVCARTLLWERPELGTLTRQQIAALVGVALLNCDRGTLRGRRIIWGGRAHVRTVLYMGTLVATRDNPRIKAFYQRLLAAGKVKKVALTACMHKFLTILNAMLKHRTPWHAQEVQG

SEQ ID NO: 258002 - protein, 388 aa, unidentified
MRKTITYVGLDVHKDTIVVSLADGGIRGSRGEVREYGKIANTAAAVERLARRLAVNGNELKFCYEAGPCGYGIQRQLSGLGHQCDVVAPSLIPRKPGERIKTDRRDANKLAKLHRAGELTPVWVPDRTHEAIRDLVRARHAAARELRRARQQLSSFLLRNGHAYQRDAWTASHRRWLAGLKFDQPMQHLVLEDAIAAMEAAEERRRRLEAQIEAALPTWSLAPVVGALQALRGVAQVGAATLAAELGDVTRFDNPRQLMAYIGLVPSEHSSGGTRRQGGITKAGNSTARRMLIEAAWSYRFPARISRELLRKQEALSKPIRDIGWKAQDRLCRRYRTLARLGKLSTVICTAIARELAGFVWAIAHEVSRSASSGKSGGKPAVRRVAVS

SEQ ID NO: 258003 - protein, 411 aa, unidentified
METICNDPQVCRIVDLPVYYELETNNGNRDYRIQIGGHYMNYNTVYVGMDVHKESFTLCSCKYEDEKASHYQRTPASYKNVLRYLAFLRTIYGEDTRFVCGYEAGCLGYSLYHQLENFNVECVILAPTTMLEQRSKRRIKTDKRDAEIIARSLAQHNYSPVHIPTETDNQTKEFIRMRDDHKAELKKIKQQILSFCLRQGYQYDGSGNWTAKHVKWLRSLKPAGLYKEILDEYLLTYTILTDKLNRLDQRIEELASKEEYKESVSKLTCFLGIKTHTALSVIVEVGDFQRFVSARKFAGYLGLVPGQHSSGDDRNGLGITKAGNTHVRRLLVESAQSYTRGKIGYKSRVLRSRQAGNSPQVINYADRANERLRRRYYKMVLKDGKKYNIAKTAIARELACFIWGMMTDNIY

SEQ ID NO: 258004 - protein, 397 aa, unidentified
MNRLLYIGMDVHKESFTLSTYHVTLDENELTQDFIGDPLKITDATASGVEKYIKNLKKMLNIKATDNIRIQCGYEAGCLGFDLHFQLKAKGIECVILAPSTIQKSANAKKKKNDPLDSKAIAMALANKTYKSVHVPDKDDLNVREYLRMRNAHKDAVKKVKQQILAFLLRQGIKYSATNWTKAHITWLHGLKFDHVLLKETLDEYITSLENYTAKLERLDKRIGEFAQGDKYQEKVAELGCLLGIKTQAAMTMISEISDFSRFRTASEFASFLGLVPGENSSGEKTQRTSITKSGNSQCRKTLIEAAAGICRGKVGHKSKELLRRQALCNNPIAISYADRANERLRSKFYRLNLRNKKPANVAKTAVARELACFIWGIMTDTYDGKVPRSDEYALGK

SEQ ID NO: 258005 - protein, 418 aa, unidentified
MKTKAGKIGIVNHKTLIVTVDIGKKIQHGYFRSPTGREVKPFAFYNSRNSFERFWARILQFKRQEHLGDIVIGFESSGPYAEPLFHFLMNKPVTMVQINPLHTKRVKELTGNSPNKTDRKDPRVIADVISLGHALTLVVPQGPAAELRRLTQARERAIKTRTAIVNRLEHLIFVIFPEFTTVMKTLTAKSALCVLKNCPTPDGIVRLGLESLVILLREASRGRVGWHRAERLFGAAKNSVGIGEGKESMVVEIKHLVSTIEHQNRFIDILEEQMASYLGRIPCSGNILSIRGIGLVIASGLIGEVGDFGAFKTIPEIMKLAGLDLYEISSGRHKGQRHISKRGRSLLRKLLFFAAINVVRSDGIMHTPYKRMLDRGMPKTKALVAICRKLLGVIFALVRDHTDYVADYVQVAHMPLAA

SEQ ID NO: 258006 - protein, 358 aa, unidentified
MDRVTRVKVSGKRLQVVASDVVHVGLDVHKRSIHVAVWRNGRVARHWVMPADHRQVLARLEPLRAALVRVVYEAGPTGYRLARRLRSAGLPVEVVAPSKTPQRADQSAKSDRLDCVQLAEYSAARLLRPVAIPTEQQEADRQVLRLRDQVMRKVRRVKQQIKSFLLQHGIAEPAGLKHFSAAGVEALRHLALRDELQFCLDELVAELAELQARLRRVNRRIGQLAAEARHAPAVAVLKSHPAVGPITAMTFRTELHHAGRFRDGTEVGQYFGLAPRVRQSGATRRDGPISKTGRGHARAILVQAAWRWIAQDPSAKTVYDRLLHNTGIPQKAIVGVARRLALCLWRMMTRGERYRQAA

SEQ ID NO: 258007 - protein, 403 aa, unidentified
MNMNAVGIDVSKGKSMVAILRSYGEIISKPFEVKHTVSGIRSLIEQIQSIDGESRIVMEHTGRYYEPLVRELSKADLFVSAINPKLIKDFGDNSLRKVKSDKADAVKIARYTLDSWTELRQYSLMDEIRNQLKTMNRQFDFYMKHKTAMKNNLISILDQTYPGANTYFDSPAREDGSQKWVDFSATYWHVDCVRKLSLNAFIDHYQKWCKRRKYNFSRSKAVEIYEASKELVSILPKDDLTKLIIKQAVEQLNTASQTVEQLRTMMNEAASKLAEYPVVMAMKGVGKSLGPQLMAEIGDVSRFTHKGAITAFAGVDPGVNESGSYEQKSVPASKRGSSTLRKTLFQVMDVLIKTKPQDDPVYLFMDKKRAQGKPYYVYMTAGANKFLRIYYGRVKEYLSSLPE

SEQ ID NO: 258008 - protein, 459 aa, unidentified
MPGQSKESKKQPKQKVTKLDSLKQLNLNAAGLDIGAAEIWACVPEDRAEAPVRAFPTFTPDLQALADWLVACGVETVAMESTGVYWIPIYEILEARGLAVYLVNARHLKNVPGKKTDVLDCQWIQQLHTYGLLHASFRPAADMVALRAYIRHRDNLIRYRTGHVQHLQKALHLMNIQLTNVISDVTGQTGLQIIRAIVAGNHDPAKLAQYRDPRCHQSEAEIAKALTGNYRPEHLFALKQALELYDFYNQQIQACDKEIEHNYATFKPVFDEPTAPPTPKKRRSKNEPAFDLHHCLYQLTGVDLTRIDGLDVLTVQQILTETGTDMSPWPTVKHFASWLTLAPHNAISGGKVLSSHTLKSTNRAAQAFRMAAQSAGQSNSALGAFYRRIRAKHGAPIAITATAHKIARIFYHMLKNKQAYNDPGQDYYEQKYRQRVINNLERKAKALGMELVPLQPSVS

SEQ ID NO: 258009 - protein, 348 aa, unidentified
MTLTTIGLDVAKLVFQVHGVDENSRAALKRKLHRHEVVTFFEELPRCTVFLEACGASHYWARLLTALGHEVKLIAPEAVKPFAKKGKKNDAVDAAALCVAGSRPEIQFVPIKSVAQQAVLALHTARSLLVKQQTMLANAIRGLASEFGLVVPQGLHRLEELMVQVTAEASFPAVGRQALIVLHAQLQAAAERIVMLEEQIVVHARQNASARRLATIPGIGPITASLIAATMGDNITAFTSARHFAAWLGLVPRQHSTGGKPRLGRITKAGNTEIRRLLVLGATSMVRRAETWNSAAGIWLRGVLARRPVRLTTVALANKMARIAWALLTRNDVYRAQGRSKVAAGAAA

SEQ ID NO: 258010 - protein, 349 aa, unidentified
MRFYTNQHRHYCGIDLHTKTMYVCILDRDGQVLVHKNLPSNPEAFLEVIAPYRDDLVVAVECIFTWYWLADLCAAEGIAFILGHALYMKAIHGGKAKNDKIDAHKIAMLLRSGMLPQAYVYPAGMRATRDLLRRRLHLVRKRGQLLAHIQMTNQQYNLPAFAKRIAYPSNREGVADHFEDRVVRKSVAVDLALLDRYDTLLTDLESYLVRQAKQHDPQAFALLRSIPGVGKVLALTILYEIHDVKRFDRVQQFASYARLVKCAKESAGKKHGTSGAKMGNVHLKWAFSEAAVLFVRHNEPGKKLLAKLEKRVGKGKALSILAHKLGRAAYYILLRGKAFEIDRFVATAN

SEQ ID NO: 258011 - protein, 364 aa, unidentified
MQKISTMRRSGKNIFRGQLTIGLDLGDRFSAYCILSEAGEIVLEHKLATTPEAMKQVFGSMPRCRMAMETGAHSPWVSRLLAELGHEVIVGHAQKVRLITKSRRKDDRLDARTLARPARIDPELLSPVKHRSAQAQLHLAEIRARAGLVSARTALVNAARGLVKSYGERVHKCDTRQFRRETSGLSTGLREALEPLLSQIESLNESIQKYDRRIEKMAKETYPETSLLKQVKGVGDLIATTYVLTLEDTHRFRKSRDVGCFVGLQPGRRNSGESEPQMRISKEGDEYLRTLLVQGAHYILGPFGEDSDLRLRGQKLSARGGKNAKKRAVVAVARKLAVLLHRLWVSGEVYEPLRNSRKAMSTAA

SEQ ID NO: 258012 - protein, 410 aa, unidentified
MSESPYAFYVGVDWASETHQFTVLTPERRLEAERRIEHTGRALSEMADWLTALADGEPARIAVAIEVPRGPVVETLLERGFHVFAINPKQLDRFRDRHSPAGAKDDRRDGFVLADSLRTDRPAFRQVHVDDPLLIQLRELSRAEEELQTELRRLSNRLWEQLQRFYPQVLRLSPAVDEPWIWALLQLAPTPVAARALRRATLARLLARHRIRRVTAATVLAELHSPALRVAPGTTEAAREHIALLLPRLQLLHEQRGRCARRIEQLLDALEGPDAEHRDVTVLRSLPGVGRVIAATMLAEAARPLAERDYHAVRTQGGVAPITRQSGKSVLVSMRYACNHRLRNALYHWGRVSAQHDPSTRRHYRALRQRGHGHARAIRGVIDRLLVVLMAMLRTGTTYDPARRRVPAAA

SEQ ID NO: 258013 - protein, 337 aa, unidentified
MTIIRIGLDTAKHVFQGHGVDENEQPVLRRQLRRSEMEKFFAKLPATRIGLEACGASHYWARVLRGLGHEVVLIPPQYIKPYVKRGKNDAIDAAAICEAMSRPGMRFVAVKSAEQQAGLMLLKVRDLLVKQRTMLINAMRGHAAEFGLSAAKGPVKVAELLHRADAEAAGVPALAREMLSVLSSQLDALAAKLKALETRLMVLHKQDPMSQCLATQPGIGPIGAVSFSLKVSEPKAFRSGRHFAAWLGLTPKENATAGRRRPGRISRQGDETLRRLLVLGATARIRFTKAGQASPWLLNLLARKPKKLAAIALANKMARTLWAMMVSGEVYRHPKQA

SEQ ID NO: 258014 - protein, 347 aa, unidentified
MIAIGADVHKQQCTLAVQRPDGKLSMLPSMDNTRENWLNLLTQLPPEAQIALEVSTSGHFVMSVLEEAGWRDRAHWVHTAGIDSLRKQKTDRLDAKRLARKLSVREQDPLPEAWFPPRPIRELRLRARQRCWVAVLRTRVKNRVRSLLQMSGLRGTNPFTASGRTWLKQQKLSEATRESVEQLLRFHDFLTTEREKSETSLRGMEKDFPEIARLQTLPGLGHILSAVIWSEIGDLKRFDSPRALVNYTGLAPSLYESGERSVRGGITRQGPVWLRWALITAVNAATHGQNAFARRYRRLRRHKLPNVAKTAVARSIARCAYGVLKHGVDYQEQRWGRKAGIEMEQEA

SEQ ID NO: 258015 - protein, 318 aa, unidentified
MTDTAQWVGIDVSKAHLDVMVLPGEQTWQFRNDATGHTSLVERLREVAPERVVLEASGGYEAMLVAALACAELPVVVVNPRQVRDFAKATGQLAKTDQLDARMLAYFGQVLKPELRALPDAMTQQLSALLTRRRQLVEMLTAERNRLMTAAVQNAPQPLRDQLGTHIDWLQHQVQVLDRELDDQLRSSPIWREKENLLRGIKGVGPILSATLLAEVPELGLLDRRQIAKLVGVAPLNQDSGKHIGKRTIWGGRAAVRAVLYMAALSAKRYNPRLRDLYQRLVAAGKPRKVALVACMRKLLIICNAVLRTHQPWRTETA

SEQ ID NO: 258016 - protein, 408 aa, unidentified
MNPLYVGIDVSSKSNVVYLMLPNGDKHSNFELKNSHDGSTQLVKRILSAMTSRSLDTVLIGLEATSVYGDNLVYFLREDATLAPFNRKIHVLNPKQVNKFKESYNDLPKNDYVDSFVIADCLRFGRINKEVYIGDYRYKTLQNLTRARYYAVCNLIKEKQRFMNVLFKKYSTMTQEKVFSDTFSTTALAVYEEFESAEALANMDLQELTDFIMEKGKNRFPNPDSVAKAIQKAARSSYRLPKTVNDSVNQVLSISITSMKALESQIKEFDKAIAAQMELLPNVLISIPGIGPVFSAGIMAEIGDINRFGNHAQLAKYAGLAWKQHQSGGFEAQTTRLINSGNRFLKYYLCEAAFSLVRCDKEYSDFYHLKYKEVNRYQHKRALALTARKFVRLVFVLLKDNRLYRPAK

SEQ ID NO: 258017 - protein, 429 aa, unidentified
MEEVDEVELVVQRVAALDLGKATLEACMRVPHPSKPGRRMQEIRGYATTTATLLEMAIWLRQWGIERVVMESTSDYWKGVYYLLEAEGFDCWLVNAREVKNVPGRAKTDRADAVWLAKVAERGMCRPSLVHPPPIRRLRDLTRYRRALVSDRSREMQRVEKLLKDAQIKISSVLSDIHGVSGRAMMEALIAGQRDPRSLARLAKGLARKKTDRLEEALRGFFTDHHATILQMMLDNIDRIGAQIAALDARIAEAIGPFSRQGSRLADIPGVNTVAAAELIAEIGVDMTRFPSAAHLVSWAKFCPQIHQSAGKSRSKARGKGNPWLAGTVGRIVFSASHTDTFLGARYRRLARRRGKPKAIVAVGNSVLTVVYHLLSDADLDFCELGPAHYESRINKHRRARDLATQLQALTGQHIVIRDGKAIITDNAA

SEQ ID NO: 258018 - protein, 420 aa, unidentified
METPQVSFKQVVSRGCGLDVHKKTVVATIDGEGLKKQTREYGTVTSSLKELRDWLLENGITDVVMESTGVFWKPVYNVLEPAVITVWIVNAAHVKNVPGHKTDKKDSAWLCKLLLAGLLKPSYIPAKEQRELRDLTRYRTRLIQSNASNKNRIIRILEDANIKLSSVLSSTNGAVGTKLIDKICEGQAITLQDIDEVYHKKLEASKEEIFEACQGFITGHHVYMLQIIRQEIAGTLRTIESLDQRIKEVLSPYENALELLKQVPGISTKSAEDLVAEIGLDMGVFPTEKHLASWAGMSPGNNESAGKKKSGRTTGGNKQVKAVLTEIAWAATRTKNTFYHARYHKLAARRGKKRALIAVGHSILKSVYHILKNNCDYKELGAAYLISRTEAKRKAYLKSELSKLGYIVDLKELPPVEKAG

SEQ ID NO: 258019 - protein, 345 aa, unidentified
MDHFAGLDVSVKETSVCIVDDTGRIVREVKVASEPEALLAVLKNPAYHFERIGLEAGPLSQWLFSALAEAELPVVCVETRHMQAVLKAQINKTDRNDARGIAQMIRVGLYRPVHVKTLRSQKLRMLLTHRKLLQSKAIAIENDLRGTLRNFGLKVGMVGKVRFEARIQELVENLPDLAELVEPLLIVRRALREQIVILHRRLLAIVRDDEVCRRLMTTPGVGPVVALTYRATVDVPARFRKSKSVGAVFGLTCSKYQSGEIDRSGSISRCGDEMMRVMLYEAAQSMLRSKKWSWLKAWAMQIARRRGMKKAIVALARRLAVIMHRIWVDGTEFRWTREQAAVAAA

SEQ ID NO: 258020 - protein, 411 aa, unidentified
MKLFCGIDWAETHQDIAIVDGGGNLVAKKRITDDADGFAQLVELLAEAGDSAEHRIPVAIETPRGLLVASLRATGRSVYAINPLAVARYRERHSVARSKSDHADAMTLANILRVDAHVHRKMPADTELCQAIAVRARGQQDAIWRRTKASNELRSLLREFYPSFLAAFKGRFQIGIASLEARAVLAIAPTPAVANKLSASRLAAALRRAGRTRNIDQVAAEIKTALRAPQLRQLPLVESAMGRQTLALLAALDAACVSVDELGQAAAELFHTHPDYAVITSFPGLADSTGARVLAEIGDDRTRFADAKALKAYAGTAPITRASGRSISITRRRIKNDRLAAAGWVWGFAAMANHPAAQDHYRRRRDQGDHHAAAIRHLVNKFLGQLHYCLQNQQMFDTVKAFPPPNEGLAA

SEQ ID NO: 258021 - protein, 354 aa, unidentified
MIIIGVDFHPEFQQIALLNTTTGEVEEKRLAHPDEAERYYRALASAGETVRIGMEASGQGRWFERLVAELQFELWIGDATEIRVKRGRKQKTDRQDAQHILKLMLKDDFPKIWVPSWENRDLRQLLWHRHRMVQARTRVMNQLQAVALNEGLHCKKKLWRERGRQQLESFALAPWASRRRHDLLELLDRLNPTIAALTQAIEREVENYPAAQRLKTHPGVGVLTALAFVLILGDAERFHCGKQVASYLGLVPLEESSGNRRRLGHITKQGSSIVRFLLVEAAQVTVRSLPEWRSKYFHLVLRRGRKIAKVAMARRLAVRLFWMMRKQWDYEQLKKFGSHAGQPGNRDGVQSNTE

SEQ ID NO: 258022 - protein, 387 aa, unidentified
MKIMAGIDLHSNNAMCGLVDSEGKRLLHKKVPCDLRCVLSVLEPYKQRLESVAVESTFNWYWLVDGLQEHGYKVALANPAAMQQYNGLKHTDDKSDAFFLGELQRLKILPTAHIYDRKTRPVRDLLRRRLLLVHQRTSLLLSLKSLHARTSGCSLSLGLAKALLPEQAAKLFRHPADQLIAREQAQHIRQLSQSIEAIEKMVLGEVKQLFCYRQLQTLPGVGSILALTITLETGDITRFPSAGDYASYCRTVDSARLSNERKKGQNNEKCGNKYLAWAYVEAANFAQRSDGPCRRFFDRKLAKTNRFVATKALACKLSKAAWYVMSQGVDFDSARAFPGPRPEAQTQRSSKAQAGQATKQTELKKKTDLGRASVNPSKGSGSKTLRD

SEQ ID NO: 258023 - protein, 337 aa, unidentified
MKRYLGVDLHRTQFVVCTRLENGQQQVRQWRIGQLAEFVEQLESQDEIAVEAMGTTARFHDALVGRVARVVVVNPHQFKVISESVKKTDRHDAAALALYLEKGLLPEVRMKPKQHRELMHMAETRDLLVKQRSALKGKINNLLAMQGIELKREALSSKIALERVLASAVSPMVGLELRVLVGQIRSLSESIAALDQQLEEEGQQLPGHENLTSIKGIGTLSATILLTAIGKISDFADENKLAAYLGLVPKVENSNERERSGGITKQGNKLARTALVQCGLVAKRYSPYLSRFYERIKQRRGGGKAKIALARKLVKIVYDTLKNRWVFEDFPTFTLAA

SEQ ID NO: 258024 - protein, 356 aa, unidentified
MEGERFVGIDLGKRTYVVCAISRGGSLEQWHGKTDGVGRDHLAARLRCGDVVGVEAGSTAFHIARRMQTVHGVRVVVLNPGKLAVIYASMKKTDKEDALKIARLLETMREEYLPIVPLPTEAEEDMRRLAGSQIFLKKERTRLINRLHALFVGAGITTITKKDLARDESRRSMLEMLFGVYEEVAGHLVVILAEVEQQIAKLDQSIRNALIDRREQAALLMSIPGVGPVATATFLGYVGDGSRFETASQVSYYAGLVPRLDISGETQRLGHITKSGNPAIRRAMIQAAWTAVRSPLGNPFREVFERIAATRGRGIAIVAVGRRILELMYTLITRGEYYKYSSAAERQRKLRRYKVA

SEQ ID NO: 258025 - protein, 371 aa, unidentified
MEKGITYVGLDAHQETIHAAVLLPGAEKAVEDSFANTPEAIRRWARRLRQQAPGTVRCCYEAGPLGYGLLRELKALGLECIVVAPALIPVRPGDRIKTDRRDARKLAELLRAGLLTAVHPPTPEQEAVRDLTRAREAVKRDQIRQRHRLSKFLLRRGVRWVGGRKAWTQPHLEWLRGRRLEHAADQAILDDHLLGLEQIEGRLAALDRTLEAMAQEDPYREPVGWLRCFRGIDTLTALALVAELHDWRRFDSPRARMAYLGMVPSESSSGGKEKRGAITKAGNVRLRRLLVEAAWHYRHRPGVSYRLRARRSGQPARVIAIADRAQQRLHARYGRLQARGKAHNKIVVAVGRELVGFLWAAMDPKALAPTA

SEQ ID NO: 258026 - protein, 316 aa, unidentified
MAALICGVDVSSISLDARVGSQGSEARFENTPEGVGRLIAFCHEYGVELVAMEATGGYERLAFGLLWGSSVPVALLNPRAVRRFAQGMGLEEKTDRIDAGVIAWFAEVKNVVPTQPASAAQARLEAMVTRLRQLTELHAAQRNQRLLVSEPSVLDSFGELLALVKTQIRALEKTIAELIAADPLWQQLDTAFRSIKGVAGRTVSRLMAEMPEIGTASNKAVSKLAGLAPLAKDSGKTQGKRVVRGGRSNVRTILYVVADVVRRYNPDFAAFADRLRAAGKPKKVIRIALAHKLLVRLNAKAREVRQPHLTAVCSTC

SEQ ID NO: 258027 - protein, 353 aa, unidentified
MDTIYIGVDFHARQQTICSLTTMGGEIQTHELKHQNKDDVRAFYAQFTGHVIVGLEASGYSPWFEQLLEDLGHEVWLGDATEIRRRARWRQKNDRRDAELMLDLMLHDEFPRLHRPSPQSREVLRMLRYRQKLIKIRTMGKNSLQALALQSGLARRSHLFTRAGQQELRRATMSPAMQWQREQWLQLLEPLNERLVETMLWLKQQSQDDARIKLLRTHPRIGLLTSLCVVHTLWPVSRFRNQRKVAAYAGLEPMERSSAERKHFLGVSKAGSRVLRYLLVEAAHTAVKKDDDLKRFYQRLAKRRGRPKAKTAAARKLLIRSYIMLRDEIDYAEFRRRAVAARLARQSSRPPCL

SEQ ID NO: 258028 - protein, 473 aa, unidentified
MTDYHLGGDASKGYCDFVILNKSKEIVEPNFQLDDTYSGHQILIKTLKVLFAKNPDMVLYAGLESTGGYESNWYNTLLNLKDTVNIKVARLNPVGVNHHKKAGLERNSTDKISARVVAEYLIDHGKNIVYNREDAKVALKKEWKFIKMLNKQCVQLLNQFESALYNTHPHLLTYCRSEVSNWLLMVVMQYPSAVKLSGARPKTLAKIPFVTLERAKELVKNAKESIGAEQDEVTEFRLKSLAQQILHSRQLIKTQTKAMMHFCPFPEIEIIQSFVGISEFSAVGLMLVIDNIARFKYCGKLSAYVGVHPVYKDSGDGSGAYRMSKQGSKEVRSILFNVARCAIVHNEMIKNRYEHYLAEGKEKMAAIGIIMHKILRIIYGMLKNNQKYDPQIDQTNREKSIKKNTELGKGKGMKPDKNRRYQERDQNAPISRRQQKKRNQLQLVQTQQIDNKENGKTDKRTNSQGMLKKREKA

SEQ ID NO: 258029 - protein, 347 aa, unidentified
MEQIIRIGMDTSKHVFQLHGVDAADQPVLRKKLRRSEMIAFFEKLPTTVVAIEACGSSHHWARLLGALGHEVKLIAPQLSKPYVKRGKNDAADAEALCEAMSRPTMRFVPVKSAEQQASLMLMGMRDRLVRNRTQLANAIRGYAAEFGLTAAKGMCKVEPLLDRIATDPAIPTLARELFASHAVEYRHLDEQLGEIDEKLMKWHRANECSRRLAQIPGVGPVGAALLMMKTPAPELFASGRQFAAWMGLTPKDHSTAGKSRPGIITRAGDEALRCTLVVGATALLQHVRTGRGKNATPWLLEMLKRKPPKLVAVALANKIARIAWKMMMTGEVYRANTSPPPHACAA

SEQ ID NO: 258030 - protein, 380 aa, unidentified
MVATARSVEHNAEEVLFVALELSEAKWKIGTTVSPGQKAREKTIDAGDLESLAKEIERAKKRFGLPESALVVSCYEAGRDGFWIHRHLTSLGVRNVVVDPASIDVNRRRRRAKTDRLDVGKLLSNLMRWWSRERKVWSVAVVPTEEDEDARHFHREQETLKKERTAHINRIKGLLKLHGLTLKRIGKEFVKELGELRLWDGSGLGPQLRQRLEREYQRLEMVNEQLRVLARQRQEALRRCDDARLEKIRKLIGLRGIGELSAWPIVLELFGWRVFSNRGQVGSLVGLTGTPYDSGASSRELGIDKAGSGRLRALMTEVAWNWTRYQPRSALTVWFNERFANGGKRLRKIGIVAVARKLLIAIWRYLEQDIIPKGAIVEKA

SEQ ID NO: 258031 - protein, 340 aa, unidentified
MDHIAIDLGSRTSQICVRDAQGQIVDEQSYTTRHLGTYLRRRPAGQVIVETSSEAFGVARMAQAAGHQVSVVPSVLSRALGVGYRGVKTDVRDARALSEASTRVALPSVHIPSEQSLHWRAMSTSRQALVRARTLLINRVRGYLRTQLTARVRCSSKTMPKAVRRALESSEDGLPGHLEAALASIETLSAQIIAIESEMAAVIDEEPVAKLLMSMPGVGPITALRFMAAVDDINRFGSAQALTSYLGLTAGERSSGQTRRRTGIIKAGPSAVRHALGQGAWQLWRRRPEDPMVLWARRIAERRNTQIAITALARKMAGVLYAMWRDGQPYRPQLAAPPTT

SEQ ID NO: 258032 - protein, 328 aa, unidentified
MCTLGIDVSKNKIDLCLLTAGPGGKKKHKVLTNEPAVARKVVDWLNAQKCVPESVTVVLEATGIYHENLAYGLHEAGVSVCMANPCRVREFAHGMDILNKNDAVDAFVLACYGELKSPAVWVPPSPEVRKLRALLRQRDALREDVQRTVNRLEKANSTSTPQEVIRSLERTKSWLNEELARIEKLITDHTDNDPGLKADLELLKSIKGVKDQVGREMLALLKDGTFKSASQVAAYLGLTPVEKTSGSSVRGRPHMSKTGPSGVRAKLYVAALTASRWNKQAKAIYERLVAKGKAKKAALGAVMRKLVHLCFGVLKTRLPWDENYVATA

SEQ ID NO: 258033 - protein, 341 aa, unidentified
MLTNNVIAIDLAKNVLQACHISVHGELLSNKPLSRQKMKEFLAKAKPSIVAMEGCCGCHYWGQLAEKHGHQVRIINSKKVKGYLEGHKTDHNDAIANAAIQIGIKYSRPKSLEQQSMHSLESSRRFLSRSVVSLGQHIRGTMLGYGVANPRGEKGLKASVQTALDGETSIPANVVSVLSMLWNQYKELKAQLIAFEKEKNALARQIEPCQRLMEIEGVGETTAAMLYTTLGDGKQFKNGRQASAFVGLTPKQHSSGGKVFMIGIDKCGGVKELRSLLYLGAMSYVGRLPEKPKTQKDAWLRSIIERIGFKKACIALANKVVRTAWAMLRYETEYKPVLLTN

SEQ ID NO: 258034 - protein, 388 aa, unidentified
MCSGPHEDNPGRRRQEVREYATRVPALLELADWLRSQSVQLVAMEATSSYWKPLFYLLEAEGFACWLLNAKHVKNVPGRPKTDRLDAVWLAKVVERGMCRPSLVHPKPIRHLRDLTRYRRSLIRERTREKQRLEQLLEDAQISGRQMLQALIAGQRNPKALAQLARASMRSKIATLEEALTGHFDDHHGFLCQLMLERIDATTAKIDQVTAQIDQVIAPYAHQVAQLDAICGVGVVAAQELIAEIGVQMGRFATAAHLVSWAKFAPIDHQSAGTKKRGATGRGNPWLAGTLGEIVAALARTDTFLGERYRRLARRRGKHRAIVAVGNSVLTIVWHLLADPQARYQDLGPDFYWSKVNQRRRERDLVRQLEHLTGKQVILQPPPEQPAA

SEQ ID NO: 258035 - protein, 414 aa, unidentified
MNNKRKRIQIVNEKVMISAIDIGKNKNTGYLRCYNGVEIKPFEFSNNKKGFKEFWEKIFRARVIHKIDKIIIGFESTSSYGEPLIHYLLDKPVQLVQVNPMHTKRVKELHDNSPLKTDTKDPKVIADIIQFGHYLSLVIPKGASAQLRRLNNCRERIIKNRTALINRLHSLVCAIFPEFLVIMKGIRSKTSLRFLKNYPTPDDIIKLGFESVGIELKNISRGKFGFDHAKRLFEAAKNSVGIKEGIESILMEIEYIIKEIHSQNQFIDQIEKKMKQYLKDIPYSRYLLSIKGIKEITVSGIIGEVGNFEDFHNQKAIIKLAGLNLYEVSSGEHKGKIQISKRGRSILRKTLFFASMNVIRKDGVMHDYYHNLINNGMLKKKALIAVSRKLLRLIFSLARNKRYYIHNYSLKSAA

SEQ ID NO: 258036 - protein, 332 aa, unidentified
MENFYFIGVDVLKKKLNFCVMFEGKVVHEEETSNHQGAIMSLLHHLEEDYGIASGQMLVCAEHMGQYTFPLACACKAVECRLWLENAAEIKYSSGVQRGKSDKVDAKRIAIYASRFQDKVRYYERPTEDIERLKQLESERTLYVTDFAKYKGQMKDQKEYMPKSLYERKMKRLQALMDDLEEAIQSITDEMDEVIASCPVLFRQRELLMSIDGVGRVVATNMIIATEAFTRFDDPRKFNCYAGVAPFSYSSGSSQHSKARVSHRADKVMKRLLHLAAVAVTHRIGGELKKYYERKVAEGKNKMSVINALRAKIVARMFAVIKRNERYKPILS

SEQ ID NO: 258037 - protein, 436 aa, unidentified
MSKKSRIAGLAALYGRVCGLDVHKKLVVACVRILDAKDGTVQSTLRKFGTMTADLLELRQWLGELKVTHVAMESTGVYWQPVFNLLEGHFQVWVVNAQHIKKVPGRKTDMKDAEWIAQLLQCGLLKPSFVPDRQQRELRDLTRQQTKLVQQRNAVDNRIQKVLETANIKLGSVASDVLGVSGRKMIEALIAGEKDVTVLAELAQRKLREKIPELQRALEGELTEHHRFLLHQLLGQYDFLEKEIASVSERLGAVAPPSFRAAVEQLDAVAGVGERGARALLAETGIDMSRFPTHKHFASWAGRCPGNHESAGKRRSGKTPAANRHLDAVLTEMAHAAVRTKTSYFKSQYHRLAGRRGKKRAIGAVKHSLLVTVYFMLRDDKPYKDSVLITLINSIPNNGFVTMSENSKNSDKRWSYHRWLMQPKPHSQPNFQRSDS

SEQ ID NO: 258038 - protein, 374 aa, unidentified
MSDCSEVFVGLDTSKLRNAVAIAEGGRNGEVRYLGEIENAEAATRKLVKKLAASHRRLTFCYEAGPTGYGLYRQIKALGHECVVVAPSLIPKKPGDRVKTNRRDALNLAKLLRAGELTAVWVPGERHEAMRDLVRAREAAVDDLKSKRQQVLSLLLRLGLHYSGKRTWTRTHMRWLMGQKLVHREQRIAFEEMLLAVRQAEERVIRLEQAIRAAVPEWSLSKLVTALMAVRGLDLISAVIFMAEIGDLSRFASPRQLMAYLGLVPGEESTGDRVWRGGITKAGNHRARRILVECSWSYRHPPRVGKKKLAKVEATSPAVQEIAWKAQARLTARYRALSRRGKRQTLVVTAIARELSGFIWAVSQAVGAPATAAM

SEQ ID NO: 258039 - protein, 421 aa, unidentified
MTHPKMLYTYVGIDSHKETHTAVFLNCFCEKLGEITFENLPADFKDFLEKSQQYKLDGTTLLFGLEDVSLFGRGLTLFLRANNQPVKHVNAYLVAQERKNNSYEKSDSVDAECAARCLIYKFDNLPYSEDDKRYHVLRTLVVRRNFIMKSCTSLKTYLHSLLTLDFSDYHKFFSTIDGKTSLAFFAKYPTPNSLNGISIDELSQLLWEHSGGLLGMARAKMILDTVENLPPVHEINGRVIQSTIAQLKYNLQELEYTETELAKVYHEFNVTLTSLTGLDIVAASQFLSCIGDVRKFSIPAKLARYAGVAPSSHSSGKKDIQFASHRGDRELNSLFYTLAVRSISTYEPGHKAFNPFFHNLYHRKRAEGKTKSQSLKCVQRRLVNILWGMLTFGEEYVAPPMISVENYEQKEKPSKKPKKET

SEQ ID NO: 258040 - protein, 412 aa, unidentified
MSVTDTATSARGNSAGVDWAKDDYAVCIVDGDGEPLQRLTLTYTKTGLRRLIDLLDRHRVDAVGIERPDGPIVDALLAADTTVYVIPPSQVKALRRRYGSAGNKDDRFDAYVLADTVRTDRRRLTPLVLDSEATTGLRKLCRARKDLIAHRVAVANQLRAHLATALPACVELFNEIDSSITRQFLTRFTTQDALDWLSPTRLATWLKSVSYSGRTDPALLHTRINAAPRGATGEHGQTLAGITRAYLATLATIVAQIDTLNQQITQALDRHPDRNIFTSLPRSGTVRAARLLAEIGDARGRFRTPAALACLAGVAPSTRESGKVRIVAFRWAVDKQLRDAVCDFAGDSRHANPWAANLYARARGHDHPHAVRILARAWLGIIWKCWTTNTPYDPHRHIALQHLQNQDQPAEA

SEQ ID NO: 258041 - protein, 374 aa, unidentified
MKKTQHYVGLDVHKDTIMIAVADGGREGEVRLYGQVSSDLHAVERALRKVGADGGELHVAYEAGPTGYVLYRRLRQLGIDCVVVAPSRTPVDKGNRRKTDRRDAQMLARLHRAGELTAVHVPEAVDEAIRDLTRARADAVRDLTRARQRLKSFLLRHGYRYSGKANWSEAHRRYLRELELPAPSLKAVLEEYLLAVTQCEERVSRLEQLLGLQAPLWRLYPAVEALMTIRGFQLVAAAVLVAELGDVRRFAHPRELMAFLGLVPKEESTGESRRLGSITKAGNAHARWILIETVQHAWLPPKVSAQLSKRQEGQPAARRELSWKIQVRLHKRAWHLSRRGVMKPKVTVALAREMAGFAWAMLQTADWPAMTRAA

SEQ ID NO: 258042 - protein, 335 aa, unidentified
MHYLYYVGLDVSKETFDASLVAFEDANEMAHRKFANSRKGICSCLHWVEKRHGIRLDDVIFCAEDMGSYISEMAVCASDRTLTFNFSLISPLVIKYSMGIARGKTDRVDARRIAEYAITHYRKIALYLPAEKELCQLRTWLILRAHLAKQRVAKLVLLEKLDYKEKFADVSIQRSMLQEEIAYAETHMKTIEREMKELIAADSNICRNYKLLTSIKGVGPITAIVMLCSTLNFTKITDHRKFACYCGLAPFEHSSGTSVRGGCHTSSMANRDIKVQLNRSALIAIRCDPQLKAYYERKVAEGKHKFSVLNAVRAKIAARCFAVVRRVTPYVALQI

SEQ ID NO: 258043 - protein, 367 aa, unidentified
MKKVSTVVAEQSRKLSQPKLTIGLDLGDRTSWYCILDESGSVLLEQRLSTTARALEEIFGAIPRSRVALETGTHSPWVSRLLSGLGHEVIVAHARKVRLIGESRKKDDRLDAQTLARLARIDPGLLCPVKHRSAEAQADLTVIRARAAVVRARTALVNTARSLAKSYGERLRGCNVRNMNPEKAEALSPELQSALEPLLAAIESLSEQIREYNQRIEKLAQQSYPETALLKQIKGVGTLIALTFVLTLEDPRRFRKSRDVGCYLGLQPGRRNSGQSQPQMHISKEGDPYLRTLLVQGAQHILGPFGVDCDLRRWGLKLAERGGKSGKKRAIVATARKLAVLLHHLWMSGEVYEPLHNGDRISLPAAA

SEQ ID NO: 258044 - protein, 379 aa, unidentified
MRRVCGLDVHKDSIYMCILYENGSKIESVFGVLTPELDKLRDLLVSHHVCEVALESTSIYWIPIWNILSVDFSLKLVNPYFIKQLPGRKSDVKDAEWIATVLQKGLIRGSYVPDRMIQCLRQYERRNHELSKNIVHAEQRMDMILQHCNIRISNYVSCISCKGYQKVVNAIISGESNPKVLVTLIHKRTLNKHGRQVVEDSLNGFVSDTDRDILRQYRDERMQMEQHKSENKAKMQAICEAHYCEELELLQTLPGIKEESAANIIAEIGVDMKMFLTASAIVGWAGLKPRNDQSAGKIKSRKITHGNKYLRKILVEAAWSAARTKDSRFMKMYQRLLARGKSKQKALIAVARKLLVLIWNMLSKKEAFNPEYKRRIQAA

SEQ ID NO: 258045 - protein, 424 aa, unidentified
MNCNQNFKISQVTEGTLVLGIDIGSNTHYVRAFDWRGLELSKVFKFKNSFEGFQSFVLWVNDLCCKYNKSKVIAGLEPTGHYWFSLGELLKENNITIAIVNPYHVKQSKELDDNLQTKNDSKDPKIIAKLVIDSRYSFPYIPEGIYGELRVADKLKNDITQQIISIKNKIHRWLSIYFPEYEKIYSSIDSKSGFLLLKETPLPKDIVELGSEGIVERWKQTKLRAVGLDKAKKLEEAAKKSIGCKNITSSARFEIKLLIEDYEYKQNQLNSITEELNKLCEKIPMIKEIAEIKGIGIATAISFVAEVGDIRRFKSAKQVQKYAGLALKENSSGKHKGLTRISKRGRKKLRTILFRATIPLIGFNKEFSSIYNYYIERKDNPLKKKQALTAICCKMIRIFFTILSKGIKYDETKMLHDIKRPVAA

SEQ ID NO: 258046 - protein, 342 aa, unidentified
MSEKRYMGVDLHRKVFTCCIRLENGRQFLSEWRLEQLPQFVKKLRATDEVAVEVTSNTRLFYEAVAPHVARVVVVDPHQFRVISQSVKKTDPNDARNLALYLAKGLLPEVRMKEKQQAQVASLTQTRDRLVKLRTALKNKVNNLLSARGIALEKEELSGEKGLTRVLAMKVEELTRFELQVLVEQIRSLNHSIAELEKVIEREGKKLKGHGNLTSIKGIGSLGASILLSVIGDIRDFSDEGRLASYFGIVPRVHNSNETEHSGHITKRGSKLGRTALVQCALIAKRYSPYLANYYERIRSRRGTGRAIIALARKLLGIIYRTLKNNWVFEDFPNFVLREATA

SEQ ID NO: 258047 - protein, 355 aa, unidentified
MANSTKLDFTGEPIYIGLDVHKKSWSVSIHSALCEHKTFTQPPDGDILVNYLRRNFPGASYHAVYEAGYSGFWVHDQLIEKGVACTVANPADVPTKDKERRTKRDQIDCRKLARSLRAGEIEGIYVPCRKKLEDRSLVRTRQSMVRKQTRCKNQIKSILFFYGIAIPEEWAERRWSGPFVRWLESLPMERASGDVALRMHLDELKHLRQILARLDREIRLLAQTEEYQTQVRLLRTIPGISTLTAMILLTELQEISRFRSLDELASYVGLIPDTRSSGETEHTGDLTQRRHGQLRASLVEAAWVAVRKDPALLMAFQESCKRMRKTRAIVKIARKLLNRVRYVLKNQAPYRIGVV

SEQ ID NO: 258048 - protein, 352 aa, unidentified
MNKGSKIDFTGQPIYVGMDVHKKSWSVSIHTEHFEHKTFTQPPEVEKLAHYLQRTFPGGTYYTVYEAGFSGFWIHDRLKEQGIHCMVVNPADVPTKDKERTGKADKVDCRKLARNLRSGDIKGIYVPSRMKVEDRNLVRTRQSMVRKQTRCKNQIKSILFFYGIPIPEESHWSRRFIAWIETIRMERTSGDLALKAHLEELKHLRQIIATLNRAILSLSRTEEYRAYVLLLKTVPGISTLTAMILLTELYDIFRFPSLDRLASYAGLDPDIKSSGETEHTVGITYRRNASLRSVLIEASWVAVRKDPALMMAFNKLSLRMRKTKAIVHIARKLLNRIRFVLKNRQSYVPAVV

SEQ ID NO: 258049 - protein, 318 aa, unidentified
MVEAPCYIGADIAKDTIEVAYANAMGAPLRIENRRTAISAWLRGVPRGTHLALEATGPYHELLCTLAYRRGLVVYLLNPKRTRHYLQAMSPRAKTDRVDAPLIATFLANERPRLRPWAPLRPEERRAWALLRRRAKLVNARQRLEQSLAGLPSLRSTRAALLAELERALGVLDTQLARLLAQDPAHAHLLHDLQSIVGVGTLTSSALLLALKRGTFATSDAFIAFLGLDLRVRDSGNKRGRRRLTKHGEPELRRLLYTAAMAARRTQAWRPVFDHYLGRGFSSIQTLVIVARRIARVAWSLYKHGGSFNPQRLVQGLT

SEQ ID NO: 258050 - protein, 412 aa, unidentified
MTAKDQFAAYVGLDWADKKHDVCVQFKNGDRIFHVIEHTPEALDIWLNELHQRAKGRIAIAVELKKGPVVYALQKYPFVTVFPVHALSLARYRQAFWPSGAKDDPQDAELALDLMLRYPHKIKAIEADNPDIRLLQQLVEQRRLLVEDKRRFVNRLINTLKQYYPQPLEWFSHRDSSLFCELIIRWPSLQQLKRARSDTVRHFMNAKGGPAVAYTEQRVASIASAIPLATDKTVIEANALMATALASQIKLTGDLVRTYDERIESLFDTLPDAELFKSLPGMGPCMGPRMLAALGDNRNRFNSAEEIQNYAGIAPVTERSGQKSWVHWRWQCAKFVRQTFVEWTAKTVNSSYWARLYYQGQREKGKSHQSAIRALAFKWIRIIYRCWKTRTRYDEAKYLLALEARKSPLLKP

SEQ ID NO: 258051 - protein, 349 aa, unidentified
MDDIKTRKKNYTYFIGTDISKNKLDHAVMKGKQFLFHRETLNEPEKIAAFIAELKTLPGFTIGRAVFCLEHTGLYGQPLLYGLKKAKANVVIEDANQIRNSLGNMRGKNDKLDAMRIAEYAHGNREKLRLWVPRRPVVQQLAELMTLRSRLNTVHGAIATPLKELAQFNKKQKSNQPARFCQNTLSAITRDKTELERHIADVIQADERLRHLMAIVSSVPYIGPVTALQIIISTNEFIDIHNPKKFACYAGVAPFTQESGTVKAKSRVSHMANKKVKALLHICAMAAVSRNTDLRAYYLRKTEVEGKHKMKVLNAVRYKLILRVFACVNQNRLFEKDYVRKTALCLVED

SEQ ID NO: 258052 - protein, 450 aa, unidentified
MKVFIGIDIGKEYNYASFLNNEGMEIDKRFKFKNNHLGFLSLKDNIDKLTYDCNFNYDDVLIGFESTGHYWINTDWFITEKLNIKTVMVRNDAVRHTRALNSQGKGKNDSLDSRTIAECLKNGYYFDVQGRKEDYIVLRRLTRERSELEKEIARYKNRFRAWLDVNNQIFLENFSNVFSTGALALLKVYPSPLDIIQDSYLEVREKLKEVGYKRTNNTFKIYYEEAKTYKNIINGISYADRLEISEYIETLEMYMKKKESLDEKIEALMNYLEGKVYNSLSQIKGMPKAQVASLLAEIGNVNNFKSARHLISYAGLNIQGEGSGKNKGHSWISKTGNRRIRKEIYVITFTLVKHNDYFRGLYCYYKSYKRPNEKSNKAMLIALACKILRVIYGMLKYNVDFDLNEMLKNYDFRNINKEKFIDEFLGSSEKKQKIISQEIEDIFLNNRKSN

SEQ ID NO: 258053 - protein, 322 aa, unidentified
MAMLSFGGIDVSKDRLDVMVLPEEQCSSVSNDAAGWDKLIEQLRGSSIAAIGIEASGGYERGVMRALLAADLPVRQVNPFKLRQFARASGVLAKNDPLDARMIASFVAIMPTRPAQRPAPAAERLTEMLAVRRQLSAEKVAAENASRLLEDAMLQRLSRRRIARLAADIAMLDERLVEVVATDDALVHRYRLLTSIPGVGAVLSCTLLALLPELGCMSRKQLAALVGVAPYAFESGTLKGRRCIWGGRAHVRQVLYMAAMSASNWNPAFKTFHDRLKAAGKLPKVAIVAVMRKMITTLNAMVRDDVMWADRLTGRHSVPTAR

SEQ ID NO: 258054 - protein, 388 aa, unidentified
MFKTVERPDAPAAIRMDIGAIFVSLELSRSTWLLTSVSPGAGEKMSQHATPAGDLRQLFECLAELKRKAMARTGKTYPIIVIQEAGLDGFWIHRALEREGIESHVVDAASIAVPRRRRRAKTDRIDGKTLLRTLMAFKRGEPRVCAMAKPPSVEEEDRRRLGRERKTLIAERVEHVNRIKGLLFTQGAIDYQPLRRDRRARLEALRTGIGDPLPARLKGLISRELDRLELLLAQIKAVEAERDALLAEQSRQAPAAAAMLLAFKGIGPEFATVLWLEGLFRSFANRRQVAAYAGLAPTPWRSGSIAREQGASKAGNPRLRATLIELAWLWRRHQPKSALTLWFEDRVKANGGRIKKTLLVALARKLLVALWKYVTTGLVIEGAVMKTA

SEQ ID NO: 258055 - protein, 315 aa, unidentified
MDDSITRFVGIDIAKRSLDVCILPERESCSLSYDDDGLKQLLRQLPPKGTCLIVMEATGGYQRRLVAELVEAGHDVAVVNPRQVRDFARGLGILAKTDRLDASVIARFGQQVRPRIVEKQPEKMVELEQLVGRRRQLVELRTAENNRLETITVKAVRKSIQQVVKLLNKQIDQIEQDIFALVESDDDWKDKANLLRSVPGVGPVTAVSLLAELPELGLLNRQEIAALVGLAPFNRDSGRFRGKRSIWGGRASIRSVLYMAALTARRCNPAIKSFSQRLEAEGKEFKVVITACMRKLLVILNSMVKSNSHWDPKFV

SEQ ID NO: 258056 - protein, 345 aa, unidentified
MEPKTSTTQLYCGMDLHSNNVYCAIIDQSGGRRAKKRLPLDIERIINYLEPYRGELKETAVESTYNWYWLVDGLQEAGFHVRLANPAAMSQYSGIKQTDDQSDAFWIAQMLQLGILPEGYIYPKQLRPVRDMLRRRRLVIEQRTQTLLCLQSMIARNTAKKVSVTNLKKWTPKEVKTCFEHPHLKQTASSMRKMISTQDDVIEYLGVQAEGMVKLSQSYRRLLTAPGIGTVLGVTIMLETGPIERFQSAGCYASYCRAVSSSRTSNDKKKGGNNKKNGNKYLAWAFVEAANHAQQHYPQIRHWFDKKKSATNRIVAVKSLACKLSKAVYYILRDDTEFNMNKMFG

SEQ ID NO: 258057 - protein, 317 aa, unidentified
MNYVGIDISKEKFDVAISENESYKHYVFTNDTIGFKQLIKLLNKSKHWCIMEASGPYYQKLAMFLHANEIELSVVNPLVIRRFCQMRLMKAKTDKKDAIMIAEYGKTEQPKAWIADQAHHLELKQMQAFLDQLDKSRTNYIRQLEAFSQSPNMHKAVKKGLSKMIKTVETQIQEIEDKMEEIIRQYHNEMFEHIKSIPGVGKKTSLLLVVISAGFTKFENAKQLCSYVGLSPRIFESGSSVKGKVKICKMGMSKVRAKLYVCSWSAIKYNKACKDLYSRIVEKGKPKQVALIAVANKLLKQAFVLATRKEFYREISF

SEQ ID NO: 258058 - protein, 470 aa, unidentified
MNNHRRRPGQHRRRPGKPRTSPSVLDRINPNVAGIDCGSAEHFVAVPPDRDPCPVQSFRTVTSDLVRLADWLVACGVMSVAMEATGVYWIPVYDILEARGLNVLLVNARHIKNVPGRKSDVSDCEWLRELHSVGLLRGSFRPTATIVALRTYLRHRQTMIEGACTFIQRMQKALVQMNVQLPLVVTDITGVTGMSILRAIVGGQRDPERLAEYRDPRCQASKADIIEALTGHYQADHLFVLQQNLALYDACQQQIAACDRAIEAHVQTLVATVEPPRTPLPPARARTGLKNEPAFEIRSPLHRLTGGVDLSQIEGIAPYSALKLLSEIGTDMSRWSTEKHFTAWLTLAPKNRISGGRLLSSKTQSSANRAAQILRMAAMSVGKTQTALGAFYRRLALRIGKPQAITATARKLAVLVYRALKGELVYRDPGADAYTAKQRTRIVRSLRQRAGSFGFDLVNRATGEILSAVS

SEQ ID NO: 258059 - protein, 457 aa, unidentified
MAQRRKKAKSRKFKISQLPTQLQHINLNAAGIDIGSERHLVAVPEGRDNVSVREFGTFTADLEALADWLKKCGVTSVAMESTGVYWIPVFEVLERRGFEVKLVDARHVKNVSGRKSDVLDCQWLQQLHTYGLLAGAFRPPDEVCVLRSYLRQKEMLTQAASMHIQHMQKALQQMNLLLHNVVSDITGVTGMKIIKAILAGERDPKVLARNRHGLCKNSPSTIAKSLIGNYREEHLFALRQAVELYEMYQAKIADCEQAIIKQLEKQPNVSDDEPPAADKETQARSRIRADVDVQDLLYKKTGIDLFAIPGLAADTLLTLASEVGFDMTPWKTEKHFASWLGLCPGTRRSGGKVLNSKTKRNPNRATQAFRIAASSLSRSKTALGAFFRRVKMRTGGPQAVTATAHKIARIYYAMLTKRTSYIELGQQAYEQRYQQRRINSLKNQAKFLGFQLVPCAT

SEQ ID NO: 258060 - protein, 345 aa, unidentified
MSNNIHFSCICGIDIAKKVMQVFKVTSDGVVTNTSVSRKDFLEHFRNIPPALIGMEACATSQHWGRELQGLGHTVKLLSPKAVKPYVKGLKNDRNDAEGIYRALIMGVREVSIKSTAVRDLSLLQTMRAKRQRDKVATINHIRGILAEYGLVMGKSVRAFLSNAGTLIARLKESETTSQLVISELEKLLKEVKEIVSRIEELESSIKQIASENKNYDLFRSAPGVGPITAAMMVVLLCNPTVFKNGRDFAAYLGLAPMSFGSGGRNQVTGIPSKYRCHNEARSLLVQCAHSITRLKYKSDWVASILSRKPKKVAIIAIANKLARQLWVMAKKGDKFEKRLVLAAV

SEQ ID NO: 258061 - protein, 344 aa, unidentified
MYFIGVDHHKQVSVMTVLDEDGEELKSGRMPNLRKSVERFLEGSRPFTAVLEAGRSSYVMADLLRELGGEVKIANALQVKAIAHARIKTDKRDSRTLAHLLRANLIPEIYQREAWNRRAQRVMRMRAYWVRKQTEVKNKIRALLAQQREEVRLEVEKRESGLFSLKGLEFAAGLPLEGREKEVLEDLLQGYQEIQAHIKKSDGLVRALYGEIEEASRIDTVPGFAATLSVLTAVEIADVKRFSRAAELHSYAGVIPSTYSSGERTYHGRITKQGNVWLRWAALEAVYPAIKKDVGLRVLYSRLARRKGPNVAKIAVARRLLTIIYRVLTEKRDYIPEIMKQSAA

SEQ ID NO: 258062 - protein, 430 aa, unidentified
MMEEVDDAELVVERIAALDLGKAGLEACVRVPSPHRPGRRMQELRGYGTTTAQLLEMVAWLRHWGVQRAVMESTSTYWKGVYYLLEAEGFECWLVNAREVKNVPGRAKTDRADAIWLAKVAERGMCRPSLVHPAEIRRLRDLTRYRRALVQDRTREQQRIEKLLEDAQIKISSVLSELHGVTARAMMDALIAGQRDPRALAQLAKGRARKKTAQLEEALRGFFTDHHAAILRMMLDNTDRISAQIAALDARIQAEIGPFSGQAARLAEIPGVDAVAAAELIAEIGVDMTRFPSDAHLVSWAKFCPQTHESAGKSKSKGRGRGNPWLAGTLGRIAFANSRADTFLGARYRRLARRRGKQKAIVATGNSVLTVVYYLLSDPMATFCDLGPGYYESRINVHRRARDLVTQLQALTGQHIVIRDGKAVITDAAA

SEQ ID NO: 258063 - protein, 405 aa, unidentified
MQKLNDLSRSLTALEPDGTLIAVIEMSLSSWLIGGILPGVERQPLKKLSWLIGGILPGVERQPLKKLAVDESALLKLLHRWREEAEKAGHRIERIVVAFEAGRDGFWLARWLKARSIEAYVIHAASVAVSREHRRAKTDRLDSELLKRAFLGWLRGERDHCKMVAIPSIMDEDAKRPNRERESLIGEQSRIVNRMKAALIRLGIRGFNPKLKRAAGRLDGLHTPEGEPIPPNTLAELRRDMERRRLVSNQIRRIEQARLQRLEQEPDDGPHAMVRLLARVIGVGIETADMLVREVLSRNMRDRRAVARYAGLTGSPDESGRKCREKGLARSGNARVRRGMIQLAWRLLMFQKNSALAQWFRARTENARGTRKTMIVALARKLLIALWRLVHEGVVPDGIVLRPAQ

SEQ ID NO: 258064 - protein, 343 aa, unidentified
MELYVGMDVSLKETSLCVVDGSGEIVSEGTVISEPVAIAEFIKVKAAGALRIGLETGPTATWLWHELRALGLPVICIDARHAKAALSLQINKSDRNDAAGIARIMQAGWYKEVKVKRLSCHEIRAVLNSRAQLVKVKRDLENQIRGLLKNRGLVIGKAGGNLFHRRAEELVGEHRLLQEAVRPLLSVREIVRREVAGLTRRLLAMARDNEESRRLMTVPGIGPITALAFQSAIDEPTRFRRSRSVGAYFGLTPRRHASGEVDWSGRISKCGDRMVRSYLFEAAGVLLTRVPHWCRLKAWGLSLVKRIGFKKAKIAVARKLAVILHRMWRDGTDFIWSSKEVAA

SEQ ID NO: 258065 - protein, 421 aa, unidentified
MKVTYQTCCGVDVHKTFLVATIIKTTSGVEPSYEKKRFSTFNSDIRRFKQWLLDNNCLDVCMESTGKYWVPVSNLLEDCIHVTIANPKWVKAVKGNKDDVKDSKWIGDLFRLGLVPGSFIPCKEIRILREYTRYRFKLVSCKTSEKNRFQNAFTVCNVTLDAVVSDMFGVSASAITDYLITSDEFDGETCKSFLKGTLKAKADAVVESIEGYQMTPDQKERLLLIRSHLEFVKMELDVIDTKLNDLVVPYESAIALLCTIPGVERASAITIISEIGIDMSQFDSSRRLCCWAGLTPGSNESAGKKKSVRITRAGVYLKPALVQCAHAAVKSIDSPYYKSKYERLLKRRGKKRAIIAIARMILTAIYHMISTGEEWNPCDLFKIDMPQELQEKQKAKAIKQAVRFLVLEGIIPQPDIECATG

SEQ ID NO: 258066 - protein, 431 aa, unidentified
MGYERVEWIGDDGAEIGCVAGLDLGKAELACCVQRSDPDHPGPPVQQVSTWSTMTNALTQLAGMLVTAGAQLVAMEATSDYWKPVFYRLEAHGLNVIVVNAKQFKHLPGRPKTDKLDSQWLARLASKGLLRPSFVPPADIRALRDLTRDRADLVDQRTANKNRVEKLLEDAGIKLSVVASDIFGKSGRLMMAALIGGEHDPETLAEMAKSSLRLKKAALTEALTGMFTDHHGFRLKLLLDRIDALNDDIDALDQRIDKLIAPYDAQRQQVAAIPGVSQVNAAAIIAEIGVDMTRFPTAGNLASWARYAPGVNESAGKSKGSSATGKGNRYLARALGQSAVAARRTTTFLGERYRRLARRIGAARAQTAIGRSMLVGIWHLLSDPTATWIDLGPDHHQQHHNPQRAIQGHITALQALGYTVTLTLPQESFSD

SEQ ID NO: 258067 - protein, 381 aa, unidentified
MGVDSRHRPHLDWKPAAASADRPRMSLVLQSFLPFPNSCQGTSPHQQGRGTKMTEHCYCGIDVAKDRLDVQVLPHRQRFSMDNNATGWDELVERLHALPIAAVGIEPSGGYERGIIRALLAAGLSVRRINPSKLRQFARARGILAKNDRLDAQLIAEYVSIIPTRAVQRAATAERLAEVVTMRRQLCDEHVTIENQAAHVEDAILRRLNKRRLARLKADIHLLDKRMAEIVAADANLAERYELLISMCGVGPTLAFTLIALLPELGQMSRKQIAALVGVAPYDFDSGKLKGHRCIYGGRMPVRNILYMAALSAARYNPALKVFHNRLAAANKKPKVIIVAVMRKMISTLRHRLAATVRAVNGCVILLDIATVNDAFFGKGK

SEQ ID NO: 258068 - protein, 387 aa, unidentified
MRPISQTTTQKLSHCRRDDATLYASLELSQATWLVTSLSPGSEKMSKYSTLGGNGAALLGLLRRLQVRAEQITGGPVEIVVIQEAGLDGFWVHRLLNSNGIESRVVDPASIAVPRRRRRAKTDSIDGETLLRTLLAWRRGEPRVCAMVVPPTPEQEDRRRTSRERAVLMQERVRHVNRIKGLLAGQGITDYEPLHKDRRAHLAALKTGDGQPLPLRLKAELLREIELIELLIRQIAEVEVERDTVELDAEGNQSPVALLARLKAIGPQIAAVLYLEGLYRSFANRREVAAYAGLVPTPWRSGTIDREQGISKAGNRRLRHIMIELAWLWVRHQPDSALSRWFRARVGTERGRIRRVAIVALARKLLIALWRYVTHGEVPEGAVLKAA

SEQ ID NO: 258069 - protein, 337 aa, unidentified
MRYVGVDLHKTQFSVCWKQEDGSDKFERYVMSAEGLSKFRERLDRDTEVGVEATANSKYFYDQVVGSAKRVRVINPLQFKIISESVKKTDREDARVIAKYLSKGLLPEVRVMEKDRRELKSLIQTRDKLVKLRSSLKNKIHGILLEHGIQSKREMFSSQKALKKVLEQPVSETARFELEVIVKQINSLTEGIKELEGKIKDKGKGLKGQGNLQSITGIGELSSTIILCTIGDIADFENKKKLAAYAGLVPRVYESNEIVRHGRITKRGDKIFRTTLVQVALIAIRYNGYLRSFYERLKAKKGSGKAIIATARKMLEIIYDTLMNDWVFEDFNNFVLA

SEQ ID NO: 258070 - protein, 429 aa, unidentified
MSAPQNTLLPVPEGLGEEPVRSFPSFTRDLEHLADWLVRIGIQTVVMESTGIYWIPLFEILEERGLEVLLVNARHVKNGTGRKSDVQDCQWLQQLHTYGLLRGAFRPVEQVVVLRGYMRQRENLVRYCASHIQHMQKALGQMNLLLDRVVSHITGKTGMMIIRAILGGERDPDKLAQYRNGRCKHSEEEIAQALKGNYREEHLFALKQAVALYDFFQQQIGECDVVLEQQIQQFDQRGDRNKMPPATGCKTQQAPAFDVRKHLYRMTGVDLTQIDGINELTALKVISETGIDMHRWRTEKHFSSWLELSPGNKISGGKTLSSKTIPTANRAAQALRMAAYTQSNSKSYLGGFYRRMRARHGSPKAITATAHKLARLIYSMLKNGTGYVDLGQTFYGQEHKERMLKNLKRRATEMGFTLTPQNQANLITI

SEQ ID NO: 258071 - protein, 349 aa, unidentified
MIAILALDLGKFKTVACAYDPAKPEAARFRTVPTNVEMFERLLREERPQRVVFETCTIAGWVGDLCQRLGVECLIANPNNEAWRWRNVKRKTDRDDALKLARLTAGDELPVVPQLAPAVRQKRALLKCRQEVISQRVAIQNHLRAVAEAQGRRLPPGKKAWSDVGLAVLDGWARPLAECGLEELWRGQLQQMLSLYRHVCAHEAALDEKLTALAATDPAIIRLRTIPGVGRCIGEVVANYLPDPQRFRRAAEVSAYAGLVPRQFQSGEQDRQGRIHKRGPALLRTMLVEGAWGMLRYNSWAATLFQRLSKGQRTRRKAAIVAVARKLLVRCWAMLRHQTDWSAPEPAAA

SEQ ID NO: 258072 - protein, 524 aa, unidentified
MNCAAQPFRWRQQEELEMNPKRSKSRHGRKMPMVHPNAAAIDVGATMHMAAVRADRTPEPVRSFGTFTADLHRLVDWFTQCGVESVVMESTSVYWIPVFELLDARGFTVFLVNARDAKHVPGRKTDVSDAQWLQRLHSYGLLRASFRPKGQIAELRSYVRQRERLLEYAASHIQHMQKALTEMNLQLHHVVADITGATGLRIIRAILAGERDPQALATLRHYSCHSSAETIAKALTGSYRAEHLFALEQALALYTAYREKASACDVRIEAVLKELSIHRGRDHGAVPPPRRRHRTDQVNALAFDVRAALFALLGKDITAIDGLGAYLSLKLIAECGDDLSSWPSAKHFTSWLGLAPSNKVSGGKMLSSRTRRSGGRAAALLRLAAVAVGRTDTALGAFYRRLSSRIGKAKAVTATARKVAVLFYNAVRHGMEYVDPGASSYETRYRTRVVNNLHRRAKAFGFVLQPLEPKAGAAPSKKSFSSVSSPILAWSDFTSTAGCTPPLPPPEPNTSAAPSSSCAFHDVI

SEQ ID NO: 258073 - protein, 372 aa, unidentified
MFTKIAFICVSCMKTVQKIESVFGVLTPELDKLRDLLVSHHVCEVALESTSIYWIPIWNILSVDFSLKLVNPYFIKQLPGRKSDVKDAEWIATVLQKGLIRGSYVPDRMIQCLRQYERRNHELSKNIVHAEQRMDMILQRCNIRISNYVSCISCKGYQKVVNAIISGESNPKVLVTLIHKRTLNKHGRQVVEDSLNGFVSDTDRDILRQYRDERMQMEQHKSENKAKMQAICEAHYCEELELLQTLPGIKEESAANIIAEIGVDMKMFLTASAIVGWAGLKPRNDQSAGKIKSRKITHGNKYLRKILVEAAWSAARTKDSRFMKMYQRLLARGKSKQKALIAVARKLLVLIWNMLSKKEAFNPEYKRRIQAA

SEQ ID NO: 258074 - protein, 331 aa, unidentified
MDIKEVIGIDVSKNFNEAHIHTNQKLIEFENNIKGFKAFEKWVLNNVKCPKNQIMFAFEHTGLYSHPLSVYFTEKRYSYIIIPGLELKRSMGITRGKDDKIDAKRIATYAYEKRSELKPYELPQEEIVQIKRLLSLREKLVKQRAGYKGTIGEFKIFLKRKDNRMLFDVHEKMIKELSKQIEKIEKNLDDIIKNDHQIKRMYKLITSIKGVGPQTALFLIVYTDKFTKFDNWRKFASYCGIAPFPNRSGISIRGRTKVSNLANKKIKSLLDLCAKTSIQHNPEMKLYYQKRVKIGKPKMSTINIIRNKILSRIFAVVQRGTPYVNTMGYIS

SEQ ID NO: 258075 - protein, 430 aa, unidentified
MKSNTQNAKIEAITEKTLVLGIDVGSETHYARAFDYRGIEYSKKPFKFSNTEAGFVTFKEWILDLKERHEKDKVVPGMEPTGHYWFNLGKFLQDNEMKPVLVNPHHVKKSKELDDNNPTKNDRKDPKVIAGLVREGRYMIPYLPDGVYADLRTASNIRFQLQAELTRIQNRISRWFNIYFPEYKTVYGKPDAKSGILILKAAPLPEDILTLGIDGVNQIWRDAKLRAVGKARAKTLIEAAEHSVGSKEGAVAARMEIRMLLEDYESRSIRLQEVMTLIEGLIKQIPMAEKLLEIKGVGIRTVSGFLAEVGDISRFNNPKELQKLAGLALVENSSGKHKGETTISRRGRKRLRYLLFEVAMSLVAKNPEFRELHNYYTTRRLNPLKKMQSLMAIAAKLIRVFYVMLTKGVNYDPKKMVNDIKRPAVYLQTA

SEQ ID NO: 258076 - protein, 451 aa, unidentified
MTKRAEKRERRSMVLQPDAAGIDIGAEEIYVAVPPDRDEESTRRFSSFTCDLHALADWLGGCRIQTVAMESTGVYWIPLFQILEERGFKVYLVNAHYLKSVPGRKSDVSDCQWIQYLHSVGLLRASFRPPDAICALRTLWRHRGSLLEMAAEHILHMQKALSQMNLQLHHVLSDITGTSGQAILDAILAGKRDPVELAQLCHSRVKSPRDKVAQALVGDYRPEHLFTLKQSLEGYRYYQKLILELDQETARLMQALPSATEQPLPPRTKATAYHRQGNDPHFDLRSELYRISGVDLTDIPGVSAATAQVILTEIGSDVSRFRHASAFASWLGLCPEKRVSGGKVLSCKTRKVKHRAATALRMGANSLCRAKGYFGEFFRRMRAKLGTAQAITATAHKIARILYHVLSTKEPYTETIFHLYDEQAHQRAEIRLRKQAARLGFQLVTIPATGE

SEQ ID NO: 258077 - protein, 416 aa, unidentified
MRIVYARCCGLDVHKRTIAACVLLQEASGQVQQEIRRFGTMTRDLLELADWLQDRQVTHVAMESTGVYWKPVWNILEGQFALVLVNAQHIKAVPGRKTDTRDCQWIADLLQHGLLRGSFVPPTPIRQLRDLTRLRTSLRQDHTAVANRMQKILEDANIKLASVASDWLGGSGRAILTQLLAGEEDATKLADLSRRRLRAKLPQMQLALEGRLTDHHRGMLRVLWDQLEFLEAQLTKVDAQIQGHVQEYQEALALCITIPGIEEVAAANLLAEIGMNMEQFPSAQHLASWAGICPGNHESAGKRLSGKPHKGNTWLRRSLCQAAWAASHTKATYLSARFRRLAARKGKKRAIVAVAHSILIILYHVLKNKQPYRELGADYLDRINAAQLKRYFVKRLENLGLQVTVQYVEKAAAPPT

SEQ ID NO: 258078 - protein, 319 aa, unidentified
MTTPNPILVAGIDVGKAKLDVHIAEGSLEHQFHNDKCGRRALRNWLLKRAVTRAVLEPTGRYHRNLHQCLCDAGIETVVVNPLRSRRFAEALGLFAKNDRVDAAMLARFGQLGGLEAPLPPPRNLTLLSDLLAVRRKLGALRKLVAQLAREAAGCPAASLAALQADIASCEHRMLACIAADPALSRRTAIIQSVPGCGPVTAACLCAEMPELGTLDRRQVASLLGLAPFDRDSGQLRGGRSIRGGRAKPRHLLYMTALAAIRWNPGSKACYERLTARGKPPKVALVAVMRKLASLLNTLLREDRMWQAEPPNRQLEAAA

SEQ ID NO: 258079 - protein, 348 aa, unidentified
MLHAGLDLSRKRLDYCLLEESGERVEVGTSPPDGDGLIAFAQRVAERHGRVEVRAAIESMNGARFVHDTLERCGWEVEVADAVKVKGLAPLACKTDKIDAWVLAELSRRELVPAIWLPSFERRQERERARWRLFLVRKRSSLKHRVHAQLLAFGHTCPVTDLFGRSGRQLLERLQFPEPWRSGVLAATGMIEDLDQQIRGIDSELKALGGDHRYIPLLMSAPGIAWVLGYTIAAEIGDIDRFASAKKLCGYTGLCPKTYQSGSKDRRGHLTHAGPKYLRWALIEAAQHAGRHPLYRERYQQTKRRLGKQRGPKVAQVDIARRLAEAIWHMLTRNQPFAPAGATSALAA

SEQ ID NO: 258080 - protein, 420 aa, unidentified
MEETAEEPAEVVARAAALDIGKASLVACVRVPHDTDPSKRRQQVRTFSTTTPQLLSLRDWLVSQGVTRVVMEATSAYWKPPFYLLEDDIECWVVNARDVKNVPGRAKTDKLDALWLCKLNERGMLRPSFIPPRPQRQLRDLTRYRRTLIQERTREKQRVEKLLEDALIKISSIVSDIFGVSGRSMLHALAGGQRDPRQLAQLARGSMRAKMSVLQEALTGHFDDHHAFILTMMLDRIDTITADIDKTSRRIEQAIAPFAEQIAKLDEIPGIGTTGAQEIIAEVGTDMSRFPTAGHLVSWAKFAPQARQSAGKGKPGSTGKGNPWLGGTLGEAAIGAARTATFLGARYKRVAKRRGKQRAIVAIGNSLLTIAWHLLSDPDTHFNDLGADHHDRLAPERRKRQLIRELERLSGQNVTLTDAA

SEQ ID NO: 258081 - protein, 416 aa, unidentified
MKIVRPICCGMDVHKNIIVATIGITNKKTRITEYIQETFSTLNPDLLNLKQWLINHKCFDACMESTGKYWIPVFNILEDEINIYLTHPKYVKAIKGKKTDKKDSKWICDLFKHDLIKFSFIPPKEIRALREISRYRYKLVGMRSSERNRYQNCMTVSNIGIGSVFSDPFGKSAQAIMKEVLESDIIEDEKILKCIHRSCKNKDKILDSIKHCNIETDQRFKMNESMTHMEELQVHINNCEIEMMKRAAPMFDQFMHITQLPGISTLSAILIISEIGVDMKQFESDKQLTCWAGLAPANNESANKKKSVRISKAGQYLKPLLVQCALGAIKDKEGYFGIKYSRIKKRRGHKKAIIAIARMMLVSIYHMILTGETFNPSDYESFRNPNPPIKQQVLTEESAIEFLKKSGFDVSKLTKP

SEQ ID NO: 258082 - protein, 416 aa, unidentified
MPLEAALPSRLDNQQWIEHRRTQVSPAKSERVVIGMDPHKRSATIEVMTGEEAIEGGGRFGTDRDGYAAMLRYGRQWPDRVWAIEGCAGIGKHIANRLLADGEQVVDVPPKLSARARVFATGQGRKTDATDAHSVALVGTRMSGLRPVVNDEQLAVLRILVDRRRSLGEDHTRMVSQLHQLLLELIPGGAKKDLSVRQAKALLAKVRPRDAAGKTRRRVAAELIADLERIHARKKAANQELTELLAATGTNLLDLPGIGPSGAARLLVEVGDITRFPNKAHFASWNGTAPIDASSGDQVRHRLSRAGNRQINRVLHIMARVQLRNPSEGRAYYDRKKADGKAPMEAMRCVKRRLSDIVYQQMLHDALRHTGTGPGGQQGDDSDSSATGSHPHTGSSDKPLPGPAVTQPKTPLRSTA

SEQ ID NO: 258083 - protein, 313 aa, unidentified
MEDMFVGIDVAKDRLDGAIRPTSEAFALPRDEHGLEQLIAKLRPLTPKLIVLEATGGFETVVASALVAAGFKVAVVNPRQIRDFARATGRLEKTDKLDAAAIAHFAEAVRPEPRPLPDKDAQRLADLLARRRQVIDMLTAERNRRAATRDRNVAKRIERHIAFLKAELAGIDTDLDDAIRNSPAWKEREDLLTSVPGIGKTVARTLIAELPELGQIDRWAIAKLGGVAPLCRDTGKTRGKRTIGGGRACVRSMLYMAALVASRHNPKLKAHYQRLLAAGKAKKVALTALMRKLITILNAILRDRQPWRQEAPA

SEQ ID NO: 258084 - protein, 417 aa, unidentified
MAINPKIMIVGVDIAKKTHWARVLNYAGLEITKPFSFHNTKEDFIRTVVKLENLKKEKGLEEIIVGMEPTGHYWKGLAWFLKQNGIPVVMVNPYHVKKAKELDDNTQTKSDRKDAFVIAKLVKDGRYSKVYLPEGVYAELRVLSNTRSQMRAKLNVVKNMLVAILDEYFPEFAKVFKNLEGKLATHALYHFPFPQQVIERGLDGMVFEFKKAVKKGACLKRAKKLLGAAEESIGVTAGTESAKIRMRSCLEEIEFLRKQMANIEIEMEKKLEATGIAQYMISFPGIGVVTAAGILGEIGDPKRFESWEQVRKYAGFNLVEDSSGDRKGKTVVSKRGRAMLRNILYQAALVMVAKNKEMKLLYHHLTDRKENPLCKKQALVVIAIKIIKVILTLVNKQQLYDAGKVLGEYRIEQIKAA

SEQ ID NO: 258085 - protein, 322 aa, unidentified
MVDKVTEAAVVGGVDTHKDLHVAAVVDQNNKVLGTQYFSTTRQGYRQMLAWMTSFGTLKRIGVECTGTYGSGLLRYFQNAGLEVLEVTAPDRMERRKRGKSDTIDAECAAHAAFSGIRTVTPKTRDGMIESLRVLKTCRKTAISARRVALQIIHSNIISAPDELREQLRNMTRMQLIRTLGSWRPDASEYRNVTNVYRISLKSLARRYLELHDEIADLDVMIAAIIDELAPELIKRNAIGYESASQLLITAGDNPQRLRSESGFAALCGVSPVPVSSGKTNRYRLNRGGDRAANSALHIIAIGRLRTDAKTKEYVARRVAEY

SEQ ID NO: 258086 - protein, 413 aa, unidentified
MEQIHDRVAGLDVHRDEVAVCVRTPGPRGGVHTEKARFSTTTGGLAMLAGWLAERAVTLTAMEATGVYWKPIYYALEDRFELWLCNAHHVKNVPGRKTDMSDAQWLADVAAHGMVRPSFVPPPPVRELRELTRYRKTQVDARAAEIARMEKVLQDAGIKLTSVASKVLTQSGRAMIEALIAGERDPAALAGLAKGKLRPKIPQLTAALRGHFGTHHAIVAARILAHLDFLDETTARLGEQIGARVAERCQSAARLLADVPGLERRSVEVIVAETGADMSRFPSPAQSASWAGLCPGNHEPAGKRRRVAATPGGQWLRRTMIEPARAAARTRGSYFAAQYRQIARRRGPGKAAVAVARSLPDVIWHMLSTGEVSADLGEDYFTSRHDKEHQTRRLVSQLEKPGYTVQLAAAAAT

SEQ ID NO: 258087 - protein, 345 aa, unidentified
MPIVGGLDIHRKQLTFGYLDTVTGEVRRGQIAPADRAHLRAWLTRFAGRDDAAFALEGCTGWRYVAEELAAAGVAAHVAEPAEAAFARGRRRHAKTDKTDSRHLRVLLEQGRLPECWIPPAQILECRALLEAYHDLRREHTAWIERIHAVFFHQGAPRLGEGALRTERGLAALRAAAAAHLSPAGQLQVATALDMLAAIEARMDTLRQQLLHAARHLAGARALQAQLYGVGPLAALAMTCWLGGAGRFSSSRKAVRFAGLDVTVYSSDGKRSPGHLSRQGPEILRWVAYEAGKTHARASAPGHGYYAAVKDRQDGKIAALAQARKLIRQACHILAELGDDALAAA

SEQ ID NO: 258088 - protein, 400 aa, unidentified
MLSIGIDVSKGKSTVCGMKPGGEIVYTPFEVQHTREGMSELVSLLRSSGEEVRAVLESTGSYHCPVVAALLENGIFVSVVNSLRMKRFCSQSIRKVKTDRIDAMQIALYGLAYWQELQPTKLPEDTYRELQLLARQYYQMTSLLIKAKVDFNAICDQVLPGMQELMNDHAGRHKLSDFVLRYRHTTHILEMGETRFRKDYCKWAEKKGYRNCERMAVLIFATAQNGIPVLPNAPSTQIVITEAIRVLHTVEASRDAILTQMQALAKTLPEYSLVREMPCIGDTLAPRLIAEIGDVRRFHSKRALIAYAGIDAPPYQSGKFCANNRHISKRGNRYLRKTGYEVMQSYVMHKPANDPIFTFIEKKRGEGKSGKLAMVAGLNKFLRVYYGKVTELYRSLPAIE

SEQ ID NO: 258089 - protein, 402 aa, unidentified
MRFFVGIDWASRAHAVCIIDQTGRVRWQDSVPHTAEGLPELVGHLRRFRGRGGLRVALERPSGLLVDTLVDAGFEVVPIHPNALKATRPRYSAAGGKSDPGDAFILADLLRTDGHRFPALRPPSDETRALRALVRGRDDLVTQRVALANQLRALLERFWPGAAAIFVDVDSAIALAFLARYPTPHSAARLGEKRLAQFLGQHAYSGRRPVVELLARLRTAPASQVGEAEAEASGDLVRALVAVLTPLVGQLQQLSAAIEAALAQHPDGRLVQSLPRSGAVNAAQILAELGDDRARFPSDEQFAAEGGLAPVTHASGQHKAVVFRWACNKRLRRALTTFADNSRHASRWAALVYQRARARGCRHQHAIRILARAWARILWRCWQDRAPYDVSRHRAAQALAAA

SEQ ID NO: 258090 - protein, 355 aa, unidentified
MNAIKYIGMDVHVATISIAVLDANGKLIMEVTIATQTGALLDFIRGLSGTLNVSFEEGTSAHWLYTLLEPQVAKVVVCDPRQNPRRLGEKKSDRLDARKLAEWLRLGTLKPVYHGNSLGPALKELARSYRTLVSDTARVMNRLKALYRARGIRCAGTRVYSPRFRDQRLEQLREPGARGRAERLYRQLDLLLPLRQEARAAMVAESRKHPAHKILCSIPALGPVRVALLLALLQTPYRFRGKRQLWTYAGLALVTRTSADYQMVDGQVTRARKPALVLGLNANHNHTLKGLFKDAAASTLAHPGPFKDFYTTRVAQGMKPELARLTLARKIAAIVLTLWKKGECFNVEHVKAQAA

SEQ ID NO: 258091 - protein, 417 aa, unidentified
MAPSALRCVVGIDVAKQAHVVCALEAPSGALRHKPSRIEATSEGYALLQSWLATWGAGREPQTILIGLEATGVLWEPLDDALTQAGYTVLVLNPRQTASWATSLGLRAKTDEADALTLARGLLAGLARASTLPSESIQALRVLTRARRDLIQARTAARQRLHDELAVVFPEFPRLLVELPGRADLGCPNVLQVLSTYSSAQDLARADPSALRMTVEAASAGRWSQPEAAALQVAARASAASTRAVAARGLVVRTFAQQVLHLQIQIADLEAAIQALLEADADGQRLQQIPGIGPNGAATIRAELGEITRFSSVDEVVAYSGLDPRTHQSGAFVGQKHLSKRGPGALRHALYLAAFVASRCAPEWHVRYQRLLDRGRAKKEAFNILARALLRVIYHLLRTGEPYDPVRLNPLPAPAGG

SEQ ID NO: 258092 - protein, 348 aa, unidentified
MIVIGIDSHKHTHTAVAVDGTGRKLAEKTLPATSAGHLELVRWARRLEDRTWALEDCRHLSRRLSTDLLVAGEGVVRVPPKLMAGARRSSREPGKSDPIDALAVARAALREDLPVATLDGPDREVRLLVDHREDLVAERTRAENRLRWHLHELDPGSEPPLRSLNRTVVLAALERDLAAAPGIVGRIARELVLRIRDLTATINGIEREIARLVADLVPSLLTLTGCGPLTAAKLVGETAGIGRFRSRAAFARHNGSAPLPVWSGNTERHRLSRTGNRQLNVALHRIAITQLQREGPGRTYLEHRRAQGNTKTEAIRALRRRISDEVFRRMRNDEAARAASPSGLAAAA

SEQ ID NO: 258093 - protein, 344 aa, unidentified
MSSIKVLGIDLGKSSFHVIGRDYSDNQVIRKKFSRSALIHYLHQLSPCTIAFEACGGAHWLGRQCESMGHKVKLIPPQYVKPFVKSNKNDFIDADAICEASTRPNMRFVSVKSEQAQIISAIHKARHGYIKDRTACMSRIGALLLEFGVALPTGHSVMKQLFSWLAQQRQPLPPLLMQELVELHEHYLLLNANIEKQDKKLKQLVEGDPVAQLLKTIPGIGDMTASLCVANISSATDFKNGRNMAAWLGLVPAQYSTGGKPKLLGISKRGNKELRTLFIHAARAVMSRPEKTGKIYEEWLMNLRATKPFNVATVALANKLARIAWAVMKTKQAFSDKALAPGLQ

SEQ ID NO: 258094 - protein, 414 aa, unidentified
MDVLHERCAGVDISKKDAKVCVRTPTAKRRGSFTTETTTWGSTTNAVLALRDHLLAAEVTLVVIEATSDYWKPFYYLLSEDLAVILVNARQVKNLPGRKTDVSDAAWLAQLGAHGLVRPSFVPDQPVRELRDLTRARTQLTRERGQIVQRLEKLLEDTGIKLAAVASDIMGVSGRAMLEALVSGEREPQTLAELAKRKLRNKIPELTEALTGRFRDHHAFLVRLHLDHYDQLTDAVGQLDARIEEAMAPFRGALDLLDTIPGINRAVAEVIVAETGGDMARFASARHLASWAGVCPGHHESAGRTKNTKVRPGNPYLKGALGLAAFGAVRTKDTYLQARYKRLTARRGPLRALVAVEHSIITAIWHMLTDHVTYRELGGAYFTQRDPERATRRAINALNQLGYTVTLNPLGTTA

SEQ ID NO: 258095 - protein, 344 aa, unidentified
MQVAVKTIGLDIAKSVFQLHGVDAHGQVVIRRKLKRRYVLAFFERLRPCLVGLEACATSHHWSRELQALGHRVRLMPPAYVRPYVKRQKNDVADAEAICEAVTRANMRFVETKTAEQQSCLVLHRTRHLFIRQQTSVINAIRAHLAEFGIVAPIGRKGVEQLLTVVANSEDKRIPAVARACVAALGAQLRALKAQILDFDRQIMIWHRSHETSKRLDEIPGVGPALATALVASIADPKAFRSGRNFSAWIGLVPKQHSSGGKQKLGRISKQGDRYLRSLFTAGALAVIRYAKIYGTQHRPWLTALLARRPAKVAAIALANKLARMVWAMMTRGERYKEPAALAA

SEQ ID NO: 258096 - protein, 370 aa, unidentified
MQKTLYVGLDVHEASISVTTAQEGRDGPISFIGAIPNTPVAMAMLAKRLVKDGHRLEFCYEAGGCGYGIYRDLTNLGHGCTVVATSMIPRKPGERIKNDRRDSQKLAILHRSGDLTRVWVPDENHEAMRDLTRARVDASMQLMRARHQLLAFLLRHGRRYDTGRKHWTQRHRSWLAGQSFDQPAHQIVFQDYLEAVWAAQDRRDQLIGRITAMTANWSMGPLVEALRGLRGLDFVSAVTFVAAIGDLGRFATPRQLMAYLGLVPSEQSSGERIRRGGITKTGNSEARRMLIEAAWSYRYPPRIAKDKAEIIVRLPKPVRDIAWKAQLRLCKRFRTLSGGSKKPTVVVAAIARELSGFVWAIGQEVKPAAP

SEQ ID NO: 258097 - protein, 346 aa, unidentified
MKYYAGLDVSMEETAVCVVDGEGKIVGEAKVASEPGAIAGYLARWSGSLVRVAQEAGGLSPWLHEGLVGFGLAAVCIETRRMKAYAKASSVKTDRRDARLIALAVRAGLYRAVHVKSQDSHKLRLALTGRQALLRQARQLQGKVRGDLKVFGVKLGRVGSGGFAGRVKTLLSGRADLWSLVEPLLAMRAALLAQVRVYDRALYRLAQDDAVCRQLMTVPGVGKLTALAFRAGIDAPERFTRARCVPVALGLTPRVDNSGELERNGAITKAGDKFLRSLLFEAANALLTRSRRWSALKHWGLAVAKRRGVNRARVAVARRLAIILFVMWRDGSDFRYGREECPATAA

SEQ ID NO: 258098 - protein, 399 aa, unidentified
MEPGDFKIWLGIDVGKADHWATAVNDSGELVYSHSLPNDESKLRAIYDDLAAQGRLLIVVDQPATIGALAVAVAQSMAIAVAYLPGLAMRRIADLYPGNAKTDQRDAFIIAHAARTTPHTLRTLRTIDEDEAELGMLTGFDDDLARQITQTRNRIRGLLTQIHPGLERVIGPRLDHPAILAMLQTWPVPAALKKAGHSRIGAKLKKHGARRWQAWANEIIDALATQTVTVTGTNAAAIVIPHLAHTLAGLYHQRDDIETQIEKLVTEHPLYPVLTSMPGIGVRTTAVIIAELAGKEFDSAANLASYAGLVPRTRQSGTSIKSENVSHTGNKRLKRALFLSAFASLRADPISRRYYDKKRLNGKRHNQAIIALAHRRLTVIYAMLRDGTFYETQPPKKAA

SEQ ID NO: 258099 - protein, 357 aa, unidentified
MGKGNILAIDLAKSSFQAHLASGQGHVLERKKISRSALVKYVAKVDADVVVMEACATSNYWGRRFASLGKEVRLIAPQFVKPFVKTNKNDANDSEAIAEAASRPTMRFVPLKSVAQQDISSLHCIRSRLIAQRTALTNQIRGILGEYGVVVAKGHDKLRELLSELQREGNIGDLSAFMLKKLGELQSELTALDARIKTCDEEVQQLCDIDPVASELTNIIGVGPITATALRASSGDMSQFKNGRQFAAFLGLVPRQTSTGGKTKLTGISKRGDSYLRMLLIHGARAALISAHKRDDYRSRWAVQLKSNKGTNRAAVALANRNARTAFALMKLGQPFDPRRPGAAAASRQPTAVPLEA

SEQ ID NO: 258100 - protein, 397 aa, unidentified
MTIIVGIDVAKRNHEASFVDSSGAMLGKSYSFPNSHSGMNQLLVQLEKRNPKGLPVVFGMEATGHYWLGLYSHLLEKGYTVHVINPIQSDSLRNFYIRQTKTDVIDSFIIAEAIRFGRFAATLRAEPDLIALRQLCRYRFSLVDAVADLKRKVITIVDQVFPEYEKLFSDMFGKSSKEMLSSFSIPEEFLAIDVEQLAKQLQETSRGRFGIAKAEEIQGAARQSFGIKVATDALTFELRQLMDRLAFSEKQLADLEEQIMKYYDRFPCTLHTITGVGKIMAAVILSEIGDISRFSAPAKLVAFAGIDPSIKQSGQFHGTQSHMSKRGSAYLRRAVWLVAFPASRFDPVFAAFYQKKRSEGKAHGTALGAVARKLLYTIFALLNSGQEYVPQVLAAHS

SEQ ID NO: 258101 - protein, 341 aa, unidentified
MEEYIGLDVSMKETSVSIRRAGERIWRGKCASDPRIIAELIRKRAPAVKRVVFETGPLSIWFYHSLRTEGLPAICIDARHAKAALDMATNKTDANDADGLAQLAEVGFFREVRVKGFDSMLTRTLVAARTRLVRITTELSNQIRGVMKTFGLLVPAGKGSTFEKNVRSLLADQDGLASIVLPMLEAWRGIRIRAAELGRQLVRDARQSQACRILMSIPGIGAITATAFSTAIERPDNFKKSRSVGAWIGLTTRRYQSGEVDYDGHISRRGDCHLRGLLYEAAAVILTRSSTDSTLRTWGRKLRERIGFKRAAVAVARKLAVIMHTMLKTGELFNPNAGATA

SEQ ID NO: 258102 - protein, 392 aa, unidentified
MRKPKQCRPHNDLSRSLIPLNLNHTLIAVIELSQKSWLVAGIIPGVEHQPLKKLEPGEDALSTLLDRWRKEANKAGYKVERIAVAFEAGRDGFWLARWLRAQGIEAHVIHAASVAVSRERRRAKTDRLDTEQLKRAFLGWLRGERDHCKMAAIPTFAEEDAKRPSRERESLVGEQGRIVNRMKATLARLGIRSFNPKLKNAAESLEDLRTAEGEPIPPNTLTELHRDLERRRLVIEQIRQIEAARLERLRRTPKAKPNAMVLLLARVIGVGIETADMLVQEVLSRNLRDRRAVARYAGLTGSPDESGSKRREKGLSRAGNARVRRGMVQLAWRFLQFQKDSALAQWYRVRTEHARGSRKKMIVALARKLLIALWRLVREGVVPDGVILRPAQ

SEQ ID NO: 258103 - protein, 371 aa, unidentified
MREPITYVGMDVHRKDIAVAMLVPGTGGPLEWRVANAPTAVRRLARKLQREGGGPVHCVYEAGPSGYALQRQLRGLGVECDIVAPSMIPIRPGEKIKTDRRDARKLAELSRAGLLTVVHPPTEDEEAVRDLCRGRDDARLDLTRARHRLGKFLLRRGRAFGHGSQRLVASPPRMARTAELRAGAERVMFEDYLLAVEQTAARRRSLELHLEELARELRYVAAVGWLRCFRGIDTHTAITLIAELHDFRRFRSPSQLMAYLGLVPSEYSSGSQQRRGGITHTGNRHVRRLLIEAAWHYRHKPRIGTALAQRRHGQPASVIARADQAQMRLCRRFRHMAHRGKHPTKIVVAVARELVGYLWATLIPMDAVVGT

SEQ ID NO: 258104 - protein, 350 aa, unidentified
MDPQGRIAHQARYDHDVAGLAGLTAQLGRHGPVTGIAIERGEGLLVEMLQDQGHRLFCVSPKMSARARERYRVAPGKSDAFDAFVLADSLRHEHRHWRPLAVPSPLLAELRALTRDRERLVWNQRDTENQVRARDTENQLRAVVLAYHPAVLGLFSTAGKALAMLLFIDQLELLNGQVRAITRRIGELLAGHPDAAVFLSVPGMGQITAATMLAEMGEDRARFPTPDTLLAETGTAPVTRASGRSRTVRFRYAANKRMRHAIDWWAFVSVRENDWARDAYDQARARGQQHNRALRGIGARWVRILWRCWTDSTPYDPARHLKGLTARRTATRKLTATPGRELRHHARRQH

SEQ ID NO: 258105 - protein, 328 aa, unidentified
MSKERFEVGVDVGQSEVWASLGNGKPRKFKHDGTGVKQLYRWAKEKSGGLLLHFCMEATGVYSQSLAVRLLGCGRCELSIVNPAQIAAYARAQMRRSKTDQIDAQVIWAFAESQQPRCWQPERLVIQELAALVAQADALQKTQRSWKNRQHAHQYRPVLPSMVQQTSTVVEETLKQQLAKVQKEIHRLCQRDAELKRDVNLLCTIPGIAELTATRLLAYGKSTLTERSPKELTAHAGLAPRHRQSGTSLKGRSRLSKQGDARIRCMLYMPTVAATIFNPIIKYHYQRHLTNHKPKMVALMACMKKLLLMAQAILISQQPFNPNLIPLT

SEQ ID NO: 258106 - protein, 351 aa, unidentified
MIMVGCDFHTRFQQVAMLDPTTGEVIERRLEHETGEARRFYASLCEPARVGIEATVNAQWFEKVLREYHHELWVGDAAEIRAMRVRKQKTDSRDALHILDLLLTDRFPRIWIPSPAERDVRQLVRHRHKLVRLRTSVMNQLHALAIGQGLCRKQKLWSKVGRLELEALVLDRWASRRRHELLQLLDQLNPWIADLDRAVMQEVQSRPGALHLMREPGVGPVTALAFVLTIGPVGRFQRSKQVVSYLGLNPSEESSGGRQRLGSISKQGNSMLRHLLVEAAQAASKFDPELRRDYQRLKFRRGNSGVAKVAIARKLAVRLYWKLREAAQPNTAARMQGSPANPVADESLSPK

SEQ ID NO: 258107 - protein, 408 aa, unidentified
MNPLFVGIDVSSRSNVAYLMKPDGTKHSSFSVQNNPGGVKILSSRIVSALDGLHLSSVAIGLESTSVYGDHLVYALREDGSLGRFTRKIHVLNPKQVRKFKEDYSDLPKNDFVDAFVIADHLRFGRSNREVFMDDYRYKALQTLTRARFYAIQNLAREKQHFANYLFLKCSGLALDKEVKNTSATLLTLMERFPSVDDLASADLDDLTDFVSKSGRGRFADPEGVAKMVQKAARGSYRLPKTVNDSVNQAMSVSIASMRALGDQVKTLDKAIAKQFEAIPNTLTSIPGIGPVYSAGIIAEIGDIRRFAGHAQVAKYAGLVWTQHQSGDFEAESTRLIKSGNRFLRYYLLEGANSVRRCDSEFRRFYDLKFKEANRFQHKRALALTARKLVRLVFRLLKDNRLYKLPES

SEQ ID NO: 258108 - protein, 481 aa, unidentified
MNISRVGVDIAKSVFHVHGVDRHDQVQWRGKYQRDKWLDAIVKRVPMGAEISMEACASAHHWARELQARGYHVKLIAAQFVKPYVKSNKNDRVDAEAICEAMGRPHMRFVAVKSVAQQDVQAAHRIRSELVQQRTAKANQIRGLIGEYGLVAPTGIGQLRVALPRWLEDAENGLTDDFRVLLAGLAEDLRHLDARIVTVTEGIECHAQTDPIAKRLMTLRGVGILTVTASALASALGDAQAFKRGRDFAASLGLTPRQHSTGGRDRLLGIKQDTGQQRTQRSALGRTLPARRGQAVLEHPGFQVAADQAQHPLVANAARDPRHQQIVVHSVEEGFQVEDDHPAVAGSDMGLHGRDGLLGAALRAVTVARFGKTRIEERRQHLQQRLLDQPVGDRGDAELSRPALGLGDLDGSDRAGVALSDQQPLTQRRPVLFQVVGQRDHRHAVGTRCAFVGDHLTVSPRHVGLLYRGLHERVGLRFRPR

SEQ ID NO: 258109 - protein, 344 aa, unidentified
MCSVTRFVGLDYHQESVQVCVLDAQGQKLANRSVENRWPAIAAVVHDTVDEPQATVIVRAAIESCSGAAHLAEELLERAGWVVTLAHPGIVNRMRQNPDKSDKGDAYILADLMRLGYLPRVWLAPDEIRQLRALVRFRQQKVKEQTRVKLRLRALLREHRQRPPEGVRAWTRAWLDWLKALDLDATSMFLRDEYLSELEQLQQKIRQLELRLIKQTEGDAVVAKLLTIEGIGPITAVTMRAEIARFDRFDSGKQLSRYCGVTPRNASSGQRQADAGLVQAGNSGLRIVLVQAAQRLMNFSPHWNAFAVRLKKKGKPHNVVVAAVANRWLRRLYHEMQPSQLIAG

SEQ ID NO: 258110 - protein, 430 aa, unidentified
MHDEVYYRRCAGIDVHKKVLVVCLRIGRKTETRSFGTLTHELRNMVAWLKDNGCQMVAMESTGSYWKPLYNIFEQEGLPAMVCNAHHIKNVPGRKTDVNDAQWIAKCLSQGLLNPSFIPDREQRELRELTRFRQSQIQERARNINRLQKFLEGANIKIGSWLSDVEGKSATQLLELVIGKPDFTVDDVAARMHKNMKSSAKELFLSLEGYMTPLQRELFAHIMEIIRQQTAQIEKTDAMIKRNLSDNYKAAIKALDEIPGIGEISAEQIIAEVGTDMNRFRTPQRLSKWAGVCPGNNESAGKRKSGKTPPGNKTLKSTLTQSAQSAKRKKDSFFHAQYNRLVTGRGKNKATMAVAHSLLIAIFFVLSGKQFVDLGADYYTNFNREKKINSHVKQLSKLGLNIPEDVLRNIMIEAMRKPDNSRASPQNKTA

SEQ ID NO: 258111 - protein, 327 aa, unidentified
MRQHKSSTEKVKTSVAFDVCKATLDGHILVDGKVFSVPNADDGFDQIAAILADYHISLVLMESTGGYEDAAACFFQSIGYDVVVVNPRHARRFAQSMGIMAKTDRIDAAVLAQFASVLDSLPDRERYIRPLTDETRKFLSRMVTRRRQIVELITVEKQHLSCADDYSRQSINMVLPFLQAQLKDINDDISLYVKKNFSYLSKILSEIPGVGKQAVGVLIGDVPELGRIDNRQLSAVIGVAPFNHDSGKMHGRRFISGGRKQVRNVLYMGIISATRFNPVIKAFYERKLNEGKPKKVALIACMHKLLRIINAMVRDGTSFNPSLHTVS

SEQ ID NO: 258112 - protein, 370 aa, unidentified
MGNRSMFVGLDVHKETIDVSIADGERHGEVRHYGVIASDLGPLDKVVRALRAPDRRLHFVYEAGPCGFGIYRHLTDRGEDCVVVSPSMIPKRSGDRVKTDRRDSQMLARLHRAGELRAIYVPDDTDEAMRDLVRAREDAVGVGTQAKYRLKAFLLRQGRRYPGREGWTLPYRRWLTDLSFPSAAQHIALQEYRNAIGETEQRIDRLTEQLRQLTPTWRWAPVVAALQALRGVSFVTAVALVAELGDLTRFRHPRELMAYLGLVPSEHSSGPSVRRGAITKAGNPHVRRLLAESAWAYQGIPRIGRQHAYRQEALPKAVCDIAWKAQLRLTTRFRRLVARGKAKPKVATAIARELAGFVWAIAREVSPTPR

SEQ ID NO: 258113 - protein, 419 aa, unidentified
MIYVEIDWAEAHHDVCVEDGEGNALAKGRVPDGIEGVERIHEMLGAHATEPAEVVIGIELDRGLLVGALVAAGYEVHAVNPLAVSRYRDISSPAGAKSDPGDARVLAEVMRTDRHAHREVAGDSIEAEAVKVLARAHQNLIWTRQRVGNQLRSALREFYPGALRTFSDLNSTDAIAVLQIAPTPTVGRALTKAKVSKALASGGRKLRLDERASEIVEGLRAPQLGAPALVEEAFGHQVASLVAVLGALRTQIEELRGELAASFEGHPDAEIITSLPGLSSVLGARVLAEFGDDRTRYADARARRSYAGTAPITKASGTRKVVLARVARNKRLADACYGWAFSSLQASPGARTFYDRQRASGKTHCETASTVPTGTGERIGPAGRGMTRKTHWLALSDAFRVDMSAPSRRHRPGSIAMLA

SEQ ID NO: 258114 - protein, 337 aa, unidentified
MEYFAGLDVSMEETHVCVVDRDGKIILEARTPTAPKTIAAALAKGPSVDRVLFETGRMAPTLFHGLTALGLPVVCVESRQAYQALRSLAAHKTDRNDARGLAHLARTGFFKPVHVKSLPSHAVRALLIARKKLVGQRVTLENQIRGLAVAFGVRLPRSLSSGFAEKAMAAGHGIAGLDGAMRGLLAARDAILKAVVAINADMKRLERSSAACRCLMTIPGVGRLTALAFIAAIDDPDRFRRSRDVGAYLGLVPRRYQSGEIDYTGGISKCGDGRLRTLLYEAANVMLTRYRGSLALKNWALDIARRSTMRKARVALARRLAVIMFAMLKHGTEFEPV

SEQ ID NO: 258115 - protein, 325 aa, unidentified
MKMAKPSIITAGIDTSKAKLDIAVHGAGSVFTVTNDEAGWKAAAAQLKRASVARIGIEATGGYERGVTRFLQKTGFTVIVMQPVQVKAFAKLHLKRAKTDRIDAVLIAACTHVFDAANKLPPDARFDALADHLTFIEQLEEDVVRIRTRLEHIYDKRLRRIAEADIKRLSQRGEDERKRLLAAVQQYDDLAARFDLVQSVPSIGERTALCIVIRLPELGQVSREEIAALAGLAPFVRQSGKHDGQAHIGGGRGRVRRVLYIAALPGAFRWSPELKALYARLIARGKSHKAALVACARKLLIFANTVATRGTPWQQQNSTVKAVRS

SEQ ID NO: 258116 - protein, 317 aa, unidentified
MLCAGIDVSKPHLDLALVSTTAKPTRLRFPNTPEGRQALLAALAHHRPTWVALEPTGAYHLPLLQLLAEKGLQVALVNPYHLAAFRRATGERHKTDRQDALLLARYAQVYGESLRAYTLPPKALQELKALVGYREDLAQRERAILNQLEAARWAGSEEILVLLQRELACVEGLLGEVEARVQALLAALPEAEVLMGLPGVGPQVAAAVLALLPPHLWGRAKAAAAYAGLIPEREESGKSLERSRLSRKGPPLLRRKLFMGALVAVRHDPEMGAFYRRLLSRGKRKKQALVAVAHKLLRRMMGRLREYYAGQSLQGVA

SEQ ID NO: 258117 - protein, 529 aa, unidentified
MLYVGIDQHRKQLTVHVRDDQGEVLLRRQVSTQWDKVREFLDDLDRRATPTAGYFAIVEVCGFNDWLLQHLRARQPVCRQVFLIQPEQQSSHKTDRRDAAGLSEQLWLNRERLLARRPARGLRVVCQPSAEDLFDRRLTSRRVVSSHDLTRTINRIKAILRRHNVEQECPTKGLGTLKSLAWLKRLELPGVDRLEMNQMLRRWELLKCERQELDDQIAQRQKQNRAAIILATIPGIAAYGALALASRIGDIRRFPRPRSLANYWGLTPTSKNSGEATQRLGSITKEGSQVARFLLGQAVLHVLRADVSMREWYKRIRRRRGSKIARVAVMRRLATIIWHMLSREESYQRGGPPRERLPRRGAAARIADAPEPRLVVAETTGASACQSAPDNAVRAGHAVGGSPPNPQDFEEAWRGVQQAGTLQAPLDATPATAVLDAPPTSPSTRRRQRKTTAPAGVSRQEPEAPLAHRGPGYSLPGCVPAEPDAASPGELTISRSRRARQPIKRRIANRDPGEPDPGSGSSPIPNHDG

SEQ ID NO: 258118 - protein, 399 aa, unidentified
MNAVGIDVSKGKSMVTILRPFGEIVSSPFEIKHTSSDIHSLIKLIHSIEGESRVVMEHTGRYYEALAHQLSAADLFVSAVNPKLVKDFNNDSLRKIKSDKADSVKIARYALDKWQSLEPYSITDELRAQLKVMNRQFHFYVKQKTAMKNNLIGLIDQTYPNANTYFNSPTRSDGSQKWVDFVSTYWHVDCIRKMSLNAFVEHYQNWCKRKKYAFNKSKAEEIYTKTKELVPVFPKNKITKHIIRQAIDQLNSTSVTVETIRTLMNETASKLPEYSIVMQFKGIGPQLMAEIGDVTRFTHKGALTTFAGVDPGVNESGSYAQKSVPTSKRGSSNLRKTLFQVMDVLIKTMPQDDPVYQFMDRKRTQGKPYYVYMTAGANKFLRIYYGRVKEYLSVLPDPS

SEQ ID NO: 258119 - protein, 353 aa, unidentified
MQCIAFDSHKHYTWASVQNEAGDVLREQRIDHARGALRGFLEEFEQGSPVAVETIGNWYWITDEIEAAGMVPRLVNARKAKLMSGSINKTDKLDARGINRLQRSGTLPTVWIPPKPLRDARELPRTRMVLVRQRTQLKNRIHANLAKYGLSTAEVTDLFGVRGRRILAKCLEQLPPQTRYATQSLLEELDQLHARIEDLEGRMAKLFGETKELELIQTLPGVGFILGVVILTEVGDVSRFPSASHLASYAGMTPRVHASGGHVRYGRTRADVNHYLKWAYAEGANVGMMHRRRHPQRHVSRLYERVKRQRGHPKAIGAVGRHLAEATYWMLKNQEPYRDPATDRAQGEPKRET

SEQ ID NO: 258120 - protein, 387 aa, unidentified
MTKNKGRVVGLDVHPDSFAGAVVQGRDPASAMVLRTSTRVELERLEEWARRHTCTEDTLVLEASGNAFAVAARLRAIDRKVEILDSHHAGKVGKVYCANDRVDAVKIARIYLSALSPIVWQPDQKTLERREIFSAYQAVVKESTRAKQQLRSMLNEHCVGLEKGFRLCHPRAIARLLKLREWTPARSMLLQQLHSTLVAARARRTLLRRHMAQEIAAEEALLRLTRLCGINLITLYGVVAAVGDVRRFTHSKKLVAYLGLNPSVSQSGNFQGSGALKRHGRGALRALLIQSGKKLLEVNNPLQKWGLAVAARRGRNKAAVAVARKLCVALWHLMMGHAIGTLERLDTLQTKLSKFATEIGPAALTAFGYNNRADFVQKKLYVLRSYP

SEQ ID NO: 258121 - protein, 346 aa, unidentified
MKKIYTNEKLFAAFDLHSNNNYLAIIDKEDKRIYKKKLPNSPEMILTELESFRDNITGIVVESTFNWYWLVDLLMDEGYRLHLANPAAIQKYKGLKHSDDNHDAFWLAHMLRLGILPKGYIYPKSERPIRDLLRKRGHLVRLRTSLINSLQGIISRNCGCKLGANKIKAIKEDNVSPLLQGHDDISLSGTVSKETIDYLGCQIRKVENAILGKVKLKKEFVKLLTIAGVGKILSLTIMLETGTIERFPTVGDFASYCRKVPSRWTSNGKKKGKGNSKNGNKYLAWAFSEAAELSRRFDDQARAFYNRKAAKKNFMVAHSALAHKLSRAAYYVIRDQVAFDPRKLFA

SEQ ID NO: 258122 - protein, 430 aa, unidentified
MPKRMTGRPELKPVNVGAAAIDIGSKMHMAAVNPASTDVPVRSFGTFTQDLHDLADWFKACGVTSVAMESTGVYWIPVYEILEQRGFDVILVNARYAKNVPGRKTDVSDAAWLRQLHSYGLLRGSFRPDAEIAKLRAYLRQRERLVEYAAAHIQHMQKALMEMNLQLHHVVSDITGATGMRIIRAIVAGERNPDVLATYRDVRCHSSIETIRAALVGNNRDEHVFALTQSLELYDTYQAKMLDCDRKLESLIATLTDKGAKPVGKLPKPRIKTKQVNTPTFDVRTALYGVLGVDLTEIHGLGPSLALKLVGECGTDLRAWPSAKHFTSWLCLAPGNKISGGKVLSSRTRRSSSRAAALLRLAATTVGRSDTALGAFYRRLSSRAGKYKDPGADHYEQQYRSRVLANLQRRAKSLGFVLQAIPGDAEPAVS

SEQ ID NO: 258123 - protein, 346 aa, unidentified
MYYCGIDIGGLSSYVYVMDGLGRKRGSGPVATTREALRGRLRRFLRGKLAVAIEAGNQTAWIYEVLVELGAEVTVVNPAKVKLIAESRRKTDKVDAKILCELLRLDGLPHPVHMPGAEARALRGLLVARRRLVSARTKLCNVVRGMLRQEGIRLPAGALSTKVGWERILVNSLAHEHLTTIVRAYYQSFEAIWRSIRELERKLAERERDEPRAARLQTIPKVGRIAALTFLAAVDDVDRFPSSRKLVGYSGLAPTVRQSGERTQYGSISRQGRSELRAVWVQIAHLVAIDRHRPTQPLRTWFNRIARRRGRKTAIVALARRLLVIAYHLLREETEYDAARLKRRAA

SEQ ID NO: 258124 - protein, 371 aa, unidentified
MSRKHTAKEFNKSNKWLAIGVDLAKYDNTIVGITEDGEVQIIERISTADLLELASEIQPTTFAIEPCNGANILSLNLQAKGHEVKIISGAAVKDWVKVHLAGQKTDRNDALALAHLSRDTMLKPIRTKTVTEMRMQSIYAARKQLVKCRTSILVSLKGMSQAWGILFSSQRRNLKKMRESLEDRVELLSQPVVDALIQMIDSVARLDKEIEALESVMKDQLSQDERAQRIQSTLGIGFVGTHRLLSTCGDPNRFKGPKSFAAYYGLVPNNKSTGHNYRVGKCSCHGDAEMRSCLYQAAAVLYMQNVKHMLPECALKQWIDKKVSQKMMWGKMIIALAAKLARILWALLKYDAYFNLSKAGLSRSMLVQQTN

SEQ ID NO: 258125 - protein, 407 aa, unidentified
MNENGKRYIGLDVHKPYLIALGVDANLEVVMPARRVELSQLENWMKKNLTRQDEVVLEMTTNTWQLYDELVEYAGSVMVVHPPHVALITRSQVMNDKIAASILARLLAKGLLVGIWVPPQEIRELRGLVAQGRKMTRLATQAQNRLHAVIQRHHLKPPAGNPFAKTNNGWWQALPLGKLEKLNLQSDLETLQFAEQQAARIQKEMTGIAAEDEEIGRLLHISGFGVITAVTVYAAIGDIGRFVEPKKLVGYAGLGARVHDSGMTTRTGKITKAGRRDLRVALVEAAHVVAHSHPHWKAELARLQPRLGYNKAIVAIARKLLVTVWHVLARKVADRFAEPKKVSQKMLRFAYAVGKENRAGKSAAQFARARLDILNLGEELTSIPWGAKKPIPLPPSKLKERSAVPNQ

SEQ ID NO: 258126 - protein, 312 aa, unidentified
MMDAVYVGIDVSKDRLDVHALPQGAAFMVARNGEGVAQLVERLKGLSPALIALEATGGFETVVAAALAAASLPIVVVNPAQVRHFAQALGRRAKTDPLDAAVIARFAQATQPAARPLPDEMTQLLADLVARRRQIVEMMAAEGQRERRADIRLKKSIARLRKALEKELAELDGEIDDYMRGTPAWAEKQDLLASVPGVGPVIARTLIAELPELGALDRRRIAALAGLAPYTRQSGQWRGKSFIGGGRKTVRSMLFLGAMVAARHNPVLKAFRDKLVNSGKPKIVALIAVARKLLTILNAIIRDAKPWRTQNA

SEQ ID NO: 258127 - protein, 403 aa, unidentified
MNSVGIDISKGRSTVAVMRPFGEVVISPFEVRHTDSELSELARQLKSLNGETRVVMEATGNYHAPVAKLLHDAGLYVSVVNAKLVHGYGNNDLRRVKTDRKDAVKLANYGLDRWLTLPRYVPEEDTRLLLKNCYRQYRQYSKVQTVLKNNLISLLDTVFPNVNRLFSSPIRGDGSEKWVDFVAEFWHCRCVSEKSQKAFTSKYQRWCRKHGYNFSEEKAHTIHAEASGYIGVMPKSETTKLLVEQAVAQLRATSAALTALKHEMLALAAQLPEYPVVMGMFGVGPTLGPQLIAEIGDVRRFYSKKALVAYAGLDAPPNDSGDVTGKHKSMSKIGASSLRRTLFLVMSVYLQNAPLDEPIFRFMDKKRAEGKPYRVYIMASANKFLRIYYATVKAYLESLEHTA

SEQ ID NO: 258128 - protein, 258 aa, unidentified
MIIGCDFHPSFQQIAYVDQETGEYGERRLNHREEAVGFYRSLAGRKVVVGLEATGNDRWFRKLVVESGHELLVGDASAIHAAAPREQRTDKRDARHILRLLVENRFPAVWQASVANEEQRQLLMHRCRLVRMRTRIKNQLDSIAKSEGLTGSRSWSGQRRGQIEALPLAGWYSQRRADLLQLLDGLELRIKPLDRAVEVAASQDAEARLLMTHPGVGPVVSLAYVLVVGDWRRFPRGKQVGSYLGLIPSEASSGKRQQ

SEQ ID NO: 258129 - protein, 334 aa, unidentified
MKQVNQVGVDVDSEELVCVMQRAAERMPLATFANTAAGHKRFIRWATKGGRPARVCLEATGIYSLEFALALHHAKNVEVMVVNPRAIKDFGRACMQRAKTDAVDAGGILEYLQRMPFTTWQPPAPEILELQAINRRIVQLTTERTREKNRRHAAEFAGASGDAIAHDIEVNIHHLERRIERMHDSGLQLIRGVPALATKLAHLVSAKGIGEASAMRLLAELLVLPDDLAAPQWVAHAGLDPRPYESGTSVHRPRRITKVGNRHLRAALYMPALVAIQHEPNVKAFYNKLVGRGKKPMQAVVAVMRKLLHAIWGMLKHDQDFDGNKFFKLTENIA

SEQ ID NO: 258130 - protein, 370 aa, unidentified
MKKNNTVAQSPKRAAARKQGPITIGMDLGDKTSRYCVLGENGERLSEGSVATTRKAMTQKFAGMRRCRVAMEVGTHSPWLSRWLTGLGFETIVANARQVQLISASSRKNDRMDAHLLARLARVDPQLLRPIRHRSEQAQGDLMTIRIRAALVEARTSLVNAARGFAKAQGDRLPSCDADTMGVEKMEALPAGMRERLRPLLEPVESLTEKIKELEAKIEQIARTQYPETALLRQVSGVGPLIALTFVLTVEDRDRFQKSRDVGCYVGLRPRQSESGQSQPQLRITKEGDRYLRQLLVQGAHCILSRRGPDTDLKRWGLKLAARGGKNAKKRAIVAVARKLAVLLHRLWVNGEVYEPLRHSRPARSSQQAA

SEQ ID NO: 258131 - protein, 312 aa, unidentified
MSEPSGIAGIDVSKEAVEVFVLEDGERFQALTKSGALAALGEQLRSLGVDLVGLEASGGYERRVVKALMRAGLQVRVLDPLRVRRYATALNLKAKNDRLDAQVIAAFTAATDGPTAIQDASREGLRELLAYRRRMLEDLTALKHQAALLEDEEVLALIGERRGLLLRQREIVASRIAAVIEADPTMARLSQLFQSVPGVGPVLAWTLIAEMPEIGQLTRWQVAALAGLAPYDDDSGARHGQRHIRGGRKAVRNALYMAALVGRTHNPVIAELYDRLKAAGKKSKVALTAGMRKLIVILNAIARDNRPWSHAV

SEQ ID NO: 258132 - protein, 338 aa, unidentified
MAMYCGIDLHSNNNYVAIQDGRHEDVVCRRLRNDLGVVLEFLEPYREELEAIAVESTFNWYWLVDGLKESGYDVRLMNTTRARDYSRKKYTDDRHDARWIAHLLALSILPEGYIMPPEERGLRDLLRRRSFLVRQRTSQYLSIKTIFARSNCQKVTTQDIRSWDSDVVRKMFDDPHVAESVAAMLPVVRVVTAQIQGIEKIALETGKLRDEFRFLLTAPGIGDILALTIMCETGDISRFRKVGNYGSYCRCVKSEKFSNSKKKGKGNRKNGNKYLSWAYSEAAHHAKQYEPLAKRYFDRKKSRCHPMVASRALANKMARACYYVMRDQVPFDPSRTFC

SEQ ID NO: 258133 - protein, 325 aa, unidentified
MSPLLIRILIGVDVCKDFLDAYARPAGIHRRFDNNPDGITQLVAWVRSLAPERVVFESTGPYQKAAVGALLAEGLPAVVVNARQVRDFAKGIGQLAKTDRIDATILAHFGEVVTTVVRPLPPPQVLEFRDLCDRRGQLVRMRACEKNHRHAAQGSSAKVVKNIDKHIAFLDKQIEELEERMDGLVTESETFKAKDEILQSIVGIGPQVSRTLLVHLPELGTASRQSIAALVGLAPFADDSGTCKHIRHIRGGRSKVRIALYQAAVAAIRYCATMKAFYAGLKARGKASKVALIAVARKLLVLANALLRDGKTYQARTNSVCPENA

SEQ ID NO: 258134 - protein, 360 aa, unidentified
MATMTWVGLDVHTRSIEAAALDARTGELTRRRFAGETGPVITWLGSLAAPISACYEAGPTGYGLYRAAHEAGVAIEVVAPSKTPRGRGDRVKTDRKDAELLVRLLSAGALTAISVPAPAFKAARDLSRAREQVRSDLLRARHRLSKLLLRYGRLWDPARSTWTVAHRRWLDAQRFDAEPTALAYHDGLGAVDALAARKAALDEQLSRLAEDPLFWPTVARLRCFRGLDTLGALIVHLEVHDWSRFRRPSELGAWLGLVPSLEQSGQSAQSGSITKTGSAYARRILVEAAKHAGRQPRISAELARRQEGQPAAVRAIAWRAQRRLYRLARHMQARGKPANVVAVAAARELAGFLWAAVLIE

SEQ ID NO: 258135 - protein, 340 aa, unidentified
MPLYGGIDLHANNSVVVLLNEQDQVVYQKRLPNDLPTILEVLAPHHAEIKGLVVESTYNWYWLVDGLMEAGYRVHLANPAAMQQYSGLKYSDDHSDARWLAHMLRLGILPEGYIYPKAARAVRDLLRKRAHWVRQHTANVLSVQNIMVRNTGARLSVKRIRELPKKELEGLLPEADQVLAITSSLAILDCLSQQIKALEKIVHQRLHHTPSYEQLLTVNGIGTILAQTITLETGDINRFPTVGNYASYCRCVDSNKISNGKRKGQGNVKNGNPYLGWAYMEAAQFALRFNPSAQRFYQRKLAKSNNNTTLARKAVAHKLSRACYYVMRDLVPFEATKAFG

SEQ ID NO: 258136 - protein, 460 aa, unidentified
MAKQRGKRKKDAKADATEGLPPLNLHAAGIDVGSAEHYVAVPSDRDAEPVRKFGSFTADLHRMARWLKDCRITTVVMQSTGVYWIALHDVLESHGFEVNVANARHTKTLPGRKTDVQECQWLQKLHTFGLLNNSFRPPEEIRTLRGYLRQRENLVAAAATCIQHMQKALTEMNIQLANVISDISGTTGLAILSDIVRGERDPYKLAMHKHSRIRASRQEIARSLEGTWRQELLFVLEQSLDLYQTYQQKIQTCDERIDGQLRSMEPRIDPMSEPIPEPRRGKGARGHQSGFDLRGQLYRITGVDLTRIDGIEVQNAQTIVSEVGVDMSRWKTEKHFASWLGLCPDNRISGGKVLKRGTRHVVNRASTALRLAALALLRSQSALGAKFRRLRSKLGAPKAITAMAHMLARLVYRMLKFGHDYVDRGVEFYEAKYQQHQLERIRKQAAALHMQLIPLTRVVS

SEQ ID NO: 258137 - protein, 336 aa, unidentified
MIGIDLAKRVFQLHGACANGTVIFRKKLTRIQLLAFMSKQPECTVAMEACATAHSWGREFEKLGHTVRLIAPNYVKPFVKRQKNDVADAEAIVEAASRPTMRFVELKSEAQQARAMLFRTRQMFVGQRTQTINALRGHLAEHGIVAPQGAIQVKRLADAVEDENIGLPAGVRELAKVYLVQIEDLSAKIAALDRQMKGAAKEAEAARRAQTMPGVGPITALAIETFAPDLNCFRRGRDFAAWLGLVPKQTSTGGKPRLGKTSKMGQRDIRRLLISGAMAVLQAVKRFGKPHNDWLISMLERKPRMLVAVALANKMARGLWAMVTKQEDYRNPAAMS

SEQ ID NO: 258138 - protein, 410 aa, unidentified
MRKENIIYVGIDLHKETHTAVMLDCWNHKLGEITFENKPAQFHKLTRKVSRFVTEEKTAVYGLENAYGYGRALAVWLFEKGFVVKDVNTALSYAQRKSVPMYQKSDSYDAEAVALVLINLLDKLPDAVPDDKYWTLSQLVNRRDNINIHQQRLKNQLHEQLCMAYPSYKKFFQDIGRPTALYFFHEYPSPVHLRGKTAEELAGELRPVSHNNCSVKRAEKILELVKSDGGTCRDCQESRDIITRSLAYDLEHYRKQMEEVEAAIEAMLPEFGCTLMTMPGIDIITAANILAEIGNIDRFPNAKKLAKFAGIAPINFSSAGKGKDMCPKQGNRRLQAIFYFLAIQMVQVAPSGTPRNVLFREYFLKKLEEGKNKPQALICIARRLVNIVYGMLKNHTEYREPERKTGEETV

SEQ ID NO: 258139 - protein, 310 aa, unidentified
MERLFVGLDVAKDRLDVHIRPTDEQFAVAYEEAGVATLVHRLVGLQPTLMVLEATGGYESAVAAALAHAGLPVAVVNPRQVRQFALATGQLAKTDRLDARANARFAEVMQPVARPLATEQAQELGDLVARRRQRVDMLGAEQNRHRQARARGLQQRIRAHVTWLTRAIAEVDEQIARLIRTSAVWRETEDLLTSAPGIGDITAHALIADLPELGQLDRRRIAALVGLAPWNRDSGHWRGRRMIGGGRAAVRRALYMPTLVAIHHNPVIREVYRRLTAAGRPKKVAVIAAMRKLLTILNAMLRDRRPWQPA

SEQ ID NO: 258140 - protein, 350 aa, unidentified
MEVLKQVLGVDVAQKELVVSFGVMYEDFGIAICGHKVFKNNPKGMENLMIWTEKLALKDKPLLYVMEATGVYHEVFAYFLSNKGQKLSVVMPNKISNYMRTLDVKTITDKSCSEAIARFGLERKLTEWKQPNKIYKRLKQLTRERDQIVEARAVVKNQLHAEQKEAIPVQSTIKRCEKHIIFLNKQEAQIIKEIEEVKDQEIKDKINKITTIPGVGVLTATIIIAETNGLELNKNKKQLTSYAGLDVKEKQSGTSVKGKPKISKKGNRSIRRAMHFPALSAIRHDEHYKEIYANLVSKSGIKMKGVVAVQRKLLELIFVIYKNDTVYDIEYEKKKRERYKNEHSLLQTSS

SEQ ID NO: 258141 - protein, 412 aa, unidentified
MFKSLRRVGIDWGSESHQVCRIDGEEEPKQRGFPHTSEGLNALVAFVVEGEMDPEQIAIAIEVDHGAVVEALLAKGLRVYSINPKLLDRLRDRFSMPGAKDDRRDAFVLASCVESDAHAFRRIEPGNEENARLRAATRLREDLKADLRANANRLWNELREYRPALLTLCPGADDPWLWVLIEKAPSPSEGARLTRARIGAVLKKHRIRRLTAEEVRTVLRGDVLSLRPVYIESHVARVLVLIERLKLAQAQIANIEKQIKTAVAERVKFEEQTERRDLTILLSLPGFGSLTVATALGESGDAFERRDYNALRSFSGAAPVTKQSGGTRYVVMRQVCQPRLRVALHLSALQAIRVDPKFGDLYLRARARGQTVGRAIRNIVDRLLFLAVQLLKKNQLYDISLRQIAPEVAATP

SEQ ID NO: 258142 - protein, 351 aa, unidentified
MIIIGCDFHTRYQQIAMADDETGELLLERRLDHESGEAHTFYRNLQGPVRVGIEATGPIHWFERLLAELGHELWIGDSAKIRASEVRKQKTDERDARLILDLLLAKRFPKIWVPTPAERDLRQLLWHRHKLVCLRTMLGNQLHFLAMSQGLCRKRKLFTKKGRVELSGLALGPWTRRRREELLKLLDQLDPAIAELDRAVLEEAQRRDDAVLLMTHPGIGPVTSLAFVLAIGPITRFSRSKKIASYLGLNPSEDSSGGKRRLGAISKQGNTMVRWLLIEAVYPAVRQDLALRQDYQRLKFRRGHAVAKVAIARKLAVRMYWMLRSGAAYAQLVRRQGSPAATLVDASPSLG

SEQ ID NO: 258143 - protein, 414 aa, unidentified
MFYIGIDIAKAFSVCSVINDKEEMIIKPFPFNSSTAGFKKLINNIESLNCDTKDILIGMEATGLLFENLYRYLKDLNYNVILLNPYQTSQYRNMLTMKYVKNDNIDSMIIALLIKSGRYSKGYVNEEQVQSLKVLFRHKENIKEKLKSLKRETSSLLAVVFPELDKVIKDPFSVTGLILLEKYPTAKHFEYVSVDRILKLFRNIKGNNFNQVKAEHLLSIAKDTIYSGVAKDARAFFIRSNIKLIRALQEEIKSLEEEMIKIFDKQIESTQENKEDEDYISSVLDNLRTIPGVSDKTLLALLAECGNLDRFKDAKSLIGYLGLYPTQEQSGNTLKYGHLAKRGARYAKKALYLASVAAIRHNSELKQIFRNQVASGRAKKEALIIVARKLAYIIWAIYNHNQAYNPTRVFVAHP

SEQ ID NO: 258144 - protein, 415 aa, unidentified
MKDNECDLSRVNLYVGIDWASESHYYVADAPSGERLREGYFPNSAEGFDALLETLDGLRSGGDVAVIYEATRGAIHYALLGLAWLRLCPVNPIKTKKLNELDGSAKGKSDPRDATLLCGYLRQKARSLLLNHVEEDSLTLRLREAVNLEAELVCRTTKLKQRIGKEINGLCPQLNSLLGDLEKRVYRRYLLERSPLEPSPVEEIESFLRSNHIHRQDCIERFLEVHASLRCLGRDRDLQLEQLENIRSMVEILEATVEQLRRCERRIDALYSQAPQVDIYRSMPNVGPRIGPRLASLFGSQPGESYACKAQVLAYFGQSPLTLQTGSKNNKRVRKRMNCQRRARRTIYLWARVSNLNDSSHWPRSYLDKCKERGDGLPTRYRKLGGKLVSILYRCLVDNIQYDPSIYMKNLHKKA

SEQ ID NO: 258145 - protein, 312 aa, unidentified
MYYIGIDVSKKDLSVFNGKKDLKFINKEGLKSFKKYLKKKYNLSDLVIIFEPTGIYSFYLKEFCAENSIKAYIINPKQSHNFARALGIRPKNDKIDARTLYKFHKLIDLKDIKVPKIDQQAKTLSSYLTSYEFAVKQRVALSNHLESLRDKELITLIKKELKMAKKLEDKIFHDILKYVSKNQNLKEDYQRLLTISGVGDKTAIVLLTLFKTYQGTNRSQITALVGLDPVRRESGTSVKYRVKISKNGKGIYRKIPYLPTICATVHNQKIKIFYQRLLAHHKPKKLAIIASMRKIILIAHAMYRDKTEYVAV

SEQ ID NO: 258146 - protein, 400 aa, unidentified
MLSIGIDVSKGKSTVCGMKPGGEIVYTPFEIQHTREGMSELVSLLRSSGEEVRAVLESTGSYHCPVVTALLENGIFVSVVNSLRMKRFCSQSIRKVKTDRIDAMQIALYGLAYWQELQPTRLPEDTYRELQLLARQYYQMTSLLIKAKVDFNAICDQVLPGMQELMSDHAGRHKLSDFVLRYCHTTHILEMGETRFRKDYCKWAEKKGYRNCERMAALIFATAQNGIPVLPNAPSTQIVITEAIRVLHTVEASRDAILTQMQALAKTLPEYSLVREMPCIGDTLAPRLIAEIGDVRRFHSKRALIAYAGIDAPPYQSGKFCANNRHISKRGNRYLRKTGYEVMQSYVMHKPANDPIFTFIEKKRGEGKSGKLAMVAGLNKFLRVYYGKVTELYRSLSAIE

SEQ ID NO: 258147 - protein, 430 aa, unidentified
MSYRVSGIDVHKKMLAVVVSEVEVDGEFRFERRMFGSNPEQLRSLAAWLLEQEVEEVVMESTAQYWKPVWEALERYWKPIREKREGARRKSGTLHLAQAQSNRGRQGRKRDFPDAERLVKRLVARELTLSFVPDAEQRLWRTVTRKKNQLRRDRVRLHNQLESLLEEAHIKLSSLVSDLLGASARRMLKALADGEANPAALAALADQKLRATPEQLCDALGVCTDLKPVYRRFLKMALEQLQFLEQQIGQLDQELATLLHPYQDAVRRLAEVPGLGVDSAQQIIAEVGPAAAVFPSAKQLSSWVGACPGDEESAGVNYSHRSPKGNRQMRRILSQTANAATKTKGSIFDIVYRRSVTRLGHNQAIGAIAHRQCRLIWLILHQGIRYEERGPVVNKQSKQRRTWKMVRQLRSLGYRIQPPNPEQPSQAQAQ

SEQ ID NO: 258148 - protein, 346 aa, unidentified
MQAVTTIGLDIAKSVFQVHGVDATGKVIIRRQLKRHYVLAFFQKLSPCLVGIEACATSHHWSRELKAIGHTVRLMPPAYVKPYVKRQKNDAADAEAICEAVTRANMRFVATKTPEQQSCLMLHRTRHLFIRQQTAVINAIRAHLAEFGIVARVGRTGVEELLDVVADSAGSDDRRLPEVARVCIAALGVQLRMLKSQILEFDRRIMAWHRSNETSKRLDEIPGVGPALATALVASVADPKAFRSARHFSAWIGLVPKQHSSGGKDRLGSISKQGDRYLRSLFTAGALAVIRYAKIHGTKHRPWLTAMLARRPTKVAAIALANKIARMAWAMMAKGERYKEPAALAA

SEQ ID NO: 258149 - protein, 437 aa, unidentified
MQYPTQEAVLSFDFSLDTLDVALRAPDGRWLIPHQPFSNNRAGFQQLKGEVLAHLHGLEGVQLITVGESTALQWWHAFYQISTDPDFAPFDPTLILLNPAHVKHFRKALPEEDKCDPKDPRLIDTYYRTRRPPHAYTFDERYLPLRCLTRAYHRLIQTLAAEKAFCLTLVYLLASDYQRLKPFSDPFGVTSLHLLSEYPDIATIADLPLADLSNELHRLARGHLQDPDETARQLQQIAQDSYPLPDSLRPTVHFVLQQTLDHIRFLEEQKMLYTTRIEEELALLPEAELVLAESGLGPILVAGCLSEIQDTQRFTTGQKYDAKGKCYRPRTYRDGQAAVAKMAGLWWPRHSSGRFEGQDRRLARERNPHLRYWFVQAAYSLKRHQPEYRAYYQRKYREATRHHHKRALILTARKAVRLIFALLHKGQMAQLEEAPKP

SEQ ID NO: 258150 - protein, 310 aa, unidentified
MNNTVGIDISKATLDAFRMSDGRREQFSNDAAGLKALKKWLGKTPVRVIYEPTGPYHRDLEQALAATGHGLVKVNPTRARRFAQATGQTAKTDRVDAELLSRMGAVLNLVASPARSEALMEIKELHVARVGLIKDRTACRNRLATARCKVIISQLNARYRQIKTQIAQIDAELVRYVKADPELARRYEILLSIPGIGQVAAIALIVGMPELGSMNAKEVASLAGLAPITRQSGMWKGKARISGGRQTIRTMLFMPALIATRFNAPLRQIHEALIGAGKPWKVSITAVMRKLVILANALVRDDRTWADARA

SEQ ID NO: 258151 - protein, 408 aa, unidentified
MSYKVAGIDVHKKVLMVVVCEVAEPESLPERRRFGTTTSELRRLSQWLREGGVEEAVMESTAQYWKPVWYELEPYLRLQLAQAYSNRAPRGRKHDFKDAERLVRRLVADELRLSFVPTGEQRAWRTLTRMKVQLSREASRLHSQLECLLEEMRLKLSSVISDLLGLSGCRILQAIAAGESDPQRLASLGDHHLRCTQEQLIDALSGNPQPLHRQLLALYLERYQLIQQQIEQLNQMTAAAMQAHSEAVTRLAEVPGFGADSAQQVIAEVGVEAATFASPAQLSSWVGTCPGQHESAEQNHSSRSAKGNRYLRRILNQAAHAAVKKNGSHFQAVFRRLLPRLGYKSAIWAIAHRLCRLVWKILHERVRFVEAGSEPSPRAKRQRAQRLLRSLRRLGYLVTVNPLPTGAL

SEQ ID NO: 258152 - protein, 338 aa, unidentified
MNFVGIDLHKQTISVCVVSQERKVSARRTFRCCQPDRIRVYFAELGEFQAVIEATASYEWLWVLLDPLADRIVLAHPGKMRIIAESTRKSDKLDAEVLAAFLALDMIPQAYRPSPRERAHRVLVRHRRYLSKRSTALRNKMRRILSDYNADREDLFSAAGTEYLKQVAVSDSHRFVLDQLLASWLAQQAQLEQTNRKLRAFARQAAVREREARAVLSTIPYVGPVTIDVVLSELGRIERFGSQKQVCAYAGLAPGQRESAGRVKQQGITKTGSSLLRWALIETAWRLVSKTRRWRALFEPLAKRRGRKKAIVAIARRLLCMMTAMLQDGRPYRYAVVQ

SEQ ID NO: 258153 - protein, 350 aa, unidentified
MSVDPAYKVVRSGALAKEAKWKGCRVVIDGVLGIDVSKNTLDASMSSCNKVRSKSFANSPDGWRHLLGWLIGEKIRRVHACLESTGRYSLGIACKLNEAGHVVSIVNPAQIRDFARTKLGRNKTDAVDASHIREYCELFKPPPWAPPSHAHRQLGELQTIRAGIVAGLTEWKNRKNSGMVDAMAQSLADATISHFTSQLGAVEKAIAQAIDNDSDLRRKRDLLLSISGVGETLAGVVLAELPGPDVLRSSAEAVAYTGLNPRRHQSGTSIDRLTRISKIGNAVLRAALYMPAMSAMRYNPAIVALVTRLKAKGRLNPKQIVVAAMRKLLVLCFGVLKTGRPFDPALAMGC

SEQ ID NO: 258154 - protein, 320 aa, unidentified
MRNTVGLDISKLTFDATAIVGNAEYSAKFDNDSKGLDQFSDRLKSLGCQNLHICMEATGNYYEEVADYFAQYYSVYVVNPLKISKYAESRFKRTKTGKQDAKLIAQYCRSAKESELVKRQKPTDEQYRLSRMTAAYAQIKSECAAMKNRHHAAKDEEAAKAYAQIIKAMNEQLEVLKEKIKEQTEKPNCKEGVKRLETIPAIGRMTAAVLFHHLTSSKFETSNKFAAFAGLSPQQKESGTSVRGKGKLTKFGNRKLRAVLFMPAMVAYRIRAFPGFIARLEEKKKPKKVIIAALMRKLAVIAYHVHKKGGDYDPSRYKSA

SEQ ID NO: 258155 - protein, 321 aa, unidentified
MTAILGIDVAKNKFDVALLRSGRYRSKSFVNKRSGFESLVAWLEQLDVVTLHACMEATGSYGDALARFLFDGGHVVSVVNPARIKAFGESELQRTKNDKMDAKLIARFCETMKPTAWEPDPPEVEQLRMLGRRRDALVSMRTQEGNRLGVADPTVNASIQKVISFLDDEIEQINKLIREHINNHPDLKKKRELLKTIPGVGDVTVEAILSEINAFAGFDTVEKVVAYMGLSPKEKTSGTSVKGKSSLCKIGSARLRKILYMPALSAIQCNPLINALYNRLKSKSKNGMIIACACMKKLVHIIYGVIKNGKPFDPTYNIKIA

SEQ ID NO: 258156 - protein, 343 aa, unidentified
MDHFAGLDVSVKETSICIVDDTGRIVREVKVASEPEALLQVLGNPIYRFKRIGLEAGPLSQWLFSALAEAGLPVICVETRHMRAVLQAQINKTDRNDARGMAQMMRAGLYRPVHVKTLRSQKLRMLLTHRKLLQSKAIAIENDLRGTLRNFGLKVGVVGTVKFEARIKELVENLPDLAVLVEPLLMVRRVLREQFAILHRRLLAIVRDDEVCRRLMTVPGVGPVVALTYRATVDVPARFRNSKAVGAVFGLTPSRYQSGEINRTGAISKCGDEMMRVMLYEAAHIMLLRLAKWSWLKAWAMKIARHRGMKKAIVALARRLAVIMHRIWVDGTEFRWTREVAAA

SEQ ID NO: 258157 - protein, 418 aa, unidentified
MKSIKTEKIKTINEKTLIATLDIGKKVHYGYFRAPNNQDIKPFPVYNTGQSFNKFWKKLCKFKEKHMLEEVVIGFESTGPYAEPIANYLRKKPVKLVQVNPMHTKRIKELTGNSPNKTDKKDPRVIADVISLGHSLTVVVPEGAAAQLRRLTHARERAMERRTAMNNQLQDLIFVIFPELTSIIKPSTKTGMYLIKNYPDPENIVSIGIETLCNIVRKVSRGRFGIDRAEKLYNAAKASVGITEGKESILLETSHLVSNIETENRYIASLEEQMAVYLEQIPYSHSILSVKGIGNITVAGLIGEVGDFGKFKTIPEVMKLAGLDLFEVSSGKHKGRHHISKRGRALMRKLLFFAAINAVKSHGIMHARYQKMLNNGTPKIKALIAVSRKLLRIIFALARDNAKYDEDYNRKHEFKLAA

SEQ ID NO: 258158 - protein, 351 aa, unidentified
MKEYIAFDSHKQYSWVEREEVETGRVRQCRLSHARGSISEFLKTCAPGTPVAIEATANWYWIIDEIEQAQCVPRLVHPRKAKLMMGQINKTDKLDTHGMNVLQRNGTLPTVWIPPGALRELRELTRTRVVLVAQRTRWKNRITATLAKWGLPASEYSDPYGKSARAELEQRLERLPEQTRWATRQMLTQLDSLSEQIRQFEKRLEELVEVTPQMQQLETLPGVGVILSATMALEIGEIGRFLSAERLASYAGTTPRVHSSGDRTRYGRTRPDVNRYLKWAFAEAANSVAVNYRRCPERHVSQLYARLRARKGHAKAVGAVARHLAEAAFHVLSRQVAYRDPTTARGRTREV

SEQ ID NO: 258159 - protein, 404 aa, unidentified
MSVQSAPVTSSTIVVAVDVGKTSALFSVTDAARDQLISPTEFAMNRSGLMCAAHRAMAVVPAAGQVKVAVEAAGHYHRPVLDYRWPDGWEVVELNPAHVAEQRRVQGRRRIKTDIIDLEAITELVLAGHGRSVGDRDSVFGELSAWAGHRSRRVATRTATKNQLLGQLDRAFPGLTLALPDVLATKIGRLVATEFSDPSRLAALGANRLIRFAAARDLRLRRPVAERLVTAAREALPTRDAVIARQILAADVNLLADLDAQIQAAEDELAALLPRSPFTTLTTVPGWGVVRVSNYAAALGDPNRWPGPRQIYRASGLSPMQYESAHKRRDGSISREGSVALRRALIDLGIGLWLTEPSAKAYAAGLKDRGKRGGVIACALAHRATRIAHALSRDHTAYDPARWS

SEQ ID NO: 258160 - protein, 362 aa, unidentified
MGKLVLKEVRDQCPPEPGATVIIGVDLSRTKWVYACRWGGQEHRRFASAGDLKHLQAVVQEYQARGGEVHVIYEACGFGYAIAWWLEAQRAHVIVVPPSTVERAPGAQVKTDGLDASRLALKYEKGLLKGIYIPSREQHELRQLSRTYGQVLKDRHRQQVRLRLLLQEHGYMPPERGTGWPALERWLRTQALPAPLAVCIEQLGSLRTAASTSARRLAKELRAVARRPAYAPLVNALAQQPGVGPFTAVRFVLELGTVHRFVTADSLPNYLGLTPREYSSGSLVRRGPVRKSGPGALRAWLVQCAWAAVRHGHDEALRDCFERLEPRAGRKKAIVAVARKLALRLRARWLEFEAAATTTVAA

SEQ ID NO: 258161 - protein, 350 aa, unidentified
MNISHYIGFDVHKKSVSYCVKTADGKIVEEGTLRATRQKLRQWAEKRQEPWHGAMEATLFSSWIYDSLKPFAAELQMGNPSMMKAISAAKKKNDKLDARKIADLVRCNLLPVCYVGSAEMRELRRLLRYRNTVVAHAVRTKNKMSGLLMEVGAEYSKRRLHGKKYFSELMGQLEEVPESVKDMLQLSRSALEMFETTQRQLLDRLQKEPLLAKRVERLRSIGGVGEVTALTWALETSDPRRFPSIDDAMSYCGLTSALVASAGKQQRGPISKQRNRYLQTVLIEAAKLAPRWNKQLAELHERELKHGNRNRATLAVARKLVAYLLAVDKSGKPFEVRTPPTRELEVQKVA

SEQ ID NO: 258162 - protein, 366 aa, unidentified
MRKNSTVVKNGNKIFKQPALTIGLDLGDRSSCYCILDEMGNVILERSVPTTSSGIRQAFGKMPRCRIALETGTHSPWVSRQLAQMDHEVIVAHARNVRLIGESSRKDDQLDARTLARLARIDPGLLGPVRHRSAQAQIQLTVIRARAVLVSTRTALVNAARGLTKSYGERLKKCGTEQMNRDSSEGLSQELREALDPLLREIESLNERIKEYDQRIEQIAKEVHPEVARLKQVKGVGTLIALTYVLTLDDPCRFRHSRDVGCFLGLRPGRRNSGKSEPQLHISKEGDRYLRTLMVQGAHYILGPFGQDSDLRRWGLKLAERGGKNAKKRAVVAVARKLSVLLHKLWVSGEVYEPLRNNRKAVRAVA

SEQ ID NO: 258163 - protein, 409 aa, unidentified
METIVERAAGLDVHKAQVTACVRVPGRSGRAQELAEFETTVRGLLALRDWLQAQRVTEVAMEATGVYWKPVWAILEDEFDCLLVNARHVKQVPGRKTDVSDAAWLCQLLEAGLLQRSFVPPKPIRALRNLTRYRKAQIGERQREANRLHKILEDTGIKLDCVATDILGVSGRAILDALVAGTTDPQLLAELARGRLRAKIPALREALVGRFDPQHALIVSAILAHLDFLEEQIELLSEGIAEQLRPFAAAVELLCTIPGVKQRTAEVIVAEIGADMSRFPSERHLASWAGQCPGNDRSAGKRRSGTSRHGSKWLDAALTEAALAASRSKDIYLAAQYQRLRPRCGHGRALGALKHSIITASWHMLTTGELYRDPGGDYYSRRDPERTTRRLVAQLERLGHHVTLEAATA

SEQ ID NO: 258164 - protein, 430 aa, unidentified
MNYNTQNAKIASITEKTLIIGIDVGSETHYARAFSWRNYEYSKKPFAFSNDEAGFAAFKEWMDDIAEKHEMEVIIPGMEPTGHYWLNLGAYLQEQGMKPVHVNPHHVKKSKELDDNNPSKNDRKDPKTIASLVNEGRFSYPYIPTGIYAEIRNLSNLRIQTQEEITRIKNRMARWFSIYFPEIKDVYRNPDAVSGLMVIKQAPMPCDIRELGVEGVNKIWRDARLKGAGIKRATTLVTAAEHSIGNTEAPRSARKEIRNLLEDYEGYKKRMDELMEEIEKTLSEIPYIDKLMKINGIGIKTVSCFIAEVGDIGRFDNPKQVQKLAGYAIVKNDSGKHAGESHISYRGRKRLRYVLYEAAISVIGKNAEFREIHQYYQTRDRNPLKKMQSVIAVACKVLRVFYTILKKGVDYKGEKMLQDIRRPGRNIKAA

SEQ ID NO: 258165 - protein, 428 aa, unidentified
MLENSTTHPEPEFVGFVGIDWADQKHAWCSQRAGATQREHGEVEHTPEMVEAWVSQLAERFGPGPIAVAVEQVKGALVFMLSKYECIHLFPVPSTMSASLRKSLYPSGCKDDPRDAELLLDLLLQHRKKLRRLTPDNEVTRRIQNLVEERRTLVDEKTTQLNRLTGYLKVYFPQMLEWFEKLDTKLVCDLLERWPSLEELQKVPPAELRKFFRQRRGRHQELTEWRLEGIGQAMPAIRDRAVLEAKRAMVQVSAQLLRTLLEGIANLDSKIEKAASAHPDFFSFESLPGAGSALAPRLLAAFGSQRDRYGSAEEVQKHSGIAPVMEKSGKKKWVHFRWACPKFLRQSFHEWAGHSISQSTWARAYYQQQRGRGQDHHAAVRALAFKWIRILFRCWQDRVAYDENKYLAALARRGSPLSSVLTVTAATL

SEQ ID NO: 258166 - protein, 340 aa, unidentified
MSEITTIGLDLAKHVFQVHGVDAEGATVLRRQLRRNQVLAFFSRLPRCVVGLEACATAHYWARELAALGHEVRLMPAQYVKAYIKRNKNDAADAEAICEAVSRPTMRFVPVKTAEQQAAQLLHRGREQLVRQRTMLVNALRAHLAEFGMVAAQGLRNVAQLIAIVRDEGDLRLPDVARQVLQVLAAQLEHIEAAVAALEKRLMAWHKTNAVSQRLASIPGIGPIIATAIATTVADPGVFRSGREFAAWLGLVPRQNSTGGKTRLGGITKRGNRYLRRLLINGASANLLRSKATKADPWVIGLRRRRPPLVVAVALANKTARIAWAVMLRQEQYQPRALAA

SEQ ID NO: 258167 - protein, 355 aa, unidentified
MDSTKYIGLDVHKETISIAVLNSSGKLVMETIIETKASMLVQFVQGLRGNLHVTFEEGTWAAWLYDLLKPQVTKIVVCDPRRNALLKEGNKSDRIDARKLAELLYLNKLKPVYHGEHGVRALKELSRSYLTISGDLARVMTRLKAMYRSWAIPCAGKQVYAPRYRSEWLGKISEAGVRRRAEFYYQQLDALRALRQQVRRELLAESGKHKASKLLCQIPSIGPIRAALLIAILQTPHRFRTKRQLWAYGGLGIETHSSADHRYVEGQLRPSKRPVSLRGLNRNHNHELKNIFKGAALIAATKAGPFQEFYAALVAKGIRPEMARLTVARKIAAITLLVWKKGVCFDAQHLKPQTV

SEQ ID NO: 258168 - protein, 370 aa, unidentified
MNDTIFVGLDVHKATVAVAVAEGMRGGEVRQLGAIPHRADHIAKLAEKLAKGGRRLSFCYEAGPCGYGLHRQLTALGHECMVVAPSLIPMKAGDRVKTDRRDAVMLAKLHRAGELTAVWVPDSAHEAMRDLIRARATTVRVLGKARQHLQGFLLRHGRIYAGKRGWTLAYRRWLTTVRFDHPAQQVVLQDYIHAVADAEARVERLTRQIEDLVPQWSMAPVVEALQAMRGVAFIVAVTLAAEVGDFSRFDNPRQLMAYLGLVPSEHSSGATVRRGGITKAGNALARRALIEGAWAYRMQARISRKLHDRIETLPQAIRDIAWKAQVRLCGRYRRLAAAGKAKVVVTTAIAREMVGFLWAIARQVEVMPAA

SEQ ID NO: 258169 - protein, 382 aa, unidentified
MQTIDTINPTILLAIELSASTWLVAARVPGLEKPRLHRIDGGDTAAFLALISSLQARAARGLDAAIDVVCCFEAGRDGFWLHRLLAAHGVVCHVLEPTSILVNRRARRATTDRLDAEGMLRVLAAYLRGDHQACSMVRVPTPEEEDAKRTHREREKLVQERLRIENRIEALLFTQGIRKRPSLRSWERDLAVLRTGDGREIPRHLRAELDRLRRRLVMTLELIREVEAERDQAAKTKPQDRACHKIAALSRIRGIGENFAAVLTREVFYRSFDNRRQIASYVGITPMPYQSGGMDRDRRISRAGNPRARTTMIQLAWLWLRYQPGSELAEWFRERVGTLAGRTRRIAIVAMARKLLIALWRYAETGVIPAGAEIRAEITVAA

SEQ ID NO: 258170 - protein, 338 aa, unidentified
MNIVFPGIELAKNVFQLCGLNQAGKPVYTKRTGRKELLQTLANIPACLIEIEASTGAFYWQREFEKLGHKVKVISPQYVKPFVRGQKNDGNDAQAIPVALMQPTMQFVPPKSPEQQDIQALHRARQRIVNHRTATVCQIRGLLLDRGIPIGSAVSRARRAIPLILEDAENGLSSRMRRTIAERYDLFNDLGRRIHFFDKEIETVFRQSEACQRIAKVKGIGPETATAVVAAIGKGTEFKNGRHFAAWLGLVPRQHSSGDRQVLMNMTKKGDRHLRTLFIHGARAVVRVATNNNDGHMNQWVNQLKERRGFNKTTVAVANKNARIIWSMLRNETGYQVV

SEQ ID NO: 258171 - protein, 341 aa, unidentified
MDHYSGIDVSLECSSVCVVDVNGKIIREAKVASEPEALITWFASLGFGLERIGLEAGPLSQWLFAAMREAGLVVELLETRHVRKAFEAMPVKSDRNDARGIAQLMRLGWFRPVHCKSMGAQETRSLLTARKLVQSKLRDVENSLRGILRGFGLKVGKTTELRFAGRIQELVAGHPHLETIAEALLAVRTALLREFKVFEKRVRSMARSNAKARLLMSTPAVGPIIALTYASAIDDPGRFKSSKQVGAHFGLTPKRHQSGETDYTGRISKIGDGSVRTALYEAAHLMLTKPIKGCSQLKSWAMRIARRAGMSKAKVALARRLAVIMHRMLADGTAFNAAAAA

SEQ ID NO: 258172 - protein, 507 aa, unidentified
MQQTIRTPLYSAGIDLALRAGHLAGLLDDQGCAAGNQMRFGRTYDEMEAMFSTITSRVPEGCDLVWGCEATGAAWRSVTAFLLAKGQVVSLENPAAIAALRDVDSRFLKDDHVDARTIGEMVLRRRCRRKPLCPVPSPHSQGVRSLGRDVEKLSNELSSVKTRFSSLLCDQLLPSLKPSDHEWASPTLMPVLHKFADPRQIARLKLEAFINKAKKIGGPRTSEAALTKLYQAAVDAVRCYGDNRHYYEAHAFRLQDAILAITQLEDRIKSMRQFLSDQLAEVRTEEDVRHGLSVPGVGESTLDILMAFYGPPREWPSFKAMKRLAGTVPVVERSGNTDCPQRMSKLGDPVLRKIIFQIGNVARRYDAECAAIYYDQMVNKGKGHVAACIAAGLWILNCLRAVLRDGKEYESRHPETGKPIDREKSRELAQTLYTVPEEIRAARSKHKPNPHEERKQPTQPNKPSDGTQRPTEAKATPSGGSDVRSRKPGKQQPHSKKRRQPEQVAPK

SEQ ID NO: 258173 - protein, 332 aa, unidentified
MMNAKLNKQASNPTDVAIYCGIDVGKKVFVVSLSCKDKTKTFSNTGGDIKQAVAYLNTNAGIHLSLVVLESTGGLEIPLAKALYQAGFRVVIANPNKTSQFARSYSNAKTDNQDAKMLALYAKFLTLDELELTKHLYAPPSKEQEHLEALVVRRTQLVSMRVQEKNRLHQSQLDSVKQVISYLDEQIARLEQDIDTLNKHFDDTTKKFKDIKGVGNLTLATLMSMLPELGTLNNKQIASLVGVAPYPKESGTMKWKSHCTGGRQSVRNVLYNATNVARQHEPKFKQFYERLINKGKPFKVAINACMRKLLTVINAIVKNDSVWQADYHLRCC

SEQ ID NO: 258174 - protein, 412 aa, unidentified
MEVMYPRCAGLDVHKETVVACVRIVEGGDVSRSVRTFATTTASLIELGEWLEVNGCTHVAMEATGVYWKPVWQVLADSSLDLVLANAAQVKNVPGRKSDVNDATWVSELLAHGLVRASFVPEPAIQQLRGLLRTRKQLVREKASHVQRLQKTLEEANIKIESVLSDVMGRSGRAMVQALIDGESDPAKLAALAHWKVRASAATLREALHGRIKRHHRFLLRLHLKQVDALDAAIAEIDREADAGLACFRDAVKQLSTIPGVSELSAQVILSEIGTDMGRFATAAHLRSWAGLCPRNDESAGKRRSTRLRRGAPWLKAMLVQCAWAAARTKATYLHAQFVRLRGRRGPKKAICAVAASILTAAYHMLKDGTFYEDLGAVHFDRRRPETQARRLVKRLAELGFSVELKPAAAVS

SEQ ID NO: 258175 - protein, 366 aa, unidentified
MIVIGADTHKGSHALAAVDEGTGRVRGSRQIKADEPGHLAAVRWARGLDEERVWALEDCRHVSRRLEQALLAAGERVVRVPPHRMGASRKGEREPGKSDQIDALAVARAVVKDGVEQFPVAYLNEQAMGIRLLLDHRGDLVAERTRTVNRLRWHLLELCPELEHSLKRGALNQARVLDRVDRRLRKLPAGARVRVAREQVSHLRTLNREIDALQCGLVELVKVHRPQLLAEQGCGALTAAILIGHTAGVKRFGKESSFALLTGTAPIPCSSGQRIQHRLNRGGDRQLNHALHIIAITRAQRDPATKTYLARKEAEGKTKKGALRCLKRHLARRFYHLLAEPPADQQQAAVDPNSNGVAPSPMVCVT

SEQ ID NO: 258176 - protein, 414 aa, unidentified
MLKIVYRVCCGMDVHKSFVVACIASTNKQGVTTYKSKRFSTFTGDLHRCAAWLAENNCKDVCMESTGKYWIPIYNILEATCNIVLAHPKYVKAIRGKKTDKRDAKWIADIFKHDLVAGSFIPPADIRQLRDLFRYRWKLTSFTTGEKNRAQNCLTVSNLKLDDVFSDVFGKAASAITSRILENPTEKITDVSGFRTKGMKATNEQVLAAVDGVMCEEQAEKLRIIRSHMDSLELCKLNLESLILSVAEKYLPQLGLVMTAPGIQSFAAIGIISEIGVDMSVFPTSKHLCSWAGLTPQNNESAGKKKTTRISRAGAYIKPLLVQCALCAIRAKQFPEFRNRYLTLKKRRGHKKAIIAIARMLLTAIYNMLKKNEPYNSELYRKGDRPPAHREVSVDEAIFILQRQGYLVTAPPTV

SEQ ID NO: 258177 - protein, 362 aa, unidentified
MNDTNYIGLDVHKKSVSYCVKTASGEIVQEGRVVARREELRAWATAQAQPWRGAMEATLFSAWIYDTLKPYAQQLDMAHPARMKAITAGKKKSDRLDARTIADLLRCNLLPACYVLSPGMRDLRRLLRYRQLVVGESVRMQNKMAGLLLETGTPFVKSKLHGKKYFNQLIQTLEEVPESVKDLLQMSRGAMEMFEATQKRLVKLLLAAPLLAARIERLCTIPGVGAITALPWALEIADPHRFPSIADALSYCGLTAAFRSSAGKEQRGPISKQRNAWLQTMLIEAAKLAPRWNPQLAAVHEHELTRGHRNRATLQVARKMVAYLMAVDKSGKPFQLRSAPAAKALPSMKKSGKAPTRAPQPA

SEQ ID NO: 258178 - protein, 457 aa, unidentified
MPQPKRSRSRTGLSAVHPAAAAIDIGATMHVAAVGPDRDTEPVRTFQTFTDDLHRLADWFARCGVKTVAMESTGVYWIPVFEILEQRGFEVMVVNARDAKHVPGRKTDVSDAEWLQRLHEYGLLRPSFRPQAEIAGLRAYLRQRERLLDYAAAHIQHMQKALMQMNLQLHHVVSDITGVTGMNIIRAIVAGERDPNVLASHRERGCHASVETICQALVGNYREEHVFALSQAIELYDVYQTKVAACDKQIKVILKRLKKSATPPASKLLPPKHRSRQPNAPSFDARAALHAILGVDLTQIHGLGPYLALKLVGECGTNLTAWPTAKHFTSWLGLAPHNKISGGKVLSSKTRRTSNRAASLLRLAAVSVGRTDTALGAFYRRLAARAGKAKAITATARKIAVLFYNTLRHGMSYADPGATYYEERYRQRVLGNLQRRAKSLGYVLHQAERDPIQMVVS

SEQ ID NO: 258179 - protein, 319 aa, unidentified
MLVGIDVAKAELVVATRPGGERWTVENAERGVRTLVERLRRDGAQLIVLEATGGYELLCVAALVAASLPVVVVNPRQVRDFAKATGQLAKTDRIDADLLALFAERVRPELRPLPDEEAKELEALLARRRQLLEMLQAERNRLGQVFGRGKAPVKKSLKAHIAFLERELRMADTDLGDMIRASPAWREREDLLRSVPGVGPVLSLTLLANLPELGRLSRRAIAKLVGVAPLSRDSGTLRGRRFVHGGRASVRGVLYMGALVATKRNAVIRAFYARLLAAGKPKKLALVACMRKLLTILNTMIRTGQRWCAEHTDRAVIHA

SEQ ID NO: 258180 - protein, 344 aa, unidentified
MEYFAGIDVSLRSCALCIVDGKGTVLLERELPCEVSDIAACLGTFPHPIERIGFEAGTLSQHLFFGLKAEGFDVVCMEARQVNAALSAMRNKTDKNDARGIAQVLRTGWFSPVHMKSREAHGVRALLSTRKALLKKTMDLANEVRGLLKIFGVRLPMTVKHGSFDGVVRPLIEIDEVLAHALVPLLDARVVLYQHFLELDRRVKRAASQDEVCMRMMTVPGVGPIASLTFKAAVDDPTRFNRSRTVGAHFGLTPRRYQSGEHDNPGRISKAGDRDVRATLYAAANALLMRTMAGSQIKSWGMRLIRTKGRRRAVVAVARKLAVLLHRMWVDGTEFRQDQVGGKA

SEQ ID NO: 258181 - protein, 339 aa, unidentified
MRQLYCGFDLHSNNVYCGIQDSADQRVFRRRLPNDINVILQELKPFKKELVGVVVESTYNWYWLVDGLMEAGHTVHLANPNAIKQYDGLKYVDDPTDAFHLAHLLRLGILPQGYIYPKKERPVRDLLRRRMLLVQQRTAHVLSLENLMMRHLGCRLKSREIENLDEHGLDSHLPDSTLRLAADTAISMIQHLNGRIKLLEKEVAGRCKLKPEYAKLTTIIGVGPILATTIMLETGPIQRFASDSNYSSYCRCARAVKTSNDKKKGENNGKNGNKYLSWAFVEAANHCRRVCEPARKFCQRKTDKRNGVVAVKALACKLSKAAYFIMRDQEVFKLDKCFG

SEQ ID NO: 258182 - protein, 322 aa, unidentified
MSNRSQVVVEGFAGLDVSAREISVARRQGKEEKSVVASFANNASGHKALLAYLVLGTERVRVCLEASGHYSLVNPRRARRFAESLGERSKTDPVDARVLCEYATRMPWMAWQPPSSLALRLRAITRAIEALGVIHTQEKNREQALASSQALPAMVIQEMQRHQRYLEHRMERLRREALRLIARDRELNRRFRLMLTTTGIAETSALQILGERAVLPDMLDARQWVAFSGLDPRLFKSGKSVEKRPRISRGGSRHLRRALSMPALVALRRDPYLPGFYQNLLARGKARLQAVVAVMRKLLHALFAMFRTNQPYDGSKLCASEL

SEQ ID NO: 258183 - protein, 401 aa, unidentified
MEAAKRDELWVGFDAGKGHHWGAAVDATGATRWSRKVVNDEAEILTAIGEIVELADRVHWAVDINGTASALLLALLAAHGQQVVYVPGRTVNRMSGAYRGEAKTDARDAYVIAETVRHRRDFTTIDVPAQLAADLALLTAHRSDLVADRVRMINRLRDLLTGICPALERAFDYSASKGALVLLTGYQAPAVIRRRGQARLTSWLTTRKVRSAAVVAATALEAAQTQQTVLPGESVAAQLVADLAAQILALDDRIKRLDQQIGTTFRTHPQAQIIESMPGIGPILGAELLVAAGDLANYADSGHLASAAGLVPVPRDSGRRTGNLHRPKRYSRRLRRVFYMSAQTSVINDGPNRDFYLKKRSEGCKHVQALIALARRRVDVLWALLRDNRKFTPDPPLAQAA

SEQ ID NO: 258184 - protein, 319 aa, unidentified
MAATAQDRKMFVGIDVSKSRLDVHIHPSGEAFTVAQDAEGLEQLVARLKDLDLAVIAIEATGGFEAMAVAALAAAFLPVVVVNPRQVHNFAKALGLNAKTDLLDAFVIARFAEATKPEIRALPDADTLALADLLARRRQIVQMITAEKNRAMRNISNAALQKSIGRILKALELELARLDDDIDKMVRGSPLWREKEDLLASVPGVGKVIAQTLLAEMPELGTLNNKQVAAPAGLAPWTRQSGQWRGKSMIGGGRSVCRTVLFIAALSATRHNPDLKAFSQRLLNAGKAKMVVLIAVARKLLTILNAIIRQSTPWQPKTV

SEQ ID NO: 258185 - protein, 402 aa, unidentified
MNAVGIDVSKGKSMVAIMRPFGEIVSAPFEIKHTASGINSLVELINSVEGESRIVMEHTGRYYEVLAHQLSKANLFVSAINPKLIKDFDNDSLRKVKSDKADAVKIARYALDKWQNLKQYNVMDELRNQLKTMNRQFGFYIKHKTAMKNNLIGILDQTYPGVNTYFDSPARSDGSQKWVDFASTYWHVDCVRKMSLNAFIDHYQNWCKRKKYNFSQSKAEEIYGKAKELVPVLPKDAITKLIIKQAVDQLNSASTTVESLRTLMNETASKLPEYPVVMAMKGVGTSLGPQLMAEIGDVSRFTHKSAITAFAGVDPGVNESGSYEQKSVPTSKRGSSDLRKTLFQVMDVLIKTHPQDDPVYQFIDKKRAQGKPYYVYMTAGANKFLRIYYGRVKEYLSSLPES

SEQ ID NO: 258186 - protein, 332 aa, unidentified
MNIVSTAGIDLAKNVFSVHAINASGKVIVRRTVSRAALSELVSQLSPCLIGMEACSGAHEWARRFAAFGHTVKLMAPKFVAPYRKSGKNDGNDAEAICEAVARPNMRFVPIKSLEQQADLSLHRVRQGFVEERTATLNRLRGLLAEFGHVLPLRPVELRRRVPQLLNQLPLRVGACARDLLEHAAQCEMKSLQYEREIRAHARSHSLAQRAKTRQGIGPITASALVATVGNGHDFKNGRQFAAWLGLVPRQYSSGGKTRLGHITKRGDPYLRTLLVMGARSVLQRAARLNDPFSRWALAVQARRGYHRACVAVAAKNARIAWALLSKETALA

SEQ ID NO: 258187 - protein, 412 aa, unidentified
MDTLVARCAGIDVGKAEVVVCLRVPGRRAGTHRTEVRTFGTTTRSLLELRDWLVAERVTRVGMESTGHYWRPVFYLLEDAVETWLVNPQHIKNVPGRKTDVSDAAWIAQMIEYGLVRPSFVPDKPMRRLRDLTRYRASLIHDRTRQVQRLHNVLEDAGIKLSLVASDILGVSGRAMITALVRGERDPRRLAELALGRLRPKIPALIEALTGRFDDHHALLCRLMLDQIEGLDAAVAHLDRQIAEEMAPFRVQLQRLRTIPGVGLRTAEVIIAEIGVDMSRFPTPGHLSSWAGLCPGQHESAGKRRSGRTRKGDSWLCGTLGEAAVAAARTKNTYLAERYRRLARRRGAKRAQLAVARSMLEAAWHVLTYDVDYRDLGADHFLKIARNPQARANRLVRDLTALGYQVQVTKAA

SEQ ID NO: 258188 - protein, 400 aa, unidentified
MISDTTGVSVYVGLDVGKHNHHAVAIDVKGKKLLDKALPNDEAKLTAILEPLLLRGRVLLVVDQPATIGALPVAVAMAAGAEVAYLPGLTMRRVADIFPGEAKTDARDAAIIAETARTMPTTLRSIDLDDEKAAELSMLCGFDQDLCDQITATSNRIRGLYTQIHPALERVIGKHLDHDAMCDLLAKYPTPSSIRKAGVRRIEAVLKKQAPRAYRAWTQEIVEALNAQTVKVIGTDAAGVVIPHLAAQLQALRKQRGDVATQVEVLVEAHPFWTILSSMPGVGIRTAAVFIAETAGKDFANAAHLAAYAGLAPVTRQSGTSIRGENPSKRGNKRLKRAMFLSAFAALRHPESRAYYDRKVAQGKRHNQALLALARRRSDVLFAMLRDGALYESKLTPIST

SEQ ID NO: 258189 - protein, 444 aa, unidentified
MTRKSRKQRLKIVHPKCAGIDIGGREHWVAVDPDQCNEPVRCFSAFTDSLYEMADWLQSLDVEIVAMEATGVYWIPLFEVLDKRGFDVQLVNSRATRQVSGRKSDVLDCQWIWQLMSYGLLRGAFRPADSICVLRSLVRQRDNKVKEQSRCIAHMQKALTQMNIQLANVVSDLMGKTGTAILRAIVAGERDPHELAMLRNSRLRADEETVARSLHGNWREEHLFALTQALAHYDFISGQIHECDLAIEQQLVALPSLADDPCEPVKPLRNPHRNAAQQKALHQALYHVMGVDLTAIPTIGIDTTLVLASEVGPDLSRFPTCAHFCSWLTLAPPTRISGGKQLPGQTPKVFNRAGQALRQAASNARNSQSFIGASHRARLARMDGADAVKATAHQLARLIYAMLTKGQPYVEQGIEAFEARSQDRQVRALHRKARKLGLQLVEAA

SEQ ID NO: 258190 - protein, 345 aa, unidentified
MQSIKFIGIDLAKSVFQLALADSRYHVFKSLRLSRSQFKAYFNNHPPTHIIMETCGTAHYWARVFQQQGHQVSLLPAQYVKAYVRRNKTDHHDAVALIEAIRNNEIHCVPVKSEYQQVLQSLHRLRSQYMRTRNARINALRGILRELGFIVPMGPVAALREATNALSQLPAIITPAICAVIEEVEALQQRMKAIEQQLKSEVKADPVLQQFMQINGVGLLTATATRAAVQTPEQFKNGRQFSAWLGLTPREYSSGNHRYLGRISKRGDKYLRTLFVHGARSVMVRCKIQQRSGKPLTRLQQWAIQLEGRVGHNKATVALANKMARILWATWMHQRDFDGNYTQAS

SEQ ID NO: 258191 - protein, 338 aa, unidentified
MPTDQTGQTYALFVGVDIAAQSAMVASQRPGAKASRSFTIEQTPEGYTSLLRQLQATGFVPGQVLVVMEATGSYWISLATRLVHEGFAVSVINPAQAHHFAKALLKRAKTDAIDAQTLAQLAMILQPEPWTPPPQIYYALQQRLAQRDDLLNLRQQVRNQLHALVQHPEVIAGVRTRMESLLATFACQLTEVESEITAALSQDSAWAAAATRLQSIKGVGWVTAAWTLVTTLNLTSCDTVDSLTAYAGLAPMPRQSGSSVWHRPSIGHTGNGRLRTAFYMATLSAAQHNPVIKAFYTRLREVGKPEKVARCAAARKLLHIAWAVVKKDQPFDPNYALG

SEQ ID NO: 258192 - protein, 409 aa, unidentified
MAVFCGIDWSEQHHDVVIVDGDGGLVARQRISDDAAGFGRLLEMLAQAGDGPDARIPVAIETSRGLLVACLRAGERPVFVINPMAVARYRERHTVSRKKSDHGDAVVLANILRTDMAAHRALPADSELAQAVTVLARAQQDAVWDRTQAHNKLRSLLREYYPAFLAAFRDARGGIMRPEARAILAAAPTPAAATAMSVQQIADLLRQAGRQRGVTARAARIHQALTSEHLRQPSPVEQAMGRRAVALLRALDTACVNAEELAAAAEEAFDQHPDAEIITSLPGLGRLTGARVLAEIGDDRSRFADARSLKAYAGAAPVTRASGKRVIVMHRRVKNQRLATAGYQWAFSALTASPGAHAHYQRRRQTGDSHTAALRNTFNRLLGCLHHCLHTQQPYQEATAFAARTLAAA

SEQ ID NO: 258193 - protein, 359 aa, unidentified
MQSMDQGGRQRRVVIGVDTHKHVHVAVALDELGTPVSDTAVPADRGGYQRLLEWAVRQGTVMAFGIEGTGSYGAGLTSLVRRRSHRVVEVARPDRRERRLNGKSDLLDAHNAARAVLAGVATALPKDADGVVEMLRQIKVAKDTAVKGRTSAMITLKALIVNVDPALREELQALPKMALIERCAALRPGPVDTPIAASKHALRSMARRWRHLHEEIRGHEELLEDLTRSLAPQLLDAFGIAADTAAEMLIVAGDNPDRIRSEAAWAKLCGVAPIPASSGTTTRHRLNRGGHRQANAALYRTVIVRMRFHEPTIAYVERRTAEGRTKAEIIRCLKRFVAREIWALIRPLRTQPTPAAEVV

SEQ ID NO: 258194 - protein, 342 aa, unidentified
MERVATVGLDIAKSVFQVHGIDATGTVVVRRKLSRGRVLTFFEALPRCVIGMGACNTSHYWARELIALGHDVRLMPAQYVKPYVKRGKNDAADAEAICEAVTRPTMRFVPVKTPDQQSVMMLHRVRLMLNRQRTQLSNAMRAHMAEFGVVAPVGRMGLERLLAIVDDHEDQRIPADARVCLAMLAAQLAVVKTQVLENDRRIRESARETEVGRRLMAIPGVGPLLASAFVASVADPTVFKTGRDLAAWIGLVPKQNSSGGKERLGGISRAGNRYLRQMLVVGAMAVIRHAQRHGTKRAWLLQLLARRATKVAAVALANKTARMVWALMTSGERYREPVVTLA

SEQ ID NO: 258195 - protein, 448 aa, unidentified
MGRKRRNNEGGFLHVVHPDCAGIDIGGSFHMVAVSPQRDDEPVRKFEAFTDALEELGDWLEACSVKVVAMESTGVYWIPLYEILDRRGFEVHLVNPRATKQVSGRKSDVRDCEWIWQLMSYGLLPSAFRPTDEICVLRSYTRQRSMLIATQARTIQHLQKALVQMNLTLTSVLSDITGKTGMCILKAIVAGERDGMRLAKLRDRRVKADEQTLARALTGHWREEHLYALGQALAHYDFLEQQLGDCDAHILEVLPKLTLTPDTKVPPARKRFQAGHRTPQQREALRAALYRVAGVDLTAIPTIGLDTALTIAAEVGTDLSRFPNSQHFCSWTTLAPGTRISGGKPLPGRTPRVVNRLGQALRIAATHARHSDSYIGAAHRARLARMEKAKAIKATAHQLARLVYAMLTQGEAYLERGVEGFQTQHRERQLQALKHRAAKFGLMLTEAA

SEQ ID NO: 258196 - protein, 310 aa, unidentified
MDAIYVGIDVSKDRLDVHVRPSGQAFDVARDGKGLSELLERLRDLAPSLIAVEATGGFETIVAAAIAGAHLPLAVVNPAQVRHFAQAVGKRAKSDPIDAAVIARFAEAVKPEPRELPDEAGRLLAELVSRRVQLIEMLVAERQREKRATAMRVRKSLARHIAALEKELPVIDRDIDTMVRGSPVWREKEDLLVTFPGVGNRLARTFLADIPELGRLTRRQIASLAGVAPFTRQSGQWKGRSMIAGGRPITRSAIFLAALSASRCNPVLRTFYQRLLAVGKPKMVALIAVGRKILTILNAMLRDKQQWQPA

SEQ ID NO: 258197 - protein, 409 aa, unidentified
MELTPIYKRVIGLDVHQAQISACAITEQPDGSVLVEQREFGGFKRDRKALAQWACAIAPEVVVMESTGIYWKSPFAALESVGVVAWVVNARHVKAVPGRKTDVADARWLATLARAGLLRASFVAKADLRSLRHVARQRQKLGGMLASEKNRLHKLLTDAGIRLGVVVSDLHGQSARAMVKAIIEGKSVQAVLSLASNRLRASREEIFEALQAEELTAAHRFVLTEIMAHIEDLEARMDRFDKELLRSLVDAGYEKPLCVLQTLPGIDLIGAAMLLVELGADMSVFGSAERLASWAGICPGNNESAGKRKSGRIRRGNAWVRRLLCEFAQAAARSRCALKDKFQALSVRKGHKRSIIALAHKMLRTIYAMLSKKTHYVDKTVDYEALMVARNAPRWIKMLVKHGFVPAPT

SEQ ID NO: 258198 - protein, 318 aa, unidentified
MKTKTNQNINVGVDTGKFQLDIYIRPLDIYFTVENNEKGIKEAVKTIKKYKPERIVIEATGRLEMPFILACANAKLPFTIANPVHVKRFAGALGQRAKTDKLDAQLIAHYSEAIKPPLSKLKPDTMQAMSDLVTRRNQLLNMQTMEKNRLQIMPKELAMTIKPVLTLFKNQILKIEEKIVKLIDSCPEYQAKNMILQSMTGIGKIAAASIISNLPELGYINSKQASALIGVAPMNRESGRFKGQRKIQGGRPQVRTVLYMAMMSAMQSNPVFKATYQRLLEAGKPKKVAIIACIRKMIVILNSMLRDGVMWEAPKVNN

SEQ ID NO: 258199 - protein, 331 aa, unidentified
MAKIGKIIGTDISKSTFSVAYRKGTSVETQTWDYTQEQMAAFAETLDEGCTVVMEATGVYHTRLAYYLYHKGIGVSVVNPLAAKNFARTLMRRAKTDKADSKLLMEYGETMELEPWAPRETWCVEVQQTYALLESKGKELTAARNRMEALTHSEVASGMCMKMVKADIKRLERDIVCLEKEIERLVKANAGEDMKRIEAMPGIGRRTACVLIAMTGSMKRFDNHRQVVSYLGLCPRVYESGTSVRGKAKICKMGLESVRRMLYLCALSAKKYNRACRELYERLLEKGKAKKLALVAVANKLIKQAFAILKSGTNYDENHISEKKVQKMLAY

SEQ ID NO: 258200 - protein, 362 aa, unidentified
MTSMPYPENGRRITVGVDTHADVHVAVALDQVGIRLGERHIPTTEAGYDEIERWALELGPVDAFGVEGTGSYGAGLARLLRRRGHRVVEVNRPDRSTRRQRGKSDPIDAEIAARAVLAGIATATPKSGDGDAEMIRMLKLTRDSAVKAQTQAINQIRSILVTAPASLREDLAGLTTATMLNRCAALPELHDSAVAAPVAAAQFALRLLARRYLQLRGEASQIKTHLRRLTDRAAPALTALAGVGPDGAATFLTAAGDNPHRLHSEAAFAALCGASPIPASSGKTNRHRLNRGGNRQANAALHRAVVVRLRWHEPTQNYMARRRALGMTNREVMRCLKRYIARGVYHALVQPRQATNDLPDGA

SEQ ID NO: 258201 - protein, 391 aa, unidentified
MQANRGLRRVFWRGASCIGRRVLGKAITYVGLDVHKDTIAVALAEAGVRGDVREYGKVANTPAAVKALATKLSRVGNALRFCYEAGPCGYGIQRQLTLAGHDCVVVAPSLIPRKPGDRIKTDRRDAINLAKLHRAGELTAVWVPDPAHEAIRDLVRARLAAVRSLRQARQQLSGFLLRHGRHYNRPAWTLMHRRWMAGLRFEQAAHHIVLEDCIAAVEAATARRDRLEAHIAAALPDWSLAPVVRALQAMRGMALVAAATVIAELGDITRFANPRQLMAYLGLVPSEHSSGATRRQGGITKAGNGAARRMLIEAAWSYRFPARISREQLLRQEGLAKPIRDTAWKAQERLCRRYRRLARAGKSATVVTTAIARELAGFAWAIAKHVQAAAA

SEQ ID NO: 258202 - protein, 411 aa, unidentified
MEPKLIVAGIDVHKRMLAVVLVDEDNPKQALAKRTFGSNAGELKHLSAWLIAHGVTQVVMESTAQYWKPVWLALEKDFDLHLAQAQSNAGPGGRKLDYVDALRLARRFLAAELRLSFVPDAEQRSWRCLSRSKYQKRRRRVQLQNQIEALLEESQIKLSSVLTDLLGGTGYRILKALARGESDPQELIKLAANNLKASPEQLADSLSGPMQNRHRKVLTMQLEELDLIDKHIAELNQQLQEALQDHQQAVLRLCEMPGLKQDAALQIIAEIGPRAAVFETPEGLASWIGVCPGREESAGESKSNRSPKGNRAMRRLLNQIAWGAVRTKDCFFRELYNRLVYKLGVHKAIWAIAHRIAKLIWKVLHEQVTYVERGPLALDPIAMKKRVTRLSQQMRKLGYILEVKPLVVEIN

SEQ ID NO: 258203 - protein, 340 aa, unidentified
MRIIGCDLHAAQQTIAMLDGDTGEVVERTLTHEGEAVRAFYASIPGPAVVGIEATGSMGWFLRLLEELGIPCRVGHPAAVRKAETRRQKHDRRDADLLLRLLVEDRFPAIWLPSTEQRDLRALLLHRHQWVRMRTRVQQALQAIAMSHGLRRGPTLWSRDGQAALAALPLPPHAAHRRSELVALYQHLAAQVDHLDARVEEAVLPRSAATRLMTHPGVGPVTALATEVFLGDPDRFADGKALASYVGMIPSEYSSGSRQRLGALSKQGNPLLRFLWGEAAMHAVRRDTELQRFYRRKLAQKGLGKARIAAARKLGIRLWIMLRDQIGYEEFCCRSPRRPS

SEQ ID NO: 258204 - protein, 343 aa, unidentified
MARFVGLDVSQRLTSICVVDDTGRRVWRGQCASDPEQIARLISRHAGDAAGIGIETGPMTPWLVHEFRARGLDITCLDARHASAALKMQMNKTDQNDAEGLAQIMRTGWYRSVHVKSLDAHRARALLGARAQLVGMTTRLSNHIRGVLKTFGLLPGAMRGLPFDRRVETLLADRDDLTSIVRPMLLAWRQLREQIAAFDKEVRALAKKDPTCRRLMSVPGIGVVSVLAYVSTVEDPKRFARSRSIGAHMGLTPRQYQSGEIDRSGRISRCGDTLARTLMYEAAVVILTRVKRASNLKDWAQAIAKRSGPGKARVALARKLSVILHSIWRSGEAFRWSEQPAVG

SEQ ID NO: 258205 - protein, 367 aa, unidentified
MSSVIYVGMDVHQDSFSLCALASSSGEIIRETRCSADVKNVVKFINHLPENESNQVTLGYEAGIWGYSLHNRLVELGYDCVILAPSTMYSNAKHQMVKNDHQDAQMIAHNLASGTYKVVYVPDQEDDEVKEFIRLIKAMKKELKQTKQRIRAFVLRNGFRFERTPWTGVYLEWLSQLQLPRIKKMVLDEYLIHYHELTDKIERLSRLLGDLSHQERYQEPISKLRCFKGIDTVAAMTIHVETSDFSRFPNARAYAAYLGLTPSEHSSGKNVSLGRITKQGNSTIRTTLVESAQGLVRGNPSKKSKKLKARQINQSGRVINYADRAVNRLHKRYERMIHAGKPRNVAIIAVARELACFIWGMENGKIA

SEQ ID NO: 258206 - protein, 476 aa, unidentified
MEQNSIPKPPIKGRVVGFDCHPDTFTAALVQGKTPAEAIVQKVFTKVPLSQMISWAKKHLSPDDMIVMEASGNSPEVARHFRANHFQAEVLESCHLGKLKEAHANNDRISAVRIAKAFLAGTAKIVWIPDAKTQERRDVMHTHRKAVKRHTQMNNRLDSYLSDNGVRLEASLKALEPQIALAQIRQAKEWSTSQWLIIESFMAELQAAGHVRQKWEQAMAMEVISDPVLLSLARLTGIRAITAYSIGAVIGDIARFKRPKSLVNYLGLHPCFDDSGNEQWSGGVGGHGRKDLRSLLIESAQSILNTTSPLARWGRSLMARKGSRNLAAAAVARKLAVAIWYLLKGKWETLENIDRSLALKIGKIISKVGSQTLLNMQTDRKTLRQQIEQKLKSGRVYQLDPTLVYQPKPTESTKPLTLAEEHGPEVKRPIALKNKLSALSRSRSTTRPVRGIQPQSAGPRSAPLRASGPKSSDAHP

SEQ ID NO: 258207 - protein, 321 aa, unidentified
MKSTQQPLNIGADIAKDEIVVACAEQSFTPRKIANSRSALLAWLNKLPQGSRIAMESTGSHHERLAELAHKLGLTVYVLNAKDVRHYAKGVGLRGKTDRIDAQLIARYLAKEHVELHPFVPPSAKQRELERLLRRRTKLVRIRAAMKQSLNGMRGFAVEVKGLLARLDALIKRIDIKMRASIEACPRSQEACARLQRIPGVGPLVGGGLLNTLQRVPFGSAAAFVAFCGWDPRPSDSGRKSGRRRLSKRGPSLLRYLLYNAAMAASRTKAWRPLYQRSLAKGLSRTEALVILARHIARTAWSIYTHKTLFDAQRISQQVLT

SEQ ID NO: 258208 - protein, 455 aa, unidentified
MSVFLSASRPRGGRSAVQILYSRCCGIDVHKDSVTACVLVDSGAGEPDVRKKEFATHFKALLNLKMWLLAQKVTHVAMESTGVYWKAVWQALEGHFALVLANPFQVKNMPGRKTDARDCQWLAELLAHGLIRPSFVPPRETRDLRDLTRYRVKLTEERNRIHNRIHKVLEDACIKLDTVASDILGASGRAIIQAIIKGQEHPDWLADHAKGTLRGKRPELRLVLRGRITDHHRLMLRELTEDREFVERKIERIEKAIAPGPNLDQVSRLCTIPGVDLITAWTILAELGSDMNAFSGPKHAASWAGLCPGNHESGGKRLSNRTRKGNRWLRRALCQSAWAATRKKNCFLAAFFYRKAGKHGIRKAIVALAHRILIIAFCMLRDGTTYQEAGGDYFDRLNPDRTRTRLVRRLQRLGLDVILKPRIDSQEPAAGPPQRPRRGRPCKCFERAIPCIHGR

SEQ ID NO: 258209 - protein, 351 aa, unidentified
MVIIGVDYHPSFQQIAFADTETGEFGERRLNHSDGEAERFYRDLKQRRISVRVGMEATGYSRWFERLLAELGVELWMGNAAEIKTKRVRKQKTDRQDAQLLLKLMLEDRFPRVWVADPANRDLRQLLWHRHRLVQMRTRIMNQLQAIAMNEGKRWKKRLWKERGRAELAQLQLAPWASRRRQDLTELLDRLTPTIEELTAAAEREARKRPEVLRLMTHPGVGFLTALAFVLIIGTPERFRCGKQVGSYVGLIPSEDSSAGKQRLGHITKQGNALLRFLLVEAAQAAARSDPDWRRRYLHLAMRRQKSIAKVAMGRKLAVRLYWMWRNGCDYSQPLEFGSYAGELVTGHGVK

SEQ ID NO: 258210 - protein, 297 aa, unidentified
MDDRVIEGEVILGVDTHLDTHVGALISETGKLIGTLSVAAETTGYLKLLAWATSFGHVRRAGVEGTGTYGAGLARVLRDHEIEVLEINRPDRAARRSRGKSDPTDAENAARAVLAGRATAIPKEQSGAAEAMRTVSVARRSAVKAKTQAINQLRALLVSAPQDIRERLLRTKTSECVANCAKLRSLGGAPMLQALATTLRLLAKRYLALAEELSTLDAMLEHLTQTHARRLRERFGVGPQTAAVLVAVAGDNPERLKSDAALAALCGTSPLQASSGKTVRHRLNRGVIEQRTTPCGP

SEQ ID NO: 258211 - protein, 410 aa, unidentified
MEVLHPHCAGLDVHKDTVVAGVRHMANGTVKREVRTFKTTTKDLMALSEWLSTEGCTHIAMEATGIYWKPVWHVLGDGEFELVLANAAHVKNVPGRKTDVNDATWLADLMAHGLIRGSFVPSAHTQELRALLRTRKQFVRERSSHIQRLQKTLEDANIKLDSALSDVMGLSGRAMIEALIAGESDPDTLAGLAHRRVKAPPEELREALRGRVTKHHRFLLQLHLQQVDAIDAAISEIDREVDANVEPFRTAITILITIPGVSDLSARVIIAEIGNDMSRFPTEGHLISWAGLCPKNDESAGKRRSTRMRKGAPWLKTTLIQCAWAGARKKGSYLQAQFHRLRSRRGIKKAIGALAASILTAAYHMLKNGTLYQDLGPDHFDRRAKAVQTRRLVTRLHNLGYAVQITPLAV

SEQ ID NO: 258212 - protein, 319 aa, unidentified
MLKQIRYLGIDVSKNSLVVAFRGHCRQLANTKEGHRALIAWIKKESEKLGVTLQVVCEATGGYHLALCLALQSEQIGVAISNPAQIRYFGRSEGRLAKNDPIDAALIERFANARRPPADPPLCPEQIALREMVNHRRQLVECLKVMRVQHQQVLSDGVAEQFKESMALVQRRLERVEQEIEKMIEANALWKRKLEVLTATKGVGLRTAVMLLVAMSELGTLNRGQCAALAGVAPYDDDSGDFKGRRFIQGGRAEVRSALYMAALSAVRSNPVLKATYERLRAAKKPAKLALTAVMRKLLIYLNSLLKEAFPAAPCPQRR

SEQ ID NO: 258213 - protein, 316 aa, unidentified
MSATPRFVGIDVAKAQRDIALRPTGERGAVANDDVGMAVLVERLQAVQPTLMVREARGGDQRAVVAALAAAGLPVAVVNPRQARDVAKATGPLAKTDALDARALAHVAEAVRPTPRPLPDAQADALRALLARRRQLVAMRTAAQNRLGSAPPRLHSDIQAPITGLNTRLAALDDDLDTTLRTSPVWREREDLLRSVPGIGPVCARTLWLDLPELGTLSRQRRAALVRVAPLNRDRGTLRGRRAIWGGRAPMRATLSMSTLVAVRYHPMLKPFCERLRAAGKAAKVALTTCMRKLLTILNAMVKHHTSWQPREVPSV

SEQ ID NO: 258214 - protein, 396 aa, unidentified
MPRIWAGVDIGKEHHHCVVINADGERLLSRRVLNDESALLELIGDILALDEDVLWAVDLNSGGAALLIGLLLSHDQPMVYITGLAVHRAPGSYRGEGKTDAKDAFVIADQARMRRDLGPLRPGDEVAVDLRTLTTRRTDLVADRTRQINRLRAQLLEIFPALERTLDMTNKGPVILLTGYQTPAAIRRSGARRIETWLRNRKVRGAAALAQAAVEAAEAQHTGLPGEKLAASMVVRLAKGVMALDEEITEVEALIEARFREHPHAEVITSLPGMGKLMGAVFIAATGGDMDAFGSSDRLAGYAGLAPAPRDSGRVSGNLRRPRRFHRGLLNAMYLSALSSLKSCPASKAYYARKRAEGKGHKQALLALARRRLNVLWAMIRDGACYQATPPVTAAA

SEQ ID NO: 258215 - protein, 461 aa, unidentified
MPQPNSSSRVEPLAGVHPNAAGLDIGAREIWACVPQERAPEPVRRFGTFTPDLNALADWLIACGVATVAMESTGVYWIPVFEMLEARGLQVFLVNARHIKNVPGRKSDYLDCQWIQKLHALGLLTASFRPDAEMCALRAYLRHRAQLLQHRAPHILHMQRALHQMNLQLTQVLTDVTGVTGLAILRAIVAGERDPLTLARLRNPACKSSEEKIVKALTGNWQPEHLFVLKQSLELYDFYTAQVAACDVTLEQYFTALKPRYEPAAEDLTGPALPRAKPGSKSKNRPAFDARAHLVRLLRIDLVAVEGVSASLAQTLLSEIGTDMTKWPTVKHFASWLGLAPHNDISGGRVLRSRTLKTDNRAGQAFRQAAASVTRSDSAFGAYYRRKKAQIGPQQARVATAHKIARTVYHMLKHRMSYHETGARVYEQQHRERELAHLQRKAAKLGFTLTAHEPVLAPAAT

SEQ ID NO: 258216 - protein, 345 aa, unidentified
MGVIIGVDPHKASCTAAVLDERGELVDQQRFASTRTGSRALGRWAKRWPERRWAVEGASGLGRRLTQQLVGDGEPVVDVPAKLAARVRLLSAGHGRKSDAHDAVSVAMAALGTTRLGQVRLEDHTAVLRLLSDRRDDLVRQRTRTLNRLHVLLCDLLPGGAKRSLDADTAAALLRRLRPATAPARTRRQLAVDLVADLRALDRRITAVEERLRHAVTQSATTLIELFGVGPILAAKLLGEVGDIRRFATKHRFAAHNGTAPIEASSGEVVRHRLSRAGNRKLNHALHLIAIVQIRHPTAGQAYYRRKLAEGKSRKEALRCLKRRLSDAVYRQLLADQHQPVQAQA

SEQ ID NO: 258217 - protein, 412 aa, unidentified
MDVVYQRCAGIDIGKRTAKVCVRVQGRGSQSTVSTVTSWSSMMPQILKLRAKLVNEGVQRVVMESTSDYWRPFFYVLAEELDVILVRASDVKAIPGRKSDVCDAEWLADLAAHGLVRASFVPPQQQRQLRDLTRARSRLLADRAREVQRLEKELEDACIKLAAVVTDLQGVSARLMLQALIEARDDPAAMADLAIGRMRTKIDQLTEALTGRFNDHHRFMVTFRLKRIDAATADLAELDARIDALIVDAGFDPARDLLLSIPGLGPHSADELLAEIGPDMSVFDAPEQLAAWAGVAPGSHESAGKRKNAPARRGNRYVKRALGIAAKSAARKKTGFLAARFRRLAARRGYQKALVATEHSIIIAIWHMLSTGEYYHDLGGDHYHRLIPARIIRRKIAELEAAGYTVTHEVAA

SEQ ID NO: 258218 - protein, 463 aa, unidentified
MSKPIIVGADVSKGYADFFAIDSDKKVVAELFQLDDNKAGHAKLHDQFQSLRKTFKSNRILFAIESSGGLEDNWLRMVKQPALCDFVEGYRLNPKVTHHEYRVQHRNSISDKVSCMTIAHHVAKNLEDYNPGEVVVDAAFAPARNLIRHIVSLDQDCTGHKNSLQQILYQYMPSLLPLLPKAWSKYFLNILLHYGSKRSIQLAASHGFKKIPRVPEGKAQAIHTALRDGIDVKETPEMIVSIIRSKARQILALQEEIASLEKMLCQMAPVKEENVELLCSINGMGRVPATILLCYIEDVDRFDEAKSMAAFFGVQPRIKVSGDGKVKIGMSKQGNGLVRRTLYLLAFRTLGYEPYLKSIYAKCRQQGMVHDAALGVLMHKLTRVIYGMLKSGTAFDPGVDQLNQIDPRAEEESGASKQPVKEDPKRRFQAKTPDAPLSNRQRRKRKKDQESQAATVAESAGST

SEQ ID NO: 258219 - protein, 433 aa, unidentified
MDIIYDKCCGIDVHKKLIVACFRCGKKQDVRNFGATTRELLELADWLKEGGCEMVAMESTASYWKPLYNILESSDLNAMVVNARHMKAVPGRKTDVKDAEWIADLLQHGLLQPSYIPDKDQRELRELVSYRKSLVGERTRELNRLQKMLEGANIKLSGTVSDINGKSARSILEYLLTVEFIDAAKYNETYEKKIIAHNLKANKEQIIDDLNGVMSPLQRRMMKELLAHLDELNKHIKNLNDEIDNFMKPEEKQASQAIQDITGIGNTSAQAIISVIGTDMTQFPTDRHISSWAGLCPGNNESAGKRKSGKTRKGNSLLRTTLITCTHSAVRNKKSYFYAQFMRISAHRNPKRAYVAVAHSMLIAIYHILNEGVVFKDLGADYYNQFNKEHKINAYLNRGSLRFLATRKLLFHSKVCNILNITASHSSHRHPQY

SEQ ID NO: 258220 - protein, 424 aa, unidentified
MKYKMQQKQNQLIERITDRHLVVGVDIAQQFHVARAVNYRGIVVGDPLTFENNEEGFTSFLEWMNKLIDKNSLDTSIVGMEPTGHYWINLSKWLSNQKIDVVTVNPHLVKRNKENRDNTQSKSDKKDALVIADMVKNGYYSNVRSTPESFEKLRVLMSNRDVIVKRLVSSINQLNRWVDIVFPELRQVFKDVKGKGAIATLRLFPTPFELRSMHPQDIVTKWKSVMKRQPGLKKAYLLINLAKGSIGSHQAHDAYKLHLEQLLEEYDLATTQLERVEREVTKVLQRIPFAMKLLAIKGISEISLAGILGEAGDLSGFAHGNSLLRHAGLHLSEASSGKWKGQIVISKRGRSRLRRFIYLATMSLVMNNPEFKALHANNVKVKKIKKMKSIMKLCGKLARLFVGMAKSNESYSPEKLQPLSSLAA

SEQ ID NO: 258221 - protein, 273 aa, unidentified
MENYAGIDVSLELSSVCVVDGQGKILREVKVASEPDALVEFFETLGFAVKRIGLEAGPLSQWLHAGLKRTGIETVLLETRHVKAALSAMTVKTDRKDARGIAQLIRMGWFRPVHAKSVDAQEIRALLIARKQLLGRLIDVELSIRGILRGFGLKVGPVTRKNFEARIRELVSGQATLERMATAMLSARSALKAEYGRLHKAVLAIVRDDAVCRRLMTVPGVGPLVAIAYKSGIDDPHRIAKSKAAGALFGLTPKKYQSGERTSRAESHWPETR

SEQ ID NO: 258222 - protein, 338 aa, unidentified
MEKDTTYVALDDSKRKIVAGILRPDGLHLELREIANDPRQVRRLFERLKGEGPVTACYEAGVSGYDLYRQIIACGVDCAVMAPALTPRRPGQRLKTDRRDAAKLVRLFRAGELTAIHVPAEAEEAVRDLVRCRDDLRRDVLRWRHRVLKLLTRHGRAYLLGPNWSQAHWRWIRAQRFALPPLQRAFEATVFALEHALAQQAELDKELEALAATAPYREPVGWLRCFRGIDTLSAIILLAEIVDFQRFRRPRELMAYLGLVPSEYSSGETHRRGALTKAGNRHARRVLIEAAWHYRHRPALGPALAGRSAGQPPAIVGQASPRPVAGSFRAAFLDPAMC

SEQ ID NO: 258223 - protein, 350 aa, unidentified
MSTRNQPRDAAVFGIDIGKTVFHVVGLDSAHAPIQKATFRREALLQFFERASPVLVGMEACPGSQWLARKLQAMVHTVRIVPAQFVKPFVKSNKNDIIDAEAIAEAVTRPTMRFVEIRTPEQIDLQALHRVRDRMIAHRTRLISQMRAFCLEYGIAIHQGAGKFKAEIPRVLADATNELTPSMRRILTEVHGELMALEQRIAAMNQEIDAIAARSDIARRLMTVPGIGPLASTALLAAAGSGRQFRKARDLAAWLGLVPREYSTGGKTKLLGISKRGNKYLRRMIVHGARSCVTHLDRGRDRLGPWLDGLERRMHKNKVTVALAAKIARIVWVILTKQGATYERRVPALG

SEQ ID NO: 258224 - protein, 369 aa, unidentified
MSECITYIGLDVHKETIAVALAEGSRRGEVCEHGQISNTPAALTRLSSKLSQTGSELRFCYEAGPCGYGIQRQLAAAGHDCVVVAPSLIPRKPGDRIKTDRRDAINLAGLHRAGALTVVWIPDPAHEAVRDLVRARLAAVRSLRQARQQLSGFLLRHGCHYSRPAWTLMHRRWLAGLRFEQSAHHIVLEDCIATIEAATARRDRLTAQIEAMLADWALAPVVHALQSLRGMALVSAATVIAELGDITRFANPRQLMAYLGLVPSEHSSGGTRRQGGVTKAGNSTARRMLIEAAWSYRFPARISREQLLRQEALPKPIRDIAWKAQVRLCGRYRKLSRAGKPATTVTTAIARELAGFVWAIACQLPRPTN

SEQ ID NO: 258225 - protein, 377 aa, unidentified
MKKVVMCGADVHDNSITTRIAMNKETPETKVFRYTVQGRRDLYKHLKLVARKHGTDRIVVAYEASSLGFGMCDECTDSGIECYVLAPTKMPQSEAQRKRKTDKHDAQKILEQLRGHVLAGNALAKVWIPGPEVRDDREVVRMRLEIADKLTRARTQVRTLLKRNKVAKPKMVGKSRTVSDRHWLKRLTESESELLSGARVALASLLRQIDALEQEVKELDKAVKALSETESYRAAVEVLVDKLTGVATLSAMVFLSELGDLRRFANRKKIGAFLGLVPSSNESGESAKDRKGHITRQGPARVRKVLCQSTWSRVAFDQEESKAHARIMAKNPKKKKIATVACMRRLGIRMWHIALEAQLEAGVYDSKDLPKTKRIAA

SEQ ID NO: 258226 - protein, 341 aa, unidentified
MSVIAPVFSFGLNGYAGSGLALQDKAEKRLMQITIGIDISKETLDAYRFPDNHHIQVANGRAGHKTLVRWIGKQNGSLVVFEATGAYHRNLEAALAANGTAFAKVNPRQARRFAEATGRLAKTDRVDAIMLAKMGAILGLKAHEPKTEALHILRELITARRALMKDKVAAKTRLQTTRQTLLKNQINARLKQIKIQIQQVDAAITEKVAQDEALSNKLDILTSIPGIAETTAFSMLIEMPELGTLEGKQAASLAGLAPMSRQSGKWQGKERIKGGRAFLRRAIYMPALVATRYNPGLKAKYDQLIRAGKSGKVALTAIMRKLVVMANALLRDGRTWSELRP

SEQ ID NO: 258227 - protein, 341 aa, unidentified
MLIIGCDYHPGFQQIAFVDTATGECGERRLNHTEGAEQFYRDLGARGIEARIGMEASGHARWFERLIAELGFELWVGDAAAISTKRVRKQKNDRQDAELLLTLLVENRFPRIWIPSCENRDLRQLLWHRHRLVQTQTRLRNQLHAVALNEGVRRKKALWRPKGRAQLESLVLAPWASRRRQDLLQLLDQVDSTLIELTAAIGKEAEKRPEVLRLMTHPGVGALTALAFVLIIGTPERFASSKQLSSYIGLVPSEESSGERRRLGHISKQGNTLLRFLLVAAAQATVRSDPDWRRRYLRLAMRRERAIAKIAMARMLAVRLYWMWRNGCDYVQLPKLGSHAG

SEQ ID NO: 258228 - protein, 411 aa, unidentified
MDLEVVVTHGAGLDVHKKVIVATVLTPTVKETRSFGTLTPDLLALADWLQSCGVTHVAMEATGVYWKPVVNLLEAYPFEAVMVVNPQHIKGMPGRKTDVQDSQWIAGLLRIGALKASYIPPRPQRELREIVRYRTSLQQARATEANRIQKVLEGANVKLGSVISDVLGVTGQRILAALADGMTDPAALADLADPRIRASRDTLIHALTGLVTAHQRLMLRVQLQHVAFLDRQIAALSEEIATRLANFDDALTRLQTITGVERRTAEIIIAEIGTDLQRFPSAGHLVSWAGFSPGQNESAGKARPTRTRKGSKALRAALTQSGHAAGKTQTYLGAVYHRLAGRRGKQRAAVATGRHILIAVYAILRTPGAVYEDLGATYYDQRDRQALVRREIRRLEALGYRVMVEPTSAAS

SEQ ID NO: 258229 - protein, 334 aa, unidentified
MADTVAPALLALDIGASRHAFALDCRGRGDAGEIRNDPAEIRTFLSARLKSHGAVRVLVEATGIYYLDLALIAAELGCEVMVVNPKAAHNFAKALQVRSKTDRLDAAMLLEFLKRMPFVPWTPPRTALLELRYYGRYLTQLTEDGTVARNRLHALISAQVSPKPLLADLRRAIATLDRRIARVRQDAIALIQADAELQAAFSALSSVIGIADTSAVSLLSELMVLPRHLSSRACVCHAGLDVRLHQSGTSVAKAPRISKHGNKYLRRALFMPALSAIQHDPHAKAFRQRLLDRGKKKMQANVAVMRKLLTAAWALVRNPAQYDGSKLYSSTECG

SEQ ID NO: 258230 - protein, 352 aa, unidentified
MLIIGCDFHPGFQQVAIFDNRTGEMQEKRLQHRAEAEQFYGSLAGQEVRVGMEACGHYPWFERLLEGLGIELWMGDAAQVRASVVRKQKTDRRDAEHLLQLLMEDRFPKIWVPSLEVRDVRQLLVHRHKQVQARTRTKNQLQAMALSCGVQKKYKLWTKAGRAELEQLPLLPYAAERRKRLLETLDTLEAEISKLDRRVAEEAGQRPEAVKLMTHPGVGPVTGLAMVLTLGPAERFGSGKQVGSYFGLIPSEESSGGKQRLGKISKQGSSFLRFLLVEAGQTAARYDPQLKRFYRRLAARKNRSVAKVAVARKLATRLYLMLREDWTYAQLCQVVMQVSPSHSVAGKSEPSA

SEQ ID NO: 258231 - protein, 447 aa, unidentified
MNAVGIDVSKGKSKVAIIRAYGEVVAKPFDVMHYPDQLAELAKYIHSLEGESRVVMEHTGKYSEPIADFLCDAGIFVCMVNAKLIHDYGGDTIRRDKTDKVDALKIAGYCLDKWSKLSRYEPADDKRKMLKTYNRQLGEYTKIKTMLKNNLISLLDQTFPGANELFSSPAREKDGHEKWIDFALAFPHCFCVTLLSGRMFMAKYEKWCRKNGYNFCPHKAEGVYSAALNCLPTLPNDDFAQTLIIQTVIQLNNLCQTVAAVKAEMNKLASSLPEYDTVLAMHGVGKTLAPQLIAEIGDIRRYPKRSSLARFAGIEPPENQSGAYNQHSRRISKQGSPHLRKALFQVMCCILQNGNLDEPTFQFLDKKRAEGKPYKVYMIAGANKFLRIYYARVNECLGFPQSSGICALQNGNNMNTCKQDRATLESDLSGYAGFAIPIAEKTAARTC

SEQ ID NO: 258232 - protein, 352 aa, unidentified
MSSNEMFPNLTIGLDLGDKVSRVCEINAAGKIVNRASIATTPGAIERYFGGRERCRVVLEVGTHSPWVTRELKKLGHETIVSQASKVYGKGHKQRHNDGMDAEYLARQGRADPELLHPMEHRSAEAQQDLALLRARDQLVQARTKLINHVRGAVKSLGGRINKCAAEAFQKQAATQLPEPLRPGLVPLLEVIADLTRRIRAMDEVVEQIAEAHPEAVHLQQPSGVGVLTAVAFVRALEDPQRIKRSREAGAFFGLVPKLDDSSDSSPQLHISKAGDPLVRRYLVSAARYILGPFGPECDLRRYGEAIAARGGKNAKKRAAVAVARKLAVLLHHLWITNATYDPNWSQRQRAA

SEQ ID NO: 258233 - protein, 455 aa, unidentified
MAKNSSKKAKSQRSRERALLQKVHLNAAGIDVGADAHWVAVPEDRDPQPVRRFGVFTSDLVLLCHWLKSCQIETIVMESTGVYWIALFQVLERHGFEVRLVNASHVKNVPGRKTDVLDCQWLQQLHTFGLLRGSFRPEAAMCVARSYLRLRDTLTKDSNSLVQRMQKALTEMNVQIHRVISDITGLTGMSILRAILAGERNCVKLAQLRHPQIKSSSEVLAKALEGDYCPEHLFALQTALELYDSLQLKMLECDQRIEETFQGFEAKISLPAPDLSRLRSAEKRRDAHRRHRLQELTGADLTALPGLDLLAVERILSEIGRDMTRWPTEKHFCRWLGVAPDNRISGGRPLPSKPRKNANRAAAALRLAAQSAMQSKSALGAFIRRIKSRLGAPTAINAGAHKLARLLYRMLKFGTAYVEAGQHAYEKLFKERMLRNLQRKARDLGFEITPIPSPR

SEQ ID NO: 258234 - protein, 342 aa, unidentified
MKQYVGLDVSQKETSVCVIDEQGRLVFEGKAKSTPGALMELIRRRAPSAERIGFETGAMASWLWHELRRVGLPVVCIDARHAHAALSVRINKSDKNDARGLAELIRIGWHREVAVKSEESQRVRAVLIARCRLVSIRRDIENQVRSMLKEYGLLFSRAIGAPFRQQVVELMGASHPLRAVVEPLLSIHEQVAREQAKFDEDVRRSARADETVRRLMSVPGVGVVTALTFRHTIDDPSRFSSASKVGAYLGLTPRRKQSGETDITGKISRWGDRLLRTYLFEAASVLVHRTKKWSTLKAWGVRLIKRIGMKKAKVAIARKIAIILHCIWVDGTSFEWGQPKAA

SEQ ID NO: 258235 - protein, 429 aa, unidentified
MTSKPSTTFTGVRVAIDVAKLTHQVLLELPSRQRRAMRIANTKTEIDHLVTTLRGFDVPCEIAFEPTGDYHRPLAYALGQAGFRLCQVSSIAVARTREALYNTWDKNDPKDAQVILQLLKNGTTQRYLDPLITGHQDLQEMANTYQQVSLRKVRLQHSLLTHHLPLYFPEAERYLHSSRAEWFTELLLFTPCPAAVRRYSKAAFVAAACAQIAGRKVDKHRWLGDFYDTACHSVGLPVAETSETIVMFRIVLEEYRALCRLRKRLEADIARHLSTQPDFVRLQTIPGIGPILAMTILAEARDLRRFGCARQFLKYCGFDLCTEQSGQFRGTTHLSKRGNARLRYAFWMAGTVAIRMQQNSFRRKFEDYIRPDPKSADRRRKGYTAVAAKMARVVYAVVNTGTEYRRFPEATRPGGRIPSPGAVEAHATS

SEQ ID NO: 258236 - protein, 350 aa, unidentified
MLIIGCDYHPGFQQIAFVDTETGELGERRLAHREEAEQFYGMLKQRSVGVRVGMEASGHARWFERLLSQLQFELYIGDAAVVRTKRVRKQRTDRQDAQLLLKLMVEDRFPRIWVADAENRDLRQLLWHRHRLVQMRTRVMNQLHVVALNEGLRRKKALWRPAGRRELESLLLARWAGRRRQDLLDLLDQLRPKIQELTGALEEEAEKRPVARRLMTHPGVGPLTALAFELVIGIAERFACGKQIASYIGLVPSEESSGDRRRLGHISKQGNSLLRYLLVEAAQVTVRSQPQWRSKFFHLAMRRGRKIAKVAMARKLAVRLYWMWRQGLDYGQFENFGSHAGEPGNRHGVQ

SEQ ID NO: 258237 - protein, 397 aa, unidentified
MKKDSTGQKKQPKKQPNKKRAASPAKGKARKTRVGKNKPTHLTIGMDLGDKTSRYCVLDEQGEVLWERSTATTKKGMAQAFGALGGCRVAIEVGTHSPWVSRLLSSFGHEVIVANARQVQLISQSSRKSDRVDAQTLARLARVDPQLLRPIQHRSEKAQGHLLVIRVRAALVEARTGLINSARGLAKASGERLPGCDADQMGTGKLDGLPAGIAATLRPLLEQVETLTKKIKESDRQIEQIAREHYPQSARLRQIRGVGELIALTYMLTVEDPGRFRRSRDVGCYVGLRPRRGESGQQQPQLRITKEGDRYLRQLLVQGAQYILGHRGPDTDLRRWGLKLAARGGKNAKKRAVVGVARKLAVLLHRLWVSGETYDALRQSRAKQEAGQGNRAQLAAA

SEQ ID NO: 258238 - protein, 412 aa, unidentified
METIVARSCGLDVHRDEVTACLLIHEAGRKPKKEIRRFATFTANLVEMGEWLKAAGVTHVGMESTGVYWKPVYAVLEEAGGFELIVGNAQHMKNVPGRKTDQKDAEWIAKLIQHGLVRPSYVPAADLRDLRDLVRYRRSLVNARSAERNRLQKVLQTANVKLASVASDVFGKSGMKMLRAMAVGETDPETLANLAEGLLRKKLAALRTALDGRLREHHRFMLRQQLQRLDDAEAAVAAVEAEIERRLIPHEQVVDAMCTIPGVDRVGAAAFIAEIGVDVKAFPSVQHLAAWAGICPGNNESAGKHRGVKARKGNVHLRTALVEAAQAARNKRGSYLRDKYHRLMARRGGKRAIVAIGHKILVAVYHLLSRGSTYNDLGEVYLDRLNKRRTVDTLVRRLKALGWEADLRPVSA

SEQ ID NO: 258239 - protein, 341 aa, unidentified
MQITTIGLDIAKNVFQVHGVDTQENVVVRKRLRRGQVIAFFEALTPCLVGMEACATSHYWARALTKLGHEVRLMPAKDVKAYVKRNKNDAADAEAICEAVRRPTIRFVQVKSAEQQARLMQHRTRDLLMRQRTQVINALQAHLAELGITAAQGREGIKELLAIVADDRDQRLPTDARASLRVLAAQLQAMQTLLSSLEKRIMAQHRANADSRRLETIPGIGIVGATAIAATVTDPKVFRSGRDFAAWVGLVPREDSTGGKRKLGPISKQGDRYVRRILVVGAHSVLRRARQSPEKYPWLTGLLARRPFRVVAIALANKMARIAWALLAKGGTFRAPQLAAA

SEQ ID NO: 258240 - protein, 316 aa, unidentified
MTDNSMICAGIDVGKSHLDIALHPGKARLRVTYDTAGLKALDAFLREHDVSRIGFEASGGYEWRLLAHLRAGKRPAARLQPAQLRFFAKSRLKRAKNDRLDAVLIALFTASLEQLPALPDARFDKLAAELTYLEQIEQQIALVKTFAETALSEAIKRRHLREVARLETCRKAHLLRLEKTVRDDCDLAQRLDLLISIKGIGLRSALCLIIRLPELGHASRAEIAALAGVAPYDDDSGKYHGRRRIQGGRERLRKSLFMCAFTATRHNPDLAAFYTRLRQNGKEHLCAVIAVARKLIVLANTILFRKTEWTPQHRKN

SEQ ID NO: 258241 - protein, 373 aa, unidentified
MKKNITETPKMSRTKRLSRGQLSGSLTVGIDLGDRTSRYCVLNQAGDVVEARAVATTRKDLTRVFGALRHSRLALEVGTHSPWVSRHLQALGHEVIVANPRRTRLIAESDNKHDRVDAETLARLARADAKLLFPIRHRGEQAQADLAVIRVRAALVEARTRAINTARGLTKSFGERLRKCDAQSVDERLAEDLPPAVQTVVAPLLAQTRELNARIREHEETIQKIARERYPETALLTAVHGVGVLTALTFILTIDDRSRFACSRDVGAYLGMRPRRRQSSGSDPALGISKAGDRYLRKLLVQGAHVILGRHGADSDLRRFGRKLAERGGKGANKKARVAVARKLAVLLHHLWVTGEVYEPVHHTRTAPVAAAA

SEQ ID NO: 258242 - protein, 412 aa, unidentified
MEVLYARCAGLDVHKETVMACARLAAGASVARERETFGTTTRELVRLLEWLEHHGVTHVALEATGVYWKPVWHVLVGHVTLVLGKASDMKQVPGRKSDVKDAEWIADLLAHGLIRASFVPPEPIQELRDLTRTRRQLCGEHTQHVQRVQKVLEDANVKLASVLSDIVGASGRAMLDALCAGEHDLARIAALAHGRVKASQAELVAALDGTLRDHHRFLLRVHLRQIDALDAAIATLEARTEQCLRPFAKRLRRLKTIPGVSDIVAAVLLAEIGPDMNVFPTAAHLVSWACLAPRLDGSAGKQRSTRTRKGQWLKAVLIQAAWASVRAKRGAKAETYLHAQFHRLRARRGAKKAIVAVAASILTAAYHMLKNDTDYQDLGAQHFQRRAGKDVAYRLKRRLEEMGYSVELSTAA

SEQ ID NO: 258243 - protein, 335 aa, unidentified
MKKIHVGIDISKEKCNLCFRSGLEIVREEECSNDVKALKKAFKAALKVLGASLEEVLVCAEYTGRYIYPLTVACQELDIFLWLDDPTRIKNSMGLTRGKNDAIDAARIAEYAYRYSDKAIRYHIPDAALVSMKNLLADREFLLVDKKRYQSQLTDQKKYMAPGDFKHKNSRWKKVIKSIDEQIAAIDTEIEALIAADPVLTRQKELLVSIDGIGERIAINMIAITGGFTRFQNARQFCSFAGLTPYKYDSGTSVRSKAKISKRANQTMKALLHMSAVNVATRMKSGEYKDYYERKLKEGKHIMCILNVLRAKLVHRMFSVIKRDTEYTKEYKSAG

SEQ ID NO: 258244 - protein, 383 aa, unidentified
MKSVCGLDVHKDSVYLCILSEFGELIEKVFGVLTYQLEEMRDLMLHHHVVEVSMESTSVYWIPIWRVLSPHFKLNLANPYFIKQLPGRKSDVKDAQWIAECTMKELIRSSFVPPEIIQQLRQYDRRIFDLNEEIVRKLSKLDAVLQRCNIRLSNYVSNVDSKSYKAVVKAISQGITAPEELVKLIHGRILNHHGIDVITASLKGVVSLAEIDMISQLRDELDMAEAHKEKCQARMLEICEREFPEELKRLQPIPGITERAATSLIAEIGTDMNKFETANHLASWSGLKPRNDESNKKIKSRSITHGNVYLRKTIIECAWAASRTKDCFFSRFSFHQTQVRKKNKMKVLVAVARKMLIAVWHVLHDNTNYIDFTTDRTTSQTKG

SEQ ID NO: 258245 - protein, 350 aa, unidentified
MIIIGCDYHPGFQQIAFVDTETGEYEERRLQHREEAEKFYRNLAAQGMKVRVGMEASGHARWFERLLAELNFELWIGDAAEIETKRVRKPKTDREDARLLLRLLMEDRFPRIWVPSWENRDLRQLLWHRHRMVQARTRIMNQLQAVALNEGLLLKKRLWRERGRQQLESFPLARWASRRRHDLLELLDRLNPTISELTQLIEREVDKHPVAQRLMTHPGVGALTTLAFLLIIGEGERFECGKQIAAYLGLVPEEESSGESRRLGHISKPGSGLMRFFLVEAAQVRVRSDAEWRNKFFHLAMRRGRKIAKVAMARRLAVRLYWMGRKQWDHEQLKKFSLHAGQPGTGVGVH

SEQ ID NO: 258246 - protein, 368 aa, unidentified
MKRYAGEYDGRQYVGIDLHRRRSVVVRTTDAGELLEAAQITNSPLALAEAMTRAGEHPEVVIEATYGWYWAVDTLAECGASTHLAHPLGVKAFEYRRVKNDFRDSVDLADLLRMGRLPEAWIAPPATRELRELVRHRAKLVSMRSRCKAQVHSVLAKCGVAVPMSDLFGVAGIDLLDRLDLPAAYAARVASLRRVIDLLDFEIDVATGLVRPRLARDPGYTAVQTIPGIGPLLGAVFVAEIGDVQRFPTAQKLTCWAGMTPLHRESDTTIRRGRITKQGSRPVRWAAVESVQRLPATTRLGAFRDALAAKRGHNIAVVAAARRQLEYVFYALRDHHVSADLRSPTPHRPTRPRTPVPTPSPGPQDLDP

SEQ ID NO: 258247 - protein, 367 aa, unidentified
MSVYVGIDVHRKRSQVAVVTEDGKVQLNKNTVNGTAPILRLIGDLPSGTPVAFEAAFGWSWLADLLEDYGFEAHLVHPLRCKAIASARLKNDKVDAATLAQLLRADLLPEAWIAPLQVRQLRALLRHRTGLVRLRTQLQNRIHAVVADFGYDRSGSYLSGPGRGWLAGLELPAISRELVTGYLAVIDGLAPLTDRIDGELRQHAKADPRVKILTTLPGVGQFTALVMLAEIGDITRFPSARKLASWAGLTPTVRGSDLHVRHGHISKQGSAWLRWVLNQAAQTAKRSPEFSATYAAIAKRRGKKIATIAISRKLLTRAWHLLQAPGPASPDASTATAAHPQTGRVTKPRASSHLRHEPATGRARSSD

SEQ ID NO: 258248 - protein, 334 aa, unidentified
MLYLGVDHHMKTSHLTITDESGQILKRKGIATRQDELLKALEEFEGEPIKAVLEASYSWGKMYDWLGEVADDVILAHPQKVRAIADARIKTDTIDSETLAHLLRADLIPEAYACSAETRAVKRVLRQRMFLVRVQTMFKNRIHATVSQHEVSRPKVTDLFGAEGMRWLSSIELPYPDNLILGEDLRFLSEVRARISATEGLIKDLSRGDQAVRLLKSIPGIGDFFSVLIRYEVGEITRFRSPDKFASYTGLIPSTYSSGEKTFHGKLTKRGNKYLRWAFIEAVRPAVMTSPELRAYHDRIRRRKGAGDARVATARKLACITWYVWTEQRLYEIR

SEQ ID NO: 258249 - protein, 379 aa, unidentified
MTLDKYFRQCVGIDISKDKFTACLYMYDMASDAGCCTESIDFPNNRTGFNQMVKWSRKESQKGFPLVYLMEPTGSYYEPLAYHLHKIGQTLYVVLPNKARKFCEYEGIKTKTDAMDARCLALMGCKNRKLRPWEPPLPIYRELRQLTRLRADLVKMQTQMLNHMESIDHMEDVAPEVRKSYEKLLDTIEKQLEKNEKDIAAKLAQDKELETKVKRIATAKGIRVGTVTCIVAETQGFHLISNRKQLTSFAGLDVKARQSGKDDPRHHITKKGNAHIRAALYMPALSAAHCNRQMAQAYGRICAKHPDVKMIGVTAIMRKMLLLVYSLWKSGEEYDETRDNTHTPRKKEPQPTNSPEDCLKPNAEPPDWNAADKEGNPPF

SEQ ID NO: 258250 - protein, 344 aa, unidentified
MLRKKVAQSDFNGKGLILEKYDHYVAIDWSMRIMAIAHMTTRRKAPQVFERPTNLKELKAYLSTLSGRIVLTIEETTTSQWLFLQLLDHVSRIIICDPYRNRLLCHGPKTDKIDAGKLCLLLYNGMLSEVFHSTSDLYELRLLVGAYVDHVQAGVRCHNQKSALLRGHQDQSPTALFILNRLDSDIERYHATKEEYEKHFATIVRKNKLLRNLICVDGIGNIGATKILACVVDARRFPNRGKYYGYCGLARHEKISGGRSYGSRTPRFNHMLKDVYKTAASAVVGSTKPLNEYYEALRSKGVAEHNARHAVARYIARVTLAMIKSGQSYDPYRWRQNVIEQDHL

SEQ ID NO: 258251 - protein, 337 aa, unidentified
MEHFAGLDVSMEETHVCVIDREGKVILEVRTPTVPKAIAAALAKGPALERVLFETGRMAPTLFHGLTALGLPVVCAESRQAYQALRSLAAHKTDRNDARGLAHLARTGFFKPVHVKSLPSHAVRALIIARKKLVGQRVTLENQIRGLAVAFGVRLPRGLSPGFAENGMAVGRGIPGLDGAMRGLLAARDAILKAIVAIDADMKTLERSSAACRRLMTIPGVGRLTALAFAAAIDDPGRFRRSRDVGAYLGLVPRRYQSGEIDYTGSISKCGDGRLRTLLYEAANVMLTRYRGSLALKTWALDIARRSTMRKARVALARRLAVIMFAILKHGTEFEPA

SEQ ID NO: 258252 - protein, 413 aa, unidentified
MNYEPITAVGIDVSKGKSTVAVRRPGGEVVLTPFQVNHDAAGLSCLIKTLRDVGGDIRIVMEHTGMYWRPIALTLKAAGFFVSVVNAMLIHDFSDNSLRKVKTDKADSMKIANYALSFWAELRDYSPEDETRQMLKMQNRLYLRTKKSSVVLRNGLISLLDQTFPGINTLFDSQPKRSNGHFKWVDFVKRFWHKDCVAGISLAAFSDAYRKWCAKSGYRFSQSDAEKFHTAARNAVATFPKSDSVKLLIAQAVDSLNAVYDALHILRGEMLRLASLLPEFDVVMEMQGAGDVTGPQLMAEIGDVRRFTHKGALVAFAGMDAPPFQSGTFDSKSRRISKRGSPHLRKTLFMVASTILQHSDPANPIFQFMDKKRAEGKHFYVYTVAGAAKFLRIYYARVKTHLAMLDSGANSAA

SEQ ID NO: 258253 - protein, 348 aa, unidentified
MNRLSKSKSDDKVSMFVGMDLHKNYLQIAVMNEEGRVLRNSKIDNNLRQISRFFDDVNNDKAHVVMESSSVWYNIYRYLSEERSFDVVLSNPVKTRAIASAKIKTDKLDAVKLADLLRGGYIAECYVPNNKIMELRELVRHRIVLVRMRTKLKNSIHGIMLMKGIQLSNTCTNTFTLEYIDELKKLNDYRINHYISLIESLDQEIKDVSKQIILLAKENKMAKLLTTIPGIGHYSALFLVSEIDDINRFPDSYHLCSYAGLVPSTHSSGGVTYHGNITKTGSKHLRWIMLECVHAHIRTDKSSNITQFYQRLAKKKGNSKAAVAAASKLLRVVYWIMKERREYQHRCS

SEQ ID NO: 258254 - protein, 451 aa, unidentified
MGQKNVKMEIINAHCAGIDIGSRSHYVAVGQELTDVKEFGVYADDLLEICNWLKEHHITSVAMESTGSYWQNLYVELVKHNFEVVLANGKFTKNIKGKKTDVKDARWIQKLHTIGLLTSSFLPDEQTEVLRTYCRQRENWIALGAEAIHKMQKYLKLLNFRLDVVVRDVTGLTGLKIIEDICKGNLDPQSLAKHRHYNCKKSEEEIAKALKGNNREDFLFGLKQEFDCYNFYQEKIADCEKMIHQFLKQSINTNPEKKKLKTTDKPHKRLNKNAIKGIDLNQASYQYFGGVDLMTIEGLSHSTILTIISEVGPEGFHKFETAKQFTSWLRLAPNNKISGGKLLSSKTPKGSNRLKIALRNAANAIGNLKDTHLSNFFQRICYRKGRTVAVSATARKLAVIIWNMVVKKVPYKPPTDYLFLDEKRKLKLVTRIQKQITKFGLTNEELGFLTI

SEQ ID NO: 258255 - protein, 410 aa, unidentified
MELLHRRCCGLDVHKETVVACLRLVSDGQVTTEVRTFQTTTADLQRLSEWLAANECTHVAMEATGVYWKPVWHILDDGEFELVLANAAHVKNVPGRKTDVNDAMWLAELLAHGLIRASFVPDTQTQEMRNLLRTRKQLVREQSSHVLRVQKTLEDANIKLDSVLTDLMGKSGRAMMEGLIAGETNPTKLASLADPRVKASHEEFREALRGRVTKHHRFLLRLHLNQIDALDAAMATLDAQVEANLGPFRTAVDLIMSIPGIKNLSAHVIISEIGIDMSRFPSDAHLISWAGICPGNDESAGKRRSNRLRKGAPWLKTTLVQCAWAAVKKKNSYLQAQFYRIKVRRGPKKAIMAVAASILTAIYHMLKDGTMYQDLGCNHFDRRSTDQQKKRLVKRLTDLGYAVEIKPLAA

SEQ ID NO: 258256 - protein, 392 aa, unidentified
MIYVGIDVAKDKHDCFIINSDGEILFHTFTISNNHEGFNTLFQRIESVSDDFTKVKVGLEATGHYSYNLLGFLLDKGLPTYVINPLHTNLYRKSLSLRKTKTDKVDSRTIATMIMSDMNLKSYSDISYHNEELKSLTRYRFDKVKERAKLKTSISRLVNILFPELEKLVPSLHLSSVYALLSEFPGAAQIAASHLTKLTNILSQASKGRYGKETAILFRETARSSIGSVMPAKSLELKHTIKLIQELTAEIDEIEVAIKQIMDEEIHSPILTIPGISYRMGAMILAEIGDFNRFDSADQILAYAGMSPSTYQSGQLNNCYSHMEKRGSRYLRYALYNATKYVCQWDESFSAYLAKKRSEGKHYNVALSHATKKLVRLIFAMEKSGRTYQPAA

SEQ ID NO: 258257 - protein, 340 aa, unidentified
MQVTTIGLDLAKNVFQVHGVNAHGTVVLRKQLRRDQVAPFFANLPACLIGVEACSSAHHWGRKLQTFGHTVRLMAPQFVKPYVKSNKNDAADAEAICEAVARPSMRFVPIKNTEQQSVLALHRVRQGFVKARTAQANQIRGLLAEFGFVVPQGIAHIAQRVPGIIEDASVELPGSFRLLIDRLLEHLRLLHRQVEEIEVQIKAWHRTSEASRRLEKVPGIGPLTATALVASVGDARNFDNGRQFAAWLGVVPRQHSSGGKPTLLGMSKRGDAYLRTLLIHGARSVIYRAAQRLDAQSWLVKLTARRNKNIAAVALANKTARVAWALLAHDRQFEAGYAAA

SEQ ID NO: 258258 - protein, 367 aa, unidentified
MWEAPVRGQRTSVGLDVHARSVVACGLDGETGELFERRLTPERGGVLSWVRSLPGPVSVTYEAGPTGFGLARFLVVAGVDCQVAAPSKLQRPSGDRVKTDARDARHLARLLHLGEIVAVAVPDAETEAARDLVRAREDVRGDLMSARHRVSKLLLRQGIVYSGGVAWTGVHDVWLRKQKFESAALQLTYDTAYDTMIAAVDRRDRLDKVIAAMAADSPFTPVVTRLGCLRGVSTLTAFGLAVEIGDWRRLTGRSIGAYLGLVPTEYSSGGSRSQGGITKTGNGHARRLLIESAWHHRQPYHRPSVDLRRRWDLADAASRARGQQANRRLHARWAGFDARKKRPVVANTAVARELAGWCWSLAVGENS

SEQ ID NO: 258259 - protein, 443 aa, unidentified
MGRRCIGLDVHREFAQIAVWEDGVVRQAGRIALSDEALRIFADSLGPEDEVAIEATCNTQAIVRLLEPHVARVVVSNPQKTRAIAEAKVKTDKVDAEVLAQLLAADYLPSVWVADQATQALRRQVARRANIVRQRTRLKNRVQAILHRNLIPRCPAADLFGIKGRCWLANQPLPPDEQLAVDALLRQLDFHAQELRIIDAELGRVALSSSEVKRLMTIPGVDATVALSIVAAVGDFCRFRRPEQLVSYLGLNPRVKQSGGQPASHGRITKQGRAHARGMLVEAAWSAAKTPGPLRAFYQRVCSRRGMQIAVVATARKLAVLCWTMIERGEDYAFARPSLTDKKLRALELRAGMPSRRGQKGKAAAYSLKEIRQRERELAEQGERAYRQLVTDWQANRPAKPKPEPGVAAANGTRLKRPSAGQAARQASVPEPALRSGVDHALS

SEQ ID NO: 258260 - protein, 327 aa, unidentified
MKEAVFLGLDVAKLNFEACLLLPDGKALKNKFQNTPVGFSKLLVWLGGLELTEIFACLEPTGVYSRRLANFILQSGMRVSQVNSYTVQCYGRSKNFRSKTDRIDAYLLADYCRTQNPPVWDPPAPTQSELKEVQRRLASLDEQIRQEENRLDVCEFSVVRDDIEENLGRLYVRRKKLETVASSLVKSDEVMARNFKILNSIIGIGEKSALRLLALVQFEKFTSGRQVGCFAGLTPRAFDSGTSVHKKPRISRIGSSELRAGLYFPAMVAIQCNPQMRAFAERLKAKGKPPKVVICAVMRKLLVLATTLIRNQQFYDPQFHPELSITP

SEQ ID NO: 258261 - protein, 401 aa, unidentified
MSNFSYFLGIDVSKRSFDACLIDAKEFVLMNDKYEMDSDGFEKLMLRLQKFDLDEVLVVLESTSIYHVNLFFHLEEKGFAVAVVNPLLIHNFNKSVTLRKSKTDKIDAFRIACFTLHNQDKINLNKTPTASIRSLSRERDRLSKETAKLKTEIKNHLQILFPELVNNYNVFTKTMLLLLLKAPGAFPIKKMRPVQIERIFSKTSGNKVQLSPRELVRMAKKSFGIDDKHLQTVLIMKIETLLFIQKQKGEMDKVLKDYVEENLKKDFEIITSINGIGQTTAEKFLIEIGDISKYKSHNQLRAYIGTDPSIKQSGSSINVQGKISKRGNSHLRRTIWQMAVSVINYSDNFAAYFEKKMTEGKKYKQAVIAVANKLIKTLYAILKNKSKFCENYRNQSKFIYS

SEQ ID NO: 258262 - protein, 337 aa, unidentified
MTQVHILAIDLAKRSFQVCGTDRGGAVLFNRLLSRARLQQLLNEQSPCIVAMEACATSHFWGRFAQGCGHNVRLIPPIYVKPFVKRQKNDAADAAAIAEAAQRPNMHYVEVKSAEHQARAVAFRTHQCFVRQRTQLINALRGHLGEFGIVVAQGPANLTTVVGILADQTNDLPDGVREIGQLYLDQIGLLTEKIDGLMLKLREATKANEDMRRLCTVPGIGPVTAGAILAFAPDLRAFKSGRNFAAWLGLVPRQHSTGGKTRLGGVSKMGQADIRKLLIVGAMSLIRWIVRKGVLPDNWLGAILGRKPRMVAAVALANKMARIIWAMMTKEQNYRMA

SEQ ID NO: 258263 - protein, 381 aa, unidentified
MRTVCGLDVHKDSVFVCILNENGIVFSAKYGVLTPQLEQLLSVLRQYDVGEVCMESTSIYWMPIWRVLEPYVDLKLVNPYFIKQLPGKKSDVKDAEWIATCLLKDLVKGSYVPDDLIQQLRQYDRRISDLNREIVRKLGKLDAALQRCNIRISNYVSTTDGKSYREVVRLIAGGVKDPAELVKVIHGRTVNRVGKDVVLASLSGVVSDTDVDVISQLRDEIDLAQRHKDECQSRMDAICRQYFPDQLKNLQTIPGIKGRSATAIIAEVGTDMSSFEYAAHLVSWCGLKPRNEESAGKIKARSTTHGNRYLRKTLIECAWAASKTQGCFYNKFSYHQVVVRKKCKMKVQVAIARKILVSIWHVMHDNVAYRDYTPDIVPADA

SEQ ID NO: 258264 - protein, 365 aa, unidentified
MDSEKLVVGVAEPSGEVRSLGSIPYTSEGVGRLVKKLGPASRLRICYEAGPHGYGLYWELTALGVHCDVVAPTLVPVKSGDRVKTNRRDAEKLARCYRSGDLTPVWVPDAEHEALRDLVRAREAAKKDQLRARHRLGKFLLRHGLRAAAGVKNWTLKHLLWVRTLHFEHPAQEATFLDYLHEVEHAAERVARLEKAIDQAVEGLPQEMKAMVAGLQALRGIKQVSAVTIVAEVGPLSRFERPKQLMGYSGMVSSEDSTGNRVRRFGITKTGNAHLRRVAGEAAWAYQYRPAMSAALKKRQEGLSEEVKEIAWKAQHRLCTRYRRLLARGKIKQQVTTAVGRELLGFIWAIGVQVEKEQQRRSRAA

SEQ ID NO: 258265 - protein, 321 aa, unidentified
MNKYTEIYGVDISKDVFDVMNSKGAYIQYANGLKGFGQFSKKLPKGSLVVMEATGYYHYRLAQYLYEQGHCVSVVNPLSVKRFIQMKLSKVKTDKSDARAICEYACVNEVPLYTAKNKDQTECLQLLRLMDTYLKHSTAIKNKLHGERTLGIPSKTVYRSLSRSLKSLQKEMCLLEARLLSLVKEHQQGQLTLLKSIPGMGSKTAMVLLVLTDGFTKFENAGQLCCYAGITPTIRESGSSVRGRSRISKVGNRKLRNLLFLCSFSACKHNRACREIYERITSKGKSKKLALIAVSNKLLKQSFAIAKSGLPYDEKYVSRLT

SEQ ID NO: 258266 - protein, 429 aa, unidentified
MDPSVSLLPPIVAWVGLDWADQKHDVCLQASNGPDVEHRVVEHQPEALHALVADLRHRFPQGQIAIALEQSRGSLFYALMHYEFLRLYPIPPKALADYRRALYPSGSKNDPTDAQLLLEFLRKHPERFRPWVADDVETRQIALLSEHRRQLVDDRTALTNRLTALLKGYFPQALKWAGDLTAPLAWDFLAQFPSLERAQRASRVEVLKLYRAHARRTPEQLEELCEQIRAARPLTTDRAILESSALVVAPLVGQLRVLQAAVKALERKLRDLFAAHPDQALFASFPGAGKALAPRLLAAWGADRQRFPGPDNMQCFAGPAPVTVTSGKSQWVHRRYACPTFVGQTFHEFAAQSRLQSPWAQAYYQQQRAKGADHHPAVRALAFKWIRIMFRCWKDRTPYDEARYQQALKRRGSPLATTLSRLEAPPARA

SEQ ID NO: 258267 - protein, 365 aa, unidentified
MNATAGLPIVGVDLAKIVFQLAVANGAWQVTEQHRLTRTQMERWFANRAVGLVVMEACGSAHHWARWLNALGIEGKLLPALYVRAYVKRNKTDSADACALLEAARCADIVPVKVKSLEQQALQGLHRTRSLWMGTRTSRINALRGFCREFGIDIAQGARLGVERIERVLADPHSAVPELIRGTMKLLIEEIRLLEARTAQLERELTLLARRSPACTTLLTIPGVGLLTATAMVAATSGSVAHFRDARHFASWFGLTPRERSSGTTRILGRISKRGDRYLRMLLTHGARSVLHAAARATVAGKPVDGLRQWALGVQQRANHNKAACALANKLARICYATLRDAAPYGEPVRRPEKKIARTSFELAA

SEQ ID NO: 258268 - protein, 379 aa, unidentified
MDQTITSADLGNTLYGSMELSKKTWLLAIQFPDRPQPSLYPIEGGNTEDLMAKLAAASDRWAKMSGRRPSITLCYEAGYDAFWLARFLKTRDIECLVVDAASLQVNRRGRRAKTDRIDVEMLLRALIAWCRGERHVWSVVRIPSIDEEDLRRSHRERSRLVQERTAHINRIKGLLFAQGIRGINVRSKHKRLEISKLVTGEGRPLPPRLASEIARELERLALVQQQLVAIERERDEAPTPCTSTEKKRLQLSLLNGIGPTVSAIMAREVYYRQFKNRRQVAGFLGLATSPHDSGAVERSQGISRAGSGPVRVTMIQAAWLWVKHQPKSAITRWFLQRTDGHSGRIKRIMIIAVARKLAIALWRYVEQGLVPQGAILTSR

SEQ ID NO: 258269 - protein, 413 aa, unidentified
MDLLVERCAGLDVSKQEVVACVRTPGLQAGGRRRQEIRTFATFSADLEALADWLEAEGVTQVVMEATGQYWKPCWYVLEARGFELLLVNARHVKIMPGHKTDVADAAWLCELLEHGLLRSSFVPPPQIRELRDLTRYRKRLVQAHTAECQRVQKTLEDAGIKLDSVASDILGVSGRAMLGALVAGERDPQVLAELAKGRLRNKLPELRRALRGHFGDHHGLLIGLSLSHLEHLEGAIAQLDARVDQVIAPFAVARDHLDTITGVGKRAAEAIIAEIGTDMSVFPTAGHLASWAGRCPGNNVTGGKRRSGRPTKGNRWLADVLTECAWAAAHSRDTYLAAQFWRLARRIGKKKAAVAVGHSILVIAWYLLTDDCDYQDLGGDWFTRRNDADRHKTHLIKQLQALGYSVTLQPAA

SEQ ID NO: 258270 - protein, 343 aa, unidentified
MEYFAGIDVSLEQSSVCVVDGTGKIVREAKVASEPEALVGCFRGLETGVTRIGLEAGPLSQWLYAGLTTAGFEVVLLETRHVKAALSAMVIKTDRKDARGIAQLLRMGWFRPVHAKSPAAQEVRALLVARKLLQTKLLDVEFSIRGILRGFGLKIGEVSKGRFAARVRELAAGHAMLERITEPMLRAREALRTEYARLHGEMLAIVKPDPVCRRLMTVPGVGALVAITFKSAVDDPARFARSRVLGAHFGLTPRKYQSGETDVTGAISRVGDAMVRMALYEAAHIMLSRVTRFSSLKRWALDVVRRRGLKRAKVALARKLATVLHRMWVDGTSFRWGKQAAAV

SEQ ID NO: 258271 - protein, 413 aa, unidentified
MLLFIGDDWAEDHHDIEIEDETGRRLAKARVPEGLEGITRLHALLAEHAPADWSDLPSEEVAGRVFVGIETDRGPWVTALRAAGFQVFAINPLSSARYRERYSTSGAKSDAGDAHVLAEIVRLDRDHHRKIAGDTDLVDAVKLLARAHQTAIWERTRQVLRLRSTLREYFPAAVEAFSDLAAKDSLLLLGRAPSPVRAAKLTRSQVVSALRAARRHHAEAKADALLAVLRTPGLRQPATTDAAYAAVVIGQVGIITALNEQIAQLQEVVAEHFGRHPDADIYLSQPGFGVVLAARALGEFGDDKKRFSDSRARKNYSGQSPITRASGKKTVVLARYATNRRLGDALHLQAFSALVASPGARVYYDALRARKIGHHAALRQLANRLVGILHGCLKTGTKYDETTAWQHQIVTAA

SEQ ID NO: 258272 - protein, 430 aa, unidentified
MKSNTQNAKIEAITEKTLVLGIDVGSETHYARAFDYRGIEYSKKPFKFSNTEAGFVTFKEWILDIKERHEKDKVVLGMEPTGHYWFNLGKFLQDNEMKPVLVNPHHVKKSKELDDNNPTKNDRKDPKVIAGLVREGRYMIPYLPDGVYADLRTASNIRFQLQAELTRIQNRISRWFNIYFPEYKTVYGKPDAKSGILILKAAPLPEDILTLGIDGVNQIWRDAKLRAVGKARAKTLIEAAEHSVGSKEGAVSARMEIRMLLEDYESRNTRLQEVMVLIEELVKGIPMAEKLLEIKGVGIRTVSGFLAEVGDISRFNNPKELQKLAGLALVENSSGKHKGETTISRRGRKRLRYLLFEAAMSLVAKNPEFRELHNYYTTRRLNPLKKMQSLMVIAAKLIRVFYAMLTKGADYDPKKMVSDIKRPAVYLQAV

SEQ ID NO: 258273 - protein, 427 aa, unidentified
METGLFFTIGIDPHKDYHYAVLLSPFGELLKTYEFDDLAIHAFYKDAINDINNFGEKLQGITKRKFGIENAYGYGIKPTKYLFSKKELVLNVPTSLTEEARLDEIHLDKDDFLDACRVARCVLFHNPKIRLIQVTPKIETSEDLRLLVNERELLVRERTAQKNSLHALYYHMFDNYKEIVTYKNIFCMKAIKQMKDHLKDETDLRSTIIVKKLDKIVSLEDEIDSYEKQMGEVKSEDIEILKTIPKCSTAVAAKIMSAIKDIARFENPDKLAKYCGMGGVTSSSAEGRSKRKKKVGKKDKKGEQKSKQKKKHKKMRKDKRGQVKLKHTLYMLSVSHLGKGGVPKAVEYIKKKREEGFTGLEACQRWAKKLLFGIFFMLKRKEPFKYATGANGKIPNNVIAFPQQKLHATTVIEKKIKQVPIVACNIL

SEQ ID NO: 258274 - protein, 347 aa, unidentified
MRFYNRQHRHYCGIDLHVKTMYVCILDAAGQVLVHRNVKSTPEAFLEIVAPYRDDLVVSAECMFTWYWLADVCAAEGIGFVLGHALAMKAIHGGKSKNDKIDSHKIASLLRGGLLPQSYVYPATMRSTRDLLRRRLHLVRKRGQLLAHIQNTRAQYNLPDFERRLAYPANRDDVPDHFPDPSVRKSIEVDLALLERYDTLINDLELTLVREAKRHDADAFHRLRSVPGIGKVLALTILYEIHDIGRFDRVQEFASYARLVKGQKQSGGKMLGTSGAKMGNVHLKWAFSEAAVLFLRHATGGKKFLATLEKKHGKGKALSILAHKIGRAVFYILSRDTVFSLEKFMAA

SEQ ID NO: 258275 - protein, 428 aa, unidentified
MKDKPIQRKLTEPALFIGIDWADQKHDIYTIDRQGGGSWEQIEHSAEAIDTWLAKKLHQAGGRPIAILLEQSRGALVHALMFRENVILYPINPKQFARYRESYSNAGCKDDLTDAMLLARMLWERIRVLKPWQPDDAPTRLLARLCKTRRCLVNERTRLTQQLIAQLKAYYPLILGFGSSRSISVLILEMLRRWPDPRQLQRADRRILHRVFKEHGYRNEDQRQELIDRIRSSKLLSRDRGLIEPASVVVQCLAKQIPLLQKSIDQLDARIETEMKNHPDAALFTSLPGAGKVLAPRLLTAFGSQRDRYASAEEVATFSGIAPVTKTSGKSRVVHRRYACPKYLRQTFHEFADQARKWCPWSRAYYRYQRSRGMKHHAALRKLATRWIRILFRVWKNRTAYDPAAYLAIIKQKNPAMVPFLPAKKIAA

SEQ ID NO: 258276 - protein, 446 aa, unidentified
MTACEAPYIRSTHDSVTMPNKKGNIMKSSQQITSYGGFDWGREHHAVVVVDLQGQIVADFQFDHTRSGWQKFRDKTAAFTGLAFAIETNQGAAVDHLLQHECTVYPVNPVAAKSYRQRKMPSGAKSDHVDAWALAEALRLDGHEWKPLKLTDDASLKLKWLCQDEVVLISQRTQLVNQLQQALVEYYPAALEAFDDWTQSYTWDFIIAFPTPTALTKAGQRRWQKFLHLHRLWRPATLEHRLQVFAGADQFKGSAAITEVKSHLAVSLCKLLRTLQQQLDDYRQKIAELFAQHPDHHLFASLPGAKTKLAPRLLAAIGSDPGRYANNPEVLQAFAGTAPISFQSGQHHTVKMRRACDKFLRHTVHLWADTFHRASPWGEVYYNKKRAEGMSHACALRCLAQRLLKIVFRIIVDKKPYDAELHARNQQKHGSWVLSLVNLTPAKTGE

SEQ ID NO: 258277 - protein, 365 aa, unidentified
MWEAPVKRQRMSVGLDVHARSVVGCALDGDTGEVFQRRLCPDYREVLDWIAGLPAPVAVTYEAGPTGFGLARALTAAGIDCVVAAPSKLQRPAGDRVKTDARDAAHLARLLHLGQITEVTVPSTGQEAARDLVRAREDCRSDLMTARHRIWKLLLRQGLVYYGGQAWTGNHELWLRAQHFDDPALALTYESALDAMVSGVHRRDRLDAAIATMAADSEFTPVARRLCCVRGVSTLTAFALAVEIGDWSRLSGRSIGAYLGLVPTESSSGNTRSQGGLTKTGNSHARRLLVEAAWHHRASYRPSRDLRRRWDLASASARERGHAANHRLHTRWAGFDKRKKRPVVANAAIARELAGWCWSLAVMPD

SEQ ID NO: 258278 - protein, 412 aa, unidentified
MYVYCGIDWASDHHDVALIDQDGALLAKARIRDDSPGLQQLIDLLAAYGDTGEDPIPVAIETSHGLLVACLRATGRPVYAINPMAAARYRDRHAVSRRKSDHLDAMVLANILRTDAAAHRQLPRDSELAQAIAVLARAQQDAVWDRTQAGNKLRSHLHEYFPAALEAFSTRDGLCAPAALVILACAPTPAQAAKLTRAQLRALLKKAGRQRGIDVEIERLHEVFRQPHMRQLPLVEDAMGRQTLTLVRKLEIACTSADDLAQAAVESFEQHPDARIITSFPGLGSLTGARVLAEIGDDRCRFTDAKGLKAFAGAAPVTRASGKSVAVMARRVKNQRLAAVGYVWAFAALTASPGARAHYDRRREAGDRHTAAQRNLFNRLLGCLHHCLIVRTAYDEAIAFLIPKAPDVAEAA

SEQ ID NO: 258279 - protein, 295 aa, unidentified
MDITTIGIDLAKNSFALVGMNKHGKIVFRKTLTRNKLLAFIAQCPPCLIGMEACSGAHYWGREFTKLGHRIGIIAAKFVEPFRKGAKNDNNDAEAICEAVLRPNIWFVPIKSPDQQAVLCIHRVRQGLVRDRTSMMNQLRGLLSEFGIIMPKGRYPAQAAIAGILEEAENSLPMIARRVIDNLWQRIKQANEQIEGYNRELAQLVKESTVARQIMTIPGVGAQTASGVVASVADPRMFKNSRQFSAWLGLVPRQYTTSGKIKLGRITKRGDQYLRTCLVHGARAVVANLVTSRTG

SEQ ID NO: 258280 - protein, 359 aa, unidentified
MTSIASLAPPRKVIVGVDTHKHLHVAVAIDHHGARIGEHSASADSAGYAQLETWANNLGAVEVFGIEGTGSYGVGLTSFLRRRGHRIIEVNRGDRRMRRQNGKSDTLDAEAAARSILSGSATSVPKSADGLSEMIRQVKVARDTARTGRSSAIIALKAVIVNAPAELRESLEGLGDKALLERCAGFRIRTMDSTTSSAKHALRSLARRWLVLDQEIKEHDIVLDQLTDQASPTLRDGFGIGPDTAAEILVVLGDNPERIRSESAFAKLCGTCPIPASSGMTNKHRLYRGGHRQANSALYRAVIVRMRFHQPTIDYVARRTQEGLTKKDIIRCLKRYLAREVYQRVMIDHRARLELAEAS

SEQ ID NO: 258281 - protein, 361 aa, unidentified
MKVETPKKTKAPLESPLARVCVDLSKSTFHVVGLDAEGNKVLRRKFNRENFKEWLARPDLPKVIVAMEACGGAQWWGAYCQSLGHTPMMIPPHQVKPYATSQKNDYNDAEAIGEASLRPKTTSVPVKTPEQQDLSMLIAARQGMIKERTALAVRIRAFLLERGFALPRGIGHLEGRLSDLLDDGTNSLTLVTRTLIRTLQSDLRHLSERIGEIDSMIKALARTDETSQRLQTIPGVGPMVAASLIAVIGDPGRFENGRDMAAFLGLVPSQHTSGDKIRLGRITKHGDTGLRSLLVEGAHAAIQAAETTGSGKMKDGKLRAWILELKKRKETPNKVAVALANKIARMAWAIWTKGTIYTAAA

SEQ ID NO: 258282 - protein, 370 aa, unidentified
MSNATTFVGLDVHARSVKACAFVPETGETIRKSFGYEPGEIASWVSSLPQPARCVYESGVTGFHLCRELNAMGAACVIGAVSKMHKPAADRGRKTDRRDAQFLAVQLALGVVTEVHVPDAECEGARDLARALADARDDAVRAKQRLSKFLLRHGLVYDERNAAGQRRNRWTGDFWAWVGRIDLGDAAAMATLDHYCERVREADAAKAALEAKVKSLAQQPRWKPTCDALKCLKGIDAVTAVSIACEADGFARFATASGFAAWVGLVPSEHSSGESRFHGGITKAGNKHLRKLLVEAAWHYKGASRSPKDLAKGQVVDAATRRHANAGVRRLVDRRRSMDDAGKQSSVANVAVARELACWCWAVGRMAEGA

SEQ ID NO: 258283 - protein, 291 aa, unidentified
MEQNNEVILGVDTHLDGHVGAVISETGKLLGTLSVSTDTAGYLNLVSWAHSFGHLRRAGVEGTGTYGAGLARVLRDHEIEVLEVNRADRAMRRSRGKSDPTDAENAARAVLSGRATAVPKEQSGAAEAMRAVSVARRSAVKAKTQANQLRALLVSAPQEIRERLLKTKTAECVASCARLRSLGDTPMLQTLTTTLRLLAKRWLALAEELNTLDAMLDRLTSQHASRLRDRFGVGPQTAAVLVAVAGDNPERLKSEAALAALCGTSPLQASSGKTVRHRLNRGGDRSANNAL

SEQ ID NO: 258284 - protein, 412 aa, unidentified
MKKHTYRSKNVNKINFTQVKERLANEPVVFAIDIAKEKQYGLLSNASGTVSELIWWTHTEQTVELLSALKELECPLDIVIESTGTYGDALRFQFRDCGFEIYQMNAKRVKDASEIYDGVPSMHDAKSATIITRLHRDGLSKLWVELNDDERTMNALRREYDMHQSQYQRNQGRLEAYLSRHWPEVSYLLSLDSVTLEKLLIEYGSPASIAADAKNAANNMRLWGKHLLSDGKIEAVISSACNSLGQPCIESELRYLQALAKELQHSRLQQKQAKQALEESIKSKDDLRELGALIGMVTTAVLFSCHLDPRKYDCARSYQKALGLNLKEKSSGRHVGQLKITKRGSSVARSYLYFAALRLIKNNSVVKAWYLNKVDPRAKNKTVIAVMRKLSKALWYVGRGDKFDATKLFAVA

SEQ ID NO: 258285 - protein, 392 aa, unidentified
MRFIGIDIASERHVVVVVDDAGGVLVKPVGFDEDAGGYRKLFDLLGAATEVLVAMEATGHYWKNLFAELTARGFPVALINPVRTRRFAGEDLARTKTDAIDALGIARFALQKRPAVTRLPDAVTEELRELVRHRERLVQDFGDRTRQLHRLVDLGFPEFTRHVHGLDSMLATTVLHLYPTAEAFTGLPWKKLAKLVYDGQHRVGEELAKTLIEAAKVSVGRHHGLAYRIQVRHACEDMDLLRRRIRELDRDIEAKLGDHEVGTLLTTIDGIGPQTAARIVAELGNPADFRDASAVAAYVGVVPALRHSGKRSPVRAGLTAMGNARLRAALWMPTLTAVQRNPWLKAHYERLRARGKLPKVALVACMHKLLAAVYSVAKHRQPFVPRLERKPA

SEQ ID NO: 258286 - protein, 350 aa, unidentified
MSTVTIAVDLAKHVFELAVATRPGSIQERKRLTRPQFEQFWGTRAPCRVVMEACASSHFWGRKLRTLGFEVVLLPGHYVRPYRRRNKTDRADCEAILEAARCAGIHPVAIKSEDQQALVALHRVRSQWQQSRTARINAMRGLLHEFGVHAPAGSKRFLNDLHALLARKQDALPERVRRTLVALWEDVRDLEQRMEAIETELEGVALEQPAIQALLRIPGVGLLTATALFASVSDIHAFKSGRQLSCWLGLTPRESSSGGRRRLGRISKQGDPYLRTLLIHGARAALNAARRAEAAGKPVTELQAWSLRRAQTSHPNRATVALANKLTRIAWAVWFHDRTFDGNHVIRVAA

SEQ ID NO: 258287 - protein, 348 aa, unidentified
MNYIGMDAHIATLDFAVINERGKISKERTVKTGVKDMIEYVRSIPKPRKIYTEEGSLATWLLETCNEFGETLIITDPKRNKWIGKSEQKYDRIDARKLGELARGGYVKEIYHAVGKRKRFCELVSAYHDTIKSQTRIKNKLKAKFRQHGIRCSGETVYGAKHRDQWRKKLDKEELVLNIVEEIWHQLDSTRSSINRILKLMRKESKNYPEIKNFQELPGVGFINAATISAIIETPNRFSNKKKVWMYAGLGIVERGSGEKIYSKKLSKDYNRMLKRAAKSSMEAAIGGKDNQFRKQYLKLTLEKGVLPHRAKLTVARSLLAALYGMWKNGEKYDPTRNLKNDDIQSES

SEQ ID NO: 258288 - protein, 350 aa, unidentified
MKSFEKMQIVNPNAAGIDVGSRSHFVAVGQEENQIKEFNVYQSGLNNLADYLQTNNIQSVAMESTGSYWQSLFMLLQQRGFEVLLVQGTQTKNHKAKTDVKDAQWIQKLHSLGLLCGSFLPSESTLQIRTLHRHRAGLIEQSSAYTNKMQKALRLMNFRLDVVISDITGVSGIRVIEAILSGETLGEKLAEYCDKRVKRSKEEIADALQGKINAEYLHELSDCYDIYRFLQDKIKKTDARINEVLENQTREIFLSEEVELVKKQKKGKNQPQFDVQKHSQKLFGVDLFAIESVCTGTVASFLAEIGTDIYKFKTAKQFVNWLRLAPNNRISGGKVLAAEPQRVKINLHWH

SEQ ID NO: 258289 - protein, 386 aa, unidentified
MKPSNPSIATRGAENTAVIFVSIELSKKSWLTAIHTPLADKIGLHKVAAGSGTELLALIRRVMKKVERTMKGPVKVLSCYEAGYDGFWLHRILAEAGIINYVIDPASLQVNRRARRAKTDRIDALGMVRALMAFERGEEQVFSVVRVPSVEGEDARRVHRERERLIKERIQHVNRIKGLLATQGIYDYEPMRRHRRERFEALTTAMGTPLPDHLRDEITRHLQRLELVLEMIRAVEAQRDAVVEAEPAANASGRKIQHLVRLKAIGPQFATVLVGEVFHKKFANRRQVASYAGLTPSPFNSGSLVREQGISKAGNPRARTTMIEMAWLWLRYQPHSALSRWFHERVGTGTGRVRRITIVALARKLLIALWRFLESGLLPDGAELKA

SEQ ID NO: 258290 - protein, 420 aa, unidentified
MDVLIERCAGMDVHRDTVVATVRRPGPGGTRRSETRTFTTMTGQLEMLADWLTEQKVTLVGMESTGIYWKPVYYVLEDRFPVWVINAEHLRNVPGRKTDVADSVWIAQLIEHGLVSPSFVPPRNVRLLRDVTRHGRRLTEERTRAIQRLEKVLQDAGIKLTSVASTILGKTGRAILAALLAGEEDPVVLAELAKGRLRPKIPALREALTHRFRLEHHGVLIAQMLAHIDFLESAILETHQRVEVLLRPVAATVELVMTIPGVGRRVAEVLIAEVGLDMTVFPTAGHLASWAGICPGNNSSGGKHRPGRTRHGSMWLRIALTEAAHVAARGKGTYLAAHHAQIRGRRGTQKAIGATRHDILIAYYHIVRDNVPYQDLGPDWNNRRRSTEQQTRRLLRQLERLGVNVTIEPNTESPTYKPNT

SEQ ID NO: 258291 - protein, 413 aa, unidentified
MEILHTRCAGLDVHKKVVVATILVSDEHGQLTKETRSFETMTASLLALSDWLTGFGITHVAMESTGEYWKPIFNILEENFEILLVNAQHIKAVPGRKTDVKDSEWIADLLRYGLLKASFVPPKGQRELRDLTRFRTTFIKERATLINRVQKALEGANIKLASVVTNIEGVSGRAILDAIIEGKATPEAMAELAKGRLRTKRDALAQALAGRVQAHHRFILQELLCQIDSLDETIERFDTEIQDYCRPFDVAIEHLDTIPGVARETAEVIVSEIGVDMSRFPTANHLASWAGVAPGNYESAGKRLSGRTTKGNQALATALTQAAWAASHTKNTYLSAQYHRIASRRGRKKAIVAVAHSILIIAYHLIMDKQTYQDLGGNYFDRRNSEATAKRLVQRLEKLGYKINLDRPIAAAA

SEQ ID NO: 258292 - protein, 377 aa, unidentified
MKRILRIGMDVHSSSYTLCAMEPVIGEDDRIFATIQVTPDYKNILLFIENLKMKLGLDNEYDIQCGYEAGCLGYSLYNQLTAAGVKCVILAPTTMLTQQGQRVKTDARDALMIAQCLSYGGYHAVHIPTQEDDSVKEYLRMRDDHKTALKKIKQQINAMCLRHGYHYDGTKWTIKHVAWLRKLELAPLYRETLDEYMASYDEQVAKIERFDKRIEELAAQKSYGEKARKLGCFLGIKTHTALSLLVETGDFSRFAKGNTYAAYLGLAPGEKSSGEKINRTGITKAGNRHLRQLLIEAARGICKGAVGHKSKELRSRQSGNTAEVIAYADKANTRLRSRYYKLIRHGKKKNVAVAAIARELACFVWGMMTDNIKIKTV

SEQ ID NO: 258293 - protein, 355 aa, unidentified
MTASYDYHIGVDYHKSYSHLVVQDSSGKTLRSGRVKNDRQSLGGFLERYRENSHAVVEATRNWMVIYDWLDDICDDVVLAHPLKVKAIADAKIKTDKIDATVLAHLLRADLVPEAWAPSDKARELRVALRERMFYVRLRTMTKNRIVTVFDRYPEQTAQLKKLGDLFGKAGRVQLAQVNVSEIDRIQIDRGLDFIGDIDGRIKQSETTIRAMTKANGNVKLLKTIPGIGEFFARLIDAEIDDVSRFRNAKKLAAYAGLVPSTYSSGGKTFHGKIIKQGNKWLRWAFVEAVTPAIASDAQLRAQYEHLKFRGVNKARVAIARKLLTIAFQILRDQRAYEPCRESNMESTSTISRLS

SEQ ID NO: 258294 - protein, 339 aa, unidentified
MDRQYVGIDFHRRRSVIVRKNAAGEKLASVRVANDPMVIAAAIAEAGPEPEVVIEATYGWYWIVDLLQAHGASVHLANPSGLNWGQRRVKNDERDAIDLIDMLRLGRLPEAWIAPPATRELRELVRYRAKLVALRSGLKAQVHAVMAKEGVLPTVTDMFGPRGNVQLDAMPLGDAYTVRVESLRDLIEIYDREVAMLERHIRQRVRSDPGYKAIQAINGIGPTMAAILVAEIGDVARFRSAAALCSWAGLTPKHHESDTTVRRGAVTKQGSRLVRWAVIEGAARYHGGPKLAGDFRRIAERRGKNKATVAVAHKILTLVYYGLRDGEIRCLAPADPEAA

SEQ ID NO: 258295 - protein, 417 aa, unidentified
MKLIVGLDVSSTELDVCFLTNDDQLPVLKQVCFNNDKLGANQIKELILKYVEELNIQQIVIGMEATSLYSFHPAMFFHQDQTLNQLNTSVFVEQPNKIKKYREVFEESKDDQLDAFYIADYFRVNRYGVAILKEEQYIALQHLTRTRFQLVEDLVRTKQHFIENIYYKCNTLSKELKQDNQHHSVLSATIIELMTTQYTLDDLNALSLEDLGALVNQLGRGRFNDPEKIAKSISKAIRGSYRLSKTHQESVDCVLSILVRQIRGIEKSIKEIDKAIEDIVDTLPEYQCLTSIPGIGKVYAGGIIAEIGQIERFVNQAQIAKFAGLYWPHKQSGKMMSENTHLAKRGNRYLRYYLVEAANSVRRYDPDYKVYYQKKYNETPKHKHKRAIVLTARKLVRLVDVLLRNHQLYTPQKERIE

SEQ ID NO: 258296 - protein, 340 aa, unidentified
MSTQFFCGVDLAKHHFSLHAVDDHGKVILHKSVSRAKLLATLANMPTMCIGIEACSGAHYWAREFNKLGHDTRIMAAKYVGPYRTRGKNDLNDAVAICDAVQRPNSRFIPVKSPERQAILAIHRVREHWVNERTALINRIRALLAEFGIIIPTGRAAIHRQVPLILEAAENGLPDIARAVVADCFDHLQTLNQRIADTEQCFDMVTKASPNAQRILNVRGIGPQTATAIIATIGKGEQFDSGRDFAAWLGLVLKQYSTGGKPRLGRISKRGNKYLRTLLVHGARAVITNLGDKQDRLSVWGRNILERRGMNRAIVALAAKNALIVWALLHHQTDYQDYAA

SEQ ID NO: 258297 - protein, 475 aa, unidentified
MKENLRRCCGIDVHKNSVTVCVLAPAGQRHIETKKRKFRTFTRDLKQLRAWLKNCQVTEIAMESTGQYWRPLWNLLEGEFTKLILVNPQHIKGLNGYKTDPKDAQWIADLLDSGKLRGSWVPPRSIRELRDLTRHRVNILEDLNRAKNRIEQLCQSGNIKVSSVATDLFGVSGRKMLKAIVENQHDAGWMADYARGQLRNKRRELELALQGTFTDEQRWLLEKELRQVEWLEGQVEGLEEEIERRVSGFEEAIQRLRTIPGIDRKTAWTIVAEVGVDLSAFADAKHLASWAGLCPGNRESGGKRMSGRTRKANRYVKRAMCQAAWAASHSKNTYLSAFYRRMAIKKGAPKAVMALAHHMIVVIYQVLSRKEEYVEMGGDYYDQRNKPRTIARLVARLGRLGYQVDLKLLENAMPADPTEKDNESEPPSQPDAVPEEGLGAKRKRGRPCKCRQRGIICKHQAAREVNPLIQRITPP

SEQ ID NO: 258298 - protein, 392 aa, unidentified
MCVLDDAGTTINTFQITHSADGLKRLVNRLGRLGDPAGLPVAIERPDGRLVDRLLEAGHPVVPVQSNAIKAWRDAEVLSGAKSDPGDAAVIAEYLRLRQHRLRVLQPFSPETRALRAVVRTRGDLVDQRVAATNQLSATLEAFWPGAKAVFADVESPIALDFLARYPTPESAEQLGEARLRAFCTKHGYSGRRPAAQLLARLRAAPAGLAGTPEVEARRDAVLAMVGVLRALNQAIKQLDRSVIAHLGEHPDAEIFTSLPRSGQISAAQVLAEWGDCRPAYDGPDAVAALAGIVPVTKTSGKHRTVSFRWACNKRFRQAICTLADNSRHASPWAAKVYADAIARGCDHPHAIRVLARAWVRVIWRCWVDQVPYDPAKHGAARKLTETAASAA

SEQ ID NO: 258299 - protein, 426 aa, unidentified
MKYTQNEKIMQIKETTLIVGIDVGSESHYARAFNFRGVEYGKVLVFSNNAEGFAKLKEWTRRITGSKGFTEVVLGMEPTGHYWFNLAENAMKSGMRIVLVNPHHVKKSKELDDNNPTKNDRKDPKTIAMLVKDGRYIEPYIPEGIYKELRSAMDSRWRLVRELSAVKNRISRWICIHYPEFTKVFCDWEGKAALLILNECPTPKKVVEKGIEGIMSIWKKHKIRAVGIKRAVRLLESAKTSIGTSEGLVSAGNELSMLLEDYESKMRQLERTMALIEDLAMQIPGFEKMLEIKGVGLVTAAGFLAEVGDIFRFSHPKQIQKLSGLSLKENSSGKHKGQTTICKRGRKRLRYYLTFGIMPLLSKNEEFRALHQYYTTRKERPLKKMQSLIALSNKLIRVFYTILTKGIAYDPQKMMSDIKRPEVKAA

SEQ ID NO: 258300 - protein, 347 aa, unidentified
MAHYAGLDISDKDTAIHVVDDNGKLVWRGKRASEPDVLAAALRRHAPELVRVGLETGQLAPWLYHSLKDLGFPVICLDARHARVATALQRNKTDAHDAETLAQLVRTGWYREARVKGWAAHAMRRLVGARSQLVGISIDLSNQIRSTLKTFGLRATGGAGRVFEAKVRIALEGRPEVAGVVEPLLAAWRAVRDQVAVLDRKLMAAVKADPTCRLLMTCPGVGVVVAASFSAAVEAPAYFRHSRSIGAYLGLTPRRNQSGEIDHSAGVSKRGDRLLRSYLFEAAASLLVRVQSSSALKTWGLALVQRLGFKRAAVAVARKIGVVLHAMWKSNKPFEAWHGATPKTRAA

SEQ ID NO: 258301 - protein, 449 aa, unidentified
MSRPQVIDDQEHERVHDRVAAIDVAKDTGMVCTRTPHPARPGTQRATVWTVKARMGAVRALGRQLKNDGIEIVTLESTSDYWRIWFFVLEACGLAVQLVHAAQAKNLPGRPKTDKLDAMWLARLTELGLLRASFVPPKAIRDLRDYTRARTRLVQERTRCWQRLEKLLEGALVKVSSVASKLTTLSAQDMITAMIAGQRDPDQLAALARGSMKAKHDDLVQALDGMFDDHHGELAALLLDQIAFLDARIAQLGARAAELAAAMPAAWGVDGDGTTGPHAGATADAPVLNAVARLAEIPGVSEMLARSIIAETGLDMTRFPTAAHLVSWAGLCPSARQSGPRARPGKKGQGDTWLRGSLGQAAVGASRTATFLGERYSRIVRRRGKAKAQVAVARSILVIIWHLLSNPEARFTDLGYGYYQARLDTDRRLNNHIRQIQALGFAVTITKAA

SEQ ID NO: 258302 - protein, 458 aa, unidentified
MRTIGIDLAIKGEHKAMVVDEAGNFLTPLLKFRSRADELDHLLACARQGAPDCPLQAVLEPTGMAWFPIAVYLIRRGVTVYLVNSQQVTDLRRFYKRHAKSDRIDARVLAKLPMVNGDQLHQLMLSPAPVLACQRACRQLDRVVTQTTATQNRILAIDGFAWPGLQGTVFPKPFSPAARWFRQYWYDPAQVQQADACVIRQQWIASADDPSDDGGWVEALVALAGEVLAIYGTDGAYLDFTLLQSEVRCEQECLAALEVEERRLRRQVVRPLYRQIHPSRHLETLAGVGEASAAVYASFMGVAKRFPSMRACRGWSGLVPNSKQSSNQETKGLHITQAGPNLIKKFAYLDAEVARLHDPQIAAIYHDQMVHKGKHYNQAICTCATHLLDRVRAVLYDDKPYELRDVDGTPLTAEQARTIIGERYTVPEEVRRRNTKQQRRQRTDQLAERKTQRESRPS

SEQ ID NO: 258303 - protein, 346 aa, unidentified
MTHYAGLDVSVKETAICVIDAVGAVVWQGKVHTQIETIAEALVRHAPELERAGMETGPVAVWLWHGLRDAAVPLDCIHARRAAAALKLQVNKTDRNDARGLAQLVRSGWYEPVPMKSMATHRVRAILVARQQIVGMCTALINKIRGLAKTFGIIVAPGKGSTFDRAVRAGLPSDLVVRNLLESLLATLTLLRDQRRAFDRQLARIARENETCKRLTSAPGVGPLTAIAFAAAIEDPSRFRRASDVGAYLGLTPKRYQSGEVDIGGRISKCGDRLTRSLLFEAASVILYRTRGEFGLQDWARQLAARSGSWKARVALARKLAVILFRMMRDGTSFEPRPYHAGRAAA

SEQ ID NO: 258304 - protein, 410 aa, unidentified
MRRIYDRVGGLDVHRDTVVACVELFDGHRVETDKATFTTTAVGVRALGEWLAEREVALVVMEASGVYWRPVYYGLEDQFGELWLVNAHHVKNVPGRKTDMADAEWLADVAAHGMVRPSFVPPPEIRGLRELTRYRKTQIRARGQEIQRLEKLYQDAGVKLTSVASTTWSKSARAMVEMLIAGERDPAVLAELAKGRMRPKIPALMEALESRWTGHHSTVARQILAHIDFLDETIETLNTEIVERLVPFDAAAELLKTLPGVSDLTAQVMIAEMGVDMSRFPTAGHLAAWAGVAPASHESAGKRRPAGTRHGSRHLREALIEAARAAARTKGTFLSARYGRIVRRRGPNRAAVAVAHSILVAAHHMLTTGEVYHDLGSDYFNRRDDTAHETRRLVTKLETLGHTVHLEPAA

SEQ ID NO: 258305 - protein, 369 aa, unidentified
MSDVITYVGIDAHKKDLFIAMLVGQQAKPVAWTVANEPNAVRRLAKKLEREAPGPVQAFYEAGPCGYALQRQLTTPRVQCDVVAPGLIPQKPGERVKTNRRDARKLVELGRAGLLTTVRPPTPAEEAVRDLCRARDDAREDLQRCRHRLGKLLLRRGLQYRVGRHWTKTHRRWIDSLTWPHDAERVVVDDYLLAIDQHETRLKELDQQLAAVAETEPYREPVAWLRCFRGIDTLSAMLILAELHDVRRFPSPRALMAYVGLVPGENSSGEKHCRGRITRAGNALVRRLLVEAAWHYQHRPGVGVALARRRKGQPGRIVAIAEKAQQRLCRRFQYLAVLNKPRPTIAVAIARELVGFLWAALQPALVVAN

SEQ ID NO: 258306 - protein, 338 aa, unidentified
MSTYYIGADVHCNKTELAIERKNKIIRRFSVPTTIPAISEVLKSIPGRKHLTFEEGPMAGWLYQNLNNQVDTITVCDPRRNKLIASDGDKDDKIDAAKLACLLRGKYLRSLYHGTDDKIVELKRWTGLYLDRVKQATACINKIRSQARMYGIKIPRRVLRDVQYRQEWLCSLSKESVAKRLQILWIGYDASAQQTKLSKQQMSKLAGRYPIIRYWDRLPGVGLIRATTIFAYLETPWRFKKKTKLWKYCGVGLVRQFSGGRAGRLKMNWASNKRLKNAVMGAAISAIRHRDNIFRDDYERMVKDGITPSNARHAVARKLLTVMWGMWKNISRFDKSLC

SEQ ID NO: 258307 - protein, 354 aa, unidentified
MKQRSEKRASVATIGVDLGDRHSQFCVLEANGEVVETTKIPSTRAAFKKKFEGLAPCDVALETGTHANWVHDLLVDLGHTVAVANSRKLQAISANERKSDERDAELLARLARYDRTLLYPVAVRPKQLRQDMMVIRARAELVEVRTALVNSLRGLAKSAGHRLPSVSAASVHKLKVDASLEVALRPLMKSLESISAEIKKYDKLIEKLSVERYPQTSCLDQVKGVGPITALYFVLLIGDTGRFKNPRSVGAYTGLVPKRNQSGGRDPELRISKTGDRMGRTLLVQCAHYILGRFGPDSDLRRFGERLAARGGKNAKKRAVIATARKLGVLLFALLRSGKVYEPLRNSAKSSKAS

SEQ ID NO: 258308 - protein, 403 aa, unidentified
MLRGWCRETGQGTTEDSLDRTMENIFHHVGGWISTHPLSGIIRPVAARSPLGAPRGIAWAPPVTRRRSPNSRMGVKARMYKEGHCTMLSKQEGQYLGIDLSKEWISTELFPSGQTETVARTQEALQEWIAKLPSGIMLAVMEASGGYEALPAALLHEAGISVAVVNPRQVRGFAVALNLKAKTDEIDARLIAQFAHDIHPSPKPMNSPNQDQLKELLSRRGQLMKMQTAEKNRLGMAHNPRVKKSIKTHLEWVALELANIDKELDSLIKASSLWKAKEDFLKSVPGVGKITARSLMAGIPELGCLNRKEAASLAGLAPFTHQSGKWQGKSFITGGRSAVRSALYMATLCAIRCNPTIRTFYERLTSCGKPKKVAIIACMRKLLTILNALMREERFWQISSIPA

SEQ ID NO: 258309 - protein, 318 aa, unidentified
MPTAAPAFVGIDVAKAELVIAIRPSGERWTLANDGAGIQTLVQRVRGHAPTLIVLEATGGYERAAVAALAAAQLPVVVANPRQVRDFARATGQLAKTDRIDAAILALFAERVRPAPRALPDDAAQALDALLTRRRQVLEMLIAERNRLEHAVPAVRRGITQHIRWLERQLADVDRDLDDTIQASPVWRAKEDLLRSTPGVGPILSRTLIGELPELGTLPRKQIAALVGVAPLARDSGTLKHKRLVWGGRAPVRAALFMAALVGTRCNPVLRAFYRRLLAAGKPKKVALTACMRKLLTILNAMMRTNTTWRHVDPSRTT

SEQ ID NO: 258310 - protein, 344 aa, unidentified
MDEYDGKQFVGIDLHRQRSVIVRQSESGQQLSAVRIINDPVALQLELERAGEAPEVVLEATYGWPDYWAVDVLQDFGAHVHLAHPLGVKGFRYRRVKNDVRDAGDLADLLRMGRLPEAWIAPPATRELRELVRYRAKLVAIRSGLKAQIHAMLAKAGVLIAVSDLFGVSGRQRLAKVPLGSAYAERVRSLLELIDVFDDHEARFATVIAKRLDADRGYRAIQQVPGIGPVLAAVFVAEVGDVHRFAGPAQLCSWAGLTPRHRESDTVVHRGHITKQGSKLVRWAAIEAVQRHQSTAKIAADKDRIEARRGKNIAKVAAARRLLTLVYYGLRDGHIRALDRARAA

SEQ ID NO: 258311 - protein, 343 aa, unidentified
MQAVTTIGLDIAKSVFQVHGVDAEGNVVIRRQLKRRYVLAFFQKLPPCLVGIEACASSHHWSRELQALGHTVRLMPPAYVKPYVKRHKNDAIDAEAICEAVTRVNMRFVATKTPEQQSCLTLHRTRHLFIRQQTSVINAIRAHLAEFGIVAPVGRHGVEQLLGVVADASDKRLPEVARACVAALGAQLQTLKAQILEFDRMIRAWHRSSEASRRLDDIPGVGPVLATALIASVGDPRAFRSGRDFSAWIGLVPRQNSSAGKDRLGSISKRGDRYLRSLFTTGALAVIRYAKIHGTKHRPWLTALLVRRPTKVAAIALANKIARMAWAMMAKGERYKEPAALAA

SEQ ID NO: 258312 - protein, 389 aa, unidentified
MSSMPQSTPSDPAEVVLGVDTHKDVHVAAVLTTLGVLLATSTFPTTAVGYRRLLAWARGFGPVGRAGVECTGSYGAALARYLLAATITVIEVNRGDRGERRRRGKTDTLDAETAARAVLSGRATAIAKSGDGQVEMLRMFKLAKASAIKSRSQAINQLKAVLVRAEPTLRESMTGLGNPALFRRCAQLTVSDPCDPAGAAALTLRLLARRVLTLTSEIDELNVHITAAIKTHAPQLLQRYGVGPDTAATLLLAAGDNPERLTSEASFAALCGVSPIEASSGKTRRRRLNRGGNRQGQLRALHDHHRPPALGQTNPALHPTPRRRRKDPPRGHPLPQALHLPRDLPRHHPRQRPTRTGQLSCLTSIAASNSPSSTEAVPSYEPSHSGSSG

SEQ ID NO: 258313 - protein, 330 aa, unidentified
MQKVQHIIGADLSKRTIDLFYHLKETHLKIDNNLQGFKTLLKWISQQQINPSELIIVMEHTGLYSFCFEEFLHRHQISFTKVSALTIKHSIGLVRGKSDKIDASRIASYGYEKKDKLSAEPPISKGLQRLQLLYATRERLVKQKVGLINAVKEYRNIGLLQNDPILRSQYRLIKNYEKEIAKLEVQLDNVLKSNPSLQKNHLLLQSIKGVGKVLATATIIKTRNFTRFTNARKFACFCGTAPFEHTSGTSIKGRTRVSHLADKQMKTLLDLSAKTAIQHDKELKKYYLNRTQNGKPKMSTINVVRNKILYRMFAVIKRQTPFIENYVHAA

SEQ ID NO: 258314 - protein, 318 aa, unidentified
MKESITFEQVVERGCGIDIHKKVLVATIKGMGIKEETRTFSGFTASIEEMRDWLKANMITHIAMESTGVYWKPVFNILEEDFEIILVNARHIKNVPGRKTDKKDSKWIAKLLLSGLLQGSFIPPKPIRELRDLTRYRRKIVGQISSEKNRLQKILEDANIKLSSVVSDMSGATATKIIAAMINGEEDIEKLSRLRHGKMLTSKEDLKAALKGKLTEHHKFMLTTIKESIEEKEQLINKLDKRIEEHLKTNELTLDVDLLQTIPGVGKDAAPGILAEIGNNMDQFPNEQHLASWAGMSPGNNESAGKKKTVELPMETNT

SEQ ID NO: 258315 - protein, 273 aa, unidentified
MENIALIGIDLGKNSFHIHCQDRRGKAVYRKKFTRPKLIEFLATCPATTIAMEACGGSHFMARKLEELGHSPKLISPQFVRPFVKSNKNDFVDAEAICEAASRPSMRFVQPRTESQQAMRALHRVRESLVQDKVKTTNQMHAFLLEFGISVPRGAAVISRLSTILEDNSLPLYLSQLLLKLQQHYHYLVEQIKDLESQLKRKLDEDEVGQRLLSIPCVGTLTASTISTEIGDGKQYASSRDFAAATGLVPRQYSTGGRTTLLGIREGANKFLI

SEQ ID NO: 258316 - protein, 346 aa, unidentified
MNNTFSDFDACGIEVSARTVLVALGAAERPASRREFANTAEGHRALLGWLKRWKRPVRVVMEATGLYGLDVALGLDQAGILLMVANPRAARHFAQAIMQRSKTDRIDAEVLRQFAARMPFVAWHPPSAAALKLMAVARRLEALTEMLAAEKNRRHAASLSEALPAVVRRDVQRSIQTQQRAIERLTRAAQEFVAADPELARRYQLLLSIPGFAAASALHTLAELALLPPAMDVRQWVAYAGLDPRHHTSGSSVEKKPRISKAGNKHLRRALYMPALVAIVHQPHLRAFYQHLLARGKAKRQALVAVMRKLLHAIFGMFKHQQTFHGNKLYRLSPVEQALPLAQEVA

SEQ ID NO: 258317 - protein, 339 aa, unidentified
MKNSEKTTYKHYLAIDWSIEEVYTARMLAQGEKIETKKFDSDIRQIKKYLMSIKGSKILTIEETTSSHWLYVELLDCVDKILICDPYRNKLLSEGAKNDKIDARKLCLLLRSGLLKEVYHSLNEDYKIRKLVSAYEDLVKAGVRVKNQKSALYRAEGLRYKKDKINKKDKLILFIEEQQNASIKLYIEEKKKYESKFEEIKKGNEIIKLLCGVPGIGTILSMRIYSKVIDASRFENKYKFWGMCGLVNHQRESGGRNYGKKKPRYSRTLKSVFKTAAIAAIGGNNDVREYYDHLLKVGYTISEARNQIARYIAKVCYAVMKNKIAYKAYQWRELKKTAA

SEQ ID NO: 258318 - protein, 354 aa, unidentified
MNNVKYIGLDAHLSTISVAVLDEQGKSVMASVLPTHSAAILDFIHGLRGTLYVTFQEGTQSAWLYDLLVRKVHKVVVCNPRKNALLKAGNKSDAVDARKLAELLRAGLLSPVYHGETSTVTVKHLGRSYESLTQDSTRVMSRLKALYRGQAIPSAGQRPYGRRREEWLGKLGGAGLQSRAQRLYQQLDVLQALRREARQELMQECRKHAAAGLLRSIPFLGPIRAGLLIGRVQTPHRFRTKRQFWAYCGLALETRSSADYRFVNGQLERTRKAAWIRGLNLNHNHDLKNLFKSATTTASARPGPFGSFYQGLLAKGMLPAMARLTLARKMAAITLSVWKKGERFDAQQLKPQAA

SEQ ID NO: 258319 - protein, 315 aa, unidentified
MSKIVVIAGIDVSKDKLDIHVLPSNQTFVVGRDPRGLASLARRLRKAGVEQVALEASGDYERIVIEALEADGFVVQLLNPARVRAFAEAIGMLAKTDPIDARLIALYCQHFPDTGLTRRPEQARKLGEFLNMRAMLLKLAGEIRNSLEHVREPGLKALADTLSADIAAKLKDVDDRIAKVIAGDDATMRKARIIRSFTGAGPVLTSGLLARVPELGGVTRHAAARLCRAAPTDRQSGRTRHRSSIEGGRDQVRPVLHMAALAAIRSNPIIKAFAHRLSAAGKPKPLVIAACARKMVVILNAMLRDNTEWKYAKAA

SEQ ID NO: 258320 - protein, 295 aa, unidentified
MERYIGLDAHASSCSLAVVGPSGKRLGSHVVETNARALIEVLQGIPRNRHVCLEEGTLSEWLHEVLEPHVEELVVAGVRKSRGPKSDKRDAFALAEQLRIGSLETKVYKGRGKFRTLGCLARGHGLVVVDVVRVKNRLKSVLRSRGVGYGAGHSVYAKGDRGQWLEALPEPTRPLAELLYSERDALAALKARAEKALLKEAHRHREWKLVKTCPGLGPIRAVELLPVVMTPYRFRSRSHFWTYCGLGIVMRSSSDWVRAPSGEWVKTAVQRTRGLNQNFNHTLKRIWTSPDSVDR

SEQ ID NO: 258321 - protein, 254 aa, unidentified
MNRFEEEKGLLRFDNTKDGIQEFVAWLQTIEVKTDQMILGIEGGAGMQHELLRQLTERYTHIFEVNPVYTKQRRAFGTRADKSDPFDAKLIAEVLTKKIGALPRITKRELSAQKLMLKKLVWFYEEVTLQGARIKTQIKQTKAQYELCSNPSEKRILGEILKDQNRTLALIRKQQNKLEKRLKDLLKTAGSGNLVTIPGIDTILAGKIIAHAGGIERFPTIDKFIKYAGIAPTEKSSGKSRRYIKNTKGNRKLR

SEQ ID NO: 258322 - protein, 354 aa, unidentified
MTYVGLDLHKRYLTACALDASGTVLAEVRQMAVSLEALAGFLSALPAPVTVALESCLYWQWLHDQLDAQGHTVRVADPRQVKVIWQARSKTDPIDARKLAELVRVNLLPTIWIPDADTRRRRQLLHGRAFLVRQRTMVKNRIHGRLTAENLLFPRSDLYGRAGRAWLATAPLSPMLRSHADQLLRIHDALTAEIEQLDDAVKRLRRDHPMIERLHTIPGVGLFGALFLVAEIGSIERFSSSHRLTAYAGLVPTTRSSGGRTSHGGTGHASNRWLKWILVEIVQTLKRAPGPVGDQYRRLLRAKGKPKATTAAARKLCCYIYWMWRSGQSYDEWLADRGASRSAVCPSQPLGAVA

SEQ ID NO: 258323 - protein, 342 aa, unidentified
MEVKQVTKQIVGIDIGKDSFYTCYKVKYQDNSVVVKGTKSFENTISGMKSFLLWCKKRNKSAENPAIYIMEATGIYYENLAYFLYEHKQNVSVQLAQKLNYFAKSCNLKTKTDKVDSKMIASFGIEKDIETKDLWTPPSKEFKVIRDLSREHTRLKQDLTAAKSQLHALDHAHSTYKKVIVMKKQMISFYEKQLKTVEKEIKYLIKSDPKLQLKIKNIEAVKGLGFITIIKVLSEVNGFLLFTNIRQLVSYAGLDVVKKESGNYKGKTKISKKGNARIRAALYMPAMTAARHNNSLKIFYDRINQKRTIKKQGLIAVMRKLLILIYTLWKKEEAYIENYQVR

SEQ ID NO: 258324 - protein, 342 aa, unidentified
MSKVTVFVGLDYHKDSVQVCIMDQAGQVLANRKCPNDAAELALLVAFFGDHVRGAIEACGGAADLADELIGRHGWDLSLAHPGYVARMKQSPDKSDYSDAKMLADLVRVGYLPRVWLAPEDVRQLRTTVRYRQQLVNQRRAVKLRVAALLREARSVEPKGSRRWGPTWLAWLKAVEGLGAEARFVLDCHLAELRRLDEQITMVEVRLAKVTAEDPVIAQLVAMRGVGMVTAWALRAEIGRFDRFRTGKQLARYCGLTPRNASSGQRQADAGLIKAGSELLRATLIEAAHRLIRFDPRWAQLGAKLRAAGKPGSVVAAAVANRWVRWLFHQVQGGCITLKTAG

SEQ ID NO: 258325 - protein, 372 aa, unidentified
MGHHTEAFVGIDTSKSSNAIAIADGGRGGEVRYLGDFPATEAAIRKLVAKLAAKYRDLMFCYEAGPTGYGLYRLLKSLGHECLVVAPSLVPKKAGDRVKTNRRDAVSLAKLLRAGELTAVWVPDERHEAMRDLSRARQAVKKDLQGKRQQISSLMLRLGRIYPGKTTWGPAHMKWLMAQKLEHREQRITFEELLDGIRQESERVERLEKAIREAVPEWSLAEVVAALQAMRGIDLIAAVGVLAEIGDLSRFQNPRELMGYLGLVPSESSTGDKVKRGGITKAGNGRARRLLVEAAWSYRYPPRVSREKQPKVEAAPRRVREIAWKAQTRLCGRFRSLERKGKRRTVIATAVARELSAFIWAINCELMAHRQA

SEQ ID NO: 258326 - protein, 353 aa, unidentified
MKRGKYMGMDVHQAMTVVAVMDADGKVVLETMVPTEASAIIGLVQLISGPVHVTFEETTQAEWLYDAVRSFATEVIVCDPRHNKLLREGSKGDKIDARKLADLLRTGMLRRVYHGNEGSRRLKQLVRGYEALSEDTKRTMVRIKAIFRGRGICTPGRQVYQPQHREQWLQLLTEPGLRERVGWLYEELDHLKPLRRQAKNAMLAESRKHRAMKLLRTIPQLGPIRAALIVATIDTPYRFRTRHQLWSYSGLAVVTHMSSEYEMKDGRVVRSRKPIATRGLNRNCNRRMKEVFIGAATAGSRTEPYRSYLQALEQRGIRREMARLTLSRKIAAVALTIWKKGETFDPKKLNWTT

SEQ ID NO: 258327 - protein, 317 aa, unidentified
MTHTIRFIGIDISKSSFDICVLPEISSASFSNDACGIAQFLAFVARLDNVARLVLEPTGGYERAVVDALLAAHLPVARVNAKQIRQFARACGQLSKTDRIDAFVLADYARRMETKVLALSSPSQTELIDLVSRYRQLSHMIVQEKNRREKLRMRGDDRVKAWIEETLAFLLQQRQSVVDAMEACLKADKDLADKAQVLTSLKGIGLKTACFLIAGLPELGLLDKGQIAKLVGVAPINRDSGLMRGKRMITGGRKPIRDALYVAALPAIRFDPAMKAVFQRLKEKGKPGKVALVAVMRRMIIILNARMRDHRATVLDP

SEQ ID NO: 258328 - protein, 325 aa, unidentified
MEIKKLCCGIDVSHTTLDVCYQNNLGELFHLKVGNNNKGFAKILEHTGTGYHFVMEATGVYYIRLAFYLHQQDCQLSVVNALSIKRYIQMHLERNKNDKKDAGWICRYAIEQSPSYWEMPDSAYFESKQLYNTIREYAEQIKRFNNQLHSVRLLPVPSKATIMSLEKMKQQLEKEMKNLEENLQVILQQWQPAQLKSVSSIKGIGKRATAMLIVYTQGFKNTHNHRQLISFAGLSPTEYSSGSSIQGKPRIYKRGGKNLRDVLYMCSMNAIKTNTACKALYERLRTNGKTGKQALIAVCNKLLKQVFAVVKNNSLYQPNYCSARL

SEQ ID NO: 258329 - protein, 386 aa, unidentified
MRSIALDLGANRIAFCEMKGEEVKTRLTVTRLSGLERELGPNTPAAVVAIEACREAWHVHDVLTAWGHQVVLVDTTRVRALGIGVHGKKTDRVDVETLARAVVRGTLPRAHVLSPHRRELRLQLGVRRALVATRAEYITTVRGLCRAHGVRIPTCTAEHFVKHARETKKSEAVIQLCEPMLTMLERVEVQLAIVETKLEELCAKEPIIELLATAPGVSRIVAAAFVACVDEAKRFDRAHQLESYLGLVPCEDSSGDRRRLGHITKHGNAYVRALLVQAAWNILNRGADTDPLYAWAKALEQRRGKRIAVVAIARRLAGILWAMWRDGTFYDARLLGTSSAKGLRVQAQSAEDRADAMARVAEKMKRHMRRPRAVLKGEKTSVTHGA

SEQ ID NO: 258330 - protein, 380 aa, unidentified
MDRVFLGKNLTIGVTDRSPLGTIDPVLEHGSSHHSLKSPNSCEGHRARISQGRDLENTYEEVQMSFVGIDVSKSQLDIAVRPDNKRWSAVNAEADIAKVVEKLKDFSPQVIVIEATGGMEMPLVAALSQARLPVVVVNPRQVRDFAKAVGRMAKTDRIDAEILAHFGEAVKPDVRLLKDEDTQMLTALVTRRRQVIEMLTAEKNRLGISPKVVHKDIKKHIDWLQARLEDMDRHLDSAIRKSPVWREKNDLLRSVPGVGHVLSVSLITGLPELGILSRRQIAALVGVAPLNRDSGLFRGKRTVWGGRAHLRAVLYMAALSASRVNPAISLFYRRLVEAGKKPKVALIACMRKLLGILNAIIKNRVPWQADHSTCPTPNIP

SEQ ID NO: 258331 - protein, 345 aa, unidentified
MNRIKVTQSQAKGKSLRLNDFDHFLALDWSMKVMAIGHMRRRSKEPETFERPSDLKELKQYLATLKGRKILTIEETTTAQWLYVELIDHVDRIVLCDPYHNRLLSNGPKTDKIDAGKLCLLLRAGLLKEVFHSLSGLYELRRLVSAYEDLVKAGVRVLNQKASMEQGHFESGKHAPFILEHVAKSIELYRRSKEQYERKFLDLSGRNKLVKNLMEVSGIGIIGAVKIVAIVVDARRFARAGNYLSYCGLIKHEKISGGRSYGRRRPRFNHTLKAVYKLAAMSVISGNNNPIREYYEYLLAKGIAEHNARHAVARYIARLTYGMLKTGTRYQRYQWRNTAAGHQAA

SEQ ID NO: 258332 - protein, 352 aa, unidentified
MDRDVPVTIIGIDAHKRTHTLVAIDSGGRKLGQNTVEASSRGHAEAMRWATVHFGTELVWAVEDNRSVTALLERELMGAGPWPVVRCPPYLMARNRTSAREWGKSDPIDAWAVARVALREPNLPRAFHDPVSWELKLLVNRREDLVGQRVAITNRLFWRLHYIDPDRPEPKRLNYAVRRKALVDYLTEQSGLQAELALGEVTDIGWLSESIDALTKRITRQVTDLGSSLLTVPGCAELTAAKLIAEAANVDRFPNDSAFAAYAGIAPIPQWSGTTRGRLRACPYGNRQLNAAIHRIAVVQTWREGPGKDYYQRRRAEGDSSASAIRHLKRRLCRVIFNRLRTDFKRRSNHRV

SEQ ID NO: 258333 - protein, 442 aa, unidentified
MDPVMQDLEVEDDEERLERVAAIDVAKASGKVCVRLPGGKRRVTKLWDVPSTTTAILALADELVGMGVERTVMESTSDYWRPFFYLLEASGLAVWLVDARAVKQVPGRPKTDKLDAVWLAKLNERGMLRPCFVPPVAIRQLRDYTRLRRDLTQDRARHKQRLEKLLEDALIKLSTVATDIFGKSGRAMVEALIAGERDPHVLADMALGKLRPKHSALVEALNGRFDDHHAELARMLLDQVDELTDQIIRLGRRIDELIAQLPEAQPPSPTGPTAADDGGGLGVVERLDEITGIGRVAAQTIIAEVGLDMTQFPTAGHLVSWAKLTPRTMQSGPRTRAGRTGKGNPYLKGVLGEAAAAAGRTDTFLGERYRRLVRRRGKLRAIVAVARSILVIVWHLLADPSARFSDLGADYYTRRIDTGRRTRHLVQQLQALGHHVTLSPAA

SEQ ID NO: 258334 - protein, 340 aa, unidentified
MSEVTTIGLDLAKHVFQVHGVDAEGATVLRKQLRRAQVLTFFSRLPRSLVGLEACATAHYWGRELRALGHEVRLMPAQYVKAYVKRNKNDAADAAAICEAVMRPTMRFVPIKTADQQAAVLLHRGRERLVRQRTGLVNALRGHLAEFGVIAPQGLRNVGKLIAIVRDGGDGRLPDLARQVLAVLAAQIEQLEAAVAALEKQLIAWHKSNPVSQRLASVPGIGPIIATAIAATVTEPSGFRSGREFAAWLGLVPRQNSTGGKNRLGRISKRGNQYLRRLLINGASANLLRSKATNADPWVIGLRRRRPSLVVAVALANKTARIAWAVMQRQENYRRVAAAV

SEQ ID NO: 258335 - protein, 421 aa, unidentified
MKGSGVKKASTVKEGTLIVTVDIGMISNHGYCTAGDGRSTKTFKFDNTREGLDTFWSMILSSKARFRCTEVIVGYESTGPYGEPLIHYLKQKPVKIVQVNPMHTKKMKEINDNSPLKTDNKDPRVIADIIRLGHALSVVVPEGDVAYLRRLNNARERHVKERTGLLNQLQQFVFITFPEFARILKTIDSKTALYILTKYTTPARIGSANHEELGKEMRRQSMGKFSIEHAAALINFAKTTIGIQEGLQGLVMDIQHVLIQLDLLERFIAAILDEMEITLNRIPYSRKLLSIKGFGIVTVAGLIGEIADFTKFTTQSEITKLAGLNLYEVSSGKRRGQLRISKRGRSLLRKVLYYAAIQTVRKNGIMHDYYQKLIGRGMKSIKALIAVSRKLLRIIFAMVRDNSEFIVNYEAQQKEVMREAA

SEQ ID NO: 258336 - protein, 442 aa, unidentified
MANDGNRPTSEPEWAAFVGLDWGDQKHQWKLQEAGSGHCEQGELRNAPEDLDAWASQLHFRFQGQPIAVCLEQSRGAVVYQLCKHAHLVLYPVHPKAAARFREACHPSGGKSDARDAAALLDLLMHHRDRLRRLDPESPQTRLLQMCVEQRRMWVDEKTCLSNRLTACLKQYFPQVLDWVDDIDSPMGCALLQQWPSLEALQSNHPGSLRRFFTQHNCRSQKRIQERLEAIPAARPAIQDAAMREAGPRLVQHIVALIQVLHKQIKELERRIAQLVQEHPEAPLFKGLPGVGPALLPRLIVAFGSDRQRYTSAAQLQAYSGVAPVTQQSGRSRAVHFRRACPKFLRQTFVEMAGHSIAKCGWARAYYAQHRSQGQRHQAAVRALAFKWLRVLFACWKNRTPYDEQIYLRALQNNRSRLVQILGTHLQWKEQAGFQKICAEKP

SEQ ID NO: 258337 - protein, 381 aa, unidentified
MLLNSNTVAEESQLANHFTVGIDQGDSLWMMTAMDRMSGKYSRYPFRGENKEYDCYKKVSELVNIGRPVSVCYEAGRSGFTPARFFENLGCNTRILPVNKIQIISTGKKVKTDKIDSQFLSEINPLDKSIPSVWIPSVHQECLRAIPREEQRIKCDISRNNNRITCILQRWPIPSGTKHQKAADWRNIIKEWIKAGAIPTLLPASELKRIELMVDELELLEKHLEKWREFMLNTEKEERVNAEEKGEKYIVDELRKYRGIGEVISRSFAWEVGDLHRFKNGKHFSSYLGLTPTSFSSGKMFREQGISKQGNSELRRLAIQLAWLWRKWQPDSKITKKWSEQLNKKGRQRKTAIVAMARQIMVALYRDIVRGEEIDSAKINK

SEQ ID NO: 258338 - protein, 391 aa, unidentified
MVCVGIDVAKDKHDCCILDSEGTALVDCFTIPNNMDGFKSLLQTIQDCSQKSDKIKVGIEATGHYSYNILGFLLDNDLPVYVMNPLHTNLYRKSLSLRKTKTDRVDAKTIATMLLSDVDLKSYTDTAYHNEELKSLTRYRFDKVQERAKLKQSVSRLVTILFPELEQLVSSIHGTSIYALLSEYPGAKQISEAHLTRLANILVKTSRGHYRKDKATHIRDAARTSIGSVMPAKSLELKHTIKLIQELTSEINEIEDAIRKIMDELKPPILSIPGMGFHSAAMILAEVGDFSNFNSPDKVLAYAGCSPSTYQSGKLTNCYAHMEKRGSRYLRYALYTATKYVCYWNPVFTEYLTKKQAEGKHYNVALSHATKKLVRLIYALQKSGKAYLAVT

SEQ ID NO: 258339 - protein, 416 aa, unidentified
MDAIVERCAGLDVHLDTVVACVLYGKLDIKPKKEVKTFSTTTKGLLELLDFINQKECTHVAMESTGIYWKPVWNILESGAFDLIVENAKKIKNVPGRKTDVKDAEWIASLLRCGLIEKSFVPPERIRDLRDLTRLRKELLGEVNRNKNRIHKVLQDANIKISSVLSDVFGETGKSILNQIIDNQCITEEFIYSLYEGRGKSKLKSTPMEMYEALNGKIRGHHVILLGMHNSNIVFLEKQINELEKEIDILLQKERDSLELLETIPGISKISASSIIAEIGTSMDVFKTEKHISSWAGLCPKNNESAGKKKRSGIKSGNNWLRSMLCECAWSATKKKDSRFKNKYWSMVPRMGRKKALIAIANMMLRLIYHLLKTKSTYKELEIQYFIDKDKRREDRIIKELKSKGYLVEKDSLQMA

SEQ ID NO: 258340 - protein, 341 aa, unidentified
MKIVGCDLHAKQQTIAMVDTETGEFSEKTLAHEGNRVREFYVALEGPVVVGIEATGAMQWFLQLLEELGIECRVGHPAKIRAKETRKQKHDRRDARLELELLMEDRFPTIWMPSTEQRDLRTLLRDRHQWGKMRTRVQNTLQAMALNHALRQGRTVWSPAGQKALQALARSRYTSQRRDELLGLYVQLQKRIQELDRQVEEEAKQRAQARRLLTHPGVGPVTALATEVFLGDPTGFTRGKKVASYLGMIPCEHSSGKRQRLGKLSKEGNALLRYLWTEAVMHAAAQDPELKRFYRRKLIPKGMGKARIAAARKLGIRLWIMLRDQIDYEEFCRRGGSSSNS

SEQ ID NO: 258341 - protein, 383 aa, unidentified
MKAVCGLDVHKDSIYLCILHPDGELFEQVFGVLTFQLHEMCKLLKKHHVSEVSMESTSIYWIPIWRVLSPHFTLRLVNPYFIKQLPGHKSDVKDAQWIAECTMKELVNGSFVPPEIIQQLRQYDRRIFDLNEEIVRKESKVDAVLQRCNIRLSNYVSNIECKSYRTVVRRLSEGVTDPQELIKEIHGRIINKHGRETILASMEGVVSQAEIDVLRQLREEIDIAESHKKECQDKMSEICQKYFPEELRRLQTIPGIKERAATSLIAEIGTDISKFETANHLAAWSGLRPRNDESNKKVKSRKTTHGNSYLRRTIIQCAWAASRQKDCFFSWFSYHQTVVRRKNKMKVIVAVARKMLVAVWHVLHDNVEYIDFKYDCEESANNG

SEQ ID NO: 258342 - protein, 358 aa, unidentified
MKHYIGCDAHKKYSVFMGISEAGEIIPAQRVEHDRESYRSFLRGLPPASQIAVESVGNWYWLIDEMEKAGHIPTLVNAGKAKLMMGSINKTDKLDARGLAVLSRNGTLPAVWIPPAQLRDQRELARMRTFLVRIRTSLKNRIHATFAKYAITFQEVSDLFGARGRNLVEKRLAELPPETRHSVREQLKLLDQLQRQIDEVEDRIHELVRMTSEMQLLMSLPGVGAILAVVIAFEIGDVARFPDSAHLASYCGAVPRVKSSGGKTSYGKTRPDVNHYLKWAFTEAANAIVVNQRPMAGRHVVVLYQRISRSKGHAKAVGAVRRHLAEAAYAVLKTGRPYHEPVLREKRVVAKEVCAALA

SEQ ID NO: 258343 - protein, 429 aa, unidentified
MAKSKTQSVVQTDDDALYYERCAGIDVHKKLLVVCLRIGRRTESREFGTTTGEIREIVAWLKSNGCQMVAMESTGSYWKPLYNIFEQESVPAMVCNAYHIKNVPGRKTDWNDAFWIAKCLAQGLLKPSFVPDRDQRELRDMTRFRKSQIEERSRNINRLQKFLEGANIKLGSWLTDIEGKSATELLELVISKPDFTIDEVKSRMHGKMKSTPIQIFAALEGYITPTQRTFLTHVMDVIRQQTEQIEKTHSLIQAAMTEEQKAAVKALDAIPGVGIVSAEQIIAETGTDMSHFRNQHSFSNWTGTAPGNNESAGKRKSGRTTHGNKTLKSTLTQCAKSAVRNKSTFFSAQYSRLVSHRGKNRATMAVAHSMAIAIYFVLSGKEFKDLGADYYTQFNREKKINSHIKQLSKLGVTIPDELFRADSNCPPDG

SEQ ID NO: 258344 - protein, 335 aa, unidentified
MTVSNQAERVIGVDVAKNRLDIADSQGKIRKTISNTAPAIKKAIVQKVKDDDSVFVVCEATGGYERGLVKTLQDAGISVAIANPRQVRQFASAMGRLEKSDPIDAEAICQFAQTAELPAAPVKTAEQEARDAVVRRREQVLEMIGQENNRLQQESDPKMKKTIERVLKTLKSLLKKLDAEVERFLAEEAKTNASVEVLMSVPGVGAVTTATLLCELPELGQLNRSEIAKLAGVAPIVHESGQSRGHRSVSGGRGKVRRVLYMAALVGIRSNPALVEFHRRLVSRGKPQKVAIVACMRKLLTILNSMVRTKTMWRTKGEEKVMADQGSATTRAHGD

SEQ ID NO: 258345 - protein, 350 aa, unidentified
MSVNHYIGLDVHKKSVSYCVKRGDGQIVEEGKLPATREALRQWAQERNEPWQAAMEATLFSGWIYDTLQPYASQLQMGHPAMMKAIAASKKKNDRLDARKIADMVRCDLLPACYVAPTQIRELRRLLRYRNLVVRQAVRQKNKIAGLLMEVGASYNKRRLHGNKYFGELLEGLEEVPPSVKDLLRLSRGALQLFEVTQRQLLGRLRNDPRLAQRVELLSSIPGVGEVTALTWALEVGEPQRFSSIAHAVSYCGLTSALRSSAERQQRTPLSKQRNVHLQTVLIEAAKLAPRWNTQLAAVHARELERGHRNRATLAVARKLVAYLLAVDKSRQPFQMRSPAVEATPSDQAA

SEQ ID NO: 258346 - protein, 343 aa, unidentified
MFAESVDVVIGVDTHRDSHALALVDAGLGALIAEERVDANREGYRRALKLASGCGRRRLWAVEGTGSYGAGLARFLQQQGERVLELERPVRSGSRGRAKSDALDALRAARAALTGEPLAELRCGGKREALRVLLVSREASVAVRRSGLNQLRALVLTAPAELRERLQGLPKRALVKRCVALRPRSSQPPQLRGTLLALRSCGRQVELASREAALLERELAVLVEQLSPQLLSHYGVGPITAAQLLVSWSHPGRLRSEAAFARLAGAAPIPCSSGKTIRHRLDRGGDRQLNRALHTIVLARRRGDQRTIAYIHRRTSEGKTEREAIRSLKRYTARSLYRLLEHA

SEQ ID NO: 258347 - protein, 376 aa, unidentified
MNEDEVTSVLRRYIALDIHKHYCVIAGVDREGRVLLQPVRVEHADLEGWLKKNLRSMDHVVIESTTNAWHVYDLLAPLVERVVVANPIRVKQIAQARVKTDIRDTLILARLLAANLVPDVWVPPVHVREMRQLLSQRRQFVETHTQIVNRMHSVAHRHHLKHERGKRFNEKTTGWQKDKKLSTLEQFQLQLEMENLTYIEKQIERTSKVVRKMCHQKPWADSMTYLMPLPGFGVITAMTILAAIGDIQRFESPKHLASYSGLTPGLEQSGTKNRGKGITKEGRRELRWALVEAAQMAVKSDPLWKKRFQELQKRMHRNQAITAVAHRLLELVWHVLTRRQPYRHFSHERIAYKYLTWAWQMDEAARDGLTRQQFTR

SEQ ID NO: 258348 - protein, 356 aa, unidentified
MQTQVTKKIDFTDQNLFVGLDVHKKSWSVTIIVDGIEHRTFTQPPDPKSLCNYLHRMFPGASYHSAYEAGFCGYGIHRELNSLGIKNIVINAADIPTTQKDKLQKRDPVDSRKIARSLEKGSLHAIHVFDRNLEELRTLNRTRFYLMRDLRRSKTRIKSFLQYYGEPVPLEFDNNQWTLKFVSWLKQVKMKTISGQDAFSHLIESYEHHRRQLLDLSRMVRQRIREYDNELYSLLKSISGIGPLTSSALITELGNINRFNNIDQLSSYVGFIPRIRESGETTHTGGITFRCNTFLRTLLIEASWQAIRKDPAMMQYYHKHLVNNKGHKAIIKVARKLLNRVRYVMKNRQPYITGVA

SEQ ID NO: 258349 - protein, 312 aa, unidentified
MNTNNTTQNPVYIGVDVAKATLALHGARMPAEVSNDAAGHRRLLRALPPGAHVVLEATGGYERPLVLALHHAQVTLSVLNPRQVRDFARAQGRLAKTDKIDASVLAAFGACMRPAADLPPKPAELSLAELISRREQILAWRVAEENRAGHHRLAQVRTQARRLVKTLEKEIVRLEGWISELMEADADLKSRRDRLEQVQGVGPTVAASLLGQIPELGRLDRRKAAALAGVAPFNCDSGPYRGQRRIHGGRSAPRATLYMAALTACVHNPILKVFYQRLRARGKPFKLAITAVMRKLVILLNHILKNPDFVLA

SEQ ID NO: 258350 - protein, 343 aa, unidentified
MQTITTIGLDLAKSVFQVHGVDAGGQVIVRRQLKRRYVLTFFQKLSPCLVGIEACASAHHWSRELQALGHTVRLMPPAYVKPYVKRQKNDATDAEAICEAVTRANMRFVPTKTSGQQSGLLLHRARHLFIRQQTSVINAIRAHLAEFGIVAPVGRHGVEELLNVVADPNDKRVPEIARACLSAFGAQLRRIKEQVLEFDRLIRAWHRSNELSMRLDEVPGVGPVLATALVAAVADPKSFRSGRNFSAWIGLVPKQHSSGGKNRLGNISKQGDRYLRGLFVAGALAVIRYAKIHGTTHRPWLTALLARRPTKVAAIALANKIARMVWAMMARGERYKEPFALAR

SEQ ID NO: 258351 - protein, 340 aa, unidentified
MKITTFGLDLAKNVFQLHWVEPQTGEVKRRALKRDQMIKFFAQRSASVVAMEACGSAHYWARKLIELGHEARLIAPQFVRPFVRSNKTDAADAQAIWEAAQRPERRFVAVKSVHQQAVLMLHRVREQRVKMRTMQINQLRGLLYEFGVILPAGRHKAMTQVAQALARLEDTLPAMALEALREQCASIEALSAQIEEIERKLAAWRKEDEAAKRLMQMPGVGLLTATAAVATVGDAKVFSSGREFAAFLGLVPRQSGTGGRVKLLGISKRGDGYLRRLLIHGARAVITHAKARDPWVEALLARRPLNAVVVALANKMARTIWALLAHGRHYEPRGQALGCA

SEQ ID NO: 258352 - protein, 323 aa, unidentified
MTRTICGVDISSQTLDARIGREGAFAQFPNTTDGIAALGAFCQAHQVELVAMEATGGYEQQAFAQLSAQGLPVAILNPRAVRQFAQSMGSLEKTDRIDSGMIAWYAEVKKSSPACLAPQSQQHLRALVTRLRQLTDIRTAQLNQQRLVTDRAVQLSFKKLLAVLARQIKQLETSIAAIIAEDPLWHQLDQAFRTIKGVADRTVARIMAEMPEIGSLSNKTVSKLAGVAPLANDSGKHQGKRAVRGGRASVREILFIVASVVGRHEPDFIAFQQRLSAAGKPRKVIRIALAHKLLVRLNAKAREVRQRLANLPPDRMALPATSQ

SEQ ID NO: 258353 - protein, 372 aa, unidentified
MEKRSTQEELEWVVGLDVSDRTSTVCRMSMASGEIVDRTTIATSAAGMEGYFGSPVRWRVALEVGTHSPWIRRQLESYGHEVLVGNPALFQASVSRRKSDRSDAEGLARVARLDPSLLHPVRHRSATAQRDLTVVRSRHALVRARTRLINECRGQVKSYGHRLPSCSAEAFAARAGAALPEDLRPALEPVLEVIAQLSAQIRALERTLETLARKHYPQTLRLRQVCGVGTLTALSFLLILDDPHRFARPRQVGAYLGLVPGRRQSGERNPHQPITKQGDPLLRQLLVQAAHYILGPFGPDCDLRRFGQRLIDRGGGGARCRAAVAVARRLAVLLLHLWRSGDEYDPFFVEHRLARAAIPATATSQTSHSIHV

SEQ ID NO: 258354 - protein, 370 aa, unidentified
MGKHRLAFVAFDSAKNKHAVAIADGGRGAEVRYLGEIDNSPDAVRKLVAKLTRQYERLHFCYEAGPTGYGLHRQLTELGHVCDVVAPTMIPKRSGDRVKTNRRDSVALVKLLRAGELRAIWVPDNVHEAVRDLTRARETAMLDLKTKRQQLLSFLLRHGRSFPDRNWTKTYERWLAKQTFAHPAQQIVFQDQLEAITTAQARLAALEQQLREIVPTWTMAPVVAAYQALRGVSFLVAITFVAEVGDVRRFATPQQLMAFLGLVPSERTSGDTVRRGSITKTGNRRARRVLIEGAWTYRFSARVGETLRTRLKDLPLSVRAIAWKAQVRLCARYRRLIARGKKAPVVTTAIARELSAFLWAIGQQVAPQTG

SEQ ID NO: 258355 - protein, 443 aa, unidentified
MLQIIYERVAGLDVHKRSVVATRMRISEQGTVEWETKTFSTMTADLLKLHDWLLAWSISEVAMESTGDYWRPVYNVLEDTFVLFLVNAQHVHHVPGRKTDAKDSEWLAELMLHGLLKASFVPPKPQRALREVTRYRTTIIRERTRIVNRVHKLLEGANIKLSSVATDIMGVSARAMLAELVCGQTDTKLMADLARGRMRSKIPDLEKALTGFVQEHHRFLLAQQLAHIDYLDEEIDALGAEIIRQMERMSSPATGHPPETEAVPSSPDAGNTESPLTWLEAVALLDTVPGIGVRAAEAILAEIGLDMSRFPTAKHLASWSGQAPGNNQSGGKRFSGRRPKGNKPLSSVMTQVAHAAARTKGTFLNARYHRLAARRGKKRAIGAVSHSIIVSIWHILTYRQPYRDLGGDYFDQRSKEVKINYLIRRLQKLTGPAINLEIQPASA

SEQ ID NO: 258356 - protein, 357 aa, unidentified
MEKRLKQSLGIDVSKLSLSLSLGSLTDKLVKGFTSRSDVSNDISGYRELSKWLGKSVDATVELVVVMEATGVYHQGIAHYLHDKGYAVCVMQSGRVRRYAQSLDQRSKTDALDSKMLSMLGLERTVRLWRPPSGELQELKGLSRERSSLLKDRITETNRQGAIASSSYSNTKALKRHRNRLKLLTAQILVIEEEMQELVSGNEELKRKIGFMMSIPGVSFISAATVIGETLGFESIMNAKQLASYAGYDVVLRESGNFKGKTRISKKGNSHIRAVLHMPSMTCVRCNPTLKQFYNRLKPNKAKPLVALIAVQRKLLILMYTLWKNEEVYDAGFETKKQQKHEALAARDNNLIAQIVS

SEQ ID NO: 258357 - protein, 391 aa, unidentified
MDQAWAGVDAGKEFHWAHVLDASGTELLSRRVENDEADILRLIEEALSLAEEVVWAVDQPGGGAALLLALLWEGDQKVLYVPGISVDRARQTYRGESKTDARDARVIADQSRMRSDLGELSPGEQEISELRLLLGRRRDLITDRSRVITRLREMLLSLFPALERALDVNSKGPLILLTHYQTPAQLRRAGHRRVAAYLRNRSVKGSDKVARKALSAAGSQSVVLPAQEVASRIVAQLAAEVLTLKERIESIDEEIGERFFARPEARILASLPGMGPILGAELLVCVGDIRAFESADRLAAYAGLVPAARDSGKRVGNRRRMRGGNKALKRIFYQSAFASLRGCAQSRAFYDRKRAEGKGHTQAVVALARRRVNVVWAMLRDGTEFEERSAA

SEQ ID NO: 258358 - protein, 407 aa, unidentified
MRVRWDREQLIGGKPERLVSRVLRVLIWVPDQRTTGIDGGAGLNCFCGIDWAEGHHDVAIIDGDGKLVAKKRISDDPAGFTALTGMLADAGDSAQDPIAVAIETPRGLLVAALRGTGRPVFAINPMAVARYRERSSVARAKSDHRDAMTLANILRVDAHIHRQLPADSELAKAIAVLARAQQDAVWRRSKATNELRSILREYYPAFLDTFAGKSATNLAKPQARAILAIAPTPAHAARLSKARVAAALRRAGRKRGIDGLAAEIVERLRVPQLRQPELVEKAMGRQAMALLAMLDAACAGDLEQAAAEEFRKHPDYARITSFRGLAEVTGARILAEIDDDRDRFADGRALKAYAGSAPVTRASGKVTSVTHRRIKNDRRAAVGWVWATYASINPGPARALPQSPRPR

SEQ ID NO: 258359 - protein, 373 aa, unidentified
MKDHITIGMDLGDLENHIVVMDAEGTEIEVTSIANTKERVREYFSRFPGAMVAMEAGTHSNWISREIKEAGCDVLVGNPRKLRLIWDSTDKDDENDARLLCMICRLEPRLLWPIRHRELESQYDLQIVKSRQILVGTRTKLINHVRGAVKAVGERLPGCSADAFAKRAVEDLPDELHVALDGVLKIIETLTEQIRHQDRLIAHLCRERYPETALLSQVNGVGPVTSLAYVLTIEDPERFPKSRYVGSYLGLTPKRDQSGQTDKQLKITKAGDTYLRTLLVNCSNYILGPFAPDSDLRRHGLKIAARGGENARRRAKVAVARKLAVLLHRLWMNKEPYERLYKSINKQNHKNKARVAGTMSLSKPEAAVAMAAG

SEQ ID NO: 258360 - protein, 355 aa, unidentified
MNDEKYIGLDVHQATIVVAVMDSTGKLVMESILETKASTILQFFAGLRGTLSVTFEEGTWAAWLYDLLQPRVDKLVVCNPRKNALLKDGNKSDRIDARKLAELLRGNQLKPVYHGETGVRMLRELSRSYLTIVKDLSRVMNRLKAVYRSWAIPCAGRDVYYTRHRAEWLGKIREAGVRRRAERLYEQLDMLQHLRQQARRELLTESRKHAITAKLRQIPYLGPIRSALAVALIQTPHRFRSKRQLWAYSGLALETRISAEYRFVEGQVRRSKKLLSIRGLNKDHNHDLKGLFKGAATMASVRPGPFQDFYQAALAKGIKPTMARLTLARKIAAITLTLWKKGENFDAEKVKSQAA

SEQ ID NO: 258361 - protein, 353 aa, unidentified
MLIIGCDFHPGFQQIAIFDNLTGEIQEKRLGHRAEAEQFYRGLAGQEVRVGMEACGHYPWFERLLAELGIELWLGDAAKIRSSVVRKQKTDRRDAEHIAQLLREERFPRIWVPSLEERDVRQLLVHRHKQVQTRTRVKNQLQAMALSQGVQKKWKLWTQAGRAELEKLELLPYAAERRKQLLRNLDELEAEIGQLNRRVEEEVKQRPNAMKLQTHPGVGPVTALAMVLTLGPAERFPAGKQVGSYFGLIPSEHSSGGRQRLGHISKQGSSFLRFLLVEAGQSAVRYDPELGRFYRRLAARKHRALAKVAVARKLAVRLYLMLREDWNYAQLCRAVVRASPSHSVVESKNRPLE

SEQ ID NO: 258362 - protein, 353 aa, unidentified
MPRSTNLSVAAMGIDIGKNSFHVVGLDQRGAIVVRQRWTRSQIRARLANMPPCLIGMEACVGAHHLSRRLHSLGHDARLMPAKYVKPYRKGQKNDFRDAEAIAEAVQRPTMKFVATKTADQLDLQALHRVRERLVSQRTGITNQIRAFLLERGIAVRQGLRFLRAQLPEVLGKRTDVLSDRMVHVIEDLAADWRRLDERIQGLSGEIQIVASQDPGCKRLMTVPGIGPIISSAMVAAIGSGAVFSNGRDFGAWLGLVPRQISTGDRTILGKVSKQGNRYLRVLFVQAAWVVLIKPQTWERYGLKQWITAAKRRLHPNVLAIALANKLARIAWAVLSKDCDFKCEKTDETPRCA

SEQ ID NO: 258363 - protein, 371 aa, unidentified
MVAPYPERHRSAKVELGECPPETERERQMKIRTVGVDLAKSFFQAHGVNEHGKVALKKQLKRSQVLPFFANLPPCLIGMEACGSAHYWARKLQALGHTVRLMAPQFVKPYVKTNKNDVADAEAICEAVTRSNMRFVPVKSVEQQTVLSLHRARQAFVKSRTAQANQIRGLLSEFGLTIPIGISHIASTVEAILEDAENELPGQFRSLLRRLVDNLGEMDRQVNELEKDIKAWHRSSAPSRHLEEIPGIGPITATALVACVGNANCFKSGRQMAAWLGLVPRQHSTGGKQTLLGISKRGDVYLRTLLIHGARSVIAQCERKANADGWLKQLLARRNKNVAAVALANKNARIAWALLANGRTYQLGYKLPAAA

SEQ ID NO: 258364 - protein, 338 aa, unidentified
MVGHLNPNEDGLMTEPMVGIDVAKATFDVAVPLEPKGKYRTKAKLPNTPAGFTLLGDWLDHHAPGAAVCMEATGVYHEALATFLVERGVTVYVANPAQVAAYAKSELSRTKTDRTDAKLIARFAMAQWQVGTALRPWVPPTPAQRKLRALVHRLDDLEGMRQMECNRLDVSDSAVRTSITRVIETLDAQIAALKKEISEHIDSDPDLRRDTDLLASIPGIGELTAAFLLGCAGDLRRFDDPRKLDAFAGMNPAVRESGKWVGQSRLSKLGHALLRAKLYMPAMTAIRHNVAVRALFDRLVARGKPRKLALGAAMRKLLHLAWGVIRSGKGFDPSIALA

SEQ ID NO: 258365 - protein, 380 aa, unidentified
MNPTTKSENKHMKSQKYVGLDVHKDKTTVAIAEGDRTGEVRAYGEISSDLVTTEKALRKIRGDNGVLHVAYEAGPTGFVLYRRLQQLGFECIVVAPSRTPQPKGGRQKTNRRDALQLARLHRAGELTGIHVPNAVDESLRDLTRARSDASRDLKRAKQRLKSFLLRQGFHYKGKANWSEAHQRYLRELVLPLPALKSVLEEYLLAITQATEQLTRHEELIAAQVPQWRMYPAVQALMCFRGFQLVAAAMLVTELNDVRRFAHPRGLMAYLGLVPREDSTGDTRHLGAITKAGNAQARWILIEAVQHALNPPKVSAALALRQKDQPTVYRTTAWKAQVRLHKRGWHLLRRGVMKPKVNVALARELVGFIWDLLRQVPVAKS

SEQ ID NO: 258366 - protein, 411 aa, unidentified
MEAAVITAVGIDVSKSKSTVAVRRPGGEIALRPFEVHHTNSDLKKLASTLKILGGDIRIVIEHTSTYWRPITLTLKEAGFFVSVVNAMLIHDFSDNTIRKLKTDRADALKIANYALTFWDTLPPFNNEEETRLLLKMQSRANERITATTTALRNGLIALADQTFPGVNIAFDPNTKNANGHEKWVDFFLRYWHKDCVCQYSMEAFTESYRGWCKRKNYKFRTDTAHKIYLLAQEGVATLPKCESTKMLITQACKSLNAVCEAKQSTQLEMQRLAAMLPEYEVVMQMEGAGPITGPALMAEIGDVRRFKNKKALVAFAGIDAPPFQSGAFESKSRHVSKRGSPHLRRTIFIVSNIILTRSNTENAVYCFMDKKRSEGKHYYVYTVAGSAKFLRVYYARVTEFLRSQSSPDAC

SEQ ID NO: 258367 - protein, 369 aa, unidentified
MQKDITHVALDDSKNSIVAGILRPQATEPELRQIANEPKHLRRFFARLQREGPLASCYEAGPSGYDLYRQLTALGVPCQVMAPALTPRKPGERIKTNRRDAAKLVRLFRAGELTPIRVPDEAQEAVRDLLRCREDLQEDLLRWRHRLLKFLARHGRVYREGRNWTQRHWTWLRSQRLADPVLARTFQEYLFTVEQLLARRAELEREIEAIAQQEPYREPVGWLRCFRGFDTLGALTVLVEIGDFQRFQSPRKLMAYLGLVPSEASTGDRERRGSITKAGNTHARRVLVEASWHYRHPPRIGPALARRSQGQPTAVLAQAWKAQQRLHRRYRHLVGHGKRPPVAVVAIARELVGFLWAALTPRAPALQAA

SEQ ID NO: 258368 - protein, 394 aa, unidentified
MRFAGIDIGGERHAVAVVSEGGGVLVKSTFFGEEAAGYERVRDLLDNPDDCLVAMEATGHYWRNLFAFLVGHGFRVALLNPLRTRRFAEEELERTKTDSVDALGIARFAAQKRPAPTPVADEVTAEMRELVRLRTRYVDEHSDRMRQLHRAVDLGFPEFTRHVRINTMLATAILARYPTARSFASVSVRKLARLTYDGRHQVGEVLARATIEAAKISVGSHHSEAYQLQVKYMCSDLELLRNRVKQLDQDIERKLQAHEVGRLLTTIDGIGARTAACLIAELGDPSRFRNAAALASYVGVVPRLRQSGKRALSGARGLPLGNARLRHRLWMPTLVAVRKNPWLRAYYERLRAAGKRPKVAIVASIRKLLGAVYSVTLSRRPFVPNLASADTGSQ

SEQ ID NO: 258369 - protein, 355 aa, unidentified
MSQEKYIGMDVHQATISVAVTDSRGKLIMESILETKAATILEFLQGLHGSLSVTFEEGTSAAWLHDLLKPHVTHLVVCDPRKNALLKDGSKSDRIDARKLAELLRGNQLTSVYHGEHGMRTLKELGRSYVTITKDLARVMSRIKALYRSWAIPCSGTSVYAPRHRAEWLDKIPEPGVCLRAERFYQQLDLLQPVRQQARRDLLTESRKHHAVQLLRQIPSIGPIRAALLVAQLQTPHRFRTKRQLWAYSGFALETHDSGEYRYVRGKLQRNRERTTVRGLSNNHNPEVKNLFKGAAISASTHPGPLYDFYVALLEKGMRPTMARLTLARKIASITLTIWKKGVDFDATQLHRQEA

SEQ ID NO: 258370 - protein, 341 aa, unidentified
MSMIPVCVGFDYHDDSIRICVMSESGQTLLNRSVANSVELVIQAVSRCARVAVCAVEACCGAADFAHQLSRRTGWTVRLAHPGYARRLKRSPDKSDHDDAQLLADLVRVKYLPEVWLAPTEVRELRRVVRYRQQLKRSRIELKLQIRALLREERVKPPMRAWTRAWREWLEETDGLSSAARWILEQQLARLAELDERLKHVHARLDEQVADDPMIPALEKHSGVGRVTAVTLRAEIGSWRRFQSGKQLARYCGVTPCNASSGKRIADAGLVKSGNRELRAVLIEAAHRLAQHDPRWQHFRDKLRQRKPYNVTMAAIANRWIRWLYHQMIQFEQEAPATATA

SEQ ID NO: 258371 - protein, 408 aa, unidentified
MLFAGDDWAEDHHDVELMDASGRVLARARLPEGAAGMARLHAMIGEQLGGAEDVEVAVGIETDRGLWVQALVAAGYLVFGISPLQTARYRDRHGVSGGKSDAGDAHALADMVRTDSHQLRPVAGDSPGAQAVKVVARAHKTLVWERTRHVQRLRHQLRDFFPAALAAFEDLDAPDTLELLARAPDPASAAKLTTAQVSAALKRARRRNISERTTAIRAALRSQQLAQPPAVTAASAAVVRSLIAVITTLSEQVKALEGKVDEHFRAHPDAEIIMSQPGLGPVLGARVLAEFGDDPHRYASAKARKNYAATSPITRQSGKRKTVMARYVHNDRLRDALDAQAFTALNASPGARACYDAQRARGAGHRAALRTLANRLTGILHGCLKSRTLYDEATAWPQTASKEIKTAA

SEQ ID NO: 258372 - protein, 423 aa, unidentified
MMKLKYSICCGLDVHKNVIVATIVTTNKDGISEYKQKSFSTINSDIQKFHIWLIENNCYHVCMESTGKYWIPIFNYLENDIDVCLTHPKYVKAIKGKKTDKKDSKWIADLYKFDLVRCSFISPKDFRQLRELSRYRFKLVCMKSSEKNRIQNCMTISNVGIASVLSDPFGKTATEIISYLLEHTADSMDEKAVRKLIKKGAKSKSDEIIEAIKGYTIETDQAKKLELARGHLEYLDDMITQTEVELYVRIKPYYEFVEFVSTMPGMTELSSTIVLAETGVDMDIFDDAKHLCSWCGLSPANNESAGKKKSVRIAKAGDYLKPMMVQCALAAIKSKKQPYFAIKYGRIKKRRGHKKAIIAIARMMMVCIYHMVSEKKPFTPTDYEELMDPQNHVESVVLNENNVFAYLESLGYDSSKLVKRNDN

SEQ ID NO: 258373 - protein, 348 aa, unidentified
MMRYVGIDVGKTRCRAALMNEKGVIESEFFFENSNKGIANLTSALTSEDRVVMESTGNLWLNIYDTLDAKSIRVVLANPLKTKVIASAKVKTDKLDARILAHLLRADLIAESYVPQGNVREMRALVRHRLSLVQMRTMVKNKVHAIIDKYSYRCECSNMFGKAGTMWLRALELGALDRLLLENHLGLIEFVNSQICRVDEVIRERACEDQDVRLLLSLTGVDVYTALLLRSEIGPIERFADFKRLVSWAGLAPSVHQSGNVEFHGRITKRGSSILRWALVEVAHVAVQRDERMKAFYLRVAARRGGQKAIVAVACKMLKIVWFMLTRREAYGNVNEKRYEEKLKRMDA

SEQ ID NO: 258374 - protein, 412 aa, unidentified
MQDILTCAMGLDIHRDVIVACLAKGELGTDPEIEIRSFSTLIPEMRKLRDWVLEAECRYVAMESTGIYWQPIYEMLEPCFDGQISILVVNARHMKNVPGRKTDMRDAQWIATLLRAGLLKGSFIPDKTFRELRHLTRYRKSIVRDITAQKNRIDKFLQSSGFRFTAFLSDAFGASGRNIIRHLMKYGNISREALDRCLKTQTRKRIDEILIALNGSLSEHQRGFLRMIFGHLEALEQHRHTVEDAITKEITKHEEALSLLCSIPGIDVTAAAAIIAEIGTDMSAFPDSQHICSWAGLSPGNNESAGKRKSAHINKGNPYLKSMLCEVGWVISGKRSLYLSGWYWRIKQRKGAKRATIALARKLLALIYTMLKTGSPYNEECFETRRKQSERKRASRMVNELQKLGYFVVAPG

SEQ ID NO: 258375 - protein, 352 aa, unidentified
MEEYKRSGQGGKTVFVGVDLHRFKWHVTVRTEDQELFSGTLPGHWEALRRLLDRYRGNSIQVVYEAGYFGFWLHDRVLASGAQCIVTPPSLLPQEYGNRVKTDRRDSRKLAYLLAKGILKRVWVPSLQERYHRQVIRRRRQLIGDRVRTQNRIKAELRFYGIELVEPRGPWPRRYVERLWCIRFGNRWMQESFGRLLEQYEFLTEQISKQTQLLRELSETPLYRERVEILRSVPGIGLIAAMELLVELQDVSRFRRAEQIAAYVGLTPSQYSSAEKIRMGRITGIGKNGLRAILVEASWRLITKDGAMRDKYERIKARSGAKRAIVAIARTLLLRSRRMLLDGRPYALGLIR

SEQ ID NO: 258376 - protein, 346 aa, unidentified
MRFYNKQHKYYCGIDLHTKTMYVCILNQAGEIVLHQNIPADADQLLKTILPYMPDIVIAVECIFTWYWIADFCEQYQIPFVLGHVLYMKAIHGSKTKNDRIDSHKIAILLRGGMIPMAYVYPAKMRSTRDLLRRRMFFMRKRAELLAHIQNTNSQYNLPSFEKSIARKRNRKGVKEHFPDKSVRKNIELDLELLNHYDTLLNDIELYLTNHAKEHQPNNLYLLQTIPGIGKILALVLLYEIEDISRFERVQNFTSYARLIKPQKESAGKIKGSGNKKIGNSYLKWAFGEAVLLLIREQPQVKQYHLKLKNRHGKAKALAILSHKLGRTVYYMLKNQQAFDMKKFLN

SEQ ID NO: 258377 - protein, 429 aa, unidentified
MNITQNEKILQVSNETLVVGIDVGSETHYARAFDNRGFEYSKKVFKFSNTESGFAELLAWMNHIKDAQGKKSILPGMEPTGHYWFNLGKHLKDNEINPVLVNPYHVKQSKELDDNSPSKNDRKDPKVIAGLIKDGRYSYPYLPEGVYADLRNASNLRFQLTEELTRTVNRMQRWLNIYFPEYREVYGKPTVVSGMMILRQAPLPDDIVSLGVQEVNQIWRRAKLRSVGLKRATALVEAASRSIGCREGLMAARMEIAILLDEYEAKQAMLEKVMELIEELCRQIAMTEKLLAIKGIGIKTVSGFIAEVGDIGRFSNPKQLQKLAGLAPVENSSGKHRGETRISKRGRKRLRYLLFEAAMSLVAKNDEFRELHRYFTTREENPLKKLQSLMAIACKLIRVFYAILTKGMDYDGLKMLGDIKRPTGYAQTA

SEQ ID NO: 258378 - protein, 347 aa, unidentified
MLIIGCDFHPGFQQVAIFDNRTGEIQEKRLQHRAEAEQFYRSLAGQEVLVGMEACGHYPWFERLLAELGYELWLGDAAEIRARVVRKQKTDRRDAEHVLELLRTGRFPRIWVPSLEVRDVRQLLVHRHKQVQARTRTKNQLQAIALSCGVQKKYKLWTKAGRAELEQLALLPYAAERRKRLLEALDGLEVEIVELDRRVEEEARQRPEAVRLMTHPGVGPVTALAMVLTLGPAERFASGKQVGSYFGLIPSEDSSGGKQRLGKISKQGSSFLRFLLVEAGQTAARYDPQLKRFYRRLAVRKNRSVAKVAVARKLATRLYLMLREDWTYAQLCQAVMQVSPSHSVAGE

SEQ ID NO: 258379 - protein, 315 aa, unidentified
MTKHLLPVNVGVDVGKNQLDLYLLERDRALTVPNEEQAILVLVRSLSRYRVERIVVEATGRLEQPFVRAALAAGLPVIGVSPLKIRRFADVIGQLAKTDQIDTRLIAQFAATVKPLPRPASDANAQAIKDLVVRRRQLTSLRTMEKNRRQVMPNDLKPSFDRILKALDRELKSLEQLINHAIDQHASSRHKRELLTSMPGIGNCVAATLIGDLPELGSLDRRQIASLTGVAPFNRDSGTLRGKRRIRGGRAHSRTALFLSAMVATRFNPDIKRFYQRLLTAGKHKKVALTACIRKIVTALNAMLRDNLPWRSAIA

SEQ ID NO: 258380 - protein, 342 aa, unidentified
MDKIETCGVEVSAKELVVALTGKNGEAVLHRFANTAVGHKQLLRTLTRGRKRVRVCLEATGVYGLDVALLLSAQQQLQVMVANPHAARHFARAMMQRSKNDRLDAVVLWEFAARMPFTAWARPEKNTLALWAIARRLEALTKQGAAEKNRQHAAGVSQAIPPCVRQSIARTLRFHQREIKHLREQALQCIVADPRLQQRYQLLRSVPGIGEVSAIAMLAELQLLPPDRDVRQWVAYAGLDPREYSSGTSVRKYTRISKIGNRHLRHALYMPALVASRREPHLRGFYRHLLARGKSKRPALIAVARKLLHAIYGMFRSHQPYNGARVFSLSAPAQVVLLPLRA

SEQ ID NO: 258381 - protein, 316 aa, unidentified
MERYVGIDVSKKALDVHVLPEGEALHVSRNAKGLDELIRWLRAREPRIIALEATGGFERVVAVELDAAGLPVVVVNPARIRDFASAVGKRAKTDTVDAAVIARFAEATKPVARPLPDEQTRELADLVTRRRQIVEMLGAERAREQRAPNRRVARSCQRLIKALERELADADGEIDAALRASAEWRAKQELLQSVPGVGPTVASTLIAELPELGRLDRRSIAALCGVAPWTRQSGQWRGKSFTGGGRSSVRSRLFMAALVAARHNRVFAPFYQRLLAQGKPKLVALIAVARRMLVVLNALVRSGERWDEAKHVQPSI

SEQ ID NO: 258382 - protein, 345 aa, unidentified
MKITTIGIDLAKAVFGVHGVDERGKAVLRKPLKRKEVVSFFANLEPCLIGMEACGSAHYWARKLTQLGHTVRLMAPQFVKPYVKTNKSDRNDAEAICEAVARPNMRFVPVKTAEQQAVLALHRGRQGFVKARTAQANRIRGLLAEFGIVIPQGIGHIAKRLPEILEDAENALPGMMRELLERLGENLKQMDKQVGEMERQIKLWHRENEASRKLEAIDGFGPITASALVATVGDARSFKNARQVPAWLGMVPRHEGTGGKVSLGRISKRGEAYLRTLLIHGARSVIAQIERKPNQADEWLKKLLARRNKNVAAVALAAKNARIAWALLAHERSYEREYVATRPAA

SEQ ID NO: 258383 - protein, 333 aa, unidentified
MKFTIVGVDIAKSVMQLYYIDAETGGIVNKPVKRVAFLEHFANRSPCLIGMKACGGSQHWARKLTALGHQVKLMPGKFVKAFVMGNKNDAADARAMWMAVQQPGKSVAVKTETQQAVLGLHRMREQLVKFRTMQTNSLRGLLTEYGEVLGKGRTALDKAIPGVLERQVDRLPTILINTPREQWNGPVELDKQIAQIERRLQTWMKEDKACKTIAAIPGVGLLTATAAVATMGAAKTFRSGREFAAWIGLVPAQTGSGGKVQLLGISRRGYTYLRTLLIHGARSVLFHPKEPSLFDKCVRNVHVRQCALRPAISLFQNRRRRTSEGTGTGKYTR

SEQ ID NO: 258384 - protein, 421 aa, unidentified
MASDVSWFNICTWGGKVMDLAPLYRCVAALDVHQAKLTVCILREVADRELRVELREFGGFKRDRREMARWVASFAPESVVMESTGIYWKSPYEALERAGLRALVVNARHVSQVPGRKTDLADAQWLAILARSGLLRGGFVPPANFRHLRLVSRQMQKLTGILASEKNRIHKVLTDGGIRLGVVVSDLHGKSGRAMVKALVAGESAQSLLGYADPRLKASEEDLLDALDGDLSAEHRLVLRQLLDHIGYLEQHIAALRQALVAGLAPQQGLLQALQTIPGLDETGAAMLVVEIGDDMQAFGSPEKLASWAGVCPGNHESAGKRKSGRQRKGNPYVRRLLCEAAHAASRTRCALAEKFKGLLVRRGRKRAIFALAHKLLKTVFVLIDRGDYYRDAGVDYEAMSVERNAPRWIKMLRKYRYIPA

SEQ ID NO: 258385 - protein, 460 aa, unidentified
MNQYFLGIDASKGYSDFVMLNEKKQPVIENFQLDDTFEGHARLYELLRSFNQDHPKASIYAAVESTGGYENNWFQSLLKFQGSLPIKTAHLNPLGVNYNHKADLKRNVTDKISAQNVAEYMIAHPEKVSYQHQDSLASLRKQWGFITMLTKQSTQLLNQLESLIYNANPEILMYCKDGTPQWVLKLLTLYPTALRLSKAKVKSVARIPYVSKDRARQLVATAKKSVASASDNVTQQLIVATVKQVVDLNKTIKEQTKILTNECAVPEVELLKTFIGISDYSAIGLMLEIQSIQRFLLSKKLASFFGIHPAYKKSGDGTWKYRMSKKGRKEPRRILFMVAMSAIKSNPLIRSIYQQAVQRGMEKKAAVGLCMHKILRIIYGMLKHNKTFDPEIDRKNRQKKPLRQRRVRQDKNRRYQDFDSKAPISSRQKIKRKERKQSQNVSNVECGISEASVPITELAN

SEQ ID NO: 258386 - protein, 367 aa, unidentified
MTDPLRSEKDLHVVQVSLQELEEVLMRIVGGLDIHRQQVTFDWVDLDSGEARRGRITPADRVGFRKWLGQFDGEVEVVLEGCTGWRFIVEECAAAGAKVHVADPAEVAGRRSSKRRAKTDPIDARQLRQLLERGEVPESWIPPKVVLEVRERVRLYLDLLEDKQAWQHRIHATLFQHGVPKVDGKLVAGGRAEQGRDDPDLSDAGRDAVDTALRIIAALDADLTRIRAELIAFGQRHPGPRELAHEYGLGALLATAVWEELGDTRRFSASRQAVRHAGLDISVYDSDGKQRGRPTLTRQGPPALRWALYEGAVHAHKPTSPDHAYYTRLARRAGSGRARLAVARKLARGCHHRLRALGDQAWVELPS

SEQ ID NO: 258387 - protein, 350 aa, unidentified
MIIVGCDYHPGFQQIAFVDTDTGELQERRLQHREEAEKFYREQAAQGMKVRVGMEASGHARWFERLLAELNFELWIGDAAVIRTKRVRKQKTDRQDAQLILQLMLEDRFPKIWVASGENRDLRQLLWHRHRMVQVRTRIMNQLQAVALNEGLRCKKRLWREHGRQQLESFRLAPWASRRRQDLLELLDRLNPTIAELSQAIEQEAEKFPEARCLMTHPGVGPLTALAFVLIIGRAERFQCGKQIAAYLGLVPLEDSSGNRRRLGHITKQGSSMLRFLMVEAAQVTVRSLPEWRSKYFHLMMRRGRKIAKVAMARRLAIRLYWMWRKRWDYEQVKKFGSHAGQLEPGDGVQ

SEQ ID NO: 258388 - protein, 476 aa, unidentified
MAGSKKAISNMALIPMLPHETLYVGVDVGKSRHVAGFLSRTLLQRHERFEGCPTLVFEQSREGFRTLVDRMREYVPLEQATVLLEHTGHYHKNLEQYLLEWDITVYRIHVQERPKGMTKTDKRDALGLANRLYTQLELGAQVEEKMQLVRRTARPTQAALQLRGFMQHRYELSHQRTQLRNKLTAICDELFPEFTQIFHDPNLEVALAFRETFPTPHDIATASLSALRETRVKYFPSEANLLRLQQLAEKTIGINNKDRLRGMKLEQELLIKELRLVQGHLERLDTEITDIVRTSREGQILLSMPPIGPVQAATIIATIGHIDNFEKASELKSYFGWAPTRHQTGVTFDRTKLSHRGVRPVKQMLFLMAARATTLDGEWARIYRRLLPRMATYDERVKEYRGKKKVLGRIAGQMVSMIFALLKTDQETLSRVPSGEEPPPPMLYDPEIHRKHQEGSYRSLKPGTQPRKILQLPSKS

SEQ ID NO: 258389 - protein, 422 aa, unidentified
MAVVMIGVDPHKGSHTAVAIGAAEEPLGQLRVRASAVQAERLVGWAQAWPQRAWAVEGAGGTGHLLAQQLLAAGERVLDVPPKLAARVRLLATGNINKNDPNDARSVAVAALRSAGVREVRRDDHAAVLKVWSKRYQDLGRARTQVACRLHQVLCELLPGGVPGQITAGQAAHLLDAITPADAVEEARWELAAELTDDLRGVDAQIRETRKKAATAVRAAGTGLTGLFGVGPVIAAAVIGDVRHVSRFPNRDHFAAYNGTAPIEVVSGGRKIHRLSRRGNRRLNHAIHMAAVTQIRYRHSPGRAYYDKKLAEGKTGKQALRCLKRQISDAIFACLQADARRAAAAKSPGGQPGHHSESRAAGSHPARRLFGQATPGPAPHPTTPAGTDAPAAFPAPLPARASGQPGPGPGKARPRSGASRRP

SEQ ID NO: 258390 - protein, 345 aa, unidentified
MKYFAGMDVSLEETAICIVDETGAIMKEIRAASEPEALADALSAAGLPLERVGLEACSLTAWLHDGLRAAGWPALCIETRQANAAMKTMPNKTDRNDARALAQIMRTGWFRQVHVKSRQSRLWRSLLAARRTILNEMRSIENVARAVLREAGLKLGRPARAQFEERVHDLAGDDGAVMAIVAPLLAVLRTMRAQLDALTRQVLAVVRNEATCRRLMTVPGVGPITALAFRATVDEPGRFAKSRAVGAHLGLTPARYQSGETDIQGRISRCGDELARTALYEAAHTLLVRSTKWSSLRAWGMAVARRRGMARARVAVARKLGVILHRMWRDGADFRFGQEPAAAAA

SEQ ID NO: 258391 - protein, 341 aa, unidentified
MTKNIYYVGIDIAAANFVASIYQSPKQPVITKEGFENTFDGFNMLNSWLETQKINPTNCVTCMEATGVYGEGLAHYLVTQGFKVSVEPPLEVKRAFDPIGHKTDPVDSRQIAEYACRYSDELRFWQPKDEIIEKIRHLLTAREQFTKQSVALQNSMGAYKKHVAQVSLITDAHSHILKELKKQIAEIDKELEQLVRKNPTISNIKNQLMSLPGYGLLLSSSLIAMTGAFREITSYKTLAAYIGICPYQHQSGSSVYRPPHIRHFGPAYSRKPLMLAARSVVTHNADFKKYYLRKLTEGKAKKLVLNNVANKLIKIACAMIKSNARYVSTYRSVNPMRLISA

SEQ ID NO: 258392 - protein, 313 aa, unidentified
MPVSLSKPIVGVDVAKNELVIYQSDGDLLEEIANTKTSIKQWLKALSGTVAIAIEATNIYHLDFADLAYEAGCTIYMVGGYELKHYREGVKIRAKTDALDAKLLARYLKNESEELRPWTPPSPLYRQLLSLFRRRAALVQARVGLVQSWSNEPLLKAAFAEQVKSMQQLETLIEKTINDQLKEAGLLGQLKRCLKVEGIGFLTGARLITAFQRGDFRNADAFIAFLGMDLRVAKSGQKDARRSLTKRGDPEARRLLHNAAMSASRTKAWKGYYEEQRTRGFSTTQALVMLARKLARVVFALLKGQSEYQPKAS

SEQ ID NO: 258393 - protein, 391 aa, unidentified
MVCVGIDVAKDKHDCCILDSDGMVRADCFTIPNNMDGFKQLLQTIRNCTKKSDKIKVGLEATGHYSYNILGFLLDNGLPTYVINPLHTNLYRKSLSLRKTKTDRVDARTIATMLLSDVDLKSYTDIAYHNEELKSLTRYRFDKVQERAKLKQSVSRLATILFPELEGLVSSIHGTSIYALLGEYPGAKQISEVHLTKLTNLLTTASKGRYGKEKAIQIREAARASIGSVMPAKSLELKHTIKLIQELASEINEIEDSIQKIIDELNPPILSIPGMGVNSAAVILAEIGDFSNFSSPDKILAYAGCSPSTYQSGKLTNCYAHMEKRGSRYLRHALYNATKYVCYWNPVFAEYLAKKRAEGKHYNVALSHAMKKLVRLIYALQKSGKTYLTAA

SEQ ID NO: 258394 - protein, 369 aa, unidentified
MTDLTLFVGLDVHKKTISVAVVEAAAGAVVRFYGTIANTPDSVRTLCRKLSKEGQQLHFCYEAGPCGYGVHRQLTRLGHRCDVVAPALIPRKVGDRVKTDRRDAMMLAQTLRAGQLTAVWVPDEAHEAMRDLVRLRTQAMRDLRKARQQLLSFLLRHGRNSPYGHWTKMHRRWLGELVFAHPAQHLALEEMLQRIERAEALCDRLKAAILELVPQWSLAAVVQAIQALRGVSLIVAAAIVAEVGCFSRFESPRALMAYLGLNPSEHSSGATIRRGAITKTGNTLARTCLVEAAWTYRFPPRVSQIIRDRLKELPEPIRAVAWKAQVRLSARYRKLTAAGKPGPKVVVAIARELVGFIWAIARMVEPKFA

SEQ ID NO: 258395 - protein, 339 aa, unidentified
MRLYGGIDLHSNNSFTTLIDQDDRAVFEKRMPNDLGVVLKGLEPFRDKITGVVVESTYNWYWLVDGLMDAGYRVHLANTAAIKQYEGLKHTDDKSDARWLAHLLRLGILPEGYIYPKEERSVRDLLRKRMQLVHQKTSNILSIKGQVARHLGGSIHSNHVKRLTEEAVDGFFPDECVSLAVKSNVAVMHCLDKRIKQIERETKKRMKLRPEFKQLLTVDGIGSTLALTISLETGDIRRFPKAGNYASYCRCVRSERTSNYKKKGQGNTRNGNKYLAWAYIEAAAFAIRWNELARRFYQRKSSKTNKVVARKALANKLARACFYIMRDNVPFDERRIFAA

SEQ ID NO: 258396 - protein, 342 aa, unidentified
MSKQVVRGGDVAGLLERFARLREKARARTGKVFPFVVIQEAGLDGFWIDRALQNEGIESHVVDPASIATSRRRRRAKTDGIDGEALVRALLAYKRGEPRVCAMVKAPTPEEEDRRRLCRERKVLIGERVQHVNRVKGLLFSQGISGYEPLRRDRRERLDTLQTGDGRRLPDHLKAQVRRELDRLELLLEQIKAVEAERDELLAAQRTAAPAAMLLDIKGIGPEFAAILWSEGLFRHFDNRRQVASYAGLAPTPWQSGSVDREQGVSKAGNRRLRTALIQLAWLWLRHQPQSALALWFEERVRRNGGRLKKTAIVALARKLLVALWKYVTAGVVIEGAVMKRT

SEQ ID NO: 258397 - protein, 335 aa, unidentified
MRRRFHLVGLNLRGEVVVRKKFSRIQLLRFTANMHVELIGMEACGGAHFLGRALREQGHEVRLIPAQYVKPYVKTNKSDYIDAEAIAEAVARPTMRFVPIKTDDQLDLQSLHRVRERWVMRRTAVINQIRGLLLERGITLRKGRHHVHAALPLILEDADAKLSGAVRMLLAQLKLDLDQLAVRIDEADAVIRKTAYENEACRRLVAIPGIGPVTATALIAAIGNGGAFHKGREFAAWMGVVPGEHTTGGQQKLLGISKRGNSYLRRLFVQGARAVLQQRTKQSSGLSAWLAQLTSRTHRNVAAVALANKLARIAWAVLAKNEQYRPSVLADVAAA

SEQ ID NO: 258398 - protein, 343 aa, unidentified
MKITSIGIDIGKTTFHLVGLDIHGSIVVRRKFSRKALLAYTVNLPSSLIGIEACGGAHCLARTMRDQGHEARLLPGQFVKPYRKANKNDYLDAEAIAEAVTRHNMRFVPIKTPDQLDLQGLHRVRERLVHNRTEVINQIRGFLLERGITFNRGPVSLRKEMPLLLEDAEQNLTPGLRTLLEHLWREWQYLDNQVAQIAGAIDNVAESDAACRRLRKIPGVGPLVSTATVAAIGNGAAFKRGRDFAAWLGLVPKQHSTGGKAKLLGITKRGNRYLRTMFVHGARAVLLRVKYNTGGFGQWVHRLAARAPRNKVIIAIANKLARIAWVVLSSGNEYQHQPVANVA

SEQ ID NO: 258399 - protein, 403 aa, unidentified
MSSCFAGLDWASITHAVCVIDQRGSVQEHFEVAHSASGLAELTRQLKRFGAPPIALERPSGLLVDTLVEAGFTVVPIHPNAVKATRPRYRSHGAKSDASDAYLLADLLRTDGHRFKPLAPQSDEIRALRALVRGRDDLLGARVQLTNQLRAVLESFWPGAAAIFAELDSPIALAFLARYPTPESAARLGPKRLAAFCAQHAYSGRRSPEQLLEPLRNAPPTACADFEMEAKGELARALQRTLRTLVEQKRALSLRIERHVASLEDRRLLMSVPRAGRLCAAQLLAELGAVRERFASEQHLAAEAGVAPLTYASGKSKAVAFRFCCNHRLRAALTCLANNSRHASPWAAAVYNRARTRGCDHPHAIRILARAWTRVIWRAWQDRLPYDPTRHRAAKHFLASTTA

SEQ ID NO: 258400 - protein, 355 aa, unidentified
MSEKFNSEIAVIGIDIGKNSFHIVGQDRRGSIVLRQKWSRGQVEARLANLPPCLIGMEACTGAHHLSRKLQALGHDARLMPAKYVRPYSKGEKNDYRDAEAIAEAAQRPTMKFVATKSADQLDLQALHRVRERLVGQRTGIINQIRAFLLERSIAVRQGLHFLRAELPGILAKRTDVLSPRMLRVIEDLARDWRRLDERIDALSDEIMTLARQDKGCERLMTVPGIGPIISSAMVAAIGSGDTFSKGRDFGAWLGLVPKQMSTGDRTILGSISRRGNRYLRTLFVQAAWVVLVKIKPEGWERYGLKSWIETAKQRLHRNVLAIALANKLARIAWAVLHKGRAFECVTNATASRPA

SEQ ID NO: 258401 - protein, 344 aa, unidentified
MTTPVYILGIDLSTTRLDCATLPDERSFHVPNSPAGFRTLVEHLSERRAQGLEVLAAVEATGGYERALVEALLAAGLPVAVVNPKRVRAYARGIGILAKTDRLDARVIARYAREVRPRPAAPVSPERRDLDDLLSYRTQLVGEIAARTQQKRLYTSAAAIGRADAALVRLRQEKRELDREIARMLEEAEALKQTAAVLLSVSGVGPVVGATLLAYLPELGRLGEKEIACLAGLAPVADDSGKRRGKRHIAEGRAKVRHALYMAVVAALKNNAPLRGVYQRLIRAGKPVKVAMVAVMRKLLVMLNAMVRDGATWQPDGATRKRRRLEAAGQGEAPVQQAARTAAA

SEQ ID NO: 258402 - protein, 424 aa, unidentified
MRFIGMDVHRDFCEIAIAEEGGRVRSAGRIASTLDALGLFAQSLAFDDVVALEATSGAGLIAEIIEPHVVAVVVANTRKLPQISRAKAKTDRLDARTLARLAASGFLETVWAPDEPTRALRRLCARRESLVRARTRAKNEAHAVPARNLCGRPPVTDAFGKKGRAWLASLQLPVDERLTLDGCLRQIDFLDAELRALEAALAEQALSSPQILRLMTVPGVNVHTAAAFIASIGDIRRFPTARRLVGYLGLDPRVRQSGNSDPRHGHISKAGSSLVRHMLGEAAWSVAQTPGPLRAFFERVRARKGPQVAATATARKLACLFWCLLTREQDYAFERPSMTRSKIRQLELAAGAPPRKGVRGIAGNKSPAVRETERELARRAEAAYRRMISDWQATAPAKAGAGATPGRASQRPSGGKAARQATSP

SEQ ID NO: 258403 - protein, 341 aa, unidentified
MSIMTIGIDLAKNIFAVHGVDQNGKAVLIKPKVARDQLAALIAQLAPCLIGLEACSGAHHWARLFRTYGHTVKLMDPKRVTPFRLTGKRGKNDAADAAAICEAVARPNMRFVPVKEEHQQVILCLHRTRQGFVEERTATYNRMRGLMSEFGIVLPQKVACLRRSIGEHLEDLPGYANQCIGDLLSHADRLDGRIADYDKLIAQAAREDARSKRLMQRPGIGPVTASALLASIGNGHDFKNGRQVAAWIGLVPGQYSSGGKARLGRITKAGDAYLRSLLVMGARAILSGLGDKQDGFSRWARSLVERRGYWKAVVAIAAKNARLAWAVLHYGEDFRLNASAV

SEQ ID NO: 258404 - protein, 334 aa, unidentified
MKQVNQVGVDVDSEALVSMMRRGGQRLPLARFANSAGGHKKFIRWATKGARPVRVCLEATGIYSLEFALALHHAKNVEVMVVNPRAMKDFGRASMQRAKTDAVDAGVILDYLERMPFTEWQRPTPEILELQAINRRIDQLHTELTREKNRRHASEFAGASADAIAHDIEVNIHHLERRIARMQDSGLQRVRGVPALAAKLAHLVSAKGIGEASAMRILAELLVLPDDLAAPQWVAHAGLDPRPYESGTSVHPPRRISKVGNSHLRAALYMPALVAIRHEPNVKAFYDKLIAAGKKPLQAVVAVMRKLLHAIWGMLKHDQDFDGNKFFKLTAKTA

SEQ ID NO: 258405 - protein, 347 aa, unidentified
MNFYTQQHKQYCGIDLHARAMYVCILDQSGTIRVHKNLPTTPEAFLRVIAPYRDDLVVGVECIFTWYWLADLCAKEGITFVLGHALYMKAIHGGKAKNDKIDAHKIAVLLRGGMLPQAYVYPAEMRATRDLLRRRCHLVRKRAELLAHIQNTNSQYNLPEIGKKLAYKANRAGVEEHFPDPSVRKTIEVDVSLIDHYDKLLGEVELYITRTAKAHDVQTFSRLQSVPGIGQILALVILYEIQDIARFPRVQDFVSYCRLVKCAKESGGKRLGTSGKKIGNVHLRWAFAEAAVLFLRHNQPGKEYFTKLERKHGKAKALTVLAHKLGRAVYYLLTREQAFDLNRFVTA

SEQ ID NO: 258406 - protein, 343 aa, unidentified
MTQYKRIGIDTSKAVFTLHGIDHQEQPVLRTNLRRAQVLSFFSKLPCTTIALEACGGSHYWARELTALGHAVRLIPPQYVKPYVKRGKNDRNDAEAICEAAGRPGMQFVPVKSAKQQAQGMILKVRETLIGQRVALINAVRGFAAEFGIIAGKGAGKIVQLLSALEQHAAMPSEAREMFVVLGKQIADIDVRIREVDAKLNAVHKASELSQRLVTIPGVGPIIALTLAVEIDPAMFESGRHLAAWAGLTPKERSTGGKQRMGGISRAGNERLRVLLVSGATSVINHAMRPGSKLMTEWLRALLLRKPRKLAAVALANKMARIAWAKRGETYRCPSTAAGAVAA

SEQ ID NO: 258407 - protein, 403 aa, unidentified
MSNYFAGLDWASKTHALCVIDERGGVVERFDIDHNAAGLTELRRRMRRFGSPPVAIERPSGLLVDTLVDADFTVVPIHPNAVKASRPRYRSHGGKSDASDAYVLADLLRTDGHRFKALTPQSDEIRALRALVRGRDDLVATRVHLANQLRTLLESFWPGAAAVFADIDSPIALAFIERYPTPESASRLGPKRMAAFCAQHAYCGRRSPDDLLARLQEAPSAVSAETEMEAKGELARCVARTLTRLVEQLRLLSSRIEHLVASLDDGRILMSFPRAGRICAAQILAELGSVRERFATDAQLAAEAGVAPVTYESGKSKAVTFRWACNHRLRAAITCLADNSRHVNAWAAHVYANARARGCDHPHAIRILARAWLRVIWRAWTDRKTYDPMQHRAAQLLLKAAGG

SEQ ID NO: 258408 - protein, 336 aa, unidentified
MKHEFFIGIDISKRTIDVAIKTKNVKELLHKQFENKKTGFTSMLKWIKQVTKALEQELFFCMEHTGIYTLPISCFLSGKEIIYRLENPYHLKHSMGIQRNKNDKADSRMIARYAYMHHEELKPTEFSGTEIIKLQNLLAHRERLIKTRTLYKVAPKELSEFSGKELHAFITDSSLDVVKLINEKIKLAEQEIETLVEEHEGLKRNFELARSVKGVGLVIAAYMLVYTQNFTSITNARNFASYSGVAPFGERSGTSINKAPHVSHLANKRMKSLLNNGAWSAVKSDKELKTYYERKIKEGKHPLVVINAVRNKLLGRIFATVKRGSPYVEMLQYCKN

SEQ ID NO: 258409 - protein, 356 aa, unidentified
MTLTTTHPIKTVTIGVDTHQLVHHAAAVDQDGRMLGDRKFPAGQDGYRELLNWAASFGIINAFGVECTGSYGAGLTRHLLAAGVDVVEVNKSHSQVRHRVGKSDAVDAEAAARKVLSGECTDPAKDTTGTVEAIRNLHLVRDSAIKARSAACVQLRDILLTAPDHLRTRLTAKTLEGKATQARALRPDLSRIHEPEQAVKYALRELGRRIYELTAEINEVDKHLTQLVSAVAPNTLALPQVGPVSVAQLLITAGENFERFRNEAAFAKLCGVAPIPVSSGKSHRMRLHRGGNRQANRVIYLIAICRLRYDPRSQAYRDRKRAQGHSSADAIRCLKRFIAREIYYSLKRDLTAVAAT

SEQ ID NO: 258410 - protein, 355 aa, unidentified
MIIVGCDYHPSFQQIAYVDTETGEWKEQRLEHRESAEAFYRELASRGAKVRVGMEASGHARWFERLLAELGIELWLGDAALIRAKRGRRKPKTDRQDAQHILHLLLKDDFPKIWIPSWENRDLRQLLWHRHRMVQARTRIMNQLQAVALNEGLRCKKRLWREKGRKQLEAIRLAPWASRRRQDLLQLLDGLNPTIAELTQAIDQEVEKSAEAGRLMTHPGVGPLTALAFVLIIGKAERFQCGKQIAAYLGLVPLEDSSGERRRLGHITKQGSSMLRFLLVEAAQVAARSIPQWRNQYFHLALRRGRKIAKVAMARRLAIRLFWMMRQGWDYEQMKKFGSHAGQPGNRHGVHSNIE

SEQ ID NO: 258411 - protein, 345 aa, unidentified
MEPMYYIGLDVHKRKISYRVKDSSGKIYAEGSLPATRMDLDLWMKTLPCPWSGAMEATMFTGWIYDHLKPHAAALKVAHPLMLRAIAAAKKKNDRIDASKICDCLRCDFLPECYMAPTAIRERRRTLRYRNLLVRQMVQMKIKISSLLMEAGVSYNKQRLHKAGYFRELLASNPDIDEGLGALLRLCRETVVRLEKTESAMVRSLERDSLLIDRVERLMTIPAVGPITALTWALEVGDVQRFSSIKKAISYCGLCGAERSSGNTVQRTPLSKQRNKHLQTTLIEAAKMAPRNSADLAMLYDKEKQKGNANRATLAVARKLVAYLMAVDRGQRNFQVVETSNGIAA

SEQ ID NO: 258412 - protein, 312 aa, unidentified
MHELFVGIDVSKDKLDVHVRPSGEYITLGTAPAGLHDLVERVQAWGPALIVLEATGGYEVVVAAALASAALPVAVVNPRQIRDFARATGQLAKTDALDAAVIARFAEAVRPPVRPLAPPAAQALGELVTRRRQLLEMLGAERNRQAQARDRQVQRQLGTHVRWLTKALADLDRDINDTLRSSPVWRAPDALLKSVPAVGPVTAHTLIAQVPELGQLGRRQIAALIGVAPLNRDSGTLRGRRMIGGGRASVRQVLYMAALVGVRYNPRLAAFYSRLTGAGRPKKVALVATMRKLLTILNAIVRDQRPWQPQNA

SEQ ID NO: 258413 - protein, 408 aa, unidentified
MGRAIGLDVHRDFCEVAVADGGRARSAGRVATAAEDLELFAASLAADDRVVLEATGNALAIAKIIAPHVDEVVLAHAKQVRAISHARIKTDKFDARVLAELLAADLIPKVWIGDERVRALRRLVSRRRGLVKRRTQVKNEISAVLQRNLKGRPPMSDLFGRQGRAWLALQELPADERLTVEGGLRQLDFLGEELAQIERLVAAEALSDPEVRRLLTIPGVDVTTAVTLVAVIGDVARFPSARHLVGYLGLHPRVRQSGNEPARHGRLSKEGSAAARHVLVEAAWVAARSPGPLHAFAARTAARRGRNVATVAVARKLCVLCWCLLTRGEDYAFQRPSLVRRKLRRLELRAGAPRAKSGPRPDPVWNKDADAHERRLAEQAERAYERLVADWTASRRKAGAGATPGRAS

SEQ ID NO: 258414 - protein, 362 aa, unidentified
MRKPEQQHKPLNDLSRSLTPFDPNRTLIGVIEMGKRSWLVAGMIPGVERQPLKKLAADENELLKLLERWRAEAEKAGHKIDRIAVAFETGRDGFWLARWLRARGIEAHVIHAASVAVSREHRRAKTDRLDTQLLMRAFLGWLRGERQHCKMAAIPTLAEEDAKRPHRERETLVGERTTIINRLKAALTRHGIRNFNPKLVKAPERVEHVRTPEGAPIPPNTQAELLRDMQRLRLVREQIGQIEKARLEHLKRNPNTGPNLMVSILARVIGVGIETADMLVQEVLSRNLRDRRAVARYGGVTGSPDESGSRSREKGLARSGNARVRRGMIQLAWRFLEFQKDSALAKWFRARTENAPRSRKKL

SEQ ID NO: 258415 - protein, 346 aa, unidentified
MQPTTIAVDVAKSVFEVAVSRRPGSVSSSHRLTRKRLARFLAEQAPATVVMEACGMAHSWGREARARGHAVRLLPPRDVRPYVRGNKTDRSDAKALLEAYRNEAIRPVPVKSVEQQALTGLHRMRATWVATRTGRLNTLRGLLRELGVMIPVGSRRVVPAVWELVSDPESDVPELLRPVLAEAAREVTELERRVREVETQLEAVARQSSRVRRLRTIPGVGLLTATAIVASVGDLKRFPSARHFASSLGLTPRESSSGNVRRLGRITKRGDPYLRTLLIHGARSVLHHAKRTSKPDRLRAWALERERERGHNKAAVAVANKLARIVWATIVRDADYGAPSSEEVSP

SEQ ID NO: 258416 - protein, 371 aa, unidentified
MKSDSTIKFIGLDVHSKTISVAIADEGRKGEVRHYGTIENTFEAIDKVIKSLTATGIELRFIYEAGPCGFALYRYLSGNGFTCIVTSPAMIPRPKNVRIKNDRRDALTLARLYRAGELTGIYVPEPEDEAIRDLGRARDDARMAERKAKQRLNSFLIRNNLIYPGKTKWNRTYFSWLSSVGMKYPGQKVALQEYIEAVNECTGRVARLREQIGLAVEEWRMAPMVKALQALRGVSLICATITVAELGDLSRFQNPKELMAYLGLVPSEHSSGESIRRGGITKTGNGHARRVLVEGAWTYKHHARVTYPLIKRQRELPKSICQISWKAQLRLCARYRKMVARKKPNNVVVIAIARELAAFMWAIAQEVRVAA

SEQ ID NO: 258417 - protein, 450 aa, unidentified
MDGGAKGQQKPRSGNKVMKPPPEQPAPDWLVHRAFGGLDWASQKHNVIVVDPHGKVVEDFEIEHSALGWKKFRERLAPYGAIPFAIETSQGTAVEQLLEAGMKVYPINAKSAKSYRERKAPSGVKDDRLDAWSFADACRIDGQGWRALRPEDPLVKELRLLCRDEVSLIEQRTSFICQLRHALAEYYPTALEAFEDWGSVSAWMFVQRFPTPQLLQVAGKRAWEKFLHARHLWRTESGPRRIELFSHATELSGTVPMANAKSQLALSLISMLFALEKQLGIYRKRIDELFGRHPDHDLFGSLPGTGPKLAPRLLSEIGDDRERFEDGPQALQCLAGSAPVTRRTGKCKVRANPDRWPCHQRWACDKHLRHAMHLFSEHTLRQCVWAQIYYQHHRQKGSSHADALRRLTQRWLKIIYRMWMDRTPYDPMLHHHNQLKHGSWVFELKTTNCK

SEQ ID NO: 258418 - protein, 448 aa, unidentified
MRARKEPSARKLKLPKHLQHINAQAAGIDVGCRSHFVAVPEGSCEQPVREFSSFTDDLHRMADWLLECGVTTVAMESTGIYWIPVFEILESRGLEVRLVNARHVKNVPGRKSDVLDCQWLQQLHSYGLLAGAFRPEEQVCALRAYVRQRMTLVRYASSHIQHMQKALLQMNLQLSNVVSDISGVTGMRIIRAIVGGERDPMALARLRDPRCRSSESTIARSLHGHFRAEHLFSLKQAVELYEFYQAQIAECDREILAQLGGFDAADASGNGPPTSVDEALQRISGVDLTDIDGIDTTSALKIIAEVGTDMSRWSSAKHFASWLGLCPGTKISGGKRLSAKSKPVANRAAATLRMAAFTLLKSKSALGAYFRRQRARLGAPKAITATAHKMARLVYSMLKHGSAYVDVGQDHYEQRYRDRVVKNLKRKAQSFGYLLVKEAETLPQPLVP

SEQ ID NO: 258419 - protein, 370 aa, unidentified
MLDTTTFVGLDVHARSIKAVSLDVMTGEVRAATFGYDAGAVAEWVRSVDPRARCVYESGVTGFDLQKRLSGLGVDCVVGAVSKMIKPSADRRRKNDRNDAEFLARMLSVGNVVEVWVPDDECEAARDLTRALEDARDDLSRSKQRLSKFLLRHGLAFDERTPTGRRKGNWTRAHWSWIESIRFAERADNDVLAYYVDAVRRAAEEKARLEGLVEAEARKPRWRKRVDSLRCLKGVDTASAADLVFEAGEFSRFRNARSFAAWVGLTPSEHSSGESDRRGAITKAGNKHLRKTLVEAAWHYPTCSGRPKDLAKGQAPDRGARRHAAKGVRRLVERREALLARGVHGNKANVATARELACWVWAVGLMAEEA

SEQ ID NO: 258420 - protein, 399 aa, unidentified
MDPVIGLDIAKGKSQVQAFLQKKDPYKKSFVFEHNVLGLHDFHRFWLEVEEITGRPPVVVFESTGHYHEPVLQFLEEHQIVYYLVNPVLSHEAKKMSLRKVKTDAIDAFRLGELYYLYDDLQPFKKKAVKIMNLRNLTRQHDALTGTYLQIKLQFQTVLDQVFPEYKTVFGSLYSPTSLRTLLHYQTPQGVREETKEKIAEVILQQGVKRSYGWALDKAHQLKEAAGRDPFKRNLYSSHVVSLTMFIQLLLQYQRHLSKLLKEIDALAEEFDEYKIIRSIPGIGGKIAATILSEIGDIDQFNHPKKLVAYAGIDPSVHESGQFKATINRITKRGSSSLRKSLYNAVQCGITKNRNPKLRAYYDKKREEGKPHKVAIIACANKLIHWIYAILKSKKAYVI

SEQ ID NO: 258421 - protein, 406 aa, unidentified
MTEIPKPTRFVGLDIHKEYFVATGVNALQETVFGPQRVDNQQLETWMHKHLTSQDAVVLESTTNTYEFYDTLLPQVHSVTVVHPPHVALITRAQVKTDRKAALGLAQLHAAGLLVGIWIPPQPIRDLRALIAERYKMVRLQTQAKNRLHSLLHRHHLLPPEGGDLFSPEHRNWWEKLALTPLEHVNVQCDLDTLEFAHEQLDRLQNCIAKAAAEDPRIPLLVQLPGIGILTAVTILAAIGKIERFPDAKQLVGYAGLGARVHESGKLFQTGRITKAGRRDLRHVMVEAGQQAARTHEHWKSELERLEPRIGRQKAIVAIGRKLLVAVWHVLAKEMVDRFADPTQVACSFFAYAYKVGVKNLPDGQSALQYTRAQLDRLGIGKDLTEIPWGSKTFKLPPSQLSEPAH

SEQ ID NO: 258422 - protein, 378 aa, unidentified
MSSTPIIWIGMDVHKDTVMVAVFEDRNREAAIVKQLPNEDGKLRRFFERWSRRGEVRSCYEASGAGYVLHRSITEWGYDCEIIAPSLIPVRPGERRKHDRKDATQLARLYRAGELTTIRIPSAAEERVRDLVRCRQCFQREILRSRHYVTKFLARRGFVFREGKNWTQRHWAWLRRLLRDGGLAQADRTVFGEYLSLLEYKISRREDLDGQIEKLALSPLYRPTVDQLRCFRGISTIAAMTLATEIGDWRRFEGPGQLMAYLGLVPSEHSSGDRERRGAITKAGNSRCRHVLVQAAWSYRHRPAVGLELKKRQRGQPPEVISHAWKAQHRLYKRYHSIAARKSSNIAVVAVARELVGFLWAVMHELEIEQATQVSEAA

SEQ ID NO: 258423 - protein, 386 aa, unidentified
MQKLNDLSRSLTALEPNGTLIAVIEMSLSSWLVAGIVPGVERQPLKKLAVDESALLKLLHRWREEAEKAGRRIERIAVAFEAGRDGFWLARWLKARGIEAYVIHASSVAVSREHRRAKTDRLDTELLKRSFLGWLRGERDHCKMVEIPTMQDEDAKRPNREHDSLIGERSRIVNRMKAALVRLGIRGFNPKLKRASTRLDGLRTPEGEPIPPNALAELRRDMERRRLVNNQIRQIEEERLERIEQAPCDGAHVMVRLLARVMGVGIETADMLVHEVLSRNMRDRRAVARYAGLTGSPDESGRKRREKGLARSGNARVRRGMIQLAWRFLLHQKNSALTKWFRSRTENARGTRKPMIVALARKLLIALWRLVREGIVPDGVVLRAAQ

SEQ ID NO: 258424 - protein, 350 aa, unidentified
MVEAPDAVGERGPLRLLSKPARLRGHVSPHRKEGIEGMIRTAVHVGIDVAKDFVDVAIGDDGECFRVTTDTAGLDALACRVSGFGPGVVVGLEASGGYERPIIRRLHEAGIAVRLVDPARVRQFARAMGIKAKNDRLDAAVIAAFVATVDGALNVAEPARERLCEHVRYRRQLMEALTVIDNQARLTDDAGLEALAAERRELLRRQVDEIEHRIVRLIDADPAMSKTFALLRSVPGVGPVLAWTLIAEMPELGSLDRWKVAALAGVAPFDRDSGGHNGKRMIHGGRANVRKVLYMAAVAAARCNPPIQAFHQRLRDQGKPPKVAITACMRKLLITLNAIARDQVEWKPAI

SEQ ID NO: 258425 - protein, 355 aa, unidentified
MTSSKYIGLDVHKESISIAVRNSAGKVVMESVIETKASMILDFIDGLRGEIHVTFEEGTWSAWLYDLLRPHVTRLVVCDPRRNALLQEGNQNDRVDARNLAELLQNNQLRPVYHGDHGLRALKELVRSHLTITKDLSRVMTRVKAIYRSWGIPCSGTQVYTACHRAEWLEKIREPGVRRRAEIYYLQLDGLRLLRLQVRKDLLAESKKHQVWKRLCGIPSIGPIRAAVLLGIVQTAHRFRTKRQLWTYSGLGIEVHSSADHQVVKGQLQRKKKPIEIRGLNKNCNHHLKSLFKSAAITASTKPGPFQEFYAALLAKGMRPEIARLTLARKIATIVLIVWKKGDRFDANHLKPQTA

SEQ ID NO: 258426 - protein, 363 aa, unidentified
MNYVGVDIHKKYSVLCALDESGRKLREGRVQGNSARGFAQFFAGLEGPSKAVVEACWNWGLIHDELEELEPVEEVVLAHPYKTRLIADAQIKTDRLDAHALGTLLRGNLVARAHVPGRETRARKNLLRQRLYWARLRTMLRNRIHALLDRQRELELPQCSDVFGVRGLGFLRRLELAEPDATLLREQLALHDLIAQQMKAQEKRIAAEFKTEAVHQHLLSVPGIGITLAAVIGCEIDQIERFNSAEKLCAYAGVVPTTHASGGKTSHGRLLPFCNKWLRWALVEASWVAIGCSPYFGSLYRQHRARGKKANTAILIVARRMCRIIWQLLEQKRDFEKLAPRPKLYSFPGCSALALTVNPALAS

SEQ ID NO: 258427 - protein, 343 aa, unidentified
MEYGAIDLHTKESEIRIIDEAGAVVFERRIATTRTRLTEVFGRRAPLRILLESGTGSEWVAQHLESMGHEVVVADPNYAPMYGQRTRRIKTDRRDVAALAEANRLGIYRAAHRVSAPQRDVRRRLRVRDQLVHVRRQAINLMRAQLRSEGVRVPTGAAETFAARFEASEASAAVREAMAPLLELLAALAPLLSQAEQWTRQAAKADPVARRLMTAPGVGPVVALAFQATVDNVGRFATPGAVTSYLGLVPREDSSGERQRKGAITKAGPSRMRVLLIQSAWHLWRSPTGSATLHAWARRLGERRGRRIAVVALARRLARILWAMWRDGRNFEPARVGRLAVAA

SEQ ID NO: 258428 - protein, 381 aa, unidentified
MKKNSIAKLQVTKSQIRSMAAKQRLTVGLDLGDRSSRYCILDEAGEKASEDQLPTTKAGLDSIFAKMAPSRIALEVGTHSPWVSRQLAAMGHEVIVANPRKVRLITQSVKKNDRMDAEQLARLARVDPRLLAPIRHRRPEAQADLGVIRARAELLEGRTKLINAARGLTKPMGERLKSCDADTVKESMADGLSEATQKVIRQLLKSVEAITQQIKVYNEQIQEIEKRYPETELLKQVHGVGPLVALTFLLTLEDAERFEHSRDVGPYLGLTRKQRESGKSEPELGISKAGDELLRWLLVQAAHCILRRGAPDSDLRAWGLMKVGAGAGKKGSKSRKKKAAVAVARKLAVLLHHLWVTGEVYDPQYNRKAAEASQASKRAAA

SEQ ID NO: 258429 - protein, 450 aa, unidentified
MGKIKKKKGQVRNISEITVINHYAGGIDVSDTEMMVAYPIDSKQLVVEPFGCFTCDLKEIVETLKKHDITSVAMESTGVYWVSLFLLLQENGIEVSLVNAKHVKNVTGRKDDEGDAEWIQKLHRCGLLQASFQPDNMTRTLRSMMRHRKSLVQTSSSFINRMQKALELMNIKLHTVISDIDGKTGLSIIKAILDGERRPEVLAELRDKRIKATKEEIIKSLEGYWIKEHLFELRQSYELYLILKEKINECDREIEKQLLEQIASKNDGIIPDFSKTKIQRKPSGKSRLPFNATLYLQNLLGVDVTKIFGINELSALAIVSEVGTDMSKWKTSGHFTSWLGSAPNTKISGGKIISSKIMRKKHHAGQAFRMAAQGLTNSKGPMAEFYKRIKAKAGPGKAIIATARKLAVIWYNMIANQQAFNPKLLEDYQHKHKEKQINYLKRKLQSLEAA

SEQ ID NO: 258430 - protein, 387 aa, unidentified
MCYYVGIDVAKFKHDFTIVTSDGEVILQSTTFKNDFKGFETIKDSLANLDHSQEIKIGLESTGHYHKNLVKFLTEQGYQVSILNPYLVHGFIKSRTLRKQKTDNLDCLWIAKYLQSEDFKAYQSKLYPCEELKSLTRSRNKIVRERSNQLVVVTNCLDCIFPEFKGFFDGKLSKSALVLLFEHSTVDSIKALTASKIQKIKDKHKGIRIGKYFEIRDAAKITIGVPNDSTSFIMKQAISQIFTFDEILNSYDERIDKIMDEQNSVLESIPGVGRNSASVILAEYNNFQGFPDADKLLAYAGLECSRYQSGESDYHGHMVKRGSPFLRYTLMNLAIALKNHNAVFKEYYLKKRDEGKRYRVALNHVVRKFLRVAFKLVSTNQKFNIDQ

SEQ ID NO: 258431 - protein, 327 aa, unidentified
MMFIGIDISKEKIDLSWLRDQLTNKIKTKVFKNKRQDFVTIEKWLLNTTKSAANELVITLEPTGVYHEALMYFLYEQGFNIILANPGKAKKYADALNIIHKTDKSDATMLAHYGCAKHAVVNYWQPEALAIRELKALIRRLDALESNRQREANRLEASEFSNVSARVCQSIKVTIAFLDDEIKQLKSDIDNHIDNEPDLKRNRKLLESIPGIGPVLSRELTYLFAAKKFNKAKEAAAYCGLIPRHNESGKLKGRTSISKLGPARIRCKLYMAAIVAGQWNKTIKRHKLTLINNGKTPMQAVCANMRKLIHICFGVIKNQEAFKLQES

SEQ ID NO: 258432 - protein, 456 aa, unidentified
MAKTRKAKMIKSPDGNKLAIVNPDAAGIDIADKEMQVCVPEDRDGDNNRCFGSFTCDLNTIVEWLQACRITTVAMEATGIYYLQLFLKLQDAGIEVLLCNPRDVKNLSGHKTDSADAEWLMLLHRYGLLKPCYQPGNAARQIRNLIRQRNNILRSADKQVLYMQKAMEQMNIKLSTVITDITGMSGRDIINAILAGKRDSMELASLAQANCKTPREDIAKALEGTWDADLLFMLQQSVDAYDFFNMQMKECDKQIEALLDAYQARLDAGTDALVRHKRKKSDRSKNAPEIDIEKYAFAIWGVNVFDIPGLKDLAVMQLIGELGHDFIDKFETAEKFCRWCNLTPENKISGGKILSSRVQKRKNPVGQIFRKAAAPMAREKSEMGNYYRRIRAKSGALQANVATAHKIAKIFYTMIKTKEKYNPAKVGLDEREITQKKILRLERALEKLNQKHKMAS

SEQ ID NO: 258433 - protein, 392 aa, unidentified
MYIIGIDIGKKHHEASIVDDSGRLVGRSCRFTNTHSGADRLMQHMQKHIGQEACVFGMEATGHYWYSIYSFLKSKGFTIHVINPIQSDSLRSMYIRQTKNDAKDSFLIAEVIRFGQFTTTTLADEKLLSMRQLCRYRDSVVSDRTEIKLRINTILEQIFPEYETLFSSIWRNSSISVLQKYLTPENIANAPVDELYALLKEKSHNRLTMAKAIALHDAAADTFGIKIAQSAFVFQLKQLFERLSLLTEQLAALESEILAYYESFHCYLHTIPGVGLMAAASILAEVGDIHRFKSATALVAYAGIDPSVRQSGTFNSIHNHMSKRGSPYLRHAIFLAASTCSLHESPLNAYYLKKKAQGKHHLTAVGAVSRKLTSIIYAILRDETPYEAVKFS

SEQ ID NO: 258434 - protein, 335 aa, unidentified
MKKIYVGIDISKEKCNLCYRDGLEIVMEEESANDVKALKKSLSAVLKTFSVAFDEVLVCAEYTGRYIYPLTVACQELDIFLWMDDPTRIKNSMGLTRGKNDVIDAARIAEYAYRYSDKAIRYRIPDAALVSMKSLLVDREFLLIDKKRYQSQITDQKRYMASGDFKHKCARWKKVIRAIAEQIKAIDAEIESLIAANPVLTRQKELLTSIDGVGDRIAINMIAITGGFTRFQNARQFCSFAGLTPYKYDSGTSVRSKAKISKRANQTMKALLHLAAVGAATHMKESEYRDYFDRKIKDGKHVMCILNVVRAKIVHRMFSVIRRDTEYTKTYKPSV

SEQ ID NO: 258435 - protein, 414 aa, unidentified
MNHPLFVGVDPHRKKNVVQMMDSQGERLGDTLRVDNNQPGTAALIKHLMETAASGEFDGIRIATEATGWYWLHFFQALHQELAASPWPVALYALNPRLTAKFKQTYVDLDKNDAIDAYVVGDRLRMGRDLPQSFRQDDTYLPLRFLTRFRRHVVLNLAREKNYFLSALYLKASEYTRKDKQPFSNVFGATSRAVIQEFPSLEEIAAIPFDDLVDYIDVKGKRRFPDPTDNARRLRQVAADSYPLPQAWQEPVNTILRLSLQQIAALQRQEQRLNTAIAEHMAHIPHTLDTIPGIGPVFSAGIIAEIAGVERFNYDQAKVAKYAGLRWRHSGSADFQAEDTPLSRAGNAHLRYYLCEAANIVRLHDADYKAFYHRKFLEVRKHRHKRAIVLTARKLVRLVVRLLTTNQPYRPRRP

SEQ ID NO: 258436 - protein, 336 aa, unidentified
MYYSGIDQHKRNSFITTYDSKGTVVKQMRVSNNPLLIQNYFAQFPGPHKAVVESTGSWYWLADLLQQHDVELTLAHATRLKAISAAKVKTDKVDSNIMALLLRADLIPEAHMISSDKRGPRDIMRTRLRLISKCAGCKNSIERLLEKFNVTTITELDDLYQLQARAHEDQIALMEQQIHKIEHPSLIPNEDIQRLLWIPGIGKVNAFTIYTEIDDIERFPSVNQFFSYCRLVPGADNSAGKNRHRSGSKAGNCYLKLAFSHAGVRAVQYYPEIKAFYKAKLRRKPERIARTLVSLEIARIVYQVLKTRKDFNGRFKNQQLSRTKQSQWPRLASPAA

SEQ ID NO: 258437 - protein, 315 aa, unidentified
MAMPVVTTQSIIGVDVAKDELVIYCTESDQLETISNTKAAIKKWLKTVAKPVAIAIEATNIYHQEFADLAYANGCVIYMVGGYELSHYRKGVNVRAKTDALDARLLARYLTNEGDHLRPWTPPSPLYCRLISLFRRRAALVQARVSLKQSWENEPLLKTAFKNQINAMQRLEILLEKTILTQIDEAGLGAQLKRCMKVEGIGTLTGARLLASFQRGDFRNADAFIAFLGLDLRISDSGKKKGRRCLTKRGDSEARRLLHNAAMAASRTSAWKGFYEALRERGLSTTQALVALARKLARVVFALLKNQSEYSPKAV

SEQ ID NO: 258438 - protein, 369 aa, unidentified
MNTTTFVGLDVHARSIKAVALDAMTGEVRSATFAYDAAAVAEWVRSLDPAAKCVYESGVTGFDLQKRLAALDVDCVVGAVSKMIKPSADRKRKNDRNDAEFLARMLSVGNVVEVWVPDDGCEAARDLSRALDDAREDLKRCKQRLSKFLLRHGYVFSETTPTGRRKGNWTAAHWAWIKSISFPEKADDDVLAYYVDAVRQAMEDKARLERLVEAEASKPRWKRRVDSVRCLKGIDVTSAADLVFEAGEFSRFKSARSFAAWLGLTPSERSSGESVRQGGITKAGNKHLRRVLVESAWHYLGCSPHSKDLAKGQVPDPAARRHAAKGVRRLVERRRAMLERGVHKNKANVATARELACWCWAVGRMAENG

SEQ ID NO: 258439 - protein, 347 aa, unidentified
MEITTIGLDLAKNVFQVHGVNATGEVVIRKALRRSQMLPFFRKLPPCLVGIEACGTSHHWARELVGLGHEVRLMPPAYVKPYVKRGKNDAVDAEAICEAVTRPTMRFVAVKSREQQSALSLHRARSLLVGQRTQLVNMMRSMLAEFGIAIPEGLEKALSMARQIIGGEIDTGLPTEATTIVGMLSGQAIDTHARLREIDKALGALQRSDDIARRLSTIPGIGPVGATAFAASVTDPHQFRSGRQFAAWLGLTPLQRSSGGKERLGRITKMGDKYLRQLLVIGATALVRYAKCKPDTADPRLLALLARKPVRVATVAMANKMARVIWALMTRGETYQARHVPMLAGQH

SEQ ID NO: 258440 - protein, 388 aa, unidentified
MIQVDDLSRSLVAFEQISTLVIVVELSQSSWLAAGVVPGIERRPLKKLDPDPTALLHLVEGWRDRATKAGRAITRTVLAFESGRDGFWLARWLRVRGVDTFVMHSTSVAVSREPRRAKTDRLDTEMLIRVFLGWLRGEPRHCKMVAIPTLEEEDARRPSRERENLVGERTRIINRMKAALVRLGIRGFKPGLLTAPQKLDALRTPEETPIPPNMLDEMRRDMARLAWVREQINAIEQARLERLERAPATGRHAMVRMLARVIGVGVETADMLVQEVLSRNLRDRRAVARYAGLTGSPDESGSKRREQGLSKAGNARVRRGLIQLAWRFLRFQKDSALAQWYRGRTEDVAGKRKRTMIVALARKLLIALWRLVTIGEIPVGVALRTAVA

SEQ ID NO: 258441 - protein, 396 aa, unidentified
MLYVGIDLHGKQITVCVRDEAGNVVLRRQVSTRPGKVAEFLDELRALSGGKYVVVLEVCGFHNWLVERLKADPSCSEVVLIQPEETSKKKTDRRDASRLSEILWVNRQRLLAGQAVRGLRRVYIPTDDERQDRQITSVRMRQGRQRTRTINQIRHILRRNNLEWERPTKGFQTKKVRQWLTTLELDETDRLEMDQLVEQWDLWERQIKQLEERIEKHFERNAAAQILATIVGVSCYMALAIASRIGDIHRFARGRSLANFFGLTPGSRSSGEKERLGSITKQGSRMVRFMLGQLVVHVLRKDSKLRTWYRAIKKRRGVNIARVAVMRRMTGIIQRMLSKQEAYRYDGITEPRRADPWSPCEACVLPERATILAAYLAPAAGDHGAGQVPVPLLCSE

SEQ ID NO: 258442 - protein, 422 aa, unidentified
MKKRIYRKVPVNQFQPASLSLDNVGARLVVAVDVAKVDMVAAIAAGDGRVLNTIAWKAPGENAAVLGILRALRAAGFLVEVAMEPSGTYGDVLQYHLEKDGFPVFMVSGKRTFDARELYDGVPSLHDAKSAAIIARLHVEGLSKPACAPSPVRRQLHAAITIMDLHQRRYLQLIGNLESWLARHWPELPALVDLTAASLMALLARVGGPADVAARRSEAEKLLRGISHGLMAKEKITAILDTASTSLGVPLVGMERDALMAIAAEAHRALRAFKVAKTELEKLSAPTPAAVLAPAIGRTTAAVVYTDVGDANSYTSAGSFVKAMGLNLKEKSSGTIKGQIKITKRGSSRVRHYLWLAVYRWIQKDPIANAWYERKVKRDGGKSSRAAVALMRKLAKALYHVARGATLDSSKLFDVRRLEVAA

SEQ ID NO: 258443 - protein, 345 aa, unidentified
MDYFAGIDGSLETANICIVDQDGTVLREEKVESTPEALIDALRRFRKPLKRIGLEAGPLSTWLYRELRQAGLTTILVETRHMKSALSAMRQKTDRNDARGIAQMMRMGWFRAVHAKSTDSQELRVLLTHRKTMIGKLIAIDNEIRGTLKAFGFKVGHTTRLTFERRVLELVQGMPRLDSMTRPMLRVRAVLLTEIATLHRMVLKEVRHDPVCRRLMTIPGVGPLVALTYKTGVDMPERFARSSDVGVHFGLTPRRYASGATDVSGSISKCGDGMVRTALYEAASVMIHHGRRWSALKAWAMKLAKRAGLKRAKVALARKLAVVMHRMWLDGTDFRWTSEQQAVRA

SEQ ID NO: 258444 - protein, 419 aa, unidentified
MAFKILRKNCCGLDIHKTWIFACIGITDSNGRTEYKQARFSSFSNGLRDLADWLAKYSCSDVCMESTGKYWIPVFNILEKTCWVTLAHPKYTKPQKGNKTDRKDAKWICDLYMCGMVKPSFIPPPDIRQLRDLMRCRVKLTNMLTGEKNRAQNCLTVSNLKLDDVFSDVFGKSSRSIIQYILEHPGEQFDVTPFIHRRCKHPVEEIQAAVDGVVSREQAAKLKECLLHIDQLNAHRERIEAEILRLAEPYPYQLELIRTVPGFAAAPLTAVALISEIGVDMSVFPSAKHLASWAGCCPRNDQSNKKVKSTRISRAGCYLKPLLVQIANAVIKSDRHPECREPYRRIKARRGHKKAIIAVCRMLLTAIWNILSKLEPYSAKGYLADKLTEHSVVISKAEGLALLRKRGYIFKDELAVESG

SEQ ID NO: 258445 - protein, 372 aa, unidentified
MRHHSEAFIGIDTSKLRNAVAIAEGGRGGEVRYLGEFPATEAGTDKLVAKLAAKYNKLTFCYEAGPTGYGLYRRIKSLDHECNVVAPSLTPKKPGERVKTNRRDAVSLARLLRAGELTAVWVPDERHEAMRDLSRARQAAKKDLQGKRQQISSLMLRLGRCYPGKKTWGPAHMTWLRSQKLEQREQRVAPEELLEGVRQEGERVERLEQAIREAVLEWSLAEVVTAVQAMRGFDLIAAAGVVAETGDLSRFQKPREFMGYLGLVPSESSTGDRVNRGGITKAGNGRARRLLVEAAWAYRHPARVGRVKQAKVAAAPRRVREIAWKAQTRLCRRFRLLERKGKRRPVVATAIARELAAFIWAINREVMQGRQA

SEQ ID NO: 258446 - protein, 448 aa, unidentified
MSKVKTKNETVKRISQLTVINPTAAGVDVSDTEMMVAYPINSVQLEVRAFGCYTIDLHSIAKTLKANGITTVAMESTGVYWIPLFLLLQEYGFEVCLVNAKHVKNVTGRKDDESDAEWIQKLHSCGLLRASFQPDNQTRTLRSIVRHRKSLESTCSVYINRIQKALELMNIKVHTIISDIDGKTGLFIIESILAGERNPEVLADLRDKRIKASREEIIKSLQGHYTTEHLFELRQCYQLYRTHRQMIEECDMEIEKQLIEQIASKNGGVIAEIAEVKRKVSKKHKLPFNATSYLKEIFGVDITEVFGISELSALTILSEVGTDMSKWKTEHHFTSWLGLAPNTKISGGKIISSRIMKKKHHAGQAFRMAANGLHNSKSPIGDYYRRLKAKAGAGKAVVATARKLAIIFYKMVACQQNFNPKMLIDFQEKYKQKKINQLKRKLQLLEAA

SEQ ID NO: 258447 - protein, 402 aa, unidentified
MNAVGIDVSKGKSMVAIMRPFGEIVSTPFEIKHTASDIRSLVELINSVEGESRIVMEHTGRYYEVLAHQLSEANLFVSAINPKLIKDFDNDSLRKVKSDKADSVKIARYALDKWQNLKQYNVMDELRNQLKTMNRQFGFYMKHKTAMKNNLIGILDQTYPGVNTYFDSPARSDGSQKWVDFASTYWHVDCVRKMSLNAFIDHYQNWCKRKKYNFSQSKAEEIYGKAKELVPVLPKDAITKLIIKQAVDQLNSASTTVESLRTLMNETASKLPEYPVVMAMKGVGTSLGPQLMAEIGDVSRFTHKSAITAFAGVDPGVNESGTYEQKSVPTSKRGSSDLRKTLFQVMDVLIKTHPQDDPVYQFLDKKRAQGKPYYVYMTAGANKFLRIYYGRVKEYLSSLPES

SEQ ID NO: 258448 - protein, 294 aa, unidentified
MNEELVYLGVDIAKAYLDAAIANEKRRFSNDAVGHRRLIQWLKQIQGPVQVICEPSGGYERALVRALVAAQIKVSLVPANRVRQFARAGGILAKTDRIDAKLLCAFGEAMKPGIISASQLEQEQLRELESQRRHLTHLLVMEQNRAARVSEVCVRKMNRRLITQIKKQIEQLDLLIQEQIAASRELATKAEKLTAISGVGARTAALLLAHMPELGQLNRREVAALVGVAPFNRDSGRMRGKRAIYGGRRSVRHGLYMAALVAARHNPILRGFYLRLRAPGKPAKVALTATMRNS

SEQ ID NO: 258449 - protein, 415 aa, unidentified
MALKIVYKICCGIDVHKTFVVACIASTNSKGVTTYESHRFSTYTKGLRDLLQWLLARNCKDVCMESTGKYWIPIYNILEDDCTIVLAHPKYVKAIRGKKTDKKDAKWIADLFKHDLVAGSFMPPADIRQLRDLMRYRFKLTCFRSSEKNRLQNCLTVSNIQLGNVVSDTFGKSAQAILDKLLENPADTSFDLEPLVFKSLKKKLPELRDAIDGFITPEQAGKLKVIKGHFEDLESRKAELEELILALAAPYQQELAILQTAPGISSVFTAIGIISEIGTNMEAFPSAKHLCSWAGLTPTNNESAGKKKSVRVSKAGCYIKPLLVQCANAVVTSKKHPEIRNRYLRLKKRRGHKKAIIAIARMLLTALYHMLKNGENYNAELYRKSNLPPVDREITVEQAIIIARNQGYKIKSATA

SEQ ID NO: 258450 - protein, 356 aa, unidentified
MNYIAFDSHKRYTLASVCDSKGKILCEKRLEHEQGVLHNFLSQWEAGSPVAVETIGNWYWIIDEIERAGMTPRLTNARKAKLMMGSINKTDKLDVRGLNKLQCVGTLPTVWIPPAELRDQRDLPRTRMVLSRERTRLKNRIHATLTKYRLELTSVSDIFGPKSADKLAEHISKLPVHTRYATEQLLQQLRLVMSQIELFEKRVKDVFKDSEDLKRIMSLPGVGHVLGTVILLELGDVRRFGGAPQFASYAGCTPRVHASGGKIRYGQLRTDVNHYLKWAYSEAANTICLNRKNHPHWHAMRLYTRIAAKKGHQKAIGAVARHLAEATYWMLYKEETYREPKQISGVINREISATSN

SEQ ID NO: 258451 - protein, 387 aa, unidentified
MYYIGIDISKFKHDCAVIDDSGEIITPSWSFTNDSEGFSQLKMLLDSLDEETRIGLESTGHYGMNLKLFLESIGFSFMEFNPLLINRFVKSKSLRKTKSDSIDCMMIAHYLMTVEYKPYPTLLYHTEKLKSLTRFRDSLIRQRSRQLVELTNILDKIFPEFKPFFGGRFSVTALYILSNYSSPEKITNMNSKSYEALRKLSRGRFSTVDFAKLKQLAKTTVGSTEDYLLQEMQIVLELYSQLDSKVDETEVSIKECVLEMNPPMLTLPGIGIESAAVMLAEFGDFSKFNNASQMLSFAGLEPGYFQSGTSETTGKMVKHGSSYLRYSLMNCAQTVVNYEPTFATFYAKKRAEGKPHRVALSHVVKKLLRVIYTLQTKNLAYDSNFVR

SEQ ID NO: 258452 - protein, 431 aa, unidentified
MNESVADQPIGTPQVAAYVGIDWADQKHDVVLRSAGEPAKPEHQVIKSEINALNDWIAQMHERFGAKGKVLVCLEQSRGALIYQLMAYELFELYPINPSQLANYRKTFFSSGAKDDRPDADLLSELVMCHRDRLKAWKPDDQLTRELASLNEGRRNAVNRRTELANEIKSQLKLYFPVALQILENDITTALAADLLVQWQTLAELQKVSPGKLRKFFYGHNSRQEKKILERLALIKEAKPLTTDVAIIRPNALRVKLLAQQLKSLLPFIAEYEKRIAELFGSHPDRFLFDNLPGAGPALAPRLLTAFGTDRDRFEVAGDLLNLSGIAPVRIASGKKTGKNASVHCRRACPKFLRQSFHEFGECSIRYCPWAQACYQAQRGRGKGHHAAVRAVTFKWIRILFACWKQRTPYDPQRYFQALQTRGSDYAQTTA

SEQ ID NO: 258453 - protein, 358 aa, unidentified
MQKYNISFKGQKIFIGIDVHKKNWDVAIALEIGIIKRHTQKPSAKELFDFLKKHYPDGDYLAVYESGFSGFSTYYALKEVGIDCIVIHAADVPTTQYEEVMKSDRLDSIKLVKSLKAGLLKGIYIREKENIDDRAVIRIRKTIQKELSRYKIRVRHILHSNGVQLPDRFEKPGSLWSRAFIKWLKEDVTLLSSTRNALDLLIRQVETIRKTLLEATNMMRYMSQTERYKHKFDLLTTVPGIGVTVAMCILTEVYDIRRFHNEKQFAAYLGLIPTCHSSGEKVIHGEMTFRGNKQMGPMLIEAAWTTISRDAGLGSLYLRYKERMKPQEAIVRIARKLSNVIFAILKNETEYIPYQTGK

SEQ ID NO: 258454 - protein, 371 aa, unidentified
MNSILYVGMDVHKENYTLCCYSFDRDKVEYRQTVPSDYRLVLKYLEQVRRKYPEEVEFICGYEAGCLGYSLYHQLTDHGVKCIILAPTTMGITNTNRVKTDRKDAANIARCLAFHTYSAVYVPDGEDNAVKEYLRMRDDQKLALKKIKQQITAFVLRLGKQYTGGKSLWTENHLKWLRGLDLTLLEKETLQEYLITYDYLTDKLERLDARIEELARNERYGERVRRLGCFIGIKPHTALSLLVEVGDFRRFEKAPNFAGFLGLVPGEDSSGGGRNRLAITKAGNSHLRRLLVESSQSYSRGTIGFKSKELKKRQEGNPPEVVAYADRANERLRRRYYRMTLKNGAKRNVAIVAVARELACFIWGMMTDEIA

SEQ ID NO: 258455 - protein, 337 aa, unidentified
MNFVGIDLHKKTISLCIVNQEREIVDRKRFYCSEPERIVAFFASIKPFQVVVEATASYEWLLALLEPLAERVVLAHPKKMRVIAESTRKSDELDAQILAEFLALDMISESYRPSKRERAHRILVRQRCYLSRRLTSVRNKIRRVLSNYNADREDLFTEKGLAYLSKTSVLEADRFVLDQLTAEWRSYTEQMKEADKRLSSFAKDAPAKEAEARAVLDTIPGVGPVTIDVVISELGDLRRFRSQKRACSYAGLAPGQRESAGRSRQLGITKEGSRLLRWILVQAAWRLTNTTARWRSIFDALVKRRGKKKAIVAIARRLLCVMVSMLQSGRGYKAAMV

SEQ ID NO: 258456 - protein, 297 aa, unidentified
MSPSRTRFIGMDVHKDTMAVAYVAQEHGAEVTSLGTIGTRQCDIDQLIRKRQSKATHLIFIYEAGPCGSWLYRYLRKKDDDCWVVAPSLIPTKAGDRVKTDCRDAMQLARLARSGDLTAVYVPQVQAEAMRDLTRAREDALSDCKDAKFRLKAFLLRHDIRYTGRANWGPAHLRWLSEVVCPTPTQQIVFQEDVRAVQEHTERLQRLEHELHEHVQAWRLSPVVEALQALRGVPCTVAVTVVAEMGDLTRFDTPRELMQFLGLGPAEYSSGEQRRQGTMTKAGNTHARRVLVEGAWA

SEQ ID NO: 258457 - protein, 324 aa, unidentified
MLPSLGIDISKSNFHVELSLGDNKLRHRKFANRKEGFAELAAWLTKHKTQPVHACMEATGPYSEDLALYLQQQGHTVSVVNPAQIKAFGQSELLRNKDDKPDAGLIRRFCEKQQPAAWVPPPAHLRQLQALTRHLENLAETKQQQVNRLESTKAKDVVKSLRKLIAYLDTEIERTEKQIQNHIDTHPDLKEQFELLDSISGIGTRTAATLLGEINFKQYRTARQLAAFVGLTPKNNRSGTFSGRTRLSKIGNQRVRKALFMPAIVAKQHNPIVRAFCQRLARRGKPKMAIIGAAMRKLNHIVFGVLKTGKPFDPEHGNIRALVA

SEQ ID NO: 258458 - protein, 336 aa, unidentified
MSKTYLGVDVHKRFCVFTEIDAEGNLVRRGRFANNFEEVSQFACSLTAKVQLVLEPVLNYLWLLDQIEPYVGSVHVATPHKVRIIAESKSKTDRYDSRVLAELLRINFSPESWIPPYEIRILRGLVRQRYHLVKTMVMNKNRIRHLLFWHGIDIPVFDISSPRALREINRLCCSPVTRKSIHQCLDLITRLKGSIAELDQQLSEMTEGNEIVELLRTIPGIGSVRSVTIYAEVGNIDRFKSSKALTSHTGLIPSVRASGDSIHGGGITKLGSRPLRHALVEASINVIRESPPLNRLFNRVLYRGNVQKARVAVAGKLAVVIYAMLKHREPFRFQAA

SEQ ID NO: 258459 - protein, 358 aa, unidentified
MVVSVGIDVSKDKHDCFVLSSEGEVLADVFTVSNNMDGFHYLLQRIQDCAAPQDNIKVGLEATGHYSYNLLGFLLDNGLATYVLNPLRTNLYRKSLSLRKTKTDRVDARTIASMLLSDAGLKPYTDTAYHNEELKSLTRYRFDKVKERAKLKSSISRLVCILFPELEKLVPTLHMASIYALLEEFPGAKQVAGAHLTRLRSLLETASKGHYKRDMALEIRDVARSSIGSRMPAKSLELQHTIRLIRELDTEIAEIEEQIQSIMDELHSPITTIPGLGFRMAAMILAEVGDFTRFDSPDKLLAYAGMSPSTYQSGQLKNCYPHMEKRGSRYLRYALLQRDQICLSLGSDLCRLPCQEAG

SEQ ID NO: 258460 - protein, 341 aa, unidentified
MDNYAGIDVSLECSSVCVVDASGKIVREGKVASEPAALIAWFGSLGFGLTRIGLEAGPLSQWLYAAMRQAGLAVELLETRHVRDAFKAMPVKSDRNDARGIAQLMRLGWFRPVHCKSMGAQETRAVLTARKLIQSKLFDVEMSLRGILRGFGLKVGPTTPKRFAGRIGELVAGHTTLEIVAASLLAVHEALLREFGNFEKRVRAMARDDGRARLLMSAPGVGAIVALTYVSAIDDPARFKSSKAVGAHFGLTQKKYQSGQTDITGRISKIGDKGVRTALYEAAHIILTRPVKGSALKSWAARLAKRAGMKKAKVALARKLAVIMHRMLADGSRFDFAAAAA

SEQ ID NO: 258461 - protein, 421 aa, unidentified
MNQLTATEYSAYVGIDWAAEKHDICVQAGADGGREFACISSQPEGIDAWARDLYRRFGGPIAVALELSKGPIVSALQKYDFFVLYPINPSTLARYRETFTPSGAKDDPTDAELAVDLITRHPERFSPLKPQSMGMRKLIGLVEQRDTFVSDQGRLVNRLGHALRQYYPQVLEWFSEHNTVVFCDFLSQWPTLTQVKRARKTSLDRFFKSHHVHSAELIERRIRAIKTAMALTADAAVIEPHRLQVEILVEQLRITIKALKRFDGEIAVTAQKLPDYDLLFRPLPGAAKVLAPRLLAAFGEDRQRYPQADALQKYSGIAPVTKRSGKSTWVHWRWQCPTFVRQTFVDWAAQTINKSAWAGAYYRQQRAKGCSYQVAVRALAFKWIRILHRCWQDRTPYDESKYLEALRRKGSPLLKYLAQSA

SEQ ID NO: 258462 - protein, 416 aa, unidentified
MKIVRPICCGMDVHKNIIVATIGITNKKTRITEYIQETFSTLNPDLLNLKQWLINHKCFDACMESTGKYWIPIFNILEDEINIYLTHPKYVKAIKGKKTDKKDSKWICDLFKHDLIKFSFIPPKEIRALREISRYRYKLVGMRSSERNRYQNCMTVSNIGIGSVFSDPFGKSAQAIMKEVLESDIIEDEKILKCIHGSCKNKDKILDSIKHCNIETDQRFKMNESMTHMEELQVHIDNCEIEMMKRAAPMFDQFMHITQLPGISTLSAILIISEIGVDMKQFESDKQLTCWAGLAPANNESANKKKSVRISKAGQYLKPLLVQCALGAIKDKEGYFGIKYSRIKKRRGHKKAIIAIARMMLVSIYHMILTGETFNPSDYESFRNPKPPIKQQDLTEESAIEFLKKSGFDISKLTKP

SEQ ID NO: 258463 - protein, 365 aa, unidentified
MRPISQTTTQKLSHCRRDDATLYASLELSQATWLVTSLSPGSEKMSKYSTLGGNGAALLGLLRRLQVRAEQITGGPVEIVVIQEAGLDGFWVHRLLNANGIESHVVDPASIAVPRRRRRAKTDSIDGETLLRTLLAWRRGEPRVCAMVVPPTPEQEDRRRTSRERAILLQERVRHVNRIKGLLAGQGITDYEPLHKDRRAHLAALKTGDGQPLPLRLKAELLREIELIELLIRQIAEVELERDTVELGAEGNQSPVALLARLKAIGPQIAAVLYLEGLYRSFANRREVAAYAGLVPTPWRSGTIDREQGISKAGNRRLRHIMIELAWLWVRHQPDSALSRWFRARVALSVGGYGVSPLSRSHASC

SEQ ID NO: 258464 - protein, 401 aa, unidentified
MPAVWAGIDPGKRAHHCVVIDQSGEMLLAQRIDNDETVLLEIIATVTEIADGHEVVWATDLNSGGAALLISLLVDHGQQLLYIPGRIIHHAAATYRGEGKTDAKDARIIADQARMRTDLQPVRDGDQISVDLKLLTTRRLNIIHDRVRAINRLRATMLEYFPALERAFDYSTSKAALTLLSTYQTPGALRRMGVTRLAAWLKARGCRNSATVAQKAIDAAREQETTLRTEIVAATLGSRLAAVITAIDAELVELDKTITARFNEHENAEILQSMPGFGPILAATFLANIGGDLRNFENADRLASVAGVAPAPRDSGRISGNHHRPRRFNRRLLRTCYLAALSSLKNSPASRAYYDRKRREGKNHKQALLALARRRINVLWAMLRDHTLYQEPAEIPMLKTA

SEQ ID NO: 258465 - protein, 357 aa, unidentified
MSKSTTDFSSVIRVGLDLAKHVFQVHAIDAAGAVVVAKAVRRGKLLEFFSALPRCVVAMEACSTAHHWGRALNALGFEVRLIPPAHVKPYVRRSKNDAADAAAICEAAGRPGQRFVGVRSIDNQAQLMRHRTREMLVGQRTQLFNALRGHLAEIGVIAPQGPQHAYTLKELLTDGADGNGEILVPDSVRAALAPLGLLIDELDARIAAIDKELKKQAKADATARRLMTIPGVGPIIASAVLASVQKIDAFGSAREFAAFLGLTPRQNSSGGKERLGHITKMGDRYLRKLLVSGACSVLFRRKGHNDALRHWADQLLTRKSGASKFKLVAVALANKLARVIFAVLTHGGEYEARAIAA

SEQ ID NO: 258466 - protein, 313 aa, unidentified
MHLGIDVSKQTLDCCLISDGIFYERKFTNDSGGIAKLQIWLQEHGADSNLHCCCEATGTYYEESAIALARLYKMSVVNPRTIKGFGTAVMNRSKTDRQDAKLIARYCQAMKPEQWQPFTPEHRQLQELVRYIARTKQQRASEQTKYKTAPDFIKPHIQETINHFTQLIDSLEQELQAYYRNNPEQDKRIKTLKSIDGIGENSAAVLCSIITERFTHAKQLVAYLGLDPKEHQSGTSVKGRTRISKIGKSETRAALYMPALVAYRMGAFPDFTARLKAKGKPPKVIIVAIMRKLAVIAFHLLKNGENFDRSRYR

SEQ ID NO: 258467 - protein, 325 aa, unidentified
MSQVTLGIDVSKDTLDVALLEGDKVRFHQVANDSTGFERLGKWLRLAKGKGIHACLEATGQYGDGIATYLYEQGYAVSVVNPARIKAYSASKLRRFKSDKGDAELIAVYCQRESPALWSPPEESVRELQYLVRHLADLKNMRQQEQNRLKSGVTSERVRNDLAAHIAFMDEQIINLTRDIQHHIDQHPDLKHQKELIASIPGIGDLTAAVLLGEIRDIRSFESARQLAAYAGLAPEQRESGTSVRHKTRLAKNGNAHLRKALYMPAVVALRCNPLMRDLRARMEKTGHCTMEIIGAIMRKLLHLAYGVIKTGKPFDPNHAHASPV

SEQ ID NO: 258468 - protein, 386 aa, unidentified
MPQPNDLSRSLAILDQNRTVIAVIEMSQSSWLIGGIVPGIERHPLKKIPVNEEALLQLLQRWRDEAVKAGGTITRIAVAFEAGRDGFWLARWLRARDIEAYVIHPTSVAVSREHRRAKTDRLDTELLKRVFLGWLRGEPDHCSMAAIPTLDEEDARRPNRERENLIGERTRIVNRMQSCLARLGIRAFRPTLRKAADLLASLRTPEGELLPPNTLAEMRRDIARLHFVVEQIKEIEVARRDRLQHAPEGQCSAMVRLLARVIGIGIETADMLVHEVLARNLRDRRAVARYAGLTGSPNESGSRRREKGLARAGNARVRRGMIQLAWRFLMFQKDSALAQWYRARTLDARRGTRKTMIVALARKLLVELWRLVTTGQLPVGVALRAA

SEQ ID NO: 258469 - protein, 312 aa, unidentified
MKIICGVDVSKARLDACIEPGAIFASFDNDTAGIAALAAFCRHHQASLVVMEATGGYERRAFLLLWEAGMPCALTNPRSVRRYAESMGILEKTDRIDASVIARFAHAKNLQPTPAPTPAQQRLKALVARLRQVTDDLTVQKQRRASLADNAEMLASVDEVIALLKRQSRRLEGEIASMIDDDPLWAQLAEAWRSVKGVAGRTIARLMADLPEIGTYSNKAIAKLAGLAPIADDSGKRKGKRSIRGGRASVRSILFLVARTAAKYDKSLAAFRERLLAAGKHKMAVRIALAHKLLVRLNAKARDARAQYANAT

SEQ ID NO: 258470 - protein, 356 aa, unidentified
METAYDGRQVVGMDLHRRRSVLVRMTEDGQRLGTVRIVNTPQALRRELARAGKSPKVVLEATYGWYWAADTLAAAGAEVHLAHPLGVKAFAYRRVKNDARDAADLADLLRMGRLPEAWIAPAEVRELRELTRYRQKLVHLRTSCKDQVHAVLAKLGVPVTCTDIFGTAGSAWLDALALPQPYAGKVTSLRQVAGALTAEITMLSEVIADLVAGDRGYQVIRQLPGIGPVLAAVIVAEIGDVTRFGNAGQLCSWAGLTPRHRESDVKVTRGHVTKQGSRILRWALIEAIQHQPAGSRPREAKDAIIARRGTQARNIAKVAAARQLLTLVFYGLRDGQIRCLSPRSGQPATTGAEPTA

SEQ ID NO: 258471 - protein, 387 aa, unidentified
MQKPHDNSKASPAAFMQDNTLIAVIELSLSNWLVAGLIPGVSREPLKKLEPNPEDLLKLLHGWRDEAIKAGRPITRIAVAYETGRDSFWLARWLRERGIDAHVIHATSVAVSREHRRAKTDRLDTAMLKRGFLGWLRGERGHCTVAIVPTMEEEDAKRPHREREGLVHEQTRAVNRMKSALIQFGVRNFNPKLRKASVKLETVRTPEGKSLPPNTIAALRRDMERLKIIKEQIKAIEQARLQQFEQKPEALANRMVYLLVRIYGLGLETADLLAHELLARTLRDRKAVARYAGLTGSPDESGSKRREKGLSRSGNARVRKIMIQLAWRMVKFQPDSALVQWFKQRTESAKGSRKPMIVALARKLIIALWRYANDGVIPEGFRLHSAA

SEQ ID NO: 258472 - protein, 406 aa, unidentified
MTLDQEPGQVCERVYGGVDTHEDTVHVAVISGDGRDLADREFPISPAGYRRALAFIASYGEPIAVGIEGTSSYGAGITRAAIQDGIAVCEVVRPERAERRRLGKSDPIDAYQAARAAISNHRIAPAKDASIDGIRALHNARRSAMKARTAAMRQIHQQLVTAPAPIREKYRQLGGDKRVQVLAGLQVRSAPAPLQRAVLLALKSLARRCVDLQREHHRLGIELDQLVTAANPGLRAVYGVGPDTAAQLLLTAGGNPARLRTDAAFAALCGASPIQASSGKVTRHRLSRGGDRAANNALYRIAVVRMAGDQRTKDYVARQRQTGFSSKEIQRKLKRAIAREIFRNLTTPVTVPAIDDLRPLRQHKNITLTTAAHHLDVWPTTISELERGTRRNDQLATTYRQWLKTA

SEQ ID NO: 258473 - protein, 342 aa, unidentified
MNHFAGLDVSVKETSVCIVDETCKVVREVKVASEPEALLSVLKKPAYRFKRIGLEAGPPSQWLFSALAEAELSVVCVETRHMQAVLKAQINKTDRNDARGIAQMMRVGLYRPVHVKTLRSQKLRMLLTHRKPLQSKAIAIENDLRGTLRNFGLKVGMVGTAKFEARIKELIENLPDLAVLIEPLLVVRRALREQFVILHRRLLALVRDDEVCRRLMTTPGVGPVVALTYRATVDVPARFRKSKAVGAVFGLTCSKYQSGEIERSGRISRCGDEMMRVMLYEAAQSMLRSKKWSWLKAWAMQIARRRGMKKAIVALARRLAVILHRIWVDGTKFRWTRETAVA

SEQ ID NO: 258474 - protein, 343 aa, unidentified
MEYYAGIDVSLESSSLCVVDATGRIVREAKVASEPEALIAWLQSLGFDLARIGLEAGPLSQWLYAGLKQAGLAAELLETRHVRNAFKIMPVKTDRKDARGIAQLMRMGWFRSVHCKSLPAQETRSLLGARKLLQGKLHDIELSLRGTLRGFGLKVGKTTPKTFEARIRTLVADHPTLTLIAEALLRARAVLLDEFIKLDKKVHALARQDPRARLLTTAPGVGSMVALTYAAAIDDPARFRSSKTVGALFGLTPKKYQSGETDITGRISKTGDAAVRTALYEAANIILERPVKGGWLKAWALGVAKRAGMRKAKVALARKLAVVMHRMLVDGTPFDLNRVTATA

SEQ ID NO: 258475 - protein, 416 aa, unidentified
MSFALPDAQVFTGIDWASAAHAVCVMNAGGKVMAEFTIEHSAEGIATLIRRLARFGDPGGLPIGIERPDGRLVDLLLEAGHPVVPVKPNAIKTWRDGEVLSGAKSDAGDAAVIAEYLRLRYHRLAPAVPYSGETRALRTVVRTRDDLVDMRVAATNQLAALLEAHWPGAKAVFADVESPISLAFLTRYPTPAAAAHLGERRMTAFLAKHSYCGRRPAAHLLERLRQAPAGTTDETLTEALRDAVLAMVAVLAALNAAVKDLDRSVAAHLGEHPDGQIFTSLPRSGQINAAQVLAEWGDARPAYEHPDAVAALAGVAPVTKQSGKHRSVEFRWACSKRFRRAITIFADNSRHASPWAAGIYNQARAAGKDHPHAVRILARAWIRVIWRCWLDGQPYDPAKHGRAAALTQKPASEPAT

SEQ ID NO: 258476 - protein, 342 aa, unidentified
MKITTVGIDLAKNVFAVHGVDVRGKVVLKKPLKREQMLPFFANLPPCLIGLEACGSAHFWARKLQALGHTVKLMAPQFVKPYVKTNKHDAADAEAICEAVTRPTMRFVPIKNGEQQAVLALHRARQGFVKARTAQANQIRGLLAEYGLIIPQGISHITKHLPDILEDGENELPGVFRQLINRLGEHLTELDRQVKELEVQIQTWHRSSEASRKLAQVPGIGPITASALVASIGDARNFDDGRQLAAWLGLVPRQHSSGGKQTLLGISKRGDSYVRTLLIHGARAVVRVAERKASHVGSWLAGVMGRRNKNVAAVALANKNARIVWALLTHDREYQSDCSPAA

SEQ ID NO: 258477 - protein, 432 aa, unidentified
MTTHRLHAGIDFSQKKADFCLLFPDGRPLEQHRSFDNSLPGYSMAKALMIDALETYQFDGLDVSGEATGFLWLPFFNQLAADPDLQAYDLNLFLLNPRWVKWFKKCFPQDDKTDPKDAFYIADRTRTRRPDATWSPQLDTLPLRFYTRLRFHLVQNLAREKCYFSAFLFLKASSYRRLKPFSDVFGVTSRRVLSEYATLDELAAIPVEDLAQTLHEMSGHHLPAPYDNAHKLHKVAAESFPLPDALTLPVHRILDLTLEHIRFLEDQIARVEDWISTEVQPHPTIMNLATIPGVGPVFSCGNGAEIGETQRFLQGLKWDKKRKRYRPRNLRDAEDAVAKLAGLWWPRSDSGDFEAEDRRMAKTGNRYLRYYLIQTANLMRQHIPEYADFYRRKYREAAKHHHKRALVLTARKSVGLVVGLLHRNEAYRPQEV

SEQ ID NO: 258478 - protein, 408 aa, unidentified
MSTTLYVGIDVSSKSNVVYLMLPNGDKHSNFSVANSHEGSTQLVKRIIAALNSHSLDTVLIGLEATSVYGDNLVYFLREDATLAPFNRKIHVLNPRQVKQFHDAYNDLPKNDYVDSFVIADCLRFGRINKEVYIGDYHYKALQNLTRARYFAVQNLTKEKQRFINVLFKKYSTMTQEKVFSDTFSTTALAVYDEFESAEALANMDLQELTDFIIEKGKNRFPDPDAVAKAIQKAARSSYRLPKTVNDSVNQVLSISITSMKALESQIKEFDKAISAQMELLPNVLTSVPGIGPVLSAGIIAEIGDINRFESQAKLAKYAGLAWKQYQSGGFEAETTRLIPSGNRFLKYYLCEAAFSLVRCDKEYSDFYHLKYKEVNRYQHKRALALTARKLVRLVFRLLKDNRLYRSA

SEQ ID NO: 258479 - protein, 332 aa, unidentified
MSNVTTVGIDLAKNVFSLHGVDAEGAVVLQRSVSRAKLLELIVQLPPCLIGMEACSGAHEWARRFALLGHTVRLMAPKFVAPYRKSGKNDGNDAEAICEAVSRPSMRFVPVKSLEQQADLCLHRTRQGFVEERTATINRLRGLLAEFGHVIPQRAVEVRRQVPPLLEQLPARAARCVADLLEHVRELERKIAAYEREIETHARHSALAQRAQARQGVGPITASAIVASVGDAAEFTSGRQFAAWLGLVPRQYSTGGKTRLGHITRRGDGYLRMLLVMGARSVLQRASRERDPLSRWALAVRERRGYHRACVAIAAKNARVVWALLTQARAAV

SEQ ID NO: 258480 - protein, 343 aa, unidentified
MQAVSTIGLDIAKSVFQVHGVDTEGKVVVRQQLKRGRVVPFFRKLPPCVVGIEACASSHHWARELQALGHTVRLMPPAYVKPYVKRQKNDAADAEAICEAVQRPNMRFVPIKTSDQQAGLMLHRSRHLFIRQQTALINSIRAFLAELGIVAPVGRNGLEELLSIISAGKNTRIPAPARTCLIALQIQLNALREQIRILDRRILGWQRTDETAKRLGALPGVGPALATALVASVADPKAFRSGRDFSAWVGLVPKQNSTGGKDKLGSITKQGDRYLRSLFTVGALSVIKYAKIHGTKHRPWLARLLERRPTKVAAIALANKLARMAWAMMATGERYREPIALAR

SEQ ID NO: 258481 - protein, 466 aa, unidentified
MENNYILYVGMDSSKGKADAAILKVSDRRSVKPKFLRKKLSFKFVKSEVTSFLETVRSYSDDNCTSICFALEVTGIYSTNVYNFIKDNLNDNESIKFLNTDFVNQWRNAHNIAKSDPLDAQTISTIIGTDPDVQYVNDNVFENKNGYQDLKALVHRHYQIKKIYSQEINRLIAQCDCLFPELQYVFEPKSAAFIAVLSSYPTTHDIINASRLEVFNVVYEATKHRCSMDKIDKLFDLCHDTLVPDNISSYGRSIILDLVENIKNIKGQLKMIERYIRDVASLNPAYKLLLTITGCGPLTAATVIAETGDIKRFKNADCFVSYSGTSPRNKRSGTSVETMGKISKKGSRYLRHAIYMIAEFARRHNPVLKHQFERIKNGNKKRHKLANIAIANKIARYIYSIMKNESGFVIFHEHIMRLPEETQNTFFNSISLDFPKNTRKQIYQYSDINGEVHKFVYTKLEETMII

SEQ ID NO: 258482 - protein, 362 aa, unidentified
MTKISKLARRMETGKNKPEMTMGIDVGDRFSHLCLVDNEGEVVERDRVRSTEAAFEKYFEGAPRLRIALECGTHSPWMSRLLKQLGHQVIVANARKIPTITESESKNDDRDAEQLALMAAFNPKLLSPLEHRSLARQQDLNLIQARAILVKARTMIVNALRGLVKSAGGRLPACSARSLPTRAPAAVPPALAAVAGPLIEQIARLNMQIDAMDEQIEKLAIKYPEIGTLRSAPGVGPLVAAAYVLTLDRPDAVASSRSAGAFLGLRPGQSQSGDSDPQKRISRTGNTYLRCLLVQSAHYVLGRFGPDSALRRWGLKLAASGGKRAKKRAIVAVARKLAVILHSMWRSGQRFEFFPKPAQAQA

SEQ ID NO: 258483 - protein, 340 aa, unidentified
MYYLGIDHHKRYSQVAVVDEKGTVRTNGKIANEKKAFALLKEYYKEPCRAVIEAGRNWGMMYDLLEELDIKTVVGHPLKIRAIADAKIKSDSIDAKTLAHLLRADLIPQVHVPSKEVREQKNLLRHRLWLVRLQTMTKNRIHQLIDRNHVKRPKVKNIFGVAGRTFLEGLNLSLIDQKLLKDHLKLLDTLHQHIRKTEVWIGKELKDNPYISILLSLPGFGKVLSALAALEIDNINRFRTPAKFASYSALIPSTFASGGKVYHGDLIPGGNRWLKYVFIEASWVSIRTSGYCRFYFEKMKDRKNSNVAIVALARRLSEIAYRCLKEKRAYEERPYMPYTR

SEQ ID NO: 258484 - protein, 503 aa, unidentified
MATPTTRRKPASATGGPHAQAQADRPPAQRRKTRAPPKSEAPGPGAAPHVEALPVQHAHAAGIDIGSRSHWVCVGFTTDTDSRSIREFPAHTAGLKAIAAFLREHQVDTVALESTGIYWIPLYELLQAEGFEVLLVDPSYSHQLRGRPKTDRRDCQWIYRLHSVGLLAAAFRPDEKTCQLRAYLRQRANLVRQASRHVQHMQKALEQMNLKLTEVLSDITGLTGQAIIRAILRGTRAPEKLAKFRDKGCKASAEEIAQALTGSYREEHLFELKLAHEAWQFTLRQIEQVDRQIALQLGRMKSDRALPPLKPKPRPKRRANSPRFDVRAALYYVVGLDLTEIEGISELTALTVISEIGPGVSRFATVKKFCSWLGLCPNWKKTGGRVKSSRTRRGVNRAAQALRVASQGLHHSKGALGGFLRRMKGRLGAQAALTATAHKLARIVYQALRHGLTYVRRGQEEYEAQMKQKQLKALRRKARQLGLEVVEKTSGRVPTATATPAQG

SEQ ID NO: 258485 - protein, 440 aa, unidentified
MQVGLSCTCPYDTQETESAMDNRWYHVNLSDWRSLIMFNAVGIDVSKGKSTVSVLQPGGTVVKKPFNVVHSSRSLNDLSRFILHLDGQTRVVMECTGRYHEPILHALHDAGIFVSAVNPHLIKNFGNNSIRKVKSDPADSRKIARYALDNWASLRQYSDMDTTRTQLKTLNSQMDFFTKQKVAARTNLISLMDMTYPGVNSLFSSPARDDGSEKWLDYAESFWHVDCVRKIGLKAFTERYQAFCKRNGYNFQPGKPEELYLASKELVAVYPKDKVYKDLIMTGIEQLKSTTRHVEHIRHEMDALASTLPEYETVLSMRGVGKTLGPQLMAEIGDITNYTHREALTAFAGVDPGVNESGSFRSKSNPASKCGSSRLRKTLFLIMTSLLQTSPADDRVYQFLDRKRSEGKPYLVYMTAGANKFLRIYYGKVKACIASQSKAE

SEQ ID NO: 258486 - protein, 465 aa, unidentified
MLVRKSLSPPRPPSPAALESLPVQHRHAAGIDVGDRTHWVAVAATPDGSPTTREFPAHTPGLRELVAWLRQCGVTTVALEASGAYGHVLYLTLVEADFGAVMTSPAFTRQIKGRPKTDRLDCQWILRLHTHGLLPPVFQPDDATQTLRAYVRQRGNLVRLSGQYVQRMQKALQLMNLKLTAVVGDVTGVTGLKILRAILKGERDAKQLAKLRDRRCQCTVSEIATALDGRYRPEYLSELRSSLAMWEKHLEVIAELDAEIQSHLLTTRRPSALPPLAAKPRVRGRKPHDPKFDVRTVLYYATGVDLTAIEGIDEIHALTLLSELGTDMTKWPTVKQFASWLGLCPQFQKTGGKVKSSHTRLGKNRAASAFRLAAWGLMRSTSYLGAYLRRQRSRLGAPKAITATAHKLARIVYNLMRYGVAYMKRDEEAYAAQVRERLEKNLHRRAKELGYEVKKIELPSEVASP

SEQ ID NO: 258487 - protein, 344 aa, unidentified
MLYVGLDLSRKRLDWLALDEEGELAEAGAISPDRDGLAKLGRRLGDQAVLAVIESMSGARFVHDRLELAGWDVRIADAAKARGLAPLACKTDRIDCWVLAELARRQLVPEIWLPDPRVRAERERARFRLHLVKHRRSLKNRVHAILFQHGLPSPHRDLFGAGGRCLLERLQLPEPWASTLRASLVLIDRLDQQIDDCERELRRLGVDHAYVPLLTTVPGIAWVLGYTIASEIGDIGRFASPRKLVGYTGLTPSVEQSGERDRRGPLRKNGPNYLRWALIEAAHTAGRDPRYRPIVERMRARHGRTRGSKIAAIEIGRRLTEAIWHMLTNDQPFAPAGAPTPVAA

SEQ ID NO: 258488 - protein, 340 aa, unidentified
MSEVSIIGVDLAKRVFQVHGALPDGKVAFRKKLSRSQFMKFLAEQPPCLIAMEACATAHYWGREALGSGHEVRLIPPIYVKPFVKRQKNDAADAEAIVEAALRPTMRFVEVKSADQQSLGLLFRTRELLVRQRTQLINALRGHLAEYGIVVAIGVRNVKVFQQALLDHGTRLPKTVLSISGVYFEQIAALTEKVTELEIALRRETARDGQATLLQTMPGIGPMSAAAIQAFAPPLENFARGRDFAAWLGLVPRQHSSGGKDRLGRISKMGQRDIRRLLIIGAMSIVNWASRKGSRDSWLMRLLESKPKMVVAVALANKMARRLWAMCVKKEVYEIPILVA

SEQ ID NO: 258489 - protein, 417 aa, unidentified
MAEEIEWFVGIDWASQTHQVCLVDAHGECLGERAVAHGGPGIEKLCDWLITRTGATPEVIGVAIEMTQGPIVEALLERGFCVYGINPKQLDRFRDRFTVAGAKDDRRDAHVLGDSLRTDRHAFRRLSNDEPVIVKLREWSRMADDLQQERNRLASRMREQLWRYYPQLLELADDLAADWFLDLWSRAPTPAMAVRLRETTIERFVKAHRLRRWQASEVLSILKQKPLSVAPGVVEAASDHIRTLTVRIRLVNQQLKAAHRKLDELCAQLIPSEEDEPGQQCEQRDVVILRSMPGLGRIILAVLLAEVWQPLRRRDYHALRSLSGVAPVTRRSGKTRVVVRRYACNKRLANALYHWARLATQHDALSRRRYAALRRRGHSHGRALRTVADRLLSVACTLLEQQTLFDPTYEVRDAASG

SEQ ID NO: 258490 - protein, 322 aa, unidentified
MAQNDLVVAGIDVAKDKVDVCIRSLSLRRTFASTAEGRRELTSWLRRQKVGKAVMEASGGYEREWAKALRDAKVEVRIVDPKRVRSFAQSAGRLAKNDTIDAEMIAWFAETFDEARGQAYDATREQLHQMVHARQALMEMQAKLENQGEHALPAAVERMHARILKTIAVELVKLEAAISAMVQATPHFAGLAEIIESVPGLARNTSAALIAGMPELGQANDKIVAALLGTAPYDDDSGRRRGERHIKGGRRRTRNAFYMACLGAATQHNPVLKAFYDRLVAKGKEKKVALVACMRKLICILNVMITRRQKWDPSRYRLSERT

SEQ ID NO: 258491 - protein, 465 aa, unidentified
MQNSYELFIGIDVSKNKADAAIIKLYRDRSRKPKLLRKKIAFRFLTSEVDAFLSTVRKYVDDNCTHVTYAMEVTGTYSDNIYDALTSNKLEIEDVFLLEARYVQNWCKTHNRPKSDPLDAESIASIIAFEYDVKFVSKFDSSNEKGYTDLKHLVHRYYQLKKVLTQEMNRLIATCDRFFPELQYVFKPKSAAFLAILSVYPTTYDIINATKSEVFDLVFQATKHHVSMDKIDSLFDYCKDSLAPMVVSNDISSLILNQVSSVYHLRANLHEFEKLVKATASQFVLFDILQSMPGCGAITAATVIAETCDIKRFSSADNFVSYAGLAPVNKRSGSSVEVLGKISKKGSKFLRHALFMIAEFARRHNPILKHFFEIKKNGNKKRHRLAVVAVANKVARYIYSVMKHNSEFIILDSDLSRLPEDTRNSFFQNISFNIPKNNRKQVYRFCDCNGKISEFVYNSKDINEE

SEQ ID NO: 258492 - protein, 427 aa, unidentified
MPYHIAGIDVHKKMLAVAVADVEVEDDYHFERLKVGTSPVQLRALADWLVEREVDEVVMESTAQYWRPVWEALERYWRPKRRMRTNASPLSGTLHLAQAQSNRAAGGRKRDFPDAERLVKRLVAQELTLSFVPDAEQRLWRTVMRRKYQITRSRVQLHNRLESLLEEAHIKVSSVVSDLLSTRARRKLNAVGEGETNAAALAALADQRLRATPEQLRDAFGACADLHPVYRRLVKLTLDELRLIEDHLAQLDQQMARLLAHHHDAVQRLAEVPGLGVDSAQQIIAEVGASAAAFPSAKQLASWMGACPGNEESAGVNYSHRCPKGNRQMRRVLSQAANAAVKAKGTIFAIVYRRLVPRLGHAQAIGAIAHRLCRLIWKLLHQGIRYEERGPAVSQEAKKVRARKMIRELRSLGYRVELLPAPSNSPA

SEQ ID NO: 258493 - protein, 411 aa, unidentified
MEAAVITAVGIDVSKSKSTVAVRRPGGEIALRPFEVHHTNSDLKKLASTLKKLGGDIRIVMEHTSTYWRPIAPTLKEAGFFVSIVNAMLIHDFSDNTIRKLKTDRADALKIANYALTFWDTLPPFNNEEETRLLLKMQSRANERITATATALRNGLIALADQTFPGVNIAFAPNTKNANGHEKWVDFFLRYRHKDCVCQYSMEAFTESYRGWCKRKNYKFRTDTAHKIYLLAQEGVATLPKCESTKMLITQACKSLNAVCEAKQSTQLEMQRLAAMLPEYEVVMQMEGAGPITGPALMAEIGDVRRFKNKKALVAFAGIDAPPFQSGTFESKSRHVSKRGSPHLRRTIFIVSNIILTRSNPENAVYCFMDKKRSEGKHYYVYTVAGSAKFLRVYYARVTEFLRSKPSPDAC

SEQ ID NO: 258494 - protein, 434 aa, unidentified
MTASDSTARPCNLVAIDIAKAKHDVLVELPNGKRRKMIVRNQLSDFRQLVAYLKRLDGALEIALEPTADYHRNLAYFLKAQGFAVNLVSSIAVARTREALHNSWDKNDPKDAQVILHLLRNGNTQYFYDPVIEQTNDLQELSKTHFQVSLRKTRVQHSLLNHYLPLYFPEAERFLSNSRSSWFARLLLEFPTPQAITQLTENEFLERASRLLKRKQSKAAILRALYAKAQESVALPVSLESQAIATFRLTLAQHLELCRIRTELEETAHELLQDQLDYQILRSVPGVGPIIALTVLAEAGDLRRFGHERQFLKFCGLDLATSQSGAYRGRTQLSKRGNSRLRSALWMAARRATHMQENTFRQKFSRYLRADTTNTDLRRKAYTACTAKMARTIYGLIKHEQFYRAYREDAIPEPGGRTRSHGPLRQAASGGLTS

SEQ ID NO: 258495 - protein, 458 aa, unidentified
MQLLYRRCAGLDVHEKSVTACIRRRGKGSSDVECEEAVFGTFTQELLRLRKWLRQHGVREVVMESTGVYWIPVWNVLEGPGLHLMLVNPATVRALRGRKTDRIDARRLAEYLQYGLLNGSFVPSRHLRQLRELTRMRVHVQQDRNRIINRIGRLLETVNIKLSAVASNIVGASGKAMLRALAAGVRRPETLANKALGVLRSKIPQLTAALEGRPDAHFEWMLNRLLEKLDWLDIELAGIDQQLDERMRDYADLIRRLDTIPGVDVIVAQAIIAETGTDMTQFPDAAHLASWAGLCPGNAESAGKRFSGRTRKGDRYLRRILVQSAWAAAHTHGCFLQNLFFRIARRRGEKKACVAVAHRIATIIWNIIRNGEIYKEAGGDFFDRIHPERTARKLTRRLEHIGFEVEIKRRPIDPVPPDQVVPADVCGKCHGWRLGHCIHHNPHPKRRRTPRKPLQSEG

SEQ ID NO: 258496 - protein, 340 aa, unidentified
MSLHGGIDLHANNSVIVLLNEQDEVSYQKRLPNDLTTILGQLAPYRTEIKGLVVESTYNWYWLVDGLMAADYRVHLANPAAIQQYNGLKYTDDLSDARWLAHLLRLGVVPEGYIYPKAARAVRDVLRKRAHLVRQHTANVLSVQNIMTRNTGARFSGKRMQELTKQDLTTLLTDETQVCAVTSSLVVLDCLRQQIKTLEKIVHKRLHDTPSYEQLLTVPGIGPILAQTITLETGAISRFPTVGNYASYCRCVDSQKISNGKRKGTGNVKNGNPYLAWASMEAAQFALRFQPAAQRFYQRKLAKSRNNSVLARKAVAHKLARACYYMMRDLVPFEERKAFG

SEQ ID NO: 258497 - protein, 391 aa, unidentified
MIYIGIDVAKDKHDCFITNSEGEVLFNAFTIPNNADGFHDLFQKISSLTNDFSNVKVGLEATGHYNYNLLGFLIDKGLPTFVINPLHTNLFRKSLSLRQTKTDKVDAHTIALMMMSGVNLQSYSNTSYHNEELKSLTRYRFDKVQERAKLKTSISRLVNILFPELEKLVPSLHMVSIYALLAEFPSSAQIASCHLTRLTNLLANASKGHYNKEKAIEIRNAAKHSIGSNMPAKSLELKHTIRLIQELTSEIDEIECSIKSIMDEIPSPILSIPGINYRMGAMIIAEIGDFNRFSSPDKILAYAGLSPSTYQSGQLDGCYSHMEKRGSRYLRYALFNATKFVCIWDNQFSAYLAKKRSEGKHYNVAISHAAKKLVRVIYQLEKSGQLYHRAA

SEQ ID NO: 258498 - protein, 344 aa, unidentified
MKIAVLGIDLGKNVCSVVGLDASGAVVLRRRVRRDTLIGLLANLPACIVGMEACCGAHHLGRLFAAQGHDVRLMSPEYVRPYVKAQKNDDRDAEGIAEAATRPTMRFVEVKTEDQLDMQTLHRSRERLVGERTALINQLRAVLLERGIVVPQGKRKLEQYLVIMMNEHDGEGLSARMRMLVADIRAQWQDLDRRIGAFDAEFGRWTKENEDARRLATIPGIGVTISTALIAAIGKAETFEHGRDLAAWLGLVPRQSTTGGKPRLMGISKRGNKYLRKLLIHGARAALPHIAEKDTALGRWAKSLLSRVHQNVAVVALANKLARICWAVLRSGQKFAAKGAPLVV

SEQ ID NO: 258499 - protein, 318 aa, unidentified
MAKTFVGIDVSQKQFDVHIRPLKLARRFDNTKEGIAELLTWIRPYAAERIVCESTGPYQKLLVGALLAENFPAVVANPRQVRDFAKGMGQLAKTDAIDAGILAHFAELVPTIVRPLPSKELSELRELYDRRGQLVRMLASEKNHRHAAANGLPKVLKNIDKHIDYLEAQIEKLEQRMNEIVETSEAFKAQNEILQSITGIGPQVSRTLIAYLPELGKRTRQSITALVGLAPYPDDSGSHSGTRHIRGGRSKVRIGLYQAAISAIRHCPTMRAFYVSLKARGKMPKVAIVAVARKILVLANALIRDNRPYQPQPANSVC

SEQ ID NO: 258500 - protein, 427 aa, unidentified
MKQEAPEQQEFGAYIGLDWADRTHVISLRGTDSGKVEHYQLVHKPEVLAEWVSDLQRRFPGQRVAVALEQARGAVVHALMGYDFLVLYPVNPKTLAKYREAFSPSGAKDDPTDADLLLELVTLHRDKLRAWLPDDELTRTITLLVEYRRQLVATQTSLSNRLTSLLKLYYPQALAWAGELTTVQACDFLQRWPTLAQVQQAAPAKLRQFYLAHGCRKADVIEQRLQEIKLAQPLTRDGAVITASVLMVQATTTQLRPLMEAIARMEKQIAELFRQHADHELFSSFPGAGPVLAPRLLAALGADRGRFAAATEVQQLSGIAPVMERSGKTCWVHRRWACPKFVRQSFHEFAGQSIRWSTWARAFYDQQRQRGNGHHAAVRSLAYRWIRIIFRCWQMRVPYCEETYCRALQRRQSPLARVLAAPMQNAS

SEQ ID NO: 258501 - protein, 408 aa, unidentified
MKVMHRRCAGLDVHQKEIVACRRRVVGRKVEVEVRRFTTTTAGLLELADWLAEGKVTHVAMEATGVYWKPVWHILEGRFTLILANAAHIRNVPGRKSDVNDATWIADLVAHGLIRASFVPPQPIQELRDLTRTRTELTREMVRHTQRIQAVLEEANIKLASVISDIMGGSGRRILKAIAAGETDAGTLAKLGSLRLKASRDELVAALTGCIRDHHRFLIAQHLQMIERIETAIADFDARIEAALAPFRDAVKRLIDIPGLSMTSAQIVLAEIGADMGAFPTADHLVSWAGLCPRLDESAGKRRSTRVRKGAPWLKPVLVQSALAAGRAKNSSFKARYHALKARVGPKKAAIAVAANLLRVIYHMLKDGTFYQERGEAYRRPHNPARAAANLANRIRALGYQVEIRQAA

SEQ ID NO: 258502 - protein, 344 aa, unidentified
MKKVLIGIDFSKEKFDVAIIVKSTSTQEHALFDNKVSGYRKMIKWVNSVVEDVPCSSWLFCGETTGGYSRMMSDWLYAQGYDVWIENALVIKRTFPLKRLKNDTVDAFMIAEYALRFEDRVQLYEPMSQALTELREIFLYRHHLVRHRCSFEVRRIEKRFTQQKSANKNVISQSARHIITEINKEIAKCDEKIKEYIESDDQLSSIFAIVTSMPGIGTINAVSLMVYTNNFTKFAYNPRKIACYYGIAPFGRDSGTSVHTDPRVGFIANKMLKSLLTQAALASVRTCPQIAKYYQRLIERGKKPMVALNNVKNKMIAIITAMVRTGCMYQPDNICLATQSVNVK

SEQ ID NO: 258503 - protein, 320 aa, unidentified
MRMLPSEGCWVGVDVSKATLDICVSHPDQALSVTNDSAGIQTLIGMLHDLHPTLVVLEATGGLERAVVAELLVAQLPVAVVNPRQVRRFAEALGYLAKTDRLDARVLAHFAAAIQPPTRALPDAQTQALAEQVARRRQLVEMLTMEKNRLLQTPYAAVRQDIQAHIEWLQQRLKNTERGLRDAVEASPAWQAKADLLREVQGLGEVSILTLIADLPELGTLNRKQIAALVGVAPLNRDSGTLRGRRCVWGGRAEVRQTLYMATLSAVRYNPILRAFYTRLRNAGKMAKVALVACMRKLLTILNAMLRDQAPWDEHHGKTA

SEQ ID NO: 258504 - protein, 335 aa, unidentified
MKKYLFHVGIDISKLKLDVVLLQTESSKVVEHFIVENTQKGIKILMNHLQKKKIDLSNTLFCCENTGVYTFPLSIYLSEKSLDYWVVPAIEIKRSKGISRGKNDKTDAKDIALYSLRNIDKLKLSTIAEKEIQQLKLLYSEREKVIKSIGLFGMATENKDFIPNDVYKVIASLNAKTIKALKKSLKDIESKIKEIIKNNNEFKHQFDLIKSVPGVGEQTAIYIIIATKGFKTFDSARKFACYSGVAPFEYTSGSSIRGRTKVNHMADKKMKTLLQMCALTAIKYDPQLKEYYNKKKKEGKNNMLVLNNVRCKIISRVFSVINRQTPYIDTYKFAS

SEQ ID NO: 258505 - protein, 429 aa, unidentified
MTNSQSTPEAVVWVAIDVAKDYHEALIEAPGWKNRKRFRIQNTAEEFRAFADFLHRLGFRVCIGFEPTGNYHRALAYFLHSEGFHLELISSLALARTREAMHNSWDKNDPKDSQVILHLLRAGLTQHYHDPIVHNLNDLQELSKTHHHVSLEKTRTQHRLLTHYLPLYFPEIARYHSSSRSEWLWNLLVEFPTPRSMTCLPATEFVRKAWNLVGRKVAKERILSDIYRTAQSSVGLPVQEDSETVAMLCFVLRQLLALGQLRDTIEERADKLLAPNEDYQRLRRIPGIGPIAALTILAEAGDLRRFSHHRQFLKFCGLDLATEQSGQFRGLSRLSKRGNARLRAVFWMAASVAVRMRENSFRAKYERYMRNDPGSADRKRKAYVAVAAKIARVAYALIRSGADYRCFHEVAVPSGRTRSAGAVEAISTS

SEQ ID NO: 258506 - protein, 354 aa, unidentified
MRDEQKPVSEAVVWVGVDVSKSTFDAALAEGGQGGCQPLGKLPARCFSRSPEGVAELLAWLRASGVAPESARVVMEATGRYSVEMAAWMAQACPPLSPAIESPRQTTAFIKSLGLRNKTDRMDARALALYGVERRPRAYQPPPVSEGELRELVRYRDFLVQQKVAAGNRAEEMRDSKFIQREMRRQIRQLERDIEKTEKEMARVKQATPELENDIALMTSIYGVAFLTAATIRAELGDLRRFEKARQPTAFAGLNPSLRQSGSSVRGRTHISKAGNPRVRRALYLSAMVAVRGDNDFRHDYERLRAQGLSKMAALCAIMRKILVLMRALLISGKPYVPLWKNRPQLQEKMFLEA

SEQ ID NO: 258507 - protein, 279 aa, unidentified
MLHVGLDLGRKRIEVCLISDQGELVDRFAAIPDRDGLHGLARRVAAYGEPVRAVVESMNGARFVHDELTAQGWEVLIADAQRVKGLAPLACKTDKIDAGVLAELSFRDLVPAIWLPTLELRREREISRWRLHLVKHRSTLKNRVHSTLITFGHQRHMSDLFGVAGRRLLGELEMPEPWRSHVDASLVLIDDLEARITQIVKELRRSGADHPHIPLLMTAPGFGWITSFTVACEIADVGRFSSPVKLTGYTGLCPRVKQSGQMDQRGRCPSTAPSICAGG

SEQ ID NO: 258508 - protein, 444 aa, unidentified
MAVRKKVVLELAHPNAAGIDIGSASHYVAVPPDRDDEPVREFKSFTEDMERLADWLKACGVDTVAMESTGVYWIPLFELLDARGFTVFLVNARHVKNVSGRKSDVLDCQWLQQLMSFGLLSGAFRPKDEICALRAVSRQRDMLLSYQARHVQHMQKALTQMNVQLANVISDIVGETGQKIVRAIISGERDGAKLAKMKNVRIRASEADIAKSLRGTWREEHLFALKQAMALFDAYGERLAECDRQLEAMLSALHRDGAGEPGTARRRGRAKNAPGFDVRSHLFAMCGVDLTRIDGIDTTTALKVIAEVGPELSRFKSAKHFASWLGLCPGTKISGGKLLSGATKRTANRAAQALKLAAAALRSSHSALGAYFRRMASRLDRAKAITATAHKLARLIYTMLTKGTEYTDKGQDYYEERYRERVMHHLTKRAKQLGFQLTPIPETV

SEQ ID NO: 258509 - protein, 429 aa, unidentified
MNVVTERLKLFKQMKASVRGSEKYLLVGVDVAKNSHHAFFGTPNGRTLQKNLVFDNSIKGFENLRTLARDLRNQHGLDDVVYGLEPTASYHKPLAEYLIRQEEHVVYVSNVAVAKNRALLDGRWDKNDKKDAANVADLVGQGRCLYYDVPDENLRVLRSLIAFRIRMKKEEHALRMRLRNNVFAQYFPELDKLYIRAGQPDDVVLAIAQHCLDPREIAGMEFEAFLKLIMTRTIRIEQEKRLRELWLIAPLSAGCRVHDAAKWEAQSLVTQLKAVRETVKDTEHRMAQAAQHFPEYACLLSIPGFGPIVSAMVLAAIGNPARFENRKQVLRLAGLDLSASRSGKNSDSATPVISKQGKAALRYALVQAASVASALTPNIRSYYSNLLKGRELERGIKLKMKVKLAAKLLIVAWTLMKRKEYFKTSCFSG

SEQ ID NO: 258510 - protein, 330 aa, unidentified
MTIVDEFNACITGGVDTHLGSHVAAALDAKGGLLGVEHFDAGRAGETRLIAWLHELGPIDRVGVEGTGSYGAGLVRRLRAAGVSVVEVDRPNRQTRHRKGKSDPVDAIEAARAAQGGRATGLAKSRDGNVEAMRALLVARRSARSSRIKAMTQIRHLGFCGPDELREHLDGVSAIMLGRTAAAVRPTEGSRNLAMHATATSIRILGRRVESLEAEIEMLEHVLEQLVRETAPSLLALYGVGVDTAASLLVAAGDNPERLRSEAAWANLCGVAPLEASSGKATRHRLNRGGDRNANQALWRITLCRMASDNRPTWSAEPLRAKASGRSCES

SEQ ID NO: 258511 - protein, 421 aa, unidentified
MPHLAPEAFAAFVGIDWADAKHDVCLQAVGSTTQECSPLDHTPEAIDAWARALQERFAGRPVAVGLELNKGPLVYALRKYDFFVLFPINPGALAKYRAAFTPSHAKNDPTDAELQLELLLKHRDKLQPLNPQSPAMRALAQLVEHRRRVIGDKVRVTNRLTSTLKNYFPHGLQWFEDKDTLLFCDFLAQWPTLKAAQLARRTTLADFFRTHHVCYSNVIDRCIQAIKRATPLTTDEGVIVPHALLVQALVAQLRVILQAITDFDHAIAPRAQSHPDFSLFAALPGAGAVFAPRLLVAFGEHRERYASAEERQKYAGIAPVTERSGNKTWVHWRWQCPTFLRQTFVEWAAASMRHSFWARVYYQQQREKGKSHQAAVRALAFKWIRILYRCWQERTSYDESVYLQALHHRGSSLIQKLAQAS

SEQ ID NO: 258512 - protein, 353 aa, unidentified
MNSLTDLREVVDVVIGVDTHVHTHSAAVVDAATGGVLAEITVEATAEGYSEVVEFANNHAMLRAWAIEGTGGHGAGLSRHLLESSEIVIELDRPKRSARRNGAKSDPLDAIRAAREAMARPRLGTPRTGGERQALSVLLAARRSAINASTEAQQQVFSLVIAAPEPLRLRFRGQKLAAMLNTAANLRMHASWDTETTSTVVALRTLARRAHAMLKEARELQKAMVAIIRGWRPDLLEEFGVGPIVAATVLCAWSHPGRIHSEAAFAMLAGVAPIPANSGQVTTRYRLNPYGDRQLNNALHTVVQSRIQYQSATRDYVARRTAEGKTGREIKRCLARYVARDLYRLPENTAATA

SEQ ID NO: 258513 - protein, 526 aa, unidentified
MSRRVGIDLALRGAHKAVVLDGTRAVGRPFTVSMDRTGMVRLLERAMAGVSEVSEFVLEPTGNAWLIPSAWLIGRGQRVVIAQGKKTSDLRKFYRKHVKSDVVDAETMGRLPELDPRGCHRLAMPSAAVLSLRRLVKQRERFVRQATASKQRVLAVLELAHPHLLAALGGDKFTSAARAFLGRYLDPFRVKRLGQNRLGAFLARHNRGRRDPELAERVWEACVRTWELYGELRDACRLPCDYEQLQDEVNRELQALAFAEDTVAGLEEKIQELYIQVDPAQSLRQLPGIGPTIAPSIEALVAGVGRFRNARAFVSYCGLCPRHNQTGLSRREGMPMTKAGQRLLKKHLYLAAEVARRRDPVFAAKYAAFEARGKHHSQIVIALAHMLARRAYAVLKRRDAGRLDSVPYELRATDGQPINVADATRLIAERYPSKRERQRRAQETKAVSKSSPGPDSEGGSAAPAYSGQSEDSTIQAYDTLPLRAILDELRRRTDGRTTASDLACGKTGDDVRITRTGDDQNRLDKT

SEQ ID NO: 258514 - protein, 408 aa, unidentified
MLNPVSLQLRVGVDVGSRCHTVAIGLSDGSLLEEFEISHTQAGFDEFFARVEACNRRHGVPIAVAMEGYNGHVRPLDTLVRARGWQLFNVNNLKLARFKEIFPAAAKSDRVDTRKTLELFQLRDHLPMAREVLQEVMATPEENDVLKRLSRRRRRLVNERGRVASAMQSDLQAVCPGLLEITRSAGNLWFVNFLTCRKGLRKLARVRRDSLLKVAGIGASYANNIMAWQDCAYFAPDADLVGEMIQQDAARILELKQQIKALEAQMAQVAKRSAIAGRLASIPGFGAICSAELAGEIGTLERFRGEASLALYLGMATLDNSSGKSRRSKPPRHVNTRAKAAMMIAVDTHRKLVPQSQRYYEKKRAEGKRHNQAIRALGRHLCRVIFKILAQDRAYRTDLPPQAAGKIT

SEQ ID NO: 258515 - protein, 413 aa, unidentified
METGQKGRIQTRKENIIYVGIDLHKETHTAVMLDCWNQKLGEITFENKPSEFHKLTKKVSRFVTEEKTAVYGLENAYGYGRTLAVWLLEKGHAVKDVNTALSYAQRKSVPMYQKSDSYDAEAVALVLINMLDKLPDAVPDDAYWTLSQLVNRRDNICSHQQRLKNQLHEQLCVAYPSYKQFFGDISRRTALYFWLKYPSPEHLKGKSAEELAAELRSVSHNNCSVKRAEKILELVRMDGQTTREHQASRDVITRSIAGDLEHYREQLEIVETAIVNMLPSFNCTLMTMPGVDVTTAANMLAEIGDINRFPNANKLAKFAGICPIYFSSAGKGKDMCPKQGNRRLQAIFYFLAIQMIQVSTNGTPRNKVFREYYLKRVAEGKNKQQALICISRRLVNIVYGMLKNHTEYREPGQ

SEQ ID NO: 258516 - protein, 425 aa, unidentified
MNYKQNEKINQVKESTLVVGIDIGSTTQYARAFDWRGIELGKVFTFSNSREGFESFKSWMQHLQDKYRKSDVIVGIEPTGHYWFDLGAYLEDEGILLVMVNPYAVKQTKELDDNSQSKNDRKDPKVIAKLVTEGRYSAPYTPDGVYADLRIMVANRKRLIREMTQIKNRFARWFAIYFPEYTDVFGDYEAQSSMLLLKKVCTPEAIVELGAEKINQIWRDAKLRAVGMKRATTLCETAKRSIGLKKGSSAAQYEMKLLLEDYEYKKAQLDAVMEEIEKLCRKIPESEQMLAIKGIGVITVAGFLAEVGDVRRFESPRQIQKLAGLSLRENSSGKHKGQTTISKRGRSKLRAVLFNAAIPLIAKNPEFKSLHEYYTTRANNPLKKKQSVIAISCKLIRVFYAILAKGVTYDAQKLISDIHRQPQVA

SEQ ID NO: 258517 - protein, 340 aa, unidentified
MGEITTVGLDLAKQVFQVHGVDAEGATVVRKQLRRAQVLAFFSKLPRCLVGMEACATAHYWARELRALGHEVRLMPAQYVKAYVKRNKNDAADAEAICEAVVRPTMRFVPVKTADQQAAVLLHRGRERLVRQRTMLVNALRAHLAEFGIVAPQGLRNVGKLIAIIRDEEDARLPDLARQVLGVLAVQIEQLETAIASLEKQLMAWHKSNPVSQRLATIPGIGPIIATAIAAMVAEPSGFRSGREFAAWLGLVPRQNSTGGKTRLGGISKRGNQYLRRLLINGASANLLRSKATNADPWVIGLRRRRPSMVVAVALANKTARIAWAVMHRQENYQRTALAA

SEQ ID NO: 258518 - protein, 404 aa, unidentified
MRALYERCCGLDVHKKTVVACAITPEGRETRTFGTMTADLLALADWLLERGVAAVAMESTGVYWKAPYNLLEGTGLELLVVNAAHIKAVPGRKTDVRDAEWIAELLQHGLLKASFIPDRGQRELRELVRYRTQLIRERARAVQRIQKLLEGANIKLASVASDVLGVSGRAMLRALAAGEADPASLADLAKGRLRTKRADLEAALRGLVGDHHRMLLESGLRHLDFLEEEIGRLDGEVAERMAPFAKELEALDSIPGCARRSAESFLAEVGRDMSRFPTHRHLASWARICPGTNESAGRRGSGATGPGNPWLRSTLVEMAHGTTRSRTYLGAQYHRLAARRGKKRAAIAVAHSILVVAYHVLRDGTTYHELGRNYFDEREREAVGRRAVTRLERLGFKVTVEPAA

SEQ ID NO: 258519 - protein, 312 aa, unidentified
MTSEVYVGIDVSKKWLEVRMHGEVKSRTIGNDAEGLANLIESMKAIGPKQIVFEATGGYERKAVKVLGEAGLAVAVVNPTRVRRFADALGVLAKTDTIDAKVIAHYASVVQPPVNVPQTELEEQLAAFVERRRQLLVILSAEKNRLSTCPEGVYEDIQMHIFWLEERIEHLDTMIQACIQQKPEWQERARLIESVPGVGTVTASTMVAELPELGYLNRQKIAALVGVAPFNKDSGPKRGKRRIFGGRSSIRRPLYMATLSATRHNPVIRSFYESLIKRGKEKKVALTACMRKLLVIINALVRKRELWRLSPI

SEQ ID NO: 258520 - protein, 351 aa, unidentified
MVRKFLKHVAGIDVAQNELVVSFGRMHEDAAIELYSYKAFPNTAKGFVALVAWADKLAGGQPVHFVMEATGVYHEALAYFLDGRGLLVSIVLPSKISNYAKTLDVKTVTDKTASEAIARFGLERRLDAWKRPKAIFKILRQLSRERGQVVEERTLSKNQLHAEQAEAEPNKSSIARIEKRIAFLDSQEKEIKAEISQLVQNDEDVKNIVAIICSLPGVGLLTAATVLAETNGFDLIRNKRQLASYAGLDVKEKQSGTSVKGKPCISKKGNRYLRKAMHLPALSAIMQGGLFKEIFERLLAKHGIKMKAVVAVQRRLLEMIYTLYKTNQKYDKDYLAKKEAEKKKGQDKKAA

SEQ ID NO: 258521 - protein, 440 aa, unidentified
MNMSKTYRSVPVKRVEVEKVLAAHAGEFVEAGFDIGKRWVWTTIRFRDGTCLRPWRAGNPLEIGSLVDLLKQAGERVKLRVAMESSGTYEGPLRQALSDAGLDVHRVSSKASHDWAEAFDGVPSQHDGKDAGVVAELCAMGKSVAWPLQKPTELEQELGYWVDQLDAAHRVQQVWIGRLESRLARHWPELGQERKLSAPTILKALRHWGSPAALGADPQAAATLSRFSHRLLDQAGIDRLVQEAKQSVGVRMNAWDQRRVREDAEGALLAHRQKRAARRRLHELARRHELIPALGEVVGIPTACVLWVCVGDPRHYGSGGAYRKAMGLNLAERSSGMYQGQLRISKRGKSLPRRFLYFAALRYVCKQPVKRWYLEKKRRDGDGGMRGVVAVMRKLPLALHAAARGEAFDAARLFKSIVNEVNNSNMRRQVQGGDARPKRQ

SEQ ID NO: 258522 - protein, 348 aa, unidentified
MEKDDTMKDTMIGVDLAKRVFHLHVASMTGEVKDRKKLTPDQFRRYMSDVPECVVVFEACGSAHYWSREMRALGHEARIIPAQYVKPFVKRHKNDKNDAEAIVVAAQRPEMRFATVKSEDQQARAVVFRARERLVHQRTELVNALRSTLYEYGHVFPVGITHLKKIEELLQNPHCDLPTLVLTECQDLLAQIAEKTARIKAKDKLIKELAKESDVARRLQTMPGVGPMTALAVEAFAPDMVQFSCGRDFAAWLGLVPLQSSTAGKSRLGKMSKMGQVDIRRLLIIGAMSRIVGRARHTIPDDSWLGRKVATKPKMLVGITLANKMARQIWAMLTKNEDYRDPALVGVA

SEQ ID NO: 258523 - protein, 496 aa, unidentified
MVTNIHRTESQILNRLFAGGGKFLVVPMDFAKAEHTAQCCTQDGDYVWKRPLRVWNNLRGVDFLLERVAGICRKLRIKHDRLVFAGEDPSSFALPFVEELMRRKAAFVRVQATKAAEHRKSSLASSDNLDLDGIAHAVLKRFAYDMEESDGLYARMRLAGRSRARAVKLETGTKSRLHQIVDRVFPGFLDDDKSGIRPFGPACLEVLKDGLTPKKVLAMKPDKLAAWLKKRGVWRAAATAEKVHALASSTVQATDSLVVSLRESMGAKVVLLQAIRAEIASEENEMARCLIQTPGALLTSIPGIGLTYAATITSEYGDPRHWRPVNSMFAYAGCAQSQKQSGGPDKQPVQQGMPMSCNHRLKDCLLQAAFHAGTTQHQAAKRLPGLEDTHRLMRCWQALDARGGHTRLGTARLLLRIMHDMMQEKRIYLPDWWLQPEKHQSPEPAQAAAWLDAATTAMEEKWQGYNLDGIPDDTNQLKLWRKNADDLINSLTAIPF

SEQ ID NO: 258524 - protein, 384 aa, unidentified
MNKHSILFIGLDTHKEFNEVAYIEEHRGAKPVHLGRVSSSKVAVQKLVRQFESKYPGATLHFVYEAGPCGYWIYRLITSLGHCCYVVAPSLIPKKPGEKIKTDKRDALKLAKLLKSEDLTPIYVPEPEDEAVRDLSRAREVAMKDLKDAKYQLKALLLRNNINYRGTANWSQKHLRWLTELVLPHPAQHIVLQEFLHTINERISRLERLDNELTHHVHQWRYYPVVKAIQAMRGVRLLVATGVVAELGDLSRFDHPRKLMSYLGLVPSEHSSGGKRHIGAITKCGNGRARRLLVEGAHTYRYAANISTDMQKRQEGLPKDIIDIAWKAQLRLCKRYKKMIAKGKHYNLVVTAIAREMIAYIWAIAKEVVLTPVNTKLRLARVPA

SEQ ID NO: 258525 - protein, 351 aa, unidentified
MFPIVSEKYKFIVGVDTHSRKHVSTIVNNLGAVVSRREFKVTAGDINKFIDWSLKVAGVEDKKILFAIEGTSSYGETLTKALLARKLEAVEVKPPKTKSHGGDGKTDQLDSELAALNILRVPVNKLIKPRFGDKHKTLRIILSSRRLLVAQQTMNKNALIALLRGEDIGIDARKPLTPADYWTIARWKLKDTDNNYDIKQEARRMAKAVTALSDELASNKQRLHDIVSRVAPELLKETGIGPVTLATVLCAYSYKDRIRSANAFANLAGTTPIPAGSGNIVHNRLNRYGDRQLNNAIHTIMMARVRCEERTKDYVEKRTKAGTGIRDIKRSLKRYIARYLYRKLEALNIEP

SEQ ID NO: 258526 - protein, 422 aa, unidentified
MANKKRVTDEVEEIVYERCCGMDIHKDDIKACLNIGGKKEVKIYNTMTDDLLTMAKWLKENNVEMVAMESTASYWKPVYNILECEGIPVMLVNPQHVKNASGAKTDVRDAKWISGLLRHGLLKASFVPSREMRELRELVKYRSSLTEERTRVLNRMEKVLQGANIKLSSIISTTGTKTELSMIEAIANDECDIEALVKLAKGTLKNKEADLRRALNGLLGGHQRILLKSMYNSLSQICSEIAAMETEIDKRMEKDKELVERLDEIPGVGKTNAQVIIAEIGTNMDQFPNAKNLAAWAGICPEQNESAGKRKNVRTRKGNSSLKKTLVQSANSAARKKGSYYMAQHKRIAARRGYKRATVALAHSILITCYHIIRDGVRYQDLGPDYFDKRNKDRVVNRSIKRLEALGYEVTVKPKEPHKEAS

SEQ ID NO: 258527 - protein, 307 aa, unidentified
MYVGIDVAKDRLDVHVRPSGEAFAVARDGEGLAQLTARLDALAPRLVVLEATGGFEVTVAAALAAARLPLAVVNPRQIRDFARATGKLAKTDALDAAVIAHFAEAVRPEPRPVADQQARALGELVARRRQVVEMIIAENHRRRQLTQRRLLRRLDRHLTVLQQELTEIERELDDSIRGTPAWRESDDLLKSVPGIGDATARTLLAELPELGTLDRKRIAALVGVAPLNRDSGKMRGRRTTWGGRATVRAALYMAALVASRHNPVIARFYARLRQAGKPAKVALTACMRKLLIILNAILRDRTPWQNA

SEQ ID NO: 258528 - protein, 402 aa, unidentified
MLYLGIDVAKKQSRYLVLDGEGKRVVSFSLENLKERFQNLLSRLQEMKIEPKDILAGLEATGPLWENLYQFLQEKGFKVILLNPYYVNKFREALAKKAKTDDIDALVIANLLRTGEYMNSVVPEEKIQVLREYTSLRYEFLKTKKDYQRKVISLLAVVFPEYERTALRNPFGVASLQILKEFPTAKDLSLAKPSRIEKIVRSIQGNNFDIKEIQALIDWAKNSIYSGRAQKARGLTLRMLLEQIHGLDANIEELDKNIEDILSPGSDGSFPGENLLSIPGVGKKTIAAVLSYLGMDGSSFSSAKKAAGYVGFFPKLYESGETKRENKISRRGPKMLRWALYMSAVACLKHNKEMRLIYHKKVSQGKAAKQALIVVAKKLLQIMLAMLKSGKPYNPMQVFANT

SEQ ID NO: 258529 - protein, 451 aa, unidentified
MARRRKQASKANNAVLPLMRPDAAGIDIGATEIFVAVPADRTEENVRSFPTFTQDLYALADWLKRCGIRTVAMESTGVYWIPLFQILEERELEVCLVNARHVKNVPGRRTDVSDCQWLQFLHSVGLLKASYRPEQEVCAVRSLLRHRESLVQMAATHVNHMQKALDQMNLQLHHVISDIVGQTGLAIVDAILAGERDPQRLAKLRNERIKASEEVIAKSLVGDYRPEHLFTLRQSLAAYRSYQKLIDDCDREIRQRLHDFQPPNPPSETAGEESTQKPRSPDGVLKSELKRVFSIDLTQIPGIRTGIAQTLFGEIGPDFTKFRSASAFASWMGLCPDNDISGGKVLWTGTRKVNCRAATALRMAAQSLHHSKSALGDFYRRMRAKLGAPKAITAAAHKLARIIFHLISTRQQFDESKFAADQLRYQKRQETKLRAKAKSMGYELIPLERAG

SEQ ID NO: 258530 - protein, 375 aa, unidentified
MATVRFVGLDVHAETIVVAVAEAAGEVRSLGTMPNRPEAVRRLVRKLGPPDQLRVCYEAGPTGYVLYWQLIGLGVHCDVVAPSLVPTKAGDRVKTDRRDAEKLARAYRAGDLTPVWVPDAEHEALRDLVRAREAAKKDQLRARHRLGKFLLRHGRRRPAHLKMAWTAGHIDWIRAVRFESTAHQIVLADYLHEVERVAARIAHLNQAILEAIRTAPPQMRAVIQALQALRGVAAVSAATIVAEVGQLSRFANPRQLMGYSGLVPSEYTTGSRRRLGAITKTGNAHLRRVIIEAAWAYRFGPAVRGPLRERQAGLDPVITEIAWRAQKRLHDRYRTLAAKGKNNNQVITAVGRELLGFIWDIARTVERQVPIAATA

SEQ ID NO: 258531 - protein, 357 aa, unidentified
MSQYIGIDLHKSKSFVTRLTSRGRVLEQVELSHANDALRDDLTQLPADARIAVEATGNWMWLYELIEERHPDLILAHPLKTKAIASARIKTDKIDATTLAHLLRADLGPAAYIPPRDVRDTREMLRYRASLVRLRTQVKNKIAAIISKTGLQTPTRTPCGVKSRRFLATVPVRPCYRLGLDGYLRTLEQLTTEIRQVSKTIETQAAAEPQARLLQTMPGIGAYSALLILSEIGDIQRFPDSRHLCSYAGLVPSVHASGGKTRLGQLTKQGSSWLRWMLVELSIHAINGAPQFRSLYYRVAKRHGANTGRVAVARAMLKTIYAMLTKQETFRPMAQGTTGQRQGSWPASLQAERGPET

SEQ ID NO: 258532 - protein, 320 aa, unidentified
MKRKGGFVGIDVAKSRLDVAVRSTGELRTMGNDEQGWEQLARWLSELRPALVVLEATGGYETNVLAVLLEKQLPVARVNPRRVRDFAKARGTLAKTDKLDAKVLAHFAEAMKPEPRPMPDEQLQALSELVARRRQLVEMLAAEKNRRQQACRGVRERIAVHVQWLEKELEQLDHDLRAQIQQNAEWRETDELLRSTPGVGPVLAMTLLTELPELGHLDRKKIATLVGVAPLNRDSGEMRGKRTVWGGRASVRAALYMAALSASRFNPVIRAFYEHLCKAGKLPKVALTACMHKLLVILNAMIKNRTRWRPPVVTASGSIQ

SEQ ID NO: 258533 - protein, 322 aa, unidentified
MQYIGIDVSKATFVVAYSSDKGGEIRTFNNTTAGIKQFIGTLPKDGSIHCVMEATGNYSALLLYMLNVAGITVSMENPLKVKNFARAMLSTVKTDKIDARLIALYGEKMNPQPFKVQGEAILRLRQKRTVIRQLTKQITAMSNLRGSLACLPVPDKGATHTVDETIKFLEKRRDRLQSELTDLVEVEFSRQLALLTTIKGIGITLATALILTTGGFTYFQNAKQVSRYLGICPTYEQSGTSVNIRGHINRNGDAYTRGLLYIAAWPASRFNAQCKETYTRLRQNGKPGKLAMIAVANKLVRQAFAVVAHDKEYIDGFVSNRP

SEQ ID NO: 258534 - protein, 400 aa, unidentified
MDEKERFGWFLGIDVSEETFDACCISRQGERLFSMSTSMDRRGFEELINQLCSVSVAQESVLVGMESTACYHLNLYSFLISLGYPALVINPLLISNFVKLQLRKTKTDKKDAWVIAQFLLLSRDSLGRTVGSSELSYIRDLSRQRESLVDQMTSIKSDLKRLLTITFPELEHIAGIFTKSMLRLLCQYPSAASVRGAKRSKIAGVLIPGSYGKQTDTSVQRIIKAAEASIGTASPAKEIILKQKVSLLIQLEEHLQELTTILIEHCQEKMRRDMDILTSMKGIGEKTAMNFLIEMGGDIKQFESHKKLIAMAGLDPALYQSGKIDRKGKISKRGNRHLRRVIWLMTTRVIPFNERFKQYHLKRLNEGLPYKMAVLATAHKLIRVIFAMLTNQTLFNARTN

SEQ ID NO: 258535 - protein, 331 aa, unidentified
MSVYVGLDIGSRTSTAGVRKDARPAGLWDIAQTPAGRKAAVKKLQALQPKAIVMEATGIYYLDLAIELHAADLPVSVINPKSFHNFAKLMLVNSKTDAIDAQLLAEYGERMTPRLWTPPSPVQLELRAIGRHINRLVGHRTRAKNELHALRATHTTMSMLIEDEEEAIASLDKRIERFRKAGHDLIAQCPTLSRQFKQLLVAPGMGEVSVLAALAELTTLPEILKSSQVSRHAGLDVRQTQSGTSIDKPGRLGKSGNAYLRAAMYMPALTAVRCDRYAKAFYESLVSRGKKKMQAIAAVMRKYLTGVWACMRGSEPFDTAKLFSAKHLAKA

SEQ ID NO: 258536 - protein, 315 aa, unidentified
MSYIHFIGIDVSKEWVDVALHDAGVKPQRFASDSKGFAALAKHFAAELPEALVVLESTGGYETALIAFLLANCVSVHRADPRATSYFIRSLGKRAKTDQLDALALARYGAERHARLRLCRISETGQEALQALLARRADLIAMRVAEQNRRQHPRYDRHAFLKRSLNAVRDVLIAELVDLESQITALIEQAPALAAKFAVMTSVKGIGKQTAFTLLACMPELGTLTRRQAASLAGCAPHPKDSGKTQGYRATRGGRGSVKRSLFMAAMAARRFNLDLRLFYERLIGNGKKPIVAITAIMRKLIVILNAKLRDYAHA

SEQ ID NO: 258537 - protein, 451 aa, unidentified
MSKSMKKKKSKVKNLNEFNIINPNASGIDISSIDYVVSVSEDRCKKNIQTFGAFTCDLKKIALWLLSCKIETVAMESTGVYWKQLFVVLQEHGLEVFLVNSRHVKNVTGKKTDEDDAHWIMRLHTCGLLTNSFQPEEQIRTLRELLRHRKSLNRNKTIAVNKMTKALNSMNVKLNIVLSDLTSVSGQKIIMSINSGERRPKELVKLVHHKVKASKEDILKALEGVWREECLFELKHATEHYYFLQNQTSECDKKIEEQMVLITAKYNDGDITGLKEKAIKKYSRKNELNFNINPYLQEIFGIDISRIYGFSDDTALTLFAEVGSDLSCFGTANRFTSWIGLAPNNKISGGKIISSHLPKKKHAIKKALIQAANSLYRSDNALGDSYRRLKSRMGPKSAKCAMARKLAIIYYTMVTKKDEFNIELLNLHQSSFKEKRIKFLENQLAELKSVA

SEQ ID NO: 258538 - protein, 339 aa, unidentified
MELYAGMDLHSRNTYIGIMDDALNRVFKKRVPNDLDQILQTLTPFQDQLKGFVVESTFNWYWLVDGLVDAGYSGAHLANPAAIKQYEGLKYSDDQHDAFFLAKLLILGILPEGYIYPKEHRPVRDLARKRMFLVRHKTANILSLQSFLQRCCAIKLSANDTRKLTVETLEEWLKEEYLVLTAQASLDTITFLKEKIKCLERAIIKRVKLRKGFKQLLTIPGIGNILAMTIMLEVGDINRFRKVGNFVSYCRCVPSQRLSDGKSKGVGNRKNGNRYLSWALTEAAQLGRRYNEPFRRYYNRKVAQANTSLATKALGNKLARICYYVMRDRVPFRKELTSH

SEQ ID NO: 258539 - protein, 384 aa, unidentified
MKTSIKDTFYNVVSTSHKGKEGSPMKKVQEYVVKNKSIYIGLEDSKKTWRLCVRSEGLVVHEVSMPTVYENLRNYLLLRYPGCRIQLIYEAGFSGFCLHDLLEGDGIDCIVTPPNKVTQEKDSRMKNDRIDARRLSKNLENRDYRSCFIPDKELREDRQISRTLAMTQKDITRTMNRIRRFFDFHGLELLRDKQNWTVSDYKKTRQMVLGDSLKFSLDRLLDELDRLCGSKKQLKKKLQELSKKTRYAKTFGHFESCPGIGWLTAIRLVLEWGEDLSRFPSGKHMASYVGLTASEYSTGETIRRGHITSQGNELVRSWLIQCAWIAIRKDPVLLEKFNAVWKNTGSKKKAIVATARKLAVRLRYLAVNDEDYELGLVEEITVAA

SEQ ID NO: 258540 - protein, 326 aa, unidentified
MEHELHYIGIDTAKEKLDVDVLRPDGRHLTKKFANTSKGHDELVSWLKGHKIDHAHICIEATGTYMEPVAECLYDAGYIVSVINPALGKAFAQSEGLRNKTDTVDARMLAEFCRQKRPAAWEAPHPLERALRALVVRHQALTDMHTQELNRTETAREVQRPSIDAHLLWLEAELKRLEKQIKDLTDDDPDMKHRRKLLESIPGIGEKTSAVLLAYIGLKDRFAHARQFAAFAGLTPRRYESGSSVRGESRMSKAGHVSLRRALYMPAMVATSKTEWGRAFRDRLAANGKKGKVILGAMMRKLAQVAYGVLKSGVPFDASRHNPVAA

SEQ ID NO: 258541 - protein, 339 aa, unidentified
MNNSVIGLDIAKHIFHLFTQEADGKIIKKKLKRSELLAFFANYPASIIGIEACGSAHHWARELTKLGHEAILLNARYVKSFVVGNKNDFNDAAAIYDAVTRPNKRVVAIKTVAQQDIQLIHSMRKELVDQRTALVNQTRGLLSERGIIINQGIAQVRQQLPLILEDAENGLTALSREMFAEQYDKIKALVDDEIKTQDQRINRLCNANELSKRFLDVPGVGPLTATIVAADIGDTGKGYESSRDYAASLGVVPKQHSSGDKQVYLGISKRGNRYIRTLLIHGARAVLKNCTKKTDKLSLWLQALVDRRGFNKAAVALANKNARILWAMASKNKAYEALA

SEQ ID NO: 258542 - protein, 344 aa, unidentified
MTKTPIAVLGIDLGKNSCSVAGLDMHGAVVLRRRMTRESLVAFASKLPACIVAMEACCGAHFLGRTFAAQGHTVRLMSPEYVQPYVKSQKTDDRDAEAIAEAATRPTMRFVTLKSEEQLDLQVLHRARERLIAARTRLTNQLRAVLLERGVILPKRRAPLRHRLHELMAGELPISPRVIRLLEDLRDEWASLDERIRAYDDELAALTRENQQARQLATIPGIGVINATAFLAAVGDGSAFAKGRDLAAWLGLTPRQHSTGGRTKLLGISKRGNKYLRTQLIHGARAALTHFAKTPTRIGAWIRQLLTRAHPNVVVVALAAKLARIVWAVLRHGRAFEHQGHAVS

SEQ ID NO: 258543 - protein, 345 aa, unidentified
MENVGIDVHKRESQVCILEEAGPLERRIRTERSRFAEVFKGRPRCRILVEASTESEWVARCLEELGHEVVVADPNFAAMYASRSRRVKTDKRDARTLAEACRLGAYKPAHRTSDPRRHLRAQLAVREALVRTRTRYISLVRSLVRREGIHVASGSAEAFSKRLGALELPKHLQAEVEPLLALMEALNARIATLDETLERVAHEDADVACLCTVPQVGCVTASAFVAAVDDVTRFDNAHQVESYFGLVPSEMSSGEKQHKGRITKAGNARVRWLLVQVAVSLLRQRSPETAHLRAWAERIALRRGKKTAVVALARKLAGILFAMMRDRKPFTPPALREEVSLRASA

SEQ ID NO: 258544 - protein, 456 aa, unidentified
MEKEIETQAFEIVHPNAAGIDVSSEDYYVAVPIDRDEQPVRCFGCFTESLLQIVDWLFKCRITSVAMESTGVYWVQLFMVLQDHGFEVFLVNAQQIKNVSGKKSDVCDCQWIQQLHTCGLLANSYQPDNITKELRTYVRQRKKLTESASKEVLRMQKSMTLMNIKLDRVISDIMGKSGKNIIQAILSGERNPEALVRLTDRRLKASKEELIKSLEADWRKEHLFTLQQSFEIHEFYQAKIMECDKQIEKALALYPRAEITNKNTDSFNPYKTKQKQKTDFTFDPDKQLKEILGIDVTRIPGFSSVTAITILSETGKDLKESFPSKKQFLSWLNLVPNNRKTAGKIISSKVKKKKNKTGQSFRLAANALKNSKCPFGDYFRKVKSRDGHGRAIIATASKLAGIYYTLVTTKQEFNISIYMQSYKINIQKKLVRLNKKIIDLQNQLLYVPEKQVFATT

SEQ ID NO: 258545 - protein, 381 aa, unidentified
MNPLFVGIDVSSKNNVAYLMKPDGSKHSSFSVQNNLGGAKLLSEKIVSALHSMQLNDVVIGLEATSIYGDSLVYALREDGSLGRFQRKIHVLNPKQVRKFKEAYPDLPKNDWVDAFVIADHLRFGRIAKEVYMDDYRYQALRTLTRARFDIIQNLTREKQRFANYLFLKCSGIAQDKDIQNTSATTIALMEHFETVDDLANADLDELTAFISEAGRGRFVDPDATAKAVQAAARGSYRLPKTVNDTVNQAMSVSIASMRALKEQVKVLDKAIEQHLEIIPNTLTSIPGIGKVYSAGIIAEIGDIHRFNAQASVAKFAGLVWHRNQSGDFEAEHSQMIKSGNRYLRYYLLEAANSVRRCDSEFRRYYDLKLKEVNKLSLIHI

SEQ ID NO: 258546 - protein, 352 aa, unidentified
MRRPKHQVTREEDLFVGIDIHKHRWHVTIRTVDLELFSASIPGTWEALQRVLARYAGYQLQAVYEAGYFGFRLHDRLVAHGIPCLVTPPSLVPQEYGNRVKTDRRDSSKLAHLLAKGMLKRVWVPSEEELYHRQVIRRRRQLVRDRVRTQSRIKAELRFYGIHLEEPRGRWTQGYFETLRRFRFGNRWMQESFKRLLEQYEFLSAQIDKQTQLLRELSETALYRERVEILQSIPGIGLISAMELLLELQDVSRFRRAEQLAAYVGLTPSQYSSADKVRMGRITGIGKNTLRSLLVEASWTLIRKDPAMRDKYDRIKIRSGGKRAVVAIARTLLLRMRRMLLDKQAYALQRAA

SEQ ID NO: 258547 - protein, 426 aa, unidentified
MLNSQINKIQAITSDTLIVGVDIAKNIQWAQFINFRGIEVSKHICFENNYSGFNSIMEKIEEIKSKNNFLSVIVGMEPTGHYWKTFATFLHNNGIKVVQVNPYHTKKAKELDDNSQTKSDKKDALVIAKLIKDGRYSAIYFPEGEYADLRNLSNTRLEVSRLLNICKNRIHACVDEYFPEFETVFKSFIKGKVALHILKRIPFPTDILELTLEDIISVIREAAKKSVGKKKAEELIRAAKVSIGVKVGLEGARIRLNNLLEEYELYHNQLEKIEKEMAQELEKTGYKDILTSIPGIGIISAASFIGEIGDPKRFSNPQQIIRLAGYNLVEDSSGKHKSKTMISKRGRKILRTILYKISLIVVCKNQEIKLLYKYLITRKENPLKKKQALIVISGKMVKIMYSLIKKEEVYDKEKVLGIYRKQQIVA

SEQ ID NO: 258548 - protein, 370 aa, unidentified
MKKNTIVKQSPKPATVGTREQITIGMDLGDKISRYCVLGADGEIKSEDQVATTRKAMAQKFSGMQRCRIAIEVGTHSPWLSRLLTALGFEVIVANARQVRLISASSRKNDRMDARMLARLARIDPELLRPIRHRSESAQSDLRKIRVRAALVEARTKLVNSARGFAKAQGDRLPSCDTDAMDVEQMEALPAGLQEDLRPLLEQVESLTAQIKKLDGELEQIARTKYPDTKLLRQVSGVGTLIALTFVLTVEDRERFQKSRDVGCYVGLRPKQSDSGERQPQLRITKEGDRYLRQLLVQGAHGVMSRRGPDTDLKRWGLRLSERGGKNAKKRAIVAVARKLAVLLHRLWVGGEVYEPLNYRPVARPRKLAA

SEQ ID NO: 258549 - protein, 392 aa, unidentified
MEIFIGIDVAKETHWVCALDHAARVLLDRAVDNDQAAIERFVADLRGLGGEVVVGLDITGSLARFLEAILLAEGLRLVHVPGIAVNRAGQGFAGGERKSDPRDARTIAELVRTRPLRPILPDDETVIALRLKVTRRRELSDDQTRRVSRMRQFLGAIHPGLERRLDLTAKGPLVLIARYVTPAEIRRAGLKKLMAHLKKTPHLHAVEALARRALDAAEGQSIVVPGEAVFADMIRELAAEALQAREMIARIDRDLEALLDRHPDGALIRSLPGMGAVLSAELIAGIGSIDRFHSADALASAAGLAPVIRQSGKSRNWRRAFGGDKALKRVFFQSAFCAVSTRDPLSKAFYDRKRREGKHHTQAIIALARRRVTVLWTMLRNRQTFDPTRKTA

SEQ ID NO: 258550 - protein, 348 aa, unidentified
MRTCFNRRETEMKYSGIDLHSNNSVVTVADEEDRVVAEKRLPNELAKIVGFLMPWREELVGVVVESTFNWYWLVDGLQAAGFKVHLANTTAIKKYEGLKHSGDETDARYLAHLLRLGILPTGTILPPEQRAVRDLARKRMQLVRSRTAHILAVENITARQHGTRISSNQVKRLTAAAVEQMPLPDDVALAVKANVAVIGTLSAQIDILERRLQEKVGARAEYGLLTSVPGIGRVLATTILLETGPIERFAAAGNFASYARCVDSVHTSNGKKKGEGNTKNGNKYLAWAFVEAANFALRYCAEAKRFYERKKAKTNKVVAIKALAHKLARACFHILKERQPFDVTRCFA

SEQ ID NO: 258551 - protein, 420 aa, unidentified
MAVSPDRDLEPVRRFGCFTADLREMARWLVDTGVRSVAMQSTGVYWMPVLEVLEQNGLEVYLVNARHTKNLPGRKSDVQECQWLLKLHAFGLLNNSFQPSNEIRIARTLWRHRGNLVAEAGSAIQRMQKVLTEMNIQLGNVLSDLSGVSGMKIIGAILEGERDPWELAALARPEVKATPEDIAKSLEGNWREELLFILKQEVELYRFYQEKILDCDLQLRQHLQSFGSTVDLQAQPIGPKPKGKKGSRNAPHFDLRTELYRITGIDWAQINGMDVLTAQTVIAEAGTDLNAFPSEKQFTSWLGLCPTNEQSGGKILNRRTRKVVNRATVAFRNAAATLLRSQSYLGAQYRRLRTRLGAPKAITAMARKLACLFYRLIRHGQQYVDKGIEYYEARYRDQQIRSLAKRAQKLGLQLVIPETA

SEQ ID NO: 258552 - protein, 406 aa, unidentified
MSVQHAAPVTSSTVVVAVDVGKTTVALSVTDAARSRLFGPVDFPMTRPGLAGVLAQVQRVVPGAGRVKVGVEAAGHYHRPLTAPAAWPPEWEVLELNPAHVSEQRRVAGRRRVKTDAIDLEAITELVLAGRGVPVTVRDDLFGELAAWAGLRRRRIATRTATKNQMLGQLDRSFPGLTLVLRDVLSTQVGYLILAEFGDPARLAALGSARFRRFAAGRGLRVSRPMADRLVQAARDSLPVPDAAVARRMLAADLALLADLNVQINAAEVELARLVPASPFAPLMSVPGWGIVRTGTYGAALGDPARWPGHRQVYRASGLTPAQYESAGKRRDGSITREGSVLLRRSLIDLGIGLWQFDKPSRTYAAELKARGKPGGIIACAMANRATRIAYALVRDQDRYDPARWT

SEQ ID NO: 258553 - protein, 336 aa, unidentified
MTIIRVGLDTSKHVYQIHGVDENEQPVLRRQIRRSEVEKFFARLAATRIGIEACGASHHWARVLRSLGHEVVLIPPQYIKPYVKRGKNDAIDAEAICEAMSRPAMRFVPVKSAEQQAALTMLGVRDLLIKQRTMLINAIRGHAAEFGVTVAKGPKQVTELLQRLATDEGVPALAREMVNVLASQLDGLDIKLKGLEARVMAWHRQDQTSQCLATIPGVGPISGVSFALKVPDPKAFRSARHFASWLGITPREASTGGRQRLGKISRQGDEDLRRLLVIGATAVIRAAKPGRVSPWLMALLARKSKKVAAVALANKMARIVWAMMISGETYRRPKAA

SEQ ID NO: 258554 - protein, 335 aa, unidentified
MQSELSVVGIDLAKSIFHLVGTDERGTIILRKRLARGEVLSLMAQLPRVLVGMEACGGAHDWARHLREQGHEVKLMAPQYVKPYVQTNTNDLRDAAAIAEAVTRPSMRFVPIKNVAQQDLQALHRVRERLMGARTALVNDMRGLLAEYGIVLPTGVNAFRHAWAAKLEAEQAKLTPLSQELFGKLWAECKQVEAEGAYDDEKLQALATTHPESPRLWSMPGIGPLTATALIAAVGEVGGFTNGRQFAAWLGLVPKQHSTGGQTRLLGIRKRGDRYLRKLLIHGARATRRWARTKTESRSRWIRGVLERRGWNRTAVAVANKNARIVWALLSRGGV

SEQ ID NO: 258555 - protein, 345 aa, unidentified
MSMVRSVVGGVDTHADTHVAAVIDANGGVLGIESFPADESGFEALLGWLTSHGDVTVVGVEGTGSWGVGLSRFLHDQEVTVVEVDRPNRQKRRKVGKSDTTDAVSAARAALSGSASVVPKRRDGPVEQMRMLLVARRSARRQRIQTLNQLRHLIFCGPEPVRARFKDRYKTGLVSEVAKLRPRKGSDPILFTTLVTMRGLARRIEHLNTEIKDLDAILAEQVHNTAPSLVGLFGVGTDTAATLLVTAGDNPDRLRSERSWARLCGVCPIPAGSGKTDGRHRLNRGGDRQANAAFYRIVLTRMSGDPATRTYVAKRRAEGKNTAEIMRCLKRYVARETFKHLPHAA

SEQ ID NO: 258556 - protein, 391 aa, unidentified
MSMYFIGIDISKYKHDCCIISAADQQIISKFTITNDKDGFEQLLTALNSLSNPEDIKIGFESTAHYALNLELFLENSLLTFMEVNPVLISEYKKSKTLRRTKTDSVDCESIARWLMTVEYKPHSKGFYHAYSLKSLTRLRDKLIRQRSFYLIKITNVLDHTFPEFKPFFNERLSKTALYLLENYGSAEKMARMNSASYEKLRSVSRGKFSPQQFLRLKELAVNTVGVNNSIFDVELNSLLSLYKSLVKEIDTIKKEINQLIEEVHPHYMSVPGIGPLSAAVIYSEYGDISNFTNPGQMLAFAGIEPGINESGTESHGGKMVKRGSSQLRYTLINCCLPLIRFDMTFATYYAKKRGEGKPHRVAITHVAKKLIRVIYALERQDIDFNAQKLR

SEQ ID NO: 258557 - protein, 343 aa, unidentified
MQTITTIGLDIAKSVFQVHGVDATGQVVIRRQLKRRYVLAFFQKLSPCLVGIEACASSHHWSRELQALGHKVRLIPPAYVKPYVKRQKNDATDAEAICEAVTRANMRFVPTKTPEQQGGLVLHRTRHLFIRQQTAVINAIRAHLAEFGIVAPVGRHGVEELLNVVADPNDKRVPEMARACLLAFGAQLRRIKEQVLEFDRLIRAWHRSNEVSMRLDEAPGIGPVLATAVVATVADPKSFRSGRNFSAWIGIVPKQHSSGGKNRLGNISKQGDRYLRGLFVAGALAVIRYAKIHGAKHRPWLTALLERRPTKVAAIALANKLARMVWAMMVKGERYKEPVALAR

SEQ ID NO: 258558 - protein, 291 aa, unidentified
MRASARQVAELLAWAAGFEERTWAVEGAGGVGYLLAQQLVGAGERVLDVPATLAARVRVLGSGRSNKNDPNDGYSIAVAALHAPRLAVVTGADHASVLRLLAKRNQELSSARTRTACRLHALLVELVPGGITKEITVSRAAQVLASVTPSGPVETTRHELALEHLEDLRRVEEQIRASKRRLTAAVEASATTVSEVFGFGPVGTAIAIGHTRNIGRFPSRDHFAAYNGTGPIEMSSGGRVVHRLSRRGNRQLNTRSISRRSPRSATRTHPAAATTTANSPKERQPKKRSAH

SEQ ID NO: 258559 - protein, 341 aa, unidentified
MPHAVTMGLDIAKNVFHVHGIDETGTPVVVRKLSRSQLVPYFRDASPCLIGIEACGAAHHWVRTLSALGHTVKIMPAGYVKAYVKTNKNDSNDAEAICEAVGRPTMRFVPVKNEQQQAVLILHKTRDLLTRQRTMVTNAIRGHLAEFGLVAPPGPAGVSRLISFINASARDNVPVVARAALRILVEQVRSLSTRIKSCEERILRWHDKNPQSKRLATIPGVGPLTASALVASIGDASLFRSGRQLAAFIGLVPRQRSTGGRPRLEGISKRGNAYLRTLLFMGARSMFAARRHARSRLGRWLTSLRSRKPGRVAAIALANKMARIAWALLRHNEDFRHQPAA

SEQ ID NO: 258560 - protein, 384 aa, unidentified
MAEQIFKYSVGCDISKDKFNVCILEVSQERSKVKASHKFKNVKSGFREFETWVKKHKKHEVPTGFYMEATGVYYENLAWYLFEQEYSVYVLLPYKTKHYLKSIGIKSKTDKIDAQGLAQMGAEQKHNPWRPHSKSIYILRALTRQHESVTKLKTSLQNQLHSNEHSAVRNAVVKKQLNATIRLLEKQLAELAGEISNLIDTDERLNEKYGHIDQLRGISKLSWATIIAETSGFETFENQRQLVSYAGYDVVENQSGKHVGKTKISKKGNSRIRRILYMPSLVSVRIKEPVLYNLYKRVTERTGIKMKGYVAVQKKLLVLMYHIWKNDKPFQSGYSKIFGEEESKDLFPFGFGETIKESSPDKRATQDEHSYELSSKVLFPLAQI

SEQ ID NO: 258561 - protein, 401 aa, unidentified
MAAAQETAWVGVDIGKTHHWVCALDADGKRLLSVKVANDEAEILALIATVQGLAEQPIWAVDIIGAPAALMLALLAQADQSLRYASGRMVAAMSSAYAGEGKTDAKDAYVIAETARLRRDLAVVDQDTDLVRNLAVLTGHRADLVADRVRMINRLRDLMTSVFPGLERAFDYASRKGALVLLTGYASPHRIRRIGHTRLAAWLRQRKVRDSAGVAARAITAARAQMTVLPGQDLATSIIAELATNILALDERLRSLDAQIAETFDQHPQAAVIQSMPGFGPLLGACLLVGAGDLRAFPSAGHLAAAAGLVPVPNDSGRRTGNLHRPKRYSRPLRHVFYLSAQTSMLRAGPNRDYYLKKREHGRTHSQAILALARRRVDVLWTLLRENRTWTTAPPVVAQAA

SEQ ID NO: 258562 - protein, 424 aa, unidentified
MSSDLEIAAFIGLDWADQQHVIRLRMAGSASVEAQLLDQKPETLQTWIGQLRQRFGGRPVAIALEQSRGSLLYALMNVDFLRLYPVNPQNLAQFRKAFYPSGAKDDPQDALLLLEMLEKHRDRLRVWVPDDASTRCLRLLAENRRKLVNRRTALTNQLTSLLKESFPQALDWAGPLDSLRACDFLQHWPSLQRLQQTATSRLRKFYRDHTHLDSDAIHQRLDQIRQAQPLTRDSAVLAAAELMIPALVRQLRCLIESIQQFDQQLKDRFQHHDDYTLFHSFPGAGPALGPRLLSAFGSNRNRFECAAEVQMLSGIAPVTERSGKSHWVHWRLACPKFLRQSFHEFAAQSILFSTWARAFYDHLRSRGTSHHAAVRTLAFKWIRILFRCWKNRTPYQEQIYLASLRRHGSPLCAALSPPTTGANL

SEQ ID NO: 258563 - protein, 345 aa, unidentified
MAQASRIGLDIAKSVFQVHGDAAAGAVVLQKRLRRSQVSTFFAKLPPALIGIEACGSAHYWARELRALGHEVRLIPAAYVKPFVRRNKIDARDAAAICAALGRPDMRFVAIKSVEQQAARGIERTRALLVKQHTQLTNSVRGQLAEFGIVAAQGRRGFAELATLLAAGDERIPPMLHEALAALTQAIDGLAIKIAVLERRIVTIARTHPTMRRLATIPGIGPLTAHAIVSAIGDGRQFASARDFAAWCGLTRRVDQSANTRREHGISRQGDNAVRKLLTLGASALMRHRRAHPAGATQWQRGILARRPIKVAVVAQAAKNARIAWAMLTAGTSYRQPAATPTQPG

SEQ ID NO: 258564 - protein, 343 aa, unidentified
MKIMRIGVDLAKNVFQVHGVDRAEKPVWCRRLSREKWLRVVLEKAEPGCEIGMEACAGAHHWARQLQAHGLTVKMIAPQFVKPYVKSNKNDANDAEAVCEAMSRPTMRFVSVKSVEQQDIQAVHRVRTELVEQRTAKANQIRGLVGEYGLVAPKRLSHLRAALPGWLEDAENGLSERFRGLLNALWGDLVELDTRVGELDDEVNAIAKSDPVAQRLQQLRGVGPVTATALVAAVGSAEQFAKGRDMAVSLGLTPRQHSTGGKDRLLGISKRGDPYLRSLLVHGARSMIRAAKGKDDRLSQWVMNLVARSHPNVAAVAMANKTARIAWAMIRNGTDYQPERAAR

SEQ ID NO: 258565 - protein, 351 aa, unidentified
MIIGVDPHKSSHTASAVNSATTTVVASMRIDVSLAGYRELSRWGRRFGDRRWAIENANGLGCHLAQWLVARDEVVVDVATTATARVRELSRGGRRRNDVIDAAAAASVAALYGDAVKVAPDDETTVFALLEERRANVAAQRVRVVNQLHALLWDLVPGGARTNLTAAEATGLLRSVRPATTVERTRKELARDMVRDIRSRDTALADIASRMVEALDQRDTRLLDVDGVGPVLGVRLIGRTGRASRFPSADVYANYAGVAPVEIASGDHTRHRLSRSGDRQLNAALHVVAVTQIRMTNSAGRRYFDKKIAEGKTRKEAKRCLKRRIAASVWRIMLADERRIHQTTHTQIRAA

SEQ ID NO: 258566 - protein, 337 aa, unidentified
MSLYCAIDLHSTNNVPAIIDDDDRILFQKRLPNDLSTVISALKPFKHDLYGVAVESTFNWYWLVDGLADNGFNTLLVNPSAVKQYEGIKHTNDESDAFHLAHLMRLGILPTGYIYPKTERAVRDLLRKRLQLVRHRVTHMLSAQNQIWRSTGLNVSSKPFKQADFSLLNLVNDNHIRMAVKSNLTIIQALNQLIDELECTVLQQIKLKPEFLALLTIDGIGKILGMTIMLETGDIRRFASVGNFSSYARCVDSSRTSNGKKKGSNNRKNGNKYLSWAFVEAAHCIIRHNKTAHKFYQRKRSQKNGALATKALAHKLARAAYHVMRNQAPFQLERLFR

SEQ ID NO: 258567 - protein, 342 aa, unidentified
MKLTTIGIDLAKNVFQVHGADEKGKTVMKKQLKRAQVLPFFANLTPCRIGMEACGSAHYWARKLQALGHTVQLIAPQYVKPFVKRNKNDAVDAEAICEAVTRPNMPTVPIKNAEQQAILSVHRARQGFVKARTAQANQIRGLLAEYGITIPQGISHIAKRVPEIIEDGENDLPGSFRLLIQRLVDHLKELDRQVGELETEIQLWHRDNAASQKLAKIPGIGPMTASAMVASIGDARNFKDGRQLAAWLGIVPRQHSTGGKSTLLGISKRGDTYLRTLLIHGARAVIRVAERKPDAGPWLKSLLARRNKNVAAVALANKNARTIWALLAHDREYETDYARAAA

SEQ ID NO: 258568 - protein, 391 aa, unidentified
MINIGIDVGKFKHCASVMDDKSGEILLKPFFFNNDQKGFNLFYSKTKQYIHRKHAVGMEDTGHYMINLTDFLLGKKFTVKFINPRSTCLRRKELGMSAKNDRKDSILIAEMLSEKKFWRSVTRTTQDTDKLREITHLYHQLQEQQNEDMNRLQRALDIVFPEVNKLSWTRYSKVYMQFLASYPTAASIASEDIRNLRNALKTDGRGRQCKLTAENIKEAAKCSVGEDNIAVALEVQSIIAIINTRKQQIENLENKIEEFSLKLNSPIISIPGISHITGMTIIAEIGDIHDFSDAAHLISYAGMEPLVHQSGKYDAAHMPISKHGSRYLRKALYQAVFTVCKYCPTFNAYYTKKRNQGKTYRCAQGHCVRKLLRVIYKLLANNIAFDENLVK

SEQ ID NO: 258569 - protein, 382 aa, unidentified
MITMTRPNESTAPACGLLLAFELGQRSWKLGFTVGMGQRPRIRQIPAGAVGALATEIERAKTRLGLPSDAPVMSCYEAGRDGFWLHRYLVAHGVTNYVVDSSSIEVNRRARRAKTDRLDLAGLLNLLARYVLGDRRAWRVVRVPTVTEEDARHVSRTLEALTQDRTRLMSRLKSLLATQGVSLSIDAQFLHRLEAAHLWDGTPLPPGLQERLTRTWTQLQEVDGQIRDLKALRLTRPEHLTPATSRALAQLMTMRAIGPIGASVLATEIFGWRRIRNRRELGALVGLVPAPYQSGETDYDQGITRAGNAHVRRVIVQLAWGWIRHQPDSALTHWYQQRFGGGGKRLRKIGIVALARKLLIALWRYLETGVVPDGARLKPMEV

SEQ ID NO: 258570 - protein, 361 aa, unidentified
MLSPETAMSKDIILTVDYHDRACVIRRLDRGADREQVFTEIPTTAASLGQVVDQARRDLGRRGRVVWIQESTTGWARVRELLADRVEFNLANVLQMPLPPKARRRKTDKVDTARMQREYLAGTLPLAYQPPAAWRQLRRLVAYREGLVSRRTAVRNWIDRYLAHETWFDRTGLWSPRGQRRLRALLEGWPRTDRVILAEKLDELARLEGQLGVALKELVAAYRDCAEARRLDAILGIDVVSAVSIVARIGPVERFGDAEALIAFAGLAPGIQESDRTRRDGRIGGGGTDRHLRHYLIEATVWARKLPRYRATYERINKRRGSKVGRLVVARMLVRSIYKILKDGVAFDPGVPPRTTPAVAC

SEQ ID NO: 258571 - protein, 461 aa, unidentified
MAHHDAHVRSGPDEGLDGFPVLRRDVAGIDVGSEQHWVCGPAREGSGREIAVFAATTPGLEQLTAWLRDRRVTSVALESTGVYWIVPHEMLEAAGFAVVLADTRTLGRVPGRPKSDRRDCEWLQRLHACGLLRGAFRPAEQVCMLRTLMRDKATLVAERSDWLRRMQKSLDQMNVRVHRAVSDLDGVTGMAILRAIAQGERDPHRLAALRHRRCQKSEAEIAAQLTGHWRADHLFSLQQALHMYDAITARLTAYDGEIQRQLAQMTPPDRRDVDAPPPAKATKAKAMKTRGDDPLRHALYRVSGVDLTSIDALGVETVSIVLSEYGSDLSRFPTEKHFVAHMRLAPYKPISGGKVVTTRKKPASTSARVAAALRMAALAARRSQTALGAYYRRLAQRCGADVAVFATARKLAQYIYRLLRWGQPYVDEGAAAYETRYHQARVKRIAANAKQLGYALVSVNT

SEQ ID NO: 258572 - protein, 350 aa, unidentified
MTMVGGLDVHRQQITFDYVDDDGLVRWGQIRPATRKTLRGWLAEHCADGDAEFALEGCTGWRYVSEELAAAGVGVHLGDPAETAAARGRKKRAKTDHADAKLLRTLLLEGRFPESWIPPAHMLEIRTLGRLYCSLIEERRAWQQRIHAQLFHQGCPPIRALLSKAGRAALAGAELSAAGRQYVQTALRRIDELTPEIDTLRAQLVNFAQRQAGCRALQAHYGIGWLCAAIMWAEIGDARRFSSSDQLVRYAGLDVTVYSSDTKRSPGHLSRQGSPELRWAAFEAAKCAARRGSPDYVYYRRLAAKRDGHNGKNPTLAVERKILRRCYHTLRELGDAALALPIPQRQEVAA

SEQ ID NO: 258573 - protein, 424 aa, unidentified
MTQNQSYAAFIGLDKSDKKINVSLQQCAKNKMERSIVKGGAEALHAWVAALCARFPGQAVAICLEQPASGLIHALMSYDFIVLFPINPMTLARYREAFTPSRAKDDPTDADFLCELVALHREQLKAWQPDDVCTRKLRHLTLSRRRSVNMRTRFSNQLKALLKTYFPQALELCGDDLTTPMACALLQKWPSLQQLKKSRAETIRRFYYAQNARRGDVIEKRLALIAQAVALTNDPALIESSIITVQALTLGLRAAHTAISCYDREIARTFAQHPDASLFAALPGSGTAYSARLLAAFGSRRELFESAEAMLNFSGVAPVLKRSGQATITHRRYARPLFVHQSFIEYANESIRHSLWARAFYQMPKAAQKSHWVIIRALAYKWIRILFRCWQQRMPYDEIHYLKSLQKSHSPLLPYLAQPVIQTA

SEQ ID NO: 258574 - protein, 356 aa, unidentified
MSRDIKYIGMDVHQEAIVIAVLNGSGKLVMETILETKASSILQFIHGLRGELHVTWEEGTWAAWLYDLLQPQVQQVLVCNPRRNALLKEGNKSDKVDARKLAELLRSGMLRPVYHGENGLRTLRELGRSYQTISKDLTRVMNRLKALYRGWGIPCAGTQVYAPRYREEWLSKIAQAGVRRRAELLYQQLDGLQALRRTLRPEFLAESRKHKATKLLRQIPCIGPIRAARLIALMQTPHRFRSKRQLWTYSGLGIETHDSAQYRYVGGQLQRSKKPQQLRGLNQNHNHEMKEIFKGAATRASCGRGPFRDFYAALLAKGMKPEMARLTLARKIAAITLTLWKRGEGFDAEQLKTQAA

SEQ ID NO: 258575 - protein, 372 aa, unidentified
MQQSRTLYVGLDVHKESIAVAYVAQEHGAEVVSLGTIGTRQCDIDKLLRHLQSKGQQLVFVYEAGPCGYWLYRYLMKKGYVCWVVAPSLIPKKPGDRVKTDRRDARQLARLMRSGDLTPVYVPAVDDEAIRDLSRAREDTLRDLKTAKLRLKAFLLRHDIRYTGRANWSPAHLRWLSEVVCPTPAQQIVFQEYVQTVTEQTARLQRLEHELRDQVKTWRFQPVVEALQALRGVQFTVAVTTVAELGDLTRFNNPRQLMNYLGLTPSEYSSGPRRQQGSITKTGNTHARRALVEGAWAYRYPAKVSRHLQLRLEKLPAAIQAISWKAQVRLCKRYRQLMAKGKNANQVVVAIARELSAFMWAIAKQVVVPPKA

SEQ ID NO: 258576 - protein, 384 aa, unidentified
MKPPIEKQKTLHSSGNLTIGLDLGDKKSHYCVLDKDGMVMEESSIPTDPASMEKHFRKYPSSLVALEVSTHSRWVSQLLQRCGHEALVANPNKVKLISKNNRKNDRTDARTLARLARADRELLHPIQHRSEEAQAVLALLRARETLVAARTQMINCVRGLVKPTGHRLPHCTPPAFAKRMAPLIPHALHGATMRVLDQIKMLTETIREYDKSIEALAREQHPESRLLTQVTGVGSLTALAFMMTLGDKHRFARSRQVGCYIGLKPKQRQSGDKDPQLGIGKDGDNYLRKLLVQCSHYILNRAPDSDLKRWGLALRARGGKNGRKRSVIAVSRKLAVLLHRLWVTGEVYEPLRHKPTHPTTATAGEKTLAAKNIQAPPTPLAATA

SEQ ID NO: 258577 - protein, 423 aa, unidentified
MNNENEIQFAAYVGFDWADQEHVIRIQAAESTEVESEEVNQRPERLAEWVAKMRERFGGGKIAIAIEQSKGSVVYHLMQYDFLELYPINPKTLARYREAFNVNKASCDQTDAELLLELVRLHRDRLRRWVPDDKQTRLLSMLVENRRNLVNTVTEYTNRLTSLLKNYYPQALELAGSLNTQKACAFLSNWPTLELLKAAGSSELREFYRKHRSGRDVIEKRFKVISDAQPLTTDEAIVEMSVMMVKVIVTQLRGLNEAIQEFDERIAELFAEHPYGAVFNSFPGAGKVLAARLTAAFGINMDRYRSASDVQKFSGTAPVTEQSGKSKWVHRRYASPKFLKQTYHEFAGHSIHWSVWAKAYYDQQRALGKGHHAAVRALAFKWIRILFRCWKTNKPYDEQIYLDALVRRGSPLVARLQLGAGQN

SEQ ID NO: 258578 - protein, 415 aa, unidentified
MNNTISDIDIDLTAVCEAEDDAAQAEAQPAQNESDDTYAQKMQEQLALARSSANCRYIGIDLHSNNIWLSVIVNEQRPSGSVGKVIFSRSIGTQRVDGTLPEDLIKPVIERFCKDQPHIACVEATYNWYWLADLFERNGWNLVLADPSTVSEAKTKAADDRKDAEYLADRLRYNALRYAVIMPKQLREIRDLVRTRGTAVKQRAREKIIVINKLTNLIGRKITGKELRELIKEHAEFGTEAPMLLNWGLTEEVRTILDYHLTMATNIDQGIQKLEEHINAVGRNLRYTRELQKMPGCGPVISSILASEIGSIRRFATAANFVSYCRLASTSKLSNGKSKGLGNAKNGNAYLSWAFTELATLMVRYSEAAKRHFEKLMRKYGQLRVKAIRVLAAKLARSVYQCLSKNEPFDVLRCF

SEQ ID NO: 258579 - protein, 450 aa, unidentified
MAQRSGLTRGDRRRNAKIEELRAVVRSDRAILAIDLGEDKQVAALLDHDGRVLGRRVARDKAHALGGLLRWAVEQAGRHGFVGVVVGCEPTGHRWRSVMQLADAAGLGFVCVQSLRVHLAREADDYTRDKTDHKDAVLIGKLIARLDCYLPERAEEDWARLRHLGQRRFRLVGEMVACRNQIDDLLSCCWPAALECAVKPFDSTTWLACLAVTVDRCNGNPAKLRGLGRDRFSAAVRRELPRFGAQRVCHKVADRFFAALTDGRGVTVQRRGALERVGMLIDDWRSAIARLGEVEARMVAVLDGLGLTTLVTSVPGVSAVGAAVILAETGDLSRFATARSVVKHAGLNPAENTSANFRGQTRVSHRGRPALRAAAWRAAWGALPHNPVLGARFTHLTTRERDRLAPGQARVACAATLLRWLYAIVTTRESWNPDRAAGIRAGQAGEAAAA

SEQ ID NO: 258580 - protein, 341 aa, unidentified
MKITTIGLDLAKNVFHVVCCNQQGKVIKKKMLKRRELKGYFTQIAPCLIGMEACASAYYWARELEAFGHSVKLIPAQHVKAFLRGNKNDYNDALAISEAVVRPQMRFVAIKTVEQQDIQALHRLRSLCIKERTALSNQLRALLAEYGIVFPKGIATLRRHLVRLQNDEKSPLTDFFKQSLSRGYTQLQQLEAHIESYTQTLEQHVNVLEACQHLKTIPGFGSIVASAFYTEVGNGCAYRRGRDVAASLGVVPRQHSTGGKDTLLGISKRGNRYLRSLLVHGARSVVNQAKRKDDKLSQWINHIRLTRGYNKATVALANKMARIGWAVLKNNTVYQTDFSYD

SEQ ID NO: 258581 - protein, 335 aa, unidentified
MKLTAVGVDVAKRVFQLHWVEAETGEIISKQIKRAAFLEHFVNRAPCLIGMEACGGAQHWARRLIEMGHQVRLMPGKAVKAFVSGNKNDVADARAIWTAVQQSSVKSVAVKSEAQQAVLALHRMRQQLIKFRTMQSNGLRGLLTEYGGRAALNKAMTDVLARLSERLPAALVDTLREQWSRLGDLDEQIAEIERRLSAWMKQDRSCRKIAEIPGVGLLTATAAVATMGDAKAFKSGREFAAWLGLVPGQVGTGGKVRFLGISKRGDTYLRTLLIHGARAVLTHAKEPGPWVEQISKRRPPNVVTVALANKMARTIWALLAHDRSYERSYVSVKQA

SEQ ID NO: 258582 - protein, 345 aa, unidentified
MSMVRNVVGGVDTHADAHVGAAIDSNGGILGVESFPADHAGFEALLGWLAGFGDVMLVGVEGTGSWGVGLSRFLHGHGIMVVEVDRQNRQTRRRLGKSDPTDAISAARAALSGSATVTPKTRNGPVEQMRILLVARRSARHQRIQTLNQLRHLIFTGPEEVRDRFKDRPKAGLVTEVAKLRPRTGSDPILFTTLVVMRGLARRIQAFNDEIKGLDVMLAGLLNETAPSLVALYGVGTDTAASLLVAAGDNPGRLHSERSWAHLCGVTPIPAGSGKTSGRHRLNRGGDRQANAALYRIVLTRMSSDQRTRAYVTRRRQEGMSTREIMRCLKRYVARETFQHIQHAS

SEQ ID NO: 258583 - protein, 345 aa, unidentified
MKYFFIGIDVSKEKLDATLIHYESESDSEQQLAYTTVENNPKGFRSLVSWSKKNAGRGVKTDTMLFCCETTGGYDRALCDWLYGNGLNIWRESALQIKRSMGLRKGKDDKADSEMIAHYALRFRSKATLYKPMDGNMRSLRDLFLYRQSLVAERRAKMVSAKEKQHISSKSKVDNFIYRDAQKTIDLLTKSIQECERRMLEIIKDDEEMYRNYLHLTSCKGVGLVTSVMLIVYTDNFKGWNAKKMASYCGIAPFYESSGSSVFHKANTSGYSNRRLKGILTQAARSAITHNPTLRQYYLRMKAQGKPYGVILNNVNNKLLHILFSLVLHDCDFELDHEAKRALRA

SEQ ID NO: 258584 - protein, 421 aa, unidentified
MDYRWYHANLSDWRLLTMLNAVGIDVSKGKSTVSVLQPGGTLIKKPFVVVHSSSSLNALSRFIQDLEGETRVVMECTGRYHEPLLHSLHDAGIFVSAVNPHLIKNFGNNTIRKVKSDPADSRKIARYALDNWASLRQYSDMDTTRIQLKTLNSQMDFFTKQKVAARTNLISLLDMTYPGVNSLFSSPARDDGSEKWLDYAESFWHVDCVRKIGLKAFTERYQAFCKRNGYNFQSGKPEELYQAAKELVAVYPKDKVYKDLIMTGIKQLKTTTEHVEHIRHEMDALASTLPEYETVLSIRGVGKTLGPQLIAEIGDITNYTHREALTAFAGVDPGVNESGSFRSKSNPASKCGSARLRKTLFLIMTSLLQTSPADDRVYQFLDKKRSEGKPYLVYMTAGANKFLRIYYGKVKACLAAQTKSE

SEQ ID NO: 258585 - protein, 390 aa, unidentified
MIVIGTDTHKRTHALAAVDEGTGRVRGHREIKADDAGHLAAVKWARSLDDERVWAIEDCRHVSRRLEQALIAAGERVVRVAPHRMGASRRGEREPGKSDEIDSLAIARAVVKDGVECFPAAFLDEQAMEIRLIADHRSDLVAERTRVQNRLRWHLVELDPELEASLKRGSLADARQLDRIDRRLRRIAPCPRVRVAREQVAQIRQLTRNVNTLKDELLALIKAHRPQLLSETGCGPLTAAILIGRTAGAERFQTDASFALQTGTAPIKCSSGQRQQHRLNRGGDRQLNHALHIIAITRAQHDPATREYLARKQAEGKTTKGALRCLKRHLARRFHHLLAPPAEPAATEPSVRSRQHDRDDILPDIPDHPRRRDNIDTTITAAPTTMRCVR

SEQ ID NO: 258586 - protein, 339 aa, unidentified
MNSMAVGVDIAKQVFQVHYVDQESGEIVNKPIKRAKFLEHFANRARCLIGMEACGGAHHWARQLTKLGHEVRLMPAQFVKAFNIRNKNDAADARAIWLAVQQPGKPVAVKSEMQQAMLALHRMREQLVKFRTMQSNGLRGLLTEYGEVMSKGRAKLDKEIPAVLGRITERLPAALIETLREQWNGLARLDEQIAEIERRMRDWKKEERAVKAISEIPGVGLLTATAAVAMMGDPKAFSSGREFAAWAGLVPKQTGSGGKVNLHGISRRGDTYLRTLLIHGARSVLTHAKELGPWVEQMKQRRPMNVVIVALANKMARTIWAVLAHDRPYQKDYLSVKPV

SEQ ID NO: 258587 - protein, 383 aa, unidentified
MKKTKGTLSKNDTKKETVLHLAFELSETKWKLGFSDGNKMRFKGMAARNLGQLEEEIEMAKERFKLEGEIKIVSCYEAGRDGFWLHRYLLSCGIDNIVVDSSSIEVNRRKRRTKTDRIDARKLLQMLMRYRGGERKLWSVVNVPGVEAEDGRQLHRELEVLNKERTMHRSRIRGLLIQQGLEVSNPSGKGFFEELESLRTWDGRALAEDLKERVVREHERLRNVEDQMKLLRKEREIRVESMATPSLRMVEQLRSLYGVGKTSSWDFVMEMYGWRKFRNRKEVGAFAGLTPTPYDSGGSRREQGISKTGRGRVRGLSIQISWGWLRFQPQSKLSKWFWERFGHGGKRMRKIGIVAVARRLLIDMWRYLEYGVIPDGARVRPSA

SEQ ID NO: 258588 - protein, 363 aa, unidentified
MKGNRDVHQQRMAEPTSESTIGLDLGDRWSRYCVIDSRGVVVKEDRVRTSPEAVEETFRVVLASKIVIEAGTHSPWVSRLLERLGHRVIVANARKVRLIYESDRKNDRLDAQMLAKLGRVDVSLLAPVQHRSLEAQTDLAVVHGRDALVSARVQLINAVRGLVKSMGGRLPASTTAAFASKMASLIPPPLKSALAPLLKSIQHLSEQIRRCDRQVEELARKKYPQTKLLQQVKGVGPLISLAYVLTLDNPARFQKSRMVGSYLGLQPKQSQSGESSPQLGITKSGNGFLRRMLVQAAQYILGPLASDSRLRRWSLGLSQRGGKNSKKRAVIAVARKLAVLLHKLWVTSEVYEPLYGIEPSTAI

SEQ ID NO: 258589 - protein, 335 aa, unidentified
MALYCGIDLHSTNHLVTVIDEEDRRLYEKRLPNRLEATLQALAPYREELTAVAVESTFNWYWLVDGLMEAGYEVRLVNTAAVKQYEGLKYADDRHDAYWLAHLMRLGVLPTGYIYPKAARALRDLMRRRLGLVRVASRQLIGVQSEIWRQTGLRVSSNRLRRAEFAMEFADANVARAVQSALSVYRALRAEIEGLEQTILSQVKLEPAFEVLRTITGVGPILALTIMLETGEVRRFAGVGNFASYARCVKSERLSNGKRKGEGNAKSGNKYLSWAFSEAAHFAVRYCPQAKRFYERKRAHRNGIVAIRACAHKLARAAYYMMRDQTPFDAQRLFA

SEQ ID NO: 258590 - protein, 431 aa, unidentified
MWLVLGVSWGDQSGKGNSNKGGDKLVQLYVGIDIGSKLHHVAVFTESGEVIKRDKIVHRMRDISRFIEELKTLKEKHSCTDVFVGMENSSGYAAPLDRMLIHSGFKVIAINSITIDKYRNLVGQPRKDDPYDAELIGSYLIDIYHSKGIRRNAQEIGSPDQASMGKLRALTRHFRTTKRDLTRANNRLKKHLLGYFPDFLEAFENIQTKTARALLRHYDTVSKVKRARASSIAKIRISSRRTVGPKAASKLKALVKEIHYLDPLENEMGIVTSNLIKQMGWLIDQLEELGSQIEEMAAELSSIQEITKTVPGAGIRNTAELVAEIGDVRRFSTRDKLGIYCGIGCLNRSSGKKVAARKPTQINHRAKSVLCMMAQAAIVHDDTSRRYYDKKRGEGKSHWHAIKCLAKYLLRRIYLLLNSVEAHDAVTLLAA

SEQ ID NO: 258591 - protein, 262 aa, unidentified
MDYYAGLDVSMNETHICVVERDGAVVLEAKASSTPEAIAAVLETAPACAKIVLETGRMAPMLFHGLAALGLPVICIESRQAYQALKSLATHKTDRNDARGLAHLARTGFFKPVDVKSLPAHAVRALIIARKKLVGQRVTLENQIRGLAVVFRIRFPRGLSPRFTEQVIRASQGIAGLSGAMQGLLAARKAVLGAVVAIDRGMRLLARSSQACQRLMTIPGVGQLTALAFVATIDAPERFRRSRDVGAYLGLVPRRFQSGEID

SEQ ID NO: 258592 - protein, 405 aa, unidentified
MGVIFVGDDWAEAHHDVYVCDEAGARLVSRRLPEGVQGIAALHELLAAHATDPGQVHIGIETDRGLWVQALVEAGYVVYAINPKAASRYRDRHTLSGAKSDSGDAKMLAELVRTDRHNHRPVAGDSALGEGIKILARAHQNLIWDRNRATNRLRSALREYFPAALATFDDLADRDTLAVLARAATPAEARKLTPGRARTLLRAAGRTRNIEARAQAIVDGLRADTLTAPGAVASAFAATTRSAVAVIGELNRQIAALETELTAHFDQHPDADIYLSQPGIGVILGARALGEFGDDPNRYADTKSRKNYAGTSPITKASGRSRVVLARYARNTRLADACQQWAFCALNASPGARAFYDQRRQNGDTHQRALRALANRLVGLLHGCLRHHTPYDEHTAWAHRQQTAA

SEQ ID NO: 258593 - protein, 444 aa, unidentified
MNSTLSNVLGTEESASSPEPDRGALCCEPCAAWVGIDWADENHAVCIRPAEGGPDESLCVTNTAAELHQWVRTLQRRFDDRPVAVCFEKTRNLLVNVLVQYDFIVLYPVNPAMVTKYREAFAPSGAKDDDGDSATMLDLLCTHQAKLTAWVPDDDQTRKLAGLCEERRQAVDQRVGIVQELQAKLKRYYPEAITLAGKDLTSPMACAFLERWPDPVALRRAKPQTIRTFYHRHNCRSEKLIDERLDLIASTPPATKDRSIIDPLVITIRMLARTIRALSKSIEEFDAQTDKVSKAHPDTHIFRSFPGAGPRLAPRLLTAFGTDRSRYEHASDMQCYSGVAPVTEASGKRKRVRRRWRCPKFMLQTFHEFANCSLQYSAWAKAYYEHRRAQNKKVGHNTIVRALAWKWIRVIHACWKNETEYNEAQYIEALRRHKSPICEHLPAA

SEQ ID NO: 258594 - protein, 341 aa, unidentified
MNVTTIGIDLAKTVFSIHGTDQHGKVVVRKRLNRPKLLAFFAQLPPCLIGMEACSGAHYWAREMTKLGHDARIIAPRFVAPYRKSSKNDDNDAEAICEAVSRPNMRFVPIKTEDQQATLSLHRIRRGLTKERTAQINQIRGLLAEFGLIIPQGRYAARRRVPEILEDAENGLPMLARRLLNNINQRILQLDEEILAYDREIEAMARRDEQAKRLMAIPGIGPQTATALLASAPDPRQFKSGRHFAAWLGLVPRQYSTGGKPRLGRITKHGDKYLRTLLIHGTRAVIATIDTKEDRLSAWAKELKERRGYKRAAVAMAAKNARIVWALLMNQTEFKTQPVEG

SEQ ID NO: 258595 - protein, 376 aa, unidentified
MKQFNDIYVGLDVHKDTIAVAIVRGLRSPAQYFGEIANTPQAVTKLLSKLSPEGEVLNLCYEAGPCGYELYHQLSALGHACEVVAPSLIPRKAGVRIKTDRRDAMSLAKLHADGSLTAVWVPGKEQEGIRDLSRAREDFKQIETKARQRLGAFLLRNGKIYSGKSKWTQAHWSWMQELSFDTPMQYIVMQEYIEAVKEAGRRVLSLEGQIRLAVRGWSLEPVLQSLMAMRGVSMVTALTILAELGDLTRFESPKLLMSFLGLVPSEYSSGGTKRQGSITKTGNGHVRRVLIEAAWNYRFPARKSRTIEVRAQKTSERVQAMAWEGQKRLCGRYQKLLNLGKPKQKVCAAVAREMAGFIWAIACEASGKVHASRVTA

SEQ ID NO: 258596 - protein, 427 aa, unidentified
MNKGVEKPSETLDDFEILYERCCGLDVHKKQITACLITPDQNGRPKREVRTFGTMTEDLLALHDWLLDNQCTHVAMESTGVYWKPVYNILEGSFKLFLVNASHIKAVPGRKKTDKLDAIWIARLLRVGLLKGSFIPEPEIRELRDLVRYRTTLIQEKAREIQRVQKILEDTNIKLSSVATDTSGVSARAILNSLIAGRTDPKSLAELAKGRLRKKIPELQKALRGVVKPHHRLLLSELLAHIEYIEESIARLNAEIEERMRPFAKQAQDLATIPGLKEFIPQIVISEVGVDLSSFPSAKHFASWLGVCPGKNESAGKNKSAKTKKGNSWLKSALIQAAWAASHTKDTYLSALFRRLVGRRGKKKALVAVAHAMTVIIYHVLTKGVPYHELGADYFLKLDRKGMERKLVRRLEELGYKVILEEAEPAA

SEQ ID NO: 258597 - protein, 370 aa, unidentified
MGLPSGLQAGRQWRGRVRNPLAWVTDQVRWEPEPFVPGSETRTVDRAALESLLVFARMSPNTMTTIHAGLDIAKLNLQLHLAGRLHDLPNTPAGHRRLLKLLAGQPGVHVVCEATGGYERDVAAALHAASVPVSVLNPARVRHFARATGQRAKTDDLDAAVLSAYGHALQPKPTAPRTQQEQQLAELVRRRVQVVEILVGQRQQIERLTMPALRRQAQSLVRRLERDLEQIEGQLKALRTQAAALDERVQKLEAITGVGAITALGVLAELPELGTLNRRQAAALAGLAPHPRESGQWHGRRRIGGGRAPVRRALYMAALVAAHSNRQLKEFYQRLRAAGKPAKVALTAVLRKLIVLMNHILKNPDFALQN

SEQ ID NO: 258598 - protein, 354 aa, unidentified
MTRTTKYVAFDVHQATTVTSVREESGRVLARSILETHGPSIVEFLRGLRGAIHVAFEEGTQAQWLHDLIAPLVHRVVVCDRRGQARHGNKGDQVDADQLSELLRRGGLRSVYHGSAHHADLKELTHAYRSLVEDGTRVMLRLKALFRARAIRTPGTAVYQPRHRPQWLAQLADHGARCRAEVLYAELDVLRALRPKAKAAMIAEARRDPAWPVLRTIPFLGPVRVALLLATMQTPWRFRSKRHLWAYAGLAVVTKSSADYTLVAGQPGRRRRAPLTRGLNRNHNRVLKDVFKGAATAATARPGPLQDFYHAVIARGVREELARVTLTRKLAALTLRLWKKGAPYDPTQLTQQAG

SEQ ID NO: 258599 - protein, 325 aa, unidentified
MQGKEASEQETLNCTVGIDVSKTWLDAHALPSSASLRVANAAEGIRKLKRWLLRHKPKLVAVEATGKWHRELCRSLQASQIAVAITDPYRVRMFAKAQGNFAKTDRLDAKVLAQFAAVMAPACRAPTPQALEMLKELVTARCSAVAEETALKNQLVAAESTFLKRQLTHRITRLAADIKALERESLRRIRADEGLAKRYTILTSIPGFGTVVATTLIACLAELGSLSAKQIGMLAGLAPMADDSGERHGLRVIWGGRAAVRRILYLAALTASQRNLDMKAFYRRLIAKGKPAKVALIAVARKLVLLANTLVAENRTWQQKAPQHA

SEQ ID NO: 258600 - protein, 354 aa, unidentified
MKRTTKYVALDVHQATTVASVREESGRVIARSILPTEEGTILEFLKGMRGAIHVAFEEGTQAQWLYDLLVPVVDRVLVCDRRGKSRQGNKGDQVDADELSELLRRGALRAVYHGSPHRSTLRELTRTYQNVVEDATRVMLRLKALFRARGIKAPGKGVYHPKNREEWLAKLAGDGVRLRARTLYAQLDVLRELRPRVKAAMVAEARRDPAWAVLGSIPFLGPVRVALLLAIMRTPWRFRTKRNLWAYCGLAVVTHSTAEYALVDGRPVRRRRAPMTRGLNRNYNRELKDVFKGAATAATGRPGPLQDFYEGMIARGMREELARVTLTRKLAAVTLRLWKEGERYDPEKLTMQAR

SEQ ID NO: 258601 - protein, 400 aa, unidentified
MNSVGIDISKGRSTIAVMRPFGEVVISPFEVRHTGSELSKLAKQLKSLDGETRVVMEATGNYHASVAKLLHNAGLYVSVINAKLVHGYGNNELRRVKTDRKDAVKLANYGLDRWLTLPRYIPEEDTRLLLKNCYRQYRQYSKVQTVLKNNLISLLDTVFPNANRLFSSPIRGDGSEKWVDFVAEFWHCRCVSEKSERAFTSKYLRWCRKHGYNFREAKAHTIYAEASGHIGVMPKSETTKLLVEQAVAQLRATSTALAALKHEMQSLASQLPEYPAVMDMFGVGLTLGPQLIAEIGDVRRFYSKKALVAYAGLDAPPNDSGDVTGRHKSMSKIGASSLRRTLFLVMSVYAPLDEPVCQFMDRKRAERKPYRVYMMASANKFLRIYYATVKAYLESLEHTA

SEQ ID NO: 258602 - protein, 427 aa, unidentified
MTDQPKHKAYHSWVAIDIAKDYNVVMVELTDGKTRRFRMANSGKDHDRLIEVIRELPQPCHIGFEATGNYHRPLAYRLLTEGFDVSLISSLASARYREAIFNSWDKNDPKDAGILLELLKRGIVQTYVDPIRSGYHDIQELSKTYSNITLSRTRLQHSILTHYLPLYFPEMAKFWCSTRNAWWINYLLHFPTPASVIQYSEQAFCQIASPIIGRKMNKQAKLLELYEAAQHSIGLPIASDSLACQTFQLQLQRYQELTNQRQQLEQQAETTLSMNPDYCLLKTIPGIGPIVAMTILAEGGDLRRFNHHRQFLKYCGLDLAKNQSGNFRGQDKLSKRGNARLRLALYMASLHAIRQTENSFRNKFHRYTQATPKDADCKRKAMTAVMAKMARVIHALIKSGTPYQGYFEVSPSGSIPLCRAVGANRTP

SEQ ID NO: 258603 - protein, 339 aa, unidentified
MSKLTQPRQAMVFCGIDVSAATLAVAVQQENQRFEERVFDNTASGHKALIGWLRKDKAPARVSLEATGIYSLDLALALDQAEGIEVAVLNPKLMHRFAQTLRRSKTDSADAQVLAEYSCRMPFTPWSAPELSGLRLRTISRHIQSLVVEQTRQNNRLHNAEKSATTPRCVVNDLKRSMASLKLRIVRLRREALELVRSDEAMRKRFDLLILIPGIAAISALQLLGELAPLSPEMSVRQWVAHSGLDPSHQVSGTSVHKPSRISRAGNRHLRHALYMPALVAVRRDPHLKAFYETLLNRHKAKLQALIAVARKLLHAIYGILRTQTAYDGSKLFPLIKTT

SEQ ID NO: 258604 - protein, 343 aa, unidentified
MTHYVGLDVSQKLTSICIVDATGRKLWRGQCASDPEQIERAIGRHGGEDVRVGIETGPMTPWLVHELRGRGLDVTCLDARHAKAALKLQINKTDQNDAEGLAQIMRTGWYRAVHVKSFDAHRARALLGARAQLVGMTTRLSNHIRGVLITFGMLPGAKRGQRFDRRVESLLAERADVALIVRPMLVAWRQLREQVAGFDKTVRTLVKSSPACRHLMSVPGIGVLSVLAYVSTVEDPARFRRSRSVGAHLGLTPRQYQSGEIDRSGKISKCGDTLARTLMYEAAVVLMTRVKRASGLKDWAQAIARRSGAGKARIALARKLAVIMHHIWRSGAPFRWPAPSASA

SEQ ID NO: 258605 - protein, 437 aa, unidentified
MNTQPTTPNALPQDYDLFVGLDWADDQHVLSVGAAGATTIQRSTLEQTPQALAQWANALRTRCPNGWIAVCLEQSRGALIAGLMAYEHLVLYPVNPKSLARFRQALHPSGSKDDPNDADLLLELVLKHCDRLRPWRPDTVQTRQLALLCEQRRGFVDQRTALTNQLQAHLKAIFPQALQLVGQNLASLMATDFLKKWPTLAAVQAASPTVLRQFYYGHNSRSEELIRQRLGLVKSAVALTCDPALLAAHSLGIQTLVAQLQALRPFIEQHDQQIAQLFAAHPDHAIFESLPGAGAVLAPRLLTALGTDRSRFPQAVAHSCYTGIAPVTEQSGKTQRWVHVRWSCPKFLRQSWHEFANSSRKFCPWARACYEHLRKKMEHHQAIRKLAYIWQRIVWRMWQNHDTYDEVRYLSSLQTRGLEHYASLRAKASPQPPQPAT

SEQ ID NO: 258606 - protein, 400 aa, unidentified
MRAVFGIDVSKASSEVAILVNGEKVHGYTISNDAIGFSRLLGDLRTVHKPEIIFEAKGVYSRRLQTFLDEHGYAYTRLNPLEAKKQLDSLRVRKTDQIDAEKLAQSQFVLNRKTTYVQEEVYQNLRDLSRFYQNLTEDIVRAKNRLHKALQVTFPELENILSTPTGEQYWNLVIAFPCKDFVLELSKDKLSESIRQSTSKRISDKRVAYLAEKLIALANQSYCAVKKTSPILEEVRYYAKELLRLSERRQAVLDQMVKLAQPLPEYDILLSIPGIAETTATSIIGELGDIRRFQSANQINAFIGIDLRHYESGNFLAKEHITKRGNSYARKILFKCIHNIASASHTNPCHIADFYKKRKRQSQTTSTKPHTIASIHRLIRTMYYLIMHNKLYDYASTQNR

SEQ ID NO: 258607 - protein, 473 aa, unidentified
MPRVAVEDYDVPLLSLEGLVSQDNEEDVVVNSSALSRGDRRRNSRLSRLRELVPVGNAVLGIDLADTKQVVVLTDLDSQVVARKRVKAKAWELGLVLDWAQRTATAKGFAGVTVGCEPTGHRWRVVEQLAVQRDVPFVCVNPMLVGKARETEDYTRDKSDDKDAVVIARLVAQLHCYVPERAEETWARLRQLGARRERLLVEATACVHQLRDLLECAWPGVLDAAADPFGSSNWCAALSVVLKRCDGHPERLSRWTLARFESVVVKELPRWGGLRRRRAIIEAVFTALVDPNGVWAQRRGALERAGWVLQDWQATTQRVAQVEARMVEVLDELDLTDLVTSIPGLSAVGAAAILAETGDPTRFDSPRALVKHAGLCPRENTSGNFCGRSQISRRGRPRLRLAAWRAAWGALHHNPVMSARYRYLTTRDDNPLTDGQARAAIAAALLRWLHVVTTRRIAWDPRVAGAEVMPVAA

SEQ ID NO: 258608 - protein, 343 aa, unidentified
MKLHVLGIDLGKTVFHLVGLDSTGRVVIRKKCSRTQLLAFTANLEVELIGMESCSGSHFLGRALREQGHQVRLMPAQYVKPYVQTNKSDFLDAEAIAEAVQRPRMRFVPIKTEEQLDLQALHRVRERWVMRRTAVVNQIRSLLLERGLTLPKGRGYVDRQLPRILEDGELRLSGCFRVLLAQLKLELDQLTARIEEMDRVIQKTAKENEACQRLTEIPGVGPVTATALIAAVGNGSTFQKGRNLAAWMGIVPGEYSTGGKQKLLGISKRGNKYLRTLFIQGARSVLQQRHKQAPGLSSWLAQLLARAHQNVVIVALANKLVRMAWAVLCKNERYRAPVLAVTT

SEQ ID NO: 258609 - protein, 370 aa, unidentified
MGSIAFVGMDVHKATVTVAVAEGVRGGEVRQLGTFPNRAEVIAKLAERLAGAGRELSFCYEAGPCGYGLQRQLVALGHACVVVAPSLIPSKPGDRVKTDRRDALSLAKLHRAGELTAVWVPDAAHEAMRDLVRARATAVRVLGKARQHLQGFLLRHGRVYAGRTTWTLAYRRWLTTLRFQHPAQQIVLQDYIHAVEDAERRVARLAGQITGLLPSWSLAPVVRALQAMRGVGQIVAVTVAAEVGDFSRFANPRQLMAYLGLVPSEHSSGSTVRRGGITKAGNALARRVLIEGAWTYRMQARVSRKLYDRLEQLPSTVRDIAWKAQLRLCSRYRHLIAAGKARVVVTTAIAREMAGFIWAIARQIQLQPTG

SEQ ID NO: 258610 - protein, 340 aa, unidentified
MTEIKRIAIDTSKSVFTLHGVDAAGRAVLRRNLRRGELLRFFERLPPVEVALEACGGSHHWGRALAALGHRVRLIPPQYVKPFVKRSKNDRNDAEAIGVAAAQPSIGSVPIKSVEQQAAAMLLSVRELLVRQRTQLVNAMRGHAAELGVVAALGEKGLRELQTEIVAADEAAVPAAAKQAIALLGREVERIEGRLRAIEAELMQQHKANPLSRRLAAIPGIGPIGALNLALRVDQTQFASARHFAAWLGLVPRECSTAGRQRLGGISRAGDERLRQLLVLGATAVIQHAKPGRPATSQWLLNLLSHKPRKLAAVALANKMARIVWAMMTSGKTYRPAPAA

SEQ ID NO: 258611 - protein, 343 aa, unidentified
MQIRSVGIDLGKTTFHLVALGDNGKVLLKKKFTQKQLIAFTANMQTCLIGMEACSGSHFLGRALREQGHDVKLIPAQFVKPFVKSNKNDFIDAEAIAEAVDRENMRFVPIKTDDQLDLQALHRVRDRLMARRTSLINLIRAFLLERGIVFAKSPIRLREALPEVLENVNENLTPRMRNLVAMLWSEWKDLELQIVQMNDEVERIASSDAACRRLRQIPGIGPLVATAIVASIGNGAAFRKGREFAAWMGLLPKQHSTGGKARLYGISKRGNSYLRKILIHGARAVVLRSKRDRIAMGAWMTSLETRAPRNVLIVATAHKLARIAWAVLSTGQDYRAVPEALTV

SEQ ID NO: 258612 - protein, 441 aa, unidentified
MRLVYSRCCGMDVHKDSITACVLVYSDSAEPDVRKKQFETHWKALANLRLWLFAQKVTHVAMESTGVYWKPVWQALEGHFTLILGNPYQIKNIPGRKTDRRDSQWIAQLLAHGLIRPSFVPPPATRQLRDWTRYRVKLSEENNRIHNRTHKVLEDACLKLDTVASDILGASGRAIIQAIIAGVESPNFLAERAKARLTKKIPQLRLAMRGRITEHHRLLLRELMEDLEFVERKIARLEKTIRAAVDPQQVERLCSIPGVDEITAWTILAELGSDMSVFADAKHAASWAGLCPGNHESAGKRLSNRTRKGNRWLRRGLCQSAWAASHTKKCYLSAFFYRKAAKHGVRKATVATAHHILVIAYCLLRDGSYYRELGDEFFDRLHPERTRNRLVRRLERMGLEVTLLPKVVVDSQPTLPQKRRRGRPCKCAEKSIPCAHNHMTP

SEQ ID NO: 258613 - protein, 349 aa, unidentified
MRFIIGCDFHPSYQQLALLDTQTGEVVEKSLTHENLEEVRAFYAGLPGPARVGIEASGQSQWFERLLAELGHELWLGDAAKIRAREPRKQKTDRRDALLLLELLQQGRFPRIWVPTLAERDTRQLLLHRHKWVRLRTQVKNQLQALALNQGVRRKGKLWSVAGRAQLEGLELPPWTQRRRADLLKLLDDLQPGILDLDRDVAEQARARPEVRRLMTHPGVGPVTALAFVLTLGPASRFPRGKQVASYLGLIPSEHSSGGKQRLGHISKQGNAFLRGLLVEAAQSAVRYEPRLRREYSRLAQRKGRAIAKVAMARKLAVQLYWMLRGEKDYAQQVQVRVQDSPRHPVVVA

SEQ ID NO: 258614 - protein, 338 aa, unidentified
MKNILDLNKAIFIGIDAHPTEHTALAMNRFEEQQGILQFENTHEGIQEFLSWLPTLKKKTKDIVIGIEGGGNARHALLSALLSKNYEQVYEVNPQYTKQQRTYGTRGDKSDPFDAKLIAEIVTRKLDLLPRITSHELTDWMLSLRKNVWFYEELSVEGTRYKNQLHKLRREYKLSTSEDEKAVLTRMIDQREQRLSETKKAKKELTHIFTELLENKGNNLTTIPGIGIIIAARLIAHTNGIERFSAKDKYIKYAGIAPKERSSGTKKSFMRNNAGKRSLNTIFFYAALVQLTRNPKSKEYYQKKVAEGKTKSQALVSLMKVLASMVYTMLKTGKEYQG

SEQ ID NO: 258615 - protein, 345 aa, unidentified
MVMIGIDPHKRTHTAVAIDTAERVLDERLVRATSKQVPELLEWAKRLDGGDRIWAIESAGGLGYLLAQQLLAAGEHVVDIPATRASRVRLLGTGRSDKNDPNDARSVAIAALRAAELVPVRVEDHASVLRLMSCRHTQLGWSYNKTACRLHALVADLVPGGITKEVVVCQARSLLADHPSIGAVAVERHALALDLVDELERLNTQRKALRKRIAVPVDASGTTLTEIFGVGDVGAAIILGQVGDVGRFRTADRFAAYNGTAPIEWSSGNPARPIHRLSRRGNRTLNHVIHIAAVTQLRHRHSPGRAYYDAKRTQGLTGQAALRSLKRRISDVIYRRLVADAARRS

SEQ ID NO: 258616 - protein, 350 aa, unidentified
MTTLTANDVVVTGGVDTHQDLHVAAALDQLGRVLGTHTFPTTAAGYRRLLAWLRGHGRLERVGVEGTGSYGAALARHLADAGVQVIEVARPNRQVRRRYGKTDVVDAIAAARAVLSGEATGTPKSHDGPVEALRTLQAVQRSGNKARTQALNQIHQLLVTAPQQLRARLRPLNRTDLLATCAGFRIAADDDSLQAMTRLALRELAQRVLHLDEQLALVTKRLHRITADVAPKLVATTGVGPAVASALLITAGDNPHRMHSEAAFAALCGSNPIPASSGKTNRHRLNRGGDRNANAALWRIVIVRLACDERTRAYLARRQAQGKTKTEAIRCLKRYVAREIFKAMPSTAAI

SEQ ID NO: 258617 - protein, 320 aa, unidentified
MKQIKFFIGTDVSKEWLDMCIILEEEVIHRQQIKNKEAAIRKWLKQTQKQYGYSMQDSLFTMEFTGIYNYHLLELLHQAGANIWLIPGLEINASRGLQRSKNDKDDAKLIAEYAMKNLKKVRLWKKPRTVLKQLAALLMMRDKLMTSKHQYETTLKEYKSFSTKEEYLIIKDYSSTMLKTIRQDLKTIEHQIKDIIEGDEQLKELNEYITSVDGVGIITSANTLVETNEFLDILEPKKFSNHSGVVPHKDESGKKIKKPKVSHKANKKMKKLLHLAAMSVIRKKGELRDYYERKIAEGKNKMSVLNAIRNKLVLRNFCMC

SEQ ID NO: 258618 - protein, 428 aa, unidentified
MQAIQERLRRVTPTTIIVGIDVAKEIHFARITDYRGIDLIKPFKVHNSIEGFESLLEKVEKIREKQSCDQVMIGMEPSGHYWRAVGWYLKLHESAPVLLGVNPYHTKQTKELDDNSQTKSDPKDALVIAHLIRDGRYFDTYLPEGEYGDLRLLNTERQRIMKQISRANNALIAMLDEFFPEYSTLWGNVTCPTSLKLLKKYVFPSDILTAPRSELREAIREASGGTEGDKLLAEMIKAAGRSVGVKEGQRAARLRITNLIDDMAYYEGKKAGIEDELEAAMDGLQLGAVLQSMLGVGPIISSAFLGEVGDITRFDNWKQVRSLAGLNLVENSSGKHKGETKVSKRGRPYLRHMLYMAGECGCRCNPEMNGFYRYLRNRKNNPLNGNQAIVATGLKVMRILFHLAKTGEAYDPGKALGAVRLQQIASLD

SEQ ID NO: 258619 - protein, 394 aa, unidentified
MKLIGIDIGKNKHFFCVMDQQTGEIISQPVSFSNDKEGFDFLVQKIKSYPKDSIPIGMEDTGHYHFALLKYLLDLQYTVALINPKTTDFNRKMQGGITKNDKLDTINICDVLDTPERKKQYRITKVNSFDLYEQKQLTRHHHNLKEEENVYKNRLQKCIDIVFPEFNKLFNSKYGIVYMNILKMFGSAENIANTDIRTIRKCFEIEGRGNRISLTPERLKECTRSSIGISSSAEVIQIKHLTAQIELIEEQLTEIDKKIEEFSIQNNSPILSIPGISHFSGTSILAELGDISNYSKPSQIIKFAGVAPLHYESSQFNAQHTAITKKGSKYLRKTLYQIILPVIRHNPVFNKYYQLKISQGKGHRCAQGHCVRKLLRIIYHLLKTNQQFDPQLLR

SEQ ID NO: 258620 - protein, 351 aa, unidentified
MSMLCGLDLHRGQITFDAVEIESGVEWRGRLWQPDRARFRRWLHDELGTRAAGGSVEIAVEGCTGWRFVVEEIQAAGFVAHVAEPADTQAARGRKQRAKTDRSDARLLRDLLARDELPESWIPPTVVLEWRERVRLYKTLTEQRSAWAQRIHAELYQHGVAVPEGRVRSLETRDWLLGSAVELSAAGRQRIQVGYRMMEATDTEARQLRQQIHRFGQRQPACRALAEAHYGIGPLIAVVVWSELGDCRRFSRSMQVVRHTGLDPTVDASDRRRSSGFLSRQGPQTLRWALFEAGMAASKATSPDRDYYRSVKAAHDGKLAAISMARKLARRCYHTLRNLDPGEVYAIPTGY

SEQ ID NO: 258621 - protein, 340 aa, unidentified
MVHVGVDLDKRSSQIAVLTDDGEIVQQRLVNDAVRLTKFFSQLPPQTPIAIEASGTWWWLVDLLEQLGLQPVLSNPKQTKAIAAARLKNDRVDAERLALLLRGDLLPTVWIPPAALREARELIRHRIQLVWLRGVIRNRLHAMLARRNLQPTSGKSWLTQRGQRELQRLPLAETPSRIREDCGALLPTLDAQIRRLDADLVTRWGADPRVRRLTTIPGIGPFIAIVLVLELGDIARFASAKRVASYVGLTPRVRGSAGRVRAGHITKEGNRLLRWVLVLAATQAIRRPGPLRAWFHAVKKRRGKKVARVALARRLAEIVFHVWKQECDYFTVVRHGVVRG

SEQ ID NO: 258622 - protein, 343 aa, unidentified
MRTYYYIGLDIHKRTISYCIKAIDGSLIGQGKIEADRKSLDEWAKGLPGPWVGAMEATIFTGWVYDFLKPHAVALKVAHPEMLKAITAAKKKNDRADAEKIADLLRVNLLPECHMLSEEIRELRRILRYRNHIVRTAVKMQNKISGLLMEVGVSYSKRRIHGRKYFHEILERVEEIPPSVKELLKLSRSGYEMFRTFQKKLVETLRTNTLIHDRVQRLMTIPGIGEITALTWVLEIGDPGRFASIRQAVSYCGLCSAQRESAGKEQRGPISKKRNKHLQTMLIEAAKLAPHWNEQLAIVHERELKKGNRNRATLAVARRLVAYMLAVDKNQADFKLPAEIQAA

SEQ ID NO: 258623 - protein, 371 aa, unidentified
MLFRLEVIMTINIGVDLHKTQFTTFARTGQGMFGKFSTGDEGYQKFLKLISDWQGEGHTVRLGVESTGNTRYFRNRMEKTGVEVIVINTLKFKVVNESVKKTDRHDAATIAEFLEKDMLPESTLCSVKTEQLRRLLAVRRSLVQTKVGIKNQIHSMLVSLGMEDKKSSLQSKRGRQKVLDALDRAVTELVAQPLFETIDLLEQQVKKIEAELERLTTEDRVVELLKTIPGCGPITAWTVRAGIDDIRRFASAKKLAAYAGLVPWVQSSNETSHYGKITKRGPEELRTALVQLVLGMVRYQKVTARWRIMERYQMLKSTKGSGKSIVATARKLAMMIWHMLSSDQPFRPGLMLDTEIWEKADAMRASTRNPA

SEQ ID NO: 258624 - protein, 429 aa, unidentified
MNSTQNKKIEQVKETTMIVGIDVGSEKHYFRAFNWRGIELTRKPVAFSNSMEGFNSFYNTIVELMQKSELEEALVGIEPTGHYWFDLGQFMGEKSIKFVMVNPHHVHKTKELDDNSPSKNDRKDPRVIAGLVRDGRYFYSYMPTGVYAELRNASNRRFVLVEEQTRAKNRLQKWIAVYFPEYKGIYTHIDAKGGLLVLKQAPTPEEIVKLGEEGIIKIWKDAKLRGNGNKRALKILNAAMRSIGLRTGLTEARMEIQDLIEDYELQTKRLERVNDLIKELCQQIRYADKLLEIKGIGIITVAGFIAEVGDITRFDSTKELQKLAGLELVADSSGKHNGKTKISKRGRKRLRYLLFEAAISVVGKNEEFKEIHRYYTTREKNPLKKMQSLIAVACKLIRVFHVILTKGVSYDASKMLEDIRHPGEQLKAA

SEQ ID NO: 258625 - protein, 397 aa, unidentified
MKCPQGLQHRGSNAHSAVGRRRERHIQHEGGTDMTTVHYVGMDVDKQKIVLARVGAGRDTRATEHVIANRPSAVKKYFVALLADAEVHATYEAGCFGFALYRQLSALGVSVVVAAPGLIPRKPADRVKTDRRDAHSLALSLRAGQLTGIYVPTLQDESVRDYLRMYDALRGDLRICKQRVLQFLLRRDIRYEGGGPWTVKHKHWLSSLEFPQSRDRQTLDMYLSQMQELEAKCAEVAAEVESIATQDCYRERTQKLTAFKGIKTLIALSFVSDIGDFRRFASARQFMAYLGLVPSERSSGNKRRQGGISKAGNSHLRRLLVEAAWHYRSYHPSSRDLTERRRGVDPAVLSYANRAGRRLNRKYMHMVLRGKRSQVAVTAVSRELAGFLWGAMTGQVA

SEQ ID NO: 258626 - protein, 345 aa, unidentified
MKKVIAGMDLHSNNVVIGVMDLDGQRLASRKLPCELIEVVKFLTPFKKRLERVAVESTYNWYWLVDGLQALKYPVVLANPAGMEQYSGIKHADDTNDAFFVAELLRLAILPTGHIYDAELRPVRDLLRRRLMLVHQRTALMLSFKSLYTRTTGQELTLSQLKELEIKEAQQLYEHPANQLIAGMQIKHIEQLTESIEKIEKAVLGSARELPYYAKLATLPGVGRILGMTITMEVGDIGRFADPGHFASYCRTVEAKRMSNRKKKGENNSKCGNKYLAWAFVEAANFARRYDEQCRKWFERKVARTSNVIAIKALACKLAKAAWYLMAEGTDYDPKRMFGQPAKTK

SEQ ID NO: 258627 - protein, 345 aa, unidentified
MQIKSIGIDLGKTTFHLVALGAHSQVVIRKKFSRQQLLNYTANLPSCLMGMEAGVGSHFLGRAFREQGHEVRLIPAQFVRPFVKSNKNDYCDAEAIAEAVERENMRFVPIKTEDQLDLQALHRVRERLVSRRTSVINQIRAFLLERGICFRKGPASLRRQMPEILENADERLTARMRRLLDFLWQEWKHLQLQIESLSEDLEKIANSDAACVRLQQIPGVGPLVATAVVSAIGNGSAFHKGRQFAAWLGLVPRQWSTGGKPKLLGISKRGNPYLRKMFIHGARAAVLRVKREGSCLGQWMSGLETRAARNVVIVATANKLARISWAVLSSGNDYRPMYRALRCSS

SEQ ID NO: 258628 - protein, 322 aa, unidentified
MNKYKETFGVDISKDVFDVHGSNKGHNRYKNDETGFRKYLKELPQGSLVVMEATGYYHYRLAQFLYKNGVIVSVVNPLSIKRFIQMKLAKVKTDKSDARAICEYALTNEVPLYNSLTDTQSECLQLFRLLDTYLKQRTATKNKIHGEAVLGIPSKFVHRSLVRNRKQLNKEVTAIESKILSLVKEDQQEQLTLLTSIPGIGQKTALFLIVVTDGFSKFETASQLCSYVGITPTIRESGSSVRGRARISKIGNRKLRNLLFLCSFNACKHNKACKEVYERIVNKGKSKKLALIAVSNKLLKQSFAIAKSGRPYDETYVSMLPK

SEQ ID NO: 258629 - protein, 411 aa, unidentified
METMIARCCGLDVHKARLTACVRMLVDGTVSELVESFGTTSSDLLALRDWLLAHQVTHVAMESTGVYWKCVYYMLEDDFELLLVNARHIKHVPGRKTDTIDAAWIAQLLACGLLRASLVPPRPIRELRDLTRYRKALIYERGRAVNRLHKILEDAGVKLSCVATDVMGVSGRQMMRALIDGQADAEALAELAKGKLRAKLPALRKALEGRFTAHHAFLLERILAHIEALEDDIEAISARVEEQIAPFEPAVQLLRTIPGVERRSAEVIIAETGGDMSRFPSAAHLASWAGVCPGQNESAGKRRAARTRKGSPWLRATLIESARAASRSKGTYLGERYRRLARRRGDKKAIVAIAHEILTATWQMLSTGELYREPGTTVISQREADHARRRAIRQLEQLGHKVTLEPLPEAA

SEQ ID NO: 258630 - protein, 322 aa, unidentified
MKYIGIDVSKATFVVAYSSDKGGEIRTFNNTTTGIKQFIGALPKDGSIHCVMEATGNYSALLLYMLNVAGITVSMENPLKIKNFARAMLSTVKTDKIDARLIALYGEKMNPQPFKIQGEAILRLRQKRTVIRQLTKQITAMSNLRGSLAYLPVPDKGATHTVDETVKFLKKKRDRLQAELTDLVKVEFSRQLALLTTIKGIGITLATALIITTGGFTYFQNAKQVSRYLGICPTYEQSGTSVNIRGHINRNGDAYTRGLLYVAAWTASRFNAKCGETYTRLRQNGKPGKLAMIAVANKLIRQAFAVVTHDKEYVDGFVSNRP

SEQ ID NO: 258631 - protein, 403 aa, unidentified
MNNVAGIDVSKGKSMVSVLRPFGEVVAKPFSIGHTGSELKELADYLKSLDGETRVVMEHTGRYYEPVARFLHEEGVFVSAVNPKLIKDYGNNTLRKVKTDKADARKIARYGLDNWAELRQHTPMDTIRMQLKTLNRQQGLYSKTKTMMKNNLIALLDQTYPGVNALFDSPVREDGSQKWVDFATAFWHVDCVRNMSLTAFAERYRKWCKRHGYNFSQSKAVEVHAGAQDLIAMLPRDALTKTMVRQAIDALNAISTSLERLKAEMQALAAQLPEYPVVMAMHGVGDSLGPQLMAELGDVTRFTHRNAITAFAGVDPGADQSGTHEAKSTRVSKSGPPELRRALFLVMDCLLKTQPQDDPVYRFMDKKRAEGKPYLVYMTAGANKFLRIYYGRVKEYLASLEGN

SEQ ID NO: 258632 - protein, 349 aa, unidentified
MGCWEWQTLVTNKEETSRRFYTQQHPFYCGIDLHARTMYLCILDQAGATLLHRNRPAPPEALLKAITPSRDQIVLAAACMFPWYWLADLCADHGIPFVLGHALSMQAIHGGTAKNDKIDAHKIAVLLRGGMLPHADVSPAEMRATRDLLRRRMPLARTRGALLAHVHHTNSQYTLPAMGKKIASKANRDGVAERFADPAVPKRMAVDLALITSDDALLRDVERTIVTTAKHHDAQTLSLLQTVPGIGKILSRVLLYDMHDIARFPRVQDFASSCRLVKCAKASAGKRAGTSGSQIGNAHLTWAFSEAAVLCLRDHPAAQQFLARLEHTHSKGKALTILAHKLARAVYDM

SEQ ID NO: 258633 - protein, 325 aa, unidentified
MSSPEVIGIDVSAATLAVAGEELGLQAVYENTATGRNALIKALRRGRPRVRAVLEATGIYFLDLACELAAAGIEVMVVNPKAAHHFAEAILQRRKEDPVDAAMLREYGRRLDFVPWTPPAAGLFALRAIAREAQAQSKAVTAAKNRRHALAATKLTPAELIALLDRQIAEAEAIIDRLIAVALKQIKADPELRRLFKRTDSAPGFATKAAVIAMAELIVLPPMTAGQWVAQAGIDVREERSGASVQRKPRISKRGNKRLREALFYPALTAARCCPEARAFVDRLVARGKTRLQAIVALMRKLLHAIHAMWRNDEDFDAKKLFAQA

SEQ ID NO: 258634 - protein, 346 aa, unidentified
MEYIALDVHKRYTWARVENAKGDRLSELRLAHSHGTVKNFVSRWSSGSPVAIETVGNWYWVVDEIEAGGGQPQLVNARLAKLMMGSVNKSDKLDAKGMNRLQRTGTLPTVWIPSSSVRDARELPRTRMVLSRQRTQLKNRVHATLGKYGYTVEGASDAFGKKGRKIVEELLLKLPPHTQQAIGLILDELDHVTDNLKQIERQMIDTFSPCPQTQWLKSLPGVGDILAVVIWTEIGSIERFSRAEQLASYCGLVPREHSSGGKIRFGAVRRDVNVYLKWAFVEAANSSLMNAERCGYDHISGLYQRIKARRGHGKAKVAVARHLSEASFWMLKKGEPYREPMSSTQR

SEQ ID NO: 258635 - protein, 348 aa, unidentified
MIIIGVDFHPEFQQIALVDSDTGEFQEKRLAHGEEAEKFYRALAGQKVRVGMEASGHARWFERLLAELQVELWIGDAAEIRAKRVRKQKTDRQDAQLILRLLLEDRFPKIWVPSWENRDLRQLLWHRHRMVQARTRIMNQLQAVALNEGLRCKKRLWREHGRQQLEAFRLAPWASRRRCDLLELMDRLNPTIAELSQAIEQEAEKCPEARRLRMHPGVGALTALAFVLIIGRAERFDCGKQVASYLGLVPLEDSSGNRRRLGHITKQGSSMMRFLLVEAAQVTVRSVPEWRSKYLHLMMRRGRKTAKVAMARKLAVRLYWMMRQGWDYQQWSKFGSHAGQPGNRHGVQ

SEQ ID NO: 258636 - protein, 341 aa, unidentified
MEVATIGVDISKHVFHIHGVDSKGQVTNRQRLRRGEIISFFFSSLAPCLVGIEACATAHHWAREIRRLGHDVRLIPPAYVKPYLRRGAKNDAADAAAICEAVTRPNMRFVPIKSVENQGFLMLHRARGLLVRQRTMTACAIRAHFAEFGIIVGQGRQRVDGLVDLLVDEGLAIPANAHMALAVLVNQLKELDRQVDAIERELAHIQRVNPMAKLLSSIPGVGPITATALAATVPDPTMFRYGREFAAWLDLTPKQNSTGAKERLGRITKQGDSYLRHLLVIGARNIVRYPKARSRVGGGWIEALLERRRPMVVAIAVANKLARIVWAMMTTGEFYRPKLAA

SEQ ID NO: 258637 - protein, 343 aa, unidentified
MNEISTIGLDLAKNVFQIHGVDASGAVVLRRQLRRGAVEKFFAQLPPCLVGMEACGSAHHWARVIGSYGHQVRLMPPAYVKAYVKRNKNDGRDAEGICEAVTRPTMRFVPVKSIAQQAALAVHGTRTLLVRQRTMAANALRAALSELGIVAPQGYKGLRELMTRLEEPSADIPEDMRGALLILARHWQALDVDERVLERKIAKAARCDQDARRLMEAPSVGPMIASTVLAKVPDPKVFRSGRDFAAWIGLTGKDHGTGGKHRPGHISKQGDRVLRALLISGASAHLRQQKARGITDPWLRDLLARRPYKVAMVAFAAKTARIIWAMLVKGEHYRDRASVSAAA

SEQ ID NO: 258638 - protein, 345 aa, unidentified
MTTMNYIGLDVHKKTISYCVKDVSGRIQQEGKIGSTRRELDCWMKTLPQPWTVAMEATIFSGWIYDHLLPHATQIKVAHPLMLRAIAAAKKKNDRIDASKLADCMRCDFLPECHMMPRAIRDRRRTLRYRHLLVRQMVQRKNRVSGLLMETGVEYNKQRLHKVSYFRELLSANGEVPPSLRPLLKLSRETIERCQKTEYALVSSLQRDPVLADRIKRLRTVPGVGPITALTWALEIGDVSRFGSIKQAISYCGLCGEERSSADKAMRMPLSKQRNKHIQRALVEAAKLAPRQNHEMAVIYDQERQKGNSNRATLAVARKMGAYLLAVDRQQRDFVPAEERRTTAA

SEQ ID NO: 258639 - protein, 402 aa, unidentified
MSNYFAGLDWASKTHALCVIDERGGVVERFDIDHDAGGLTELRRRLRRFGSPPVAIERPSGLLVDTLVDADFTVVPIHPNAVKASRPRYRSHGGKSDASDAYVLADLLRTDGHRFKALTPQSDEIRALRALVRGRDDLVATRVHLANQLRTLLESFWPGAAAVFADIDSPIALAFIERYPTPESASRLGPKRMAAFCAQHASCGRRSPDDLLARLQEAPSAVSAETEMEAKGELARCVARTLTRLVEQLRLLSSRIEHLVASLDDGRILMSFPRAGRICAAQILAELGSVRERFATDAQLAAEAGVAPVTYESGKSKAVTFRWACNHRLRAAITCLADNSRHVNAWAAHVYANARARGDHPHSIRILARAWLRVIWRAWTDRKTYDPMQHRAAQLLLKAAGG

SEQ ID NO: 258640 - protein, 416 aa, unidentified
MAEHEQETIAWFAGVDWGSERHQVCLLDARGTTVGEREFPHSGEGLAELGDWLLSMASAASTVAVAIEVPHGPVVDALIDRGFVVYAINPKQLDRLRDRFSVAGAKDDRRDAYVQADSLRTDRRLFRRLQVADPRLIELRAWSRLAEELRAERVRLGNRVRHQLWRYYPQMLKLTNDLAAPWFLELWAIASTPAKAGRLRKSTVERLLKQHRIRRLDAETVLRILREPAIKVAEGVAEAASIHMRSLVARLCVVNRELREAERKLDELCTAVSEIEQTSGEGLQRRDVAILRSMPGIGRINLGTLLSEASGPLSRRDYEGLRTLSGAAPVTKRSGKSLIVVRRYAAHVRLRDTVYHWARVATQRDPKCRTRYTALRKRGHSHGRALRGVADRLLALACVLLQRQTLFDPYFGRSTT

SEQ ID NO: 258641 - protein, 408 aa, unidentified
MNAVGIDVSKGKSMVAALRPMGEVALLPQEFLHTGVGLEQMAYAILALGENTRVVMEATGRYHEPVAAALHEYGIYVCVLNPLYIKQSGGGSIRKVKTDKADAMKIAKYGLDNWVDLREYTPMDTVRQQLKLCSRQYNLYMKTVVSLQNNLISLTDKTFPGVNKLFSSPERADGHQKWVDFVMTFWHCDCICRVSEKAFTERYQKWCKRKGYHFSEEKALDIYAESCGHFTTLPKNDNTKLLITTAAQQLLAGKTTLAALRAEMTRLALQLPEYETVRAMYGVGETTAAQLMAEIGDVRRFPRRSSIVGFAGVDPAVDQSGKHETQSTSTTKRGSPHLRKTLYQIVCTYLRKAPADEPVYQFLDKKRAEGKPYFVYMTAAQNKFLRIYYARVKECLEAFDAQQGTSQG

SEQ ID NO: 258642 - protein, 434 aa, unidentified
MQTTSQNQTTADPPKDIVLWVGADWADQKHALVTGLPNGSQRQMHWVDQKPQHLDDFFLGLRQKYPDGRIAVVLEQSRGALLYGLLKYSFLRLYPVNPRCLSDFRAALKASGAKGDPSDADLLCEMGCKHSEYLRELDLNDPATRQLVLLTEQRRNIVDEQTALSNQLTSTLKCYYPLVLELFPDDIVAQTVLSFLKRWPNLAALKKAKPSTLRAFFYQHNSRSEERIQQRLEAIAAAKPLTEDPALVCTMELQVQTLLWRLAAVQKSIAAYDQRIAEVFASHAKAKVFASFPGAGPVLAPRLAAAFGTNEANFPMPSAMQCWSGIGPVQKASGKTKVVLFRWARPKFLHQTFVEYARNSVLYCDWAQAFFKERRDKGWGKFRIYRALAFKWIRILWRCWKDNVEYNETNYLESLRKRGVQTYAALYAELPGQK

SEQ ID NO: 258643 - protein, 381 aa, unidentified
MITETAQSTLPNLEQNVLYLAFELSQNQWKLGFTIGVGQDPRIRTITARDMDALQWEIHKARQRFSLSEDALVLSCYEAGRDGFWLHRYLLKQDITNLIVDSASIEVNRRMRRAKTDRLDVGKLLTMLMRYHFGERRVWRVVTVPDRESEDRRHLHRGLADLKVERTRHINRIKGLLTGQGVCIPIEADFLDRLQTVRLWDGSSLPGELIARLKREYQRMQLLNQQIHELEAYRREVIRTSQRPDIQQVRQLMSLRGIGVNSAWLFVMEFFSWRAFRNRRQVGALAGLTSTPYQSGGNSQEQGISKAGNRHIRAIAIEIAWGWLRFQPDSQLSVWYQRRFGHGSSRMRRIGIVALARKLLIELWRYLETGIPPEGAVLQPQ

SEQ ID NO: 258644 - protein, 343 aa, unidentified
MQTITTIGLDIAKSVFQVHGVDAGGQAVIRRQLKRRYVLAFFQKLTPCLVGIEACASAHHWSRELQALGHTVRLMPPAYVKPYVKRQKNDAADAEAICEAVTRANMRFVPTKTPEQQSGLVLHRTRHLFIRQQTSVINAIRAHLAEFGIVAPVGRHGVEELLNVVADPSDRRVPEMARVCLLAFGAQLRRIKEQILEFDRLIRAWHRSNEMSMRLDEAPGVGPVLATALVAAVADPKSFRSGRNFSAWIGLVPKQHSSGGKNRLGNISKQGDRYLRGLFVAGALAVIRYAKIHGTKHRPWLTALLARRPTKVAAIALANKIARMVWAMMARGERYKEPVALAR

SEQ ID NO: 258645 - protein, 356 aa, unidentified
MTRQVMAGIDLHSNNVVIGLIDESGRRLKHQKLDCQLKQVVQFLAPYKKRLKSVAVESTFNWYWLVDGLRALSYPVVLANPAKIEQYSGIKHADDKNDAFFLAELQRLNILPTGYIYDPELRPVRDLLRRRLSLVQQRTALLLSFKSLYARTTGQTLSLSRLKGMEVAEVMGLYDHPANQLIATVQKQHIEQLDQSIERIEKAVLRCARQLPYYPKLKTLPGVGIVLGLTITMEVGQISRFAGAGNFASYCRAVDSKRTSNEKNKGQNNRKCGNKYLSWAFVEAANFAKRYDASCRRWFDRKAARTSTVLATKALACKLAKAAWHVMAKDVDYDEQRVFGTVAGSQMKGLATSPAD

SEQ ID NO: 258646 - protein, 370 aa, unidentified
MTRGITFVGMDVHKASINVALLEPGKTEHVEWKLDNRATAVSKLARRLKADSGGQVVACYEAGPCGFALMRQLASLGVPCKVIAPALIPKQAGNKVKTDKRDARKLASLFRAGLLTEVHPPTAAQEAVRDLCRARDDARDDRQRARHRLGKFLLRHGIAHEVRAWTRPHRAFLSTLQFEHDAAQATFEDYLRAVDAADERLKALDDKIAAVAKGDAYREAVGILCCFRGIDTTSAMVIISELGDITRFESPRKLMAYLGITPSEYSSGGKERRGGITKTGNAFVRRILVEAAWHYRHPPRVGKRLRERRREQPGWAIAVADKCQARLYRRHRRLIANGKTSTKANVAVAREMSGFIWAALTAHGERGKKA

SEQ ID NO: 258647 - protein, 342 aa, unidentified
MNITTVGLDLAKNVFQVHGINTKGEVIVRRRLRRSQVREFFVDLKPCLVGMEACGTAHFWARELAALGHEVKVIPPSYVKAYVRRGKNDAVDAEAICEAVTRPNMRFVPIKTEDQQAALMLHKARELLIRQQTMLVNALRAHMAELGMIAPQGRGKIKDLIAVIVDVEDESIPKLAKAALKPLAAQLQSAEKMTCALDDDIKAWHRSNQASRRLATIPGVGFLTATAIAATVPDPTFFRSGREFSAWLGLVPRHNSSGGKERLGRISKQGHRYIRKLLVIGATSVLRCHRTKSAPGANWVNDLLEHRPTRLVTVAMANKTARIAWALLARQESYRSPVEAVS

SEQ ID NO: 258648 - protein, 493 aa, unidentified
MNGKTNSPKKQTGNRGGRLGGRGGKQKKAIVPVPSAEQEAALKQTTEEISKGLQSFTWRDLETAGKFSHNDKLTFIRDDMLIVGCDIGSETHYARAIDAKGRELSKGAYSFENNTEGFQRAKDWALHLAAQHGKNQIVLGLEPTGHYWFSLAAWMIANGISVVQVNPYAVKQTKELADNSQDKNDVKDPKLIADLVKNGNYGVPYLPEDVYAELRVLCTLRDQLMEDRVRNMNRLHREMKIVFPEYREAFGKIDGIFTLRVLASAPLPSELAALGEDGVKDIWHAEKLRGGGYKRAREIVRLASVSAGLRQGAEARKIAIVSFVDKVIELAAELEEIEAKIARKCREIPGAENILEIQGLGETTVSGILAEMGDIDRFDAAKEIQKLSGLGLVACSSGKHQGQTKISHRGRKRLRYWLFQGALSVVSHNEAFRKIHEYYTTRAENPLKKMQSITVIACKLLRIIFTILKKGVRFDPEKMLRDIVRPELLEAAA

SEQ ID NO: 258649 - protein, 339 aa, unidentified
MAILYVGIDLAKNVFAVHGVDEHGKPVLVRPSVPRARLHQLVAALPPCTIGMEACSGAHHWARLFMQHGHAVRLMAPKFVAPYRMSGKRGKNDAVDAQAICEAVQRPNMRFVPVKSQDEQARLCIHRVRQGFVEQRTATINRLRGLLSEFGIVLAQKAATVRREAAAHLEDLPGWANTAVGDCLSEVHRLDERLAEYDRHVSRMAGEDERSARLMKLQGVGCTTASALVSTIGDARDFKNGRQLAAWLGLVPGQYSSGGKTRLGGITKAGDGYLRTLLVLGAKSVLAAARNKHDRLSRWALALEVRRGYWKAVIAIAAKNARMAWAVLAKGDEFKPLVA

SEQ ID NO: 258650 - protein, 314 aa, unidentified
MSTQESKFYVGVDVALRHLDLFDPESGKSERIKNDPVAIDSLCQRWKGQSDVMFVMEAGGGNEELLVSKLQQASIPCALIIARRVRDFANSIGVDATSDQIDAKLISQFAAVLKPDQLPAQSDDERKHVALVTRRFQVLDMISQERKRLKVTWDQEPKSSIQKVIELLGEELKSIDAKLVKMLASDRKNKRKVEILRSADGIGDVAASVLLAQLPELGKINREQMAKLVGVAPMNPDSGESSGRRSLYGRRSNVRTVLHMATLISIRGNGKMKPHYAHLKSEGKESRVALVACMRKFITTLNHLIKTDQLWETK

SEQ ID NO: 258651 - protein, 412 aa, unidentified
MSLLQMALEPSTLVLAVDPGKVSNRVWLSDGFGLLAEPVSMPVSRAGLTVVERLVSSHDAGHPAVVVAIEATGSLHRAWSSALERSYPGAVRLFAPSETKAARTQLGSGRFKTDDRDCAALTYLARQGAGRRWVDEVDVDALRAVVRHRRGLVHDRKVIQQRLHDQLNALAPGLSAPAGHGRSLALDQPSGQAVLACAAAFAGRPPTARSLQARATGRFSQADAEYWAQRWRGCLQPPPDAERRAERLGRDLARHQALQADVAALEADMEPLLAATGGQVLTTLPGVAMVRASGFAAHSLPIGRFPDAEHLYSATGLAPALYESATIRRRGRISRQGLAEHRDALMGIAWGLSRYSPSFAKRDREYRGRGMTPIQARVALARHACRLAYRLLTSQEPFDEERYCQGRHSRGR

SEQ ID NO: 258652 - protein, 344 aa, unidentified
MNATTYALDIAKSVFQLHWVQPDTGEIHRKKLQRAKLMDFFARLQPSRIVMEACGGAHHWGRELSKLGHQVELLPAHKVKESASGNKDDARDARAIWITATQKDVRRVPVKSVEQQAELFTHRVRSHWVSLRTATVNQLRSMLYEFGLVAPRGRKIVVRWVAEHRALVEQQVPPMAVQLMDQQLQALRELDERIAANERTLQQAQRADDTVRELLKVPGIGPLGASALKAELGDASAYRNSREFACCRGLVPRHTGTGGKVRMAGISKRGDPYLRTLLIHGARSVLRWVGEKQDAHSRWLRDLIERRGYNRAAVALANKNARIIQALLSSERVYRPRSPAEAPA

SEQ ID NO: 258653 - protein, 409 aa, unidentified
MSPSLFVGIDVSHKHNVVCSLDDQGQQVGKMASFANNLPGAEQLERWIVEKMHTAGAEHLIVGTEATSFYDFHVMEHLAQSPLLAHLPPSLYRFNAKLIRDFKKALRSQAKNDYRDAFAIAMRLRMGDLPAAFRPQLAHLPLQRLTRFRAHTAKSLAREKNYFLSQLFLKFSAYTQIKPFSNPFGATSQAILAEYLTIDELMAMPIEDLLEFIIEKGRNRFPDPRKVVEKLKQVARESYRIRPALAQSVHLVLTLSYKNIRTLTSTIKELDEAIVKELDGFTTTLKTIPGIGPVYTAGILSEIGDIAYFPGHPQLAKYAGLTWTEHQSGDFRAEETRIIKTANAYLRYYLVEAANLVRLHDPTFRAFYQRKHQETLKHKHKRALVLTARKLVRVIFAMEKNGTIYRPRT

SEQ ID NO: 258654 - protein, 332 aa, unidentified
MLYAGVDLHRRSLVVAVEDELGKEVVVRQFACEEAQAIKGFFSVLGEFRAVIEASSSYRWLYELISPHGLVILAHPYRLRAIVAGRAKTDKLDARLLARLLRAGLIPTAYIPPADYQALRDLARARARLSREATHAKNELHALLARANLHSPYANVFCQRGRSWIAGQDLPPVARGIGDELLRRLAHFELEISRVDVELQGLSEHFPEVEALTVLYGVGLYSALLIIGELGEPWRFGDSRQVGAYAGLTARVTQSGSSCRHGSISRQGSPWLRWILVEAAMKLVRQDRQLGNFYQRIRKRSGAKIARVAAARKLAEICWKRLMRWHREHQAA

SEQ ID NO: 258655 - protein, 359 aa, unidentified
MTDVSSERPKITAGLDLGDKYSYLCMIDQQSGEVLEEGRLRTTPEALRRRFASESSLRIAIETGTHSPWASRVLEECGHEVLVANARKLRLIYANKQKTDEVDAENLARLARLDPKLLYPVAHRGEDSQAHMAILRSRQALVGCRTQLVNHVRGAVKSFGGRLPKCPARSFHKRAKEHLPEALSPALEPILEQIASLTERIRDYERQLEEICQECYPETDLLRQVEGVGPLTALTFVLTLEDPCRFEKSRSVGAYLGLVPASDQSGERDPQRRISKEGDEMLRKLLVSGAHYILGPFGSDSDLRRHGEKIASRGGKNAKKRAVVATARKLAVLLHSLWTSGEVYEPLRNAHRLSGGQAA

SEQ ID NO: 258656 - protein, 343 aa, unidentified
MEYYAGIDVSLKESSVCVVDATGKLVREAKVGSEPECLVGYFAQLEFPVERIGLEAGPLSQWLYAALAAAGHEVVLLETRHVKAALSAMTVKTDRKDARGIAQLLRMGWYRPVHAKSSPAQDTRALLVGRKLLQSKLLDVELSIRGILRGYGLKVGEVSRGRFEARIRELIAGHATLSTVIDAMLTARAVLWSEFTKLHREMLRIARADKVCQRLMSAPGVGALVALTYRSAVDDPARFQKSSTVGAYFGLTPKKYQSGETDRDGGVSKVGDAMVRTALFESAHIMLTRATRFSSLKRWALDVARRRGMKRAKVALARKLGVVLHRMWVDATDFRWSASPMAA

SEQ ID NO: 258657 - protein, 313 aa, unidentified
MMGTFVGIDVSKDQLDVAVRPTQKRWSVANDSTGLAQLVTELQQLESPLVVLEPTGGYERELVSSLVRAKVCFVVVNARQVRDFAKALGKLAKTDRIDADVLAHFGDAVRPEPRLLPDEDTAELDALITRRRQLVEFRAAEMARKHLAPEVVRPSIDKVIDFLTKQIDDVDGRFRKLLRSTPAWREKDDLLQSIPGIGPIVSCTLLAQLPELGRLNRKKIAALAGVAPFNNDSGKRRGTRQTWGGRATLRSVLYMAAVTGARHNPVLKRFYQRLIALGKEPKVALVACMRKMLVWANAMLRDGKKWNPAQLAA

SEQ ID NO: 258658 - protein, 397 aa, unidentified
MYIVGIDIAKRKHEAAVIDGEGTVIIKPFSFTNNCSGYNRLLAMLARAKLPLDEVSFAMEATGHYWLALFTRLQKEGFRVQVINPVQTNSIRSFYIRQAKTDPRDALLIAEVIRFGHFSESTLHPENIYELRELCRGRHAIVSMQADVKRKVVALLDQVFPEYETAFTNLFGDTSMAILQTCPTPKELSEMPFEELCHLIEVSSRKRFRMAKAQELQALARNSFGFAMAGDVFSTMIRLYAKHLVFLKQQVREMDRKIAEIMDTLDTPITTITGIGPTLGAYILSEIGDISRFSSAAKLAAYAGIDPTMRQSGEYNGVRNRMSKRGSPYLRHAIWLAASSAVLHDPALKLYFQKKRDEGKPYMASVGHACRKMVSIIYAVMRDNKAYTPCIPNEISA

SEQ ID NO: 258659 - protein, 422 aa, unidentified
MSYCPVAGIDVSKRFSDMCILSPDNKIFAQEKIYHDETSINRANALLQKAERLFFSKPVIVMESTSHYHLILFQFFSEHGYDVIVVNPLQSNSMKDFSIRKRKTDRVDAFKLAMMYRTKTLRPSQIPQTATRALRQLCRHRAELLNDVSSYKNRLTALLDQTFPGYDKVFSDVGGVTSCAVLVRFPTPTILLVEEESELVEVIAAASKSGYSFAKKKAGLLISAAQKAQTLGIHSCADETLIVCTIQMLRTLSESVLQIETAIDNLLAQIKEMRNNVSLLQSIPGIGSHSAALLLGEIGDISLFKKPKQLAAYFGLDPTERQSGSFRGTKNKLSKRGSSYARAALHMGMVNSICKRGKDSAANPVLLSYYEKKCKNKPAKVAQAASMHKLVFIIFAVLRDQKPFELKTPEQHAVEQGFVKAA

SEQ ID NO: 258660 - protein, 319 aa, unidentified
MQSKLTFGMDIGKNEVVVACHEGAFAILKMANAVAGLRRWLGTVPAGSRLGLEATGGYHEPVAELAYSLGFTVYILNPKDVHFYARALGARGKTDRLDAQIIAAYVAEHCARLHPFTPLSADEKLLRELARRRATLVNAKSMLQQSLRVLPGFEREGRELLRAMGSFADRLERKLAQIAARSSERATLVKRLQTIDGVGTLTSIRCATLFTRVPFHSSDAVVAFFGLDPRPNDSGQHRGRRRLSKRGPSEDRRLLYNAAMSAIRTPAWRPLYLHLRNRGLASTEAIIIIARRIVRIAFAMYRNHSNFNPRLGPRPYCPA

SEQ ID NO: 258661 - protein, 421 aa, unidentified
MTAATQTSSESLLVAIDIAKRYHDVLVRWPDGREKAFKLPNTRVEHDALCHFLLEPGRPVTVVLEPTADFHRPIAYRLAEAGITVHLASSLACARVREALYTSWDKHDRKDAKVLLYMLAHGMTQPFHDPLREGHFDIQEISNTYHQIALARARCQHSLVNHYLTLYFPEMERYLHTSRAVWFCRFLLAFPTPGRITSLDCDAFVAAAWDIVGRKVAKTQFLHGLYETAQSSMGLPVPLDSPALETFKLQLQRYLTLTKQRQALETFAAQRLRDNADFARLQTLPGVGPVIALMILAESGDLKRFRHHRQYLKFCGFNLAASQSGNSCSKYRLAKRGNARLRYAYWLAATIAVRMRENSFRAKYERYIQADPGNGDLKRKALTAVAVKMARVAHALVKQHADYRSYYELSIPGGGTPLLWP

SEQ ID NO: 258662 - protein, 311 aa, unidentified
MKETTTVGIDISKDSFDVHIDTTSQFLHLENTPTGIQLLLEALRELSVSLVVMEATSKYHYLLASMLTEAGLAVAVVNPRQVKNFARALGKIAKSDPIDAKTICEFGKRMQPAPLKGNELQELSLILARRRQLVQTRTMEAARCQEKPSPFIEQGIAKHIAWLNAEINALDLEIKARLKESEELTIRRKLLDSVKGIGPVTQAVLFTQLPELGKLNRRQISALVGVCPYDRDSGSLRGKRAIWGGRSGVRAMLYMAMLSAVRYNPQIKMFYTNLVSRGKPKKVALTACIRKFITILNAMFRDERMWAELKS

SEQ ID NO: 258663 - protein, 416 aa, unidentified
MLFIGDDWAEGHHDIELEDEAGRRLARARLPEGLEGITRLHALVAEHAPGSWAELPPDQVAGQVIVGIETDRGPWVTALRAAGYQVFAINPLSAARYRQRHSTSGAKSDAGDAHVLAEIVRLDRDHHRPIAGDSDLADAVKLLARAHQTAVWERTRQVLRLRSTLREYFPAAVEAFEDLAAPDALALLARAPDPARAAKLTRGQLVAALRAARRHHVETRADTLLAVLRAPALRQSATLQGAYAAVVTGQVGIITALNAQITQLGQVVDEHFARHPAADIYLSQPGFGVVLAARTLGEFGDDKDRFATARARKNYSGQSPITRASGKKSVVLARYATNRRLGAALHLQAFAALGASPGARAYYDAIRARNIGHHAALRQLANRLVGILHGCLKTGTLYDENTAWQHHRTDIQPAAA

SEQ ID NO: 258664 - protein, 424 aa, unidentified
MKVTYPTCCGVDVHKSFLVATIIKTTAGIEPSYQKKRFSTFNNSILDFKSWLLENECHDVCMESTGKYWVPVFNLLEDQINVTIANPKWVKAVKGNKDDTKDSKWIGDLFRLGLVKSSYIPCRLIRILREYTRYRYKLVSCRSSEKNRYQNALTVCNIALDSVVSDIFGKSSSSIIDYLLEQSGTTINHEEIASKLLKSLKSKEDAVIESIEGYQMTDAQKYRMRLICAHMDYITAEINDIDKQIESLISSDPDYDKAIRFLTTIPGVKRDSAITIISEIGIDMSQFCNSKRLCCWAGLTPSNNESAGKKKSVRITRAGVYLKPALVQCAHAAVKSDKSPYYKTKYESLVKRRGKKRAVIAIARMILIAIYRMLSTGEVWNPSDLYKIDMPAPLVERQKAKAIKQAKKLLQKEGLLPPDEPLAS

SEQ ID NO: 258665 - protein, 343 aa, unidentified
MHTVTTIGLDIAKSVFQVHGVDAQGQVAIRRQLKRRYVLAFFAKLPPCLIGIEACASSHHWSRELKALGHTVRLMPPAYVKPYVKRQKNDAADAEAICEAVTRGNMRFVATKTPEQQSCLMLHRTRHLFIRQQTSVINVIRAHLAELGIVAPIGRKGVEELLDVVADPSDKRVPETARTCLIALGAQLRSLKTQILEFDRMIMAWHRSNETSRRLDAIPGVGPILATALVASIADPKVFRSGRNFSAWIGLVPKQHSSGGKDRLGSISKQGDRYLRSLFMAGALAVIRYAKINGTKHRPWLTALLARRPTKVAAIALANKIARMVWAMMARGEHYKQPVALAA

SEQ ID NO: 258666 - protein, 356 aa, unidentified
MRWSPPPCERYADRVFFFLKGIIMQNVTLIGIDLGKHSFHVHAQDKSGHALLRKKFSRTQLTAFLSTCSAATVVMESCAGAHFMARHISQLGHQVRLISPQFVRPFVKSNKNDFIDAEAICEAASRPSMRFVTPRTEDQQAMSALHRVRDALVRERVKTTNQMHAFLLEFGISMPRGIAVIRRLSAVLEEHQFPPYLTRLLLRLHQHYSYLSEQIEGLEQELKTHMAEDDTAQRLLTIPGVGMITASLLATKLCDGKNYASSRDFAASTGLVPRQYSTGGKTTLMGISKRGDKNLRRLLVQCARVFMQRLEHNPGRLAEWVKVQQTRHHSNVVACGLANKLARIAWAVTAHRTAFS

SEQ ID NO: 258667 - protein, 324 aa, unidentified
MFVGIDISKLSFDAAVLQDTAYHHRNFDNNSDGFVLFLKWVRSFKTPALFCLEATGIYGLGLAKYLCQQQQKTIVANPIQTHAFAKMEMSRNKTDKADAKSIARYAQHLEHQGVSDKALYRPKDPDFERIQFLVTRLDQLNKMRTQENNRIDVSLDKVAVQSVKSMCRFIDKQLVTVQAKIAGIVKGNPQLNEQVELLTSIAGLGDKTAWAILAYVGDVSLFENSKQISSYAGLNPSIEQSGSSINRSRLSKMGCARLRKSLYMPALVAVRYNPLMKDLYHRLQAKGKPKKVALVAVMRKLLVLAYGVLKSGKPFDLNYQQQPN

SEQ ID NO: 258668 - protein, 338 aa, unidentified
MKLQCGMDLHGKNVLCSLTDENDKVVAERRLPTKLADVLGFLEPYRKSVINIIIESTYNWYWLVDGLREEKYPVSLANPNAVKTYDGLKHGNDKGDARHLAHLSRLGVLPTGYIYPKEQRGLRDLLRRRMYLVQERTGLILSLQSLCERLNGGKIAAEKFKHMKPEALVEKIDDPYHRLGAIEYLEIVRRINQSIYRLETKVLHECEETHQFKLLTTIPGIGRVLGMMIALESGPMNRFAGPGNYASYARTVNADRYSDGKKKGENNRKCGNKYLAWALVQAAHHLIQHCPEARSFYDRKKAKKNGAVATKALACKLARCIYHMLTEKEEFDVKKIFG

SEQ ID NO: 258669 - protein, 343 aa, unidentified
MQSISTIGLDIAKSVFQVHGVDAAGQAVLRRQLRRRHVLAFFQKLSPCLVGIEACASSHHWSRELQALGHTVRLMPPAYVKPYVKRQKNDTTDAEAICEAVTRPNMRFVPTKTVEQQSCLMLHRARHLFIRQQTAVINSIRAHLAELGIVAPVGRRGVEQLLEVVADTADRRLPEVARACLAALGSQLRALKAQILEFDRRIMVWHRSNATSKRLDAIPGVGPALATALVASIAEPGAFRSGRDFSAWVGLVPKQNSSGGKDKLGNISKQGDRYLRSLFTAGALAVIRYAKIHGTRHRPWLTGLLARRPTRVAAIALANKLAKMAWAMMVRNERYRQPAALAA

SEQ ID NO: 258670 - protein, 318 aa, unidentified
METVETVVDKGCGLDVHKETVVACVMGSGIAKEVRTFSTMTGELLKLKEWLQSLEITHVAMESTGVYWKPIFNILEDSFEVILVNARHIKNVPGRKTDVKDCEWICKLLRCGLVKGSFIPEKDIRELRDLTRYRKKLVQAISSEKNRVQKVLEDANIKLSSVLSNSFGVSGNAIIAELLKGTQTIAEMSGLARGRLGKKKEQIKEALQGNFQEHHRFMIEASLEHINSIELIISRIAVEIDKKIERHRKEYELLQTIPGVKEQGAASLIAEIGVDMGRFPTPEHLASWAGMSPGNNESAGKKKALTPPTEISASKAHW

SEQ ID NO: 258671 - protein, 369 aa, unidentified
MGDHITYVGLDVHKRGIVVAVAEDGLRGEVREYGRIANTPAALDRLARKLSREGVKLRFCYEAGPCGYGIQRHLSARGHECVVVAPSLIPRRAGDRVKTDRRDAASLARLHRAGELTAVWVPDAGHEAIRDLVRARLDAVHALRRARQQLSGFLLRQGCHYGRPAWTKLHRRWLAGLKFEQAVHHIVLEDYIAAVEAAQARRDRLTAQIEAMLADWTLAPVVAALQTMRGMALVNAATLIAELGDLSRFANPRQLMAYLGLVPSEHSSGASIKRGGLTKAGNSAARRRLIEASWTYRFPARVSRELLLRQEEQPKPIREIAWKAQLRLCARYRKLARSGKPANVVTAAIARELAGFIWAIARRVPPATN

SEQ ID NO: 258672 - protein, 346 aa, unidentified
MLHVGLDLSRTRLDVHVMTEVGAPVLVTTAAPDAGGLASLASRVGEFGQPVTAAIESMTGARFVHDQLELRGWDVEVADAVKVRGLAPLAAKTDRIDAWVLAELSRRELVPAIWLPDPAVRGERERARWRLHLVRHRTALKNRIHATLMAFGHPCPVSDLFGVAGRRLLDGLALPEPWAADVAAALRLIDDLDEQIADCEAALRTLGADHPYVPLLRTVPGIGAVLGYTIAAEIGDITRFDSPKKLVGYTGLCPTVYQSGRRDHRAALAKNGPKYLRWALIEAATHAARHPVYAERYQRTRARLGKQRGPKVARVDLARRLAEAIWYMLTTNKPFAPAGAAKPLAA

SEQ ID NO: 258673 - protein, 451 aa, unidentified
MPKDRTRSKPSGLPIIHPFAAGIDIGSRFHVVAVSPDLCDEPVQTFQAFTGDLQRMADWLVATGTKTVVMESTGVYWVAAYEVLESQGLEVILANAREARAVPGRKSDVNDAQWLQRLHACGLLRASFRPGRDIAELRAYLRSRERHTDYAAAHIQHMQKALTFMNIQLHHVIADITGVTGMRIIRAIVAGERDPDRLAAMRDVRCKESLETIRHALVGNYQPEHVFALKQALALYDFYQQCIDECDVEIERAVAILNVAHPIPEAPLPKAKHRSKMPSDPSFDVRTAMYQLAGTDLTQIHGIGPFLALRLIGECGTDLSRWPTAKHFTSWLTLSPGCKISGGKVLSSHTRKTSSRITVALRLAAVTVGRSNTALGAFYRRLAGRIGNAKAVTATARKIAVLFYNAMRYGMDYRDPGADHYEQQYRDRVIKQLHRRAAQFGYSLQPQGSPT

SEQ ID NO: 258674 - protein, 349 aa, unidentified
MTDRHLSYIGRIVYVGIDVHKETYTVTCVCNKQIVKTATVQAEPAGLATSLLRWFSGATLYSAYEAGFSAFVLHRALTTAGITNIVVNPASVAVAANDKVKTDRRDAKKLAIDLADGRLRGIYVPTEEEELARLLPRTRAQIVEHRATIARQIKAKLHQFGLIAPTSRRLISNRYLREMAAWALPSELRVSLTLLAEQWRFATRQLIEIRRLLRAQATAQAALEQVYRSVPGIGAVVARTLATELGDMTRFAHERALFSYTGLTPSEYSSGPSVRRGHMSRQGSSRVRHLLIETAWRALPRDKVLQEIFDRIAATRGKKRAIVAIARRLTGRIRACFRQGTTYAVGTYV

SEQ ID NO: 258675 - protein, 350 aa, unidentified
MLIIGCDYHPGFQQIAYVERETGELEERRLSHREEAERFYRDLAAQGARVRVGMEASGHAHWFERLLAELNCELWIGDAAKIRAKRVRKQKTDRQDAQHILRLLLKDDFPRIWVPNWENRDLRQLLWHRHRMVQARTRIMNQLQAVALNQGLRCKKRLWRESGRQQLEALALAPWACRRRQDLLAVLDRINPTIAELTQAIEQESEKCPQAQRLMTHPGVGALRALAFVLIIGEVDRFGCGKQIASYLGLVPAEDSSGERRRLGHISKQGNSLLRFLLVEAAQATARNDARWRNRFFHLAMRRGRKIAKVAMARRLAVRLYWMWRQGWTYEQLESFGSHAGQRGNRHGVQ

SEQ ID NO: 258676 - protein, 342 aa, unidentified
MKDTMIGVDLAKNVFQLHGASMTGEVKFRKKLTRPQFMAFMADHPAAVVVLEACGSASYWARELSKAGHEVKLIAPQYVKPFVKRQKNDAADAEAIVVAAQRPEMRFVPPKTEEQQARAVLFRARERLVHQRTELSNALRAVLYEYGHAVPQGSVHLKRIVEIIEAETCDLPDLAREEARDLLEQIAEKTVRIEAKTRKIAAQAALTPTARRLQTMPGVGPMTALAVEAFAPAMATFKCGRDFAAWLGLVPRQMSSGGKERLGRISKAGQSDIRRLLIIGAMSRLNWMGARSIREGSWLDRLRARKPKLLVAIALANKMARMIWAMLTKQEDYKDPVPAGAA

SEQ ID NO: 258677 - protein, 416 aa, unidentified
MNAVGIDVSSRKSTVAVLRPLGEVVCLPFDVTHDIVGLASLAEKLKTIDGETRVVMEHTGRYYEAVAKALHEAGFFVCAVNPLLIKEYGANSLRRVKTDKADAVKIARYALDNWADLRDFTPMDAIRYDLKTLNRQFQLASKQRTASANNLIALLEQSFPGIRKCFDSPVRSDGTQKWVDFAHSFWHVDCVRKQPFPAFCERYRKWCKRHAYLFKLSNAEEVYALAKRAVVLTPKSKVVKVLVQEAANQLISISRSVEVYRAEMDRLAAMLPEYPVVMAMYGVGKSYGPQLMAEIGDVRRFERKQALVAFAGIDPMPNQSGDKNVRSNKSSKRGSPYLRKTLFNVIRTYLQCAPQDEPVFQFLNRKRAEGKPFYVYMLAAANKFLRRYYAKLRDYFASLDTLQPVAPIPTILKATL

SEQ ID NO: 258678 - protein, 342 aa, unidentified
MLGSNVSLELSSMCVLDATGKVIREAKVASEPEALVAFLRGLGVTIVRVGLEAGPLSQWLYDGLQAAGYETVLLETRHVKAALSAMAIKTDRRDARGIAQLLRMGWYRPVHRKSVPSQEVRALLAARKQMQIKAMDLEQTLRGLLRGFGLKVGEVSRGKLAVRIRELVSGHAMLERIAEPMLTAREALWSEFAKLHREVLAIVKEDQVCRRLMTVPGVGAVVSLTYRAGVDDPGRFAKSKLVGAFFGLTPKRYQSGETDVTGAITRVGDAGVRTALHDAANALLTRATKFSTLKRWAMDVAKRRGMRRAKVALARKLATVLHRIWADGTEFVWGKDPAAAAA

SEQ ID NO: 258679 - protein, 314 aa, unidentified
MQLPKDVGVDVAKDFIVAAFADQSSSPRQVPNQARALRAWLRTLPAGSRIAMEATGRYHVLLADLAHEAGFTVYVLNPKDVWYYAKGLGRRGKTDRIDAEVIASYVADHHPKLKPYTPSSPEQGAIDRLLKRRARLIVLQGAARATTGDLTECRRQVKALLDRFDALLAEIDRQLQDLTRPLEPLRQSQARLQKIVGIGPLTGLSLASTFLRIPFRNGDAVVAYSGFDPRPHDSGRMVGRRRLSKRGPSELRRLLYVAAMSAAQTPIWKPIYERYRARGLSSTASYVILARRILRVAWSVHSHQTDFDPARLAA

SEQ ID NO: 258680 - protein, 423 aa, unidentified
MEVMHRRVAGLDVHKETVVACVRVMASRRPTRQCRTFTTTTQGLLELLGWLTASRVTHVAMEATGVYWTPVWKILSEGDFTLIVANAAHIKQVPGRKTDMNDAMWIADLLACGLLKASFVPPEEIHELRSLMRTRKQLVREQTRHVQRIEKTLEEANIKLGAVLSDLMGVSGRRIIEAMIAGERDPHRLAALAERSVKASPNALHDALHGRLREHHRFLLQLHLRQWDALDAAIRQIDEQVSDHIERVDEEAADGQPPFRELIPRLCAIPGVSFQSATAILAEIGRDMSRFPTAGHLIAWAGLCPGHNESAGKRKSSRLRKGAPWLKTMLVQCAWAAKRAKHSYYSAQFHRLCGRRGPQKAICAVAASILTAIYHMVQSGTPHRDLGADYFDRRTPETKAKRLVAQLARLGYAAQLQPLAEAA

SEQ ID NO: 258681 - protein, 338 aa, unidentified
MTLCGGIDLHSNNSVLAVSDEADRLLYRKRLPNDAGVIVDALAPYRDGIVGLVVESTYNWYWLVDALMEAGYRVHLANTSAIVQYSGLKYANDDTDAAWLAKLLRLGLLPEGYIYPKAERAVRDLLRRRQHLVQQHTANILAVQNLFSRNRGRSISANEVRRLTPESVAELVPDPNLALAIQSTVLAMRGQQAAIDLLEREAWRQTKETQTWRALLSVSGIGRILGLTIVLETGPIERFERVGNYASYCRCVGSTHVSNGKQKGKGNTKNGNKYLAWAYVEAANFAVRYNPHIKRYYQRKRAKTKGVVAIKAVAHKLSRACYHILRDGSAFDVNRAFA

SEQ ID NO: 258682 - protein, 339 aa, unidentified
MKLNVVGVDSAKRVFQLHWVEQDSGEMVSVQVKRERFLEHFANRAPCLIGMEACGGSQHWARELVKLGHEVKLLSARWVKPFVGGNKNDAADARAIWTAVQQPGVKTVAVKSEAQQAVLALHRMRAQLVKSRTAQINGLRGLLTEYGEVMPQGRAGVIRQLPAVLGRQSQRLPAQLIDTLREQFARIGELDAQIQQIEQRLRQWHREDTASQRIAAIPGVGLLTATAAVATMGDAKAFKSGREFAAWLGLVPRQSGTGGRVRLLGISKRGDTYLRTLLIHGARAVLTHSKAPPEWVTNLAQRRPRNVTVVALANKMARTIWALSAYERAYQPGYVSQPA

SEQ ID NO: 258683 - protein, 427 aa, unidentified
MNQTIPASTFAATIGLDWADKKHDLWIQVATGGKPEHLILEQTPEAIHEWVAKMSLLFPNQRIAIAVETSRGAIISALQAYAFIVLFPINPKMLCSYREAFCVSGAKDDRTDAMLLEEYVRFHFAKLRPLNPDTELTRKLGGLVENRRDLVDERTRLVNQLHSLLKTYYPLAEVLFDDLTSLLATQFLLKWPELASAKKAGAAALRKFFYGHNCRSAQTLEQRLQALEKAQPLTTDPALIEPAVLKVKALAGMLKVLHEAISEIEDHTNQAMDAHPDAPLFRSFPGAGPVMAPRLLVAFGTNRARFENAQETQQFYGIAPVKKQSGQSKVIHMRHRCPKFGRQTFHENAGHALRKEGWTKEFYDQQRERKKGHHAAVRSLSFKLIRIYFRCWKNSKPYDRSLYEKALDTHGSPLGAALRKKVTSPTK

SEQ ID NO: 258684 - protein, 346 aa, unidentified
MGKSIINLSSVTTVGLDLAKHVFQVHCVDASGCVVVARAIRRNKLLEFFASLPPCLVGLEACGSAHHWARELIKLGHDARMMPPAYVKPYVRRQKNDASDAAAICEAVTRPSMRFVGVRSLENQATLMRHKTREMLVSQRTQLLNALRGHLTEVGVIAAQGPRHGRELAELIEACDETIPFEVCEALAPLVVQLRNLDEAIARLDRTIAKMAQKDETARRLMSIPGFGPITASAMAATIQDASSFTGPREFAAFLGLTPKQNSSGGKQKLGRISKMGNRNLRKLLVVGAHAVLFHRKPHTDPLRMWAKRLLEKKPFKLVAVALANKMARIAFAIMRGKTVYREIPA

SEQ ID NO: 258685 - protein, 423 aa, unidentified
MGKTIPICCGVDVHKKFLVATILTGDYLIPQCKQKHFGTSFKNLLAFKQWLLDNNCKDVCMESTGKYWVPVWNVLEGVVNVVVANPKWVSAVKGNKDDKKDSKWIGNLFRMGLVPSSYIPGKDIRVLREFTRYRSKLVSMRASEKNRYQNAFTVCNLTLDAVVSDMFGKSAMAIENYLLDTDVVDPEFCVSLLQKKLKKKSAEIIEAVEGFNMTQEQKERVRIIQGHFADIDKRISQIDEIIGRLTAEYEGTISLLCTIPGIDRRLAITIISEIGTDMSEFGSSRRLCSWAGLVPGNNQSAGKKKSVKITRAGVYLKPALVEAAHAAVKATEKSPYFRIKFEKIMKRRGKKRAIIAIARMILTAIYAMVSTGEVFNPSDLLKYDMPEELQKKRTLAEAKDAVKLLVSLGLVAEGSISLEALAS

SEQ ID NO: 258686 - protein, 387 aa, unidentified
MYFVGIDISKFKHDCAIIDDLGDVVTPSWSFRNDCQGFSLLAELLTNLGKDVKIGFESTGHYGQNLKLFLESNSFTFMEFNPLLISRFVRSKSLRKTKTDSIDALLIAQYLMTVEYKPYPASFYHLDKLKSLTRFRDSLVRQRSRQLVELTNVLDKIFPEFKPFFKHKFSVTALYILSNYATPEKIANMNSRSYEAIRKLSRGKFTMSAFVQLKTLARNTVGQSDDYLLHEMDVLLALYNQLDAKIQEIEEQVVACIRGINPPMLSIPGIGALSAAIILSEYGDLSNYDSPAKLLSFAGLEPGYFQSGQSEHTGRMVKHGSSHLRYALMNCCLPLITNEPVFAEYYAKKRAEGKPYRVAMTHVAKKLLRVIYTLQTKNVTYDPGLIR

SEQ ID NO: 258687 - protein, 371 aa, unidentified
MNSILYVGMDVHKENYTLCCYSFDRDKVEYRQTVPSDYRLVLKYLEQVRRKYPEEVEFICGYEAGCLGYSLYHQLTDHGVKCIILAPTTMGITNTNRVKTDRKDAANIARCLAFHAYSAVYVPGCEDNAVKKYLRMRDDQKLALKKIKQPITAFVLRLGKQYTGGKNLWTENHLKWLRGLDLTLLEKETLQEYLITYDYLTDKLERLDARIEELARNERYGERVRRLGCFIGIKPHTALSLLVEVGDFRRFEKAPNFAGFLGLVPGEDSSGGGRNRLAITKAGNSHLRRLLVESSQSYSRGTIGFKSKELKKRQEGNPPEVVAYADRANERLRRRYYRMTLKNGAKRNGAIVAVARELACFIWGIMTDEIA

SEQ ID NO: 258688 - protein, 280 aa, unidentified
MEHYAGIDVSLEQSSVCVVDALGKIVREAKVSSEPEALVSFFEALGFAVKQIGLEAGPLSQWLHAGLRRSGFEAVLLETRHVKAALSAMTVKTDRKDARGLAQLIRMGWFRPVHAKSMRSQEVRALLVARKQLLGRLIDIELSIRGILRGFGLKVGSVTRKGFDARIRELVTGQVTLERIAGAMLSARAALRAEYGKLHKSVLAIVREDAVCRRLMTVPSVGPLVAITYKSAMDDPNRITKSKAAGALFGLTPRKYQSGEKDVTGGITRTGQEIVRTGPD

SEQ ID NO: 258689 - protein, 420 aa, unidentified
MNAVGIDVSKSKSVVAIMRPFGEIVSTPFEIKHTASDIHSLIELINSVEGESRIVMEHTGRYYEVLAHQLLEANLFVSAINPKLIKDFDNDSLRKVKSDKADAIKIARYALDKWQNLKQYNVMDELRNQLKTMNRQFGFYMKHKTAMKNNLIGILDQTYPGVNTYFDSPARSDGSQKWVDFASTYWHVDCVRKMSQNAFIDHYQNWCKRKKYNFSQSKAEEIYGKAKELVPVLPKDDITKLIIKQAVNQLNSASTTVESLRTLMNETASKLPEYPIVMAMKGVGASLGPQLMAEIGDVSRFTHKGAITAFAGVDPGVNESGSYEQKSVPTSKRGSSDLRKTLFQVMDVLIKTHPQDDPVYQFLDKKRAQGKPYYVYMTAGEQVSKNLLRTSERISFISSRILIIIIIFRPALVWWSYFDT

SEQ ID NO: 258690 - protein, 421 aa, unidentified
MSKKKSGLAGLQALYARVCGLDVHKKLVVACVRILDSKDGTVQSTLRKFGTMTADLLELRQWLAEQKVTHVAMESTGVYWQPVFNLLEGHFQVWVVNAQHIKKVPGRKTDMKDAEWIAQLLQCGLLRPSFVPDRQQRELRDLTRQQTKLVQQRNAVDNRIQKVLETANIKLGSVASDVLGVSGRKIIEGLIGGEKDVTVLADLAQRQLRGKIPELQRALEGELTEHHCFLLRQLLGQYDFLEKEIARVSERLGAVAPPSFRGAVEQLDAMAGVGERGARALLAETGTDMSRFPSHKHFASWAGRCPGNHESAGKRRSGKTPAANRHLDAVLTEMAHAAVRTKNSYFKSQYHRLAGRRGKKRAIGAVKHSLLLTVYFMLRDNKPYKDLGADYFDKLNPQQRIRYHVRRLQELGQEVELKPAA

SEQ ID NO: 258691 - protein, 401 aa, unidentified
MYNAVGIDVSKGKSTVAVLQPGGTVIRKPFDVSHTSQSLNELAAYLVSLDGDTRIVMECTGRYHEPILKALSEAGLFVSAVNPHLVKNFGNNSLRKVKSDPSDARKIARYTLDNWAELRQYSSMDNTRTQLKTLNSQFSFFMKQKVAAKANLIALLDNTYPGVNRLFDSPAREDGSEKWVDYAYSFWHVDCVRGIGLKAFTERYQAFCRRHHYNFQADKPEKLFNASKELVAVFPKEKTYKLLVQQSIQQLNLASGHVERLRREMNELASTLPEYNTVMGIYGVGKTYGPQLIAEIGDVSRFTHREALTAFAGVDPGVDESGQHKSKSNRASKVGSARLRKTLFQIMRTLLQNAPEDDPVYRFLDKKRSQGKPYYVYMTAGANKFLRIYYCLLYTSPSPRD

SEQ ID NO: 258692 - protein, 352 aa, unidentified
MKSTFIGVDFSKQTIDVAILKQSKKSQKEFACLKFSNDEESYKKLFQWIEEQTHTPQEQWLICGENTGLYSLGLQRFLNLRHIFFWLENPLQIKRAQGMVRGKNDKMDACQIALYAYRFQDKACNVELRNDILDMIRDLLVLRERLIKNKKQLLTASKELVRVKNNQTSAFIDEHTNKLIKCIIDEIKETEKKILELIKEDEQIEENFDRLCSIKGVGFVNAIWMIIATNNFIDFNDPRKFGCYAGCVPFNYESGTSVYRPDRVSAFANRRIKTILTCAAASAIRYNENIKAYYWKKKTEGKPWRLIVNNVRNKLIHLMFAIIRSQRTYQENYVPAFNQKNADSTRLNLAQS

SEQ ID NO: 258693 - protein, 477 aa, unidentified
MIHSVGIDLHRGRHRVHCLDEQAQPCDAFSFQTTPEGLATLEQRIFRDGSKPIVVFEPAGLWWLMVAAYLRSQHPECRLVKAKTQKVAALRRYLRGSTKSDRIDAITLAKMPFIDPERFDELYLAPAQTHALQRLIRQRKRLEEEIGARKKRIVALIDGYLPGVRQTFSRPWSAQMRAFLHSRVNPFAVVRDGEEALYTSLNQSKPQRKGGKTESHLVYRACQNVLALQNLCQAAGSLNEEFFIDFQNEIDRELRLMEIAEAESEALDHRIEELYGKLHPSDNLRTIPGVGVHTAPVFVANIGDPTRFPGQSEFANWTGVVPGAKQSSNVESKGLRMTKAGPAAVKWSLYQSGQIGRRWDPQLASVYYRQMVHHGKNHNQAMGAVMSHMGARIFAVLREDRPYELRDTDGKSISKAAARALILAKYHVPEDLRQERRKRKGRETTSGSQKTKGMASGRIHEAVVAPQPAAVLPSPST

SEQ ID NO: 258694 - protein, 412 aa, unidentified
MLFIGDDWAEGHHDVVVHDDAGKTLARRRLPEGADGIARFHELAASCWGEEGEPDPAQVVVVIETDRGPWVKTLAAAGYRVYPANPKQAARHKETIAVSGKKDDFFDAGALADMGRTRRHQMRELAADSDIAEAVKIAARAHQKLVWERTRHLLRMRSALREYFPAALEAYAALSLSGPDTLELLGRAPDPAAAAKLTITQITAALRRAGRRGDLAQRARDIQAALRAPHLAQPAVIAEAYAASVQAAAAVITTLNAQVKVMEAKVSGLFRRHPDAGIYLSQPGIGDITGARILGEFGDAPGRYASAKARKNYASTSPLTIESGKKRTVLARYIRNRHLIDALRAQALSALTASPGARACYDELRARGIGHDDALRRIASRLTGILHGCVKTGCEYDEAAAWSHRSHSAQAA

SEQ ID NO: 258695 - protein, 428 aa, unidentified
MIPAVLERCAGIDVHKKFVMVCALLGPAQANPEAKIRRFGTYNAELEQLRDWLQELNCMHVVMESTGPYWKPVFNVLEEAGVQTTLANPQQVKNLRGHKTDMRDCQWLAHLLRHGMIRPSYIPPRPIRELRDLTRRRKQLVRNGAMERNRVQKLLEEANVKLGNVLSDVFGASGQEMLFALVQGRATAEQMAQLAKQRARKKIPQIQAALEGHRMNQTQRELISQCMAHMAFLEEQIEEVDRQIQDKIRSFGLSQSYELLQTVPGMKKEAAAAVLAEVGAKVDAFSTPAKLSSWAGVCPGNNESAGKRKSTRTTKGNPYLRDMLLECAWASSHRKNSQMQNRYQRLQVRKGHKRAIVAVAHALIQAVYYVLSTRQPFVDTAEPPHSPATVRRLIRHHTRRLRKLSCWLERSAHAIQTSTLHQQHITSG

SEQ ID NO: 258696 - protein, 342 aa, unidentified
MKTFVGLDVSQKKTSICVIDHNGNKIRMANVDTHPGVIANYLFSEGFDNSKVGLETGPLCVWLYHSLKSFGLDIDCIPARHVHAALSMQLNKTDQNDAFGIARLVLSGWYKPVHVKSLECHQQRLILTSREKLVQLRVAVTNQIRGLLKTFGVVLPPGKNSVFERSVLESSPSLETVKPAVIMLLNTWEHLSDQIKKFNSMLEKLARKDPVCQILRSIPGVGVLTALSFKTSIDDPSRFRRVSDVGAFLGLTPKKYQSGEVDRNGGISKQGNRMTRTLLYEAASCLLTRYGTDTSLAIWANGLRHRMGYKKVIVALARKLTTLMLSMWKSETTYNERLNAIN

SEQ ID NO: 258697 - protein, 319 aa, unidentified
MTRNHIGVDLSKDFLDVCDPRRGAARVPNRPEEVSGWVAGLGPDDVIVFEATSGCDRVLRRAVQAAGIPGVRLNPLHAWHFARSLNLAKTDQVAQNARFQRDAAMLARLGAERQPEPDPAPDPAREDLRALGQRRDQLKRMEVQEKNRRAACPLEAVAAGIGEMLAILAAHIERIDKAIAEHVSRHPGLKSADRLLRSIPGFGAVAAVTMLAHVPELGTVSRRAAASLGGLAPRARDSGRHRGRRFIGDGRRHVRRVLFMAAMSLMHRPGFLADFIARKKAEGKPGKLILIAVARRLLTIANAVLRTGIPFQPNTRPAT

SEQ ID NO: 258698 - protein, 523 aa, unidentified
MAAAPTPKRRRSARPHLIHKPRGVLHPRVQAVGPEHFGIVSIDCAKARSKAMLADFYGRVLLPPTTLEHNQAGFQAALQALRDAIARHALKDVIVAVERTGRYHRPAQQAFARAGFEVRIVHPFATKQFRQPADPGNKTDDTDLSAIHRAAVNGFGLLEHEDDPLYVRLQLLARHRRSLVEKTVALRNQIHEHLQAVLPGYSKCFDDIFLCRIPLWVAKEYGSAAAIREAGVAGLTSRLCRARLRVHAPTLERIVAWARSAPAPEETASIHHRFVCELDEDRLSKRGAIRALERELAGLLVQAPYVLLLGIPGINVVSAAEFAGEMGPIARYAKARAITGRAGLFPARHQSDQVDRKDGALIRCANRSLRRAILRIADNLVTRNDHFRVLASGWRLRGKDARDIRVKVGGRFCRIAYQMVAGRSAYRHPCCQQRHYVLEKLIKFHNEHDSDVAQVLRDLDAAAAQLPRAEHGAEAAPLAEELARARTKRGAGARRLGEILPAVLAKLGVGLIQSPGSGETDPT

SEQ ID NO: 258699 - protein, 341 aa, unidentified
MKNKSFIGIDISKNVIDVSIFCEETPIKDFSHDVFNNSRKGFGEMCTWLKKNHVVLSNCLFGMEFTGSYSMELEKFLNARNYQFCMLSTHVVKHYPMGPKDKSDKIDSAKIADFLYRYNGTECVKPYNMPDKTMQRLKALMNERKFLVEQRTCFMNRRQLCITKEDAQLYDGYIKKFSRDIENIELEEQKLLATDDSLLSTYKNLLTIPGIGFVNAINVIVITRNFSAFETARQYASYVGVAPHFRTSGTSVKWRPRPSARCDGQAKADLSMAATVVVQYDAELQSFYNRKLGGKQDSDTKRKALNAVKFKLVLRMFAIGKQNRKWEPLDSKSSNEKLAIS

SEQ ID NO: 258700 - protein, 323 aa, unidentified
MDKSTKYLGIDISKDVFDVVNMDDKHFQFQNTLKGFKAFSKMLTADSFCVMESTGYYHFKLAYFLLESKIKVAIVNPLSVKRFIQMKLSKIKTDKADAKMIRLYAQNNELKLWKGNSKSQIEAFQTARLLDKYTKQTTALKNKIHGEDILGNPAPKVLRSLKRVLKNIQKEKKLLEDRLTELVKEQNAAMLTNLESIPGMGRKTATMLIVYTDGFARFDSAAALCSYCGITPIIRKSGSSVNGRPRISKMGNQKIRNLLFLCSFTASIHNKACREIYQRITNKGKSKKLALIAVSNKLLKQAFAIAKSGRPYDEKYQSVLPSH

SEQ ID NO: 258701 - protein, 315 aa, unidentified
MTQTNTTTAGIDTSKLKLDIAVHQRTERWQVANALPGWRALTANLAKAGVTRVGIEATGGYERGVVEHLRAAGFTVLVLQPIQVKAFGRVHLRRAKNDALDAALIAACAATLDQPRIAPDPRLADLAGYLTFLEQTEEDIARFKTRLEHIDEPRLRRIVTSDIKRLKARKAAQTRDIAKRLRAHDDLAKRLDLVLSIPGIGERTALALIIRMPELGQISREEAAALAGLAPFDDDSGKYKGQRHIAGGRGRLRHSLFAAALPAAFRWNNALIDLYGRLIAKGKAHNAALIACARKLLIYANTVVQRGTPWTEKAA

SEQ ID NO: 258702 - protein, 338 aa, unidentified
MKLYGAIDLHSNNNVTVLIDEQDQVVYQKRLPNDLPLISEQLSAYQDSLQGIVVESTYNWYWLVDGLMDGGYKVHLANTAAIQQYEGLKYTDDTSDARWLAHILRLGVLPQGYIYPKGERAVRDLLRKRGQLVRQRTTNLLSIQNLLTRNTGSSLSSNRIKMLDDQTVDALLPNPDLALAVKANLSMMQRADEQIAILERAVRDRVRLRPEFNFLKTVPGIGQTLALTIMLETGDIGRFAGVGNYASYCRCVGSQKISNGKKKGKGNTKNGNKYLSWAFIEAANFAIRFSARIQSFYQRKKAKSHRVLALKAVAHKLCRACYYIMKNRVAFDVTKAFA

SEQ ID NO: 258703 - protein, 353 aa, unidentified
MDHVGIDVHKVASQICMIAEGGELIERRVRTEPARLGEVLGDRVRARILIEASTESEWVARCLEGLGHEVIVADPNFAPMYATRQRKVKTDRRDARALAEACVVGAYRRAHRLSDAQRHVRGRLGVRDALVRTRTRYIALIRSRLRQEGWRVPTGTAERFPHRVLALPLPGRLRSEVAPVLAVMRHVTRQVEYSDERIEALTATDERVRRLRSVPTIGPVTAAAFVAALDDAHRFGRAHEVEAYVGLVPREWSSGETQRRGRITKAGSGRVRWLLIQAAVSMLRLRDPRTAGLREWAERIATRRGKKIAVVALARRLAGILFALLRDGTVYAPRAGQPTSGARRRAEAACANS

SEQ ID NO: 258704 - protein, 337 aa, unidentified
MQVSVIGLDIAKSVFQVHGAERNGKPVFSRKLRRAQVHEFFANLEPCVVGIEACHSSHYWARELLALGHTVRLIPTQHVLPYRRGGKNDRNDAEAICDAASRPAIRCVPVKSAEQQAIQSLHRTRERLIHERTAKVNQIRSLVAEEGLVCPRGIAQLRRRLHELLETPDRLTPLLRSLVVLFLDQLDAADRWIGELDLKLLELFKQSALCQRLARLHGVGPVIATAIAGSVPNARVYKNGRQFAASLGLVPRQRSSGGRTVLLGISKRGDTYLRKLLIQGARSVLRGAGRRDDRQSRWIRQLLVRRHKHVVAVAIANKLARTIWAMLVKGEAFQMTQ

SEQ ID NO: 258705 - protein, 328 aa, unidentified
MFFIGIDVSKAKLDCSLLLDVASGKRKSKSVANSKSGIADLLAWCAKQLIAPAGLHAIMEGTGAYHEQAALALFDSNVTVSITNPAHVKQFGRSLGIRTKTDGVDSFILAKYGALISPKPWRPPASEARELQALLARRDAVSQDLQRERNRLEKTEVTEVSPLIHQSILDTVAFMEQQLAKLEDSIDQHINKHLNLKEDRDLLTSIPAVGPQVGNQMLSLLHNLSFRSAEQFASYLGLVPVERQSGSSIKGRPRLSKNGPAHIRAKLYMAAIVATRHNPHLKALYQRLQANGKSKMSALGAVMRKLAHICFGVLKTRIPYQLDYAVSY

SEQ ID NO: 258706 - protein, 362 aa, unidentified
MEKYIFAGIDQGDKNSVARIAVDREKGERLGFVNTRGGRTRLFKELNRQADQAGGAKILLAYEASSCGFVLRDEAQARGMICWVLAPTKMEKSVEQKRNKNDDRDADDVLEKLRGHVLAGNRLPTVWVPDMETRDDREVLRTRLALSEKQTQVKAQIQMLLKRYGLEKPADLGSTRSKQYRQWLEGLCVSASLGWGTRNSLASLLRQLSGIEEEMENLDKLVRQLGSQPRHKPIVEALMKEKGVGLLTALVFRTEIGQASRFRRGRHVGKFVGLTPTSHESGQQQDRKGHISRQGPPRLRKVLCQASWVHVRHDPHSRGVYQGLVARNPKKKKIALVAVMRRLSVRLWHRMLEAELELKTQP

SEQ ID NO: 258707 - protein, 361 aa, unidentified
MQSTTIVAFDQHAVTTVAAVLGPGQRTPAFHTLTSESATIVRFAERLQRQGAIACCYEAGPCGFELQRALTARGIRSEVIAPALIPRRAGDRVKTDRRDAGQLAVLYRAGALTAIHIPAAAEEAGRDLLRCREDIKADLLRARHRLSKFLLRHGRRFTGTKKAWSKRHDTWLRGQTWPLPALEHTHRACLRAVDEALARLRSVEDDLRLLLVLEPLRPRVARLRCFRGMDDLTALTIAAEVGDPRRFASAPRAMAFVGLVPSEHSSGTKHARGAITKTGNAHLRRVLVEAAWHYRHRPFVGAALRRRQQGAPAVTIAQAWTAQQRLYRRYHRLRARGKPNQHVITAIARELTGFVWAALIQ

SEQ ID NO: 258708 - protein, 316 aa, unidentified
MTVSAGKGVAGRIPLGQQGPQGSAGRHAHQPVARTVARAHEPASTRQGIGRGGAMSEEAFVGIDVCKERLEVAIRLQGTSFSLPHSEEGLEELLTRLRELSPALVLLEASGGLEAAVAATLATGGLPVVVVNPRQVRDFARATGRLAKTDRVDAQVLAHFAQAVRPSPRPLPQEQQQAIVSLVTRRRQVLGMLVAERNRRERSPLPIRRRIELHIRFLEGELKELEGELDDAIRGSPLFREKVDLLRSVPGVGPTTACALLAYLPELGQVGRKAIACLAGVAPLSWESGRRSGRRRITKAAGPGLGRPSTWLPWWR

SEQ ID NO: 258709 - protein, 339 aa, unidentified
MKNTKYYIGLDVHKERTTYVVRDKIGKILLEGETATFYQELFPRLKSYLTASMIGLEASTSYYTLYQQFLNHGYTIKVANTIQLRQLITKNDTLDARRLSEMLRLGTFPSSYIPDEKIQRIRSLIQIRHSLMEEKVRCNNRIQAFLDRNGVLMPSYKAFSKKWRYALMHHMGSDRVSIELRHEYDHYVFLEKKLEQVEQETQGFARKYFPTEYNLLQSITGIGPVNACYAIAHILPIERFSSCKKLRRYAGVVPTCKESGNKRSYGHIPKTSSRRLLRCALIQAANTIGKTNTNLGRYYRRKKRQKKNAGIAKVAVASSLIDIIYKVLTTKQPYTPNTC

SEQ ID NO: 258710 - protein, 321 aa, unidentified
MTDNPAAVRCSVGIDVSKDALDIFIDACAEEYRVANQAGAIAVLVERLKAVAPDYIVVEASGGFESNVVTALATAGLPVCRVSPQRVRSFARALGELAKTDRLDARLLARYGRDCRPPISRLSDAQTAELEALLQRRRQLIEMHVAESNRLGTAPQVIAKQLREHLRWLEKRIAGSDKELRQRIAGTEVWREQDELVQSVPGVGSVMSLTLLACLPELGRLTRKQIAALVGVAPFARDSGKRRGRRHTAGGRRAVRTVLYMATLSAVRFNPALKRFYERLRASGKVSKVAVIACARKLLTILNAMVRDRTRWDANRVQQTG

SEQ ID NO: 258711 - protein, 351 aa, unidentified
MVIIGVDYHPSFQQIAFLIEETGEYDEQRLNHEGGEAERFYRDLKRRGIRVRVGMEATGYARWFERLLAELDFELWIGDPAEIAAQRVKKRKTDREDARLLLRLMREDRFPRIWVPSPENRDLRQLLWHRHRLVQMRTRIMNQLQALAMNEGKRWKSKLFSQKGRAEFEKLALGPWASRRRSELLELFDRVDPSVEELTTAVQQEVHKRPEALRLMTHPGVGPITALAYVLIIGTPERFTRGKQIGTYVGMIPIEVSSGGKQRLGHISKQGSSLLRYLLVEAAQAAARYNPHWRRRYIRLAIRRHRSIAKVAMGRRMAIRLYWMWRNGCDYSPSFEFGSYAGQLEKRHGGN

SEQ ID NO: 258712 - protein, 369 aa, unidentified
MNSQYPVVIGLDVGKTGHHACALDPDGSKLFDKPLPQHEAKLRELFMGLQKLGDVLMIVDQPNTIGALPIAVARDCGCAVAYVPGLTIRKAADLYPGRSKTDARDAFIIADTARTMPHTLRQVDRDSEVLSAVKVLAGFDEDLAHETTRALNRIRSLLTQIHPALERVFTGGSLSTALVLDLLEKFGGPTRLKTAGRGKVLRFARSHSRRDPEPLVDRIFTALGEQTVIVPATAAVELVIPRVAGQIKELKAQQATVARKVEGMLEDFPLAAVLRSMPGIGLKTAAQILLAIGDGSAFQTPGHLAAYAGITPVTRRSGTSIRSEFPARSGNKRLKTPCSTLPGSPRTTTRSRRPTTTTNAPRASATTPP

SEQ ID NO: 258713 - protein, 278 aa, unidentified
MDERGKAVLRKQLRRAQVAVFFGNLPPCVIGMEACASAHYWGRTLQRFGHTVRLMAPQFVKPYVKTNKNDVADAEAICEAVGRPNMRFVPIKSIEQQAILSVHRVRKGFVKARTAQANQIRGLLGEFGLIIPQGIINVTKRVPELLEDAANELPLAFRQLIERLAQHLKELDRQVKEFEKEIIAWHRSSELSRKLEKIPGIGPLAASALVASIADAHSFDNGRQVSAWLGLVPRQSSSGGKATLLGMSKRGDAYLRTLCHPGSKEQDRQHQRVVGQSA

SEQ ID NO: 258714 - protein, 357 aa, unidentified
MKTIQVTKKTDFKGEVIYVGLDIHKKQWSVTIRTSLVEHKSFVQPPCAKTLGDYLKKHFPNAEYKSAYEAGFCGFWVHYALLEEGIENIVINASDIPTTDKEKKSKRDKVDSRKICKNLVNGLLTGIYVPSKAESEEKEAVRLRKKMVNDITRCKNRITSFLDRRGIQLPEDISDATAWSLKHISWLEGLELETSIGTASLRIMVRELTELIKLKKELERSILKELKQKYGEEYRLLRKIPGLGSVASVTVLTELGTTERFSNIDSLASYVGLVPNVYGSGEREYIGNMTKRKNSYVQSTLIQCAWMSLRRDPSMTKRYHELSHRMKPNKAIIRIARKLLTRIRYVLINKEEYILSV

SEQ ID NO: 258715 - protein, 569 aa, unidentified
MAIQLDHHAWRSQARDDKHVFISSPDLSAAPAPDRKETGLARVESGILVLQVFCPARQAIHRRIIGALWSPFSSLVLEAVHPSVVASPRKRFRPRSRRILIFVHPPGRRGQTTHQTMSKINRPASNKKKDAAKRIRPVTRPDAAGIDLAALVHYVAVPSDRDEQPVRSFGTQTADLHKLADWLVACRIKTVAMEATGVYWVPLYQILEDRGLEVCLVNARHAKNVPGRKTDVLDCEWLQYLHSVGLLNASFRPPAPICAVRALVRHRDSLVQTGCEHLLRIQKALDQMNVQVHHAVSDITGMTGLAILEAILNGERDPQKLAQLRDPRCKKTQSEIAAALHGDWRPEHLFTLRQSLAAWRYHQTLITECEAELKKQMDTLADQTKDAVPAKAKPDQRCDETLRHHLFRKFGVDLTTADGMNTQTALVLLSEVGTDLSKFATADHFASWLCLSPDNRVSGGRRLSVATRTGANRLATALRLAARSLHRSQTALGDWYRRMKAKLGSAGAITATAHKLARILWAMIKHRRPFDRARLGNPELRQQRRENALRRAAKELGYLLQPIHPVPVS

SEQ ID NO: 258716 - protein, 412 aa, unidentified
MEILYSSCCGIDVHSKNLLACLIKDGKRQIRTFSTMTSDLLRMLDWLLENHCTHIAIESTGVYWKPVFNLFDGHLEVVLVNARHIKTVPGRKTDVKDCEWIADCLRHGLLRSSFIPPRHIRDLRELTRYRFTLVKELGSVANRIQMIAESANIKLSEVVSDALGVSSKAMLRALAGGESDVVKLSDYARGRLRSKKPQLRLALDGRLSETQRWVLAQHLDRYEELERSIRKAEEKIEEAVQTSPDPFVGEAIELLDTIPGVGRRIAEIIVAEIGANMEQFPTGRHLASWAGMCPGNNESGGKRLSGKTTKGSKYLRAALVQAAWAATRKKDCFLALQFQRLARRKGRNKAAVAVGHSILVIVYYVMKRKESYKELGGNYIDHKQVEGQKKRLIRQLESLGLRVKVEEAGEAA

SEQ ID NO: 258717 - protein, 420 aa, unidentified
MPRHQDMKDDIIHLRAAGVDLGKRFLLACVRTPSLKRVGSWSLETQRFGTTTAEIRRLPAWLVDRQVEVVVMEATSDYWRGVYYRLQPHLNLMLVNPAHLKGIRGRKTDPNDAAFLARAGASGMVMASFVPQRDIRGLRDLTRRRTELVRAAGWEAQRLEKKLEDTGMKLSAVLSDIAGTSGRAILEALIAGERDPRRLADLAVGRARNKIPALVEALDGEFTDHHAFMVRHCLDEIDRWKQVITGFDARIARLLADREQDLANLATIPGIGRLGAEIIIAETGGDMTQFASAHRLASWVGVCPGQNESAGVSRSGRTRPGNSNLKRLLGIAAMVAIRNKNSYLGVFFRRLAARRGGKRALVAVMHKLAIAIWHVLHDKTHYRELGADHFTRRDSERAMRRMLKEANSLGLTIRFEPITA

SEQ ID NO: 258718 - protein, 415 aa, unidentified
MALKIVYKICCGIDVHKTFVVACIASTDKHGVTSYERHRFSTYTKGLKNLLQWLLEHNCKDVCMESTGKYWIPVYNILEKDCSIVLAHPKYVKAIRGKKTDKKDAKWIADLFKHDLVAGSFMPPAGIRQLRDLMRYRFKLTCFKSSEKNRLQNCLTVSNIQLGNVVSDTFGKSAQAILDKILENPADTSFDLEPLVFKSLKKKLPELRDAIDGYITPEQAGKLKVIKSHYENLEARKAELEELILALATPYQQELAILQTAPGISSDFTAIGIISEIGTNMEAFPSAKHLCSWAGLTPTNNESAGKKKSVRVSKAGCYIKPLLVQCANAVVKSSKHPEMRNRYLRLKKRRGHKKAIIAIARMLLTALYHMLKNGENYNAELYRKSDLPPVDREITVEQAILIARNQGYKIKSATA

SEQ ID NO: 258719 - protein, 373 aa, unidentified
MPKYSTAFGMDVHLRSTTVCALDADTGEAVTRRFPGNPWGEIAGWMDGFPGPSLAAYESGYLGFAPQRELAGLGVECVVAAVSKIPRSAADSASKNDRNDAARMAKAILAHDISPVWVPSPEVEGIRDLAGAYDGATARLATAKQRLLAFLAKRGFVYGGTTPAGNPRKYWTYDFLRWLDKVRPEDDGGVRTLAALRNEVEAAAEARADLLSEYRAAVDASPIAAEVAALRSIKGCAFALAAAFSAEVGDFTRFRSGRQVTAYFGLAPSQRSSGDSVRLGGISGAGNALVRKLAVEGSWCYAAARHQPKLMPRDTGVPLEIRMHGRKGSERLLRRREGMLARGVPAAKANAATAAELVRWLWALGMMCREGAE

SEQ ID NO: 258720 - protein, 345 aa, unidentified
MKIVGCDLHTRYQQIAMLDQETGELIERRLEHESGEAGAFYAALSSPVRVGIEATGHTRWFERMLAELGHELWIGDAARIRASVVRKQKTDARDAAHLLELLLSERFPRIWRPTMAERDLRQLVWHRQKLVWMRNAVGNQLHALAMGEGVCRKKKLFTKKGRTELESLGLGVWASYRRQELLTMLDQFDGSLRELDHAVAEQAEQNAAAVLLMTHPGVGPVTSLAFVLTLGPVERFERSKQVVSYLGLNPREHSSGGRQRLGAISKQGNPMMRSLLVEAGHTAARLDSALRQDYQRLKLRRGSGVAKVAIARKLAVRMYWMLRGQASYAQLVRMQGSPWATLVTE

SEQ ID NO: 258721 - protein, 367 aa, unidentified
MKKISTVATRQAKNFPPQKLTVGLDLGDRWSWYCVLDEAGKIRLEQRVSTTSKAMGEVFGALPRSRIALEIGTHSPWISRLLSELGHEVIVANARKVRLIAESRKKDDRLDAQTLARLARIDPELLCPVKHRSAQAQADLMMIRARAGLVRARTGLVNTARGLAKSYGERLRGCNVRNMNAEKAEGLSPELQRALEPLLSAIEELSQQICEYNEGIEALAQASYPQVALLKQIKGVGTLIALTYLLTLEDAHRFGKSRDVGCYLGLQPGRRNSGQSEPQMHISKEGDPYLRTLLVQGAQHILGPFGADCDLRRWGLKLAERGGKNGKKRAIVATARKLAVLLHHLWVSGEVYEPLHNSSRMTVAAAA

SEQ ID NO: 258722 - protein, 365 aa, unidentified
MATENLKGPALTVWAGLDVGKEHFVAALCPERTPGQSPPAPRELPTAEFARSAAGVRAWLKWVRQQRPKVAPGAASVGVRIVMEATGNYSRELAEWLGQLAPEWPAAISEPRRVAQYLQGVGLRGKTDPTDACGLARYGAECWPPPYVALPPVYAELRALTRERQSVVEAQVAGANRAATTGGAGSCRAVARLQRQRCAYLARQVAKLEGLLREHVQRHPELRQTVAHLTSIPGVGFLTAVVFLAEAGWLLPHFPTVRQFVAWCGLDPVPYDSGKSVHGKAHLSKHGSAHLRRSLYLAALALTRKPDCALGSTYARLVRAGKPGLVALGAVMRKLAVLMRALLKHDADYCETIPVAAQENSAMTT

SEQ ID NO: 258723 - protein, 318 aa, unidentified
MMPASVFVGIDVSKRQLDVAIRPGGRCSVSNDETGIIQLLEQVKAVHPTLVVLEATGGYEIPVTGALAAAGLPVVVVNPRHVRDFAKATGTLAKTDALDAQTLAHFAEVIHPAQRPLPDEQTQALAALVARRRQLVDMLTAEKNRLRQASTQIRPSLNAHITWLEQAIQEADRDLAKSIRQSLLWREKDELLRSVPGVGPVFSTTMLATVPELGTLTHKQISALVGVAPFSRDSGTLRGKRMIWGGRAQARAVLYMGTIVATRFNPVIRAFYQRLCAAGKAKKVALVACMRKLLTIVNAMLKHRRPWSHAVNTAGAGA

SEQ ID NO: 258724 - protein, 480 aa, unidentified
MSIHSTEPSAVRVQVGIDAAVVANHHICVRETMPDGQVRLTRFVASPTLAGLGLLGDRLSAYPGVVAVAEPTSMTWLGLSIALRQVGADLSLLGARHAARLRGAIIGKDKSDVIDADVLAAAGEVFTLIPLQPPTPTDLALRRAVVRRGKLVIDGNRSRRRLISLARWAFPDVWSAFAGSMPTAVAVLSRWPDLRALGSARRSSVTAVVAAHTRAVPDVPARAEAIRDAAIAWARFWDGHLDLDALAWEVAEQLQDMHETDQRIQRATTQASHYWAALYGDDPLLGSVPGMGPATAPTVRAFLGDACRFDTAKAAASYVGMNPSTWSSGTVVQPSRAITKEGPAVLRLAFYQAAGGARRVDPQLAAYYRHLMVDRGHGSHQGQRRRGPQADRADLDGAEPRRALPAPGRRRHARDPSPRQAAGPDQLRRPTRGPGPSPSAKRGHAPLQAHPITRRLDPTRRAKHTRLVDDPCPNESACNP

SEQ ID NO: 258725 - protein, 425 aa, unidentified
MNYKQNEKINQVKESTLVVGIDIGSTKQYARAFDWRGIELGKVFTFSNSREGFEAFKAWMQYLQDKYRKSDVIVGIEPTGHYWFDLGAYLEDEGILLVMVNPYAVKQTKELDDNSQSKNDRKDPKVIAKLVTEGRYSAPYTPDGVYADLRIMVTNRKRLIREMTQIKNRFARWFAIYFPEYTDVFGDYEAQSSMLLLKKVCTPEAIVELGAEKINKIWRDAKLRAVGMKRATTLCETAKRSIGLKKGSSAARYEMKLLLEDYEYKKAQLDAIMEEIEKLCRKIPESGQMLAIKGIGVITVAGFLAEVGDVRRFESPRQIQKLAGLSLRENSSGKHKGQTTISKRGRSNLRAVLFNAAIPLIATNPEFQSLHEYYTTRANNPLKKKQSVIVISCKLIRVFYAILANGVTYDAQKMLSDIHRQPQAA

SEQ ID NO: 258726 - protein, 322 aa, unidentified
MSVSVLGIDIAKQKFDAALLVEGKTKHKTCKNSAEGFEVLRFWVEKQGVQEIHACMEATGNYGEDLAIYLHEAGHMVSVVNPARIKGFAQSELLRTKTDKLDAALIARFCLAMKPGAWIPPSPEIRSLRALVRRVDSLIDMRSQEKNRISTAHQSVSLLIKEHIAYLDQEIEKIRKQIADLIGKDPNLKRKKDLLDSIPAIGKVTIPHILAELDDLGKFNHVSELVAFIGLAPKETLSGSSIKGKPRLCKIGHARLRKALYMPALVSIQCNPVMIDFYNRLKDKGKNGKVIVCAIMRKLVHVIFGVLKSGKMYDPNFKTIAA

SEQ ID NO: 258727 - protein, 349 aa, unidentified
MKKHNKIQKQMRETIGIDLGDKVSRYCIINQEGEVVEEGSFRNQASSIEKHFGDQPRQIALEAGAQSAWISRELKKLGHEVIVANPRDLKWITASDTKNDPVDARKLALLARTDTRLLAPVEHRTAEQQAELAVIRARDAILRARTLLINSARGIAKGFGVRLPKSITGTFGQRAVDALPEFLRKALTGLLAQIDALSREIAGYDQQIGVLASQHPELARLESIPGVGRLTAMTFVLTLGRAERFAHSRDVAGFLGLRPKQRQSGARDPQLGISKSGDPYLRKLLVQCSHYVLGHWGPDSALRQWGLAKSQAGKKATLRAIVAVARKLSVLLHRLWVSRDSYKPFPKMA

SEQ ID NO: 258728 - protein, 334 aa, unidentified
MEQITTVGIDLAKNVFSLHGVDGAGRVVLRRTVRRDQLVATVAALPPCLIGMEACSGAHEWGRRFQGFGHTVRLMAPKFVAPYRKSGKNDSNDAEAICEAVTRPNMRFVPVKSAEQQALLALHRVRHGFVVERTALINRLRGLMSEFGVVLPLRSITVRRQAAAAAESLPELAKRVIGDLLEQLRLLDERIGGYDREIEAQARLSEAARRLMQIRGIGATTALAMVATVGNAREFKNGRQFAAWIGLTPSQYSTGGKPRLGHISKRGDAYLRNLLVQGARSVLNSAPRHQDRMSRWILELLPRRGYYRTLVAIANKNARIAWALLAKNDTLRPA

SEQ ID NO: 258729 - protein, 350 aa, unidentified
MRHCGLDVHTKRTTVVWMDDDTGEISRASTMPNDELVAYLQFLPELKQVVMEAGSTSAFLKRQFDTCQIPAIVVDAHKASRLLEAINSQAKTDKVDAKGLAILSARGWAEPIAVWVADPPTQRLRTLTRSREQLSKVSNILRNGIRAMLRAEGLLCSATDLTGPTARAWLDDIEARLDPLTRQMLHQNRELIARTMENIAVIDVLLAQIAADDERCRQLDTIAGCGVVTAAAVVAEIGDITRFRSAKALRRYAGLTPKIEQSGERTVIGKLVRHCNKHLRRALIIIAQSFVKSARVTDTRAKSCYFRCLFRHGPNPAKVDLARRLCDIIFAMLRDGTDFDPGRLAPAKAR

SEQ ID NO: 258730 - protein, 351 aa, unidentified
MLIIGCDYHPSVQQIAWVDTETGETGERRLKHSDREAEGFYRELKEKGFSVRVGMEATGHARWFERLLGELGFELWVGDPGKIRAKQVKKQKNDRRDAEHLLKRLMKDDFPRLWVPTPENRDVRQLVLHRHRLVGMRTRVMNQLQAIAMNEGIRRKRGLWNKQGRALLESLSLPPWTSRRRQELLELLDHLDPSIEQLSQAIEQEAEKWPEVQRLLTHPGVGPITALAYVLVIGTPHRFRCGKQVASYLGLAPSEASSGDRQRLGHISKQGNAMLRHLLGQAAQSVAHCEDQWRGQYVHLALRRNHAIAKVAMARKLAVRLFWMWRKEWDYQQVKNFGSHVGQLVQSHGVE

SEQ ID NO: 258731 - protein, 341 aa, unidentified
MYYIGLDIHKKSISFCVKDASGQIYQQGKVTATRPQLDVWMKTLPQPWTVAMEATIFTGWIYDHLKPHAAAVKVAHPLMLKAIAASNKKNDRIDASKIADCLRCDFLPECYMDSLEIRERRRTLRYRSLLVRQVVQMRTRLASLLMETGVSYDRQHLHRLGFISELLSNEDAVKSIRRLLRVSQDSILRLRRIESAMIRSLERDPFLAERVRRLQTVPCVGRITALTWALEMGDISRFRSIRQAISYCGLCGDEQKSADKTVRTPLSKKRNKHIQHVLVEAAKLAPRDDSGLALLYAKEKQKGNANRATLAVARKILTYLLAVDREQRDFVLAPQFSGAAA

SEQ ID NO: 258732 - protein, 347 aa, unidentified
MLYAGLDLSRHKLDVHVMNETGEPVQVTTAPPDADGLRGLARQTAGYGEPVAAAIESMNGARFVHDQLELAGWQVQVADAQKVKGLAPLACKTDRIDAWVLAELARRELVPAIWLPTPEVRAERERARWRLHLVRHRVALKNRVHATLLAFGRPCPTSDLFGSGGRQLLDRLRLPEPWAGTTAAAVTLIDDLDEQVHGCERELRHLGADHAYVPLLMTAPGIAWVLGYTIAAELGDIARFPSPKKLCGYTGLCPRVYQSGTRDHRGPLAKNGPKYLRWALIEAATHAARHPCYHDHYQATKRRLGRQRGPAVARVEIARKLAEAIWHMLTTQAPFRPARPHAKALAA

SEQ ID NO: 258733 - protein, 394 aa, unidentified
MKRNDLSRSLVAFDQNSTLVSVVELSLKTWLVGGVVPGLERTPLKKQGPDAEALLALLHRWRDESVKAGSKIERIVVAFEAGRDGFWLARWLQARGIEVYVIHPTSIPVSREHRRAKTDRLDAGLLTRALLGWLRGEPKHCGMVAIPTLAEEDARRPNREHEHLVGERSRIINRLKAATIRHGIRNFNVKLSKAAECLEELRSAEGVPVPPNTLDEMRRDMARLRFIREQIKEIERMRLERLQRAPREGTHPMVLLLAKVMGIGIETADMLVHEVLSRSLRDQRAVARYGGMTGAPDESGGKRRDKGLARAGNARVRRGMVQLAWRWLMFQKNSALTHWYRARTANARRDIRKTMIVALARKLLIALWRYVTTGEVPAGAVLRPATGAVPRLAA

SEQ ID NO: 258734 - protein, 359 aa, unidentified
MNSSKYKNISFDDAHFFIGIDTHLKNWRVTIRLNHIELKTYSANPSPEELLKYLYKNYPGGSFHIVYEAGFCGFWPARKFKQLGIDCIVVNPADVPTSNKEKVNKNDPIDSRKLARELENKSLKAIYIPDIFHEELRDLMRLRGRIVQSQTRIKNRIKALLYTKGIDIPLNFSKNSRWSGAFIKWLKDIKLSSSAGNYSLQNMICQLVQLREHNKNIIKELRKQATQKEIAPIIEALKSVPGVGFIIAFSVYTEIIDMKRFSNVAKTIAFVGLIPSIRSSDETVYNNGMTFRGNNFIRPLIIQAAWRAVREDPAITMKYRDLTKRMDPKDAIVRIAKKLIVRARHVWLKREEYVYSLVA

SEQ ID NO: 258735 - protein, 313 aa, unidentified
MIITLRCIGIDVSKRHLDIFDEGIGVSERVANAPHAITELVARWRCDALVVFEATGVYDLELREALRAAGIRFARINPARARDFARASGQLAKTDPIDARMLAAFARAMRPATEQVSTPARNALARLAKRRDQLVLMRAQEKNRRSEAGDRAMVERICRLIEVLDREIAEIEADISALIKAEPEISHDAQLMRSLPGVGPVASMQLIAQMPELGHVGPKQAAALAGLAPFNVDSGAYRGKRKIGAGRKRVRDALYMAALNAVRRADRFKAFYAKLRQAGKPAKLALIAVARKLLIILNAIMRDRKAYMPAQQT

SEQ ID NO: 258736 - protein, 428 aa, unidentified
MNDEEIIRHEKYCQLRKDIRGSEDHIIVGIDVAKDKHHAFMGTATGKTLLKRLIFENNMDGYSRLLARTEAIRVQNGLSEIVFGLEPTGNYHKPLATHLIRCDHNVVLVSGVAVKRNRELLDGRWDKHDTKCAANIADLISQGKCLFYEYPLPDINELRNLLSLRKRLKKEDHSLRMRIRNNLLAKYFPELDRFYGQCETENLAIVRWCLEPGKIAGMEFNKFFQIVTTRERGIAQKQRLRKIHSLSSESVGCPMGQASEFEAQVLVDKLKQVRQVIKKTEDLIKDVSLGLPEYSWMLTIPGFGPYVSSIVLATIGDPFRFNNRKQVLKMSGYDLNANRSGKTSLSAVPVISKKGSSALRYALYQAALVASTRNGYFINYYTNLLRGREREQGIKTKMRVKLAAKMLIIAWTLMKKKEPFNPNYLNNK

SEQ ID NO: 258737 - protein, 343 aa, unidentified
MEQFAGLDVSVKETSVCVVDDTGKIIREVKVASEPGTLLAVLKNPAYHLKRIGLEAGPLSQWLFSALAEAGLPAICVETRHMRAALKAQINKTDRNDARGIAQMMRAGLYRPVHVKTVRSQKLRMLLTHRKLLQSKAIAIENDLRATLRNFGLKVGMVGTVKFEARIKELVENLPDLTVLVEPLLIVRRVLREQIGILHRRLMAIVRDDDVCRRLMTVPGVGPVVALTYRATVDVPARFRNSKAVGAVFGLTPSRYQSGEINLTGAISRCGDEMMRAVLYEAAQVMLTRTIKWSWLKAWAMKIARRRGMKKAIVALARRLAVIMHRIWVDGSEFRWTREAAAA

SEQ ID NO: 258738 - protein, 372 aa, unidentified
MTTTDAAAEARESVYVAIELSKKTWVLGIAHPDRDRPSIHRVSGGNIAELVSRLRVAARNNRRILVCYEAGYDGFWLARALAKMGIECRVLDPASIQVNRRARRVKTDRIDVLALLRALIATDRGERHVCAIVRVPSVEEEDARRSHRERQRLVRERTGHINRIKGLLFAQGIRDIKPKLRRTRIDFAALETAEGHPLPDRLRRELEREYARLSLIATQLREVEKERDTADAQDPVVEQKRQLLVALHGVGATSAAILAREVFARSFASRRQLGSYLGLTPSAYDSGSTTRCQGISKAGNSWARRILIEVAWLWQKYQPASPLSHWYIQRTAGQSSRIRRIMLIALARKLAISLWRYVETGLVPEGVAIAKA

SEQ ID NO: 258739 - protein, 448 aa, unidentified
MSNSRGLSRGDSRRNARLTRLRGVLPRDHAVLAVDLADDKQVFALTDHDSQVLARRTVRCRAWQLAEVIEWGRQRALAAGFTGVTVACEPTGHRWRVVAELAAQAGVELVCVQPLLVHRAREAEDFTRDKSDDKDALLIARLATQLHVYLPERADPTWARLRHLGARRVEWVTRVGAARQQLRDLLECSWPAALRAAAQPLDSMTWRAAMHVAGCDPAKIRELGPKRFTRAVRRELPGWGTTRPTQRIIDALIIAAGDEQGVPSQRLGGLERAAFALADHRHALAQRDHVETLMVGVLDELGLTALARSIPGLSAVGAAAILAETGDLTRFDSARALVKHAGLCPRENSSGTFTGKTTISGRGRPLLRVAAWRATFGALQHNPVLAARYRHLTTRADKPLKPTQAHVAVAGSLLRQLFIVLTTGTPWDPDIAAGKVHPGTGEVTATAA

SEQ ID NO: 258740 - protein, 393 aa, unidentified
MVCVGIDVAKDKHDCFIISSEGEILADVFTIQNNAEGFDTLLQTIRRCTRPADKIKVGLEAIEHYSYNILAFLLNTGFLTYVINPLHTNLYRKSLTLRKTKTDRVDARTIAAMLLSDVNLKSYTDTAYHNEKLKSLTRYRFDKVRERAKLKTSVSRLVCILFPELEKLVPTLHMASVYMLLSDFPGAKQIADTHMTHLKSVLRDASKGHYGRDMATRLRDIARCSVGSVMPAKSLELQHTICLIRELDSEIEDIETAIQSMMEEIDSPITTIPGIGVRIGAMILAEIGDFSRFDSPDKILAYEGMSPSAYQSGQLSLSGSYSHMEKRGSRYLHYALYNATKYVCLWNPTFASYLAKKRGEGKHYNVALSHAAKKLVRLIFAMEKSQQQYSNTV

SEQ ID NO: 258741 - protein, 336 aa, unidentified
MRYIGVDLHTTQITVCYLKAESEFEIRKYQLVEMDKFVNTLEKTDEIAVEATCNTRWFYEQVASSVRRVVLVNRRQFEVVKNSVKKTDKNDALNLARFLKADLLPEVRAKREAAGRVQSLVNTRTKLVRLKTSLINKIHALHVSNGRKLKKTSLASDKGLEKVLLSEWSAIERIELEIIIEQIRSLKVSIRKLDKAIETESEKLQGYESLVSMSGIGSLSAGILLSVIGEIKDFGSADKLASYFGIVPRVSNSNETVNHGRITKRGNKTGRTTLVQCSLAAIKKSEYLKKYYEQVKARRGHGKAKIALARKYLGIIYNTLSNNWVFADFNNFELAE

SEQ ID NO: 258742 - protein, 412 aa, unidentified
MNCNDSAARRWLQRIETLLKALLVFDYHLGERAEKCNEHFPALNNNPVPCGTRSSIRMKYYTSTTEFNCGIDLHARQMYVCLMDRQGKKLVHTNIRNNDFDYFLKLVAPYGHDLTVCCECMFGWYWLADACHEAGLRFVLAHALYLKAIHGGKNKNDRIDSEKLAHLLRTHLIPPAYVYPAALRPLRALLRQRLSFVWGRHESLARIQSHQLAYNRPLFKQSPSNRDEWEKRLLVQEPEPLGQMALQNELAMVRAYDQQISQVEDQLKRHTRKVAARDYALVQSAPGIGRHLGLTILYEIGDIERFPTVKDFLSYCRLVKGTVASAGRIKGLRGAKLGNPYLRWAFGEAAVIAKRDTDWFGPLAQRLEARMNGNKFKANTVLAIKLARAVYFMLKNKTVFDPQRLVMALQRN

SEQ ID NO: 258743 - protein, 343 aa, unidentified
MGEVIMIGLDVAKNAFQVHGVDAVGAVVLQRQLRRGQVEKFFAQLAPCMVGLEACGGAHHWARVIGRYGHRVRLMPPSYVKPYVKRNKNDARDAAGVCEALSRPSMRFVAVKSVEQQATLAVHTTRALLVRQRTQVANALRAMLSELGIVAAQGLRGLRKLIGQLEAPSEAIPEIMRGALALLAQQWQALDAAERALERQIRQAALANPDARRLMEMPGVGPMIASATLAKVPDARVFGSARDFAAWLGLTGRDHGTGGKHRIGSISKQGDRMLRTLLITGASAYLRQQRARGVTDPWLRAMLARRPYKVVMVALAARTARIIWALLSKGERYRDRTLVPTAA

SEQ ID NO: 258744 - protein, 410 aa, unidentified
MEVLHAHCAGLDIHKDSVVACVRHMVEGKVTSQVKTFKTTTQELMALSDWLSAEGVTHIAMEATGVYWKPVWHILSDGEFELVLANAAHVKNVPGRKTDVNDATWLADLMAHGLIRPSFVPDEPTQQMRDLLRTRKQFVRERTGHTQRIQKTLEDANIKLDSVISNIVGISGRRMIEALIDGQAAPEALAALAHGRLQATPAELEASLRGRVTAHHRFMLRLHLDHLDALDAAIGRIDKEVDCNVEPFRVAIEMLTTIPGVSRLSAEVIVSEIGIDMSRFPTEGDLISWAGLCPKNDESAGKRRSTRMKKGAPWLKTTLVQCAWAATRTKETYLHAQYLRIRSRRGAKKAIGAVAASILTAAYHMLKNGTLYQDLGANHFDKRAKGRHVLKLVNRLKNLGFAVQITPMAA

SEQ ID NO: 258745 - protein, 390 aa, unidentified
MMEQRNKVCGVDIHKRFLIATILSRDGTKIQKRYGTDIDDLFNFRDWILENNCDCVAIESTGVYWYPVNAVLENKVELILANARQIKHTPGRKTDSIDSEWIAEVALNNLIYPSRIFPKEERDLRRLTRTRESLVKMRSQIKNQVHQGLESCSIKLSSVLSDNFGKSGRHILDGLIKGKSIDHIIEEIPSKRVKKNEDQIRAAIRTGLDETQIFLIQSHLNTIDGLTKKLDEIDSEIKHRISRRKDDLQIAMSVPGIGFKAATTILAEVGNYRDFSTPDKLASWCGIVPNVYQSADKLITGSITKHGSKHIRWMLVQVAQAALKKRGSKLRRFFLRIKARKGHNVAVVALARKILCILYHLLMNQEMYQEDGVTKSHASSVSRSFLTQSL

SEQ ID NO: 258746 - protein, 330 aa, unidentified
MSSPLPIRLGLDISKDTFDACLCFEDSASKTQNKAFLNTTKGFAQLDAWLRRHHAPVVLAGLEATGRYGLALCQHLHAKGHQVYQLNPRHVKDFARSQGRRVKTDAVDAAIIAQFLRYNDQRQLWQPPPAHFVDLQALLRRRMQLMDQLQAERNRLEDPGLPAVVRSDIASHVRQLKNRLTDTTEAIQAHVLVWPDLQKSVRLLRSIPGVGLMVAVTILAETPGILNFKRARQLAAFAGLTPALAQSGTSLHRRGHMTHEGSALLRKMLYMAALQSVKRVNNPLHATYMAFVNRGKAKMCALGAIMHKILRIAYGVLKHEVEFVPQLAKL

SEQ ID NO: 258747 - protein, 340 aa, unidentified
MQVTTIGVDLAKNVFQVHGITGTEEVVFNKPLRRAQFLAFFAKLEPCLIGMESCSSAHYWARELTELGHEVRLIPPMYVKPYVKRGKSDSIDAEAICEAVTRPTMRFVAIKTVEQQSLLSLHRARDLLVRQRTQLINNLRGLVAEFGIFIPRGLARVIGFAENITLGEVLELPDIANEVIHNLCEQLMALHKRVRWYEDRVKQVAKEDARVRLLRTIPGVGAVTASAIIASIGDGHQFRNGREFAAWLGLTPTNKSSGGKEKLGRITKMGDQYLRSLLVVGMTSLVRQTRSHPERASKWLTSLLERKAARVATVAMANKTARIVWAVLTRNEPYSPRAAV

SEQ ID NO: 258748 - protein, 366 aa, unidentified
MKKISTMQAFSNEILKEQKLTIGVDLGDRWSFYCVLDEAGKIILEQKVPTTPEAMKQTFSRIPQSRIALETGTHSPWVSRLLTELGHEVIVAHAQKVELITKSNRKDDRHDARTLARVARIDPELLGPVRHRSAKAQIHLTVIRARAELVSARTALVNAARGLVKPFGERLPKCGTQQVSRELSAGLSAELRDILEPLLKEIESLNERIQEYDERMEKIAKEVYPEVSLLKQVKGVGTQIALTYVLTIEDPYRFPKSRAVGCFLGLRPGRRNSGESEPQKKISKEGDRYLRTMMVQGAHYILGPFGADSDLRRWGLKLAERGGKNAKKRAVVAVARKLAVLLHRLWVSGEVYEPLRNSQKAMRAVA

SEQ ID NO: 258749 - protein, 314 aa, unidentified
MLLSSCYFGVDVSKDTLVVVAQNRRWQFANTKAGHRKFIAQIKKLSASGHVVCESTGSYHLRMCLALQEAGIAFTIANAARIRYFGLSEGILAKNDPIDAELIARFAQAKRPPADPPLCREQLALSESVTHRQQLVEMIKVLRTHRQQVLHAALVAEIDKSMVVLEKRLAALERQLRAQIDAHPLWKAKLARLTQTKGVGFVTALTLLAKMPELGTLNRGQCAALAGLAPYDNDSGKHTGKRTIRGGRQAVRTALYMAALSAATTNPILKTFYQRLLAQKKLFKVAITAVMRKLLLHLNTLLKTPTPSPQTAAS

SEQ ID NO: 258750 - protein, 343 aa, unidentified
MDHFAGLDVSVKDTSVCSVDETGRIVREVKVASEPDALLAVLTNPAYHFKRIGLEAGPLSQWLFSVLAAAGLPVICVETRHMRAVLKAQINKTDRNDARGIAQMMRVGLYRPVHVKTLRSQKLRMLLTHRKLLQSKAIAIENDLRGTLRNFGLKVGMVGTVKFEARIKELIANLPDLAELIEPLLIARQVIRDQFAILHRRLLAIVRDDEVCRRLMTVPGVGPVVALTYRATVDVPARFRNSKAVGAVLGLTPAKHQSGERDQTGGISRCGDEMMRMMLYEAAQVMLMRSVKWSWLKAWAMKIAKHRGLKKAIVALARRLAVIMHRIWVDGTEFRWTREVTAT

SEQ ID NO: 258751 - protein, 355 aa, unidentified
MDSVKYIGMDVHKESISIAVMNGAGKIVMECVIETKASMILQFIDGLRGDLQVTFEEGTSAAWLHDLLKPHVTKLLVCDPRKNASMREGNQSDKIDARRLAELLRLNHLSPVYHGEHGLRSLKELVRSYLTITKDLGRVMTRVKAIYRSWAIPCTGKQVYAPRHRAEWLGKITEPGVRRRAEFYYQQLDALRTVRQEVRRELLAEAKKHKAWKLLCQIPSIGPIRSAVLLGILQTPHRFRTKRQLWTYSGFGIETQSSADHRSVDGQLKRVKKQSSIRGLNRNCNHDLKNLFKGAAIAASSKPGPFQEFYTALLTKGIRPEMARLTLARKIATTVLMVWKRGACFDARHLKPQTA

SEQ ID NO: 258752 - protein, 347 aa, unidentified
MNFYNRQHQYYCGIDLHARKMYVCILDQKGKTMAHENIKTDPEMFLKLISPYLEDIVVGVECVFCWYWVSDLCAKHKIPFVLGHALYMKAIHGGKTKNDKIDSYKIALLLKGGNFPTAYPYPAQWRATRDLLRRRMYLVRRCGELVAHIQNTKTQYNLPGFTKRLARKYNHAGVAEQFEDPEVRKSVEVDLAAIASLNQILNQLEWHIEKTAEQHDYHTLYLLRSIPGVGLILALVMLYEIQDIKRFPSVQDFSSYARLIKPVKESDGKWAGKSNGKIGNHHLKWACNEAAILMLRESEKAKQYVAKLERKYNKGKALGIFTHKIGRAVYYILKNKEAFNMEKFFSQ

SEQ ID NO: 258753 - protein, 432 aa, unidentified
MAVSRSTCGVAVAFWWQEAMMRVIVERCCGLDVHQETVVACLLIGAPGDRPTKETRTFRTVTRDLEALRDWLAAAGVTHVGMESTGVYWRPVYAVLEGHFDLIVGNARHIRNVPGRKTDVKDAEWIADLVRHGLIAKSFVPPRPLREMRELLRYRRKLTESQAAERNRLLKLLETANIKLASIMSDVFGVSGRAMLRALIDGQASVEAMADLARGQLRRKRSDLILALEGRMEEHHRFLLATQLRRLEAIEQDIAALDLRINERLEPYRMPHALLTQIPGVDWLVAAVIIAEIGVDMSVFLSVYHLSAWAGVCPGSHESAGRQKSGRARKGNVHLRTMLVGAAISAARTRGSYLKDKFHRLKARRGAMRAALAIAHKILVSAYHMLAKGLAYHDLGEAYLDQIGQSRTVANLKRRLERLGYHVTLERTTQAA

SEQ ID NO: 258754 - protein, 358 aa, unidentified
MRIIGCDLHARQQSIAMLDTDSGELVEKTLEHDGEELRKFYSGLCRPVLVGIEATGAMQWFLEWMEELGMECRVGDPAKIRAAEPRKQKHDRRDAQLLLKLLSENRFPTIWMPSSEQRDLRTLLRHRHQWVRMRTRVQHTLQSMALNHGLRRGHSLWNQAGQHALRALPLAPHASERRKALMTLYPSMQESIEELDEEVRQQAQQHPQARRLMTHPGVGPITALATEVFLGDPLRFTDGKAVASYVGMIPREHSSGGRQRLGAMSKQGNALLRYLWCEAAMHAVGRDPELQRFYGRKLVQKGLGKARVTAARKLGIRLWIMLRDEIDYQEFCRRGEARQESGSVCAGMLDITSGPTKS

SEQ ID NO: 258755 - protein, 466 aa, unidentified
MSKPEQSSGPKVAGRKGSKTKPVERECQPDAAGCDIGAREIFVAVPTNRDENSVRHCGTFTNELHEMAEWLVRCRIKTVAMESTGVYWIPVYDVFEKHGLEVRLVNPRNMKNVPGKRTDYHECQWIQYLHSMGLFEGAFRPDADVRAVRTLTRHRGDLVEMASQHVQHMQKALTQMNVQFQHVISDITGLTGLAILDAIIAGERDPAVLAKRRDPHVKASEEILRQSLEGNWDPAQIVVLRHRLSLYRSHREKIDESDQEIEKLLAAFVPQVDPEEKPMPEDRKQKQRKRKKKTGSPGFDMRKEGYKLFGVDLTQIPGLMASVFTLFSEVGRDMTRWPTAAHFSSWLGLCPDNDISGGKVLWRGNRQVKNRAGTLFRLAAHSLHRDQTPMGHYLRRMKAKLGPAAATTATAHKIAVIFYTMVNKQVEYDATLWAERDLMREKRMEARLHKQAALSGFKLVPLEDAA

SEQ ID NO: 258756 - protein, 355 aa, unidentified
MESVKYLGFDVHQSTISVAVVNADGKLVMQSVIATHAATILDFIHGLRGTLHLTFEEGTHSAWLYDLLARRVARVVVCNPRQNALLKAGNKSDTGDARKLAELLRAGLLAPVYHGEGSTRTLQELVRSYAALTEDTTRVMGRVKALYRSQAIACAGKKPYGRRHRREWLSKLSEAGLHRRAERLYEELDALQGLRRAAKRELGLESRKHAAAKLLRTVPLLGAIRAALLIGRVQTPHRFRSKRQFWAYCGLALETRSSADYRFEDGQLVRAKKPVFIRGLNRNHNHDLKNLFKSAATTASVIHGPFREFYEGLLAKGMQPAMARLTLARKIAAITLSVWKKGESFDAEQLKPQAA

SEQ ID NO: 258757 - protein, 279 aa, unidentified
MQATTIGIDLAKNVFQVHGVDAHGKKLFNKALKREQMAAFFVNLPAALVGIEACGSAHHWARKLQSMGHTVRLMAPQFVKPYVKGNKHDAADAEAICEAVTRPTMRFVPIKNVEQQAVLSMHRVRQGFVRARTAQANQIRGLLSEFGLIVPQGIAHITERVPTLIEDASNDLPGSFRILMDRLLDHFKALQAQIQQLETQILAWHRSNAASKRLEQIPGIGPITASALIASLGDARSFKDGRQVAAWLGLVPKQHSSGGKQNLLGISKRGDTYLRTLLI

SEQ ID NO: 258758 - protein, 289 aa, unidentified
MPDHSEALHVVGGVDTHTDLHVAAVVDHQDRVLGDESFPTTRHGYRLMLVWMRSFGDLKRAGIECLGSYGAGLLRSMQAAGVEVLEITAPDKHDRRRPGKNEHFDAESAAHAAFAERHTVTPRSLDGMVESLRVLRVCRKTSVQARRIALQMIQTTIFCAPDKLRDPLRQMTRTQLIRTLEAWRPDLPAYQEVEEAYRISLKSLARRYLELHDEIADLDDMIEAIVIDLAPELLEQTAIGLDSAAQLLLTAGDNPERLRSQASFAALHGVSLVPASSGKTVRHRSPLDS

SEQ ID NO: 258759 - protein, 334 aa, unidentified
MDTSKHIFQLHGVNAAEAPVLRKKLRRKEMVTFFEKLAPTVIGIEACSASHQWARLLQSFGHSVKLIAPQLVKPYVKRGKNDAADAEALCEAMSRPTMRFVPVKTAEQQAALMLAGVRDRLIRNRTQLINAIRGYAGEFGFTAAKGKAHLDPLLERIQADESLPALARELFAAQAKEYAQLQAQIDEVDARLMTWHHADECSRRLAKIPGVGPIGAVLLKMKTPEPELFRSGRQFAAWIGLTPKDHSTAGKVRIGVITRAGDEGLRSVLVVGATAVIQHGRRGGRASRWLTELLKRKSPKLAAVALANKMARIAWKLMVTGENYVAKSALAGAG

SEQ ID NO: 258760 - protein, 420 aa, unidentified
MKVVYQTCCGVDVHKSFLVATIIKTTSGVEPSYQKKRFSTFNNSILQFKEWLVKNQCRDVCMESTGKYWVPVFNLLEDEINITIANPKWVKAVKGNKDDTKDSKWIGDLFRLGLVPGSYIPCKPIRILREFTRYRYKLTSCRTSEKNRYQNALTVCNVALDSVVFDIFGKSATSVIDYLIEQPDNSINHEEIASRLLRSLKKKSDSVIESIEGYQMTDSQKYRMCLIRAHLDYITSTINDIDTMLNSLIAPYENAVQLLCTIPGVDRNSAITVISEIGTDMTPFSNSKRLCCWAGLTPGNNESAGKKKSVRITRAGVYLKPALVQVAHAAVKSDKSPYYKQKYERIMKRRGKKRAIIAIARMILTAIYQMLSTGEAWNPTDLFKIDMPEPMKEKQKEKAIKQAMKLLIREGKISESQLAS

SEQ ID NO: 258761 - protein, 353 aa, unidentified
MKYVGLDWAYRRAQWCALSPGGQVAGEGQIPADRDGLARLVLELGAEVKACLEMMSGALWVRDQLVACGWQVEVADARRVKTIAPLAAKTDKVDARLLAELSRRELVPALWLPSLDERALRERLRRRMHLVRLRTSAKGRIFGLQTQWGVRVSLARLRRADGLTLLERAGVPEVWRRSVSECLSVIDFLDARLEPLDRELKPFAHADPRAVLLDTIPGVAELLALTIAVEVGEISRFATPEKLVSYGRLAPRVRQSGQARQRSGPLSKSGSRLLGWAAVEAAQRAWRESNPWHELYLDVGRRSRHSNAAKAAVARKILIAAWHMLSRKEPFKPAPRTTNGTSAPASSRLALAA

SEQ ID NO: 258762 - protein, 374 aa, unidentified
MNEVSKIHVGLDVHKDSISIGVAQPGREPGKLLTKIAHHVPKLLKQLDKLGTPQQLHVVYEAGPTGFGLARSLLDKGYACEVIAPSKTPRRPGERVKTDTRDCIMLAEYSRSGSLHAVWIPDAADEAIRDLSRAREDAIEARQQARLQLKSFLLRHDVRYAGKTSWSSAHYRWLAEQSFGASAAQTAFTEYCLTVQAGDERVLRLTQALQEAVTQWRFAGVVAALQALRGVAMVTAIGLVAEIGDFGRFEHPRKLMGYLGLVPSEHSSGERTSRGSITKTGNAHARRLLTEAAWQYRFPARISRAAQLRQEQLSEAVRTIAWKAQLRLSQRFAALNRRGLQVNKACIAVARELSGFVWAIGQRAMAETAAKAAH

SEQ ID NO: 258763 - protein, 362 aa, unidentified
MKQFIGCDVHKRYSVFVSVDENGKANRAVRVEHGNGELEGYLSSLPDGTPVAVETTGHWYWILDAMEKAGLEPHLAHALSAKRMMVGPNKTDKLDAKGLATLLRNGTLPEVWVPGGSLRDLRGLMRSRLALRRMGTALKNRISSALARYGLPEQFRGDLFGTGEAATKCRQESVAALPEHSRFATEQELDLLAAVETCVTAVTEEISGSIGKLGWVRRLRTMPGVGEILGPTIYLEIGLVDRFPTPAHLAAYAGLVPRVNSSGGHTRMGRTRRECNRFLKWALVEAAEVVVAHQESMSARHVVRLYRRVKNNKPDRHGKAVVAVARHLAESAWHILKRHQDYREPQPTPGMIQRFHTTGRPL

SEQ ID NO: 258764 - protein, 436 aa, unidentified
MRKFLECCAGIDIGKREITVTILTGSAEIEPVSQTRTFGTTVQELSRCLEWLLGSHCSTVVMESTGTYWVPVWNVLHEQIAVIVANPEHVKARRGEKTDPEDSRRLAERLRVGDVRGSFVPSAQIVELRDLTRRRKRLLSAANSERNRIQKLLEQANVKIGNVVSDVFGVSGQRILQALLQHPQLPPADLAELAKGRLRHKRQALIETLQGHRLNDHVRWMIQHSLDHLVFLENQLTALSQRTLQKLQPFEREYELLQTIPGIAGETAAVILAETGGNMAQFPSPKHLTSWAGVCPGNNRSAGKQKSTSIKRANKWLLAALVQSAWATVRQRGSIFKKRFYRQMQHRGTKRALIAAARSLLAAVWQVLQRMTPYDEPANEIFQERERGKKIQHHLRRLQQLGVDISTLELPPPIPSDRLRPLPNLHPFGVLGIHAR

SEQ ID NO: 258765 - protein, 326 aa, unidentified
MSIRREGERIWRGKCASDPRIIAELVRKRAPAAKRVVFETGPLSVWFYHALRAEGLPAICIDARHAKAALDMAANKTDANDADGLARLAEAGFFREVRVKGFDSMLTRTLVAARTRLVRITVELSNQIRGIMKTFGLLVPAGKGTTFEKNVRRLLIDHGELALIVLPMLEAWRAIRIRAAELGRQLVADARQSQACRILMSIPGIGAITATSFATAIEDPGNFKTSRSVGAWIGLTTRRYQSGEVDYDGHISRRGDRHLRGLLYEAASVILTRSSTESTLRTWGLQLRERIGFKRAAVAVARKLAVIMHTMLKTGELFNPNAGATT

SEQ ID NO: 258766 - protein, 355 aa, unidentified
MHYIGMDIHKNYSQVAVTDEQGDLVDRCRIDHRHREELVGYFNRFPSKTQVVMEATCGWGWLSELLQDLGLEVKLANPSKVKIIAESQIKTDKVDALVLAQLLRTNFLPEAYLAPKEQREARDLLRYRISLVHLRSGVKNRIHALLTRLGIYHTYSDLFGKEGRSFLSSLELSPAHLRTLEGYLCLIDTVNKLIGEVEVQIRQVVKESEDGRRLLTLPGIGFILAYLVLVEIGDINRFSSHKKICSYAGLVPSVYQSGSKNYRGHISNRANRYLQWGMIEAAQRAKIIDPFLRKKAEIIARKKGPSVATTAIAHHLLTVIYHILKEKTVYRSPKLKYRLSGKPVTTLVAKRQTVL

SEQ ID NO: 258767 - protein, 386 aa, unidentified
MIYIGIDIAKYKHDCFIATETVDYQFSFENSQSGFNGLLGHFKPYLKQEMIIGLEATGHYGENLKSFLTLHGYSFMEINPFLVKKFGEAHSLRKTKTDKKDAQMISTYMRSVDYKAYHHQSYHISALKSLTRLRFKLISMRTKHYNMMTKVLDVIFPELKPFMREQGYSETTLFILKEFSSPDKIAKMTDSHFDKLRRRTKGKFSYPKFVKLKELAKSTIGVTQDHQLFKLKTSISYVEKLNLDILETEKQIVSLMDKYPTKIQTIKGIGIISAAIILCEYGDITLFSNPAEMLSYAGLDSTIKQSGTMSSTGKLVKRGSKYLRATLINISMMVMINNPVFYDYYTKKKQEGKHHRVAMVHLAKKLVRVIHHLETHQEDFDSSKLK

SEQ ID NO: 258768 - protein, 346 aa, unidentified
MKQISTIGLDLAKNVFQIHGADAEGAPVLNRKLRRAEVLRYFEKLPPCLVGLEACGGSHYWAREIAAFGHDVRLMPPIYVKPFVKRGKTDAADAEAISEAVTRKTMRFVPIKSADQQAASMVLKTRALLVRQQTQAINALRGHLSELGVIAAIGTAKVAALIEIVRDEEEFRLPKAAHFALAEIADQIEALTRQIDKLERAIVAEAKRDEDMRRLTTIPGVGAITAANIKALVPDPDGFKSGRHFAAWLGLTPKPHSSGGKERLGSISKMGNPTLRSLLVCGATSVLRHVKGNDKAPQWLIGLLARRPFKVVAVALANKMARIIWALLTKGGTYRNTGAASSAASA

SEQ ID NO: 258769 - protein, 469 aa, unidentified
MSTIYVGVDVSKGYVDVVFLNDAGSVLGEPYLFDDTPKGHKAMMSVLTELVRRDKEISFMIGVESSGGLEKNWLKFFSSISVQLPVSPYYLNPFCVKKFMARELHGGKTDILSANAIALYLKRGLRLSDKPYVEENTSDRLRFNLIRSFSKHCALMTNQLHILLIQVQPYLVQYCRSGFPDWILNLLVKYPTAKKLAAAKPEKIAKIPYITLSKAQDLIAQAKESVGALTDSNTARTIELLASELLRNQKLVEDEKKSLIKSNSNNMDKEILTSIPGFGEWIAIGFLTLIGDISKFQKASSLIAYIGSEPVVEISGDLKINRGISHHGSKELRALLYPATLAAISFNKVIRNFYDRLREKGKSHLVAMMACMNKLIRIAYSCLKTRMKFDASYGEKRRQEIETRAQLERKQNVRKRYKVSISLESPISARKAKERREMRKATENITRSHASKIYGVKHHKTQCLPHPSL

SEQ ID NO: 258770 - protein, 464 aa, unidentified
MVLVGRQPQVVRDEEHEMLIERVCAIDVGKKSGMVCVRVPDESRPGGRVNRVWEVPAITRAILELGDHLRCEQVQRVTVESTSDYWRIWYYLLEARGLDVQLVNSRDIKNVPGRPKTDKLDAVWQAKVTEKGLLRPSFVPPKEIRQLRDYTRLRVDLTRERTRHWARLEKLLEDALIKLSAVVSTLDLVSVRAMLEALIAGERNPRVLAELARGPMRAKRAALIEALTGQFDDHHAELARMLLDQIDGLTTQIEMLDFRIDQLIAAIPAARAPALDNATGQDRTGNDQTGHEETGQGNTGQALSAVERLDEVTGIGRHAAQVIIAEVGLDMSRFPSPGHLAGWVKLCPRTIQSGAKHHTGKPGKGNPYLKGVLGDAAASVARTNTFLGERYRRIVKRRGKTKALVAVARSILVIVWHLLADPTARYHDLGADHHANRTSQNRQVRNHIRQLEALGYTVTLTEAG

SEQ ID NO: 258771 - protein, 345 aa, unidentified
MDNTRVGVDLAKRLIQVCIYTNQKVHSNIEMTSDDFLLWLFQQKPTTIIFEACSGSNYWKQKAIEAGHVALLISAQLVSTVRQNQKTDKNDALAIIQASQLADIGFINGKTHKQQQLQTMMKLRDLAIKHQTALKNQLIGLLAEFNIHSYSRNGGIKSAVASLLEDAENGFTCECRAVIRVAYDHLVAQGEVVAQYDKYSQCSIDQHKDCKRLLNLEGVGPINAINLYIALGCGDIGLFKKGKDASACIGLTPKQYSSGGVIKLGAIGSRVKHGKLRSQLIVGAMAVVSHLDKRVPKTKKECWLKGLIERKGKKCAAVALANKTVRTAFAMITQGTEYKVELLTA

SEQ ID NO: 258772 - protein, 344 aa, unidentified
MNYYAGLDVSLRTVNICVINDQGDFIAETKVDSEVTDVVAYFDGLALDILSVGLEAGTMTQFLTYGLQSAGFEVVCMEARQVKAALSAMRNKTDKNDARGIAQLLRSGWYSPVHIKSMDSHRIRLLLSSRKAVLSKCIDLENEIRGLFKVFGIKLPPKLGHGSFDPAVRDIIETDVTLAESLLPLLDARLVLYHCFRKLDNRTRHMAHADLVCQRLMSAPGVGFVTALTYKAGVDDPTRFKHSRTVAAHFGLTPRRFQSGEIDIEGHISRCGDRDVRSTLYTAANAMMTRSSKWSPLKAWGMKLAKTRGHRRAVIAVARKLAVILHRMWIDDTQFQWGSEGARS

SEQ ID NO: 258773 - protein, 317 aa, unidentified
MAATAHKQTMFVGIDVSKSKLDVHIHPSGENYELANEASGLEELVARLKQLDAAVIAVEATGGFEAVAVAGLAASGLPVVVVNPKQVHNFAKALGLNAKTDRLDAHVIARFAEAVKPEIRPLANAETIALSELLARRRQIVQMITAEKNRAMRMATNKPLQRSIARILDALQAELAKLDDDIDRMIKASPLWREKEQLLSSVPGIGKVIARTLLAEMPELGEMTGKQAAALSGLAPWTRQSGQWRGKSMIGAGRTVPRTVLYIAAMIARRHNPTLRAFALRLLEAGKPKKLVIIAIARKLVTILNAILRDKKPWQPA

SEQ ID NO: 258774 - protein, 333 aa, unidentified
MHYVGIDVSKRSLDVCLLAEGSKGSRKTKTLSNGQDSAQNLAKWLILQKCELSQTHVIMEATGIYHEYLACGLHQMGILTSVINPCRSREFAKAMGIFTKTDAVDAYVLAFYGCLKQPEVWTPPEEEVRKLRALLQHSDSLLNDKLRIDNRLNTLKSTEAVQEVMDSLSLVNQYLKSEVARIERLISSHIAQHPGLKRDLKLLMSVDGIGKQIGWNMLAVLRGNNFKSAEQLAAYLGVVPVERRSGTSVHGRARLSKIGSSNIRAKLYMGALTAISKNSHIKALYERLLAKGKMKMSALGAAMRKLVHLCYGVLHTQQPYDEKYKAKIINFSS

SEQ ID NO: 258775 - protein, 405 aa, unidentified
MSTDVFAGLDWAVHTHAVCVIDGAGTVLDRFEIAHDRAGLAELMRRLARFGARVRIAIERPSGLIVDALVEAGHHVFPIHPNAVKASRPRYRSHGAKSDASDAYLLADLLRTDGHRWRELSPQSDSIRALRALVRSRDDLVATRVALGNQLRSTLETFWPGAACIFADITSPIGLAFLKRNPSPTSAAKLSEAALGRFCRSQHYSGRRSPAELLARLRSAAAGLAGPHTNEAAGQLVRSMVAVLLPLVTQIAELTRRIERFVESLPDGQIIMSFPRAGHVCAAQILAELGDVRERFPSLDQLAAEAGAVPVTYQSGKTRSVAFRWACNHRLRQAITCLADNSRHANARARGIYTSARARGCDHPHAIRILARAWLRVIWRAWTDRKPYDPALHISAQLLASGEGG

SEQ ID NO: 258776 - protein, 454 aa, unidentified
MGKPRVVPDEDHEVMYQRVAAVDVAKASGVVCLRAPDPARPGRFTSRIWDDVPATRARIAELGAELLVSGVQMVTLESTSDYWRIWYYVLEGAGLAVQLVSASQAKNLKGRPKTDKLDAMWLARLTQQGMLRPSFVPPAEIRRVRDFTRARTDLVAERTRCLQRLEKLLEDAMIKVTAVAADGLKAKSVVAMVQALIAGERDPRTLADLAKGRLRARKDALAAALDGMFDSHHGVIAGMLLDQVAFLDQRITVMEDQAIAALAQVEESWGTDATGETGPAAGTAPGSPVLAAAHRLAEIPGISVWLAIVIIAEIGLTMAVFPTPAHLVSWLGLCRSASQSGTRRGKGKPKKGNSYARAAAGQAAIGAARTATFLGERHARIARRRGKAIAQVAVARSIMIIVWHLLNDPAARYRDLGPDFHATRTNRDKKIRTYLRGLKALGLTVAITGDEHAA

SEQ ID NO: 258777 - protein, 360 aa, unidentified
MQQITRVGVDLAKRVIQVHAVNASGLRVSSRALPRDKFIPWCAQLPAGCLLAMEASTSAHHWARRLIALGLDARIIAAHLVAPYRIQGKSGKNDANDAQAICEAASRPQMHFVSVKSVEQQSMLSIHRLREGFKLERVASINRIRGLLAEFGLVFPQRPEVLRQALVETLEDASNELGGLARLALQRAWAHWQELDAHLQWCDERIAAHRKDNEQVRQAQQLMGVGPITASAVVATVGDMRQFKDGAQFGAWLGLTPRQNSSGGKNSLGPITKRGDTYLRTLLIQGAKSIVLSAHKRDDPISRWALQLKEKSGWQKAVVALANKNARILWAVLVRGQAFDAHHVSLKPTGPMAPISAVPA

SEQ ID NO: 258778 - protein, 414 aa, unidentified
MQVLYPCVAGLDVHKDTIVACVRRVNPDGRVEELVRTFGTMTEDLLKLFDWLAEHQVTHVALESTGVLWKPVWNVLEGGNWQLLLVNARELKQVPGRKSDVRDSQWIAQLLACGLLRSSFVPAREQRDLRDLTRHRAQLAGECTRCANRIHKVLQDANIKLSSVATDVLGVSGREMLVALVDGETDPEKLANLARGKLRGKIPDLKRALQGHVTPHHQFMLEQLLDHLAHLEEQLACFHARIEEAMRPFVDEATFRRLDAIPGVNRETIQNVVAEIGVDMQQFPTAGHLASWAGVCPGNEQSATKRKRSRTTKGDVWLRRALCQAAWAASRKKDSYFQAQYRRLAGRRGKKRAAMAVGHSLLEVFYHLLKNPQLEYHELGGNYFDTLDPQRLCRHLVKRLQSLGYQVTLTPAAA

SEQ ID NO: 258779 - protein, 356 aa, unidentified
METAYDGRQVVGMDLHRRRSVLVRMTEDGRRLAVSRITNSPAELRAQIARAGTSPKVVLEATYGWYWAADTLAAAGAEVHLAHPLGVKAFSYRRVKNDERDAADLADLLRMGRLPEAWIAPPEVREVRELTRYRQKLVSLRTSCKDQVHAVLAKLGIPVTCTDIFGVAGSAWLDQLGLPQPYAGKVTSLRQLTADLTTEITMLSEVTADLLRSDHGYQVIQQLPGIGPVLAAVIIAEIGDVHRFKTAAQLCAWAGLTPRHRESDTKVTRGHVTKQGSRHLRWALIEAIQRLPRESVIGSVKAAIIARRGKEARNIAKVAAARRLLTLVYYGLRDGQIRCLSRPADQPATQPPARAA

SEQ ID NO: 258780 - protein, 309 aa, unidentified
MEIVVGIDVSKDRLDVHVLPSGEAFSVGNDHAGMEDLARRLAAFSPTAIGLEATGGYEQLAVATLASAGLSVVVVNPAQVRAFANALGKRAKTDPIDAAVIAAFIAATKPELRPLRDAETRTLADLVTRRRQIVQMIVAEENRARTVNARQAQKSIKRLLAALRRELESLDADLDDHIRKSPLWRVREKLLSSVPGIGPTVARTMIAEMPELGSLDRRQIAALAGLAPWTRQSGTWRGKSFIGGGRSRVRAVLFMAALVAIRHNPVLKAFRDRLVEVGKPKIVAVVAVMRKLLTILNAIIRDQKPWQTA

SEQ ID NO: 258781 - protein, 410 aa, unidentified
MELLHRRCCGLDVHKETVVACLRLVSDGKVTTEVRTFRTTTADLLRLSEWLAANDCTHVAMEATGVYWKPVWHILDDGEFELVLANAAHVKNVPGRKTDVNDAMWLAELLARGLIRASFVPDTQTQEMRNLLRTRKQLVREQSSHVLRVQKTLEDANIKLDSVLSDLMGKSGRAMIEALITGETNPAKLASLADRRVKASPEEFREALRGRVTKHHRFLLRLHLNQIDALDAATVTVDAQVEANLGPFRTAVDLIISIPGIKNLGAHVIVSEIGIDMSRFPSDAHLISWAGICPRNDESAGKRRSNRLRKGAPWLKTTLVQCAWAAVKKKNSYLQAQFYRIKARRGPNKAIMAVAASILTAIYHMLKDGTTYQDLGCNHFDRRSTDQQKNRLVKRLAELGYAVEITPIAA

SEQ ID NO: 258782 - protein, 335 aa, unidentified
METLIAMDVHKRTSTIAALDPSTGEVMIIKALTDRNDLARKLAVLPKPWVIAVESSRHSPAVCKWLQSLGGEVRLVHPQKLAELIKLRAAKTDQIDAETMLYLMQAELLPECYLAPEEVAELRALTRGRNSMREIATKVRNILRALLAQGGFILEYQDLRGKAARERLPELIGQLGDLSGLMAGLFVTLLDDVEQLITVAEAEICEQVKKHPVARELAKLDGIGEVLALSIVAELGDITRFPTYQQLHSYGGLAPRTSESGDSRHDGELPSWCNRHLRRVAVQAAQCMVMCAADSKAQATYKRMVGRKGANTAKIAAARKVLTEVFFLWHEIIAA

SEQ ID NO: 258783 - protein, 466 aa, unidentified
MSVLNAGIDLGVTSQHQAEIRDEEGNKVCPSFSLPGTKEGFDGLCKHALKGAPEGTKLRFICEPTSMSWFPLAVYALSHDYLVVRVKGQKAHDLRQYYSKYKKRDPIDAKVLSLMPVVDKGVLEEIHLPDKLIYALDRRCRQREKLAKDIASVKTRLESLYHWVMPGLTSCFKDPFGSRARAFYARYSNPFKVKRLGLSRLAKFLAEAGRQDMDSNLPEKVYQIANQSCQIYQSASQYIDFDELQEEVECDLELLTSYEKIQDKANTAIKRLYEQAHPCKNIETVLGVSETLGAVFVGIMGTPPRFSSQSKVKSYSGLIPKQDESGETSKKGLNITKDGPPRYRRALYLAADVGRQWDPQLAKIYYDQMVHKGNCHTQAVCAVATHLSGRLLSILKEDRPYELRDLKDKPISHKEAKVLIQRELTVSEEVRQRTRSRKKRRRRKEEEYIRNQERGLRHIVKASRFT

SEQ ID NO: 258784 - protein, 454 aa, unidentified
MGKPRVVPDEDHEVIYERVAAVDVAKASGVVCLRAPDPARPGRFTNRIWDHVPAMRARIMELGRDLLGHGVQMVTLESTSDYWRIWYYVFESLGLAVQLVSASQAKNLKGRPKTDKLDAMWLARLTQWGMLRPSFVPPAAIRRVRDFTRARTDLVAERTRCLQRLEKLLEDAMIKITAVAADGLKAKSVVAMVAALIAGERDPRALADLAKGPLRGKRDALAEALDGMFSSHHGVIAGMLLDQAAFLDQRITDMEDQAIAALAQVEESWGVDADGTTGPQAGTSPGSPVLAAAHRLAEIPGLSLWLAIVIIAEIGLTMAAFPTPAHLVSWMGLCRSAAQSGTRRGKGKPKKGDSYARAAAGQAAIGAARTATFLGERHRRIARRRGGAIAQVAVARSIMIIVWHLLNDPQARYRDLGPDWHASRINRDKKIRNHILGLNALGVTVAITGDEQAA

SEQ ID NO: 258785 - protein, 353 aa, unidentified
MTLHSPDRDRISRHKLEGGDHAGLLALIEKIKARSAEKLGAAARVVSCYEAGYDGFWLHRLLQAAGINNFVFDAASIAVEQRSRRAKTDRIDGELMLRTLMAYLRGEPRVVRIVRVPSVAEEDARRASRERDRLVKEQTAHSNRIKALLRLLGVDVGDPRRKNWLVFLEQQRDWQGQPLPPHLMAEIKREHARLMLVREQIAVLEQAQVAEAAGVPAAMSERRQSLQRLKALGPAFSATLVNELFYKDFRNRREVASYCGLSPSPWKSGGIDLEQGISKAGNHRARLKAIELAWLWLRHQPDSALSLWFRNRTANAGKRAKRIAIVALARKLIVALWRYLSTGLIPDQSTMKA

SEQ ID NO: 258786 - protein, 324 aa, unidentified
MKDSNMTGSQSNGLFWGVDVASENLDLGCYGVANALAFENSTAGIESLLASVRAQPAALIVVEATGGYETPLVVRLAEAGLPVVLMNPRQVRSFATAVGELAKTDAIDAQILARFAHDVRPEVRPVPTENHRFFADLAARRRQLIVLRTAERNRRQQTSRAELVASIDVILKVLDEQIATLERQLAELIASNHHWRQRDQILQSVSGVAAATSHTLIADLPELGQLSHKQISKLVGVAPLNRDSGKFRGRRVIMGGRSTVRAALYMAAFNAVRCNPQIREFYTRLRNAGKCYKVAITACMRKLLTVLNAMVRDNTPWRKPAMIT

SEQ ID NO: 258787 - protein, 360 aa, unidentified
MKKDIKTESGLTVGVDLGDRWSKYCVLDEHGQILEEDTVATTGRAFRKLFSDRTTARVVIEVGTHSPWVQRLLKELGHETITANPRYVRLIYSSRNKNDKLDAERLARLARVDTKLLHPIQHRGGTAQADRALLRSRNALVECRTKLINHARGIVKSIGGRLPSCSTTCFHKRVRQDLPDELKPALTPVLDTLAALTKKIQCLEARIARLAAKRYPETGLLRQVSGVGPLTSFSFVLTLEDPERFKNSRAVGPYLGLRPRQSQSGKSDPELRITKAGDTDLRRLLVGSAHYILGPFGPDTDLRRWGLALAARGKRNAKKRAVVAVARKLAVLLHRLWVTAEVYEPLRNSKSLIVPEAVSA

SEQ ID NO: 258788 - protein, 385 aa, unidentified
MTIQIQVPRFIPRDYDVFAGLDVDKKSMAVTFADHAGSQRALRMAHQVTPLLNYVRKHFAGQRVAFAYEAGPTGFGLHDELVRRAYTCLVVAPSKVPRAPGERVKTNRLDSRKLAESLRGGQLHSIHVPSAVYRNLRHLVQMRDTHVRQLTSSKLRIKSLLLYEGIAFPEEHEKWTARAMRELQTLPCSETVRFKLDDLLDTLHFHFQAAARATKQIRQYCLDDPELQQSIDLLLSLPGIGWIVGSHLVARLGNPREIKNGRQIAGFLGIVSSEHSTGDKQNRGEITRSGDSRLRNKLIQSAWTAIKRDPELRAFYRRIYQRHPKKVAARKAIVAVARKLTNRIYVVLKEQRPYVIRPDSSIAPLTVEETVGPRERLDAAQNDQS

SEQ ID NO: 258789 - protein, 368 aa, unidentified
MKKVSTIVAKPSKKISQRRLNIGLDLGDRNSWYCVLDESGQIQREQRVRTNATALREVFGEMARSRIALEIGTQSPWISRLLSELGHEVMVANARKVRLIGESRKKDDRLDAQTLARLARIDPQLLYPVKHRSAQAQADLMMIRARAGLVRARTGLVNTARGLAKSYGERLRGCNVRNMNPEKAEGLSPELQTGLEPLLACIESVSEQIREYNERMEKLAQDSYPQVGLRKQVKGVGTLIALTFLLTLEDPHRFRKSRDVGSYLGLQPGRRNSGQSEPQMHISKEGDPYLRTLLVQGAQHILGPFGGDCDLRRWGGLKLAERGGRSGKKRAIVATARKLAVLLHHLWVSGEVYEPLHNSQRRPLTIAA

SEQ ID NO: 258790 - protein, 411 aa, unidentified
MHNRQNYLYVGVDLHKEQHTAVIINCWQEKLGEIQFDNKPSAFSKFLLEVETYVSDGLSVVFGLEDVGGYGRALAKYLVDHKQVVKEVNPALSFLERKSHVTTQKSDSWDAECVARILVNKFNQLPDAKPNDLFWSIQQLVSRRNALVKAQSALKNQLHIQLNHHYPSYKKFFSELDGKTALAFWQQYPLSSCLEEANIKQLTAFLLDVSNNTCSVKKASEILKLVKEDGQTMKEYQDTRDFLVRSIVRDIEFKKKEMKYIKRELKRLVNLLDYQLETMPGIELVTASALIAEIGDVRQFPNANKLARFAGIAPVYFGSGGKGKTHKSKQGNRALHALFYNLAVQQVQVAKGSKLARSPVFYAYYQKKLKEGKTKGQALVCIMRRLVNIIYGMMKHKTAYELPVVQEKEVV

SEQ ID NO: 258791 - protein, 337 aa, unidentified
MDYFAGLDVSMAETHICVVARTGAVIHKAKVPSTPADIAAELAQLSACRLILFETGRMAPMLFHGLSQLGLPVVCVESRQAYQALKSLATHKTDRNDARGLAHLARTGFFKPVYVKSLSAHAVRSLIIARKKLVGQRVTLENQIRGLAVVFGVRLPRALSPAFIQQALQASDGIPGLSAAMRGLIGARAAVLAAIMAIDADIRRMVRASDACRRLMSIPGVGQLTALAFTAAVDDPSRFRRSRDIGAYLGLVPRRYQSGEIDYTGSISKCGDRRIRTLLYEAANVMLTRYKGPLKLKDWAFAIAKRSTMRKAKIALARRLAIIMHSMLRHGTEFEPA

SEQ ID NO: 258792 - protein, 357 aa, unidentified
MTQVKKLDFSGITIFCGIDVHKKSWRVNIQDREFELEDFSQDGDVVLLHKHLNRKYPGADFKLCYEAGFSGFSAQRWLSGKGMNCLVVNAADVATSDKEKRQKNDKIDARKLCEHLQNKKVKGIYVPSLKWEHGRSLIRARAKIVRNQTRCKNRIWHLLYFSGLSLPKDYEAGQYWSNHFIKELQAIDCNSEELKITLSLYTKDYQQTKALLLEATRAIRKLCKQSRYEKDITLLRSIPGVGEINAAVMLFELQDVARFKHFDNLCSYVGLVPNTSDSGETKITKGITNRSNYYLRTALVESSWNVIRKDPALLMMYKRYCRKMEKNKAIIRVAKHLLSRINYVLKNKQGYVTSVVT

SEQ ID NO: 258793 - protein, 447 aa, unidentified
MKKVFIGIDVGKFKNSISIIDTEGNPIIKKGLSIENDYYGFARLEEQIDLIINNYGFTYDDCIAGVESTGHYWFNLRDYLKDIGIETVMIKTDSVKHRRALEEGQKGKNDTLDARVIASCLRNGNYVYIRENERELRALQKLTRMRNDISDELVALKNKIHRCIDICNPVFFKIFENLNSKTGVALIKLYPSPEDIINVDLDNIKRELGEIVDKPNMRMVSLYREECEIWGRIIKEPSYAEKVEMVAYIDKFLLQNKSKEHLDKQIKEIAKNIIPLYSEFEQIKGIPLIQLISVLSEIGDIRNFKNTRAILAFLGLSLKGNASGKYIGERRINKAGSRIVRKHLFNIMDTLVKHNEYFRIAYCYYKSYNHKNPTKKRSMQIAVMCKFVRVMYGMLKHNTNFDYKEMLKGYYFGDCNMKVFKEEFEGEKRTKKIENYKLAYSIFVNYS

SEQ ID NO: 258794 - protein, 352 aa, unidentified
MDKGIKLDFSGQHIYVGMDVHKKSWSVSIHTEQFEHKTFTQPPEVDKLTCYLARTFPGATYHTVYEAGFSGFWLHDQFKEKGIDCMVVNPADVPTKNKERAGKTDRVDCRKLARSLRNGDMKGIYVPPRVKVENRTLVRTRQSMVRKQTRCKNQITSILFFYGITIPEESRWSRRFIHWLESIHMERASGDFALKAHLEELMHLRQIIANLNRSILSLSRTEEYRSDVLLLKSVPGISTLTAMILLTELVDISRFSSLDKLASYAGLVPDIKSSGETEYSTGITFRRNAAMRSLLIESSWVAVRKDPALMMAFNKLSMRMKKTQAIVHIARKLLNRIRFVLKNRQEYVSAVI

SEQ ID NO: 258795 - protein, 368 aa, unidentified
MFIERTSVGLDVHARSVKACAIDTVTGEIIHQSIPADTALVRDYATQIAAEHGTIRFTYEAGPTGFELARALIEAGFAVQVAAPSKLLRPPGEKIKTDKNDALLLARLARNDSITPVAIPERSREVVRDLVRARDDARRDLMTARHRLGKYLLRHGHYYTDGDAWTLKHEAWMRQMAHRDVELFGEVSRVVFDDYHDAVEHALARRNRLDAQILALAEDSEWTALTRRIACLRGISTLTAFSLAVEIGDWHRFTGRSIAAYLGLVPSENSSGQSRSQGRITKTGNTHARRLLIEAAWHHKPQYRPGKVMRDRWAVAPAAVVARADAGNRRLHRRWLVLDAHKKKHTVANTAIARELAGWCWSVATMDA

SEQ ID NO: 258796 - protein, 354 aa, unidentified
MMIIGCDYHPGFQQIAVVDTETGELQERRLEHREEAEKFYRDLGAQGVKARVGMEASGHARWFERLLSELQFELWIGDAAAIHAKRVRKQKTDRQDAQLILRLMLKDDFPQIWVPSWENRDLRQLLWHRHRMVQARTRIMNQLQAVALNEGLRCKKRLWRDTGREQLESFKLAPWASRRRRDLLELLDRLTPTIAELSAAIEQEVERCPAAQRLQTHPGVGALTALAFVLIIGRAGRFQCGKQIACYLGLVPLEDSSGQRRRLGHITKQGNSLLRFLLVEAAQVTARSLPEWRSKYYHLTLRRGRKIAKVAMARKLAVCLYWMMRKEWDYEQLKKFSSHAGKPGHRHGVKSNTE

SEQ ID NO: 258797 - protein, 407 aa, unidentified
MTAVMIGVDPHKGSHTAVAIGAAEEPLGQLRVRASAGQARRLVAWAAAWPERTWAVEGAGGLGHLLAQQLVAAGERVLDVQPKLGARVRLLATGQSNKTDPNDALSVAVAALRSRTRRPVSADDHAAVLRVWSRRHRDLGRAKNQVACRLHAVLCELVPGGVPEEITAAQATRILCSAKPAGAAGQARCELAAELLDDMRQMDTRIRESKKKLAVAVRASGTTVTEIFGVGPVIAATVIGDAGDVARFASRDHFAAYNGTAPIEVSSGNRKIHRLSLRGNRRINHALHMAAITQIRHAHSDGRAYYDKKVAEGKTHKEALRCLKRRISDAVYARLQADAQPAARAAMTGPGGQPGNGSDSSAAGSHPARQLFGKATPRPATPTLRPGTPRRPPAPPRPAAKKIRQTP

SEQ ID NO: 258798 - protein, 341 aa, unidentified
MKKSLFIGIDFSKKTFDVSVIHSNNLQSADYLQFENSKEGCISLLKRVKELTDEPLECWQFCGEHTGLYSILLSEYLVKQGHDIWLENPLQIKQSTGIKRDKNDKIDSRDIALYAYRFQDKSIRYQLPGKALKTLELLLSFRERLLSNKQTLLVSASEIRRVLQRDSTARFIYEQSQKDIERINKEIKEVEKRMLEQIETDEQIHENYSLVSSIKGVALINTVAILVATRNFTRFENSRQFACYSGMAPFGRQSGTSVNSKPRVSNLANKKIKVLLTQAARCAVNYDPDVRRYYERKLREGKDNWLILNNIRNKMIHRIFAVVRNKQFYQVNYKNSLDKID

SEQ ID NO: 258799 - protein, 535 aa, unidentified
MMQQVVGREGRLIIGAYCPCRSLVSGVSAFTTGDVLTRESECDPDKELATISHPCAHNLLDPFSVMPEREKKIISHQVKKQSAQAKEFVVTALPRHLRHINVNAAGIDIGSDRHLVAVPEGRDVVSVREFKAFTTDLHVLADWLTQCGVTTVAMESTGVYWIPLYEILEQRGFEVYLVDARRVKNVSGRKSDVLDCQWTQELHTYGLLVQAFRPPEEVCVLRSYLRQKEMLVQTAAEHIQHMQKALQQMNLLLHNVVSDITGVTGMNILKAIIAGQRDAQVLAALRDRRCQNSAETIAKSLVGNYREEHLFALRQAVELYETYQVKIADCEAAIAAYLVRQDHHTDDEPPPPQKPVPARNRLRAGLDVRDQLYKMSGVDLFRVSGLAADTLLTLAGEVGFDMSPWQSVKHFTSWLSLCPGTKQSGKRVLSRKTRPTANRAAQAFRIAAVTQARAKTALGAFYRRIRGRSGGREAVTATAHKIARIFYSLLKHGSAYVEQGEAAYEQQFKERRLKALKKQAIALGYQLSPLAVTSF

SEQ ID NO: 258800 - protein, 293 aa, unidentified
MEARAQNATPVLATIGVDIGKDVFHIVGFDSDGKIALRRKIKRLALADTFKKLPSCVVGMEACLSAHFVSRMLRALGHEPRIIPAIYVKPFVKGQKNDYNDAEAIAEAALRPNLRVVSEKTQDQLDLQACHRVRSRLVSRRTATINQIRAFLIEQGITVRSGAKALRNSLFEILRNRDDEISPRMDQLIVGLYEDWLWLDERIETITKEIEEISQTEANCQRLMSIPGVGPLISTAMVAAIGTGEAFDRGRDFGAWLGLVPRQYSTGNQSWAASPREGADIFERSSFRRRTLS

SEQ ID NO: 258801 - protein, 336 aa, unidentified
MEHLAIDLGGRESQICVRSSDGQIIDERRCRTAALPAYLATRPRSRVVVETCSEAFGIADAAMAAGHEVRVVPSTLARSLGVGARRLKSDRRDARALSEVSCRIDLPSVHIPSREARDHKTMCGMREALVGTRTKLVNTVRGWLRAEGRRPRSGELTTFAARVRELYAEMMLPAHVARQLRVLESLNEEIAGADRELATTAKADPIAARLMTVPGVGPSTSVRFVAALDDISRFGGAHAVESYLGLVPGEDSSAERKRRTAITKAGPSALRWCLVQAAWAARRTRRKDPMHRWVDEVEKRRGKRVAVLALARKLAGILFAIWRDGTVYDPHRSGAV

SEQ ID NO: 258802 - protein, 345 aa, unidentified
MTSMNYIGLDVHKKTISYCVKDVSGRVQQEGKIGSTRRELDSWMKTLPQPWMVAMEATIFSGWIYDHLLAHATQIKVAHPLMLRAIAAAKKKNDQIDASKIADCLRCNFLPECHMMPAAIRDRRRTLRYRHLLVRQMVQMKNRVSGLLMETGVEYNKQRLHKVSYFRELLSSNTEVHPSIRPLLKLSRETIERCQKTEYALVSSLQRDPVLADRIKRLRTVPGVGPITALTWALEIGDVSRFRTIKQAISYCGLCGEERSSADKAMRMPLSKQRNKHIQRTLVEAAKLAPRQSHELALIYDKEKQKGNGNRATLAVARKMVAYLLAVDRQQRDFVSAEERRTAAA

SEQ ID NO: 258803 - protein, 409 aa, unidentified
MTTYRFYVGIDWATEAHRVVVLDAERRGLHDRTVRHEGVALETFAHWLAQDVAAGVASDVAVALEVPRGAVVDTLLARGFHVFALNPKQLDRFRDRYTVAGAKDDRRDAQVLASALATDQPAFRRLEPEDPLIVELRELSRLEDDLRQELGRLTNRLREQLHRYFPQLLQLVPAANEPWLGALLERAPTPSAAQHLPRATLRTLLTRHRIRRVDAETVRTLLRTPALAVAPGTVQAALRHLAVLLPRLRLVHQQQAECATLIDGLLERLAESQEHRDVPILRSVVGVGRVVAATMLAEASRLLAARDYHGLRAQAGVAPVTRQSGRRTLVAMRHACNPRLRHAAYHWGQSAARHDPVSRAHYAQLRARGHSHARALRGIVDRLLRVLIAMLTAGTLYDPTRRRVVADAA

SEQ ID NO: 258804 - protein, 324 aa, unidentified
MICGVDISSASLEARIGRDGASGSFANNSEGIAALAAFCHTHQVELVAMEATGGYEQQAFAGLSQQGLPVAILNPRSVRKFAESMGRLEKTDAIDAGMIAWYAEVKQSRPLCLAPASQQHLRALVTRLRQLTDMRTAQLNQQRLVTDQAVQASFDQLLAVIAGQIRTLEQSIAVLIDADPLWRELNQAFRTIKGVADRTVARLMAEMPEIGVLSNKTVSKLAGVAPLARDSGKYQGKRAVRGGRAPVREILFIVASVVGRYEPDFIAFQQRLRAAGKPPKVVRIALAHKLLIRLNAKAREVRQQLGILTQASSHNRSGAVVMGI

SEQ ID NO: 258805 - protein, 408 aa, unidentified
MNTLYVGIDVSSKSNVVYLMLPNGDKHSNFSVANSHEGSTLLVKKIYSALTSHSLDTVLIGLEATSVYGVNLVYFLREDATLAPFNRKIHVLNPKQVKKFHDTYNDLPKNDYVDSFVIADCLRFGRINKEVYMGDYRYKALQNLTRARFFAVQNLVKEKQRFMNVLFKKYSTMTQEKVFSDAFSTTALAVYDEFESAEALANMDLHELTDFIIEKGKNRFPDPDAVAKAIQKAARSSYRLPKTVNDSVNQVLSISITSMKALESQIKEFDKAIIALMELLPNVLISIPGIGPVYSAGIMAEIGDINRFDNQASLAKYAGLAWKQHQSGGFEAEVTRLIPSGNRFLKYYLCEAAFSLVRCDKEYSDFYHLKYKEVNRCQHKRALALTARKFVRLVFRLLKDNRLYCPAK

SEQ ID NO: 258806 - protein, 357 aa, unidentified
MRIIGVDLHARQQTIAMLDTETGEVVEKTLEHEGEKVREFYAALPGPARVGIEATGSMHWFLKLMEELGIDCQVGHPAKIRAAEPRKQKHDRRDAALLLKLQLENRFPSIWMPSTELRDLRALLLHRHQWVRMRTRLQNALQAIALSNGLRRGKSLWSQEGQRTIESLPLAPYAAQRRTELQALYRKLDEQIDKLDERVRDQAWQRPGAKLLMTHPGVGPVTALATDVFLGDAARFADGKALASYVGMIPSEYSSGGRQQLGGLSKQGNPLLRFLWCEAAMHTVRQDPDLKRFYRRKLQQKGLGKARVAAARKLGVRLYIMLRDRIDYQEFCRRGQLQQRGGARAGMPGQSYGPAMQ

SEQ ID NO: 258807 - protein, 398 aa, unidentified
MGCFVGVDIGKSRHAYAVVDANGAELASGEFTGTAAGFEKLKVVLLRFDVGLIGMEATGHYWRNLWHALGHAGYERRLLNPTATVYYRRMSLTRHKTDALDALCIARYLAAVRSDSRGLGVEEQETLRSLARAQATIAEQITEAVNRLHKQLDLSFPEFPKLAGRLDSPKALMLLEHYPTARMMGRARTLADKCYGQQNHRIGKPLAGRLQDAARNSFGCAQAASDALLIRQSVSHIRLLHEQSKELIREMETLVAEQDQDAANLLSVPGIAIKSAAAVIGEVGDIRRFETAKKLTGYIGAHPRFHDSGNKSGHPRMSKAGNKRLRRILWQCTIVAMKHNPIIKAHYEKKLAEGKKKMVAIGHCMNKLIHIIWGVLTYREPFDPNGGIRVQKVAQNEA

SEQ ID NO: 258808 - protein, 350 aa, unidentified
MIIIGCDYHPGFQQIAYVNTDTGELSEARLGHKEQAEQFYYDLKTQGVPVRVGMEASGHARWFERLLAELQFELWIGDAAAIRTKRVRKQKTDRQDAQLLLGLLLEDRFPRIWVPDAENRDVRQLLWHRHRLVQMRTRVMNQLHVVALNEGLRRKKALWRPAGRRELEALSLAPWASRRRQDLLDLLDRLTPKIHELNEKLEQMVARRPVTRQLSTHPGVGPLTALAFELVIGTPERFACAKQIASYVGLVPAEESSGDRRRLGHISKQGNALLRFLLVEAAQVTVRSDAQWRSQFFHLAMRRGRKIAKVATARKLAVELYWMWRNGWDYHEMQQLGSHAGAPGNRHGVQ

SEQ ID NO: 258809 - protein, 350 aa, unidentified
MVILGIDAHKQTHTVVVVDEHGRKLGERTVKTTTTDHLDLLVWAARFGAERRWAVEDCRHLSRRLERDLLGAGQQVVRVPPKLMANARTAGRTYGKSDPIDALAVARAALREPELPVARLDGPAREIRLLVDHRDDLVAERTRVINRLRWHLHELDPSWHPPARSLSRAPATHLAATEAFISRFDGMVARLAGQLVARVQELNAQIDQLEADLVPRVRRYAPSLLALGGCGVLTAAKLVGETADIRRFHSKDAYARHNGTAPLPVWSGNKQRYRLSRTGNRQLNLALHRIALTQARHHPDAQRYLARRRANGNTPTEAIRALKRRLSDVVYRALLADAGVADEAGQAAAA

SEQ ID NO: 258810 - protein, 338 aa, unidentified
MAIIAIGIDLAKNVFAVHGVDASGKAVLVRPAVRRDALLELIAKLPPCLIGMEACSGAHHWARQFQQFGHQVRIIAAKFVAPYRLSGKRGKNDAADAQAICEAVQRPQMRFVPIKSEDAQGRLSIHRVRQGFIEQRTATINRIRGLLSEYGHVLPQRAEVVRREAGQCLEDLPGWANTAIGDLLSELHRLDERIAEYDRHIEVMAKADDRCRKLMAIPGVGDKTATALMASIGSAHDFKCGKQLAAWLGLVPSQYSSGGKQRLGRITKAGDGYLRMLLILGARAVVAAAKKKEDRLSKWVTELADRRGYWKAVVAVAAKNARMAWAMLSKGEAFKPVT

SEQ ID NO: 258811 - protein, 444 aa, unidentified
MPNATPLTRGDRRRNEKLARLRAIVRPDLAIVGIDLASAKQAAVVADHDSITLGRRMFVGDPWVIDDILDWALPIALAAGFAGVVVGCEPTGHRWKPVLERCRARGVEVVCVNPMLVHRGREEEDFTRDRSDFKDSTIIARRVADRHCYVPYALEGQWCRLRHLGARRNDQLVESGSARQCLRDLLECVWPAVLATAAKPLESITWRAAMAVSCDPAEIVAMGYEAFAAAVTAELGRWGGQRRNGRILRAIWAAAQVPGGVERERAAAVERAGFAVADWRRALGCLDDVEARMLAVLDGLGLTELVTTIDGLSAVGAAAILAEAGDPARFDCARTWVKHAGLCPRANESGTFAGTTKVSGRGRPALRTAAWRAVWAALRHNAVYAARYRHLTGRATNPLKDGQARAAVAGALLRQLFVVVTRRVAWDPVVAAGERHEEVVDQVA

SEQ ID NO: 258812 - protein, 441 aa, unidentified
MLRQLFSFCCDNSLSFCSAPDTKFAATIGLDWADQKHDLWIQAVSGGKPEHQEIQQTPEALHEWVAKLRARFPEKPIALAVETSRGPVISALGAYDFIVLFPVNPALLCRYREAFCVSGAKDDRTDAMLLEEYLRLHGDKLRPLEPDTELTRKLGGLVEKRRGLVDERTRLVNQLHSLLKTYFPLVESLFDDLSAPLVAHFLLNWPDLASIQKAGTAALRKFFYGHNCRSDKIMEERLQAIAKAQPLTQDPALIEPAVLQAQALAGMLQVLHQSIEQMEKRIEQTTDAHPDAAIFRSFPAAGPALAPRLLVAFGTNRDRFASAQEVQQFYGIAPVTKQSGQSKVISMRHRCPKFGRQTFHENASHAVRQEGWAKKCYDQQRARKKRHHASVRSVAFKLIRIYFRCWKDRKCYDANLYEAALENHGSPLAGLIKKAAFAKGE

SEQ ID NO: 258813 - protein, 368 aa, unidentified
MLARGTEDKEYAMSPKLNSAIAAIGIDIGKNSFHLVGQDRRGALVLRQKWSRGQVEARLANLPPCLIGMEACVGAHHLSRKLQALGHDARLMPAKYVRPYSKGEKNDYRDAEAIAEAVQRPTMKFVATKTADQLDLQALHRVRERLVGQRTGVINQIRAFLLERGIAVRQGLHFLRAELPSILAKRTDVLSPRMLRVIEDLAGDWRRLDERIENLSDEIAALARQDKGCERLMTVPGIGPIISSAIVAAIGGGDAFSKGRDFGAWLGLVPKQMSTGDRTILGSISRRGNRYLRWLFVQAAWVVLVKITPEGWERYGLRSWIEAAKQRLHRNVLAIALANKLARIAWAVLHKGRAFECVKTNATASQAA

SEQ ID NO: 258814 - protein, 361 aa, unidentified
MSSTAHIVGQRGKEVNVEVLIGIDPHKATNAVAAIDERGELLEYAVFATNSAGLRSLKRWGKRFSDRRWAVEGAGGLGCSVAQHLAASREKVVDVPAKLSSRIRLLSTGNARKNDRVDAAYVAMAALGNERLAGVSEEEHAAVLRMLSDRREDLVKERTRTLNRLHGLLRGLLPGGAAKNLSADKAARVLRGVRPRSGPAHARRRLAADLIRDVRRLERQVRDLESRIREAVEEAPTGLTQLFGIGPILAAKIVGRVGAVARFPGKAHFASYTGTAPIEASSGDVVRHRLSRAGNRQLNHALHMIAICQVRHVTEGRAYYRRKLAEGKSEREALRCLKRRISDLVFRQLRTDSEKLPSAST

SEQ ID NO: 258815 - protein, 311 aa, unidentified
MNTQDCFIGLDISKDTLEVAVRPTEARKTFANQEDGLSLMIDFIKPFSPRLIVLEATGGLEKAAVCALAVAGLPVVVVNPRQVRDFAKAKGILAKTDKMDAGVIALFGEAIRPEIRPLKTEEAQKLDALLSRRRQISQMITAEKNRLQAAPVWTRKDIQTHIAWLQKALDQFNQDLDRMVKESSIWRAKDEILQSVKGVGPVLSVTLISQLPELGTLQGKKIAALVGVAPLNRDSGKFRGRRTIWGGRAEVRSVLLMATRIAIRFNPVIRAFFERLKKAGKIRKVAETACMRKLLTILNAMMKNNTRWQAA

SEQ ID NO: 258816 - protein, 387 aa, unidentified
MSQLNDLSRALTPFVQGNTLVAVIELSLTSWLVAGVVPGVERQPLKKLEPDQAGLLRLLHRWRDEAVRSGCTIERVVVAYEAGRDGFWLARWLRTHGIEAHVIHSSSVAVSREHRRAKTDRLDTAMLLRVFMGWLRGERGHCGMVAVPTMDEEDAKRPHRERESLVGERTRIINRMKAALVRLGIRGFKPELRRAPKKLDALRTPENLPIPPNTLEEIRRDLARLAMVREQIDMIEQARLARIEQAPKTGPNAMVRLLASIVGVGVETADMLVQEVLSRNLRDRRAVARYAGLTGSPDESGSKRREKGLAKSGNARVRRGLVQLAWRFLLFQKDSALSQWYRARTGVQGVRKTVLIVALARKLLIALWRMMTTGEVPHGVLLRQAVA

SEQ ID NO: 258817 - protein, 337 aa, unidentified
MKHTVIGMDIAKRVFQLHAVNPETGEIERIKLARSDVLAFFAQRCPTLVAIEACGSAHWWGRQLTALGHQVRLIAPKSVRPFVVRNKTDAADARAIWTAVQQPGARFVAIKTEQQQAILSLHRMRAQLMKLRIMQTNALRGLLYEFGVVLPEGVRALTKAWPAAMVTVADQLPGMLIDSLREQWARVQTTEAEITAIERRLASALRENQCCQQIAAIPGVGLLTATAAVAVMGNANTFKSGREFAAWLGLVPRQTGTGGRIRQLGLSKRGDTYMRTLLIHGARAVIAKAHHSPWIEALLKRRPYSVAVAALANKLARTIWAVLAKGRPYDPAAFSGT

SEQ ID NO: 258818 - protein, 369 aa, unidentified
MKDNITYVGLDVHKNSIDVALADSEKTGEVRHYGTIDGDLGSLEKLIRKLVSQGRELRFVYEAGPCGYEIYRHLSHQGLDCIVVAPSLIPKKTGSHIKNDRRDSEMLARLHRAGELTAVYVPHLEDEAMRDLCRAREDAKSAERKAKQQLGAFLLRSGFRYSGKTNWNLAHWRWLSDIKMPHPVQQIVLQEYINAVRACTERMDRLAEQIRVLVPEWRLASVVEAIQALRGVSLIVATTVVAEIGDIGRFDNPRQLMAYLGLVPSEHSSGETIKRGSITKTGNGHARRVLVEAAWAYRLPARVSRRLLERHQNLPEVIRSIAWKAQLRLCGRYRRLVAKGKQAQIVIIAIARELAAFIWAIARNVPATT

SEQ ID NO: 258819 - protein, 375 aa, unidentified
METIYIGVDFHARQQTICYLTTETGEFVTHELKHEDKDEVRTFYGQFVGRVIVGLEASGYSPWFEQLLEELGHEVWLGDATEIRRRARWRQKNDRRDAELILDLLVHDEFPRLHRPSLESREILRMLRYRHKLVKMRTIIKNSLQALALQSGLSRRPKLFTKAGQQELRAAPMSPVMKQQQEQWLELLVVLNQRIVETTLWLKQQSLNDARIRLLRTHPGIGLLTSLGLVHTLDPISRFRNQRKVTAYAGLEPMERSSAERKRFLGISKAGSRLLRFLVIEAAHTAVKKDDDLKRFYRRLEERRGRPKAKVAVARKLLVRSFIMLRDEIDYAEFQRRAVAARLARQSSRPSVPDRLIGQPASSESQECVRSESKK

SEQ ID NO: 258820 - protein, 387 aa, unidentified
MNNKRGRVVGLDVHPDSFAGAVVEWSDPASAQVLSTSTRVELKQLERWALRHTKSEDTLVLEASGNAFAVAARLREIGRAVEILDSHRAGKVGKVYCANDRVDAVKIARIYLSALSPIVWQPDQKTLERREVFSAYQAVVKESTRAKQQLRAMLNEHCVRLEKGFRLCHPRAITRLLQLRSWTPARRMLLQQLHGSLLSARARRTMLRRHMAQEIVADDALLRLSRLCGINLVTLYGMVAAIGDVRRFTHSKKLVAYLGLNPSVSQSGNFEGSGALKRHGRGALRALLIQSGKKLLEVTNPLQKWGLAVAARRGRNKAAVAVARKLCVAVWHILMGHVIGALERLDTLETKLGKFATEIGPVALSAFGYNNKADFVQKKLYVLRSYP

SEQ ID NO: 258821 - protein, 331 aa, unidentified
MNYSHFVGLDVGKKTFDASLMSAAEKELSHKSFDNTPEGIQSLLDWIAGYHLSLSKLLFCAENMGSYVTELSVSSVSMGFSLALVCPLTIKKSIGLQRGKNDRIDAKRIANYAVLHYRKLELYKLPNKDLVRLRGWIIIRDNLVKQKVSSIKLLETFSQMAKLADVTESISFLEEQLKSIKEKILEVEEDMEQLIAASTSLYTNYLLLRSIKGIGIINAIVLLCVTDNFQRFDNPRKFACYCGVAPFEHTSGISIRGKTQTSSLANKEVKVYLTRAAITAISWDPQMKAYYKRKIAEGKHKASVINAVRAKIIARSFAVIRRQTPFVTLAV

SEQ ID NO: 258822 - protein, 355 aa, unidentified
MTSTKYIGLDVHKESISIAVMNSVGKVVMECVIETKASTILQFIDGLRGDVRVTLEEGTWAAWLYDLLKPHVTEVVVCNPRKAALLKDGSKGDRIDAHKLAELLYMNKIKSVYHGEHGLRTMKELARSYLTISKDLTRVMNRLKSMYRSWGIPCAGKEVYAPRFRAEWLGKIREAGVRRRAEHCYQQLDVLRLLRQQVRRDLLVEAKQHKAWKLLRQIPGIGPIRAAVLIAVMQTPHRFRTKRQLWTYSGLALETHDSAQYHAVQGELRRSKRPATVRGLNKDHNHDLKDIFKGAAMRTSTAAGPLHDFYENLLAKGRKPTMARLTLARKIAAITLIVWKKEVGFDANHLKPQAA

SEQ ID NO: 258823 - protein, 347 aa, unidentified
MDTIGLDLHKRESQLCIGHDDGTVDERRIVTSRARFAALLGDRAPARILLEASTESEWVARCLEQLGHQVIVADPNFAPMYATRARRTKTDRRDARTLMEACRLGAYRPAYRLSDARRHVRAELAVREALVRTRTRYIALAKALVRRDGLRVAASEAHLTARRIGALELSDALRAELAPLFTVLEPLNAQIAAADRRIAAASEGDPIAAGLMTAPSIGPITASAIVATVDDITRFASAPQFAAFLGLVPGERSSGEKRRIGRITKAGNSRVRYLLVEAGWRILRAKDAETAALRAWALQIAGRRGKRIAVVALARRLAGIVYAMWRDGQPYQAAKLRAPRPSMRQSA

SEQ ID NO: 258824 - protein, 342 aa, unidentified
MELNKINLYMQFTYLLGIDISKSKIDLALSENKAGASLTLKEFSNHLKGYKKMLEWLCEKKVDLDKLLVCMENTGIYHHLLVNYLQSQKVFCWVENPVAIKWSMGLQRGKTDKIDAQRIGLYAFRNQDKAKAYSLKDKNLQKVSELLSARERLIKARKMLLTPIGELKQAGLVEEEKMVKKACKQSLYALEKEIKSIDKDLEGLVEADTTLKASYSYIRSVDHVGAITALQLLTYTHDFERFDNAKKLGSYAGVVPFEYSSGSSIRGRTRVHPMANKRLKTSLHMCALSAIRRAGTMRSYFERKVKEGKNKMSVLNAVRNKILQRIYACVKGERMYVPLQTS

SEQ ID NO: 258825 - protein, 355 aa, unidentified
MMQSQIIATPKLFIGMDIHKKSWSVHLRTDLFDHKGFSMPPDSLKLVDYVTSHFADHEVSLTYEAGCCGFSAARYFLNMGWIVKVVNPNDVPRSDKQLYQKTDKLDCRNLCKQLQQQQLHGIYIPTEPEEQLKSLLRQRNQVVKQLRKTKSHIKALLLFHGITIPEQFENPNWSKDFQSWLKNIPWQHSTGTACMNSKLRILELLNNEYSQTSNELRAYCRKYHKKDYYLLKSVPGIGGLLAAAILAELGDIRRFNNEKEFSNCIGLVPGIDQSSERDNKIGLTPRCKPLLRSYLIESSWVAIRRDPEIQAYYRKHTGKNPKNVVVKVAHKMCRRILSVIKNETPYQLNYKNTKK

SEQ ID NO: 258826 - protein, 339 aa, unidentified
MSHNVIGLDIAKSVFHLYTIQADGKILKKMLRRQQVLEFFANYPVSLIGIEACGSSHYWARELIALGHEVKLLNARHVKAFVKGNKNDFNDAEAIFDAVSRANVRTIAIKTVEQQDIQLIHRIRQEAVKRRTALVNQIRGLLGERGIVIGQGIHQVRKHLPELLEDAQNALTTLSRAAFAEQYERLLELDKEIKRYDQKMGELCKANELSKRLAEVPGVGPMTATIAAADLGEGQHYTNARHYSASLGIVPRQSSSGGKSVLLGISKRGNCYLRSLLIHGARAVLRTCHNKEDKLSLWLQKLIKRRGFNVAAVALANKNARILWALANKNEHYEMPVSA

SEQ ID NO: 258827 - protein, 429 aa, unidentified
MNYTQNEKIEQVTDSTIVVGVDIGSQIHYARAFDNRGRELTKRIFSFHNDLEGFNSFNLWAETLKTENKKTAVLIGCEPTGHYWFAFAKYVNDHQKRLVMVNPFSVKKIKELDDNSPKKTDSKDPKTIAKLVVDGRYSIPYMPEGIYAEIRDLVYSRDRIMKQHNISANRIQRWLAIHFPEYLGLYTRFDAISGLAVLEKAPLPKDVIALGVNGIRKIWHDKKMRGRGVTEDRAKTLVEAAHNSVGLDGGIGTKSELYMLLEEHRLWTSQLEAVNKVLEEMILKVPHVEKLLAIKGVGSITIAGFIAEIGDIRRFDSPKQIQKYAGLELVENSSGKHKGRTRISKRGRRKLRKILYQVMVPLLARNKEFRGIYDYYVTRVKNPLKRRQAMVAVSCKLIRVFYAVLTKGVEYDRFKMMSDIHRKSDIIAA

SEQ ID NO: 258828 - protein, 368 aa, unidentified
MSKSITFVGLDVHKNSIAVALADSGRNAEVRNYGIIGGGLDDLDRLVKKLVATGKELHFVYEAGPCGYDVFRSLTAKGLDCAVCSPAHVPKSPADRIKTDPRDAMMLARLHRAGELTYVFVPRADDEAMRDLTRCREDAKKAQRVARQQLGGMLLRLGFKYSKDNWTKAHFNWLANQKMPTDSQQVVFQEYIHAIKETTDRVERLTKQIETLVPAWRMAPVVMALQSLRGVSIIVATTMIAELGDLTRFESPKKLMAFLGLVPSEHSSGEKKQRGKITKTGNGHARRVLVEGAQTYSHPARITRPLLKRQEGQSQEVRDIAWKCQVRLCARFRRLVVKGKSRNAVVTAIARELAAFMWAIANKTPIAA

SEQ ID NO: 258829 - protein, 331 aa, unidentified
MEEVKRFVGIDVAKAALDVFIGSAGGAFSVANDEVGIRELLRQLEPADFVILEATGGLETPVASALAAAGIAVAIVNPRQVRDFARATGKLAKTDRLDAAALARFGEAVRPEARPLADEQAQALGALVTRRRQLVEMLTAEKNRRARAPKVLHRSIDEHIRWLEKRLTGFDDELGELIRNTPLWRERDEVLRSVPGVGKVLSSTLLAQLPELGMLNRKQIAALAGLAPFNRDSGSMRGSRCIWGGRAQVRRVLYMATVAGVRSNPVIKNFYSQLRARGKYPKSALTACMRKLLVILNAMLHNQTPWQTPPLTPSISPLSPRLSADTQHGCC

SEQ ID NO: 258830 - protein, 480 aa, unidentified
MEPLYRRCCGIDVHKKSISVCVLPPAGNSSIGIKEEKFRTFTRDLKRLRKWLLSCKVTDIVMESTGQYWRPVWNILEEAFPNLILVNPLHVKALAGRKTDRLDARWLATRLERDDLKGSFIPVRAMRELRDLTRLRVHWLQDLNRVKNRISQLCEAGNIKVSSVASNLFGVSGRRMLSAVAKGDRDAGWMADYARGTLRHKKGQLELALQGTFSQHQRQLLGRMLEQLEALEQQLAKLEVEIVERMQCHSELIQRLSTIPGVDDITAWTIIAEVGTDMSIFGDARHLASWAGLCPGNKESGGKRISGKTRKGNRYVRRALCQSAWAATRKKDSHLAALFRRVRSRRGEQKAIMAVAHQLLTIMFHIIGDQSVYQELGAAHYDVRNKDKVTRKLIQRLTRMGYCVTVTPIAPSGAIPPPDQAAYAPAMAASTIPAAATVQLPRRRGRPCKCAERQIVCTHSPKMTPNKSKEIPDKGQVRPT

SEQ ID NO: 258831 - protein, 427 aa, unidentified
MRSIALDAHRDFCEVAIGERGKVRLAGRIATTPEALRLFGESLVLSDEVVLEATGNALGIARILEPFVAWVVLADAKAVRAAAKGRAKTDRVDARLLARLLAAGFLAEVWTPDEQTRARRRLVSRRAQLVRQRTREKNQVHAVLMRTLSGKPPMSDVFGVRGRAWLARLELPVDERLTVDGCLRHIDMLNDEIALVEQAIAADVLASPQMRRLLTVPGVNAVTACALVGAIGDISRFPTPRHLVGYLGLDPRVSQSGNEPARHGRISKQGPGEARHVLVEAAWYLSRTIGPMRAFHQRIRARRGANVATVAVARKLAVVCWHMLTKGEDYAFARPSLTREKLRRLELMTGAERNRGHHHTERVFAPRRQHELERELAAQAEATYKRLTADWTARPPRAGAGAAPGRASRRPSSGQAARQETAPPPAL

SEQ ID NO: 258832 - protein, 354 aa, unidentified
MRRNSWVYPRSTVGLDLGDRKSVICELDAAATVVKRATVATTRAAMCAYFGRRSGSRVVLEAGTHAPWVSRMLEELGHEAVVANPSAVYGPRRRKKRNDRMDAEFLARQGRADVQLLHPIEHRRLQAQEHLAVIRARDQLVRSRTKLINHVRGSVKAQGDRIGRCSTESFPRQAHRQVPGEMRIAVFPLLDVIAELTTRIHDFDRQIEEIVVQSYPEALRLQQLRGVGALTALAFVLLVDDPYRFTRSRDVGAYFGLVPRLDESGDGTPQLRITKAGDELGRRLLVSAARYILGPHGPDCDLRRHGQKMAERGGKIARKRAAIAVARKLAVLLHRLWVSAGEYDPDRQLKRRVA

SEQ ID NO: 258833 - protein, 274 aa, unidentified
MLIIGCDYHTRFQQIAMVDTTTGEMIESRLEHENGEAREFYASLHATARVGMEATFNAQWFERLLAEYHHELWVGNAAKIRAAEVRKQKTDARDALHILDLMIQEKFPRITIPSPQERDLRQILRHRHKLVRFRTSVENQLQALALGQGLCRKAKLWTARGRRELEGLQLDPWASRRREELLRLLDQLNPSIQELDQAVEKEAASRPEAVLLMEQPGVGPVTALAFVLTLGPVERFANSRKLVSYLGLNPSEASSGGHQRLDVSGNLKFPNIGG

SEQ ID NO: 258834 - protein, 429 aa, unidentified
MNDATDRLYLFRVMRSSVRGSEKHLLVGIDVAKSNHHAFFGTSNGRTLRKNLVFDNSTKGFESLRSLARDLQCQHGLVEIVYGLEPTASYHKPLAEYLIRQGEQVVYVSNVAVKNNRALLDGRWDKNDKKDAANVADLVGQGRCLYYEVPEENLRELRSLIAFRTKLKKQEHALQMRLRNNLFAQYFPELEKIYIRTGQLDDIVLSIADHCLDPREIARMKFDAFLQLITSRKIRIELEKRLHELWEGAKNSAGCPVHNAARWEAKSLVSQLKALREIVKNNEEKLKTVAQQYPECLSLLSIPGFGPIISAMVLGAIGDPSRFENQRQVLHLAGLDLCAARSGKKSDGVKPVISKQGKAALRYALVQAATVASLWDPTIRRYFSGLIKGREFERGIKLKMKVKLAAKLLIIAWTLMKRREQFNPSCFTG

SEQ ID NO: 258835 - protein, 474 aa, unidentified
MNKYYLGIDVSKGYADFIILDEKKRPIEDSFQLDDTFDGHCRFYEILYRFCEDHPESIIYAAVESTGGYEDNWLNCLIQFQGTLNLSSARLNPLGVNANSRADLKRNVTDKISAKNVAEYMIAHPEKISYQHQDCLASLRKQWGFIKILTKQSTQLFNQLEPLLYTANPELLTYCKHGVPGWVLKLLTRYPTASDLSKAKVVSVARIPYISSARAQELVITAKRSIASATDKITAQLIVETVKQILHLKKITTSQIEMMAQHCSVPEVDLLKSFIGMKDYSAIGLLLQIQTVERFPSVKKLASFFGLHPVYKISGDGVGGFRMSKRGRREPRHILFMVTLTAIRSNPLIRSIYLEHIQKGMEKMAAIGLCMHKTLRIIYGMLKHNMAFDPEIDWKNREKSYQSRTRVNNDKTRRYQDFDAKAPISRRQNSKRKEQKQSHSDNNTNNGIILPPLHYHLNRYRNSCTGFTEFSKNS

SEQ ID NO: 258836 - protein, 435 aa, unidentified
MSSLHKLNPHCAGIDIGSEFIFIGIEEAEVASFGTFTDDYLTAIAYLKEHAITAVAMEATGVYWITLFDMLEAAGMTVTLVNGKQVKYVPGRKSDVADCQWLQQLHSFGLLRPCFIPDEVTRQLRTYTRLRTDHLSMASSHIQHMHKALTLMNIKVQNVISQIHGASGMRMMHAIVQGERNPERLADLCERSILNTKRNRVIASLKGNFKAEHLFALKQALCAYEFYQKQITECDKQIEALLNDHTNDLPTPPQITPPKDIRHNPPQIDGLHTKLMKMTGGNDPSRITGLTDKTLLELLGETGTNLQEHWATEKHFASWVALAPAIHQSGKSNRRKRIKKHSRAGQIFREAALSIAASKHAALSAFYKRMKARKGFLHALKATARKIAVLYYRIMTKGLAFVEYGIERYQLKFKEQQLRLLQKRAKTLGMMLVST

SEQ ID NO: 258837 - protein, 336 aa, unidentified
MTVVGIDSHKKTHTLVAVDQVGKRLAQLTVEATAKGHRQVCTWLGQFDQVLLAIEDCRHLTRRFEADLLLAGYAARERGKSDPIDAEAVARVALREPDLPRAELDGPTREVKLRSDHRRTLVRQRTAIANKLRWFLHEIDPGLAVPSRGLKRLCVLDSLEADLAAHHGVVAEIALDLVQDCRRLTVRINAMESQLRQLVCELAPNLLAVPGCGVLSAAMILGETAGAARFKSKDAFARFNGTAPIPVWSSNTVRVRLNRGGNRTINNALHMAAVTQVRRDGPGATYYAKQIATGKTVKEALRLLRRRISDRVFRALLADEAARDNQQIAQTPPQAA

SEQ ID NO: 258838 - protein, 355 aa, unidentified
MCQGGRRRERHNDGSRPPCSRLDLAKNVFQAHGVGAGGEVVFRRKLRRSEVLEFFRQLVPCRIGMEACASAHHWARELGALGHTVRLMPATYVKPYVKRGKSDAIDAEAICEAVTRPTMRFVQVKSAEQQSIVMLHRTRDLLVRQRTMLANALRGHLAEFGIVAAKGIWRLPELLAMASSAPVSQLPDLARECIELIVAQAEDLQRRIGMVERSILAWHKQSQASQRLETTPGIGFITATAIAAFVPDATIFKSGRQFAAWIGLTPRLSGTGGKVQLGRISKAGDRNLRRLLVLGGTSLVRYARRKPHNYAWIDALLARRPARVATVAVANKLARIAWAVLSHSEDYRHPQASAA

SEQ ID NO: 258839 - protein, 408 aa, unidentified
MTVQHECCAGLDVHQRTVVVCVRRQRGAEVTYSHQTFGTTTRDLCGLGDWLVAQSCTHAVIEATGVYWKPVWYVLEERLTLVLAYAAAVRQLKGRKTDASDAQWLADLLAHGLIQPSFVPPAPIRELRDLTRTRQQLVREVAQHTLRIQKILDDASLKLTTVLTDVLGVSGRAVIRALIAGERDPARLADCVHPRVRAGRAALEAAFDGRCTSHHAFLLQLHLDQVEALDAAIARLEAHIGTHVAPFRATLDLLTTLPGVKDTVSRVLLAEIGPDVSRFASAGHLLSWAHFCPRRDESAGRRRSTRVLPGHTWLKTTLIQAAWAAVKRRDTYLHAQFVRLRARRGPKKAIVAVAASMLVAVYYMLKNGVPYHDLGADYFTRRDRDRRAQYLLRQLQTLGYEAQLRDVA

SEQ ID NO: 258840 - protein, 408 aa, unidentified
MFYCGIDIAKYKHEATVIDESGAALLDSISFANSKEGCEKLLALFERLSVTREEILVGMEATGHYWLSIYGYLLDQNFEVKVINPIQSEAFRKMYIRQTKNDRKDSFIIAQVMRFGQFSATSLSEETIVAMRQLSRYRLALVDSCGDCKRRVIALLDQVFPEYDSLFSDTFGVTSKEILTKYPTPEDLLSVSTRKLTTLLEKTSRGRCGRGKAEQLKAAAAESFGVSFAKDAFAFQIRQLIKQLEFLESQIAELEEQISILLKRTGSYITTIPGIGDTLGAIILSEIGDIHRFDAPGKLVAFAGLDVKVTQSGEFTGTRQKISKRGSPYLRRAIWLAASRAAFCDPALSTYYQGLRARGKHHLTAIGAVSRKLCNLIFVILTENRPCQPLPPCTNAVGKVRQISQGEL

SEQ ID NO: 258841 - protein, 400 aa, unidentified
MEGHGVRVPERHLGPQALPLWCPVGTILLSGQHGFMEWPAPLACGATLAGIQREGVGTMEIAVLGIDLGKNSCSVVGLDASGRVVLRRRLHREGVVKLALGLPSCVMAMEACCGAHHLGRRLRDHGHEVRLMSPEYVRPYVKSQKNDDRDAEAIAEAATRPTMRFVELKSQAQLDVQSLHRSRDRLVGERTALINQLRAFLLERGIIVPQGRRKLELHLQILLAADEMPLSPRSRLLIEDMRAEWQELDRRIEAFDQEFAEQARTEEAARLLTTIPDIGPLNATALVAAIGNAQTFNRARDLPAWLGLVPKQVTTGGKPKLLGISKRGNVYLRKMLIHGARAALPTLSKRETPLGGWLRGLMARAHVNTVVVALAAKLARIICAVLRSGQPFEMQAAKVA

SEQ ID NO: 258842 - protein, 347 aa, unidentified
MTIVEVARPVVGGVDTHLDVHVAAALDVNGGVLGVRSFPTTPDGYGALSCWLASFGPLERVGVEGTGTYGAGLARHLATSGVSVIEVDRPNRQERRRNGKSDELDAIEAARAALSGRARGHAKGGTGTVEALRALLVAKRSARSIRIKTTGQLRHLVITAPDDLRARFRALTTKALISQAAGLRPGTSNDPLRHATKTAIVTLARRVQTINAEIATLDCHLDRLVTMTAPQLLDIYGVGTDTAAILLVTAGDNSKRIRHEAAWAHLCGVAPIPAGSGKTNQRRRLNPGGNRQANHALWRIVLTRLGQGEPRTVEYMQRRLAAGRTKPEIIRCLKRYVAREIYHQLPR

SEQ ID NO: 258843 - protein, 350 aa, unidentified
MVVVGADVHKRTHTFVAVDEAGVKLGEITVKAETKGHDKAIRWALRNFGDELKWGIEDCRHLSARLEIDLLDAAQAVVRVPPKMMAEQRRTARTRGKSDPIDALAVARAVLREPGLPEASHDEASRELKLLVNHRDDLVKQRTQVINRFRWHLHRIDPTVDPPARSLDRAKIRAGLTEFLVGKDGIDARLARELLEDIGALTTRINALEKELTALVAEQAPALLELSGCGALTAAKIVGETAGINRFADDAKYAMHAGVAPIPVWSGRTKGRVRVNKSGNRQLNAALHRIALTQIQRDGLGRAYYDKRIATGDSKTEALRCLKRRLARVVFNTLKNNPSTATASDLAAAA

SEQ ID NO: 258844 - protein, 312 aa, unidentified
MAEYVGIDVSKDTLDVAFHSSKRTLRVSNDEAGIASLVAELKSEKPVQVVLEATGGYEFPAAAALVTAGIDISMINPRNAREFAKATNRLAKTDRIDAIVLASFGATGLLKPTPLSDEQSRELEALVARRRQLVEMLVAEKNRETRARANVRGNIEDHIKWLEKQIKDVERHLRNAVKRSPVWRERDDLLQSVPGIGPTISRVLLADLPELGQLSREKITALVGLAPFNVDSGKSRGKRQIWGGRASVRVATFQAALVAARHNPVIKAFYERLLARGKAKKVALVACARKLLHILNAMVRNKTPWGVIQGAA

SEQ ID NO: 258845 - protein, 354 aa, unidentified
MKKKTKTRAVPVKKDLYAAVDLHGDNGYYCVINEEDQRVFQQRLPNDLKTVLAALEPFRPRLARGIAVESTFNWYWLADGLQAAGYAVQLVNTTAVETYSGLKNSNDQTDAFWLAHLQRLGILPTGYIYPKEQRGARDLLRRRMLLVQQRTTHLLSFKSLVARETGQGISCNKIKALEPEGVEKLLAGPEVVLMGQTNVRMIDFLDEQVRGLEKAAQAKLKVLPEYERLQQIPGLGRILNLVIMLETGPIERFESAGNYISYCRAVQAEKFSNERKKGENNRKCGNRYLAWAWLEAANFAIRYSPEIRSWYQRKLRRCGNLAVVAIEAVAAKLAKAGYYMLKNKEAFKMEQALG

SEQ ID NO: 258846 - protein, 320 aa, unidentified
MDAATDVVLIGVDPHKRSVTIEARDTREVLRAIGSFPTTTAGYRAMLQVARQWPKRVWAVEGAGGVGRPLAQRLLADAERVVDVPAKLSARVRVFDVGHGRKTDATDAHAVVMAALRDHDHLRELSITEQLVVLRLLADRRDELSRSRAQGLNRLHRLMTELVPGGIPVKKSVPQYQTMLAGVRPRDAIGRTVRRLAADQLADLVRLDVRLKALKAELTEAVLASGSHLMDLHGIGPAGAARILADVGDVRRFPDRNHFASWTGTAPLDASPGAQIRRRLSRAGNRRMNHVLYIAAVCQIRHDTPGRAYYRRKLTEGKPG

SEQ ID NO: 258847 - protein, 444 aa, unidentified
MAQMCNGHENEYVLAFDFSLDNLDYSLFSPAGDWIIPHHASENNWPGYQQMKADVLAHLADLDGDARLTVAGESTGTLWQHAFYHISTDLDFAPLDPSLALLNPQHVKHFRRVRPEDDKTDPQDSRLIGSYYQTVGVKNPHSFDFRYLPLRHLTRAYFRLTHTLASEKAFAVSLVYLLASEYARLKPLADRFSVTAVHLLTEYPDVAELADLPVDDLAETIQTLGRGHFRDPDEKANALQQVARDSYPFPDPLRPTVHTVLCHSLALIRFMEGQKKAYRRLIKTELAQLPEASLALAEKGLGTIIVGGVLGEIQDPRRFTTGRKFDRAKGRWRECKYRDGQAAVARMAGLWWPRRSSGRFEGDERQLARERNPYLRYWLVQAAHTLKKNREDYAAFYRRKYNETQKHQHKRALILTARKAVRLVFALLHKGQEERLTQEAANTT

SEQ ID NO: 258848 - protein, 312 aa, unidentified
MKNDTIGVDVSKDHLDAHRLADGATRRFANDKRGQGALIQWLAETPANRVVFEPTGPYHRAIERALDASGVPFVKVNPRQARRFAEATGKLAKTDRLDAAILARMGALLELQARPAPSEILLELKELYVAREALVKDRTAAKNRGKVLTLPLLKRQNAQRHEQINRQIATVEAAILQIVEADPGLSDRFAILTSIPGVSNITAFALLIEMPELGALEPGQAASLVGLAPIARQSGRWTGRAFIRGGRAGLRQALYMPALVAARFNPDLKAKYLKLVDAGKPAKVALTAIMRKLVVLANALLKANRRWQPKHP

SEQ ID NO: 258849 - protein, 345 aa, unidentified
MPIVGGLDIHRRQITFDYLDTVTGEVRRGQIAPADREHLRAWLARFADRDDVAFAVEGCAGWRYVAEELAAAGIAAHLAEPADTAFARGRKRHAKTDKTDARHLRMLLAEGRLPECWIPPARILECRALLELYNDLRRERTAWAQRIHAVLFHQGAPVLAEGALRTGQGVAGLRAAAAAHLSPAGQLQVATALEVIDALEARLHAVRHQLLDAARHLAGAKALAARLYGAGPVTALAITCWLAGAGRFSSSRQAVRFAGLDITVSSSDRKGPPGRLSRQGPPVLRWAVYEAGKTHARTPAPDHRYYAAVKDRKNSKRACLSEARKILRQAHHILAELGDDALAAA

SEQ ID NO: 258850 - protein, 413 aa, unidentified
MSVTVESACARVCAGVDWAKDDHAVCVVDTDGEVVDRFTIEHTAVGLKRLIARLLKAGVNEVGIERGDGPVVEALLAAGLVVLVIAPNQLKNLRSRYGSAGNKDDRYDAYVLADVVRTDRRRLTPLTRSTPATIALRSSVRARRDLVEHRVAAANQLRAHLQIVFPGVVGLFAALDSQVSLAFLERFTTQAKADWLTPVRLGAWLTKIGYSGKVAPEVLHQRLLDAPRGTTDTDAEAHAATTLAFLAVLRTLNTQITALADSIAEQLAVHPDAHIVKSLPRAGTLRAARLLAEIGDARGRFPTADALACLAGVAPSTRQSGKIKAVTFRWSADKELRDALCDFAGDCRRANPWAEDLYQRARARGHDHPHAVRILGRAWANIIWRCWQDGVAYDPTRHHALQRILNEHALKAA

SEQ ID NO: 258851 - protein, 349 aa, unidentified
MVAELVDYVVGVDTHRDEHTLALVEAATGAVLAQGTVASNGRGYAEALRFASQQVNAARLWAIEGAGHYGAGLARYLSERGETVLEVGRSPRGERRLRGKDDQLDAVRAARAALSIEPLPRPRSGERREALRLLLVARRSAVDVRREALVQLRSVIVTAPERLREELRGLPVQRLLERCSRLRRSTTATPDQVATRLVLRTLARRIEAASMEADELEAEILVHVRALAPRLLDEPGVGPIVAAQLIVAWSHPGRVRSEAAFARLAGVAPVPASSGKTTRHRLSRGGDRQLNRALHTVVLHRRQHDPATREYISKRTAEGKSRREATRLLKRYLARHLYRQLQNQEPLLA

SEQ ID NO: 258852 - protein, 348 aa, unidentified
MEMVGGLDLHRSQITFRTVDLRTGEVRRGRIYPGAREAVREWLERFEAGTEAHFALEGTTGWRFVAEEIERRGFVAHLADPAELSTLRGPKRRAKTDHADCELMVNLLLEGRLPESWIPPAHILELRALVRLRKTLLDQRTEWQQRLQAQAFHQGVVPGLRLRRTDDRRRLAEMQMSPAGRQTMQTGLVMLDDFDAQLEPLSAQLVALAKAQPGCRALERELYGVGWLTAMAIVVELGDCRRFHSADQAVRSSGLDITVYESNGQRPGGHLARQGPQVLRWALFEAAQCAARKSSPDHAYYLKVRDRIDHNRACLSVARKLCRRACHILRDLGDAAMAPPASQEPKAA

SEQ ID NO: 258853 - protein, 321 aa, unidentified
MQTIPVTVYAGVDVAKATLQLHLQGRQAEFSNQPAGLVQLCQQLKTIPHIHVVCEATGGYERLLVQAMHQAQIPVSVTNPAQVRAAAQAQGQRAKTDRIDAALLTDYGQRYQPKPTSPTTASQDQLVALTQWLMQLVQAQALAKTQAEHHEAAFVCGRHAKLMAHYQSQIVAVEKQIRALLAQDAQLQQRVDCLDEIKGVGARTAWLVLAHMPELGQINRQQVAALAGLAPWTRESGTMKGMRCIGGGRPEVRLALYMAALSAARCNSVLKPFYQRLRAKEKPAKVALTAVMRRLLVYMNHQLKALQATQTDTKLQNAKIP

SEQ ID NO: 258854 - protein, 346 aa, unidentified
MKHFAGLDVSLGETAVCVVDEEGRIAKEARVPSEPEALAAFFLGLGLTLERIGLEACSLAAWLHEGLVAAGLPAVCIETRRAKAAMGAMPNKTDRNDARGIAQIIRTGWYRAVHVKSAASRSWRALLAARRLVLNKMRDVENGLRALLREAGLKLGTPGRKRFPERVRELAAADPVVSALAEPLLAIAATMARELAQLTRRVLAIARDEPVCRRLMGVPGVGPLTALAFRATIDEPGRFKRSRDVGAHLGLTPKRYQSGETDVQGGISRCGDELARTALYEAAHSLLVRSRKWSSLRAWGMRVAKRRGMARARVAVARKLAVILHRVWADDAEFRWGKEDTALAAV

SEQ ID NO: 258855 - protein, 386 aa, unidentified
MTQPHDLSRSQAQLVQDKTLIAVIELSLSSWLVAGVVPGVDRQPLKKLEPDQAGLLRLLQRWRDEAMKAGCTIERIAVAYEAGRDGFWLARWLRGQGIEVHVIHSSSVAVSREHRRAKTDRLDTAMLLRVFMGWLRGERGHCGMVAVPTIEEEDAKRPHRERESLVGERTRIINRMKAALVRLGIRGFKPELRRAPKKLDELRTPEDLPIPPNTLEEIRRDMARLAMVRDQIDLIEQARLVRIQQAPETGPNAMVRLLASIIGVGVETADMLVQEVLSRNLRDRRAVARYAGLTGSPDESGSKRREKGLAKAGNARVRRGLVQLAWRFLLFQKDSALAQWYRTRTGVQGVRKTVLIVALARKLLIALWRMVTTGEVPHGVMLRAAA

SEQ ID NO: 258856 - protein, 342 aa, unidentified
MEKVSIIGLDLAKRSFQAHGALAEGGVAFRKKLSREKVLAFFAEQPRCVVAMEACGSAHHWGRAIRDLGHEVRLIPPAYVKPFVKRQKNDAADAEAIAEAASRPTMRFVAVKTEEQQARAMLFRTRDVLVRQRTQLINALRGHLSEHGVVAAQGPANVKVLEEAVEDKTTSLPLLVVELARVFLDHIQGLSKRIFELEKVTVHEATCGETTRRLQTMPGVGPITALAIETFAPPMDVFKRGRDFAAWVGLVPRQHSTGGKQVLGSISKMGQRDIRRLLITGAMAVVRSALRKGAPEGSWLQRMLTRKPKMLVAIALANKMARSVWAMLTKGQDFRIPVVAAS

SEQ ID NO: 258857 - protein, 487 aa, unidentified
MKLCRRQGVESILAIIYTVANGKDRVYFGPCSSLAKLISGTLICTTICPAACGRRTYSKMTTDRVPCRKFILGGAIMDKIYDNCCGIDVHKKLIVACLRKGNRQEVREFGATTRELLELADWLKTSDCKMVAMESTASYWKPLYNILESSDLNAMVVNARHMKAVPGRKTDVKDAEWIADLLQHGLLQPSYIPDKDQRELRELVRYRKSLVGERTRELNRLQKMLEGANIKLSGTVSDINGKSARSILEYLLTGECIDGEKYDEMYEQKVIAHNLKATKEQIIDDLNGVMTPLQRRMMKELLSHLDELNTHIKNLDDEIDNFMKPEEKQASQAIQDVTGIGNTSAQAIISVIGTDMERFSTDRHISSWAGLCPGDNESAKKRKSGKTRKGNSLLRTTLITCAHAAVKNKKSYFYAQFMRISAHRGKKRAYVAVAHSMLIAIYHILKDGVIFKDLGADYYNQFNKERKINAYLKKLKALGWEAPVVAA

SEQ ID NO: 258858 - protein, 310 aa, unidentified
MDRIIVGIDVSKDRLDVEVRPTGEAFSVNRNAVGVEKLVARLRELSPHIVALEATGGFENVVAAALGAAGLPVAVVNPAQVRAFAKAIGQRAKTDPIDAGVVAHFAEATHLEPRPLPDEQTRLLADLVGRRRQIVAMIGAERQREHRLTAPRLRKSIARLIKALEKELASLDTDIDDAVKGSPAWHAKEELLTSVPSIGPVIARTLVAELPELGQLGHKQITALVGLAPFTRQSGQWRGRSFIGGGRTAVRAALFMGAMVAKKHNPVLKAFFDRLVAAGKPKMVALIAVARKLLIILNAIVRDNRPWQTT

SEQ ID NO: 258859 - protein, 318 aa, unidentified
MSVAHGYWGIDVAKDTLELAEFEASEQGQVTNDSAGIAALLNRMTEAPPQLIVLEATGGYEQEVVWALGTAGLPVVVVNPRQVREFARATGQLAKTDRLDAKVLARFAAMVRPEPRPLPDAAALELEAYLTRRRQLRDMLTMEQQRLALVRPREVRQSLRKHIAYLQRELRSTESDLSQLIKGSPLWREADDLLQSVPGIGPTTAQTLIALLPELGTLGRRAIAKLVGVAPLNQESGRLRGARRTWGGRAPVRRTLYMAALVGTRWNPVIRAFYQRLIAAGKARKVALTACMRKLLTILNVILKTKRPWQPTMVSTSA

SEQ ID NO: 258860 - protein, 389 aa, unidentified
MFYVGLDVASEKHDCCILNEKKKVLQSFSISNSSIGFDSLLAALAELPSDEIKIGLEATGIYSENLSVFLRRKGFDVTTINPLLLKKHQCATTLRKTKTDKADAKGIALFIAEEGFQPDLPISYHIQELKSLTRARFSVVQDRSALKNKVKRLVVLLFPELLGEFTDIFGSSATALLKQYPSAAKLAACHCDTLAALLRKASRGRFGRAKAEHLRQLAQNSVGNHSTARAMELRMLLERIDLLSEQIAEYDTEIKVIMDKIDPPILSIPGISYTLGAIIVAEIGDISRFSSPAKLLAFAGLEPSIYQSGKFVPTSGKMVKRGSPFLRWALLQAAGYTPIYSSTFALYRAKKVAEGKPAAVVRSHVAKKLVRIIYSLLTHSTAFSDQLSA

SEQ ID NO: 258861 - protein, 437 aa, unidentified
MSQRLQVGLDIHQKHNYVCSMTNEGQMVNPHQRFDNNWPGFQEFVEMLAGVLNEGQFEGVDIAGEATGLLWFHPFYHLAQAEELGPFDSHLYLFNPRTIKHFKKVLAQRDKVDPKDAHAVVERLRFGGRLPHEVTFDERYLPLQRLTRYRYHLAHDLAREKVYARMVPIYLKASDYTRQPMPFSDVFGVTSRHILSEYATIDELASMPLDDLAEELDRVGRHRFKDAADNARRLQRAAAQSYPLSPCLVEPVNAILDSLLAHIRFLEGLLENLNLLIEAALTDVPGAPYLRSIKGLGLVYGAGLLAEIQDPSRFMQGFKRDKQGHLRPKTKHDGQAALARFAGLWWPRGDSGDFHAEDRRLPKTGNHYLRYYCVEGGNSLRRHNAEYTPYYQRKFDESLKHKHWRATVLTARKLVRLVFTLLHDEEMYQPPEARYHS

SEQ ID NO: 258862 - protein, 341 aa, unidentified
MGEVSAIGLDLAKNVFQLHGADASGATLFRKKLSRARLLDFLMAQPRCTVAMEACGGAHYWGREIGKLGHAVRLIAPAYVKPFVKRQKNDAADAEAICEAAQRPTMRFVAVKSEAAQSSALVFRTRDLLVRQRTQTINALRGNLAEFGMVVAQGPAHVTKLVSAVQDLTNSLPESARPILRVLIETLRSLDESITLLDVAIARRAKEDETARRLMTIPGVGPVTATALLALAPPTETFRRGRDFAAWLGLTPLQHSTGGKQKLGKTSKMGERTLRRLLIIGASAVVRWATRKGAPAGSWLAQMMARKPRMLVAVALANKMARIVWALLVKGGLYRAPVATA

SEQ ID NO: 258863 - protein, 344 aa, unidentified
MSEIKRIGIDTSKAVFTLHAIDQADRPALRVNLRRAQMLPFFKKRPRTEIAMEACGSAHHWARKLMALGHDVRLIPPQYVKPYVKRAKNDRNDAEAICEAAGRPGMRFVLTKSEAQQADGLVLKVRETLLGQRTRLINTLRGHAAEFGVIAAKGTSQVMPLLAAIEAEASIPATAKEMLALLGEEIAHLDDRLKEVEAKLLAMHRASAISPLLATIPGIGPIIALTLAVEIDPKAFQSGRHLAAWLGLTPREHSTGGKQRLGGISRAGHERLRARLVTGATAVIRHASRTDSKLASEWLRQLLSRKPRKLVAIALANKMARIVWAIMTSGEVYRHPTAGAAAAA

SEQ ID NO: 258864 - protein, 349 aa, unidentified
MIVIGIDPHKQTHTGVAVDGATGQVLAELTVRARTPGFERLVEWARGLDGERLFAVEDGRHVSGALERHLIARGERSVRVAPRMMGQARRADRIRGKSDPIDATAVARAALSHPDLPEATLAGVEREIGLLAAHRESMVRERTAICSRLRWLLHDIDPDLAPSPRTLNRFATLDRLEQTLAALERSVQVRICLELLASCRQITRRANELEREITALVREHAPALLEIPGCASLTAAKVLAETAQVGRFPTEGHFARYAGTAPVPASSGATHRHRFNRRGNRQLNAALHRIAVTQLRIHEPAKLYVAKKRSEGMSKTEAIRVLKRQLSRVVFRTMTSMRQSADGLTAVAA

SEQ ID NO: 258865 - protein, 349 aa, unidentified
MEHYAGIDVSLELSSVCVVDAKGKIVKEAKISSDPVALVTFFRGLGIAIERIGLEAGPLSQWLHAGLTQAGFEVVLLETRHVKAALSAMTVKTDRKDARGIAQLIRMGWFRPVHCKSVGSQEVRALLVGRKLLLGKLLDVEFSIRGILRGFGLKMGMVTRRNFEARVRELCAGHSMLEQICAAMLAARSALQTEYTKLHKAMLKIVRKDEVCCRLMTTPGVGPLVAITFKTGIDDPSRIGKSKAVGALFGLTPKKYQSGETDVTGGITRVGDEMVRTALYEAANILLSRVTRFSTLKRWGMDVAKRRGAKRAKVALARKIGVILHRMWVDSTNFRWTKEAPTAPRLIQA

SEQ ID NO: 258866 - protein, 375 aa, unidentified
MIKDSEVFVAFDTSKLRNAVAIAEAGRAGEVRFLGEIENTAGATTKLVRKLEAKYERITFCYEAGPTGYELQRHIRGLGHECIVAAPSLIPKKPGDRVKTNRRDAVSLVKLSRAGELTAVWVPDRRHEAMRDLTRAREAAVIDLRAKRQRVSALLLRQGRSYPADKKTWTKVHMNWLASQRFEQPELGVVFAEMMFATRQAQERVERLEQAIRTAVPDWSLAEMVTAFMAFRGIDLVSATCLLAELGDLTRFPTAPEVMGYVGLGCSEGSTGDRIKRGGITKSGNRRARRTLVECAWSYQHPPRVGIAKQAKVAAAPTKVREIAWKAQCRLNRRYRVLLRRGKLKTVAITAVARELAGFLWAAARELSSPQRVAK

SEQ ID NO: 258867 - protein, 315 aa, unidentified
MGTQVFVGIDVGKDVLFVAVRPFGDTLEIPNREDGIADLVKRLRSLEPTLVVMEATAGYETPVAVALYRVGIPVVVSNPRLIRSFARATGRLAKTDKIDAGVIAHFAEVIRPAPRRMDEPDEARLGQLVTRRKQLLRMIVMEKNRVAKGAMEMRKDIQKHLDWLAKELERIDQALADFIQKSPIWRAKDEILQSVPGIGKVGSHALMSDLPELGKLNRKQIASLVGVAPMNRDSGNYKGRRSIWGGRAQIRTVLFMVAVVASRCNPVIREFYQRLCNAGKPKKVALTACIRRLLAILNAMMRNGTRWGEFKPAVT

SEQ ID NO: 258868 - protein, 450 aa, unidentified
MATKAKMVKTPEGGKLAIVNPNAAGIDIADKEMQVCVPEDRDGDNNRRFGSFTSDLNLIVSWLQDCNITTVAMEATGIYYMSLFLKLQDAGIEVLLANPLEVKNLSGHKTDAADAEWLMLLHRYGLLKPCYQPGNLARQIRNLSRQRNNTLRSAEKQMQYMQRSLELMNIKLSTVLSDVTGLSGRRIINAILNGSRDVEYLSSLTESNCKASREEIAKSLEGTWDVDQLFALKQSVQAYDFFITQIEECDREIESLLQQYQSAVDQVPAELSRYKRKASSRSKNAPKIDIERYAFDIWGVNVFKIPGIKDLASMELIGELGHDFTDKFESAEKFCSWCNLVPNNKISGGKILSSRMMKRKNIVGQIFRTAAAPLARDKGEMGEYYRRIRARSGSLQANVATAHKLATIFFVMVKTKTEYDASKVGLSEKELAERKIAKLEKALNRLRKAS

SEQ ID NO: 258869 - protein, 350 aa, unidentified
MLIIGCDYHPGFQQIAFVDTETGELGERRLAHREEAEQFYGELRARSLRVRVGMEASGHARWFERWLLALQFELWIGDAAEIRTKRVRKQKTDRQDAQLLLRLMIEDRFPRIWVADAENRDLRQLLWHRHRLVQMRTRVMNQLHVVALNEGLRRKKALWRPTGRAELESLALAPWASRRRQDLLDLLDQLTPKIQELTRALEGEVEKRPVARQLMTHPGVGPLTALAFELVIGTPERFHCGKQIASYVGLVPSEESSGDRRRLGHISKQGNSLLRYLLVEAAQVTVRSQPQWRSKFFHLGMRRGRKIAKVAMARKLAVHLYWMWRQGWDYSQFEKLGSHAGAPGNPHGGE

SEQ ID NO: 258870 - protein, 402 aa, unidentified
MAYCGGLDWGSAEHGVCIIEHDSGKIIARFPVPHDAAGIADLMRRLARLAPPADLPIAIERPSGLIVDALVAADHPVVPIHPNVVKASRPRYRAAGGKSDRSDPYLLADLLRTDGHRFRRLMPCSDEIKALRALVRGRDALVAQRLVLANQLRALLDSFWPGAVAIFADIDSPIALAFVQRYPTPDSAARLGEKRIKAFMAQHRYCGRRSASELLARLRRAPPCLAGDSEADAKGELVRAWAAVLTVLVAQIAELASRIEHTIGELPDGKIVTSFPRAGRICAAQILAELGDVRERFQAEDQLAAEAGVCPVTHQSGKSRGVVFRWACNHRLRAAITCYADNSRHSSPWAADIYQRARGRGCDHPHAVRILARAWVRVLWRAWQDRTLYDPARHRSSRASAV

SEQ ID NO: 258871 - protein, 402 aa, unidentified
MNAVGIDVSKGKSMVAIMRPFGEIVSAPFEIKHTASDINSLVELINSVEGESRIVMEHTGRYYEVLAHQLSEANLFVSAINPKLIKDFDNDSLRKVKSDKADAVKIARYALDKWQNLKQYNVMDELRNQLKTMNRQFGFYMKHKTAMKNNLIGILDQTYPGVNTYFDSPARSDGSQKWVDFASTYWHVDCVRKMSLNAFIDHYQNWCKRKKYNFSQSKAEEIYGKAKELVPVLPKDNITKLIIKQAVNQLNIASATVESLRTLMNETASQLPEYPVVMAMKGVGTSLGPQLMAEIGDVSRFTHKGAITAFAGVDPGVNESGSYEQKNVPTSKRGSSNLRKTLFQVMDALIKTHPQDDPVYQFIDKKRAQGKPYYVYMTAGANKFLRIYYGRVKEYLSSLPES

SEQ ID NO: 258872 - protein, 364 aa, unidentified
MLIIGCDYHPGFQQIACVDTDGGELSEHHLAHREQAEQFYRELKQQNLCARVGMESSGHSRWFERLLQELGFELWIGDPAEIQTRRVRKQKTDRQDAQLLLRLMLENRFPRIWVPDAENRDLRQLLWHRHRMVQMRTRVMNQLHVVPLNEGLRRKKALWRPAGRKELESIALAPWASRRRQDLLDLLDQLTPKIQELTRALEEQVEKRPVTRRLMTHPGVGPLTALAYELVIGTPERFPCGKQLASYIGLVPEEKSSGDRRRLGHISKQGNVLLRFLLVEAAQVTVRSQQEWRSKFFHLAMRRGRKIAKVAMARKLAVHLYWMWREGCDYGQTQKLGSHAGEPGNPDDVQSNTDVMIGHPAPSK

SEQ ID NO: 258873 - protein, 410 aa, unidentified
METIVERCAGLDVHKAQVTACVRVPGPGRSFVEHVGEFTTTVPGLLTLRDWLRAHAVTQVAMEATGVYWKPVWAILEDEFDCLLVNARHVKNVPGRKTDVTDACWLARLLAAGLLARSFVPPKPIRSLRNLTRYRTTQIAERQREANRLHKILEDTGIKLDCVASDILGASGRAMLDALVRGTTDPAVLAELARGRLRAKLPALREALQGRFGPEHALIVGHILAHLDFLDEAIAALGEAIEEQLRPFAPQARLLCTIPGVGPRTAEVLVAEIGVEMAQFGSAERLSSWAGLCPGNDQSAGKRRSGRTRKGSKWLRRALTEAALAASRSKDTYLAAQYRRLKARRGHHRAVLAVAHSILTAAWHMLHTGEVYRELGAGYFQTRRPDAHVRRLVRQLEALGHQVTLERQAA

SEQ ID NO: 258874 - protein, 347 aa, unidentified
MRFYRGSHAYYGGVDLHARTMYLRLSDQQGQILVDRNLPCEPAAFLEAVAPYKHDLAVTAECIFCWYWLADLCTSHGITFVLAHALYLKAIHGGKAKNDPLDADKLLVLLRAGAVPMAYVYPPEMRATRDLMRRRLFFTRKRAELFTHIQNTFHQYNLLKPAGDMHRAKHRAQLAACFSDPVVRATIEADLRVCTVYDSLIKDLEKTIERQARLHDSTAFLLLKTIPGIGKILALTILYEIHTIHRFPRVQDFSSYCRLVKPQHTSAGKRVGSGGSKIGSAHLKWAFSEAAVSFLHGNPCGQALIKRMRKRYGSGKALSILASRLARAAYFMLKQHRAFDEKRFFCN

SEQ ID NO: 258875 - protein, 342 aa, unidentified
MQQSIYVGLDLGSSRCHQTVINSDGSLQLSRSIPTSEQHLRFAFTALGDHVRVHLEAGELSTWVYSIIKPMVAEVVVSHSRTLAWIGKDSQKDDSIDARKLAELLRLNRVHPIYCEAADDRRLFKQLVTHHEDLSREQARLKSKIKARLRTLGIIRFDARLFTKSGNTALLAEIKEPAIKLMLAQSFAVLNQLLEAETQAKQAMMAASKQFPEVSLLQTAPGVGIITACRFVAYIQTPRRFSNKRKLWRYCRLGITRRESNGKRLAHPRLDSAGVGSLKDVSRKVFEAARRTKKDNSFKRFFEQSLLNTKNAVHARLSTQRKILSTLRAMWLRMQPYDDTGT

SEQ ID NO: 258876 - protein, 324 aa, unidentified
MSKNTNYFGIDISKDVFDVMDVGNNHHQFSNSASGFKKFLKHLDSTSHCVMEATGYYHYQLAYFLLENKVLVSVENPLAIKRFIQMKLSKIKTDKSDAKMICLYAQYETLRLWQGNSKIQQECFQITRLLSLYSKQKTALKNKIHGEKVLGNPSKLVVRSLKRSLRNLQKEVDTLESKLVDFIRIDNQELLTNLETIPGIGRKTATLLIVLTNGFERFNTASELCSYAGITPIIRQSGSSVNGRARISKIGNRKLRNLLFMCSFTACKHNKACKDLFDRIVAKGKSKKLALLAVCNKLLKQAFAIAKSGLCYDENYQRVLKTQS

SEQ ID NO: 258877 - protein, 314 aa, unidentified
MPTSAVYVGIDVSKAQLDLAVRPTGETWSCLQEEADLGRLVARLHALAPTLIVLEATGGYEVPVASALAADGLPVVVVNPRQVRNFAKALGRLAKTDRIDADVLALFGERVQPAIRPLPDPALEALTPVVARRRQLVEMLVAERNRRAQVKDSGVRREITQHIRWLERRLAHITRDIGRLLETTPAWRVEDNLLQSVPGVGPNTAAVLIADLPELGRLSRRQIGALVGVAPFNRDSGTLRATRHIWGGRVTVRGALYMATLVATRCNPVIRAFYGRLVAAGKPKKVALVAAMHKLLTILNTMVKHQQSWRLATD

SEQ ID NO: 258878 - protein, 411 aa, unidentified
MDVLHARCCGLDVHKKTVVACVLITVDDAAVDRQVRTFSIMTSDLLDLSDWLTNLGVTHIALESTGVYWRPVFNVLEDEDRTVLLVNPQHMRAVPGKKTDVRDSEWLADLLRHGLLRASFIPPAPIRAIRELTRYRKTLVQQRADQANRLQKTLEGANLKLAAVAADVLGVSSRAMLAALLAGERDPDVLADLARGRMRAKLPELRRALTGRVQPHHLVLIDQILQHIDFLEQAIAHVQAEIERCLPRFEEALDLLQTIPGIRAVAAAAILAEIDVDMSRFPTAGHLASWAGVCPSNKESAGKRMTGPMNRGNVWLRSILGEVAWASIKTHATYFYAQFHRIARRRGRNKAAMAVAHSLLVVIFHVLRNRQPYTELGADYLDRLDAAQIERHHVRRLEQLGYTVTLSPIAI

SEQ ID NO: 258879 - protein, 340 aa, unidentified
MNEAVALVGLDIAKSVFQVHAANRSGHVLFRRKLKRDDVEPFFRELPPCQVGLEACPGSHHWARLLRDCGHDARLLPAQFVRPYVKSNKNDAADAEAICEAMTRPTMRFVPIKHKQQQEVLVIHRVREMLIRQRTQVINAIRGHLAEFGIVGPNRAHNIGLLTTLVEDDEDARLPPVARHALKFLVLQLRQTKAKLEQIDTELVKLAAQIAECRRLMSIPGVGVVTATALVASMRDPQDFKSGRHFAAWLGLVPRQNSTGGVDKLGGISKRGDGYLRRLLIHGSRSVMRWRGRSWLWLARLRDRRPANVATVAIANKTARVVWALLRYGGTYDNPARQAA

SEQ ID NO: 258880 - protein, 357 aa, unidentified
MTHQKNKKLDFSNQKFFIGIDVHKKNWKVTIRTHQMEIKTFSMNPQPDELVKHLSRNYPNGRYYSCYEAGFCGYWIDSELKKNNVKNIVINPGDVPTTNKEKLSKTDGIDSRKLARELENRNLKGIYIPSSYHQELRSLSRLRHALTKDQARIKNRIKSHLFFYGKKTISESRHWSGRYITELRNLEFSHTLGKEYLDIYLDELFSIREKIAQVVGILRKISRENKEARVINILTRSVPGIGFATAVTFYCEIIDMKRFNTIEKLASYVGLVPSLNSSGERERTRGITVRRSKYLRPMMIEAAWVAVRKDPSLLEYFSRLTRRMNKKRAIISVARKLLSRIRYVWLNEEDYICGYGS

SEQ ID NO: 258881 - protein, 349 aa, unidentified
MYYVGVDYHKRYSVATVLDASGTMLARRRVDNRLDDFRDFLAPYDKAEVEAVVEATRSWGIPVDILEQLADRVVLANPGEVKLIAKARISTDKVDSLSLARLLRMDWVPEAYLRPKANREQQLILRLRCFLVQLRTRVKNRIHDLIDRQDESVREMTTGFSDLFGKKGMTWLRSLELGHPSGKLLGQLLAVYDALDKEVRQSDRLVAELFAVDDDCKLLAKTPGIGTFFAVLIKTEVGSIERFANSPRFNSYAGVVPSTESSGGKTWHGRIIKQSNCWLRWALVEAVIPATVADAGLRAHYEYYRRMKGSRVAKIITARRLGCIVYRVLKERKPYFEQPVPRRGCRQTG

SEQ ID NO: 258882 - protein, 343 aa, unidentified
MQITTIGLDLAKHWFQVHGVDAAGKVVVKRRLRRAEVVEFFKTLEPCLVGIEACATAHHWARELIALGHEVKLMPPAYVKAYVKRNKNDAADAEAICEAVTRPSMRFVPVKDADQQSVLMMHRARNLLVRQRTMLVNALRAHLAEFGVIAAQGLRHVEQLIAAIEAESTALPELARSILRLIVTQLKDTQAKIQQVEAKLAQWHRNSRLSKLLATIPGVGIMSASAIAATVCDPNLFRSGREFAAWLGMTPRQNSSGGKERLGRTSKRGDKYIRCLLVAGAVAILRHARTRATKDAEWVRGMLARKPAKVVAVALANRTARIVWAVMKRGDGYKAKEIVGQAA

SEQ ID NO: 258883 - protein, 338 aa, unidentified
MKTKYFVGIDISSEFFTVSCYIQKPGKYISFGNYENSENGFKKLVKDISEIDTNKNLFLFCMESTGVYGESLTHFLFDYGFTVIVENALKVKRAFGISGKKSDEIDSMKIAEYSFRFQDIVKPWAPKPEIVEKIKVLLAQRDLLTKQKIAHMNSMKALKRKYLDFPDVIANYKDMISYSSKQIKSIEKMIMELIKQSPDHYQTVSNITSIPGIGNILTFYLFVTTNGFSENLNYKNIASYLGIVPQIYQSGKSVHKRSSSSGMGPGEIRKILYLASMTAMVHNKNLKMYFLRKVAEGKPKMLVLNNIGNKLLKLIIAIIKSGGRYSENFRSINPALVF

SEQ ID NO: 258884 - protein, 296 aa, unidentified
MKKNFIGIDVSKLKLDVYLHNKLEHKIFTNNEEGYQQMITWLKSLKVSVKSMAVCFEHTGIYSEDLATFLTQKKVCFYMESSLKIKYSIGLSRGKSDKIDSKRIAAYIAMYHEQLTPSIITDNNVSKLRKLLSLRSFLEKEIVALKNRIKNSIKESGIEFVLKLERDMLESKNKYLKELESEIKKLIKSDEDMNKMDQLIQSIKGVGPMTSWNFIATTNKFNYFENARQFACYIGVAPFEKSSGSSIKGKTQTDRRSNRKLNAIITMAARSAALYNPEMKEYMDRKLKKGNTTIVY

SEQ ID NO: 258885 - protein, 323 aa, unidentified
MDAVGQVVLRRQLKRRYVLAFFQRLPPCLVGIEACASSHHWSRELQELGHTVQLMPPAYVKPYVKRQKNDTTDAEAICEAVTRPNMRFVPTKTVEQQSCLMLHRARHLFIRQQTAVINSIRAYLAEFGIVAPVGRRGVEQLLEVVADTADRRLPEVARACLAALGGQLRALKAQILEFDRRIMAWHRSNATSRRLDAIPGVGPALATALVASLAEPRAFRSGRDFSAWVGLVPKQNSSGGKDKLGSISKQGDRYLRSLFTAGALAVIRYAKIHGTGHRPWLTGLLARQPTKVVAIALANKLARMAWAMMARNERYKEPAALAA

SEQ ID NO: 258886 - protein, 395 aa, unidentified
MFIVGIDIAKRSHEAIIIAEDGQVVRKAFSFRNNCTGYNLLLEQVRRLTLVKSQIVFAMESTAHYWLALYARLLKDGYAVMVLNPIQSHSLRELYIRKAKTDARDSLIIADLVRFGRCKASNVPQDKILALRELCRSRAYLVDMAADLKRKLIALLDRIFPEYESLFESVFSKASIAVLRKYSTPQKVKNAHLGKLTDILMESSNGHFCEWKAHQLKEAACSSFGIDDSGGVYSTLLGMFLEQILSLTAQADSLEKQISVFFQEFNNPLTSIPGVGTVLAATILSEIGDITRFSSADKLLAYAGLDPSVKQSGEFKSNQNRMSKRGSPYLRRAIWLASTVAVHRDPMFQTYYEKKISEGLHYMNVIGHVSRKMTAVIFAVLRDGQPYQPVLQTAD

SEQ ID NO: 258887 - protein, 324 aa, unidentified
MLPTLGIDISKDSFHVELSINDKLRHRRFANRQEGFAELGAWLAKHTAPAVHACLEATGPYSEPLALYLHEQGHTVSVVNPVRIKAFGQSELLRNKDDRPDAALIRRFCEKQCPPAWTPAPAHFRELQAMTRHLENLLETRQQQLNRLETTTTKNVVKSLRKLVTHLETEIKRTEQQINDHVDRHPDLKQQCQLLESIPGIGNRTATRLLAEIEAISQYKSARQVAAYAGLTPKNNRSGTKRVPAHLSKTGNARVRKALFLPALVAKQHNPVVRSFCQRLAQHGKNKMQLVGAAMRKLIHIAFGVLKSGKVFDPNHELLVNSVS

SEQ ID NO: 258888 - protein, 344 aa, unidentified
MGEVSTIGLDIAKSVFQVHGVDGAGAVVMRKRISRAKMLEFFADLPRCLVGMEACPSAHHWSRELQALGHRVRLMPPSYVKAYLKRSKNDANDAAAICEAVVRPSMRFVPIKTKEQQAGLMLHRTRQLLVRQRTMLSNALRGHLAELGIVSAKGRNGIGQLLGIITDVTDNRVAPAVRGLLDVLARQYNAIGAEIRSIDKSILTWHRSCEASRRLEEIPGIGPIVATALVAEVGDWREFRSGRNLAAWIGLVPKQHTTGGKERLGSITKQGNRYLRWLLVTGAMAVIRYAKKHGTERRPWLARLLERRHTKVAAVALANKMARMAWAIMVRSERYEEPKLLLAA

SEQ ID NO: 258889 - protein, 418 aa, unidentified
MEYSKLQKNLEGVDLSKVLIGAIDLSKTEHHGCCFTMDGRSDKVIKFSNDHYGAELYWSYLEKNRKKIGLEQIVITAESTGSYGEGILNWYEEQGAKILLVNSKHTKRLKELTDNSPGKTDKKDPRVIGSVLKWGGGYHPLEITNTTAELRSLSHNRERQKVSLGRIYNQLESQVVRIFPEFLKVMKGLKTKTAKGLLKDYQSPAQIKALGKIRLCEKMQKLSRGRLSQERAIDLYEAASCSIGIKTGIRSISLEIKMLVEGISNIEKRIEAIEKLMYEELEQIEWSKYLTSVPGISTISAAILIGEVGDFKKIKSAKALEKLSGLNLYEMSSGQHQGSKRISKRGRVLLRKILYMVSLGMVKKNGIFRSTYEKHKSKGMKSTKAIVAISRKLIRVIYALVTKEQKYKKEEKKEGKKN

SEQ ID NO: 258890 - protein, 348 aa, unidentified
MAVAIVESTRPVTGGVDTHLDTHVAAALDATGGVLGVESFPATRAGYASLSSWLAGFGPVGRVGVEGTGAYGAGLARHLRSLGVEVIEVDRPNRQLRRAQGKSDILDATEAARAVLSGRARGVAKTADGNVEAMRALLVAKRSGREARITCLNQIRHLGFTAPDELRERFGSAPRTALAARAAALRPRRDRDPVLYATKLAMRSLGRRVLALDDEIARLDVALAELVTATAPGLLSLHGVGVDTAAILCVAAGDNPQRLRSEAAWAHLCGVAPLEATSGKVTRRHRLNRGGNRQANHALWRIVFTRLGSDARTRSYVARRLDEGLSRPEIIRSLKRYVARQTYRQLPR

SEQ ID NO: 258891 - protein, 388 aa, unidentified
MNVGADKSEPLTAIHTDLGAIFVSLELSRSSWLITSLSPGGGEKMSKHSVPGGDFAGLMERFAQLQEKARLRTGQSFRIIVVQEAGLDGFWIHRALQNEGIESHVVDAASIATSRRRRRAKTDKIDGETLVRALLAYKRGEPRVCAMVKAPTPGEEDRRHLCRERKALTAERVRHVNRIKGLLFSQGISGYQPLRRDRRQRLEELQTGDGRAFPQHLKALVNRELDRLELLLKQIKTVEAARDALLAVGQTAKPAPAAMLLDIRGIGPEFAAILWSEGLFRHFENRRQIAAYAGLAPTPWQSGAVDREQGVSKAGNPRLRTTLIQLAWLWLRNQPRSALSLWFHERVSRNGGRLRKTTIVALARKLLVALWKYVTAGVVIEGVTMKVA

SEQ ID NO: 258892 - protein, 341 aa, unidentified
MNKVAIAAIDLGKHTFHLHAQDDRGHELYRKKFTRATLIQHLANLEPCTVVMEACGGAHFMAQEVARLGHTPKLIAPHLVRPYVKSNKNDFADAEAICEAATRPTMRFVPPKTQAQQALAMLNSVRDSFIEDRTATINRIHAALLEVGVSLAPGFKSIKDLPARLEASSFSERIKKILMTLHKHFNYLDEQVKALDKDVECQAAGDDLAARLMTMPCVGPITSTVLAAELGDGKQFKCGRGYSASIGLVPKQHSTGGKTVLLGISKRGDRNQRRLLVQCARVYLIQLDRQKGWLADWVRQLLAHHHSNHVVCALANKLARIAWAIAAHHTEFDAGPNAMNT

SEQ ID NO: 258893 - protein, 362 aa, unidentified
MSKKVINNQAILRQCVGIDISKDSFVACISHKTSTDEIIVKSTKKIPNSLRGYHTLQEWVTKFTSHELTLIYVLEATGVYYEPLAFDLLERGKSVSVQLAKNVKFFVQSHNIKSKTDDIDAQAIAQMGLERKLKLWQPGSIQMRLLKHLCRERTMLQAEQTTVKNQSHAWKHTYKPEKSILKRLEDRLSFIKEQIQEIEQEIQSIVENDQDLAKRVANVCTIKGVGLLSAIIIIAETNGFALFNNKAQLISYAGYDVVRKQSGNTESKTRISKKGNKNIRKALFFPATTACRFNPKMKQTYENITQRTAVKMKGNVAVQRKMLILIYTIYKNNIPYDENYQYDKERNDTQKNKAESIINCPA

SEQ ID NO: 258894 - protein, 370 aa, unidentified
MPRHLRYWVGLDAGHSETAVCLVDAEGHVFFEAMTETRAAPIRDIVRRFGVEPVQSITIEAGVGTQMVRDLRSFGFPVQVVDVRKSSKFLAIRRQKTDANDAKGLAELGRLAPSFGHHVFIKPVEHQDIRIMINIRRTLLKHRARTDALLQSIFRLHGASIKLLNGRGSLAAEVANQLRLLCTNGVTIRVDLDPLVRMGEDLRSHILDLDRKMRTMAASIPVCARFQTIPGVGTITALSFYSAVGDPYRFRSNRGVGPYLGLTPNLYQSGATARRGRISRYGNKLTRSHLITAATVLLRTIKTESSLRTWGLRLATKIGFLKARVAVARKLAVIMMAMWKTGASFDPDKSKPRFLQPEEAGLDPVRISGT

SEQ ID NO: 258895 - protein, 464 aa, unidentified
MRTDKKLWRNRKARKELARRLQSENPGLEVVHPHAAGIDVGNSGHYVAVRPDRDSQPVRRFECFTAELHRLADWLQSCGVKTVALQSTGVYWIPLYDILEERGFEVYLVNAQHTKNLPGRKSDVQESQWLLKLHTYGLLNNSFQPPSKIRTLRTYWRQRLQHVTGAATCVQRMQKALTQMNIQLANVISDLSGVTGQLIIRAIISGERDSWRLAELSHPRIQASRAEIAKSLEGTWRSELIFVLQQELEMYDTYQRRIAECDQQLQKHLAAFADTVTPPAKEELPAKKKKKQNKNNPHFHLADELQRISGVDLTRIDGVDVFVAQTVISEVGLDMGRWKTEAHFASWLGLCPDNRISGDKVLARGTRHVLNRAATALRLGASTLLKSQTYLGAQYRRLRSKLGAPKAITAMAHRLARLVYRMLKYGQQYVDKGAEYYERRNRQQQVEFLRKKAARLGLQIIPLE

SEQ ID NO: 258896 - protein, 426 aa, unidentified
MTNAHSIPDNAVLVAIDIAKARNDVLIEITGQKRRRRMVVQNTRAEHDRFIDLLRSFERPVVAGFEATGNYHRAVAWRLLDAGFETRLISSMALARTREAIHNGWDKNDPKDAQVILHMLRTGLSQYYQDPLAAGISDIQELSKTHEMVSKAKTETLHRILTHYLPLYFPEIERFRQNSRSEWFFAFLEQFPTPASIVALDKEAFVSAAWDVVGRKVSKARLIADIYETARESIALPIPIDSQAVVMFRMVLAEIRSLIRQRDAIEAKAEDLLGGQRDYEALKQVPGIGPINALTILAEAGDLRRFGHHRQFLKFCGLDLSTHQSGAFRGQTKLSKFGNARLRRTLWMAAQVAIRQKENSFREKYERYVAKDRNNADLKRKAFTAVTAKMARVVHAVIKSGNQYRPFFEGSAPSGRTLLCKGRGGA

SEQ ID NO: 258897 - protein, 345 aa, unidentified
MEQISRIGMDTSKHFFQLHGVNAAEKVVLRKKLRRKEMVAFFEALAPTVIGIEACGASHHWARILWSFGHEVKLIAPQLVKPYVKRGKNDTADAEALCEAMSRPTMRFVPVKTAEQQAALMMVGLRDRLIRNRTQLSNAIRGYAAEFGFTAARGMVHIDPLLDRIQADESVPVLARELFAAQAEEYAQLQAQIAEVDAKLMAWHKTDECSRRLANIPGIGPIGATLLLMKTPAPEMFRSGRQFAAWIGLTPKDHSTAGKVRLGVITRAGDEALRSVLVVGATAVIQHVRRGGRGSPWIVGLLKRKPPKLAAVALANKMARIAWKLMVTGNSYAAKSAPAALMGAA

SEQ ID NO: 258898 - protein, 403 aa, unidentified
MEHGTTHFGSVDWASEGHAACIVDAEGTALDEFEVAHSHAGLIELCHRFRRAGVQRVGIERPGGPVVDALMAADLEVVVVSTRAVKALRTRYGLAGNKADRSDAFVLADCLRTDGHRWPSLQPDQSQTVALRAAVRTRKDLVATRISTANQLRAHLQLVFPGSVGLFAAIDSPICLAFLERFPTAAQAAWLSEKRLAGWLAANAYSGHTAAGELLHRLQSAPAGLHGDAATRQAAVTLALVRVLRSVLAEIATLEAQIREQLKLHPDGFIFRSLPRSGCVRAAALLAEIGDCRARFPSPESLAALAGAVPSTRRSGKHTAVTFRWACDKKLRDAVIDFAQDSPRGNEWAAHLYHQHRARGHTHPHASRVLARAWIHVIWRCWQDRVAYDPAQHRALQALRAAA

SEQ ID NO: 258899 - protein, 353 aa, unidentified
METAYDGRQVVGMDLHRRRSVLVRMTEDGRRLATARISNSPAELRREIARAGKSPQVVLEAAYGWYWAADTLAAAGAEVHLAHPLGVKAFTYRRVKNDERDAADLADLLRMGRLPEAWIAPSQVRELRELTRYRQKLVGLRTSCKDQIHAVLAKLGIPVTSSDIFGAAGSAWLDQLRLPQPYAGKVTSLRQVAGELSAEIAMLSQVIGNLLAGDRGYQVIRQLPGIGPVLAAVIIAEIGEVTRFKNAGQLCSWAGLTPRHRESDVKVTRGHVTKQGSRILRWALIEAIQHQPAGSRPRAAKDAIIARRGKQARNIAKVAAARQLLTLVFYGLRDGQVRALARPPAITPAGPAA

SEQ ID NO: 258900 - protein, 310 aa, unidentified
MSEERFVGIDVAKAYLDVCVLPKGESWRTANDEAGIAALTERLVALAPQSVLLEATGGLQQDVVAALVDAGLAVQVLNPRQVRDFARATGRLAKTDKIDAAVLALFGQAVRPAPRMLPDRESQALKALVKRRREIQEMLTAEKIRRHTATSRVLLSIDAHIEWLKRLLKDVDDDLDKTIRSSPVWREKDDLLRSVPGIGKVVSLVLVSGLPELGRAARRQLSALVGVAPFNRDSGLMRGRRTIWGGRADVRVALYQAALVATQHNALIKAFYQRLLQAGKPKKVALVACMRKLLGILNAMLRSGERWQPA

SEQ ID NO: 258901 - protein, 348 aa, unidentified
MQVYIGIDWSEDKHDVVFMNQAGVDVARMTIPHSLEGFVQLDAARRKLGLAHDDCTVGLETAHNLIIEYLWSQAYQQVYVIPPSVVKSNRSRFRQSGARDDQSDGYLLADILRTDRGRLQPWHPDSLLTRQMRAKVSWIHHLTRASTRLSNRLRAVLLRYYPATLQVFPDLSTQIALEFIRAYPTPQAAARLTLAELVDFARQPGYSHPKKLPSCYARLKRDYPPASPETVLIYQDEATQLASLLLQMTHTKVNVLRQLHALDRQHPGYPIFSSLPGAGELLEPALLVKFGDDRQRFPTPASVQALAGTCPVTDQSGKRRVIKFRKACDREWRSLSQAWAIALVNSAK

SEQ ID NO: 258902 - protein, 406 aa, unidentified
MDVFYTLLQIKLANPIGFYVKWIRGKRQDLMEWSAPLYKRLQKSHDVSNKQNIKIKERQTVNNNNSKGKVTVLGIDLAKNSFQLHGVDEQGNRVLKKKLTRKQLVAFIAQLPPCLIGLEACGGAHHWVRVFSEFGHTVKMIAPQFVKPYVKSNKNDAVDAEAICEAVQRPSMRFVPSKSIEQQDIQSVHRVRSLLVGRRTAQANQIRGLLMEYGIIIPQGINQLRKAIPDILEDAENSLSSYFRDLLRELYEEIVHFDERIETIELKLKVISEQNEDCQRLLTIPGIGLLTATALIAAIGDISVFKSGRELAAWIGLVPRQHSTGGKPTLLGISKRGDSYLRTLLIHGGRSVVRVAHKHQDKRNQWIGEIKQRRGENISNVAVANKNARIAWALLTKKQDYCVIGA

SEQ ID NO: 258903 - protein, 379 aa, unidentified
MIATTRPEMSVSEPTLYVAFELGKKEWKLAMTSGFGVAPWLRSVVSGDWRGVDRAIAQGRARFGLAAAVPVVSCYEAGRDGFWIHRALEQRGIRNRVVDSASIEVNRRARRAKTDRLDALKLVTMLVRVCWGERRVWSEVHVPSVAAEAARQVSRERTALTQEQTRLTNQLKGWLATWGATLPRRRPSGWWTTVSDWAGAPLPVEVQARVARAEARRAVLEGQIAELDAQQQAAVTTAAPGSAVRQLVQLKGVATRSASVLLDEGLVWRAFQNRRQIGGFLGFAPTPYESGESAREQGISRAGNNRLQSISIQLAWNWVRWQPASALTVWYREQFGKGKRSCRIGIVAVARKLVIALWRYVTTGVVPAGAILKGARPVA

SEQ ID NO: 258904 - protein, 319 aa, unidentified
MEQNNYKIYIGIDVSKAKLDIQYDDSGSLLTIGNKPGDFKKLNSYLPKDKKSVLIILEATGGYETKVVKWLLSRNIPVVVVNAKRIRDYAKATGQFAKNDKLDAGIIREYGLMFGHKLHLQQKKDKLEEQIDDLTRRRKQMVSSRNKEKQHLATIQNIEGQRSIKRAIKFYSSEINKIEKKLATTLKKDKQLQAKAELLQTIKGVGEITMYTMIGELPELGHVNNKKISALAGVAPFCRDSGTMKGKRTVWGGRTQVRTALYMAALSASKYNPAIKLFYDRLITKGKCKKLALVACMRKLVIIMNTMVKNNEPWHAEIV

SEQ ID NO: 258905 - protein, 374 aa, unidentified
MTMMQQRRIRYLGLDVHKASIAVAIADEAGPPTSYGSIANDPSAIRTLMTRLGGSEVELRVAYEAGPTGYALHRQLAKMAIECMVVAPSLIPKRAGDKVKTDRRDALKLARLLRSGDLTPVWVPDEAHEALRNLVRARADAKADQLRAKHRLSKFLLRQGCWPPIGVRNWSQRYFQWLRQLQFEHLPDRVVFADYLAEVTAAGERIKRLEAALLQCAQSSTQVAVIRALQAFRGIGFLSAVTLVAEAGDLRRFATAPQLMAYVGLVPSESSSGGKQQRGPITKTGNSLLRHVLGEAAHHARHAPRVAGTLKQRQANLPREIVDLAWHAQLRLHARYRHLSLRIGSRKALTAIARELAGFIWAAGHLLEEVPAAA

SEQ ID NO: 258906 - protein, 355 aa, unidentified
MSVYVGIDVHRKRSQVAVINEGGEVLANRNVPNGTQPVLGVIGGLPPGTPVAFEAAFGWGWLVELLEDYGFAPHLVHPLQCKAIASARLKNDKVDAAILAQLLRADLLPEAWIAPPPVRQLRAMLRHRAQLVRLRTLLRNRIHAVLADHGHDRPAGCWSGPGRAWLAALELPAVSREVIDDDVALIDALQVPIDRLDWEIHQRARSEPAVKVLTQLPGVGPFTALVLLAEIGDISRFGSARKLASWAGLTPTVRGSDRTVRHGHISKQGSAWLRWILCEAAQTAKRHPDFAASYQAMARRRGKKIATTAIARKLLTRAYHLLTAASGGEPASREGRQAPGELAFSHEPASPRSMT

SEQ ID NO: 258907 - protein, 344 aa, unidentified
MDHFGGLDVSVKQTSICIVDDTGRIVKEVKVASEPAALLKVLGNSTYRFKRIGLEAGPLSQWLFSALAEAELPVICVETRHMQAVLKAQINKTDRNDARGIAQMMRAGLYRPVHVKTLRSQKLRMLLTHRKLLQSKAIAIENDLRGTLRNFGLKVGMVGMVRFEARIQELVKNQPDLAVLVEPLLIVRRALREQIVILHRRLLAIVRDDEVCRRLMTTPGVGPVVALTYRATVDVPARFRKSKSVGAVFGLTSSRYQSGEIDWNGKISRCGDEMMRVMLYEAAQSMMHSRKWSWLKAWAMQIARRRGMKKAIVALARRLAVILHRIWVDGTEFRWTREQAAAEA

SEQ ID NO: 258908 - protein, 337 aa, unidentified
MMYSGIDLHSNNSVIAIIDETDRVVAQKRLPNDATKIVGFLARWQDELAGVVVESTYNWYWLIDGLQDAGLHVHLANTAAIKQYDGLKHSGDETDAQHLAHLLRLGILPTGTILPREHRAVRDLARKRMQLVRCCTTHVLAVENIMARQLGGRMTSNQIKRLTDDAIDDMPLAADVGLAIKANVAVIATLQSQIELLEKRLQECVKPQPQYGLLTSVPGIGQALATVIHLETGPIDRFADVGNFASYARCVDSVHTSNRKKKGEGNVKNGNKYLAWAFVEAANFAVRFCPEAKRFHERKKAKTNNNVATKALAHKLARACYHILKEGKPFDATRCFA

SEQ ID NO: 258909 - protein, 407 aa, unidentified
MEVICPRCAGLDVHKQTVVACVRIAGESAPIQEVRTFATTTSGLLALADWLESFDVQHVAMEATGVYWKPVWHVLEGHFELILANAAHVKNVPGRKTDVNDAMWLADLLAHGLIRASFVPPMAVQELRTLTRTRKQFVRERAAHVQRIDKLLEDANLKLGVVLSDILGKSGRAVLQALIDGHTDPQRLASCVTTRVKASRAELLEALRGHASAHHRFMLKLYLSHIDALDRAIADIEKEVGLGLEPFRQAAKLLSTMPGMSAVASNVVVAEIGIDMSRFATPGHLLSWACMCPRNDESAGKRRSTRLRRGGKWLKTTMVQAAWSAIKVKGSYLQAQFHRIRARRGAKKAIIAVAASMLTAAWHMLRDGTEWQDLGAAHFDRADAHKTATRLMRRLEHLGYAVQLTPV

SEQ ID NO: 258910 - protein, 385 aa, unidentified
MTQLENMSTPSAALDQNSTLICVVEMSLKGWLVAGLVPGIKRQPLKKLGTDESALHRVLLCWKAEAERAGRQIARIALAFEAGRDGFWLARWLRARGIEAWVIHPTSIAVSRDHRRPKTDRLDTQMLMRAFLGWLRGEPGHCRMAAIPTLEEEDAKRPTRERETLVAERTRIINRTKSALIRLGIRGFNPGLREARERLASLRTPEGVPIPPNTLAEIHRDLARLAVLQTQIAEIAAARLERLKHATDSAHTMIRLLARVIGTGIETAEMLVTEILSRNLRDRRAVARYAGLTGSPDESGSKRHEKGLAKTGNARVRHGMIQLAWRFLLFQKDSALARWYNARTENAKRSRKTMIVALARKLLIALWRFVTTGELPEGVALHPAM

SEQ ID NO: 258911 - protein, 488 aa, unidentified
MQHGKVSMKTQQQEKSQPANLARGCKWHEMNRKQRREIMRKLQSRDLSMEVIHPDAAGIDIGNESHYVAVPQKRDSQPVRRFGCTTAQLRAMADWLKQCGIRTVAMQSTGVYWIAVFDILEQAGLEVYLVNARDTKNLPGRKSDVQESQWLMKLHTYGLLRNSFRPPQEIRTLRTYWRQRNDLIQGAARHIHRMQKALTQMNIQLANVLSDISGKSGQAIIKAILAGERDPHELAALCDSRVEASEEEVARSLEGNWQVDLLFVLQQEQEGFEFCQKQMAECDRQLQAYLEHRPDRSQGATLPEEKRKGRLKKKKGNSPRFDLRAELFRMVGTDLTLIDSIDVMTAMTILSEAGWDMSKWKSENHFVSWLRLCPDNRISGERIIGKGRLPTNNRVTVALKIAASTLRSSKTYLGAQFRRLRTKLGAPVAIKAMAAKLARLVYRMLRYGMQYSDKGFEFYEAQHRKLQINRLKWKASQLGFQIVEATAA

SEQ ID NO: 258912 - protein, 394 aa, unidentified
MKLVGIDIGKNSHHFCVMDKETGELNVTPSSFSNNKEGFDFLINSLKPYSKKSILLGMEDTGHYHVALLKFLLSNGYTVALINPKTTDLTRKMEGGITKNDKLDTITICDVLDTPERKKQYRITKVDRFDLYEQRQLTRHHHNLKEELNVYCNRLQKSIDLVFPEFNTLFSSKYSIVYMNLLKTFGSAEAIASTDIRTIRKCFEIKGRGNRISLTPEKLKECAKNSIGISSEVETIQIKHLVSQITLIKEQIAEIDKKIEEFSITNNSPILSIPGISHFSGTSILAELGDIGNYSKPSQIIKFAGVAPYHYESSQYNAQHTGITKKGSKYLRKTLYQIILTVINNNPVFKKYYLLKISQGKGHRCAQGHCIRKLLRIIYHLLETGQSFDPALLR

SEQ ID NO: 258913 - protein, 412 aa, unidentified
MEGETVIAGVDTHKDVHVLCLLDGLGRKIWSGSFGADPEGYDRLAEAIGDPGSCMVVGVEGTASYGAGLTRRLVELGYNVVEVLRPKRDKVRPGEGKSDPLDAERAARKAASGKDCSVPKSQDGWVEAVRQLYVARRLAVATSTSCVACAKSMLTTAPSALRERFRGRERPKDLMPLLARGRKAGDALEESVLASLRSVAAVWKEARSQVESLDERIRALLEANAPALLGVEGCGTTTAAALVVAAGDNPGRLKGEAAFSMMCGASPIPASSGKTDRHRLNRGGNRQANWALYEIAIKRMAYDERTRRYVARRTSEGKSRREAVRCLKRYIAREVYHVLMDPNPDGAAPEGPELAKMRKAMRVTQKKAAAELGLSAATLGHLERGKRRSTKLERRYYELLCELERALPQTAS

SEQ ID NO: 258914 - protein, 332 aa, unidentified
MQVITTIGLDIAKSVFQVHGIDAGGQVVIRRQLKRRYVLAFFEKLSPCLVGIEACASSHYWSREIKALGHTVRLMPPAYVRPYVKRQKNDMADAEAICEAVTRANMRFVETKTPEQQSGLMLHRTRHLFIRQQTAVINAIRAHLGEFGIVAPVGRNGVEELLDVVADPSDKRVPEIVRACLAALGAQLRRLKEQILEFDRMIRAWHRSSEMSLRLDDCPGIGPVLATALAATVADPWIGIVPKQHSSGGKNRLGGISKQGDRYLRGLFVAGALAVIRYAKIHGTKHRPWLRALLARRPTKVAAIALANKIARMAWAMMAKGERYKEPVALAA

SEQ ID NO: 258915 - protein, 472 aa, unidentified
MGYRSTSKRNKGRREESKRYTVGELETMPLLYPDLAGIDIGSREHYVSVPGNRSERPVRTFGCTTPDLLEMVNWLKVCGITDVVMESTGVYWVPVATVLEEAGFEVALVDARESHRLSARKTDVHDCQWIRQLYACGLLRNAFRPRSQILLLRSYWRQRHELVSMCATSLHHMQKALELMNVQLHKAISDISGVTGMRILRAIVAGQRDPEGFARMAHPNCKSSSTEFVHALTGHYAAEQVFALAQALRRYDLYQEQIAELDGELRRCLGDLPSGENWEPEAPTAGPKTLDGKRRKNQSHFDLAGEVHRIAGVDLTRIEGIDALTAFTVITEQGIDMSAFPTEKHFASHLGLCPNNQITGGRVRKKRTRRVHSRAAHALRIAAQSLARSKTALGAFYRRMRARHGAAKANVATAHKLAKIFYRMLKHGEQYVARGLEDYEKRYRERLLKNLKRQAKILGCEVLVLQTGEVLS

SEQ ID NO: 258916 - protein, 344 aa, unidentified
MTYYTGIDVSLRSVSICVVDDKGEVCLEAKVAAEIDAIVDRLRRFSSEVKSVGFEAGTLTQYLTYGLQAAGFEVICLEARQVSVTLAAMRNKTDRNDARGLAQILRTGWYSRVHVKSLLSHQVRALLASRKAILKKCVDLENELRGLLKVFGIRLPSRVGHGSFDAELRETVSSDEMLACALVPLLDARTVLYKTYLKLDNAVKGLVRVDPICRRLMSIPGVGPVTALTFKAAVDDPNRFKSSRTVAAHFGLTPRRFQSGEVDNPGHISRAGDADVRSVLYVAAHSLLTRNAQWSTLKAWGVRLAKTRGHRRAVIAVARKLAVILHRIWIDGSEFRWGAAETAA

SEQ ID NO: 258917 - protein, 370 aa, unidentified
MTFLGIDLHTNCFTCCYLDSKNGDKRIQTFKLDSSGLQLFYNSLNRRTHVLVEATINTFAFVELFQNLVASVIIANTYKLKIISVTDKKTDKVDAEKLARVLKMQILSGELQVSPVLIPPKLVKDLRALFSTYILIRKEITATKNRIHSLLKQNLFPYTKEYIFGKKTRPVIKAISPDPVLTTQLYLLFDLLEGLEKKAEEFTDQILIAAAPFIREIDILTSMKGISVFSAAAVMSDIVSVDRFPNAKHFTSYLRSAPRVESSNDKVVIKSTNKAGRKMSIVLLSQSLNHFRDANPKLSDWHDRLATYKKKGIVRMGLCRRVFAEMYQMLKKKEYHYYRDSKNHEKKMTEYRAFLASHSIYADQIIMKAS

SEQ ID NO: 258918 - protein, 354 aa, unidentified
MSQKLNTAIAVIGIDIGKNSFHVVGLDDRGAIALRQKWSRGQVETRLANIPPCLIGMEACVGAHHLSRRLRMLGHDAKLMPAKYVRPYSKGQKNDFRDAEAIAEAVQRPTMKFVATKTPEQLDLQALHRVRERLVSQRTGIINQIRAFLLDRGVAVRQGLRFLRAELPQILATRTDVLSARMLRAIEELASDWRRLDERIEGLSTEIEALARQDMACQRLMTVPGIGPIISSAMVAAIGNGAVFSKGRDFGAWLGLVPRQISTGDRTILGKISRRGNRYLRVLFVQAAWVVLIRPKTWERHGLKPWIEAAKKRLHHNVLAIALANKLARIAWAVLSKEREFEYARTDEMTSPSA

SEQ ID NO: 258919 - protein, 429 aa, unidentified
MNYNTQNAKIASITEKTLIVGIDVGSETHYARAFDWRNYEYSKKPFAFNNDEAGFAAFKAWMEDMVEKYGKEVVIPGMEPTGHYWLNLGAYLQEQGMKPVHVNPHHVKKSKELDDNNPNKNDRKDPKTIAGLVNEGRFSYPYIPTGIYAEIRNLSNLRIQTQEEITRIKTRIARWFSIYFPEMKDVYKKPDAVSGMMVIKKAPLPCDIKKLGVDGVNQVWRDAKLKGAGIKRARTLVSAAEHSIGSTEAPGSARIEIRNLLNDYEVYKNRMDDLMQEIEAKLSKIPYMDKLMEINGIGLKTVSCFIAEVGDIHRFDNPKQLQKLAGYAIVADSSGKHNGESRISHRGRKRLRYALYEAAISVIGKNKEFREIHDYYRTRKQNPLKKMQSVIAIACKLIRIFYTILTKGVDYNGQKMLSDIVRTEPIMAA

SEQ ID NO: 258920 - protein, 315 aa, unidentified
MSENKVEVFVGIDVSKSTLEVRIEPAGESFQVANDDAGIGALCTRLSKLAPTLIVMEATGGLETRAAGELAARGLCLAVVNPRQVRDFAKASGQLAKTDRIDTQVLCGFGRAIRPAVRPMKEALTQELDDLVTRRRQLVEMRVQETLRLQGASKVQAKSVKAHIAWLEKRIKSIETDLGTRLRSSQAWRVKDDLLLSVPGVGEITSRSMLSRCPEIGRLSRREIAKLVRIAPLNNDSGKYRGQRHIWGGRADVRSVLYMATVSAIRCNPVIKAFAQRLSSAGKAPKVVIVACMRKLLTIMNAMIKNNTPWSFKNT

SEQ ID NO: 258921 - protein, 405 aa, unidentified
MFFAGIDWGSQSHQACVLSQDGSVLGETVVPHSGQGLGQLLDWMVTCAGGDAGRLAVAIEIPHGPVVDSLLDRGVQVFSINPKQLDRFRDRFSPAGAKDDRRDARVLADAVRTDPNCLRALHPVDPEIVQLREWSRIADELTAQRTGLSNRLRDQLWRYYPQFLALKADLYAPWALALWALVPTPAKAGRVRETPVAKVLKKHRIRRLTAQEVLRLLRAKPVTVAPGVVEAATAHIRLLAQQLAVINEQLSAAKRAMADIIDKLSASDEPPAPTPPDAVILRSLPGVGPQVVATLLSEASALLAARDYRALRCLCGVAPVTRQSGRSRRVVRRRACQRRLVNTVYHWSRVAIQHDPVSRAKYDALRARGHSHGRALRSVADRPLAVACAMLRTGTLFDPDHAIAG

SEQ ID NO: 258922 - protein, 339 aa, unidentified
MGNVTLLGIDLAKNVFQLHGVDDKGKAMLRKRLTRTKLVETIANIPKCTIVMEACGGANYWCRKFSSFGHTPKLISPQFVKPFVKGNKNDRNDSEAICEAASRPSMRFVSPKSIEQEDIQATHRIRNRLVQERTALVNQIRGLLAEYGVIIAQGINKVRKELPEILEDGENELSHRSRKLFAGLYEELLEKDKLIKSYDDEINEIYKSNEMCQRIAKIEGVGPITATAIVSAIGDPKVFKNGRHFSAFLGLVPRQSSSGNKERLLGISKRGDTYLRGLLIHGGRSVVRYIGNKEDSRSKWVKDLKDRRGANRTAVAVANKNARIIWAVLAKNEHYRKAV

SEQ ID NO: 258923 - protein, 346 aa, unidentified
MAAFAALDVSKKSTSIHIVDEKGLCLWRGKTLTNPAALAEALSPFSDDLTLVGLETGSWTTWLWHELTERGFPMVCMDARQAHAALSVTINKTDANDAQGLAHLLRTGLFREVRVKGWEDVQKRTLLRARSTMLRCVLDLANAIRGALRTFGISLPAGTGNGGAKTFERRVVACLTARADLAIIIGPLLEAWRAGRTQVARHERAIRAIVRSDPRCQLMMTVPGVGYLTALGFVGAVGDPETFRSGRTAAAWIGLTPRRYQSGTINQQGRISRQGDKLLRAYLYEAAAHILTRSSKDSALRHWGLKLRDRIGFKRANVAVARKLAVVLHAMWRSGRPFEAEGCATG

SEQ ID NO: 258924 - protein, 351 aa, unidentified
MRKIAYLAMDVHAKHCVLGDMDFKGNFKGTQTFPTSEQNIIKALEVIKAKNKYLTLEEGNLAYWAAQVAAPYVTEVIPCDPKENALIYRGPQKNDKVDTRKLCRLLRLGELKRVYHPETDERAIFKAAVQHYIDLRNQQIALKQKIKAMYRHWGVINVAGEAVYSTAKRDDYLRQIKHLDIKNQISRLYFVMDQTDSMQESALKAMKQLGRKYPEIKQFKKIPGIGDILAHFFDAFIQTPHRFANKHRLWRYCRLGVTDRTSDGKPLGFKRLDRSGVSELKSLSYRAWMSALRGDNEVRRFYTTSLQRTFNRVHARLNTQRKIIATMYGMWKRGEPYNPKLFLDSPQSGAV

SEQ ID NO: 258925 - protein, 297 aa, unidentified
MSVYVGIDVHRKRSQVAVVTEDGTVQLNKNTVNGTAPILRLIGDLPSGTPVAFEAAFGWSWLAQLLEDYGFEAHMVHPLRCKAIASARLKNDKVDAATLAQLLRADLLPEAWIAPPAVRQLRALLRHRTGLVRLRTQLQNRIHAVVADFGYDRSGSYLSGPGRGWLAELELPAVSREIITDCLTFIDALAPEIDRIDGELRQHAKTDPRVKILTTLPGVGQFTALVMLAEIGDISRFPSSRKLASWAGLTPTVRGSDRTVRHGHISKMVCAGGTVPLRRPGGVRWRWLEDWICTEVS

SEQ ID NO: 258926 - protein, 389 aa, unidentified
MLLDHPSDEPTAIRTHIAAIFVSLELSRSTWLVTSLSPGKGERMSKHGVTAGNVAELLTLFAELRRKAEVRTGQSYPIITIQEAGLDGFWLHRVLQQNGIESHVVDPASIAMPRRRRRAKTDRIDGETLLRTCLAYKRGEPRVCAIVIAPSPEEEDRRRLCRERRTLIGERITHVNRIKGLLFAQGICGYGPLRRDRRARLEALRTGDGRELPSHLKAQIGRELDRIELLLDQIKAVEAAQDALLATARKPASEQAVPDPVTMLLALRGVGANFAAVLWSEAFYRQFANRRQVAAYAGLAATPWQSGGIRHEQGVSKAGNPRLRTTMIQLAWLWIRHQPQSALTRWFKARSQHGRKRAIVALARKLLVALWKYVTQGVVIEGAAMKPAA

SEQ ID NO: 258927 - protein, 315 aa, unidentified
MKKVSTAAAKASKRISQQKLTVGLDLGDRSSWYCVLDEAGGVLLEQRVSTSPEAVREVFSGMAGSRIALETGTHSPWVSRLLSAVGHEVIVAHARNVRLIGESRKKDDRLDAQTLARLARIDPQLLCPVKHRSAKAQADLTVIRARAGLVRARTALVNTARGLAKSYGERLRGCNPRNMNPKKSEELSPELQTALQPLLAGLESLSEQIREYNERIEELAQESYPQVALLKQVKGVGTLIGLTFLLTLEDPHRFRKSRDVGCYLGLQPGRRNSGQSEPQMHISKEGDPYLRTLLVQGRSTFWGHSVSTAICGAGG

SEQ ID NO: 258928 - protein, 423 aa, unidentified
MRHKQSAAGMQVLYARVCGLDVHKKSVMACLRVLDPKSGRVDITVQGFGTMSEDLLELRHWLKDAQVTHVAMESTGVYWQPVYNLLEDHFESWVVNAQHIKKVAGRKTDVSDAEWIAQLLQCGLLRPSLVPDRAQRELRDLSRQQTKLVQQRNAVNNRIQKVLESANIKLGSVASDVLGVSGRKMIEALISGEKDPSVLAELAQKKLRDKIPQLRRALAGELSDHHRFLLGELLVQHDFINQRIQVMAQRIDEVAPRPFVAAVQKLDAIGGVGERGAKALLAETGTDMTRFPTHKHFASWAGQCPGNHESAGKRKGGKTPAANRHLDAVLTEMAHAAVRKKNSYFKAQYHRLAGRRGKKRAIGAVKHSLLVTIYYILRDDKPFQDLGPNHFNSLNPQQRIRFHVRKLQELGQTVELSPIANAA

SEQ ID NO: 258929 - protein, 343 aa, unidentified
MKQKYVIGIDVSKSKLDCTVISSGLKIQSETVITNNEKSIRSYLKEMLKALNIKKDDILVCCENTGIYNRPLARVCIKLAINLWVEHALRIKRASTDMRGKSDRKDALRIAEYAVRYNDRIIVYTEPLDKVKQMHVLTKCRETLLSQKTAINNQLREAKSHDSFEYDLLNRSYKKTLKILEASIKEIEEKIEQLTNENYEIKRSKELLTSIPGIGNICAINLIVITNNFQLFRNAKHLACYVGVVPFKNESGGIIKKERVSKMANTKIKKLLHMAAMATIRSDHELKAYFHRKVSQGKNKMSVLNAVKNKLIHRIVAVINRNEYFISKEELTVNQEKNSCILT

SEQ ID NO: 258930 - protein, 365 aa, unidentified
MKKISTAVTSGTGNFRDRKLTIGLDLGDRFSHSCILNEVGEVMGERKVSTTRKGIEEVFRGMPRSRVALETGTHSPWVSRQLDQLGHEVIVAHARNVRLIGDSSRKDDRFDARTLARLARIDPGLLSPVRHRSAQAQLHLTIIRARAGLVGARTALVNAARGLTKSYGERLRKCSTEKIREAAAALSQELRDVLDPLLREIESLNERITEYDRRIEQMAKEVYPQVALLKQVKGVGTLIALTYILTVDDPQRFRRSRDVGCFVGLRPGRRNSGHSQPQLHITKEGDAYLRTLLVQGAHYILGPFGEDSDLRRWGLRLAERGGKNAKKRAVIAVARKLAVLLHRLWVSGEVYEPLRNHRQIVGAVA

SEQ ID NO: 258931 - protein, 563 aa, unidentified
MKKYNIGIDLAITGAHRASIYDVESRCMLDKSFSFENSFTGYEKLLNRIYKVVSGNDVTLSFVMEPTSLAWMPISCYLISRGHIVYRVSTQKSFDFRKFLAKYIKSDRIDSQALARMLDVDSLTPDKLYLPPAHLGALSLKSKHMAKIIKEASVHKLRIQSIFTMINPGVLKAFKSDKFSKAARVFYRNFLIPANIVSSTKEIFITKFQELAGDKVDAKTLEFIYNSAQSICQIYSKMNESGKLPFDFAAVEEEILTELKILECLEEEITRLQNEINVLYKEVDPYGILTSIRGIGEKIAPAVFGIVGDVARFPNIRSFKCFFGFISRKKQTSNKEIKGLRINKAAQKLLKSYLYLAAETARQWDPEFCAFYERLVNKGHHHFSAIAACANKMAGRIYSILKRMKQFQAELSDPTLTEDDKKQKAEKLIYQIRNYEGKVISSKEARQLILDKKAGTDLTHNKSVKPSEEEQNNRESSQPVSQINGNPRQSSARTDSLKRSGKTLPAKKLLTETISTLLGEDCKVATGKDLEKVKLQENFAKLKKVIEANNAVDKLCKTGGKNK

SEQ ID NO: 258932 - protein, 399 aa, unidentified
MFVGWDWASTAHDVTVIDSAGELVHRMAIPHTEDGIARAVAKLADYGDPGELPVAIEATRGLVVDRLLGVGHPVIAVHPNAFHAVRPRWGAARAKNDPGDSFKLADYARTDIHRLPMLVPTLPETLELQALTRQRDCQLALRIAAVSQLAALLDQYWPGGKTIFAQLHSPIALDFLDRYPTPRAAASLTPARIEAFCHRRGYSGRRSGAELLDRLRSAPISASRLGEPVVAQMIRGQVAVVRALQAGIDALDIVIAEKVTAHPYAGLLAVLPRIGTLNLAQIIGEVGPILERATSFDQLAAETGLAPVTRSSGKTHTVAFRYATNRRARQALHTWLDNSRRSSDWAAQRYAAARARGQRHPHALRTIGRAWLRIIWACWRSKTAYDPARDERAKQPTAA

SEQ ID NO: 258933 - protein, 398 aa, unidentified
MYLNIGIDVAKNIHEACLVNDSGEQIGKFMKLRNSRKSMDKFREHIKSVSEELKAKPRIGLEATGIYWYSLYSEISRDYEVSICNPAQIRGFASVNIRGSKTDKIDAKTIANMLRFGDAPKTDYQNRQRLELREYARFYVKLSKKKANLKKRFRRNLHLVFPDYDQVFKNVFTKTSKEILAQSPTPDDILEMGEAKLLELMKKASNNHIDHGKARELIEKAEDTIPSEILKESALFELQILLDIIENIEKHILALESKMLAIWGEVKSNHYIQTITGISEIRAAIIWAEIGDIENFKHPDQIVAFAGLDPKVKKSGNKEVIGGPTKRGSSTLRWALGWAVQESKNVNPVLASYFKKKITEGKHYNTARCAAAKKLVRIIWSVEKNKKSFQIPGNLQSS

SEQ ID NO: 258934 - protein, 326 aa, unidentified
MKKGYFVGIDISKDKIDICFLSDNSNLKPKFEAIPNKSEVIKAYFKSFVKDNLTVVFEYTNNYHISLQQVLSELKFKYSVIDPYKVSHFLKFLSFDKSDLKDSFGLATYAKTFCRELNPATYNKEYNLIKSYNAAALLLSKIQTQIKNFKKSQELVSDLNLDDALKALLAEVQKLQSKIKLLAYELLKSFIPNVDEIIKNNKGFGVDLALNLFPILHFNRDKSAKELISFLGLSPRIYESGSSVKKRGCINKKGSSTLRRSLFLTALSSVRFNEVFKQRYERLINQGKKAKVALVAVMCAIVRYLKTKFAFDDGYINGNLSIVKSS

SEQ ID NO: 258935 - protein, 451 aa, unidentified
MKPKDTPDSRSEVWPMVCPDAAGLDIGASEIWACVPADRATPAVRSFTTFTPDLQALADWLSACRVRTVAMESTGVYWVPVFEVLEAHGLEVDLVNARHIKNVPGRKSDVQDCQWIQRLHSYGFLRASFRPEAEMVVLRAYLRHRAMLIEHRAAHIQHMQKALPLMNVQLPRVLSDITGVTGMQIIRAIVAGERNPQVLATFRNGRCQRSEAEIAKALTGNYRAEPVFALKQALALDDAYSGQLQECDEEIERQYAATRLRFDPEDPDEPLGPDTKTNTHSKNAPDFDVRRRLFQLTGVDLTAVDGLDESAAQLLVSEIGTDMSKWPTEKHFCSWLGLAPHNDITGGRVVRSHTLPVHNRAAQVLRMAAQSVGRGKSALGAFYRRLRARQGPEQATTATAHKIARIVYYMLKHRQPYRTLSAADYDEQQHHRELKSLQRRAAKLGLTLAPA

SEQ ID NO: 258936 - protein, 347 aa, unidentified
MKVTTIAIDLAKNVFQVLGMDCHAKQVFNKRLNRTQLTEFMLQQLNCDVVFEACYSSHYWGRKLLAMGHNVKLIPAQHVTPFVRGSKNDNNDTMAIFEASFRPNIRFVPVKTEEQQEILMLHRVRERLVKEKTACTNQIRGILVDFGICFAQGYKAFEVAMWDIINDASQRPIIKLMANDFLDEYQSVNTRLDRINTLIKKLVERDPNGKILLSIPGIGPIIASAFVASIGRGQAFNTAKELGVWLGLTPRQFASGHRSVNGSITKRGNGYLRKQLIHGARTVVSHASKKQDDLNLWITQLRSRKSICSTVVATAHRLARLIWILLNKQVPYAPQYAANQGVNHGTC

SEQ ID NO: 258937 - protein, 419 aa, unidentified
MNQPTAQPGLFIGIDWADQKHDIHAIDREGKGFHQQLEHSAESIDAWVAEMLKLAGGQPIAIMLEQSRGALIYALMFRENVLLYPVNPKQLARYRDSYPGGGKSDPTDAMYLARMLLERITTLKAWQPDDENTRLIANLSQQRRKLVDGQTKLRLQLTALLKSCFPVVLELFGKQHQLPLLLSVLCRWSDPRQLRRADRRLIRRVLSEHSVRNEQQQKEILERIRAAQLLTRDDAQITPSAMAVKLLAHQIQQSLKAIEEFDAAIDEAMKQHPDAHLFTNLRGAGSALAPRLLCAFGSQRDRWEDADSLASFSGIAPVTKQSGKQRHVHRRFACPKYLRQTFHEFADCARRFCPWSKARYRMLRDRGMKHHAALRKIARSWIRILFRVWKTRVPFDCDRYIANLKQRCPDIIPYLAQEN

SEQ ID NO: 258938 - protein, 338 aa, unidentified
MSIVMGLDQHRGQITGEWIDTDTGEVARTRVVPADRAAVRKWLSRFRGKQLAVALEATTGWRFVVEELRRVGAEVHLAEPAETAGLRGPKKRAKGDRADARHLRELLMVGRLPESWVPPDHILDLRARVRLRHTLSEQRSEWQQRIQATLYHHGCPQRRQLMTGDGREWLVSQPLPAAAREQVTVALAMIDGIEAQIAPLDKDLRAYAHRQAGCRALMAHYGIGPLVAVTILAELGDCTRFSSSRLAVRYAGMDITVHQSDQHRAPGHLSRQGPPALRWALFEAAQSACRRGSPDLDYYREAAARLGHNRACLSVARKLLKRSYHTLRELGEEALAPA

SEQ ID NO: 258939 - protein, 420 aa, unidentified
MDKYDDNRLEEFRQLKGEIRGSTQHLVIGMDIAKERHHAFFGTPAGKVLLHRLVFDNTKEGFEKLCFQADILKTQHGLAYVVFGMEPSSDYHKPLGEYLIEQGHKVVLVAGTAVKKNRELLDGRWDKNDTKDAANVADLITQGKCLFYEFPSLSLRELRSLLSLKRRLKKLEQGYKVRIRNHLIAQYFPEMDAYFNYAEGPDLVRCLDPKRLAGLQFQELVRMVHPGNEKQEERLGEIHAKAVSSIGCETHPSVAFEASTLLDGLKGLHVMIRETDRKIAEVCRAFPEYACLLSIPGFGPDVSAKVLGALGNPHRFENHRQVLKMAGLDLSADRSGKKQDVVPVISKKGKADLRYGLYQAALVASTGNKQFMTYFANKLKGREREKGIGTKMRVKLSAKMLVIAWTLMKKKEMFDPGCIE

SEQ ID NO: 258940 - protein, 354 aa, unidentified
MKRTTKYVALDVHQATTSASVREEGGRVIARTILPTAAPALVEFFQGMRGAIHVAFEEGTQAQWLHDVLAPLVDRVIVADRRGTAQQGNKGDQTDADQLSELLRRGALRAVYHSRSHRETIRELARAYTNLVEDSTRVMLRLKALFRARGIRTPGKHVYHPSHRAEWLARLSGQGVHFRATALYAELEVLRELRPKAKAALLTEARRDPAWHVLRTIPFLGPVRVALLLATMQTPWRFRTKRNLWAYSGLAVVSRSSADYLLVQGRPVRRGRAPMTRGLNRNHNRVLKNVFKSAATAATARPGALQAFYRGMVARGMREDLARVTLTRKLAALTLRLWKTGDHYDPAQLTVQAQ

SEQ ID NO: 258941 - protein, 410 aa, unidentified
MNVIYDRVCGLDVHRDTVAACVRVPGAGRERQAVITTFGTKTADLLALRDWLEQWQVSHVAMESTGEYWKPVYWILEEGFQVLLVNAAHIKNVPGRKTDAQDGSWIAQLLECGLLRGSFVPPRPIREIRDLTRYRKRLIQQRTEEVLRLHGVLQRAGIKLSSVARNIMGVSGRAMLDALVEGKQDAAAMSELARGALRGKIPLLQKALQGNFTAHHGLMVSHMLGHIDYLEETIAALSKEVDRKLEPFRTERELLKTIPGFQDRTAEMVIGEIGVNMDQFPSSGHLASLMGVCPGNNRSAGKRKPEKIRRGGRWLKPALQEAAWAAVKLNDSYLAARYHRLVPHKGKKKAIIAVCHSMLIAAYYVLRNRVPYQDLGVDFFIRRNQQAIQRRCLRQLSELGYEVQLNPKAA

SEQ ID NO: 258942 - protein, 352 aa, unidentified
MYYVGLDLHKKYITGCALDSQGAVVATERRLPPVLATVLSWLAPVGQPAAVALEATLYWAWLHDRLTAAGYQVAVAHPQQVKLICHARCKTDPVDARKLADLLRTDLLPAIWIPDAETRARRTLLRGRAWVVRTRTRVKARIQAYLAAENERVPVSDLFSRGGRAWLATVALPPEVRSQVDRLLALVEQLDVQIAGQDRTVRALARATPEAERLQTIPGIGPFGALLLLAEIGTITRFGSSHELAAYAGLVPSTRSSGGKTAHGSVGPAGSAWLKWLFVEAVQTLKRQPGPVRSQYERLLRAKGKPKATVAAARKLCCYVYWMMKEGRSYDEWLRQRHQREVRPIQAVASVA

SEQ ID NO: 258943 - protein, 386 aa, unidentified
MQKLNDLSRSLAPLEPDGTLIAVIEMSQSSWLVAGIVPGVERQPLKKLAADEIALLKLLHRWREEAEKAGRRIERTAVAFEAGRDGFWLARWLRTRSIEAHVIHASSVAVSREHRRAKTDRLDTELLKRAFLGWLRGERDHCKMVAIPTSKDEDAKRPSRERESLVGEQTRIVNRMKATLIRLGIRGFNPKLKKAAGRLEDLRTPEDEPIPPNTMAELRRDMDRRRLVSDQIRQIEEARLDRLKQAPDDGPHAMLRLLARVIGVGIETADMLVQEVLARNMRDRRAIARYAGLTGSPDESGTKHREKGLARSGNARVRRGMIQLAWRFLMFQRNSALAQWFRARTENARGTRKLMIVALARKLLIALWRLVREGVVPDGVVLRPTQ

SEQ ID NO: 258944 - protein, 324 aa, unidentified
MTYIGIDVSKDTLEVAFPSKEGYRNQTFGNTPKGIRSLIQKLSRDEHHCVMEATGNYSALLIYMLSRAGIVASMENPLKVKNFSRVMLSVTKTDKADARLLALYGEKMNPTPYRLKSDSLLILRQKRTVIRQLRKQLTASRNLLHSLEVLPMVDSASKSAILKVIKSLEKLVGKLEGELTHLAKSEYDRQMKALTSIKGIGASLAAALIISTGGFTYFDNAKQISRFLGLCPTYQQSGTSVNVKGHINRNGDSSLRAQLYVASWSASQHNAACRKCYLRLRERGKSGKVAMIAVANKLIRQAFAVVTQNQLYIDGFESNLIHKS

SEQ ID NO: 258945 - protein, 396 aa, unidentified
MRDVVRGIQAFAVQDRRRLEAAECFIDEMDSSCDSVGIDVPESLLFRAKEEPIMSNDTRIGVDVAKAVFEIAISDRPGHIVRRERAQRAQFLPFMAQQPRATVVMEACGSAHHWGRKLQDLGHRVILLPPHHVRPYICRNKTDRTDAKGILEASRNEDIRPVPVKTVDQHVLTSLHRLRSGWMTERTARLNALRGLLRELGIFIPMGAREVVPMVWSLIEDADSELPEALRPIFAEACREIREIEARVKQVERQLEATAEQLPAVGYLRTVPGIGLLIATALVAFIGDIRRFPSGRHFASYLGLTPREYSSGLKRNLGRISKRGDGYLRTLLIHGARSVLIHARQQQPDRLREWANNLRKTHVHNKAAVAVANKLARIVWAVWSRQQPFVLIAKAA

SEQ ID NO: 258946 - protein, 497 aa, unidentified
MPNKSTIYSRCNPQLLKLFERAGHPAKVLCVALDYAKAQHTALICNGVGDLLKPSFAIENTAPGAAQLLREVRACAQSRKVRGEHVFFGGEDYPSFAENFVRQLRQEQFLVVRVNAWEAKQQRDNFQASSDALDLLGIARCCLHRRGQPVRDLPQAYPNLRIATRDRDKLVRMRTAVSNRIHSYVDRLFPGFLSAAKSGLEPFGRASLELMEDRFSPAQLRRRPRQSLAQWLGRRGVTQAPEKADQLKQLAQQVLPPAPEQVVMLQQTLAQLVGLYRNLEQSIGRIDREVAYWLARTPGAWLTSIPGFGITLAAAWTAELGPPSQWHSVRQLCSYCGVVPKSKQTGGPDKEPVVGAVGQRCNKRLKNVVLQAAEKVIQYGPEELRQTAQQLEARGAHTAFALAKRLVRLGKYLATTGTVYRPKALMDPATPPATLAAHYQSVWEKLLPKWKAKADLREVFAPEHPLGQWRKMVQDLYALELRLPQQRAAQQSSAVTP

SEQ ID NO: 258947 - protein, 410 aa, unidentified
MFSMDVVIERACGMDVHKDNITACILTPKGEEIQTFSTKTVFLLQLVDWIKLHNCTHVAMESTSVYWKPIVNLLEAEDIEFLVVNAQHMKAVPGRKTDVKDVEWIAKLLRHGLLKARYVPDRNQRELRELVRYRRSIIEERARQINRIQKVLEGANIKLGSVVSDVLGVSARDMLDAIAEGEENPEKLANFARRSMKKKKDELELALKGYIQSHQRLMLKTILRHIDFLTEEIEMLDQEVAKRVRTNQEDVERLDSIPGIATRMAEQILAEIGTDIKKQFPSAAHMCSWAGLVPGQNESAGKRKSAKTKKGNKYLRSALTETAHSVKGSKNYLGALYRRTASRKGKKRAGIVVAHAMLRISYYLLTRKEMYVDLGEDYFDKQRQQSIVRHSLRRLESLGYTVTLQEPEAS

SEQ ID NO: 258948 - protein, 342 aa, unidentified
MKITTIGLDLAKNVLQIHGADTRGKAVVKKALKRTQVLPYFANLAPCLIGMEACGSAHYWARKLEGLGHTVKLMAPQFVKPYVKTNKNDAADAEAICEAVTRPTMRFVPIKNGEQQAVLALHRARQGFVKARTAQANQIRGLLAEYGIAIPQGISHIAKHVPEILEDGENGLPGIVRPLIDRLGAHLKELDRQVGELEVQIQTWHRANDASRRLAEIPGIGPITASALVASIGDAKSFDNGRQLAAWLGIVPRQNSSGGKQTLLGISKRGDTYLRTLLIHGSRAVIRVAERKVNHANSWLAGVMGRRNKNVAAVALANKNARIVWALLARDRRYTADYAPLA

SEQ ID NO: 258949 - protein, 411 aa, unidentified
MRLIFVGDDWAEAHHDICVIDEAGKKLAKRRVPEGLDGVNQLHALVAAHASDPAEVVVGIETDRGLFVQALIAAGYQVYAINPLAASRYRERHSTSGAKSDPGDALVLAELVRTDRHNHRPVAGDSELAEAVKVLARAQQNLIWVRQRQLNTLRSTLREYYPAALEAFGDDLGSRDALAVLGRAPTPALGKALSAAKIAAAIRAAGRQRNVETRAGEIREHLRGAHHLEAPATLAKAYGATVKATVGILTEMNAQLAALEEELKSSFETHPDAEIIVSLPGLGTVLGARALAEFGDDRTRYDDAKARKSYAGTAPITKASGKSKVVLARFARNSRLADACYLWAFSALSASPGARAFYDAHRAARGPNDKDAHSKALRALANRLVGIPHGCLRHHSPYDEAKAWHREEAAA

SEQ ID NO: 258950 - protein, 352 aa, unidentified
MMVHIGLDMHKQFSAVAVLDDAGAVLERCTLHHDDPTKLAEYFGRLGGDGTVTMEATRGWYWLADLIESEGLTVKLAHPAKVRLIADARIKTDKIDAWVLAHLERLGFLPESYIPPQEVRDRRELLRYRLGLVSLTTGLKNRVHALLAKLGIMSRQTDLFGKSGREFLAGLKLRDVYRRVLDGWLATIDFLACEVKRVTSELRAELKEDFRAELLKSTPGVGVLTAYLLLAEIGDIGRFSSAKRLCSYAGLVPRTYQSGGKNWQGGITRQGNRYIRYAMVEAAQVATRKDAALDLFYQRLKREKGAGKARVAVARKLLVAVYHILKRSEPYRYGHLARIHLGKPAFVPGHAE

SEQ ID NO: 258951 - protein, 370 aa, unidentified
MAKRSMFVGMDVHKDSIDISLAEEGRDGEVRHYGRIAGDLEALAKVVKALRAPARRLHFVYEAGPCGFGIHRYLTAQGEECVVVNPSSMPKRSGDRIKTDRRDGDALARLHRAGELTAIYIPTSDDEALRDLVRAREDAVGLSTQAKHRLKAFLLRQGRRYPGRAGWTRPYRRWLADLSFPLAPQHVALQEYRDTIDEAERRVERLTDQLRQLTSTWRWAPVVEALQALRGISFVTAVGLVAEVGDIRRFSHPRELMAYLGLVPSEYSSGPSVRRGGITKAGNPHARRLLAEAAWAYQGVPRIGRQMLYRQEALPKTVCDIAWKAQLRLTSRFRKLVARGKAKPKVATAVARELTGFIWAIAREVPPPPA

SEQ ID NO: 258952 - protein, 389 aa, unidentified
MKIYVGIDIAKLNHFAAAISSDGEIILEPFKFTNDADGFQLLVSKLDSFDKNSIIIGLESTAHYGDNLVRYLVAEFYQVCVLNPIKTCQMRKNNIRKTKTDKVDTYVIAKTLMMQDDLRFVSFYDLDMMDLKALGRFRQKTIKQRTRLKIQLTTYVDQVFPEIQYFFKSGLHQNAVYALLKEAPSPKEIASMHMTHLANLLKVNSHGHFTKEQAKELRVLAQKSVGANDSAISIQITQTIQQIELLDSQLEKIEAEMTDIIKFNDSVIMTIPGIGYINGGMILGEIGDIHRFPNPNKLLAFAGLDPSVYQSGNFQAKTTRMSKRGSRVLRYALVNAAWNVVRNNATFKAYYDAKRAEGRSHYNALGHCAGKLVRVIWKMLTDKVEFNLE

SEQ ID NO: 258953 - protein, 442 aa, unidentified
MRSQRPERQYRDRRRLRRLDLGRGEGQLSDERRWYAGVDWASESHCVLLTDGEGRAIGEKVFKHGGEGLAELAAWLMAASGAAAPTQIQVAIEVPHGPVVETLIERGFAVHAINPKQMDRFRDRFTMAGAKDDSRDAEVMASALRTDPRCFRRLAAADPVIVELREWSRIAEELGVERNRLANRLREQLWRYFPAMLELEDDLGAEWLLDLWQAAPTPDKARRLREATIAGVLKRNRIRRFEAAAVRDTLRKPPLCVAAGTVEAASARVASLVPRLRLLNRQIKDAERRIDALTARLASSKEAEPGQIKQHDAAILASLPGVGRIVLATLLAEAWDALQRRDYAALRSLTGVAPVTKRSGKSRIVVRRQACHDRLANALYHWARVAVQHDPRSRTKYAALRARGHSHGRALRSVADRLLNVACAMLKSGATFNPALAVPKTA

SEQ ID NO: 258954 - protein, 354 aa, unidentified
MAEALKKSIAFVGIDIGKNSFHVVGLDKCGAIVLRQKWSRGQVEARFANMPPCLIGMEACVGAHHLSRKLQRLGHDARLMPARYVRPYSKGQKNDFRDAEAIAEAVQRPTMKFVATKTADQLDLQAMHRVRERLVSQRTGIINQIRAFLLERGVAIRQGLRFLRAELPGILAGPTDALSPRMVRILEDLAGDWRRLDERIEGLSNEIEAIARQDAGCERLISVPGIGPIISSAMVAAIGAGDVFSKGRDFAAWLGLVPRQISTGDRTILGKISKRGNRYLRVLFVQAAWVVLIKPKSWERHGLKSWIEAAKKRLHRNVLAIALANKLARIAWSVLAHGRSFEASKLAAAVTQPA

SEQ ID NO: 258955 - protein, 408 aa, unidentified
MKTLHKRCAGIDVHKAEVVACLRLVTHKKVEREVRRFPTTTRGLLELADWLETARCTHVAMEATGVYWKPVWHILDGRFVLILANAAHVKAVPGRKSDVNDASWLADLLAHGLIRPSFVPPAAIQELRDLTRTRKQLTREVAQHSQRIQAVLEEANVKLCSVITDILGASGRRMLKAMIAGETDAHRLAALGSERLGCTQETLVEALTGRMREHHRFLLAQHLQTIEQLEKTIAAFDARIEDKLAPFRDTVERLTEVPGLGMTATQVVLAEIGLDMSLFPSAGHLLSWAGFVPRLDESAGKTRSTRIRKGAPWLKPVLVQAAWGATRKKNSYFQAQFLRLKARHGAKKAAIAVAASILTTVYHMLRDGTCYQDLGPEYFTRRNPAKAAARLANRIRNLGYHVEIRPAA

SEQ ID NO: 258956 - protein, 338 aa, unidentified
MKKFCGIDLHSNNSVVVITDEADRILLSRRCPNDLAKIVLLLEPHRTELEGVVVESTYNWYWLVDGLKDAGFDVKLANTVAMKRYDALKHSDDQDDAAFLAHLLRLGILPTGYVHPPQERALRDLARKRIQLVRSRTQHVLAVENIMARQQGSRLSSAAVKRLSSTTIDNLGLPDDVALAISANVAVIETLNIQIDCLEQRLLGGVRLRPEYALLKSMPGVGEVLATVIMLETGSIERFADVGKFASYARCVNSAHYSNGKKKGEGNTKNGNAYLVWAFVEAANFARRFNEEAKRFFDKKKAKTNNVVATKALAHKLARASYHILKEKQPFDVSRCFA

SEQ ID NO: 258957 - protein, 335 aa, unidentified
MSVVTCRFFVGIDWGSQTHVVCVLNAEAQIVEERKVQHTANAIAEFLDWLSALTAAPASSMAIAIEVPHGTLVEELLEHGFSVYSINPKQLDRFRDRYFPAGAKDDGRDAFVLADSLRTDHHCFRAVSVNDPTVVRLRELTRLDEELNHCFQRHCCQLRQQLQRYYPHVLQLSKTADEPWIWALVELAPTPAKAVKLTSKRIEKLLRDWRIRRLDAEQVAAALRGRSFSLAPGTTEAASEHVLLLLPHLRLLHQQRLAIAARIERILDELSAPGDSDQPLPDVKVLLSLPGVGRIVTATMLAEAPQLLADRDYHALRAYAGVAPITRQSGKKSTC

SEQ ID NO: 258958 - protein, 391 aa, unidentified
MIYVGIDVAKDKHDCFITNSDGEVLFKSFTIPNNRDGFETLFQKIQSVSDDLTKVKVGLEATGHYSYNLLGFLLDKGLPTYVINPLHTNLYRKSLSLRKTKTDKVDSRTIATMMMSDMNLKSYSDTSYHNEELKSLTRYRFDKVKERAKLKSSVSRLVCILFPELEKLVPTLHMASVYALLFEFPSADAVANSHLTRLSNLLAESSKGRYGKDTAVMFREAARSSIGSHMPAKSLELKHTIKLIHELDAEIEEIENEIKSIMDEIHSPILTIPGISYRMGAMIIAEIGDFSRFDSPDKILAYAGMSPSTYQSGQLDNCYSHMEKRGSRYLRYALYNATKYVCHWDESFAVYLAKKRAEGKHYNVALSHATKKLVRTIYAMEKSGQPYQSAS

SEQ ID NO: 258959 - protein, 331 aa, unidentified
MPTVQLVGIDVSAKTLRLCLQTSTGSVESLEMSNSAEGHRQLCRKLSQRGRRARVGLEATGLYSLDLALALTRQPRVEVMVINPRAVRDFARACLQRSKTDVLDAQTLLEFVRRMPFQPWQPPSTERLELRALARRMAALTVTCTQEKNRLHAASSSTVLGTALRQDLEISIEHLERRIDWLLQQALTLIDQCTPLKTAFEILTSIKGFADKSGVQVLAELAVLPQDMTARQWVAHAGIDPRHQESGTSLHRPARISRTGNRYLRAALYMPALVAIQRDRHVRAFYDQLLARGKAPMQANVAVMRKLLHALNAMLRAGTRFESHKFRLLEG

SEQ ID NO: 258960 - protein, 410 aa, unidentified
MLFIGDDWAEAHHDIEVEDDSGRVLARRRLPEGLAGITTLHELVAEHLDPTAEPDQVQLGIETERGPWVQALWRRVMGVFAINPLQVARYRERHSPSGAKSDAADAHLLAEIVRLDRAHHRRIAGDSEIAEHVKIAARAHQTMIWSRVRQVNTLRSLLREYYPAALAAFGTDLASRDALAVLTVAPSPELGRRLSQSRIETLLRRAGRQRNVSTTAVKIRAALRSEQLAARPGVIGAYTASASALLAVLTAMAAQTEVLAGQVEQGFGQHPDAEIYRSQPGLGDVLGARVLAEFGDDPGRYADAKARKNYSGMSPITKASGTKRVVLARFARNRRLGDALFLQAFAALNNSPGARAFYDRQRTRGATHYQALRTLANRLVDILHGCLRTHTLYNEHLAWHNEPDKLSPAA

SEQ ID NO: 258961 - protein, 423 aa, unidentified
MEVLYERSAGADVHRDTIVVTVRCREKTRDQQQTRTFEAFHDGLDAMCRWLVEQQVQVIGLESTGVYWMPVVRAIQQQCAACVVWLVNPLHVKKVPGRKTDVTDSQWLAKLVMHGLVSPSFVPSPQLMDLRVLTRFRTRLVSHRTSLKNRAVGAMERAGVKLASVCSDVFGLSGRRILDALLDGKLTPAQMSELALTSLRTKKAELERALAVSLSPTSVFVLRKLLAQLDATDADLHQVDGRVRDLLRPYAPDVELLRSLPGLDDVSIAAILAETGPDMTVFPTADKLGAWAGLSPGSRESAGKSKPAAMRKGDKYLRTILVQVAATLATRQSKKKPPLFWQRKYRQLVPRLGKLKALCAIARRILGAVYYVLRDRKSYTEPVPRPPSPKTAKKLLDRYLSRIRELGYEPTIAPMTPPTPEVS

SEQ ID NO: 258962 - protein, 311 aa, unidentified
MMNEQTYCGIDVAKRHFVIGLSTQKRTKTETNNPKGIAHTIEYLRRFSVDLIVLESTGGLELPLAKALHRVGFRVVIANPRQTNQFALAKTDNKDAKMLAFYAQMLAMRDNVAQQLYIPPTPEQEQLEALVSRRNQLVEMRFAEKNRLEQVHSTQVFSVEQHIDYLSLRIDELDREIEQHLKHFDDTIKKFKDIKGLGTQTIAVLMSMLPELGQYTHKQIASLVGVAPHPKESGNTKWKSRCSGGRKVVRNALYMATFVCVRFEPKLKQFYERLRANGKAFKVAINACMRKLLTILNAIVRDDSQWDAHAL

SEQ ID NO: 258963 - protein, 353 aa, unidentified
MTSIVNIGMDIHKESYTLCCYRFEDDEARHRQTIMPDYKVILRYIDRIRGCYPEDVEIVCGYEAGCLGYSLYHQLTVHGVKCVILAPTTMAVTNTGHIKTDKRDAENIAKCLAFRTYSEVRVPTVEDNGVKEYIRMRDDHKKALKVIKQQILALILRHGRHFTDGKNYWTAKHVKWLKSLRFGGSVQESLDEYLITYEYLKNKVERMDKRIEDLGEDERYRDNVHKLSCLICVKAHTALATIVEIGDFHRFATPEKLAAFVGLVPSENSSGQSQLRGHITKAGNAHVRRILVEAAQSYCRGAVGYKSVLLKRRQCGNTPQVIAYADKANERLRRKYYRMTLKNGKTAQNGMSR

SEQ ID NO: 258964 - protein, 443 aa, unidentified
MICAAVERCAGIDVGKTFLAVCVMTGPLDGETRTQRRRFATMTAELEALRDWLKQEGVTHVVMESTGSYWKPVYNVLETSVKVYLANPQEVKNRKGHKTDDKDGWWLAHLLRHAMIHPSFIPPKSIRELRDLTRRRKRLLGNATAEKNRIQKVLEDANVKLGNVLTDVFGVSGQLMLDALLKGEAQPAEIAKFAKHRAKRKIPAIIQALEGHRMSDHHRQMIRYSLKHLEFLEEQIGEIDADIVGKIKNAGLEHEWQLLQTLPGIQDRSAASILAETGADMEQFPTAKDLSSWAGVCPGNNRSAGKSKSSHTTGGNPWLRSALTECAWAAAAKKNCFLKDKFWRITSKSGGKKGPAIVAVAHLLLLLAYQVLRTHKPFEDRMAPPIDERQKQRLIRHHLRRLGKLGIAIRRYAPSAPGTTTPREYPDLVRPPKTSRQCSSPST

SEQ ID NO: 258965 - protein, 381 aa, unidentified
MTTPSTDNGQENTTEATLFVAFELSEKNWKLGFTTGAGQKPRERGMTARHQERMLDEIAQAKRRFGLPETTPVVSCYEAGREGFWLHRFLLAHGITNHVVDSSAIEVSRRQRRAKSDGLDVRKLLSMLIRYHGGERQVWHVVNAPSVEAEDQRHLHRDLETLKQERGDTTRRIKGLLSSQGLRVTTLSNLPEQLDALRLWDGSPIPPGLRRRLLRVYAHHMFLSQQIAEVEVERRAQLQTSPEASIEKVRQLMQLKGIGINGAWVLVMEFFGWRALKNRREVGGLAGLTPTPYQSGERAREQGITKSGNRRVRWMIMELAWGWLRFQPDSALSAWFRERFGDGGQRLRRIGIVAVARKLLIALWRFLKTGALPEGAELKAV

SEQ ID NO: 258966 - protein, 359 aa, unidentified
MIVIGVDPHKQTHTAAAVDRQTGELLGELTVRGNEEGHARLLEWARELGGERGFALEDCRQVSCRLERFLIGRGERVVRVPPKLMAGARRSARSRGKSDAIDALAVARAAIREPDLPEAHLEGASRELRLLVDHREDLVCERTRIQNRLRWHLHEIGPELEPSRRSLGTLKVLDGLGRRLARRPQSVQVRVARELVAHCRELSRQADRLEREIETLVRREAPQLLALPGCGALTAAKLVGEVAGIERFRSDAQLAMHAGVAPLDVSSGRQQRHRLNRAGNRQLNRALHTIAIVQKRTYAPAKAYIARRQADGKSNKEALRALKRQLARRVFNILHLIAARANNPQRIQTSTPPQVPCLT

SEQ ID NO: 258967 - protein, 341 aa, unidentified
MDEDIIIGVDLAKNVFQLHGARRDGQVVFRKKLSRPQFAKFCAEHPRSLIAMEACATAHYWARELMSLGHEVRLIPPIYVKPFVKRHKNDAADAEAITEAALRPNMSFVVPKSAETQALSMMMRTRDQLLEQRTATVNALRGHLAEFGLIAPVGLKNVERLRELIDVHPDLPELVVTMAKMHFNRIDQLSEEVNTLTGRIKSHCADSPEARRLQTMPGIGPIAAMVIEAFAPDMKCFEKGRDFAAWLGLVPKQHSTGGKTRLGQTSKMGQKDIRRALIIGAMSCIAAAARRGKRCHPWLQDKLDRKPKMVAAVALANRMARQIWAMITKEQGYQSSQEVAA

SEQ ID NO: 258968 - protein, 335 aa, unidentified
MQIYGIDLAKEKFDVSFFDLTSKKVSNQPSHKVVTNNLKGIGKFFKGLPSDAVLVAEHTGVYGDTLLKCCMDSNVKIAFVGGYVIHRYRATPDRAKTDVLDCALLRDFGERYPDKLKYRKFPEEALYELRQLARHREMLVEQRKQLITADRSEDCRPIRSLAVKRSMDRIKEMLDTEIAETEKEMLKVINGHESIHHNYELVKSVDGVGLITAVELLVKTENFTKITTARQYAAYAGTAPYEKSSGKMDKGAHISKIGNRRSKTLLYICAESARLHNKEIKLYYERRTLIDKKPRHYVLNAIANKLLRIIFTLVEKGEYYDANFIRQDPRVVKYN

SEQ ID NO: 258969 - protein, 430 aa, unidentified
MHNKNYISVGIDVGSAFSFMTILVPDETVILKPFKITHNNKDSLERAVSEIKKAEELYSLESRTFLESTGIYHFPLFCYLVDCGFNASIINPIITHSTKNGNIRKVKNDKIDSKGIAKLGLSKDIPVSQFPAKLVLELRSLTRKYYDLTDERSAHINKLKGDLHTVFPQYLDVFCDVTGKTSTMILRQYGTPDKILRGHKKTMIEKISKASRKGLAKASERYEKLCAAANAAKTFGCQIDSIYFNIFLTLDLVEKLDSALDSILNRIRQLITFNKNEKFIQQIKLLNTIPGVGFLTAVTIMCEIGDFSAFRNPKQLFAYFGLDPEVNESGKFVGTQLHMSKRGSRIARRAIFAVALASIRTKRNGEGINPYLRKYYELKSGQKPKMVAIGAVMHKVCNIVFAVLRDEKAFELRSPEEHCKQYQRPALAAA

SEQ ID NO: 258970 - protein, 337 aa, unidentified
MDVLYARCAGVDVHKKMVVACLITPDAAGTPTKETRTYGTMTADLLDMLDWLVDAGCTHVAMESTGVFWKPLYNLMEGALAILVVNAAHMKNVPGRKTDVKDAEWIADLLRLGLLQASFIPDRPQRAVRELTRYRTSLLQERSAEVNRLQKTLEGANIKLSSVATDIMGKSGRDMLAALVAGRTDAAALAQLARGKLREKLPQLEKALRGQCADQQRVLVAQQLAHIDGLDEIIDRVSAEIAERVRPFEEAIEQVDTVTGIGRRTAEVLVAEVGTDLTRFRTHRHLASWAGLCPGNNESAGKHKGGKTRKGSPWLRAALIEAAKAAGRSKKTYLGAQ

SEQ ID NO: 258971 - protein, 440 aa, unidentified
MGTQSTAALTETWDVPAPTGLLYLGIDVGRRQHLAAAIPETRMWDGSWQRAPVRTIATTVLGFRGLTGWLGELGFAPDQTRIGMEPTGGWYGRTVAAWLERHGYRVDWLQNFALHDRRHLMIGKQTKTDALDARLIARLLFERERLGLQRAFLQSPPRHTDAMRMLLRNRVRLVEQRTRCRNQLTAIEDVLFPELKDFFKTSVTTSSARLLLESFPTPDHVAAADPADLHRVVVREGRNGSIAAHLMDFQMAAADSAGLSTGTDAILHAQEWLLYQLRLIDGQIEQVEGAIRAVLEEWPDQERAILASFPAMTMVRQAVLLASIGDVACFRDDRQLRKLLGWYPEARESGRSLSKHRLGRSGNRMARREIWLWTLELISPTYPNTPFRDYYRRLRERGMAGQVAMGHLAGKLISVLFHCLRGGVPYDPQRHARDLGIADA

SEQ ID NO: 258972 - protein, 397 aa, unidentified
MYIVGIDIAKRKHEAAVIDGEGTVIIKPFSFTNNCSGYNRLLAMLTKAKLPLDEVSFAMEATGHYWLALFTRLQKEGFRVQVINPVQTNSIRSFYIRQAKTDPRDALLIAEVIRFGHFSESTLHPENIYELRELCRGRHAIVSMQADVKRKVVALLDQVFPEYETAFTNMFGDTSMAILQTCPTPKELSEMPLEELCHLIEVSSHKRFRMAKAQELQELARNSFGFAMAGDVFSTMIRLYAKHLDFLKQQVREMDRKIAEIMDTLDTPITTITGIGPTLGAYILSEIGDISRFSSAAKLAAYAGIDPTMRQSGEYNGVRNRMSKRGSPYLRHAIWLAASSAVLHDPALKLYFQKKRDEGKPYMASVGHACRKMVSIIYAVMRDNKAYTPYIPNEISA

SEQ ID NO: 258973 - protein, 391 aa, unidentified
MVCVGIDVAKDKHDCCILDSDGMVRADCFTIPNNMDGFKQLLQMIRNCTKKSDKIKVGLEATGHYSYNILGFLLDNDLAVYVMNPLHTNLYRKSLSLRKTKTDRVDARTIATMLLSDVDLKSYTDTAYHNEELKSLTRYRFDKVRERAKLKQSVSRLVTILFPELEKLVPSLHIASVYALLSEYPGAKQVSEVHLTKLTNLLTTASKGRYEKDKAIQIRDAARTSIGSVMPAKSLELKHTIKLIRELTSEIDEIEDSIQQIMDELHPPILSIPGVGIQSAAMILAEIGDFSNFESPDKILAYAGCSPSTYQSGKLTNCYAHMEKRGSRYLRYALYNATKYVCHWNPVFAKYLAKKRAEGKHYNVALSHATKKLVRLIYALQKSGKAYLTAA

SEQ ID NO: 258974 - protein, 364 aa, unidentified
MHHVNNTELSSHEETRCQFNGGRCAIKLGIDVHQDFYVVVEQVGGSNPKPPQRLQKEAFLHWAARLKEKSGAQVHAVYEACGFGFALHRKLSALSINCYVVCPQKLDEQNKRVKTDGLDAKALCLKLDRFVQGNREALAMVRVPSEEEEQARAIHRQREQLVKARKQLEAQGRSLMVNHGLEPVQNWWKPRTFTALPTPQWMKELLQNSQPILIALQEKISALTAQLQSAASPDQPRGLGKMTSVVIDREIGDWNRFNNRRQIASYTGLCPGEYSSGNTRVQSCVTKHGNPRLRAALVELAWRLVRFQPNYKPIVKWRATLAKGALATGAARKKAIVAVARQLAVDLWRIKTGRLRAEELGLIN

SEQ ID NO: 258975 - protein, 378 aa, unidentified
MLTTLHTQAYNVAARLYIAFELSDKTWRLTSSDGKKRRSKTVEACAISAVLEEVAKAKQRFKLPAECEIVCCYEAGWEGFWLARCLQAQGMRVLVVDSSSIEVNRRKRSAKTDRVDGEKLLNLLLRYLGGETKALRLVRVPSREEEDDRRLNRERDVLVKERGRHWVRIKSLLRAQGLRVTKKTTFLKQLEALRCWDGQPLPDDLRQEIERQWARHEQVHKQVLALERLQKQRLKEAESEDGTLALVGRLLHLKGIGWQGAWALVMELFAWRKIRNRRELAALVGLTPTPYNSGDGVREQGISKAGNRRLRSLLIELSWLWLRHQPDTDLSQWFRQRFGGGGKRMRRIGIVALARKLLVALWRYVEHGVLPEGAVLKA

SEQ ID NO: 258976 - protein, 346 aa, unidentified
MEHYVGLDVSLRLTAICIVDRTGRIEREGVVASDPEAIAAFVKSHAPQVARIGLETGATSTWLWTELNKMGLPVICIDARHAKAALKMQINKSDRNDAVGIARIMQCGWYKEVRVKDLDSHAIKALLVSRALLVKVKRDLENQVRGLLKNLGLVIGRAKMNVFSVRAAELVEDRPELAAAVEPLLKAREAVERQIADLDRKVMRLARSDAQVRRFMTAPGVGAITALCFRATIDDPTRFKRSRSVGAYVGLTTRRYASGEIDWTGRISKCGDAMLRSYLYEAANVLLTRVAKWSVLKAWGIRLAKRSGLRKAKVAVARKLAVILHRMWVDGTEFNWSSKEVAAQRP

SEQ ID NO: 258977 - protein, 338 aa, unidentified
MNIVFLGIDLAKNVFQLCGLNQAGKPVYTKRTGRKELLQTLANIPACLIGIEASTGAFYWQREFEKLGHKVKIISPQYVKPFVRGQKNDGNDAQAIAVALMQPTMQFVPPKSPEQQDIQALHRARQRIVNHRTATVCQIRGLLLDRGIPIGSAVSRARRAIPLILEDAENGLSSRMRRTIAELYDLFNDLGRRIHFFDKEIETVFRQSEACQRIAKVKGIGPETATAVVAAIGKGTEFKNGRHFAAWLGLVPRQHSSGDRQVLMNMTKKGDKHLRTLFIHGARAVVRVATNNNDGHMNQWVNQLKERRGFNKTTVAVANKNARIIWSMLRNETGYQVV

SEQ ID NO: 258978 - protein, 401 aa, unidentified
MAPLRERSWIGVDIGKTHHWVCALDANGQTLLSVKVANEEAEILALIASVGELAEEAIWAVDIIGAPSALLLALLIEAGQSVHYASGRVVAAMSAAYTGEGKTDMKDAHVIAETARIRRDLAVIDQDTDLVRNLAVLTGHRADLVADRVRMINRLRDLMTSVFPSLERAFDYASCKGALVLLTGYASPPRIRRIGQARLATWLRQRKVRDATGVAARAVTAARAQMMMLPGQDLAASIIAELATNILALDERLKRLDAQIAETFNQHPQAEIIQSMPGFGPFLGASLLVGAGDLRAFPTAGHLAAAAGLVPVPNDSGRRSGNLHRPKRYSRPLRHVFYLSAQTSMMRAGPNRDYYLKKREQGRTHSQAVIALARRRVDVLWALLREQRTWAMVPPAVAQAA

SEQ ID NO: 258979 - protein, 338 aa, unidentified
MGVYGGIDLHSNNQVVTLVDAGGTVVYRRRLRNDLEAVLAALEPYRDQLLGLAVESTFNWYWLVDGLMEAGHRVHLANPGAMKQYSGLKHGDDDSDAAWLAQMLRLGLLPEGYIYPKAERGVRDLLRQRGRLVQQRTAQILSLQNQVHRSTGLRLSGTTIKRASEEEAASWVGDREVALSLTSNLSVLRCLDQQVTVLERAVLTQVKERPEYVGMQTVPGVGKILALTVVLETGDVRRFAAVGNYASYCRCVGTQRISNGKRKGKGNVRNGNRYLAWAFIEAAHFAVRYSEPIRRFHQRKEARTHPLVALKTVAHKLARASYYILRDGVPFELARSFG

SEQ ID NO: 258980 - protein, 422 aa, unidentified
MEDRFLKRLRKKARKMLWGGGVDIASIVRCEPMELPMQTLNNLSRSLIALEPASTLIAVIEMSLSSWLVAGIVPGIERQPLKKLAVDESALLRLLHRWREEAEKAGCRIERIVVAFEAGRDGFWLARWLKARSIEAHVIHAASVAVSREHRRAKTDRLDAELLKRAFLGWLRGERNHCKVVAIPTLKDEDAKRPSRERESLVGEQSRIVNRMKAALIRLGIRGFNPKLKRAAGRLDSLRTPEGEPIPPNTLAELRRDMERRRLISNQIRQIEEARLKHFEQAPNDGPHAMVRLLARVIGVGIETADMLVHEVLSRNMHDRRAIARYAGLTGSPDESGRKRREKGLARSGNGRVRRGMVQLAWRFLTYQKESALAQWYRARTENARGARKPMIVALARKLLIALWRFVWQGVVPDGIVLRPAQ

SEQ ID NO: 258981 - protein, 344 aa, unidentified
MSGAYEGRQIVGMDLHRRRSVLVRMTETGQHLETVRISNDPDYLREVMTRAGEAPDVVLEATYGWYWAADTLAELGAQVHLAHPLGVKMFALRRVKNDQRDAADLADLLRMGRLPEAWIAPPATRELRGWVRHRAKLVGLRSNLKCQVHAVLAAAGVAVSMSDLFGASGRQLLAATRLSVESRSRIDSLNRLITALDFEIDLYTRLVAGRLRADPGYRTVQTIPEVGAVLGAVFVAEIGDITRFARPQQLASWAGLTPKHHESDTTVHRGRITKQGSRLVRWAAVEAVQRVPAHTRFGQRRDRIAQRRGRNIGVVAAARDLITLVFYGLRDHHIRCLPSGTGAA

SEQ ID NO: 258982 - protein, 402 aa, unidentified
MTTSQLWAGVDVGREHHWVCVVDAAGTVVLSRKLVNDEQPIRELIAEVDGLGPQVSWTVDLTMTYATLLLTVLADVGKSVRYLAGRAVWQASTVYRGGESKTDAKDARVIADQSRMRGADLPVLHPDDDLVTELRMLSAHRTDLVADRTRTINRLRQQLIAVCPALERVAELSSDRGWVVLLARYQRPKAIRQSGVSRLTKVLADAGVRNASTIAAAAVSAAKAQTVKLPGEDVAAALVAELAQGVIALDDRIKNTDADIEGRFRRHPLAEVITSMPGIGFRLGAEFLAAVGDPTLLSSADQLAAWAGLAPVSRDSGTRTGNLRTPKRYSRRLRRVMYMSALTAIRCDPTSRAYYQRKRDEGKRAIPATICLARRRTNVLYALIRDNRTWQPDSPPIATTAA

SEQ ID NO: 258983 - protein, 388 aa, unidentified
MQIVADRPQAPTAIRTNLGAIFVSLELSRSTWLITSLSPGGGEKMSKHSVRGGDVAGLLERFAQLQEKARGRTGQRFPIIVIQEAGLDGFWIHRVLQAEEVESHVVDPASIATSRRRRRAKTDKIDGEALVRALLAYKRGEPRVCAMVKAPTPEEEDRRRLCRERKVLTAERVRHVNRVKGLLFSQGITGYEPLRRDRRERLEELQTGDSRPLPEHLRAQVRRELDRLELLLEQIKAVEAERDVLLAAEHAVTPAPAAMLLDIKGIGPEFAAILWSEGLFRHFDNRRQVAAYAGLAPTPWKSGSVDREQGVSKAGNPRLRTTLIQLAWLWVRHQPHSALTLWFEERVKRNGGRLKKTTIVALARKLLVALWKYVTAGVVIEGAALKAA

SEQ ID NO: 258984 - protein, 427 aa, unidentified
MKYQVAAIDVHKKMLAVVVADVAGEGEYQFERRKFGTTPEQLHVLAQRMIQQEVEEIVMESTAQYWKPVWGALERLWKPARQQREGATKMSGKLHLCQAKSNRGQRGRKSDFLDAERLVKRLVAQKLVLSLVPDAEQRLWRTVTRRKYQLTRDKVRLHNQLESLLEEAHIKLSSFVSDLLGLSARRMLKALVEGATDPAAIAALADGRLRATPAQLRDALGASTQLHGVYRRLLKMMLEDLKQLEEQMEQLDGEMATLLEDHQEVVQRLAEVPGLGVSSAVQIIAEVGPQAEVFNSAKELSSWVGVCPGSEESAGESQSTRSPKGNRNMRRLLNQAAQAAVKMKGSIFEITFRKLVPRLGYKAAIWAIAHRLCRLLWILLRKGVRYQEHGPAVSAKSQRARTTKMIKELRKLGYRIESGPLPAGAVA

SEQ ID NO: 258985 - protein, 303 aa, unidentified
MSNAIIGVDVSKLDLSISLLIDKIYHQTKIDNNQEGFKIFSKWLKKHRITKVTACMEATGNYGTFFANFLYKNNHEVSVVNPLCISAFAKSKLSRHKTDKIDSMIIAEYASKNDLSLYVPKNSDLQELQNLYRCLQNLKEQYKQSQNYLENKDHLSSTICSSYKKLSQNITKEINKIELEIDKLLIHNHELKQKADNIQTIPGIGKLTAVAILAESPDFAYFSNARELAAYAGLTPKHKMSGTSVRGKSRISKIGSSRLRKALYFPAIVAKNHNPLFKEFSQKLGSKGKPTKVIIVAIMRSQA

SEQ ID NO: 258986 - protein, 335 aa, unidentified
MYYLGIDLHKDESHVAVLDDDAEVVEEIRVANANLDEVAEEYAGAKAAIEATSNYYTVYDTLDEHLDVVVADPSQAKAIGYAEVKNDRLDAKLLAQLRRADMIAESYVPSEDLRERRALVRGRKRLVEKRTDFKNEVHAVLDKHGISYDWDPFSVNGREILAGEDFSLGVVGDQLMESFLSIIDELTAQIEELEEVIEETAASLEETQLLMTIPGVSFYSSLLITSEIGEIDRFDEANQVVSYAGLDPVVRESGDSRTEGSISKRGSGDLRWILVQCVQTAVHRCNDPYLGRFYARLKQRKNHQIAIVATARKLLVSIFHMLKRKEVYDPPGVNS

SEQ ID NO: 258987 - protein, 360 aa, unidentified
MEIGQTVADHGVVGGVDTHKDLHVAAVVDELDRVLESRCFATTRHGYKQMLTWMRSFGQLRRIGVEATGTYGAGLLRYMQNAGVEVLEVTSPDTHDRRKRGKNDDLDAQNAAHAAFAGRRTVTPKSRDGMVESLRVLKACRKTAVAARRVALQMIHNTIVCAPDDLRETLRRMTRMQLIRTVAAWRPDLTDYRSVVSAYRITLKSLGRRYLELHDEIADLDTMIVAIVDELAPALVARNSIGHGSAAQLLVTAGDNAERLRSEASFAALCGVSPVPASSGKTTRHRLNRGGDRAANSALHIIAIGRLRTDPRTKAYIAKRVAEGHSKLEAIRCLKRYIAREVFSLISQRKQEINQGRNVA

SEQ ID NO: 258988 - protein, 396 aa, unidentified
MWTLGVDVGKRRHHATLLDEDGKPVFRNVAFAQSRTGLDGLLARLAETGQSAAGIRIGMEATGHYWMVLFQELTRAGYDVVVINPLVTAARRNVTIRGTKTDSVDSDLIAKVLREESPKVSAIPEQDVAALRNLTRLRFECSQTASAEKLRLIALLDLVFPEYAEHFSDLFGAASRKVLAAFPTASELAKVDIRRLTSMLRKASRGRLGRERAKQLKAAAQNSFALPGNTDSLALEVRFVVERINLLIEQIADLDRRFAAFLRDQQELLRSVPGLGPVWAPTILAEVLPVFHPEEKHGAKKFVAAAGLDVRLDESGESRGRGKMSKRGSKYLRTAAIQAADVAVFLDGDPLFKAVYDRHKEQGKHHLVALSHAANKLLHVVFSVLKNQRPYTPILN

SEQ ID NO: 258989 - protein, 340 aa, unidentified
MTQHKIIGIDLAKNIFFLFEINHKGKNLSRKKLQRSKLLSYIANKAPCTIAMEACSGAHYWAREFSQFGHEVILYAPQHVKTQRRKQKNDYNDAEAIAEVALYKRPHPVPHKSIEQQDIQSLIRMRRLLVTERTRIVNQVRGLISEYGIIMPKGAAAFRKAIPEILENDENQLSCILRELLSHQYERYLYIDEQVKWFDDKLNQTIKQFENAKRLMSIPGFGPLTSQAVAVWLGSGQQFKTGRDASAAMGLVPKQDTSGDKVILLGITKRGNTYIRSLLVHGARAALRRAKFKSDNLSKWMLELQERRGPNRAAVALANKLMRIAWAVITKNEEYRPTQS

SEQ ID NO: 258990 - protein, 403 aa, unidentified
MEHVIIGVDPHKLSATIEVVDQNEKFLGSGRFTTDRAGYAAMRKYVKSWPDRAWAVEGANGAGRPLAQRLLEAGEHVVDVPAKLAARVRLFDTGHNRKTDARDAHSIAVVAVRTTGLRVLKVDGELESLRMLTDRREALTRRRVQTVNRLQALLAELLPGKAKRDITVLQAKKLLASVRPRDIAGKTRRRIAAEELTELTAIDAKIKTATAELKSIVLARDSRLMDLPGVGPVVAARILADVGDVTRFADRNRFASWTGTAPLDASSGEQNRHRLSRAGNRRMNHMIHIAAVTQLRLDTDGRAYYRRKRAEGKKPLEAIRCLKRRISDAIYRQLLTDAQRAVGRDPGAGPGGHCGASQESSAVDPPPHIDTSDQPLPGPAKPTLQPAAALRKSTSPTRIKATA

SEQ ID NO: 258991 - protein, 400 aa, unidentified
MLSIGIDVSKGKSTVCGMKPGGEIVYTPFEVQHTREGMSELVSLLRSSGEEVRAVLESTGSYHCPVVAALLENGIFVSVVNSLRMKRFCSQSIRKVKTDRIDAMQIALYGLAYWQELQPTRLPENTYRELQLLARQYYQMTSMLIKAKVDFNALCDQVLPGMQELMSDHAGRHKLSDFVLRYRHTAHILEMGETRFRKDYCKWAEKKGYRNCERMAALIFATAQNGIPVLPNAPSTQIVITEAIRVLHTVEASRDAILTQMQALAKTLPEYSLVREMPCIGDTLAPRLIAEIGDVRRFHSKRALIAYAGIDAPPYQSGKFCANNRHISKRGNRYLRKTGYEVMQSYVMHKPANDPIFTFIEKKRSEGKCGKLAMVAGLNKFLRIYYGKVTELYRSLPAIE

SEQ ID NO: 258992 - protein, 370 aa, unidentified
MSGEKYIGLDVHQATISVAVMDSQGKLIMESILETKASTILEFLAGLRGTLSLTFEEGTWAAWLYDLLKPHVAKLVVCNPRKNALLKQGNKSDKIDARQLADRLRLNDLKSVYHGETGVRMLRELARSYLTVVKDLSRVMNRLKALYRSWAIPCAGRDVYYTRHRSQWLEKIPEAGTRRRAEQLYQQLDMLQHLRQQARRELLAESRQHTITAKLRQIPSLGPIRSALAVALIQTPHRFRSKRQLWTYSGLGLETRDSGEYHFVKGQVQRKKPVWIRGLNKDYNHDLKGLFKAAAMRASIQPGPFQEFYQRSLAKGIKPTMVRLTLARKIAAITLTVWKKGARPTPSGWLYDSETVGAKCVMSVKQRGAN

SEQ ID NO: 258993 - protein, 317 aa, unidentified
MEVSSIFVGIDVSKATLDIAIRPSGERESVSNNESGIKALITRLAEVHPALIVLEATGGVEHQLTRALVSAELPVVVVNPRQVRDFAKATGQLAKTDAIDAMVLARFAEAVRPAVRPLPDETLLELRALIVRRRQLTEMIVAEKNRLGTVSKTVTKRIAAHIRWLQAELGRADKDLDQSIRRSPIWQENQDLLRSVPAIGPVVSRTLLAELPELGQLNRKQIAALAGVAPLNRDSGTLRGRRVIWGGRATVRATLYMAALVASRRNPVIAAFYKRLRAAGKTPKLALVACMRKLLTILNSMIKHRTRWSENTPLQTT

SEQ ID NO: 258994 - protein, 366 aa, unidentified
MTTKVRYIGLDVHKETIVIAVADAGRGEAKAWKTLPYDLPRLIKAIALIADGGEVEVCYEAGPTGYGIQRALQKAGYTCHVVAPSLIPVKSGNRVKTDRRDAAKLAHFLRSGDLTAITIPDEEREALRDLERSRDDAKRAERVVRQQLSKFLLRRDLRYTAGVNWTQRHLAWVRRLHLEDEVAQTVLDDNLLAVENATERVERLTNALEEKILASSLGPLVQGLMVLRGVAVVTASTFAAEIGDFRRFRSAKHFMSYVGLRPTEDSSGERVRRGAITKCGNRHVRRLLVEAAQHYRRRPAMSVALRKRSADQPEKLRQIGWEAQKRLHRRLGALTARGKPGNKAITAVARELAGFVWAIGKEVSLE

SEQ ID NO: 258995 - protein, 324 aa, unidentified
MNYIGIDIAKKTFVAAFPKEKGFKVKSFPNNVDGIRDFIKGLDPERDRCVMEATGNYCFLLLYLLEKKGVSACMVNPKQTKHFARMMMEVTKTDAKDACMIAMYGQKMEPPVYKIPTESIMRLKQKRTVIRQLRKQYTALSNLKESLSVMPNMDKSCEKSITKTMEFIGKQLVKLEDEMAELTNVEYQKQMELLTSIRGIGPACAAALIIATSGFTCFDNAKQVSRYFGLCPTYQQSGTSIHVRGGISHMGDSQIRGALYMASMSAIRTNTSCKEFFYKLRKNGKPGKLALTAVSNKLIRQAFAVVKSGVPYIDGYVSPNPMTA

SEQ ID NO: 258996 - protein, 348 aa, unidentified
MKHYAGLDVSVKETSVCILDASGTICREKKVVSHPEDLVAILSDPAFSLERVGLEAGPMSQWLFEGLAKAGLPIFCIETRHTKAFLKASQTNKSDRNDARGIAQMMRVGLFKDVHVKTLTSQKRRALLTARSLLQEKAVAFENDMRGLLRNFGLKVGEVSGGRFEERIRELVEADPDLAEIMEPLLAGRRKLREEFAKLDKKVLQEAKHDEVCKRLMTVPGVGPVVSLAYVSTIDIPSRFRNSRAVGAVLGLTPVLNQSGESKRVGHVSLCGDAMMRKLLYEAAQSMLTRVVKWCWLKAWAMNIARRHGKKKASVALARRLAVVMHRMWVDGSEFRWTREETTSTVGA

SEQ ID NO: 258997 - protein, 343 aa, unidentified
MELNAIGIDLGKTLFHLVGLDASGNVVVRKKCSRTQLLKYTANLRVQRIGMEACSGSHFLGRALREQGHDARLMPAQYVKPYVKTNKSDYIDAEAIAEAVQRPTMRFVPIKTEEQLDLQAVHRLRERSVMRRTAVVNQIRGLLLERGVTLPKGRSHVDEALPEILQDADLKLSGSFRLLLAELQLELEQLAEHIQQMDSAIQHTVKENEACQRLTTIPGVGPVIATALIAAIGNGSGFRKGRDLAAWVGMVPREYSTGGKQKLLGISKRGNNYLRTLFVQGARAVMRYRAKQAPGLNHWLTQLLARTHQNVVIVALANKLIRMAWAVLCKNEVYRAPALVASD

SEQ ID NO: 258998 - protein, 430 aa, unidentified
MSSANITNEKPIAAFVGIDWADQKHDIVLCAATSKAQFNHRSIGSDPDALAEWALEMQGRFGSQGRILICLEQSRGALIHFLMGYKCFELYPINPKQLSSYRAAFRPSGAKDDPVDGKLLCQLIALHHQSLRPWRPDDEATRKLALLCEKRRKAVDTRTALSNQLKSELKLFFPLALSILDNDLTTALAADFLLAWPNFDSLKKASVNKVRKFFYAHQSRSEPKIQERLKCIEAARPLTRDSAIIETSSIAVRMLAQQLKNLVPFIALYDQLISELFDSHPDSALFNNLPGAGKQLAPRLLTAFGSDRERFQCLLEALTFFGLAPVTEQSGKSKWVHFRWACPKFLRQSFHEFAAQSVRSSPWAASFYQHQRARGKGHHAAVRALAYKWTRILYRCWKTRQPYNPELYLTALLQRGSPYASALNNSTQKS

SEQ ID NO: 258999 - protein, 417 aa, unidentified
MVPNYKFIIQGAGNMNAVGIDISKGKSTVAVVRPFGVIIKPPFDVMHTAKELDELANYILSLEGESRVVLEHTSKYSEPVITALCKAGVFVCPVNAKLMHDYGGDTIRRAKTDKIDSIKIAGYCLDKWANLARYTPLDERRKILKTYNRQLGEYVKLKVALKNNLISLLDQVFPDANSFFSSPARESDGHEKWVDFIARFWHCECISSLSEQAFSLCYEKWCRKSGYYFSASKVGTIYRCAARHFGTLPKNDFTKTLIIQAATQLNTLCETIAALKAEMTKIASLLPEYETVLAMHGVGKTLASQLIAEIGDIHRYPKRSSLACFAGVEPPENQSGSYNQHSRRISKQGSPPLRKALFQVMCCVLQLSHSNEPVFQFLDRKRAEGKPYKVYMIAGVNKFLRIYYARVKESMKTTCHS

SEQ ID NO: 259000 - protein, 337 aa, unidentified
MLFCGIDLHSNNCLVVVSDDNDKVVYSKRLPNDLATICTALSPYQQELFGVVVESTYNWYWLVDGLVAAGYSLHLANTTAIKQYDGLKHRGDESDARHLAHVLRLGLLPEGHIMPRAERAFRDLARRRMQLVGQRTSQIVSIETSMAQHMGATISGNSVKELTVDDIDAMPIGPTEALGMKANLAIMQALQVQIDGIEATLSKHCRRDKDYRLLCSVAGIGPILATVILLETGDIGRFADVGNYASYCGCVGSAHMSNGKKKGEGNTKNGNRFLAWAYVEAANFAIRYCEAARKFYQRKRSKRNGIVAIKAGAHKLARACFHMLKTGEKFSVERCFT

SEQ ID NO: 259001 - protein, 356 aa, unidentified
MSSDVKYIGLDVHKEAISIAVLNASGKLVMESIIETKASSILQFIQGLRGELHVTLEEGTWAAWLYDLVKPRVSELVVCNPRRNALLKEGSKSDKVDARKLAELLRAGMLRSVYHGENGLRTLKELGRSYQTISKDVQRVMNRIKALFRGWGILCTGTEVYAPCHREEWLNKISQAGVRKRAELFYQHLDGLQILRRNARREFLAESRKHQAVKLLRQIPCIGPIRSAQLMALIQNPHRFRSKRQLWTYSGLAVETHDSGQYRYVNSQLQRSKKPQQLRGLNRNHNHEMKEVFKSTALSASRSAGPFGEFYARLLAKGMKPELARLTLARKIAAVTLTLWKKGARFDPEQLKTQAA

SEQ ID NO: 259002 - protein, 411 aa, unidentified
MQVVHQRCCGLDVHKKTVVACIMVTLDTGEVKKRVKTFSTMTVDLLTLADWLRSFQVTHVAMESTGVFWKPVFNLLEGDFTVILINAQHMKAVSGRKTDIKDSEWITDLLRHGLLKASFIPPQPIRVLRELSRYRTTLVQERSQEVNRLQKTLEGANIKLAAVATDVLGKSGRDMIQALIDGTTDADVLAELARGVLRKKLPQLQEALFGRVQPHHQTLLRHILAHIDFLDTQLAELQKEIEAHLFPYKEECELLVSIPGIQANTAAVIIAEIGVDMSIFPSAKNLSSWAGVCPGNRQSGGKRLKSTITGGNPYLRSVLTQVAWAVSHTKDNYLSAQYHRLARRIGKKKAIVALAHSILVSIYHVLRTKKPYAELGADHFDKLNTERIQQHHIRRLQQLGFEVTITKKEVA

SEQ ID NO: 259003 - protein, 376 aa, unidentified
MLPPCQRKMLAKGTEDKEYAMSQKLNSAIAAIGIDIGKNSFHLVGQDRRGALVLRQKWSRGQVEARLANLPPCLIGMEACVGAHHLSRKLQALGHDARLMPAKYVRPYSKGEKNDYRDAEAIAEAVQRPTMKFVATKTADQLDLQALHRVRERLVGQRTGVINQIRAFLLERGIAVRQGLHFLRAELPSILAKRTDVLSPRMLRVIEDLAGDWRRLDERIENLSDEIAALARQDKGCERLMTVPGIGPIISSAIVAAIGGGDAFSKGRDFGAWLGLVPKQMSTGDRTILGSISRRGNRYLRWLFVQAAWVVLVKITPEGWERYGLRSWIEAAKQRLHRNVLAIALANKLARIAWAVLHKGRAFECVKTNATASQAA

SEQ ID NO: 259004 - protein, 359 aa, unidentified
MDDTTKRAQEATVVRIGVDSSKRYMQVHGVDTRDRIVFAKAIRREEFLSFAAQLPPCVLGLEACSASHYWARKLKELGHEPRVMAAEHVAPYRKSRKGKNDANDAEAICEAAGRPNMRLVTIKSEEQQSVLALHRLRAGLVEDRTGMMNRIRGILAEFGIWVAQTPDKLANWLGKEAELIEELPILAREGIGIAREHWRELDRRIAELDGKIAETSKASEEAKRLQKILGVGAITASAVVATIVDGKQFKNGRQFSASLGIVPSQHSTGGKTVLGRITKRGDGYLRHLLVQGARSAMNAAQRRKPEKLTRLERWMLELNARVGYQKTLVAIANKHARIIWAVLAKGEAYDPKYGQAEPA

SEQ ID NO: 259005 - protein, 338 aa, unidentified
MKAYAGIDLHSSNNYLGIIDDNDKRLYSKRIPNELSHVLMALEPFRDRLEGVVVESTYNWYWLVDGLMEHGYNLHLANPSAIKQYEGLKHTDDKWDSFWLAHMLRLNILPEGYIYPREHRPVRDLLRRRLLFVRHRTAHILSLQSMIIRNLGFKMSGNAIKKLKETDAENLFDSPNLIFMAKNSLSAIDFLKKISRSIEKEVTSQVKLRKEFEMLLTIPGIGPILALTIMLEAGDIHRFAKVGDYSSYCRCVKSQRLSNGKKKGANNKRNGNKFLAWAYVEAANFAVRFNAKAHSFYQSKKAKTNGIVAIKALSNKIARASYYIMRDQVPFDEGMLFR

SEQ ID NO: 259006 - protein, 340 aa, unidentified
MDNFIGLDISKSTVSVFIPQGELEIEIANTVKGFTQLCSKLKKRYKKEYDSLVFVYEPTSSYSSTLELFCAHKQIRVFKINPKASHNFAKALSIRHKTDKVDARMLCQAGMLAKEEEIHIPVVDVIVEQINDLMSYYQLLVKQRVQTSNHLEKLQHHKESTTTLKKALEKEIFAFKQKEQHTINEIKRLIMENSMLALKYQSIQTIKGLGDIATIALIHLFLKYPNANQKQIISLSGLDPIERTSGVSVRGKTRISKAGNKLYRRALFMSTMVAIRFNEEMKCFYDRLKEKGKHTTVAQIAVMKKLIIIIARALFHSNQGYSSEIYQAHCGIVAQKSNVA

SEQ ID NO: 259007 - protein, 400 aa, unidentified
MRVVFGIDVSKVSSEVAILVNGEKVHNYTMSNDAIGFSRLLGDLKTVHKPETIFEATGVYSRRLQTFLEDNGYAYTRLNPLEAKKQLDSLRVRKTDQIDAEKLAQSQFVLNRKPTYVQEEVYQNLRDLSRFYQNLTEDIVRAKNRLHKVLQVTFPELETILSTPTGEQYWNLVIAFPCKDFVLELSKDKLSESIRQSTSKRISDKRVAYLAEKLIALANQSYCAVKKTSPMLEEVRYYTKELLRLSEQRQAVLDEMVELAQPLPEYDILLSIPGIAETTATSIIGELGDIRRFQSANQINAFIGIDLRHYESGNFIAKEHITKRGNPYARKILFKCIHNIASASHTNPCHIADFYEKRKRQSQTTSTKPHTIASIHRLIRTMYYLITHNKLYDYTSTQNR

SEQ ID NO: 259008 - protein, 366 aa, unidentified
MKKTSTVRVMGNMIFKGQKLTLGLDLGDHWSRYCVLDEAGRIILEQKVATTPEAMKQVFAKIPQSLIALETGTHSPWVSRLLTELGYKVIVAHAQKVRLITKSNRKDDRHDARTLARLARIDPELLGPVRHRSAQAQIHLTVIRARAELVRARTALVNAARGLVKSYGQRLPKCGTRQVSRELGAGLNAELREVLEPLLKEIESLNERIQEYEVRVEKIARESYPHVELLKQVKGVGTQIALTYVLTLEDPQRFPKSREVGCFLGLRPGRRDSGESQPQMRISKEGDRYLRTMLVQGAHYILGPFGEDSDVRRWGQKLAARGGKNAKKRAVVAVARKLAVLLHRLWVSGEVYEPLRNSQKAIRAAA

SEQ ID NO: 259009 - protein, 408 aa, unidentified
MEVLYPRCAGLDVHQQTVVACARVASNSTVHQEVRTFGTATKDLLALADWLTAQGCTHVAMESTGVYWKPIWHVLDGQFELVLANALQIRSVPGRKTDVNDAMWIGDLLAHGLIRGSFVPPAAIHELRDLTRTRKQLVREGAQHTLRIQKVLEDANLKLTSVVSDVMGMSGRAMIEAIIGGEQDPERLADLSRGRLKASRPAVIAALQGRVTPHHRFLLRLHLTQFDALEVAVRDVEARLGEALAPFQAAIDRLMTIPAVGRTVARVIVAEIGVDMSRFPTAGHLVSWAGLCPRQAESAGKRLSTRTRPGNPWLKTTLVQVAWVAARTRNTYLRAQFLRLKSRRGPKKAILAVAASMVTAAYHILKDETTYHELGSDHFERRDKSQITRRLIRRLEELGLSVEVKPAA

SEQ ID NO: 259010 - protein, 357 aa, unidentified
MTWVGLDVHARSTHASAIDVVTGELTRARFGVGSEEVVAWLSALRAPARVVYEAGPTGFALYRAARAAGVEIEVIAPSKTARPSGDRVKNDRKDSELLARLAMAGQLTAVAVPSEFVEACRHLSRTREQVRGDLMSARHRVSKLLLAHGRVYGATTTWNAAHRKWLGAQRFEQAPTELAFIDLLAAVDGLIARKDALDERLSRLATDERLWPTVARLRAFRGIDTLTALAVHLELGGDWQRFSSPRKLFAWLGLTPSLEQSGQAKTQGSITKTGSSYARRLLVEAAWHYIRPPRIGATLANRQTGQPDHVLQIAWRAQHRLHRLYGRLRERGKPHTLVTVAVARELAGFLWAAATSA

SEQ ID NO: 259011 - protein, 350 aa, unidentified
MIIGVDYHPSFQTMAFLLEETGECGEQELNHSDGQAEKFYRDLKQRGIRVRVGMEATGYSRWFERLLAELGFEVWIGDPAEIKAKRVKTLKNDREDARLLRRLMLEHNFPRIWVPDPENRDLRQLLWHRHRLVQMRTRIMNQLQALAMNEGYRWRKKLFSEQGRAQLEKLSLAPWASRRRQELLELLDRMNPTIEELTAAVEREARKRPAVQRLMTHPGVGPLTALAFVLIIGTWERFPRGKQIGNYVGMIPSENSSAGKQRLGHITKQGNSLLRFLLVEAAQAAARVHPDWRRRYVHLAMRRHRSIAKVAMGRRLAVRLYWMWRNGCEYSQSLEFGSYAGQLGTGHGAK

SEQ ID NO: 259012 - protein, 371 aa, unidentified
MNEFSKYIGLDVHKETIAVAVAEAQGGEVRYVGEIANTEEALAKLVKQLRKGSANLSFCYEAGPCGYGIHRQLTDLGWDCQVVAPSLIPKKAGDRIKTDRRDSLMLARLHRAGELTAVWVPDGAQEALRDLTRAREDIKHLQLQARQRLLAFLLRHGRRYDGKSKWTLTHYRWMETVKFDHPVQQIVFQEYIDTVKAMNKRIEALDKQIESAAGESVFWPVIEGLMALRGVSLLTATTIVAEIGDLRRFASAPQLMAYLGVVPSEHSSGGTKSRGGITKTGNGHVRRVLVEAAWTYRHPARKTACLQRRAEKASDAVQEIAWKAQTRLCGRYRKLEARGKLSVQTCTAIARELTGFIWAIGQAIPQPTASA

SEQ ID NO: 259013 - protein, 353 aa, unidentified
MDQFIGCDAHKEFSVFASIDEEGVYGPTRRVGHERTEFRRFLRTLPAGSSIALETSGCYYWIVDEMEAAGHRPRLAHAMTAKRRMEGRHKTDARDARGLAMLLRNGTLPEVWIPPSGLRDQRELLRWRMWLSRTRTRVKNRIHAIAQRYNVQIDVADLFGNAGRCALLERLNEIPTYSRTSLLEQLNSVDWLDNSLSECEQGLEQMLYPSLERDLLDSLPGVGKILAAVLALEIGDIRRFAGPDHLASYAGVVAAARESANRKYEGRCPRDCNVYLKWAFVEAGNVAATHRKRWADRHVAQLYERVKQSSKKHGKAAVAVGRHLAEASYWILKKQEPYQEPRSQRQSLLSTHG

SEQ ID NO: 259014 - protein, 338 aa, unidentified
MPLYSGIDLHANNSVVVLLNEQDQVIYQRRLANHLPEILEALAPYQADVSGVVVEFTYNWYWLVDGLMEAGYRVHLANPAAMQQYSGLKYTNDHSDARWLAHLLRLGVLPEGYIYPKAERAVRDLLRKRAHLVRQHTAQVLSVHNLLVRNTGVRFGAKRIEELTPSELVSMLSNPEQVLAVTSSLAVLHCLGQQIKTLEKAVQKRLKHTPAYAQLQTVDGIGTILAQTIVLETGDVGRFPTVGNYASYCRCVGSTKISNGKRKGQGNVKNGNPYLEWAYMEAAQFAIRFSPTVQRFYQRKQAKSHLMIARKAVAHKLARACYYIMRDLIPFEVHKAFG

SEQ ID NO: 259015 - protein, 344 aa, unidentified
MQHYVGLDVSVKETSVCIVDKAGKVIREVKVASEPVAILAVLTEEALAIERIGLEAGPLSQWLYSALAETGLPVICVETRHMKAALSAQINKSDRNDARGIAQMMRVGLYRPVHVKTMASQKRRMLLTSRQLLQAKALDIENELRGTLRNFGLKVGMVGTVKFEARIRELVADHPDLAAIVEPLLIVRRVLREQLGVLHRQLLEIVRHDEVCRRLMTTPGVGPVVALAFRATVDVPSRFTSSKAVGAAFGLTPHRQQSGEIDRMGGISKCGDAMMRKMLFEAALVLMTHSRKWSWLKAWGMKIARHRGMKRAIVAVARRLAVIMHRMWVDGTEFRWTRKEAAAA

SEQ ID NO: 259016 - protein, 419 aa, unidentified
MSFKIIKNNCCGLDVHKTWIFACIGITDSNNRTEYKQARFSSFTKGLNQLCDWLAKYNCKDVCMESTGKYWIPVFNILEHHNLWVTLSHPKYTKPMKGNKTDRKDAKWICDLYMCGMVKPSFIPTADIRELRDLVRYRYKLTCMITGEKNRAQNCLTVSNLKLDEVFSDVFGKSSRSITEQILQHPGEAFDVAHFVHGRCKTPIEEIQAAVDGAISKEQAVKLRQCLDHIDELNKHISELEQEILRLSDKYEAALNLIRTVPGFDKNPMTAVQILSEIGGDMSVFPTAKHLVSWAGCCPRNDQSNQKIKSTRISRAGSYFKPVLVQVANALIKSKKHLEFTNRYKRIKARRGHKKAIIAICRMILTAIWHILSDLKPYTPEGFLESHPVKEGKVLSSSQALNFFKQRGYIIKDEPLSVS

SEQ ID NO: 259017 - protein, 410 aa, unidentified
MELMHRRCCGLDVHKETVVACLRLVSDGQVTTAVRTFQTTTADLLRLSKWLAENDCTHVAMEATGVYWKPVWHILDDGEFALLLANAAHVKNVPGRKTDVNDATWLAELLAHGLLRASFVPDTQTQEMRTLLRTRKQLVREQSSHVLRVQKTLEDANIKLDSVLSDVMGKSGRAMIEALIAGETNPTKLASLADRRVKGSQDELREALRGRVTKHHRFLLRLHLNQIDALAAAMATIDAQVEESLEPFRTAVELITSIPGIKNLSAHVIVSEIGIDMSRFPSAAHLISWACLCPRNDESAGKRRSNRVRKGAVWLKTTLVQCAWAAVKKKDSYLQAQFFRIRARRGQKKAILAVAASMLTAIYHMLKDGTLYQDLGRNYLDRRSTDQQKKRLVKRLADLGYAVALTPLAA

SEQ ID NO: 259018 - protein, 431 aa, unidentified
MIAAPAPTGSEALVGGKTQMDRLYDCCCGLDVHKQTVVACLIRPAPGIGQTKTIRTFATMTDELDALADWLGEAGCTHVAMESTGVYWKPIYNRLEGRFTVIVANAGHIKTMPGRKTDVKDCEWIADLLQHGLVTASFIPDEGQRDLRDLTRTRTSLIDERSRSIQRLQKVLEDANIKLSGVATDIMGVSARQMLDALVAGTSDPATMAELAKGRLRAKREALERALTGRMRDHHRAMIAMHLTHIDFLDEQIEQLSQEVTERLRPFAPELERLQTIPGIKRRTAEVIAAEVGLDMSHFPTAGRLASWAGMCPGNHESAGKRKTGKTRKGSKWLRRALVQAAQAAARKKGCYPSLQYRRLIVRGGPKKALVAVGHTLLITVYYLLTRQEDYHDLSLLQLDEELRVRAKKRAVQQLEAMGFAVTLSPKSVAA

SEQ ID NO: 259019 - protein, 342 aa, unidentified
MEKHTTIAVDLSKTVFEIAVSNFPGRVCERKRLSRAQLVPFLANRPGATVLLEACGSAHHWARQIEPLGHRVLLLPPHQTRRYVLRDKTDGADAEALLEAHRNEKIIPVPIKTIAQQTLTALHRIRSGWVQTRTARLNAIRGILRELGLFIPQGPRHVLPALAGFLSHPQQPIPDQLHPALLTFAAEIRTLEQNLRDTDRHLNAFARRSSDGSRFLTIPGIGVLGATALIGFVGPLDRFRSGRRFSSFLGIVPREHSSGPRRHLGSITKRGDPYLRILLIHGARSALVAASRAKHPDRLQAWALRIKQRRGHNCAAVALANKIARIAWALSVHQTNYRSSAA

SEQ ID NO: 259020 - protein, 333 aa, unidentified
MTTMTPVSTYAGIDVGAEELVLVLRQQGTSLKPQHFANTTADRTRLLKKLIKFPGLTVSLEATGVYSMDLAVALHDADIRVMVLNPKASHHFAKVLLRHSKTDGVDADTLAQYAERMPYQPWARPSHEALALRVFARRLHALTRQKAAAKNQLHALSASKENPKAVLRDVNLSISQLERRIERLSDNALALIGEHPELDRVFKLLTGIKGIAQTSAIALMGELLLLPQGLSHREWVKFAGLDPRAFDSGKSVHKKTRISKAGNRHIRSALYMPALSAKQHDPYVKAYFQHLVDNGKKPLQALCAVMRKLLHAIHGMLKHDKPFDNTRFYAIPA

SEQ ID NO: 259021 - protein, 413 aa, unidentified
MYIVGIDIAKKSHQAAIMKPDGTLVGRSFRFTNTKQGFEFLMDKLAAVDSSLENFEFGMEATGHYWLNLYTWLADNHATVHVINPLQSDALRNLYIRKTKTDSVDAKIIAQVIRIGQYSETKLADDRMLMMRDLCRQRFFLVDMVANLKRKIIVMMDRIFPEYQGFFSDTFGKSSTAILRHCTTPEEITLFGEDNLAQLLQVASNGKFGLKKAQELISLARNSFAARLSSKTLSLLVKQMMEQMELLQNQIGILEKHISSHFKSFGTKITQIPGIGPVLGASILSEIGDISRFANPKKLCAYAGIDPSVKQSGQFLGNENHMSKRGSGYLRRCLWMASFVSVNHCREITIVYKSQVSKGKTHFQSMGFVCHKLLNIIYTVLKNDIDYSPMLCVNPAITARTSRRIARAALKAR

SEQ ID NO: 259022 - protein, 373 aa, unidentified
MKKVRFLGLDVHAETIAVAIAEPDGEVRSLGIIPNREESIRKLVRKLGPAEQLQACYEAGPTGYVLYWQLTALGVKCEVVAPTLVPVKAGDRVKTDRRDATKLARSYRAGDLTAVWVPNEEHEALRDLVRAREAAKQDQLRARHRLSKFLLRHGRRAPVGIKVWTQKYQEWVQQQVHFEQPAQEYTLLDYLHEVEHMADRIRRLEQAIEEAVKLAPQRMQEVIQALQALRGIAQISAVTVVAELGEISRFEGARQLMGYSGAVSSEHSSGKRIQRGSITKTGNAHLRRIAIEAAWAYRHRPAIGAALRKRQEGLSEEVKEIAWKAQHRLHKRYRSFVAAGKEKQKVVTAVGRELLGFIWAIGVQVERNSKRVA

SEQ ID NO: 259023 - protein, 414 aa, unidentified
MVVGWAHWIGTTTEVPVSHDVWAGIDAGKIAHHCVVINDAGEKLLSRKVSNDEADLLRLIKDVAAIANSGRVQWALDLNAGGAALLITLLVEHQLDFVYIPGRTVHHASAAYRGDGKTDAKDAAVIADQARMRRDLHPFRQRDEITMDLRLLCARRTDLAMDRNRAIARLRATLLEYFPALERAFDYAHHRGALTLLTRFQTPAAIRQAGPVKISAWLRRHGAYSPDTIAQTAVSAAASQRTVVPGQQTAAKIAAQLAQQVITLDAEMDTIEADITERFRDHAYAPAIESMPGFGPLLGAELLVGINGDTANYENVDRLASIAGLAPVPHDSGRITGNLKRPRRYDRRLLRACYMAAHNSLRTNPESRAFYDRKRAAGKRHNQAVLALARRRLNVLWALIRDETTYQPVTLKAA

SEQ ID NO: 259024 - protein, 318 aa, unidentified
MNVIGLDVSKDTIDATLITTKGSKDYIKISNSTEGFENLINWIKTKRIRKIAISMEATGIYYEQAAEYLSALYTVYVINPLKIKEYAKSQFSNTKTDKADSKLIAEFASRHLDKLTSFRPSENPILYKLINLLQQLKEQQKETQNRLHTAKDIYIKSTHEAIIELLEEKIDQTSKRIEGMIKQKESLNIEYQNLQTIPAIGKETAVILLRHLTDKNFETANKFVAFAGLSPKIEQSGTSVNKKGRLSRYGHRQLKRALFMPALVAYRMNAFPQLVRNLEAAKKPKMIIIVALMRKLAKIAFYIHKTKKPFDKARHQTV

SEQ ID NO: 259025 - protein, 352 aa, unidentified
MEMVGGLDLHRRQITFRTVDLRTGELQRGKIYPGAREAVREWLDQFQSGTDAHFALEGTTGWRFVVEEIERRGFTAHLADPAELSERRGPKRRAKTDHADCELMVNLLLEGRLPQSWIPPAHILELRALVRLRKTLVDQRIEWQQRLQAQLFHQGVVPGLHLCRPEDRRRLAEMEMSPAGRQVMQTGLSMLDAFDWHLEALSAQLVRLGKTQPGCRALEHELFGVGWLTAVAIVAELGDCRRFHSGDQAVRSSGLDITVHESNGRRPGGHLARQGPAVLRWALFEAARCAARKASPDHAYYVRVRDHIDHNRACLSVARKICRRACHILKDLGDAAMAPPRPPSVSRDPKAA

SEQ ID NO: 259026 - protein, 333 aa, unidentified
MGEKLTTIGIDVSKKSLDVCIYEGEKKSKLLKFNNEEKGYEKLLNYVEKEVEEGEKIYIMESTGIYHLRLAIYLYKNGSKVVVLNPYVIKKYSEMQMKRSKTDEIDARLISEYGYENKKRLLYFKPNSQEQYEIEQMLKLISNYKDLISKLCNYREGIKHNPYPSSKVLRDIEKQITNLKESIKKLEKEIEKKLKKSFKKEYEQLRSIKGVGAMLSASIISILNNFEEFSNAKKVSAYLGICPGVKESGTSVRGKGRIIKQGNRYIRKILYMCSITAMRYNKSCRELSERLKAKGKKWKEIVIAVANKLIRQAYGILKNGTFYEDDYCCKMLK

SEQ ID NO: 259027 - protein, 481 aa, unidentified
MSKQKKHSEPLGEEKTAAGRGKRDRKGRGMCLEDRPILEANAAGIDIGAREIFVAVPPDRDEHPVRVFATFTEDLEKMAKWLVSCGVTTVAMESTGVYWIPPYDVLEQHGVKPCLVDARGMKNVPGRRTDWHECQWIQFLHSVGLLRAAFRPDGDVCAVRSLMRHRTELVEMTSQHIQHMHKALTQMNVQIQHVISDLTGVTGLAIVDAIIAGQRDPVALAKLRDPHIKASEETIRKSLVGNWRGEHLFTLEQSRKSYQHYQEQITACDEEIEKLLVAFVPRVDPAERPLPPDRKRRQRGRKKKNVNPKTGFDLRTESYKLFGVDLTQIPGLMAMVLTLFSEVGRDMTRWPTAGQFVSWLALCPDNDISGGRVLWRGMRRVHNRAGDLFRMAAYSLHHDQTPLGDYLRRMKSKLGPAGATTATAHKIAIIFYTMVKKQVEYDATLWEQRDAEREKRFEAKLKRQAAQRGYKLVPIEEKPAA

SEQ ID NO: 259028 - protein, 417 aa, unidentified
MNSPPETNPIQRYIGIDIHKYYVMIGGQNRHQEWTLRPRQVQMARFRSWAEKNLKPEDEVVVEATSNVWDIYDIVVPLVRKTVVANAYKVRQIAEARVKTDKEDIKRLITLLIADIVPEVWVPPCHVRELRSLISFRWRLTKQITMSKNRLHSVVQRFNLNAPEGGLLTDKNKSWWDRQEFSDLTGFQVERDLEIVEHMEGQKEAIDQKLAELSNTEPWASEVVYLMQIPGFGLIFTMVILSAIGDISRFARPRELVGYAGLGAGVHASGEKYQEKSITKAGRKELRWALVEAAWVAVRSDPYWKAQFIRLKKRMHVNKAIVAIARRLLVSIWYILTKREPYRHFDEETIAYKMLIWSWAMDEKSRDGMTPQQFAKYGLLRLGVGQDLERIVRGGAPRRIAPTEDILALKPELAPPR

SEQ ID NO: 259029 - protein, 304 aa, unidentified
MNGIGIDVSKRQLDIGTTDGETLQVGNNRSGFSELDVWLKKRPTRQIVLEATGGYEQPVLDFLHKAGHPVVRANALRARKLAQGLGQIAKTDRLDAYALAQMAALVKLPPYQPLQSWQQKMREFVRARRQAMDALTIARQQQEMVLDRELRRLLQGNITRLQTLVERLGKQIVEQVGQQPQLKMLKSMKGVGPVLQAVLASYLPELGRISGKRIASLVGVAPMSHDSGTMRGKRSIHGGRAEIRQVLYMAAMSAMRHEPRLRDFYQSLRARGKEGKVAIVAVMRKMLVILNARVRDAESGLVPA

SEQ ID NO: 259030 - protein, 321 aa, unidentified
MRNAVGLDISKLTFDAAAIVGGIEESAKFGNDPKGFEAFKDWLDKFGSDAHVCMEATGNYYEEVADYIGSFYKVSVVNPLKISKYAESRFVRTKTDKQDAKLIAEYCRSAEAKDLIVRKPMKESDYRLKRLSALYGQLVEDCTVQKNRLETAKDDFVREICRKVIDCLQKQLKTVKAEMTELTKHNQYSGVVKRLETIPSVGRLTAVMLLNHLVASDFKTANQFVAFAGLAPKIKDSGTSVRGKGGLTKLGNRKLRAALFMPAMVAYRIKAFPDFIQRLEKKKKPKKVIIVALMRKLAVIAYYLYTKGQDYDKTRYQTVSN

SEQ ID NO: 259031 - protein, 457 aa, unidentified
MQSFYLGSDVSKGYADFVILDSRKQQVMKNFQLDDTFEGYCRLHDILSQFLAAHPDATLFAAVESTGGYENNWYNALVKFQSTLNIQTARLNPLGVMYNSKADLKRNNTDKISAQNIAEYLITHSEKVTYQQQDQMATLRKQWGFIKMLTKQSTQLLNQLESLLYTANTELLGYCKNGTPDWVLKVLLKYPTAAKLAKARVPALARIPYVTSERAQELAISAKRSVASASDRITEKLVAATVKQILNLKKTIDEQAELMVKECSMPEVDILKTFTGISDSSAIGLILEIQAIERFKTVKKLASFFGIHPVYKISGDGSGSFRMSKKGRKEPRKILFMVALTAIRSNPLIRNIYLERTEKGMEKMAAIGLCMHKILRILYGMLKHGKPFDPQIDLDNRQRSVKKKPAGRRDKSRRFQDYDSNAPISRRQNKKRLERKQSHSVNDTKFGINAPVPEFAS

SEQ ID NO: 259032 - protein, 352 aa, unidentified
MKYYIGDDAHKKYSVFSIVDEKGVMSSCERVPHDKETYRKYLSTLPENSPIAIESVGNWYWMVEAMEQAGHTPLLVHPRKAKLMMGRINKTDKLDARGLAMLKLNGSLPEVWIPPAEIRDQRELSRMRMALVSVRTKFKNRIHATLAKYAIVIDDVSDIFGVKGRVQLKEVIKELPFETRQSVEEQLILLDQVSGQIEKIEKHMREVVKATPMMQLIKSLPGVGDILAIVIALEIGDINRFASAEHLASYCGTVPRINSSGDKTYFGRVRVDVNHYLKWAYIEAANCIALQQNKMDGRHVSVLLKRIQKHKGYAKAAVAVGRHLAEATYCILKKNQPYKEPNLNKPVLSSRG

SEQ ID NO: 259033 - protein, 355 aa, unidentified
MQSNKISFKGQNIYVGIDVHLKTWHVTTLTESGYKYSFAQHSDAKELFDRLNKKFPEAHYKSAYEAGFCGFSVHYALTELGFENIVVHAADIPTTGKEKTMKTDAVDSEKIAWSLKRDELRGIYIKDKCFMDDTNLMRLRQRFIMDLSRQKNRIKHLLYTQGVTYPERFHNSKTHWSRNFMKWLREEVELLSEEKMALTLLCDQVENTRMAILTVTREIRRLSTTDKYRENFSLLTSVPGFGLITSMSMLTEFDNNPTRFPNERKFVAMLGLIPTCHNSGEKKVSGEKTNRGNKQLGPLIVEASWVAIYRDYQLGAYYSSCCQSMKPHKAIIKVARKLACRAYAVLKTKTSYVLS

SEQ ID NO: 259034 - protein, 427 aa, unidentified
MARAIGLDVHLEFCEVAIAEDRAVRSAGRVETKPDALELFAQSLGPDDRVALEVTGNAWEIARIVEPHVARVVVVSPADTGIRQARAKTDRLDARTLARLLWSGELDAVWMPDRVTWVMRRRLSRRGQLVWTRSRAKNEIHAVLMRCLVGRPPFADLFGVKGRRWLAELELPVEERETVDAGMRQVEFLDTEIAAVERLIARDALASEEIKRLMTVPGVNVIVAASFVAAIGDIGRFHNPRKLVGYLGLDPRVRQSGSGPASHGHISKQGSVRARHALVESCWSAVRQPGPLHAFYQRVRARRGHSVAIVACARKLACLFWVLLTREEDYAYAQPSLTRKKLRLLELAAGAQRYSPAGDGVWHANEAVRAAERELAHQAEIAYQRTVRDYHATQATTKGAGATPGRASSSRQSGKQRGRATVPDPAL

SEQ ID NO: 259035 - protein, 329 aa, unidentified
MILTEPVRTCLGLDIAKAKFDACLLLGPRAHHAQFDNSTPGIAALRAWCKKLGAPAPHTVLEATGRSGELAATALHAAGWRVHVANPRRIKDHARSLGQRNKTDRIDAALIAGFGTTRALPEWQPASAAQQLLRALMRRSADLATMLQAERNRSESAADPLVAKSLARVVRALEKETASLQAQITAHIQATPELREDTAHLCQIEGIGERTAAWLAAEVPRHLPSARAAAAWLAVTPRVRQSGSCLRATAPVGTEGNRHLRRVLFMAALTARRRNPRLKVFADRLAAAGKSKMSVLLAVVHKLIKIAFTLLKNHCAYDPNHHPTPIAKN

SEQ ID NO: 259036 - protein, 356 aa, unidentified
MRQTLMAGIDLHSNNVMIGVMDRSGKRLKHQKLACDLEQVDQFLKFYKARLKSVAVESTYNWYWLVDGLRARGYCVKLANPAGMEQYSGIKHADDKNDAYFLAELQRLEILPEGYIYDPVLRPVRDLLRRRSGLVHQRTALMVSFKSLYVRTTGRALGLSQLKAMSVLEAVGLYEHPANQLIARVQKEHIEQLSQSIERIEKVVLQSARALPYYQKLNTVPGIGRILGMTITMEVGDIGRFPSAGDFASYCRAVASERTSNEKFKGQNNRKCGNKYLGWAFVEAANFAKRHDPQCRRWFDRKAARTSTVIATKALACKLAKAAWHVMAGSVDYDGQRVFGRAAGSQTGRVGINPED

SEQ ID NO: 259037 - protein, 355 aa, unidentified
MDSTKYIGMDVHKETISIAVLNSSGKLVMETTIETKASTLLQFVQGLRGSLHVTLEEGTWAAWLYDLLKPHVTKVVVCDPRKNALLKAGNKSDRIDARKLAELLYLNKLKPVYHGEHGVRTLKELSRSYLTISGDLARVMTRLKALYRSWAIPCAGKQVYAPRYRSEWLGKISEAGVRRRAEFYYQQLDELSSLRQQVRRELLAESAKHKASKLLCQIPSIGPIRAAQLIAILQTPHRFRTKRQLWAYGGLAIETHSSADHRYVEGQLRPSKKQVSLRGLNRNHNHELKNIFKGAAIIAATKAGPFQEFYTALVAKGIRPEMARLTLARKIAAITLIVWKKGVCFDAQHLKRQTA

SEQ ID NO: 259038 - protein, 340 aa, unidentified
MNATTYGLDVAKRVFQLYWVDAHTGEIVNRRFGRDELIGFLAPRPAGRVALEACGSGHWWARKIRALGHEVVLLHAKFIRPFVQTNKTDAADARAIWTAVQQPEMRTVAAKTEDQQAMLALHRMRALLVKFRTMQVNQLRGLLYEFGVTFRAGRLAGLAEMRARMAELEDALPAMLFDGLQDQLHRIDGLEQGIDQLEKRIGAWHKQDAACRAIAEVPGIGRLTATALVAMIGDARTFKSGRAFASFLGLVPRQSGTGGRVRLGSISKRGDPYLRTLLIHGARSVMHHAKVPTPWQTTIQARRPANVAAVAVAHKMARTAWAILAHGRTYEKDYLSVKPA

SEQ ID NO: 259039 - protein, 388 aa, unidentified
MPQPNDLSRSLVALDQNSTIIAVVEMSQSSWLVGGILPGIERQPRKKLEPNPERLLALLHRWRDESVRAGRTITRIAVAFEAGRDGFWLARWLEARGVEAHVIHPSSVAVSREHRRAKTDRLDTELLKRGFLGWLRGERGHCSMARVPTIAEEDAKRPNRERECLVKERTRLVNRMKGTLARLGIRNFKPTLRQAAERLATLHTPEGTPVPPNALAELHRDVARLGFVVGQIKQIEKARQKRLEQPESESGPHAKVRLLARVVGIGIETADMLVHEVLTRRMRDRKAVARYAGLTGAPDESGARRREQGLARAGNARVRRGMVQLAWRFLRFQKASALALWYQARTADGRASTRKTMIVALARKLLIGLWRFVTTGELLEGVILRTAG

SEQ ID NO: 259040 - protein, 323 aa, unidentified
MTVYLGIDIASKKFDVAELCDGNYRCKAFENTSAGFLALYKWLGQSTMPDIHACLEATGDYGTSLATFLYENKIKVSVVNPARIKGFGASELSRTKTDKADSKLIARFCKAAVPDGWKPTPAPLRKLQALVRRISALNGMLRMECNRRENADANIQASLDRIISLLKTEIEVVRQEIKDHVRSDDELKKQDALIQSIPGIGAVSSNLILSFMSGKGFKKAKEVTAYLGLNPRHHQSGSSVRGKTRMSKMGDARLRSALYMPALVALRYNPDIKAFGQRLLLAGKPRMLVVGAVMRKLIHIVFGVLKSGTAFSSRIAVHSVVTS

SEQ ID NO: 259041 - protein, 372 aa, unidentified
MGMKARCSCRDTIAGFTLEELTPSLRAEQRTMSKVTVYVGLDYHKDSIQVCVMDAAGKVLVNRSCRNDARALTRLVAAQGNRVRGAIEACSGAADLADELVGRYRWDLDLAHPGYVHRMKQSPDKSDFSDARMLADLVRVGYLPKVWLAPEDTRQLRTLVRFRQQLVNQRRAAKLRVTALLREARVEGPGTRRWSRAWLAWLATAEGLGSEARWVLDNHLADLRRLDEAVLRVEARLAKVTAGDPVVAQLVALRGVGPVTAWALRAEVGRFDRFHSGKQLARYCGLSPQNASSGQRQADAGLIKAGSELLRATLIEAAHRLIRFDTRWGALAARLRAAGKPACLVAAAVANRWVRWLFHQVEGGSITLRAAS

SEQ ID NO: 259042 - protein, 315 aa, unidentified
MHIQQSFMVGIDVSKAHLDVAVEGKRAVVRFDNNAPGCAALTAAVAGAELVVVEATGGYEMAIVRTLMAAGIAVAVVNPRQVRDFARASGRLAKTDQVDARVTLHFARAMRPAQIPHIDDGRIALAALVTRRRQLIDMAVAEKNRLEHAPEAVAALIGETLAALKAQLARVDAAIALAIEAEPDMAARRNLLLTVPGIGEVSAAVLIAELPELGAIDDKKLAALVGVVPIAHDSGTWRGQRHIAGGRATVRCALYMATLSAIRCNPAIKTFHKRLRDAGKPPKVAIVAAMRKLIIMINTILKRRTPWNQPQQHGC

SEQ ID NO: 259043 - protein, 413 aa, unidentified
MEIVYHICCGIDVHAKFLVACLLRDGVKHTRKFSTMTGDLINLRDWLISEGCERVAIESTGVYWKPVFNILESALPVILVNPEHVKALRGRKTDVKDCGRLAEFLSVGLLEPSFIPPPHIRRLRELIRYRESLIRTHTAIANRIQKVIESGNIKLGQVASDVLGASGRAMLRKLAAGETDPVVIAQLARGTLRKKLGDLHLALRGELNEAQRFVLGELLQRVNELETAEYKVGRQINQAICDCEHPELFKAWELLQTIPGIGEQVAEVVVAEIGANLREVFPTAGHLASWAGVCPGNKATGGKRISGKTRKGNRYFGCAMVQAAWAATHTKKTFLSAKYHRLVRRLGKKKALIAVAHALTVIIYNVLVRNEPYNELGADYFDRNHSDKQRKYLVKRLEALGFTVALEQKVEAA

SEQ ID NO: 259044 - protein, 338 aa, unidentified
MNIVFLGIDLAKNVFQICGLNQAGKPVYTKRTGRKELLQMLANIPACLIGIEASTGAFYWQREFEKLGHNVKVISPQYVKPFVRGQKNDGNDAQAIAVALMQPTMHFVPPKSPEQQDIQALHRARQRIVNHRTATVCQIRGLLLDRGITIGAAVSRVRRAVPLILEDAENGLSVRMRSTIAELYDLFNDLERRIHFFDKEIETVYRQSEACQRIAKVKGIGPKTATAVVAAIGKGTEFKNGRHFAAWLGLVPRQHSSGDRQVLMNMTKKGDKHLRTLFIHGARAVVRVAANNNDSHMNQWVNQLKERRGFNKTTVAVANKNARIIWSMLRNETEYQVV

SEQ ID NO: 259045 - protein, 354 aa, unidentified
MEITSIGIDLAKHVFQIHGVDSAGKTVLKKQLRRDQLAAFVVQLPACLIGMEACGGAHFWARKFQPMGHRVRLMAPQFVKPYVKSNKNDRADAEAICEAVGRANMRFVAIKTPEQQAVLALHRARQGFVQARTAQSNQIRGLLAEFGQVFPQGLAALRQRVPDILEDASAELPGVFKALIQRLLDHLKVLDTQVSELDDQILAWHRTNPDSQKLQQIPGIGPITASALVASVGDVSQFNCARALSAWIGLVPRQHSSGGKERLLGISKRGDVYLRTLLIHGARSLICQAQAHPERYAWLNALIGRSNANIAAVALANKNARIAWALMAHDRAFKVNYRPEQNLPACTSAVQDNR

SEQ ID NO: 259046 - protein, 342 aa, unidentified
MSEIITVGLDLAKNAFQVHGADASGRAVLRKKLRRDQVLAFFSQLGPCVVAMEACGGAHFWGREIGKLGHDVRLIPPAYVKPFVKRQKNDAVDAEAICEAAQRPSMRFVPVKSEETQGAASVFRVRELLIRQRTQAINALRGHLTEFGQVVPKGAANVARLVAIVDDPESGLPAQAVATLRVMIGTLASFDAQIARLDTEISHRAKEDVVARRLMTIPGIGPLIATAIAVLAPPPETFRRGRDFSAWLGLVPRQHSTGGKQRLGATTKMGERSLRRLLILGANSVIIKRHVHQTARPGTWLAGMLTRKPPMLVRVALANKMARIVWALMVKGEEYRAPAMAA

SEQ ID NO: 259047 - protein, 395 aa, unidentified
MYSLLVGIDVSKDFFATAGIDSEGKESFSRTCSMDSNGFGDFLKTITSHREDLSRVLIGMESTGCYHINLFSFLTSQGIRTMVVNPLLVANFAKLSLRKTKTDKKDAMTIARFLLDHHEEISQLAVSQGLQDLRDLSRERESLSHLISATKVEMKRVLRTTFPELETIGDIYTGVMLRLIQEYPSARLVRAAKPRAIAKLLKGPYVGNKLTFTAEDILRAAKTSIATVSPAKEIILQGKIATLLHLQDRLEAITKLLTDLCKATRVDDLKILRSIKGVGPKTAAPFLAEMGTVDNFLSHKKLIAFAGMDPSVCQSGKFVGMSKISKRGNRHLRRAIYLMTASVVSKNDWFKAYFQKRKAEGLPPQKALFATAHKLIRVIFAMLSQRTYFKVKEAI

SEQ ID NO: 259048 - protein, 415 aa, unidentified
MKVVFPICCGVDVHKTFVVATIITTPADSLQPIYQKKRFSTFNSDLNRFADWLLEHGCLDVCMESTGKYWVPVFNILEKRGIQVVIANPKWVKAVKGNKDDTKDSKWIGDLFRIGLVKSSFIPDLNIRILREFTRYHYKLISMKSSEKNRFQNAFTVCNVALDSVVSDMFGKSATAITDYLTSDESFDPEHCVSLLQRSLKKKAEQVLESIDGFSIAEEQKARIKIIREHYDFIEKMIAKVDTCVNEMVVTYEGEINFLCTIPGIDRNSAITIISEIGTDMRQFGSSKRLCCWAGLTPGNNESAGKKKSVRISRAGVYLKPALVQVAHAAVKDKENPYYALKYERIAKRRGKKRAIIAIARMILTAIYSMLCTGEIWNPVDLYKIDMPEHLKEQQLAKAIKQATRFLEKHGLSVA

SEQ ID NO: 259049 - protein, 340 aa, unidentified
MDTIGLDLHKRESQLCILTEDGELIERRISTSRAEFSAVFAGRPNSRVLLEASTESEWVARHLESLGHRVVIADPGFAPMYATRSSRVKTDKRDARTLCDALRLGAFRPIHRVSEPQRHVRSELAVRDALVRTRTRYVAIIKAAVRREGLRLSSGEAQNTAQKLASLSLPTPVVAELAPLVDLFAPLNAAIDAADARLVRLARQHPAVTRLCTMPTIGPITALAFVAALDDVARFQTANQVRAYLGLVPSEYSSADRRIRGRITKRGDVRARWLLVEAGWRVLRSSQPELASLKAWAEQVARRRGKRIAAVALARRIAGILYAMWRDDHSFTGATRAVAA

SEQ ID NO: 259050 - protein, 428 aa, unidentified
MDYTQNAKIAQVTEKTLIIGVDIGSESHYARAFNWRGQELGKKVFHFNDDVDGYKAFKNWIEAHKAQLGAEKVIVGFEPTGHYWFDLGWYVKQMGVMLVLVNPYHVKQIKELDDNSPKKTDFKDPKTIAKLVVDGRYSIPYIPEGVYAELRQAVSSRDRIVKEQNALTNRIKRWLKIYFPEYLKVYTKYSAESGLLLLEKAPLPAEILELGVDGITQIWRERKLRAVGKKRAETLVEAAKNSVGIEGGACAKLELQMLLADYRTKQEQLEQVEAVLEAEVLKVPHVEKLLAIKGIGLITVAGFLSEVGEIGRFDSPKQIQKLAGLELKENSSGKHKGQTSISKRGRKKLRKILFQAVLPLIRSNTEFYDVYRYYTTRQRNPLKGKQAVIAVGCKLIRIFYTLLTKGVDYDAGKMRTDIIRPMEDTQAA

SEQ ID NO: 259051 - protein, 328 aa, unidentified
MAKSITICAGIDTAKWKLDVALDGSKERLQVENKPEGHKVLLTWLYQHRVKRVGIEASGGYEQPIVSELRRKHIVVVVFQPVQVRAYAKFQLQRAKNDKIDAALIAACTAAVRKIHAAPDPRLQPFAEQLTMIDQIGEDIARLKNRSESCRDAQINKLWKAEIARLEKREKVALKALVASIRKHPDLAKRLELINSVDGIGLPTAVTILVRLPEIGQITREQAAALTGLAPYDDDSGGYVGVRHIEGGRKRLRRALYTASLAASFRWNPQLIALYQRLIAAGKQHKRALVACARKLLIFANTVVARGTPWCDQPPATKASLTAASSVS

SEQ ID NO: 259052 - protein, 339 aa, unidentified
MVRIITGGVDTHADQHVAAAIDHNGGVLGTESFPANEAGYEALLAWLVSHGEIERVGVEGTGSWGVGLSRFLHSHEVVVVEVDRPNRQHRRKMGKADDTDAISAARAALSGSAAVTPKTRDGSVEEIRILLVARRSAREQRIQTLNQLRHLVFTAPEPIRCRFKDRPKTGLVTEVSKLRPRAGSDPITYTTLLTMRGLGRRIKHIDAEMRTIDERLRVLIDGTAPSLLELHGVGLDTAASLLVTAGDNPERLHSEGSWAHLCGVAPISASSGKTTRYRLNRGGDRHANAALYRIVLTRMSSDPRTRAYVTRRRAEGRSNREIVRCLKRYVARETFKHLS

SEQ ID NO: 259053 - protein, 411 aa, unidentified
MGKASRVWHLRRFPRQPTRCSMSQPNNSNKSVIALEQDNTMIAVIEMSQASWLVAGIVPGLERQPLKKLRSDEQALFQLLQRWRNEAVQTGRTIKRLVVAYEAGRDGFWLARWLRARDIEAYVIHPNSVAVSREHRRAKTDRLDTELLKRAFLGWLRGDAGHCSMAAIPTIEEEDARRPNRERENLVGERTRIVNRMKATLARFGIRSFKFTLRHADERLNDLRTAEAASLPANTHAELRRDIARLRVVRDQIKEIEQQRLQRIEQAAPSEKSLHAMIRLLARVIGIGVETADMLVNEILSRQLRDRKAVARYAGLTGSPDESGKRRREKGLSRAGNARVRRGMIQLAWRFLMFQKDSALAQWYRARTAHARGGTRKTMIVALARKLLIALWRMVTTGEIPEGISLRPAVA

SEQ ID NO: 259054 - protein, 342 aa, unidentified
MEKIATIGLDIAKSVFQIHGVDGSGGVVVRRRLSRVRVLPFFAKLPRCLVGIEACSTSHHWARELISLGHDVRLMPAQYVKPYVKRGKNDASDAEAICEAVTRPTMRFVAVKTPEQQSVMMLHRVRLMLNRQRTQLSNAMRAHMSEFGIVAPVGRMGLERLLEIIADRDDKSIPADARICLEMLGAQLAVVKEQILENDRRIRASARETEVGRRLMDIPGVGPLLASAFVASVADPSMFKTGRDLAAWIGLVPRQNSSGGKERLGGISRAGNRYLRQMLVVGAMAVIRHAERHGTKRAWLIELIKRRAKKVAAVALANKTARMVWALMTSGEHYREPVVVHA

SEQ ID NO: 259055 - protein, 387 aa, unidentified
MAKQNDLSRCLVTLEQDATVIAVIEIGQSSWLVAGIVPGLEGNPLKKLNPDQDALLQLLHRWRKEAVQAGRTIKRIAVAYEAGRDGFWLARWLRAREIDAYVIHPSSVPVSREHRRAKTDRLDTELLKRAFLGWLRGEPKHCSMAAMPTLDDEDAKRPGRERQSLVGQRTRIINRLKANLARLGIRDFRPNLARASSQLEALRTPEGAAVPANTLAELRRDMDHLRFVKQQIKEIETTRAKRLAGAPNEQHHAMVRLLARVIGVGIESADMLVQEVFSRNIRDRKALARYAGLTGAPDESGKRRRERGLAKAGNARVRRGMIELAWGHLVHQKASALTAWYRKRTSDARGGTRKTMIVALARKLLIALWRLVTTGETPTGLLLRPAA

SEQ ID NO: 259056 - protein, 413 aa, unidentified
MEVLYPRCCGLDVHKSSVSACALVREGARTHKKYARFGAMTRDLEELAGWLHELGVTHVALESTGVYWKPVWNVLESQFHLLLVNAQHVKNVPGRKTDVKDSEWIAELLQHGLLRPSFVPEARIRDLRDLTRARASLSEEASRVVSRIQKVLEDANVKLAGVATNTVGKSGQAMLDALVLGEDNPEKLAELALGHLRAKIPQLRLALEGKVRDHHRFLLQRLLIQWRFVIEEIAVLDQRLEQIGAQEPSLLAAVARWVTVPGIDRVAAWSLVAEIGVNMAQFPSAAHLASWAGVCPGNHESAGKRLGGRMRKGSPWLRRMVCQSAWAAARTKNTYLSAQFRRLASKRGKHRAIMAVAHTILIISYYMQKNQCDYQDLGTDYFDRLHADGLKRYLVKRLEGLGHKVTLLPQDAA

SEQ ID NO: 259057 - protein, 439 aa, unidentified
MRDANEREIEFAAYIGIDWAEQKHACALQSSTTSGVEESELLHKPEAVEAWATELYRRFGGRPIAIALEQSRGSLLFMLLKYEHLVLFPVHPSTLVNYRKGFRPSGAKSDPSDATLLVDLLIRHRERLRQLRPDSEQTRTLQFLVEGRRKFVHEKVRYSNRLTAYLKMYFPQVLEWFSAVGSPIVGAFLLRWPTLEKLQKARPDTLRKFFREHNSCQSDSIERRVQEIREAVPATHDRAVIRSCSQAALSFARMLREVRAAIRSYDEDLELLTREHPEFALIDSLPGVGPALAPRLIAALGTQRDRYQSASELQCYSGIAPVLASSGKQRWVHWRWACPKFLRQTFQEWAVHSLASCVWAKDYYEQQRAKGKPGNTVVRALAYKWIRILFRCWQDRTPYCEASYLKTLERRRRFAPQVSPVKLRWKTSAGFRKIEAATS

SEQ ID NO: 259058 - protein, 369 aa, unidentified
MAKPITYVGLDVHKDTIAVALAEAGLRGEVREHGKIPNTPAALKALTVKLATARREQRFCYEAGPCGYGIQRQLTEAGHECAVVAPSLIPRKPGERIKTDRRDAINLAKLHRAGELTAVWIPDQAHEAIRDLVRARQAAVRTLRQARQQLSGFLLRHRCHYHRPAWTQLHRRWLASLKFDQAVHHIVLEDCIAAVEAAMARRDRLEAHIEAVLPEWSLAPVVEALQALRGVRLVAAATLVAELGDITRFTNPRQLMAYLGLVPSEHSSGRTRRQGGITKAGNGAARRMLIEAAWSYRFPARISREQLLRQERLAKPICDVAWKAQERLCRRYRKLARAGKLPTVITAAIARELAGFIWAIAKQVQPTAT

SEQ ID NO: 259059 - protein, 419 aa, unidentified
MSDSFRFFVGVDLGAERHAVVLLDAAGEVLGRRSFAHNGAEVLELFTWLAKLTGAGSHEIALAAETPRGSIVEAALEREHPVFSINPKQLDRFRDRFSMAGAKDDQRDAWVLAASLRTDPHCFRRLRLGDPRVVLLRELSRSEAQLQESFRRAANQLWSLLQRYFPALLTLAQAADEAWLWSLLRTAPLPAAAARLKLPRLEKILSRHRIRRFSAAQLTELLKQPPLPMAPGAAEALAESALLLVPQLELLHRQLAQLALRIEKTIDALQQDADFPQHRDLEILRAFPGLGRVFTATVLAEAYGPLVERDYHALRTLTGAAPVTKQSGKTCLVQLRRACNHRLQHALFHSAQVFAQKDPRAKRQYQLLRDHGETHARALRGVGDRLLELLFVLLKAGSCYDPQRRKVAPLEGTPPQKSS

SEQ ID NO: 259060 - protein, 366 aa, unidentified
MSSVASAAGLIHLGMDTSKNTIMVATLLPGEENPVTDRITNEEAAIRRLVGRFADRSVLRCCYEAGPGGYELFRLLASMGVACDVVAPSLIPKGGSDKVKTDRRDSRRLARLHRAGELTAVRVPSPAEEAVRDLVRARGAVLEDRKRAQQRLTAVLMRHGRIWRGASYWTAAHRAWIAAQRYGEPALAAAIGYYRATLAVREAELAALEAELAPWAGREPLAGPVARLGCYRGIAELGGLTLAAEVVDWRRFPAARAFMSYTGLVPSEYSSGERTRRGHITKAGSEPVRTALTEAAWSYRHAPAIGAGLRRRQAGATPETLARSWTAQRRLHARYTHLLHGGKAAPEAAVAVARELAGFVWAEMTA

SEQ ID NO: 259061 - protein, 374 aa, unidentified
MRDHSEAFVAIDTSKLRNAVAIAEGGRTGEVRFLGEIDNTPAATAKLVRKLAGQYERVAFCYEAGPTGYGLYRQITGLGHACIVVAPSLIPKRAGDRVKTNRRDALAMVTQFRAGELTAVWVPDPRHEAMRDLTRARGAAVEDLRRKRQQVSAFLLRLGRHYAGDKTWTKAHMSWLASQKLEHAEQRIAFEEMLLAVRQAHERVARLETAIRAAVPDWSLAEAVQALMAMRGIDMVSATAFLAEIGDLSRFQTPRELMAFLGLVPSEHSTGETVKRGPITKAGNRRARRTLVECAWSYRHPPRVGKKKQDKVAAAPRAVREIAWKAQNRLYGRYRALIRRGKLKTVVVTAIARELAGFIWAIHREIAPAQAAAR

SEQ ID NO: 259062 - protein, 379 aa, unidentified
MTSTEVAAEARETVYAAIELSKKTWVLGIAFPDRDRPSIHRVSGGNVAELVSRLRVAARNERRILVCYEAGYDGFWLARVLAKMGIECRVLDPASIQVNRRARRVKTDRIDVLALLRALIAIDRGERHVCAIVRIPSVEEEDARRSHRERQRLIRERTGHINRIKGLLFAQGIRDIKPKLRRTRVDFAALETAEGRPLPDRLRRELEREYARLALIETQLREVEKERDMADAQDPTVERKRQMLVALQGVGGTSAAILAREVFARPFASRRQLGSYLGLTPSAYDSGSVTRCQGISKAGNSWARRILIEVAWLWQKHQPVSPLSHWYTQKTSGQSSRIRRIMLIALARKLAITLWRYVETGLVPEGVVIAEAEPRSAPA

SEQ ID NO: 259063 - protein, 344 aa, unidentified
MMNIQLKETIDEAKPHLFAGIDVGAEELVLVILKNGKSFDPQKFANTPADRDRLVKKLVKLPGIIVCLEATGVYHFDLSLALHDAGVLLMVVNPKASHNFAKVLMKNSKTDAVDANTLAEYAARMDFVAWTRPSNETIALRSFARRIDALTSQKAAAKNHLHALTATSETPKAVLKDVKLAIAQLEKRIDRLTAGALILIGKHPELERILALLIGIKGIGNTSAIALMGELLLLPPDLSHREWVKFAGLDPRAFDSGKSVHKKTRISKAGNRHIRSALYMPALSAKQHDPHVKAYFQHLVANGKKPLQAVCAIMRKLLHAIHGMLKHNEPFDNTRFYAIPASAE

SEQ ID NO: 259064 - protein, 324 aa, unidentified
MSDPDVFVGIDVAKATLCVHIQPEGDAGGHERTFEVANAGKGISSLVADLLKLSRAGRRLAIGFEASGGYERELGQALFDADLPCFLIDPARVRAFARAERQIAKTDPLDARLIARCLKAVGHSLRPYAPNPLVLLLAENVRTRRHLLDQAVELEAQIETLSAPTLRRMMARQIASLRATAKAIEIEMRAILAGDGGTEQLYRRLRTAPGVGPILAATLVASLPELGRLSSRQIAALVGVAPFDRQSGRTDLRRTCHGGRPAVRSVLYMACISVTRMKRGPLKAFYQRLRENGKPPKVAIIATMRKLLVTLNAMVAKNTDWRAA

SEQ ID NO: 259065 - protein, 394 aa, unidentified
MKLIGIDIGKNKHFFCVMDQQTGEIISQPVSFSNDKEGFDFLVQKIKSYPKDSILIGMEDTGHYHFALLKYLLDLQYTVALINPKTTDFNRKIQGGITKNDKLDTINICDVLDTPERKKQYRITKVNSFDLYEQKQLTRHHHNLKEEENVYKNRLQKCIDIVFPEFNKLFNSKYGIVYMNILKMFGSAENIANTDIRTIRKCFEIEGRGNRISLTPERLKECARSSIGISSSADVIQIKHLTAQIELIEDQLTEIDKKIEEFSIQNNSPILSIPGISHFSGTSILAELGNISNYSKPSQIIKFAGVAPLHYESSQFNAQHTAITKKGSKYLRKTLYQIILPIIRHNPVFNKYYQLKISQGKGHRCAQGHCVRKLLRIIYHLLKTNQQFDPQLLR

SEQ ID NO: 259066 - protein, 412 aa, unidentified
MQIIHPCCCGVDVHTKTVVACLIKQGTKQVRTFSTMTDDLLAMSDWLVAEGCTHVAIESTGVYWKPVFNLLEGVLEVILVNARHVKAVPGRKTDVRDCEWLADLLRHGLLKASFIPPLYIREIRELTRYRQTLVKEQTAVANRVQKLIESGNIKLGQVATDVLGVSGRQMLRALADGEHDTEKIADFARGQLKKKKNELQRALEGRLTKAQRFVLGELLKRIDELTAAIVRVNEELRAEVSRSTDPFVAEAVSLLETIPGIGQRIAETIISEIGVDMSRFPTDAHLASWAGMCPGNNESAGKRLSGKTNTGSTYLRDALIQAAWAATHTKQTYLAAQFRRLVRVKGKKRALIAVGHSILVIIYHVLKQRASYQELGGDYFDKQNTEKLRARLIRKLESLGVKVTVEMMAEAA

SEQ ID NO: 259067 - protein, 412 aa, unidentified
MMEVLYERCCALDVHKKTVIVCVATRDGKQTRTFATMTSDLLELADYLVSKGCTHVAMESTGVYWKPIYNILDGLGMELLVVNARDIKAVPGRKTDVKDAEWICDLLRHGLLRGSFIPDRSQRELRELVRYRKGLVQERSREVNRIQKVLEGANIKLGDVATNVMGKSGQAILEALVQGNTDPESLAGLAKGKLRRKNEQLARALQGLIGPHQRMMLSTQLGHIRFLDGQIERLNREVEERMRPFEEAIEAIDAIPGVGRRIAEEVLAETGADMAQFPTAAYLASWVGVCPGNNESAGKRKSGRARKGNPHARQALVEAAQSAAHTKDTYLSSQYHRIAARRGNKRAIVAVAHTILTIMYHILTERTTYRELGPDHFDKLNQDAVARRAIKKLETLGYKVTIEPLSTLECSA

SEQ ID NO: 259068 - protein, 444 aa, unidentified
MAVRKREDEVFPNAAGIDVGASSHWVAVPRHLAEQAGCEPVREVGAMTDDLKDLADWLIRCGVDTVALESTGVYWIPVYEVLEQRGLKVWLVDARQMKYVPGRKSDVQDCQWLQKLMSLGLLRAAWRPASEVCVVRAVARQREILVAEQASWVQRMQKALVQMNIQLTEVIADVMGQTGQAIIRDIVAGQRDPRVLARHRHRRVKASEDDIVKALTGNWRDEHLFVLGQALAMYDDIARHLQTCNAKLDALLAERGAANVDIGKAPKAGSKARMEFDVRQALANWAGVDLTRINGLGVTTVMKLVTEVGPDVSRFATVKHFCSWLGLCPGTKISGGKVLSSGTKRSANRARQALKMAAMNLSHSDSALGAFYRRLCTRMDKPRANTATAHKLARMVYFMLTRGEAYVDQGQQHYDELQRQRSIAALQRRAAALGFQINPAMAAA

SEQ ID NO: 259069 - protein, 412 aa, unidentified
MEVVHRRCAGIDISKKDAKVCVRVQGSGRRATTASVTTWGAMSNEIMALREHLVAEKVTCVVMESTGDYWKPFYYLLEDAVNVMLVNPRDARNRPGRKTDVSDAAWLADLGAHGLLRASLVPPPPIRRLRDLTRARTDLNRDRVRQIHRLEKILQDAGIKLSSVATDIMGQSSRAMLEALIEGKTDPAALADLAKRRLRSKIPALTEALTGRFTAHHGYLIRMHLNLIDSYTTALRDLDTKIIDALSPSLAAARDRLCSIPGWSTTVAEVFLAETGGDMTAFPTAGHLASWAGVCPGANESAGRVKSTKTREGNRNLKGALGIAALSATRSRDTYFAAKYRRICAHRGPMKALVAVERAMVVAAHGMLTNGDFYRDPGANYFTARRPGSIKANAIRQLQALGYAVTLEPATA

SEQ ID NO: 259070 - protein, 456 aa, unidentified
MKRRHRASHGAAPLKPQRTNVAAIDLGAREHVVGGPARADGAANVQRFGTTTPELRRLVRWLQEQGVRSVAMESTGVYWIPIYELLQAEGIEAVLVNARHLSGVPGRKSDLLDCQWLQQLHSCGLLKGSFRPDEAICRLRAVQRERANLIAERTRIVQRMQKALDQMNVQVHHAVTELTGKTGLAIVRAIVAGERDALQLAQLRDKRCQKSVAQIAEHLSGSWREEHLFNLTMGLRRYDEIQRVIADYDAQLYRWIAEVQPPERATQSVPAHPNARKEKKIRQDGEQPIREALWRWTGVDLCRIDGIRAAAAETVLTEIGLDLSAFATEHHFVSWLRLSPKTATSAGKPVPTRRASTAVTRVAGVLRMAALSLSRSPTALGAYYRRVARRKGAAVAVFATARKLAQLIYRMLRYGQDYVDEGAKAYEARFEQRRLRQLTDTAHQFGYRLVPLADAA

SEQ ID NO: 259071 - protein, 321 aa, unidentified
MTYIGIDVSKDSFVAAYPAKSGYTTKSFQNTASGVHKFISSLPNECHCVMEATGNYSMLLLYLLQEKGIPASMENPQKIKHFARAMLSTTKTDEIDAKLIALYGEKMNPASYKIPSESVLLLKQKRTVLRQLKKQLTMMTNMQHSFAALPKQDPASKVALEQTIKFLRKQISKLEEEITNISNKEFRRQMALLTSIKGIGDEIASALIIATGGFTYFSSAKQISRFLGLCPTYQQSGTSVNVKGHINRNGDTYLRSQLYIAAVSSIRFNTACREIFERLKANGKSGKVAIIAVANKLIRQAFAVVINNRPYEDGYVSSLAK

SEQ ID NO: 259072 - protein, 360 aa, unidentified
MEKIITPIGTPVGVDVHKRRCTVAEFREGKIHRRQPIANTREEWLEMLTELPPDAEIGLEVSTAGYYAMSVLEAAGWGERAHWIHTAGIDSHRRQKNDRLDAERLARKLAAHHLDPLPEAWFPPPEIRRLRLRARARCWLALLRTQCKNHLQSLLQMHGLLAPGSDPFGAAGQRWLAEQKLPPPLSESLPQIQRLLQLLEEEIKISEQHLEAVEKDFPERVLWRSIPGIGALLAPVLGSEIGTIARFRSAKALANDTGLVASFYDSGDVQVSGPITRHGSRWLRGALVTAANVAMQYRHPFARRDHRLRRGKKPNLAKAAIAHSLARCVYGVLKHSCPSREDRGGRKVGAREQETRGSHR

SEQ ID NO: 259073 - protein, 429 aa, unidentified
MNCTQNKKIEQVKETTMIVGIDVGSEKHYFRAFNWRGIELTRKPVAFSNSMEGFNSFYNTIVELMQKSELEEALVGIEPTGHYWFALGQFMGEKDIKFVMVNPHHVHKTKELDDNSPSKNDRKDPRVIAGLVRDGRYFYSYMPTGVYAELRNASNRRFVLVEEQTRAKNRLQKWIAVYFPEYKGIYTHIDAKGGMLVLKKAPTPEEIVRLGVEGIIKIWKDAKLRGNGHKKAMLILAAAMRSIGLKAGLTEARMEIQDLIEDYELQTKRLERVNDLIKGLCQQVRYADKLLEIKGIGITTVAGFIAEVGDITRFDSTKELQKLAGLELVADSSGKHNGKTKISKRGRKRLRYLLFEAAISVVGKNEEFKEIHRYYTTREKNPLKKMQSLIAVACKLIRVFHAILTKGIRYDASKMLKDIRHPGEQLKAA

SEQ ID NO: 259074 - protein, 369 aa, unidentified
MDYQSVAYIGFDTSKTKHAVAVAEGGREGEVRYLGEIEAAPAAVERLLRKLARQYKSLHVCYEAGPTGYGLYRHIRALGQVCDVIAPSLVPIRPGDRVKTNRRDAVTLARLLRAGELTAVWVPDEVHEAVRDLVRAREAAARDLRHKRQQVLSFLLRHGRIFTGHRHWSRAHLRWLAGQAFRHPAQQVVFQDQVDAVADAQARLERLDRHLAELVPTWSMAPVVAACQAMRGVSFLVAVTFVAEIGDVRRFESPRQLMAFLGLVPSERSTGDTVRRGGLTLAGNRRVRRALVEGAWSYRHPARVTETIRVRLEGLPKAVREIAWKAQVRLSARYRRLVAAGKRAPVAVAAIAREMAAFLWAIGRVVEPA

SEQ ID NO: 259075 - protein, 374 aa, unidentified
MHAESISVAVAEAGRQGEVRSLGVVPNRPECVRKLVKKLGARKSLAVCYEAGPCGYELYWQFVQLGVACEVVAPTLVPVKSGDRVKTDRRDAIKLARCYRAGELTAVWVPDRSHEALRDLVRARHAAKCDQRRARQRLGKLLLRYGRRPPQHKRAWGAAYMVWLRAVRFDEFALQATLIDYLAEVDHAAARLERLERAIDEAVGGAPQETQALVAGLQALRGVAKTTAVTIVAELGRLSRFDHPEQLMGYSGLVPSEHSTGGPGKAKRGGITKAGNCHLRRVMVEAAWAYRHRPSVQGNLKKRQELLSEKITSTAWKAQHRLHDRYRRLVVHGKLKPVVITAIARELLGFVWAVGCQVEQETSTAAPASGARAA

SEQ ID NO: 259076 - protein, 417 aa, unidentified
MEDNPSTSPCRYVALDIHKYYSVVAGVDREGEEILSACRVEHLDLENWAIKHLLPTDRVVIESTTNAWHVYDLLEPLVGEVQVANPIKVKQIACARVKTDKKDTLILARLLAANLVPLVWVPPKPVRELRQLISHRRRMAGMHTQVVNRMHSVAHRHHLNHPKGKDFQPKNTGWQRDESLSRLEKMQLELDMETREHLEKQIERMTRELGRMSHEEPWASEMLYLMQIPGCGVVTGMTILAAIGDITRFETPKALASYSGLVPGLEQSGVKLRGKGITKEGRRELRWVMVEVAWRAVKADPHWKKYFEELKRRMHPNQAIVAIARHLLTMVWYVLTRHEPYSHYSPERIAYKYLTWSWALDKEQRQGLTRPQFARYYLIRLGIGDELERVALNPKFPYRLASTEEVLSLRPELLPPE

SEQ ID NO: 259077 - protein, 418 aa, unidentified
MDRVVADIINPIACGLDVHSAVIVACLVRPGPRGGPSYEERSFATTLRGLRELRDWLLAAGCQAVGMEATGVFWIPVYSVLEGHVPMVVGNPNHMANLRGHKTDRKDAKWIAGLIRHGLIRPSFVPKAEFRDARELTRARRQLINARTGIRNEITRLLAHQGIPLGVKGLLSDIFGVSGMGILEALAEGRDVIEELPKLLYRTVKGKKEAISAALEAGLRDALRPLLSMHLTRLEAVEEDIQKVEELIAKQLSPYQDKLDLLMTIPGVSLISACVIIAELGIDMSQWPTSKHLSAWGGVAPGCRESGGKVRKAKTRKGNPFVCTTMVECAGAAVKKKNCQFAGMYRHLCARTGSKMKARMAIARKLLVIVYHVLSTLQPYVEPKPKEPTARSKEKSIRRHILELKKLGIEIPLPAISA

SEQ ID NO: 259078 - protein, 389 aa, unidentified
MIYVGIDVAAEKHACCILTESGKVLKQFTFSNDMPGFEKFHKALLTPSETKIGLESTGVYGNNLAEFLRRNGYETHIFNPLLVKKSIQATTLRKTKTDKSDAKHIAQYTKEHSQPNPKISYHTSELKSLSRGRFSLVRERSKVKTQAKGLLVQLFPEFSQIFSDIFGAAASAVLRQLPSARMIAQCPVGVLTDLLRTASHGRLGKVKAELLIDLAEHSVGIQSMALELQMQMLLQQIDLFTLQINRYEAAIKSEMETIQSPITTIPGIGCVLGAAILSEIGEIRRFATPAKLQAYAGVDPSVGESGSSVSTPGRMVKHGSHYLRWALCQAARCVSLYDPIFAVYMKAKRDEGKHYCVACSHVAKKLTRVIYSILKNNTAYSLTYSQIGA

SEQ ID NO: 259079 - protein, 349 aa, unidentified
MVVLGVDAHKRTHTVVAVDQLGRKLGERTTGTTSQDHLGLLRWAEKFGQQRLWAVEDCRHLSRRLERDLLGAGERIVRVPTKLMAHARDAARSYGKSDPIDALAVARAALREPQLPAAQLEGPARQVRLLVDHRDNLVAERTRAINRLRWHLHELDPSWQPPARTLWRPKHLQAIGDRLAGVDGTVARLARGLVERCRQLSIEIAAIDKELEVLVGPLAPALLELCGCATITAAKIVGETADVRRFRSRHAYARHNGTAPLPVWSGNRVRHRLSRAGNRQLNAAIHRVAITQAHYHRDARAFLERRRAAGDTKAESLRALKRRLSDVIYRALLLDAELNPAPPTVLDAA

SEQ ID NO: 259080 - protein, 320 aa, unidentified
MSAPSPVFVGIDVSKARLDVHILPLGRVLAFDNDAAGCQKLVEQLRPLGVSLVVMEATGRYQRRAAADLISAQIPVAVVNPRQARDFARSLGKLAKTDAIDAEVLARFAGVGHLRTCEKQPENAAFLDDRITRRRQVIAMLNAEGNRLAGMIDKTTIRMIKRVIRLLEQQREDLDRQIATLIESDDDWRGKRDLLQSVPGVGSTTANGLVAELPELGKLSRQQIAALVGVAPMNHDSGTMRGQRAICGGRASVRCTLYMAAFNAMRYNPLIEAFSGRLSAAGKPFKVVVTAAMRKLLTILNAIIKSNTPWRNGLCVTQNA

SEQ ID NO: 259081 - protein, 470 aa, unidentified
MSASKKKSTRSGTRPSSPAPDRPPREQPVPLAVAHPHAAGIDVHSDNHWVCVGPDQVRMFGAYTVDLEAIADHLKDHGVTSIVMESTGVYWIALYELLESRGFEVFLVEPGQLAHCGARPKTDRLDCQWLQRLHTYGLLRGSFRPPESILALRAYHRQRQMLIRYAAGHVQHMQKALEQMNVKLTEVLSDITGQTGLAIITHILAGERDAKVLAALRDEHCKKPEEEIARALAGVWRAEHLFELRQAYDLFQFYQKQVAACDEQLQAELAQLPARSGDKPVPHKARRHRSKNGPRFDACGPLFKALGVDLTEIEGIDVGTALVILAEIGVDVSRFPTEKHFASWLGVCPRDARSNHTQKKRSPRKGKHRVKQALRMCAQVVGRTQTPLGMFYRRIKSRIGGMGAVTATAHKLARLVYRMLKYGKEYVQQGMEDYAAKMKANVERALRRKAGALGYDLVAKVESQAAAALG

SEQ ID NO: 259082 - protein, 323 aa, unidentified
MQHLAIDLGGTKSQICVRSAEGQILHEQALETARLGRFLKRQPTSRVVLETCSEAFRVADLAVSFGHEIRVVPATLVRSLGVGARRIKTDRRDAQVLSEVSCRIDLPSVHVPSDLARQRRSMCTMREELVATHTSLINCVRGWTRTQLLKIRPGDTKTFAKRMRAVALATKDGLPEYVERLLQVIEALQQQIVAADDELRSLAEEDPICQRLMTVPGVGPVTSMRFVAALDDRNRFPTAHAVEGFLGLTPGENSSSERQQRTGITKAGPAPVRRALVQAAWNLRRIRPSDPISQWAAQLEQRRGKFIATVAVARKLADILFAL

SEQ ID NO: 259083 - protein, 318 aa, unidentified
MEPKLVVASIDVHKKMLAVVVVDEDHPHQALEQRKFGTNGGELKHLAAWLASHGVNLVVMESTALYWRPVWLVLEGQYILHLAQAQSNAAPRGRKSDYADALRLARRFLAAELRLSFVPDAEQRTWRCLSRGKHQKRRRRVQIQNQIEALLEESQIKLSSVITDLLGVTGYRILKALSEGETDPAKLAAMAAHNRRASQEQLAEAVSGPMQSRHRTVLAMQLEELDLLDKHIAELSRQLGDALRLHQDAVLRLCEMPGLREDAAWQIIAELGPAATAFETAEQMASWIGVCPGRKESAGASKSNRSPKGNRTMRRVLN

SEQ ID NO: 259084 - protein, 414 aa, unidentified
MDLEIKHEVACGLDVHSAVIAACLARTGPKGGPRYEERSFPSTQAGLRELRDWLTSSGCQAVGMEATGVYWMPVYAALEEHLALVVGNPGHMKNLRGHKTDRKDAKWIAGLVRHGLIRPSYVPTPEFRDARELTRSRRQLMEARTTVRNEIHRTLASRGIPLSSVLSNVFGVSGMSILEALVEGRPVVEDLPKLVHRSVKGKLPALTAALESPLSEDSRYILGLSLTRLEELEEHIQGLERRITAHLEPHLETLKRLTGIPGVGMTAACIILAEIGVDMSHWPTERHLSAWAGVAPGSRESGGKRMSSATRKGNLHLTTILVEAAGATVKSKTCHLTAVFHRLKSRMGYKKAIMAIARRLLVIIYRLLSAQADYKEPQPTLADDKAKLRSVKKRVKDLERMGFQVSLTPIETFV

SEQ ID NO: 259085 - protein, 341 aa, unidentified
MTEIYAGLDISDKTTHVCAIDKDGKVAWRGVCATDPQALASALKAHCEGLVRVVLETGPLSSFLYHGLIERGIAVVCICARHAKGVLSVQVNKSDVHDAHGLAQMARTGWFKAVHMKDSQTHMDRARLKIREQMVQAHNAMINQMRGLLKLFGLRLGGSTTPGMRNKRLEALLCQKPELRSVFAPLVASLTALEDQIKALSATLKARAQSDAVCERLMSVPGVGPITALTFVCSIEDPARFAHGYDVGAYAGLVPRRFQSGERDSQGHISRAGDGNLRHTLYEAANNLLSRVKKPFALQTWGKALAVTKGAKRARVAVARKLAILLHTLWSSNERFDWDAA

SEQ ID NO: 259086 - protein, 347 aa, unidentified
MRFYTRQHLHYCGVDLHARTMYVCVLDQEGNVLVSKDIASAPEPFLELIAPYREDLAVAAECMFTWYWLADLCAREGLVFVLGHALYMRAIHGGKAKNDRIDAHKIAALLRGGMMPQAYVFPQAMRATRDLMRRRNYLMRQRAELLAHITNTNHQYNLPALGVRPARPAERSGLAEHFAEVPVRKSVEVDLSLVEHYDRQLLPLERYLESNAQAQDPVALAIVRSVHGMGKVLGLSILYEIHDIGRFSRVQQFLSYCRLVKPTKESGGKILGHSGKKIGNAHLKWAFSEAAVCFLRANKPAQALRARLMAKHGKGKSLAIIAAKLARAVYFMLRRSEAFDAERFFAH

SEQ ID NO: 259087 - protein, 345 aa, unidentified
MEQYAGLDVSLESTSVCVVDSTGRVIRETKVLSEPEALIGWFQEHGTPMMRIGLEAGPLSQWLYAAMENAGLPVELLETRHVRAAFKAMTIKTDRKDALGIAHLMRMGWFRPVHCKSVPAQEVRALLTARKLLQNKRIDIEMSLRGILRGFGLKVGPTTPKNFEGRIHELVEGHTILTQIAHAMLTARAAIMKEFKAIESRLLAQSRRDERVRRLMSTPGVGALTALTFVAAIDDPQRFGSSRMVGAHFGLTPRKYQSGETDVTGRISKVGDHAVRVALYEAANIILTRSAKTSALKSWAQALAKRAGMKKAKVALARKLAVVLHQMLKSGSRFSLAGVPQSVAA

SEQ ID NO: 259088 - protein, 392 aa, unidentified
MKTNAIKEGTVEEAVQGRKTHQLIKLGVDVHWHEYVVVRQIDGSSPQSAQRFSPEGFVAWAAKQTQQAEQVWCCYEAGPFGFVLHKHLERLGVRNMVVRPRNWDEYGAKVKTDRRDALALCSSLDRYLAGNTQALAVVRVPTDEQEHSRSQTRQREQLVSERKRLGAQGLCAARYYGYDLPDQWWRPRRFAALQSQTPDFLLELLARWQRLLLAIDEELDSLGGLIESAQQQMLPTGLGALTAQILDREIGEWNRFKNRRQIASYTGLVPSEHSSGQTQVRGSITKHGNPRLRHILIEAGWRLRQFQPEYRAVKQRQAAFDVAKQKGNSPARKRLGVALSRQFIVDWWRIKTGRTTPAQLGLQMSWPTCPHLPSKPKPSSETSAQPNTQPID

SEQ ID NO: 259089 - protein, 421 aa, unidentified
MENNAARKLKQVPVGYLRVGVDPHKKKHVAVTMTEDFLVQGKFKFTNSRDGFEEALKRARADMEKAGCQGVIFAVEAASHLWRNFAYFLDEEGIPFRLINPFSLKRRREGKDLNRRKNDFRDAEVAAQLLCTGEFTETTLPQGVYAELRATYNAYRRVVKERTRLINLLKGLLDGLFPEFAQVFKDICGQTALRVLSMCPIPGLIRGMTEEEFLKFVREGYRGRLMRGKLLALHYVARRSAGVKAGAWSVSSEVSLLVEKLCLVDRHIQQIEQALVRLVDEAEEGKYLLSIFGLGYISVAGLVAELGSFRSYHNARQMIKMAGSNPTESESAGKRQSKTPMSKKGRPGLRHCGWTAVLSLLRHNPDFRTWAKRLRERPAHANPLTGKEIMGAAVNKLLRIGFVLAKQQTFYQSPRVPQLVS

SEQ ID NO: 259090 - protein, 428 aa, unidentified
MEPSISTSPSAALSAYIGIDWADQKHAIALRSAAEPSKVQHQVVEQKPEALMQWIGQLEQRFGAQGKILIYLEQSRGALIYHLMGYEFLELYPVNPLQLARYRETFSPGGAKDDRPDSELLCELLYCHRDRLRAWKADSTLTRKLAFFNEGRREAVDQRTALSNAIKSQLKVYFPLALELLNEESSTALAADLLLRWPSLEVLQKQSANTLRKFFYGHNCRGETKMLQRLELIQQAQPLTQDSAVIEPATFRVQLLARQLKSLLVDIARYDQKIAQLFEAHPDRFLFENLPGAGTALAPRLVTAFGSDPTRWDSAQEVATLLGIAPLRRASGKNTGKKASVHFRLACPKFLRQSLHEFAGCSIRSCSWARACYEAQRARGKAHHASVRAVAFKWIRILFACWKQRTPYDPQRYQSALQHRGSPFASAC

SEQ ID NO: 259091 - protein, 349 aa, unidentified
MRFYTEQHRFYCGVDLHARTMYLCILDHAGQVVYDKNLPARADTFLAAVEPFRDGLVVAVECLFCWYWLADLCAKEQIAFVLGHALYMKAIHGGKSKNDQIDAGKIARLLRGGTLPQAYVYPAGMRETRDLLRRRQYLVHKRAEAIAHVQNTNSQYNHPPFGKKLGYAANREELDIADRFTDPSVRKTVEVDLVLIDRYDELLGDVELYLTRTAKVDDPQAYFRLQTICGVGKILALVLLYEIHDIRRFTDVGHFLSYARLVRCAHESGGKKKGSGGKKIGNPHLRWAFSEAACLFLRRSERAKKWMQKQEKKRGKAKALGVLAAKLGRAVYHVLTKKVAFDEQRFWAC

SEQ ID NO: 259092 - protein, 369 aa, unidentified
MAQGSTLFIGLDVHKESIAVAYGSGEREAEVVFLGTVGTRQCDIDKLVRKRQAKGKTLHFVYEAGPCGYWLYRYLTKKNLKCWVVAPSSIPKKAGDRVKTDRRDAVQLARLLRSGDLTPVYVPAVEDEAIRDLVRARKDALKDLKAAKARLKAFLLRQDIRYEGRANWGPAHLRWLAEVVCPTPAQQIVFQEYVRAVSEHTERLQRVDTELQTQVQTWRWVPVVEAIQALRGVQFTVAVTLIAELGDLSRFENPRQLMSYLGLTPSEHTSGERRRQGAITKTGNSHARRALIEGAWAYRYPAKVSRHLQLRLEKLPKVIQDISWKAQVRLCKRYRRLMARGKNANQVVVAIAREMAAFVWAIARTVKVA

SEQ ID NO: 259093 - protein, 353 aa, unidentified
MKKNSITIGIDLGDRQSRYCVLDQDGMREGVVPTSRAGLLRSFGRWKRCRIALEVGGHSRWVSRLLQDLGHEVYVANARQLKLITQSTRKDDRLDAQTLARLARVDPALLRPIQHRSEQAQLDLLAIRVRAQLVETRTGLVNSARGLVKSFGYRLASCDADQMGVGRAGELPEILQRRLRPLLEHIEELTRQIQESDGEIEQIARNYPHIELLRQVSGVGILIALTFVLTLEQAARFSKSREVGAYLGLRPKRRDSGARQAQLGISKEGDPYLRTLLVQGAHGVLSRRGPDTDLKRWGMKLCERGGRNAKKRAIVAVARKLAVLLHRLWATAEVYEPLRQARAIQPACTQTAA

SEQ ID NO: 259094 - protein, 334 aa, unidentified
MDNCIGIDVSKASINIHISKNGQDLKVDNNLKGFKSFRSKLKKIYKKEIEDNVFIFEPTGSYSEALRKYCSEQKIKCFIINPKQFSNYAKALGVEVKNDIEDARILSRVLHLANDDQVKVPVYDEDVERIKELMSYYKFTSKQTTQQKNHLESLVSKDGDSFAIHELKKSIKESKEKEQRIIDQIQIIIDSNAKYKNDYENIISIMGIGQIGGIALLHLFLKYPEANQRQITSLTGLNPIYKQSGTSVQSGYKISKSGAKVYRGSLFMAAMCAIRYDENFKAFYERLKANGKQTTQAQIAVMRKLIITAHSLYRNNRKYDVNYNLQREENMIKP

SEQ ID NO: 259095 - protein, 281 aa, unidentified
MLRAGLHLSCRRLDYCLLDEEGERVEMAAAPPDGDGLQGLVAGVERWHGPVEVRAAIESMNGARFVHDTLERCGWEVEVADAQKVKGLAPLACKNDRIDAWVMAELSRRDLVPAIWLASFEQRQECERARWRLYLVRKRSSLKHRIHAQLLAFGHTCPVSDLFGRQGRKLLARLDFPEPWRGGVLAAIAMIDDLEAQITDIDRELKALGADHPYIPTLMTAPGIAWVLGYTIAAEIGDIHRFSSPAKLCGYTGLCPRVYQSGNTDRRGPLTHAGPKYCGGR

SEQ ID NO: 259096 - protein, 346 aa, unidentified
MKQIIRIGMDTSKYIFQLHGVDAAEQPVLRRQLRRKQMVEFFAKLPPTVIGIEACGAAHYWARELSKLGHEVKLIAPQHVKPYVRRNKNDGRDAEGLCEAMSRPRMRFVPVKTAEQQAALMLAGVREQLIARRTQLSNTIRGYAAEFGITTAKGLDKIEPLLAQIAQGESVPALARELFALQGREYAQLQVELKAIEVKLRAWHRANADSRRLAQIPGVGPIGATALVMKTPDPRAFPSGRHFAAWLGLTPKDHSTAGKTRLGKITRAGDERLRSVLVAGATAVIQQAKHGRGHPSPWLLALLKRKPAKLAAVALANKIARIAWKLMVTGESYDGARMPGASALAA

SEQ ID NO: 259097 - protein, 352 aa, unidentified
MNQIKYIGMDVHKATTVIVVLNTAGKAIAEAVIETTSSSILDFLKSQRGTLHVTLEEGTQAAWLYDLIRPHVANVVVCDPRKIPKQGTKADKIDAKRLAELLRTNALTPVYHGEQSTKDLKELIQSYTSVVEDGTRIKNRLKALFRGRGIDCSGSSIYSPDERKQWLLKLDTAAVRARANRLWEELEFVERLCEEAQQELMAEARKHAAFKILRSIPGIGPVRAAVILGVAGTPHRFRSKRQFWTYCGLSVVTETSSEYTVVNGRVGRSKKRPLVRGLNRNYSRTLKGTFKSAAKTTASGPWKSHFEFMVANGKRESLALLTLARKIASITLALWKKGERYDQKKLKILHAA

SEQ ID NO: 259098 - protein, 339 aa, unidentified
MKLYSGIDLHSTNSYLAIVDESGKRIFKEKLPNEIATITDRLSLYSGTLEGVVVESTYNWYWLVDGLIAAGFAVHLANPSAIQKYSGLKHADDKHDAFWLAEMLRLNILPTGYIYPKDERPLRDLLRKRSHLVSLRSSLLISLQNIITRNCGMKMKTNDIKRLRENRVHPLLADNEDLALAGQVSKESIDFLTRQIRAIETFIEKKIELKDAYKNLVTICGIGKILGLTIMLESGPMERFEKVGNYASYCRVVSSQWTSNGKSKGKGNKKNGNKYLSWAFSEAAEFARRFDDRARAYYNRKLRKTNFMVAHAALAHKLARAAYYIMRDQVEFMPEKIFT

SEQ ID NO: 259099 - protein, 352 aa, unidentified
MIIIGVDFHPEFQQIASVDTDTGEFQEKRLTHREEAEKFYRALIGKKVRVGMEASGHARWFERLLSELRFELNIGDAAAIRSKRVRKQKTDRQDARLILQLLIEDRFPQIWVPSWENRDLRQLLWHRHRMVQARTRIMNQLQAVALNEGLRCKKRLWRDAGREQLESFRLAPWASRRRRDLLELLDRLTPTIAELTQAIEGEVEKCPEARRLQTHPGVGALTALAFVLIIGRAERFQCGKQIASYLGLVPLEESSGQRRRLGHITKQGNSLLRFLLVEAAQVTVRSDQEWRNRYFRLALRRGRKIAKVAMARRLAVRLYWMWRKGWDYEQMTKFSSHAGQPGHRDSVKLNTE

SEQ ID NO: 259100 - protein, 404 aa, unidentified
MEVLYPRCCGLDVHQKTVVACIKTPDGKETKTFKTMTGDLVELADWLAAKGVTHVAMESTGVYWQPVYNLLEQLSFTLLVVNAHHIKTVPGRKTDMKDAEWIAELLRHGLLHGSFIPNRSQRELRELTRYRRSLVQQRAQVVHRIQKLLEGANIKLTAVASNVMGVSGRAMLEAMANGEKSPQVLADLAKGRLRSKLRDLEEALRGLVGPHQRMLLQSQLRHIDFIEAEIGRVDQEVRKRMCSYGDALNRLDEIPGMGRRSAEEILAEIGADVSRFPSAAHLASWAKVCPGSYESAGKRKSGKIGHGNAWLRSSLVEVAQAAGHTRDTYLSARYHRLASRRGNKRAVIALAHTTLVIVYSLLRYGRRYQDMGSNYFDERDRHNTLRRSIHRIERLGYQVVLQCA

SEQ ID NO: 259101 - protein, 351 aa, unidentified
MIIIGVDYHPSDQYIAFVDTETGEYVERQLNHSGREAEKFYRELAARGVSVRVGMEATGYSRWFERLLAELGIEVWIGDAAEIKTRRVRKQKTDREDARLLLRLLRENNFPRIWVPSPENRDLRQLLWHRHRLVQMRTRIMNQLQAIAMNEGQRRKKKLWSEQGRAQLEKLPLATWASRRRKDLLELLDRMNPTIEELTRAIEQEAKKWPEVLRLMTHPGVGPLTALAFVLIIGTPERFKCGKQIGSYVGLIPCEDSSAGHQRLGHITKQGSSLLRFLLGEAAQAAARCDSDLRRRYVHLAMRRQRNIAKVAMARRLAVRMYWMWRNGWEYSEWIKFGSHAGQLGTRHGVN

SEQ ID NO: 259102 - protein, 405 aa, unidentified
MTVYIGIDWSEKKHDVVCMNEKGAVITQFQIAHSADGFAQLDSKLRKLDVTLDNILIGLETAHNLLIDFLWDKGYSQVYVIPPNMTRSCQGRYRQSGARNDASDARLIADLLRTDRHRLYPWHPDSCLTLELRAKVHWFMSLSRSKRRLASQLRAILLRYYPAALQVFGELDSQITLEFIQTYPTPQAAAQLTLAEFKSFVRQHRYPIGKIPGCFACLQAKQPEAARHTVLAYQQEAVQLATLLLQTVRTLAAVQRELTCLFEQHPDRSIFASLPGAGDLLAPGLLVKFGDDRRRFPQANALQALAGTCPVTDQSGQRRRIYFRQACDHEFRHITQQWAKSSIAQSDWASTYFSQALKRGFSTNHAYRCLANRWLAIAWKLWQEGKPYDETYHLQQRAARCRPLH

SEQ ID NO: 259103 - protein, 327 aa, unidentified
MKSIYVGIDISKNTLDFCVRSSGVASFHKIGNKIKSIRKLLKSIAKIDSKAFIAMENTGYYNYNLYQTLKDFDFNVYVIDPKHIKRSIGLVRGKNDKVDAKRIAIFIERNHQDFECWEPCSEAIRSLKILMGQRRSKIKQRKGIKQQMADLKDIVFNGSTRKLIKINQKAIKELDRHIHEIETLIRAEIKSDPVLQEQLKRIKTVPGIGDVTAWMIAIKTEGFQRLTDPRKLACFAGVVPFEQQSGTSLKTRPRVSKMADMALKSVLQMAAMRAVRMQNDLQVYYLRKVEEGKNKMSVLNAVRNKLLHIAMALIKNQTNYKNRLELS

SEQ ID NO: 259104 - protein, 339 aa, unidentified
MKYTPVGVDIAKHVIQIHFINEHTGEVVDKQLRRQDFLTFFGNREPGMIGMEACGGSQHWARELTKLGHKVRLLQARFVKAFVMGNKNDVMDARAIWMAVQQPGKEIAVKTEEQQSVLVLHRTRMQLVKFRTAQINALHGTLLEFGETIHKGRAAMEREFPKALERMKERLPPYLIMVLENQYNRLNELDSLIEDIEKQLTSVARQNETCKRLLDIPGVGPLIATAAVATMGEASAFKSGREFAAYVGLVPKQTGSGGKVRLLGISKRGDTYLRTLFIHGARAVALVAKEPGPWITELKKRRPASVAIVAMANKLARTVWAITAHDRKYDRNHVSIRPY

SEQ ID NO: 259105 - protein, 366 aa, unidentified
MKKISTVQVFGNEILKEQKLTIGVDLGDRWSFYCVLDEAGKIILEQKVPSTPDAMKQAFSRIPRSRIALETGTHSPWASRLFTELEHEVIVAHAQKVQLITKSNRKDDRHDARTLARLVRIDPELLGPVRHRSAKAQIHLTVIRARAELVSARTALVNAARGLVKAFGQRLPKCGTYQVNEKLSEGVGVELRDVLAPLLREVESLNERIKEYDERMEKIAKEVYPEVSLLKQVKGVGTQIALTYVLTIEDPHRFLKSREVGCFLGLRPGRRNSGESEPQKKISKEGDRYLRTMMVQGAHYILGPFGEDSDLRRWGRKLGERGGKNAKKRAVVAVARKLAVLLPRLWVSGEVYEPLRNSQKAMRAVA

SEQ ID NO: 259106 - protein, 347 aa, unidentified
MAILKQVAGIDVAQNELVVSLGRIDHELTVDIFDYKVFKNNVKGFKELVKWAEKQVKNELSVRYVMEATGVYHEPLAYYLTDNGSEVSIVLPNKISNFFRTLDVNTITDKTASEAIARFGLERKLDMWRKPKKIFRDLKQLTRERDQLIVDRTVLKNQLHAESAEAFPNPGSISRVNKRIKLIDKQELEIKAEIAAIVKQDPELVKKIDLMTTIPGVGKLTAVIVLAETNGFELIKNKKQLVAYSGLDVKLKDSGTSVKGKPRISKKGNRHLRKAMYMPALSAMKHNEQHQVLFVRLVSKHGIKMKAAVAVQRKILELMYSIFKSEKPFDKNYTQPKTQELAAEVTR

SEQ ID NO: 259107 - protein, 364 aa, unidentified
MCILYENGSKIESVFGVLTPELDKLRDLLVSHHVCEVALESTSIYWIPIWNILSVDFSLKLVNPYFIKQLPGRKSDVKDAEWIAIVLQKGLIRGSYVPDRMIQCLRQYERRNHELSKNIVHAEQRMDMILQRCNIRISNYVSCISCKGYQKVVNAIISGESNPKVLVTLIHKRTLNKHGRQVVEDSLNGFVSDTDRDILRQYRDERMQMEQHKSENKAKMQAICEAHYCEELELLQTLPGIKEESAANIIAEIGVDMKMFLTASAIVGWAGLKPRNDQSAGKIKSRKITHGNKYLRKILVEAAWSAARTKDSRFMKMYQRLLARGKSKQKALIAVARKLLVLIWNMLSKKEAFNPEYKRRIQAA

SEQ ID NO: 259108 - protein, 320 aa, unidentified
MMAQNDLVVVGIDVAKDKVDACIRSLSLRGTWPNTVQDRRKLIAWLRKHKVGKAVMEASGGYERDWAKALREAGIEVRIVDPKRVRSFARSAGRLAKNDAIDAEMIAWFAETFSEAPGQAHDAAREKLAQIVNARQGLLDLQTKLKNRSEHAGPEPVQRMHARLLKKIAVEVATLEVAIAAMIKANPHFAELAEIIESVPGLAGTTSAGLIAGMSELGQVSNKVAPALLGAAPYDDDSGRHRGERHIKGGRRKVRNLFYMACLGAATQHNPVLKAFYRRLIAKGKEQKVALVACMRKLIVILNTMIARRQRWDPNLYGLD

SEQ ID NO: 259109 - protein, 340 aa, unidentified
MKPIVVGVDIAKRVFQLHWVDGSTGEIVSIQLKREKFLAHFSNRPMCLIGIEACGGSQHWARQLRALGHDVKLLPGRTVKPFVSGNKSDVADARAIWMAVQQPDIRTVAVKSEAQQAVLALHRMRQQLVKFRTAQVNGLRGLLTEYGEIMPQGRAGVLRHVPLALQRLAERLPAVLIDTLREQFSRLHELDAQILQIEQRLRDWHKTDSACRRIAAIPGIGLLGATAAVATMGDPRAFKSGREFAAWLGLVPRQTGSGGRMRLLGISKRGDTYLRTLLIHGARAVLTHCKEPSTWLRDLVQRRPRNVAIVALANKIARTIWALLAHQRTYKPGYAPQVAA

SEQ ID NO: 259110 - protein, 380 aa, unidentified
MRCTINGMSRFFGSERLLPMKKPLQHLIAEVPRSASKVEMTIGIDLGDVWSHYCTLNEAGEVVDRGRFRTSPSGVEKWFTDLPRVRIAMESGTHSIWISEQLQELGHEVIVANVREVRAISHSDRKSDQVDAEKLARYARLDPKILRPISHRTVAQQEALTLIRARNVIVRLRTAAVNAVRGLAKPCGYRLPASSTLCFAKRCLASLPPGLAQALGPVLEQIATMTVKIKYYDRLIKRLTETEYTETQALIKVYGVGQLTALTYVLTLGSKERFQRSRDVGCYLGLRPRRSQSGDRDPQLGITKAGNVYLRSLLVECANHVLGPRGKDSTLRQWGLHLASRGGKQSRNRAIVAVARKLAVLLHHIWVTQEPYIPFYAEAA

SEQ ID NO: 259111 - protein, 345 aa, unidentified
MLYVGLDLSRKRLDYCLLDEQGVRLEQAAAPPDRDGLRSLADRVGRGSAVIAAVESMTGARFVHDELERYGWAVELADAARVRGLAPLACKTDRIDAWVLAELCRRDLIPAVWLPSFTVRGERERARFRMHLVKHRTALKNRIHQTLVSFGTPCPVSDLFGERGRRLLSQLQLPEPWAGTVAASLRLIDDLEREISTLEAELRRLGADHPYLPLVRTVPGISWILGYTIAAEIGDIARFASPAKLAGYTGLCPRVYQSGDNDRRGPLTKRGPRYLRWALLEASIHACRHPLYAERYHHTKQRLGRQRGPRVAQVDLARRLAEAIWHMLTRNQPFAPAGASQVLAP

SEQ ID NO: 259112 - protein, 324 aa, unidentified
MNYAALDLHERTVQCVLKDQDGRIVKESKTVKDEGRILAFLDGTDASVVMESGRNHQHIYDVLKERGYDVTVAHPLMVKAIAYAKVKTDRVDARVLADLLRADMIPESYVPGRDIREIRDLVRRRHYMVKLRTMQKNKVHAELATRWLKYEGDPFTEDGKKYLRSLAIDAVNDYLETIEFLNRKIHQLDEKVRRVVESDKYAKLLMTVPGISYYSALLISSEIADIDRFPDHEHLCSYAKLSPGVRQSGETQHTSKSMGNSMMNWIMIQCTRVHVRKYDSAITRFYQQVSKRRGEKVAIVAAARKLMRAIYIMLKEEQAFRLDG

SEQ ID NO: 259113 - protein, 450 aa, unidentified
MSTLDIVVPTPAAAPTSEFAAYIGLDWADQKHFWTMLVDGKKTRGQLDNTPESIEVWAAELAQRFGGRPVAVALEQSRGAVIAVLSKYAHLALFPVHPNSLANYRKSFSPSGAKSDPVDGDLILDYLVKHPEQLRCLRPDTVETRSLQFLTEERRKLVDAHTATLQSLIHWLKQVFPQIVRWFDDPGAPLVADLLLRWPTLQELKKAQPKTLRKFFHQHNCRSEERTQERLDQILQAVPATDDPALLQTGTLSIQNATRILASMRQGIAEFDRRIAVIYQAHPDRFITESLPGAGPALEPRLIAAAGSLRDRFTSAYNMECCFGIAPVTETSGNSIWIHWRWACSKFIRQTFHEWAACSIRSCDWARAFYDRKRADKKSHHAAVRALAFKWIRIFFRCWRNRVAYSDQHYEEALRTRASQSKPTKTVSKVNSAVEWKSCAGFSRPVKFSS

SEQ ID NO: 259114 - protein, 328 aa, unidentified
MNNNHFCVGIDVGKDELVVSVEQGRPRVFGTSMSEIKRLENWVLKQAGEQQVHIGMEATGVYSRSVAATLSRCKQFKVSVINPAQIKAFGRAMLTRTKTDQVDAGVIREFVRSQSPSAWTPPQPVREQLSALVAQADAIQQEIQRWKNRQHAQQHHGNTTPMLTRSTAAIIRSLERERQRLYQAIDQLCETDKALSKDMALLTTISGVATRSAAQILAYGGDSLVSRTRRQLDAHAGLVPAERQSGTSVRGKSHLAKQGNVRLRRVLYMPTLVAVQFNPLLKRFYQRLLEKGKAKKVALTACMRKLLNIIRAMLIKRTPFNPNYKPLT

SEQ ID NO: 259115 - protein, 465 aa, unidentified
MAKRDAKQQRNRRFNKTLTVINTNAAGIDIGAKEHYVAVAPERDEQPVRRFSAFTQDLHKLAQWLKQCGITTVAMESTGVYWIPLYQLLQDYGFMVKLVNARHVKHVPGRKSDVQDCQWLQQLESFGLLTASFRPEGQICVLRSYMRQREQLIRSAARPVQQMQKALAQMNLKLQHVISDITGVTGMAIIRAILKGEREPLKLAALKDRRIKSDASTIAKSLEGDYRAEHLFVLRQAFELYAYYQQQIAECDAQIYEEMKKLESNSEAVPGTSQRKRSCHNPFHFNAQSELQRVLGVDLTRINGISEATAQLILSELGPQVVTTWPSEAQFASWLGLCPNNEISGGKVLRRGTRKVANRVANALRMCAESLLQSKSALGAYARRMRSRRDTRIAITATAHKLARLVYRTLKYGEEYVDQGQQLYEQKYQAAVLKSLNRTAKKLGYELVIPSTAPYHSSLGGLQGF

SEQ ID NO: 259116 - protein, 370 aa, unidentified
MGLDTIIALDLGKFKSVACLMNAGTRRHSFETLDTTPQRLHDLFVAHHTSEGDDPSSRTLVVIECCDAAGWVHDLARSLGLRCAVANANHEAWRWNKVKRKTDRDDALKLARMALNDELPTVHVPAPPVRQRRRLILHRRSLVARRTQCKNAIRSIFSQQGLSHELPRGSKAWTKPGLEQLAAAARPLDQCAIDDLWRGRLHLELALLEVLHAQILATERKLDELARDDAQVKLLETVPGVGTRLAETVVVCLDDPHRFQSAAEVGSYAGLVPKQMESGTMRRVGRITRRGSTLLRGMLVEVAWMVWRHNAWAKSFVARISRGMRLRKKIAIVALARKLLVILWAMLRDNVPWRESKLPALPDDEVVCVT

SEQ ID NO: 259117 - protein, 354 aa, unidentified
MRIVCALDVHRRQITYAVVDVRSGELSRGRITPATRGSVREWLARFDSLHDVHFALEGTTGWRFVAEEVARAGHRAHLADPAETAVKRGRKRRAKTDRADCDLLLRLLSARELPESWIPPAQILELRTRVRLRKALVDERTAWQQRLQAQLFHQGVPAGVRPRTRAGREALASVELSPAGRELVALALRMIDRIERELQPLDRALSLYARSQPGCRELITRLYGVGPVTATAIVAELGDARRFGCSDDAVRHCGLDVTVHQSDRKRAPGHLSHEGPELLRWALFEAAQQACRPASPDYQYYRQVARRIDHNRACLSVARKLCRRAFHILRELGAEALAPIEPAPPGEEVTPAAA

SEQ ID NO: 259118 - protein, 319 aa, unidentified
MDVVHSHVCGLDVHKKTVVACILTPNEKEIRTFSTMTDDLLQMVDWIKSKGCTHAAMESTGSYWKPVYNLLETEDIQTLVVNAQHIKHVPGRKTDVKDAEWIASLLRHGLLRGSFIPPRDQRELRELIRYRRSLIDERAREVNRIQKVLEGANIKLSSVASDILGKSSRSMLEALIAGNVDPETLSELALRRLKNKKQDLQRALKGLIGPHQRLMLQTQLRHIDELDALIEQLDAEIKRRMLPFEEDLERLDTIPGVARRIAEQIVAETGIDMSRYPSAAHLCSWAGLALGRRARQRETGGSVGCLHPICVERSVHRYG

SEQ ID NO: 259119 - protein, 368 aa, unidentified
MNQNTLHVGLDTDKRHIDVAVAEPLPGGEVRYWGQLANEPSALDRVIRRLQRGGRRLAVCYEAGPCGYGIYRRLSGKPGVSCQVVAPSMTPRRAGVRVKTNRRDCLSLAKLLRAEELTAVWVPEAAHEAMRDLVRARGAAVEDLLRCRQRIAGFLLRQEIGYAGKPWTGKHRAWLGRLELAEPAHRLMMGELVDALDQAQARRDRLRDHILEQVPSWSLAWLVEALQALRGFALINAATVVAEIGDLRRFDSPRQLMAYLGLVPSEHSTGERVRRGGITKTGNARARKALVEAAWTYTRPVKAPKANATDQPAALRAIADKARHRLSGRYRRLLARGKRPPVAVTAIARELAGFLWAIAHAACPQHQR

SEQ ID NO: 259120 - protein, 342 aa, unidentified
MTIVAGFDVHRTQITFDALDTDTGEVTRGRIDATPTAVERWVGRFAGREVHVALEACTGWLFVSRALEHAGATPHLAEPVETHALRGRKRRAKTDREDARWLRQLLCEGRLPESWMPPEHVREWRSRARLRKPLVDERTQWLQRIQATLFHHGIGGVPEKLNGSGGREFLGRLELPADARERIEISLAMIDSLEDQLRPLEAELRKLARRQTGCRALMELYGMGELTSLVTLTELGDVERLSASRKAVRMAGIDIGVHRSDRRSRVGKLNRQGSPDLRWALYEAALSACRTTSPDHQDYLALKARGLSHTRASLTIARKLARRSFHILRELGPAALEPLPTT

SEQ ID NO: 259121 - protein, 421 aa, unidentified
MQIVYQRCAGVDVGKDVIAVAVRLPGPGADGRQTIKRTFTTFYGVLGEAARWLTAQGVTRVAMESTGVYSMPVYHALVEHGEFEQVLVCNPGHIKNVPGRKTDLVDAEWLAQLLECGLLRGSFIPPVQIKAVRDVLRYRRKVVQSRGAEYQRLGNVLQDAGIKLDSVASSLTTKSGRLMIESLIDGERRPRVLADLALGRMRSKIRSLESALAGRFDAHHALMCQLHLNHIDLLEEMIAELDGQVEAMMAPFQTQRELLSTLDGVAALTAAELISEIGVAPAEYFRTAAHLASWAGICPGNHESGGKRYSGTRRKGNPHLQAILVEAAWAAVRHPGYLQALYRRHVGRFGGHRNPVARNKAIIVVAHQLLVIIWHMLTTDQPYHDLGADYYTTRLNPHRETRRLVAQLTALGHKVTLEPVA

SEQ ID NO: 259122 - protein, 369 aa, unidentified
MPHVTSIGLDVHARSVAAAAFNPFTGEVVHRDFGTDAAEIAEWALGFEEPRACYESGPTGFHMARELRALGLDCAVAAVSRMQRPAADARRKNDRRDAEFIARMLATHNIVEVPLPDVAVEAARDLDRALDDATRELRRSRQRLNMFLIRLGHVWDERNADGARKKAWTRAHWRWVSEIRLEGPQRDALEYYVTAARCAESDRRQLERRVVALAGTDRWRATVEALSCIKGVDTLTAFRLAAEAGSFSRFRSAPAFASWCGLTPSEHSSGESERRGGITKAGNALARTALIESAWHYSTCSPRPKAPAPGTDVPPAIRSRADDCTARLRRRREALAAAGKSACKANAAVARELACWVWEIGCRSEGTVL

SEQ ID NO: 259123 - protein, 480 aa, unidentified
MLLLRSGHFEVEQDWSVLSPLHSLTRTSSEPLIVAPPSEVSTREGFAFLPRPSSRTAEQEWNMEVLYTRCCGLDVHKASVTACCRWKDEAGQPQIQIRRFGTYTSELRDLGSWLRQQQVEKVAMESTGSYWRPVWNELESAGLPLLLANAQHIKNVPGRKTDVKDPEWISDLLQHGLIKGSFVPDRKMRDLRDLTRMRSKVVGDHTRVVNRIQAVLEDANIKLGNVVSDIMGVSSRDMLQGLIEGRSPGELAELARGRLRSKLEELQQALEGNVRPEHSFLLKRLLMQAQFLEQQERSLRREVVRHLDERACEAIRLWDTIPGVNEAVAWVMVAEMGTRVEQFPDAHHAASWTAMCPGNNESAGKRRSGKTRKGDNWLRAALCEAAWAASHTKGTYLSALFRRIAARKGRKRAIVAVGHAILIVAYEMLKKHEPYRELGENYFDNINPEKTAGRLIRRLQNMGYQVLIVKEVAEPAGAPN

SEQ ID NO: 259124 - protein, 465 aa, unidentified
MKNKSHTTKKKKQKITINPDWVPINPDAAGIDIGSREHWACVPPNRQAKNVRKFSTFTGELEALADWFSECGVKTVAMEATGIYWIPVFQILERRGFAVVLVNPRQTKNVAGRKSDVQDCQWIQRLHTYGLLATSFRPGDAYCVLRTCLRYRDELIGARSTQCQHIQKALQAMNVQLHQVLTDVTGVSGLAIIDAILKGERDAVRLAALVDRRVQASQQMIQKALAGDYRSEHLFVLQCAFELHRTYEEKILACDQRIVAEVAQLPQRVDPALKPLPARKAGRDAYKDKLAGQDMRAPLYEKTGVDLTAIEGIGITTALTVLTEVGPDVSGFSSEKKFASWLGLCPDNRISGGKVLSSRTRRVVNRLSDALRIAAMTLERSQSALGAFHRRTKARLGAAEAVTATAHKLARLIYRLLKHGEDYVRQGMEDYERKFQEGKLNRLKKNAAAMGFELTAKQPVTLPVS

SEQ ID NO: 259125 - protein, 351 aa, unidentified
MSRNKVAAVAHTIGIDTGKNVLHVIGLDERGEVVLREKVSRSRISTRLVNVPRCLIGIEAGMATHYMARELAALGHEVKQVPATYAKPFRQGHKNDFRDAHAVAEAVQRTSTRCVPIKTDDQLDLQALHRVRSRLVGDRTAVINQLRGFLLEHGIAVRQGRSFLRQQLAQILAARADVLSPRMVRIIGELIGDWEYLDDRITKVTDEIEGLARADATCGRLMTVPGIGPIIASAMVAAIGNGAAFAKGRDFAAWLGLVPKQMSTGDRTILGRITKRGNRYLRTLFIQGARSILLHPTSWAKHGFGPWLGAMARRLHCNVLTVALANKLARIALTVLVQGRSYETRIEPAAA

SEQ ID NO: 259126 - protein, 447 aa, unidentified
MKKKKPTTERVPKVQKHLQHLNQHAAGIDVGSRSHFVAIPEGTDDQPVREFTTFTDDLERLAEWLIACGVTTVAMESTGIYWIPIFEILELYGLEVRLVNARHVKNVPGRKSDVLDCQWLQQLHTYGLLRGAFRPADQVCALRAYVRQRATLVRSAASYIQRMQKALILMNLLLSNVVTDITGMTGMKIIKAILDGERNPKILASMRDKRCKNSQETIARSLHGNYRSEHMFSLLQAVELYEFYQQKIADCDQKILEQLKECGASDGNDPDIKPPRSMEEALQQMSGVDLSSINGISTNTALKIIAEIGIDMSRWKTAKHFASWLGLCPGSKISGGKVLSSATKPVANRAATALRMSALTLFNSKSALGAYLRRQKSRLGAPKAITATAHKLARLVYSMLKYGSEYIDAGQQEYEERYRSQVVHNLTRRAQEMGFKLVLVEPEAQIS

SEQ ID NO: 259127 - protein, 371 aa, unidentified
MVWTAPYGIDCARMRLLRSQTREPSVNQIIRIGMDTSKYFFQLHGVDTSERPVLRRKLRRNEVLAFFARLPPTVIGMEACAAGHYWARELRRLGHEVKLIAPQHVRAYIKRNKNDGRDAEGLCEAMSRPTMQFVPVKTDEQQAALMLMGVRQQLMTRRTQLSNAIRGYAAEFGLITAKGLDKIEPLLARIAQDESLPALAREMFTLQGRDYARLQVELKAVEARLMAWHRANADSRRLAKIPGIGPIGATALVMKAPDPGLFPSGRHFAAWIGLTPKDHSTAGKTRIGKITRAGDEMLRSVLVAGATAVIQQAKNGRGRPSPWLLALLARKPPKLAAVALANKTARIAWKLLTTGESYDGARMPVASTLAA

SEQ ID NO: 259128 - protein, 394 aa, unidentified
MKLVGIDVGKNSHHFCVMDKETGEFNVTPSSFPNNKEGFDFLINSLKPYSKKSILLGMEDTGHYHVALLKFLLSNGYTVALINPKTTDLTRKMEGGITKNDKLDTITICDVLDTPERKKQYRITKVDRFDLYEQRQLTRHHHNLKEELNVYCNRLQKSIDLVFPEFNTLFSSKYGIVYMNLLKTFGSAEAIASTDIRTIRKFFEIKGKGNRISLTPEKLKECAKNSIGISSEVETIQIKHLVSQITLIKEQIAEIDKKIEEFSITNNSPILSIPGISHFSGTSILAELGDIGNYSKPSQIIKFAGVAPYHYESSQYNAQHTGITKKGSKYLRKTLYQIILPVINNNPLFKKYYRLKISQGKGHRCAQGHCIRKLLRIIYHLLETGQSFDPALLR

SEQ ID NO: 259129 - protein, 444 aa, unidentified
MIGPQVSKVKLSTQPFGDRPTMTKRSSNPTDAVLVAIDMSKHRQEVLIERPEGGRRRRMTVMATKADYDRLATDLSDIGRPIIVGFEATGNYHRTLAHRLLSAGFELRLISSVALARTREALHNGWDKNDSKDAQVILHMLRIGATQRYVDPLAAGINDLQEMSKTHEAISKAKTQTWHRILTHYLPLYFPEIERFAGNSRSDWFLALLERFPTPASMTVLGQETFSREAWDLVGRKVSKARLINDIYETACASVALPVNEDSVSIAMFRMVIAQARNLIRQRDEIERTAHAMLAENRDYQLLRMIPGIGPINALTILAEAGDLRRFSHHRQFLKFCGLDLATRQSGTFRGRTMLSKYGNARLRRTFWMAAQVAARQRNNSFRDKLGRYTAGHADDADRRRKAMTALTAKMARVAHAVIKTGTEYRPFLERSDARWKDPSLQVP

SEQ ID NO: 259130 - protein, 411 aa, unidentified
MRVMYEKCAGMDVHKDSVYVCVVKPQEQGVTKEVRSFGTTTQELLRLREWLEAEGVTHAAMESTGVYWKPVLNILDGAVEVWLANATEVKNLPGRKTDVKDCEWLADLMRHGLIRRSFVPEQATYELRELTRYRTQVTRERASEVNRVQKVLEGANIKLGSVVSDVMGKSGRAILEAMAQGESDPKKLAALAVEQVLKTKRVDLELALEGKVRDHHRFMLKTLLRRINDMEKVIAELDQEVGRRLHPFEEPIRRLDGIPGIGQRAAEVILAEIGTDMTRFPTAAHLASWAGLCPGNNKSAGKRHGGKTRKGSKWLRAVLVEAGWASARKKDSYFQAKYGRLKGRRGPKKAVVAQAHALLGVVYHLLKRGTQYKDLGASYLDERARVRIVDRLTKRLSKLGYDVTLTQRATA

SEQ ID NO: 259131 - protein, 319 aa, unidentified
MFVGIDVAKAELVVGVRPTGTGWTAVNDDQGVRDLVARMQALGPTLIVLEATGGYELLCVAALAAAGLPVVVVNPRQVRDFARATGQLAKTDRIDAAILARFADTVRPEIRTLPTVEAQALDALLTRRRQLVEMLGAERNRLGQVCGSGKKPVKKSLTAHITFLERAVARADAELDAAIAQSAIWKAQDDLLRSVPGVGPILSRTLLADLPELGRLSRREIAKLAGVAPLSRDSGTMRGRRFVQGGRAPVRAVLYMAAMVAARRNPVIKAFYERLVAAGKPKKLALVACMRKLLTVLNVMVRTTTPWNPEFATMSVATA

SEQ ID NO: 259132 - protein, 356 aa, unidentified
MSRDIKYIGMDVHKEATVIAVLNANGNLVMESIVETKAGSLLQFIHGLRGELHVTWEEGTWAAWLYDLLKPQVQQVLVCDPRRNALLKEGNKSDKVDARKLADLLRTGMLRPVYHGENGLRTLRELGRSYQTISQDLNRVMNRLKALYRGWGIACAGTQVYAPRYREEWLQKIEHAGVRRRAELLYQQLDGLQALRRTLRPELLAESRKHKATQLLRQIPCIGPIRAARLLALMQTPHRFRSKRQLWTYCGLGIETRDSAQYRFVRGQLQRAKKPQQIRGLNRNHNHEMKEIFKGAATRASCGVGPMRDFYVALLDKGMKAEMARLTLARKIAAIALTLWKKEERFDAEQLKPQAA

SEQ ID NO: 259133 - protein, 354 aa, unidentified
MEQFIGCDAHKKFSVFIAMNERGEYGRAIRVSHDRELFREFLAELPAGSQIALETSGSYYWMVDEFERAGHQAHLAHALTAKRRMEGRHKSDERDTRGLAMLLRNGTLPEVWIPPRELRDQREMFRLRMCLVEARSQVKNRIHGVLMRYNITIQAKDLYTERGRQELAGRLSELPPWTQQSVLKQLEMVDFLQMQIEDCEQLLETALECNGERDLLQTLPGVGKILSAVIALEIGDIGRFANAQNLASYAGLVPAARESAGKKRKSKCPADCNCYLKWAFVEAGNVVSIHRKKWPHRHVAQLYERVKQQTKMHGKATMAVGRHLAEACYWMLKYQETYREPKPKLAPALSSTLG

SEQ ID NO: 259134 - protein, 345 aa, unidentified
MPIVGGLDIHRKQITFDYLDTATGEVGRGQIAPADRAHLRAWLARFAGRDDAAFALEGCTGWRYVAEELAAAGVTAHVAEPADTAFARGRKRHAKTDKTDSRHLRVLLEQGRLPECWIPPAQILECRALLEAYHDLRREHTAWIERIHAVFFHQGAPRLGEGALRTDRGLAALREAAAIHLSPAGQLQVATALDMLAAIEARMDTLRQQLLHAARHLAGARALQARLYGVGPLAGLAMTCWLGGAGRFSSARKAVRFAGLDVTVYSSDGKRSPGHLSRQGPEILRWVAYEAGKTHGRASAPGHDYYAAVKDRTDGKIAALSQARKLIRQACHILAELGDDALTAA

SEQ ID NO: 259135 - protein, 391 aa, unidentified
MESAQMLQPVFVPREFEVFAGLDVDKTRIAVTFTDHNRLLKSLQMPYSSQHLLNYTRKQFADRRVAFVYEAGPTGFGLHDDLLAAGHRCLVVAPSMVPRAPGQRVKTNRIDSRKLSEGLRGGQLNSIHVPSLAYRHLRHLVQLRDSHVRQMMAAKYRIKALLLYEGIPFPEAPASNQWSARVLHKLGTLPCAAAVGFKLNSLVASLYFHKLEAAATQKQIRRFCQQDPELSRSIQYLTTIPGIGWIVASHLVARLGDWRQIRNVRQIASFLGLVSWEHSTGDQVQRGSITRTGDVRLRNKLVETAWTAVRKDPELEEFYRRIYQRHPRPIAARKAIVAVARKLTTRIYSVLKQQRPFRLKTGVAQAPLTPEETTCPRGRLDQPQNEGTHGS

SEQ ID NO: 259136 - protein, 394 aa, unidentified
MKLVGIDVGKNSHHFCVMDKETGEFNVTPTSFSNNKEGFDFLINSLKPYSKKSILIGMEDTGHYHVALLKFLLSNGYTVALINPKTTDLTRKMEGGITKNDKLDTITICDVLDTPERKKQYRITKVDRFDLYEQRQLTRHHHNLKEELNVYCNRLQKSIDLVFPKFNTLFSSKYSIVYMNLLKTFGSAEAIASTDIRTIRKCFEIKGRGNRISLTPEKLKECAKNSIGISSEVETIQIKHLVSQITLIKEQIAEIDKKIEEFSITNNSPILSIPGISHFSGTSILAELGDIGNYSKPSQIIKFAGVAPYHYESSQYNAQHTGITKKGSKYLRKTLYQIILTVINNNPVFKKYYRLKISQGKGHRCAQGHCIRKLLRIIYHLLETGQSFDPALLR

SEQ ID NO: 259137 - protein, 354 aa, unidentified
MYIVGIDIAKRKHEAAVIDGEGTVIIKPFSFTNNCSGYNRLLAMLAKAKLPLDEVSFAMEATGHYWLALFTRLQKEGFRVQVINPVQTNSIRSFYIRQAKTDPRDALLIAEVIRFGHFSESTLHPENIYELRELCRGRHAIVSMQADVKRKVVALLDQVFPEYETAFTNMFSDTSMAILQTCPTPKELSEMPLEELCHLIEVSSHKRFRMAKARELQELARNSFGFAMAGDVFSTMIRLYAKHLDFLKQQVREMDRKIAEIMDTLDTPITTITGIGPTLGAYILSEIGDISRFSSAAKLAAYAGIDPTMRQSGEYNGVRNRMSKRGSPYLRHAIWLAASSAVLHDPALDRKSVV

SEQ ID NO: 259138 - protein, 460 aa, unidentified
MEKIRENAAGIDIGAKKVFVSIEGQEVKYFFTFTEDFEKLRDYLHVHKIETVAMEATGVYWNILYEILEEAGIDVWLVDGRQTKQVPGRKTDVKDCQWIQQLHSYGLLNRCFVAEADIKELRAYQRLREDHIRSASMHINHMHKALTEMNIRLTEVLSQIHGTSGMAIIEAILKGERNKETLLQMCNSKIIKNKKEEILKSLNGRYTKHGLFALQQAFDSYIFYQHQIEQCDEMLSEVIKRIGKGKPDQDYESKRKPIRHNKPDIDNLGMSLVKIFDGKDATALSGITDYTWMQLLSETGTDLSRWQTEKHYTSWLGLAPGQHTSGKMKKNKKKNGHPKAGQIFRQIAQSLLTSKNIALGAFGRRLLARKGSSIAIKSVARKLAELYWRIMVNGMAFVEEGIKKYEERLLAQKHKSLERLAKELNVQIAHNVLITNVVISKESTANKSQAIGKNQLKVDE

SEQ ID NO: 259139 - protein, 341 aa, unidentified
MEQQIFKQSVGLDISKDTFVACFSQRQAGKSFHILSTRTFKCTNGAFEQFHKWVQSQRYASSPLQLLMEATGVYYEELAYFLHAKGYPLTVLLPNKTAAFARSLSYKSKTDSIDAKMLAQMSIERDLPRWVPLSEGMLTIKHLCRERAEIVDTQVVFKNRLHAKKHAYHSLKSSLQRTNKAQALLKKQISDIEIALLKAVNEDEILRQKVQNACSIPGVGFITVANILAETNAFALFKNKAQLVSYAGYDVVQNTSGTSLDSPTKISKKGNHRIRKALHFPALVAVKSDPNMKSLFNRAFDKTKIKMKAYVAIQRKLLVLIYATFKSNQPYDLNHVSIKAN

SEQ ID NO: 259140 - protein, 473 aa, unidentified
MKKKFIDKRKEVEYLLKKQKIREIKQLDAYKLDICHPDSGGIDFGSRDLYLAIPPQRAAELDMEIVHRFDTFTASLEKCRDLIISTGLTTISMESTSVYWMPLYDILIEAGIEVCLVNPKKFRMVPGRKTDVQDSQWLQTLHAYGLLRGSFHPDKKIDQLRTLMRHRDKMIQERTRFVQRMQKAMTRMNLLLHNVIDDITGVTGMAILKAIVAGERDAKKLAGFRNSRIKASEQEIIQSLTGHYKEEQLFVLKQNFEFYTFTGTQIENTDKEIECLLKEFPLKKAINATCPKNHKNRNIKSKNSLTTEDSLEDMLYRQLGADLTSLPGMRGHTILQIISEVGTDMTKFPDARHFASYLGFVPRNKITGGRVISSRTDRIKSHVSQAFRKVIPSISRSKTALGAFYRRLAPRIGKGAAIIACCRKLSMMFYNALRYGTKFVEKGMEDYKQQQEKRKLKYLEKLAKQCNMELIPA

SEQ ID NO: 259141 - protein, 468 aa, unidentified
MGLRDAIGIDPDSKGFICAFVKLSGAQVTTKGYMCTDSDLEAFLRWVKGQGNVIVAIEEANGFSRPLEKALRKAGIIFYSFKPADTNTFRKAVLGQNKDNRKNAESVARYAMALEAQAKLERYRRVWFVDAELQLLTRHYERKSQTMTAETNRLWKLLRLASPDLYLALRGSHPEVCLSENILKSQGILTLLSEKPQFGEWKHLTEKQMLRVMGGGKYKGREKLIEQLHTLAGSFAPVSPAMELLMRNNAQQIKRLKAEQAEIIKMLEVLTRKNAAVQILKQIRGIATRTAATMIAEIIDIRRFPREDSLACYSGLGMKEHSTGNSFRMVHMQLFNHRLKDAFMTAARSFVFYNPESHLAGYHRNLIKRGMSPMEATKRVARALVRVIYRKLYTIVIQQTNTSEADRIKEEEGEMASGLIRSDQSHKSNITPSPSLTSKGRGRKKVKRLSAHTPRNRSRRKAVLKIIS

SEQ ID NO: 259142 - protein, 341 aa, unidentified
MSIVGGLDIHRSQITFDYLDTRTGEVRCGQVRPADRGELRAWLARFSGQDGDLAMEGCTGWRYVAGEVAAAGLRPHVADPAELAALRGRRRHAKTDRADARFAREQLQAGRLPECWVPPPHVLECRALLEAYHDLRAEHTAWLQRIQAVLFHQGAPHPGSLTAAGGAARLAELAAGLSPAGQAQVANALAMTAACEQRLEITRRQVTEAARHLTGARALQERIYGAGPATALALACWLGGAGRFSSARKAVRFAGLDVTVYSSAGKRAPGHLSRQGPAVLRWCAYEAGKTHAHTAAPDHAYYAAVKDRIDGKRASLSEARKIIRRAAHILAELGDDALAPC

SEQ ID NO: 259143 - protein, 582 aa, unidentified
MSTATLLDRIGVGIDTARYGHRVSFLRPDRQPAAKPLTVLESRVGYLALQERLERLHAQHPQAHFHIRIDAAGQYAANLEHFLRSLPLPMTLSIGEPKRNKDYQKAHFPKRTTDDTESQAMARFAIAEQPGATAPVSPAMTLLREVAGRLQAKVKQSTQAINRLHNLLARVFPELANLTDDVTTAWVLHLLDKYPTAQRIAQAQLASLQKIPYFAPELAEQVRLAAQQSVACLTGDVAEALIRDLVAQVRHTQKAETQMRLLLSDAFAGLPVSPHVQVVTIPGIGTATAAAIIGKAVDINRFASPAHFVGYFGVFPEENSSGVDKDGKPLPQGRLRMSRKGNDLVRHYLWNAARSAICHNPAIAALYRRLKEKGTRGDVALGHCMRKLLHLVFAVWKTNRPFDPQYCAEIPTDEKPSDNPLSPPPEAKPISANEEAVGHKRDLPAEKVVTTANATVAPTTPPVKPAPAAKRPRIDFAFLRQQVTMQQALDHLGLLNQLRGRGLQRRGGCPLHSRPDDPQRTFSAHLGKNLFQCFHADCRAQGNVLDLWAAVHHLPLYEAALHLAETFQVPRNREEEPVNAAC

SEQ ID NO: 259144 - protein, 408 aa, unidentified
MELRPMHRRVIALDVHQGKITACAIVEHDDGGVEVIQREFGAFKRDRRELAQWALQLTPEVVVMESTGVYWKSPFAALEAVGIVAWVVNARHVKAVPGRKTDLCDAQWLATLARAGLLRASFIPCADLRQLRLVARQRQKLVGACSAEKNRLHKVLVDAGVRLNVLVDDIHGQSARAMVKALIEGKPIHEVLDLKGRLRASREDLFEALSTDQLSPTHRFVADEIVQHIEQIEQRIARMDQYLLAGLQPRQAQLNLLQTIPGIDEIGAAMLLVETGADMAAFGSAERLASWVGICPGNNESAGKRKSGRIRRGNAWVRRLLCEFAQAAARTRCAFKDKFQALAIRKGHKKSVVALAHKILRTIYAMLASGTHYQDRVVDYEALNVARNAPRWLKMLQKHGYIATPATA

SEQ ID NO: 259145 - protein, 426 aa, unidentified
MNRSRNERINQVNENTLVIGIDIAKKNHYACAVNLRGRELAKVWRIHQSKDGFIHFEQAVRQLMETHNKSNVLIGFEATGHYWMNLAAMLEAFEFPFVIVNPMHVKQSKEMDDNSQTKNDAKDARVIAKLLPNGYFSIPRKMTTAEHHMRHGSAIRERLRKDISSVKNRIQRWKDLYFPEFNQVFSELGQQALAVLKLTPLPQDVPHLSVEEMVRQQKKAGAKYAGKPKMVTLIEVARHSIGVTRSQEMSRLEIRSLVQQLELLESQLEEVTSQMVEQAQSLEEFQYLVSIPGISENTVSELLAETGSMRNYRHPRQLIKLAGLTLRENSSGQHKGTKKISKRGRKRLRALLYKAILPLIQNNASFRQLYMHYHSREQNPLTKKEAMVVLCRKLLQVFHGLSKKQAMFDPERMLIDSSNYPQNKAA

SEQ ID NO: 259146 - protein, 342 aa, unidentified
MKFYCGIDLSARDCHLCVIDEQLQVAMQQKLRNDLKQICLLLEPYKTKLKIVVESTFNWYWLIDGLQAEGFEVMLAHTLGLYLITGAKVKTDRRDAYSLAKLLLVGAVPAAYIYPAETRPVRDLLRRRLHLVQVRAGEYGSLRRLLLRQGILSRKQQEIKTATETELEQWFEHPLVRLHANQELQRIELYSQQIATLERSILEIAETNQSYELLRQLPGVGQTIALTILYEVGEWSRFATAKDFSSYCRVIPGIAQSGQVTRRGRGSKQGNHYLKAAFSQAAVAAVRCYPNVRRYYERQLQPHRGQGRKLVCYNIIAHKLAQAAFHILKEQTEYRAELLFGR

SEQ ID NO: 259147 - protein, 350 aa, unidentified
MLIGVDYHPSFQQIAFLVEETGECSERRLNHSDGEADKFYRDLQLRGVHVRVGMEATGYSRWFERLLAELGFEVWIGDPAEIKAKRVKKQKTDRQDAQLLLKLMIEDRFPRIWVPSPENRDVRQLLWHRHRLVQMRTRIMNQLQALAMNEGRRWKSKLWSEQGRAELEKLALAPWASRRRHELLELLDRMNPTIVELTAAAEQEARKRPEALRLMTHPGVGPLTALAYVLIIGTPSRFHRGKQIGNYVGMIPSEDSSGGKQRLGHISKQGNSLLRFLLVEAAQAAVRNNSDWQRRYMHLAMRRHKSIAKVAMGRRLGVRLYWMWRNGCAYSPSMEFGSYAGQLGTGHGVK

SEQ ID NO: 259148 - protein, 479 aa, unidentified
MIKSVGIDLAVTGEHKVRCLDERAQPCDGFTFQTTSEGLAKLEERIFGDGSNPVIIFEPTGLAWLIVAICLKARHPDCRLVRVQGRKVVALRKYLRRSSKSDKIDALTLAKMSFIDSEQLEEVYLPPAKIYAMHRLARQRKRLESEITARKTRIGSIVDGYFPGIRQAFSDPWSAHARAFLRSHLNPVAVVHTSEETLHAFLTKARRHGKADATESHMVYLSCKDAATIYELSKPVGTIDDDFFADLQEEISRELRIMEMTEAESDAIAKRLEQLYLELHPSDNLRTIPGVGEHTAPMFLATVGNPARFRSQSAFANYSGVVPAAKQSSNAEAKGLRMTKAGPATLKWALYQSGQIGRRCDPQLACVYYREMVHHGKNHKQAMGAVMSHMGARVLAVLREDKPYELRDMQGKPITREEARKLILSNFQVPEEIKRERRRRKATSSSTKPRRKNQEMAAARTNEAAVAPQPVVTVAISRT

SEQ ID NO: 259149 - protein, 368 aa, unidentified
MKQQTSATTEILHKGRTMIDFTGKTIYVGIDVHKKDWQVGQFHAGLVLGNHRITGNSQELIDFLKKRYAGATLKCVYESCAWGFNLQRELTAAGIACIIVHAGDVPGSDKEKKNKTDKVDALRLARHHAAGLLEAIHVPDEELQKERNLIRFRKKLIGDLNRSKNRLKSLLKFQGIEIPANMDNPNWSRNFINWIEEQAAKDTLLQDTVELMLEEVKMQRQLLLKTEKKLRHLMSSKKYEAKTKLLLSIPGIGRTTSTLFLLEVGDIKCFKGFDALNNFVGFYPGSNSTGEKDIDTGISKRRHNQLRTMLVEAAWQAIRKDPALLDAYEQLTKKMKGNEAIIRIARKLLRRMRAVLMSGVEYQKGVVA

SEQ ID NO: 259150 - protein, 424 aa, unidentified
MKSASNTLSSECPLVLPEVAINDVTAGIDWARDDHAACIVDGRGHKIATITVEHTTAGLRDLVAFLGRHGVGEVAIERPDGPVVDTLLAADLVVVVISPNQVKNLRGRYGSAGNKDDRFDAYVLADTLRTDRARLRPLVPDTEATIALRRACRARKDLVKHRVAAANQLRAHLRNVLPGAIGLFKDIDSEISLAFLARFDTQDRADWLTPKRLGDWLAKHGYPGRTSPELLHQRLLDAPRGATGDHATTQAHITASYVALLKTLVEQIKALSTQIDRQLDAHPDAHIFTSLPRSGRVRAARLLAEIGDCRARFPTPESLTCLAGAAPSTRQSGKLRTVGFRWSCDKQLRDAVTDFANGSRDANPWAADLYDRARARGHDHSHAVRILARAWLHVIWHCWQDRAAYNPETHRALQRVLATQPEAA

SEQ ID NO: 259151 - protein, 339 aa, unidentified
MSESYAGQRFVGLDLHRRRSVLVRMTAAGEPLETVRIVNDAERLAAVIGRAGEHPEVVLEATYGWYWAADALAAAGARVHLAHPLGVKAFSYRRVKNDERDAADLADLLRMGRLPEAWIAPPAIRELRELVRHRAKLVAIRAQLKAEVHAVLAKCGVSVVMTDLFGLEGTALLDRIKLPAPYRARVESIRRLLTDLDFEVDVFTKLARVRLAADPGFAAVQTIPGIGPVLGAVLVAEIGDVHRFAGPAQLASWAGLTPKHHESDTTVRRGHITKQGSRLIRWAVIESVQILPKTTHIGAVRERVGAKRGRHIGVVAAARKQLELVYWAIPDHHVRALAG

SEQ ID NO: 259152 - protein, 336 aa, unidentified
MSYIGVDLHTTQITVCYLKAEDDFEMKKYQLCEIEKFVSSLQLSDEIAVEATGNTRWFVEQVKRAVKRVVLVNPREFEVVKNSVKKTDKRDALNLARFLRADLLPEVRAKAEETEKMQSLVNTRTKLVRLKTSLLNKIHALYVARGRKLKKASLASEKGLDKVLREQWSAIERIELEIILTQIRSLKVGIKQLDKVIEEQASKLEGYENLVSIAGIGSLSAGILLSVIGDVKDFARADKLAAYFGIVPRVANSNEKVNHGRITKRGSKTGRTTLVQCSLSAIKKNEYLKKYYEQVKARRGHGKAKIALARKYLGIIYNTLTNGWVFADFNNFELAE

SEQ ID NO: 259153 - protein, 437 aa, unidentified
MINLIKQEDVMLTEQERLNAYRQMRSSIRNSEHYLVVGIDIAKEKHHAFFGTPAGKTLCKQLIFANDNNGYERLLAHTEKLRLQHQLKYVVFGMEPTANYHKPLAEYLIHRDALVVQVSGTAVVRNRELLDNRWDKHDRKDAANVADLVGAGKCQFYDNPAQIILDLRELLGLKRRYRQLESGLRIRLRNNLIALHFPELDSFFTKHQQDCLCIIKTCFSPQVIAAMSVEEFCRKITDTPSRMRQQAFLKDIWNAAHNTVGRPVDEAMQSMVTREVCQLEQFQAEILHLDQQIFKLASSLPAYQYLISIPGFGPFISAKILATIDEPERFTNEAQVVKLAGFDLCASRSGKPAGKAIPQISKKGNSEMRFALYQAAMVATSKNTLFIRYLNQKMQGREQEKGIQKKMRTKVAAKLLVIAWTLMKEHKFFNAELLKLT

SEQ ID NO: 259154 - protein, 402 aa, unidentified
MWYVGLDWADTHHDVEEQDEAGKRVGARRFVHSQEGLSQLEAFLLSIAESADQLACIVETNHGLLISFLLEAGFPVYPVNPKMANQLRKVAGAKTDRIDAHLLAKLGRLDLAELRRLEPDSASVAELKTLTRDQDALIQMQTRLVNQLTACLKEYYPVALQLFAKVQQRSTLLFLQAYPTPQAVASASLEELTATLRASRHPNPTAVASKIFAEVHRPHLVAPEVVVRAKSRLMLSLLKQLLVVITEIKSYDEAIHSLFLSHDDSEIWSSLPGAGKRLAPRLLAEWGEDRSRYADAVSVQALAGTAPVPFESGNYAKAHKRFACLKPLRNHLHQFAWQSTQQEAWAACYYQRKRIEGKTHSMAVRALANVWVRIIFRMWLNKTCYHSETFETAQRVHAKQAA

SEQ ID NO: 259155 - protein, 396 aa, unidentified
MVRYIGLDVHKAYIRGYEFRPHCSEGKQERHFRFPNTPVGWSQFISGLDPDVQIALEVTGSAFEIHDILAPHAAQVVVSNPVAMRRLGSGRHTDREDAVRLAHMLALGTLPGVWVPPHPVREVRRLLEVRERLGSYRRALTNQARAVLRRHGILLPKGPTALRQVTEAVVCKLPQEEQAILASVLSAARALEEQENALTAHIASRVVEEPAVHLLMTIPGVGMLTAATIWAKLGDPHRFPRPKQVARYAGLDPSVEQSGERDRRGRISRNGDRLLRRMLVEAAWAVARHDGGPLGDFYRRKAKQLGAKRALVALARKLLIVAWRMLCTGEIYRGIQQGTLRRKEVRLAKLLQQVPDWREKLLNLLEGMGNNHAGRRCRAEGVRGELHSKQLCPAAP

SEQ ID NO: 259156 - protein, 391 aa, unidentified
MQYVGIDVSALKHDCTIITDQGEILRDGLTISNDSKGFDALMSAMRTCGATPEATKIGMEETGIYHERLRSHLKRHGYEVYTINPTLIFHSRKAETLRSTKTDKVDALTIARYLMMYKGSLHSYTPSLYHLTALKASARIYHTKRETLARTKTELKRLLHSVFPEFKKHYDPLSQWALNLLESYPTPRAIARMHTTTLVRILRTKGDREAAARHIRRLAKHSVGRSDAMSDQLIRFAVSDIKHFESQIRETKAVLKEQMKPFTHILSIPGVGPVTGATIISEIGDIKRFSHKTKLLAYAGIDPVIYESGKFKASNTSISKHGSRFLRSALFMAARVACVNSNVRNNKFRRKYMAKIKEGKHHYTAIFAAAKNLTYTVYGILKSGRPFEYEQ

SEQ ID NO: 259157 - protein, 370 aa, unidentified
MLDATTFVGLDVHARSIKAVSLDVMTGEVRCATFGYDAGAVAGWVRSVDPEARCVYESGVTGFDLQKRLSGLGVDCVVGAVSKMIKPSADRRRKNDRNDAEFLARMLSVGNVVEVWVPDDECEAARDLTRALEDARDDLSRSKQRLSKFLLRHGLVFDERTPTGRRKGNWTRAHWSWIESIRFAEGADNDVLAYYVDAVRRAAEDKARLEGLVEAEARKPRWRRRVDSLRCLKGVDTATAADLVFEAGEFSRFRNARSFAAWVGLTPSEHSSGESDRRGAITKAGNKHLRKTLVEAAWHYLTCSGRPKEPARGQAPDRGARRHAAKGVRRLVERREALLARGVHGNKANVATARELACWVWAVGLMAEEA

SEQ ID NO: 259158 - protein, 357 aa, unidentified
MYDFFAGCDTHKAEHSICIINPHGKTLESFSIENNLQGWSKVLKTFQKYPNILCGIENHANYAKLFSKFLVNNNIALKEVNPVYTGQRRKASTKRDKTDQIDSLVVAKITRDEQNQLPDICFDDRQEQVKLISKYRDDLVEEKVRLVNRMHSKLIQVDTSYKKNYGRDLSEVKVLKKLEKDFSKYNDIRSLLILRDIKRLKSIVDEITEIEQMMEEYAKKDSLIANLDSIGGIGTITAFKLVALVGDISKFKKEDKFACYVGASPIRFASGSYSKVMKNRGGQKKLNCLMMQITRTQKRHYAEARKYFEKKLSEGKTESQAMISLKRKLVKIIYRIYKNNEPYNYCKRTPEKVLQAV

SEQ ID NO: 259159 - protein, 466 aa, unidentified
MENNYILYVGMDSSKGKADAAILKVSDRRSVKPKFLRKKLSFKFVKSEVTSFLETVRSYSDDNCTCICFALEVTGIYSTNVYNFIKDNLNDNESIKFLNTDFVNQWRNAHNIAKSDPLDAQTISTIIGTDSDVQYVNDNVFKNKNGYQDLKALVHRHYQIKKIYSQEINRLIAQCDCLFPELQYVFEPKSAAFIAVLSSYPTTHDIINASRLEVFNVVYEATKHRCSMDKIDKLFDLCHDTLVPDNISSYGRSIILDLVENIKNIKGQLKMIERYIRDVASLNPAYKLLLTITGCGPLTAATVIAETGDIKRFKNADCFVSYSGTSPRNKRSGTSVETMGKISKRGSRYLRHAIYMIAEFARRHNPVLKHQFERIKNGNKKRHKLANIAIANKIARYIYSIMKNESGFVILHEHIMRLPEETQNTFFNSISLDFPENTRKQIYQYSDIDGEVHKFVYTKLEETMII

SEQ ID NO: 259160 - protein, 343 aa, unidentified
MECYVGLDVSLKQTSICVVNQAGSVVREGVVDSDPEAIAAFVRSKAPGAVRIGLETGPTATWLWTELKQLGLPVICIDARHAKAVLKMQINKSDRNDAAGIARIMQTGWFKEVRVKGLDNHSVRALLASRALLVKIKRDLENQIRGLLKNVGLVIGRAKFNVFTVRAEELIADRPELISVVGPLLKARQAIEQQTDDLDRKVLKLARHDAQVRSFMTVPGIGPITALCFKATIDDPTRFKRSRSVGAYVGLTTRRHASGEIDWTGRISKWGDAMLRSYLFEAAGVLLTRVPKWSALKAWGMRLAKRNGLRKATVAVARKLAVILHRMWIDRTEFNWSKKEVAA

SEQ ID NO: 259161 - protein, 438 aa, unidentified
MEVIHPHAAAIDVGSERLHVAVCDGPVQVFDTFTASLHALRDWLLSQTVQTVAMEATGVYWLPVYEVLEEAGIAVSVVNGAHVKSLPGRKSDMADCQWLAKLHSHGLLRSGFVPDEWIRRLRDYQRLRQDHVQMASAHIQHMQKALDRLNVKIHEVLSDLMGVSGQRLVQAILEGERDTERLLALCDVQVLRKKRERMRQALQGHWKPAHLFALQQARQGWEFYQQQIVACDREIQATLQEIAALTPPPVAGAAAPPSVCKRISHNAPHIADLKQLLVRITGHDLAVLPAHTDYSILQLLAETGPTLTAWPSVKHFTAWTGLAPSSRQSGKRRRREPRFRNRAGRLFCVMARSLARSNQIGLGGFYRRLRATRGPAVANVATARKLAVLYYNTLRHGLTFVEQGLETYEQHYREQSVRRLRAAARKFGMTLTPITSVA

SEQ ID NO: 259162 - protein, 385 aa, unidentified
MRDKTFVPTDYDVFAGLDVDKKSISVTFTDHQGFIRSLHMPYSVEHLVNHVRKHFPDQKVAFAYEAGPTGYGLYDGLEAQAYRCLIASPSMIPKAPGQRVKTNRLDSQGLSENLRGGQLKGIHVPTAVYRELRHLTQLRDTLVSEVVATKLRIKSLLLFEGIHFPPAPAGSQWSFMVRAKLRKLPCSSTVRFKLDQLLDGLEFSEKQVLKTTKEVRRFCQNDSELSQCIKYVMTVCGIGWIVASQLLARIGDWRELKNVRQLGGFLGLVPTEHSTGDRTDRGSITRTGDGRLRSKLIQAAWSAIRQDGELREFFRSICHKHPRHQGSRVAIVAVARKLTTRISVVLMQQRPYVVREKVHSAPLTQEETSPQGTTRREPEPGETNS

SEQ ID NO: 259163 - protein, 425 aa, unidentified
MNYKQNEKINQVKESTLVVGIDIGSTTQYARAFDWRGIELGKVFTFSNSREGFEAFKAWMQHLQDKYRKSDVIVGIEPTGHYWFDLGAYLEDEGILLVMVNPYAVKQTKELDDNSQSKNDRKDPKVIAKLVTEGRYSAPYTPDGVYADLRIMVANRKRLIREMTQIKNRFARWFAIYFPEYTDVFGDYEAQSSMLLLKKVCTPEAIVELGAEKINQIWRDAKLRAVGMKRATTLCETAKRSIGLKKGSSAARYEMKLLLEDYEYKKAQLDAVMEEIEKLCRKIPESEQMLAIKGIGVITVAGFLAEVGDVRRFESPRQIQKLAGLSLRENSSGKHKGQTTISKRGRSKLRAVLFNAAIPLIAKNPEFKSLHEYYTTRANNPLKKKQSVIAISCKLIRVFYAILANGVTYDSQKLLSDIHRQPQVA

SEQ ID NO: 259164 - protein, 400 aa, unidentified
MLSIGIDVSKGKSTVCGMKPGGEIVYTPFEVQHTREGMSELVSLLRGSGEEVRVVLESTGSYHCPVVAALLENGIFVSVVNSLRMKRFCSQSIRRVKTDQIDAMQIALYGLAYWQELQPTRLPENTYRELQLLARQYYQMTSLLIKAKVDFNALCDQVLPGMQELMSDHAGRHKLSDFVLRYRHTTHILEMGETRFRKDYCKWAEKKGYRNRERMAALIFATAQNGIPVLPNAPSTQIVITEAIRVLHTVEASRDAILTQMQALAKTLPEYSLVREMPCIGDTLAPRLIAEIGDVRRFHSKRALIAYAGIDAPPYQSGKFSANNRHISKRGNRYLRKTGYEVMQSYVMHKPANDPIFTFIEKKRGEGKSGKLAMVAGLNKFLRVYYGKVTELYRSLPAIE

SEQ ID NO: 259165 - protein, 400 aa, unidentified
MLSIGIDVSKGKSTVCGMKPGGEIVYTPFEVQHTREGMSELVSLLRGSGEEVRVVLESTGSYHCPVVAALLENGIFVSVVNSLRMKRFCSQSIRKVKTDRIDAMQIALYGLAYWQELQPTKLPEDTYRELQLLARQYYQMTSMLIKAKVDFNAICDQVLPGMQELMSDHAGRHKLSDFVLQYCHTTHILEMGETRFRKDYCKWAEKKGYRNCERMAALIFATAQNGIPVLPNAPSTQIVITEAIRVLHTVEASRDAILTQMQALAKTLPEYSLVREMPCIGDTLAPRLIAEIGDVRRFHSKRALIAYAGIDAPPYQSGKFCANNRHISKRGNRYLRKTGYEVMQSYVMHKPANDPIFTFIEKKRGEGKSGKLAMVAGLNKFLRVYYGKVTELYRSLPAIE

SEQ ID NO: 259166 - protein, 338 aa, unidentified
MTCIGFDHHKKWTQAAAVDDQGKIIREMRVLNDNSSLKGFLKGLPQPLKGVVEAGPTWGWIYDTLTELGVKMIVANPSAVRAIAEAKIKTDKIDARMLASLLRVGLIPEVYVPTEEVRSQKMLWRERIWLVRMHVRLKNRIHRLLNHYHLEVPEFSDLFGAAGRRFLEELKLPEPGNRILNAQLKLLQSYRLQIEEVQRWAVKATQGHPNRAYLESLPGFGKVFAPIVALEIDDPKRFASPGKLASYCGLVPSLYSSGGKSWQGGIGKEGNHWLKWAFIEAAWAAIRSSAYFRVVYQRLRQRKTAQVSIIACARRLCEIAYHLLKERRCYEERPYRCA

SEQ ID NO: 259167 - protein, 351 aa, unidentified
MIIIGVDYHPSFQTIAFLIEETGECAEQELSHSDGQAEKFYRDLKQRGLRVRVGMEATGYSRWFERLLAELGIEIWMGDPAEIKAKRVKKRKTDRNDALLLLRLMRENNFPRIWVPSPENRDLRQLLWHRHRLVQMRTRIMNQLQALAMNEGYRWKKKLFSEQGRAQLEKLALAPWASRRRQELLELLDRLHPTIEELTAAVEREARKRPEALRLMTHPGVGPLTALAYVMIIGTPARFQRGKQIGTYVGMIPSEDSSGGKQRLGHISKQGNSLLRFLLVEAAQAAARINAEWRRRYIHRAMRRHKSIAKVAMGRKLGVRLYWMWRNGCEYSQSLEFGSYAGQLGIGHGVK

SEQ ID NO: 259168 - protein, 451 aa, unidentified
MNNEPEIVLDDEHELVIERVAAIDVAKASGKVCMRMPHPSRPDRRMSKVRDVDATTRAVTELADDLLGEGIERVTVESTSDYWRIWFYLLEAAGLRVQLVNARDVKNVPGRPKTDKLDAVWLAKLTERGLLRPSFVPPAPIRQLRDYTRFRVDLTRERARCWQRMEKLLEDALIKVSAVVSRMDSMSVRDMLEALIAGERDPRRLAGLARGKMRPKYKALVEALSGRFDEHHAELARMLLDQIDALGAQISTLTTRIDELLAALIDTPGPAADGSVRDRDGEVELMVTGLDAAERLAEITGIGPVSAQVIIAEIGLDMARFPTAAHLVSWAKLSPRTIQSGAIQRSGKAGKGNPYLKGALGEAAAVAARTDTFLGERYRRIVKRRGKLKALVAVARSILVIVWNLLSDPTARFHDLGPDYYTRRIDTERRARNHLAQLAALGYRVTVEPAA

SEQ ID NO: 259169 - protein, 338 aa, unidentified
MEYGAIDLHSQRSLIRIVDADGAVLLDRTVASRREGFMGVFADRARMRVLLESGTESEWVAATLEACGHEVIVADPNYALMYGARGRAVKTDRRDVAALAEACRLGIYRRAHRVSAAQREVRRVLRVREQLVRQRTQLICLLRAQLRQEGYRLPSGSSETAAARCRALSLPAALVAQLTPVLTMLEALGPVIAALDAETTQRAAADPVVQRLMTVPGVGPIVGLTFRAVVDDVDRFADAQQCTAYLGLVPREASSGARQRKGAITKAGPSSLRVALIQASWAMWRQRQGRAALHAWVERLAARRGRRIAVVGLARRLARILYAMWRDGTDYRAVPLAA

SEQ ID NO: 259170 - protein, 469 aa, unidentified
MNNAKKKKRKNNGKQHNSLSQLKQINLHAAGIDIGAEEHYVAIPQGRDPDGEDIRHFNTFTVDLLSLANWLKKCKIDTVAMESTSVYWIPLFEILDSQGFDVKLVNPRFIKNAPGRKTDVLDCQWIQQLHTYGLLQGSFRPDDQICELRSYLRQRSMLISYASHHIQHMQKALEQMNIKLNHVITDITGATGIAIIRAIIAGERNPVKLARMRDPRCKNDESTIAKSLQGNWRSEHIFALRQAVELYDFYKNQIIACESRIQQHLETFDDRSDGKPLPKSPVKSGGCRNKFHFDAKTYLYRMTGVDVTRIEGIDTPTALTIISETGICMNKWPTDKHFASWLALCPGSKISGGKVLSSRSRPCANRAAHAFRLAAYSLHKSNSALGAFLRRKKSHLGSPKAITATAHKIARIFYNMLKNGAEYVDLGQDYYERCYRDRMITNLKRKAKQFGYDLVNFKEHELVTAHLHI

SEQ ID NO: 259171 - protein, 376 aa, unidentified
MGEISTFVGLDVHKATIAVAIAEGGLREAASFFGTIENTPEALAKLLAKLGRKHKRLSFCYEAGPCGYGVHRQLTKAGHACAVVAPALIPRRAGDRVKTDRRDALSLAQLHRAGELSAIWVPDAAHEAMRDLVRARQTAVHAVRRARQHLSGFLLRHARVYSGKKAWTRSYRVWLASLRFEHPAQQIVLQDYIASVSDAERRRDALGEQIRVLLPEWSMAPVVTALQALRGVALIVAATLVAEVGDLTRFDNPRQLMAHLGLVPSEHSSGGSIRRGAITKTGNSAARRAMTEAAWTYRLPARVGRALLDRNEGLDKPVREIAWKAQVRLCARYRRLVKAGKPSQTVVTAIARELAGFAWAIARHVQPKHAQPQIPA

SEQ ID NO: 259172 - protein, 427 aa, unidentified
MISASIERCAGIDVGKKFLAVCVMVGPLEGEPRVEIRKFGTIRAELEGLRDWLKQQGVTHAVMESTGSYWKPVFNVLEDAVKVYLANPQEVKNRKGHKTDNKDGWWLAHLLRHAMIRPSFIPPRAIRELRDLTRRRKRLLGAGTSERNRVQKMLEDANVKLGNVLTDLFGVSGQLMLEALLRGHAKPEEIAQFAKGRAKKKIPQMIAALKGHQMSDHHRRMIRYSVDHMRFLEEQIAQLDKDIAATIRQAGLEPQWQLLQSVPGVQEISAAAILAETGTDMRQFPSEKHISSWAGICPGNNRSAGKNRSSHTTGGNRWLRGTLTECAWAAAAKKNCFIKDKFWRITTKSGGKKAPAVVAIAHTLLSFIYQALNTGQAYQDKRVPVLDQHQRQRMIRHHIRRLGKLGIAVSSARPVYSATATSPPTNT

SEQ ID NO: 259173 - protein, 340 aa, unidentified
MKYVGLDLHARTSTMAIFDPDARTQKGKMTTRTIRGSLRTVLAEMKGFKGPYEVCYEASANYGVVYDTLAQSAHRVTVAHPSQLRAIYRSKHKNDRADAQTLAKLLYADAIPAVHVPSVDVRAWRRLINHRHGLVHKRTAVKNALRALLRGLDMETPKNLWSKKALAWLRTVDFACPGDAVMRDDHIEHLAYIEGAIRRAETALDTIAAAHPGVALLRTIPGVGPRTAEAVAAWVDDPRRFRSSKSIGNYFGLVPCQDSSADRNRLGHITKEGPAVVRALLTQATWQAVTRSPEVRAYRDRIMHNDPERKKKATVATMHYLSRTMVAMLRDGAVWAPKAQ

SEQ ID NO: 259174 - protein, 412 aa, unidentified
MQVVHPVCCGIDVHAKMLVACLILANGEKKKRTFSTMTAELLQLRDWLVAVQCTHVAIESTGVYWKPVFNILEDALTVILINPEHAQALRGRKTDVKDAEWLADLLRHGLLQPSFIPPPVIRELRELTRYRDSVVREQSSVANRIQKLLESGNLKLGQVASDALGVSGRMILKALAKGESDPRKLAALARGKLKEKSLSLEQALQGRLTVNQRFVLGELLSRWEQLEAADARVTGEIDKYVQANPKLARAREQLDTIPGIGPRVAEVIMAEIGIEMAAVFADAAHLASWAGICPGNKATGGKRLSGRTRKGNTYLRSALVQAAWGASLKKHCYLSSQFQRLVKRLGRKKALVAVGHSLLVIIFHVLQNDQSYTELGGDYFDRRHVEQQRDYYVRRLQMLGLKVTLEELPQAA

SEQ ID NO: 259175 - protein, 417 aa, unidentified
MKKDSNSETNREWNSKRAKSGSTGQREAKEVLAELVGKLREKLNPKVASLVPAEEGRRNSLKPNLDRLTVGVDLGDQWSNYCILDLEGETLGEGKLRTREQEFAEFFQSLSSARVVVEVGTHSAWVEEVIGHGGHEVVVANPRLMEGSKRRKRKNDRIDANKLARLGRVDPQSLLPIEHRRREVRQDRVLLRARDALVAARTELINTTRGMVKSLGRRLPKCSSRSFASQAEKELPVEIREALLPLVQLADRLSHCIKEYDVKIEAMASQKYGHTKLLRQVKGVGPITALAYVLTLENPQRFAKSRDVGPYLGLVPKQEDSGESQPQLGISKAGDWMVRKLLVGSAQYILGPFGPDTDLRRYGLRLCQRGGKNAKKRAAVAVARKLAVLLHRLWVTGEVYEPLRHSMSLPNVTTTAA

SEQ ID NO: 259176 - protein, 346 aa, unidentified
MLYAGLDLSRQRLDVHVLDEEGRTIEVMAVHPDADALRTLAAHVLRHGQEVSAAIESMTGGRFVHDQLEFAGWDVAIADSAKVKGIAPLAAKTDKIDAWVLADLARRNLVPEIWLPDPRVRAERERARFRLHLVRHRTALKNRIHATLMTFGHSVPVSDLFGTAGRELLAGLALPAPWATTLATSLCMVDELNIRIDACERDLVRLGADHPYIPLLLTVPGVGPLLAYTIASEIGDIARFASPKKLAGYTGLCPFVRQSGNHDLRGPLAKNGPKYLRWALVEAATHAARDAHYRARYERNKKRLGRQRGAKVARIDIARQLAEAIWHVLTKNEPFSPAGPAIALVA

SEQ ID NO: 259177 - protein, 355 aa, unidentified
MQKYKVSFKGQNIYVGIDVHLKTWHVTTLTESGYKYSFAQHADAKELFDRLNKKFPEAHFKSAYEAGFCGFSAHYALTELGVENIVVNAADIPTTGKEKVMKTDAVDSEKIAWSLKRGELKGIYVKDKRYMDDTNLIRLRQRFIKDLSRLKCRTKSLLYTQGVTYPERFSRNRTHWSRNFMKWLREEVELLSEEKMTLMLLCDEVENMRKAVLKVTREIRRLSTTEKYKENFELLTSVPGFGLIISMTMLTEMDNNPMRFPNERKFVAMLGLIPTCHDSGEKTVSGEKTFRGNKQIGPLIVEASWIATQRDYQLGAYYTNCCQSMKPQKAIIKVARRLACRAYAVMKTKKKYVLS

SEQ ID NO: 259178 - protein, 343 aa, unidentified
MQAVKTIGLDIAKSGFQVHGVDADGQVVFRRQLKRRYVLAFFQKVPSCLVGMEACATSHHWSRELQALGHTVRLMPPAYVKPYVKRQKNDATDAEAICEAVTRANMRFVATKTPEQQSGLVLHRTRHLFIRQQTAVINAIRAHLAEFGIVAAVGRNGIEQLLNVVADAGDKRLPEVARTCLMALGTQLRALKAQLLELDRMITAWHRSNETSKRLDAIPGVGHVLATALVASIADPKVFRSGRDFSAWIGLVPKQHSSGGKDRLGGISKQGDRYLRSLFTAGALAVIRYAKIYGTKHRPWLTALLARRPTKVAAIALANKLARMAWAMMTRGERYKEPVALAA

SEQ ID NO: 259179 - protein, 393 aa, unidentified
MYIIGIDIGKNNHEASIVDSAGKLIGKSCRFSNTHKGADKLMQHILKHIGNEPCIFGMEATGHYWYSIYSFLKSKDFTIYVINPIQSDSLRSMYIRQTKNDSKDSFLIAEVIRFGQFTTTSLADEDLLSMRQLCRYRDSVISDRTEIKLRINTIMEQIFPEYEKLFSSIWRSSSISILQTYLTPEYIAEATVDELFAIIKDKSHNRLTISKAIELRETAANTFGIKIAQDAFAFQLKQLFDRLNLLNEQLTSLETEIASYYNKFNCCLHTIPGIGLVAAATILAEIGDIFRFKNASSLVAYAGIDPSVKQSGQFNSTHNHMSKRGSPYVRHAIFLAATTCVFHNSPLNNYYKKKRAQGKHHLTAVGAVSNKLTTIIYAVLRDNAPYEPKKFAA

SEQ ID NO: 259180 - protein, 481 aa, unidentified
MSRQKKHPGKPAEKKAEPGKDKRGRKRKGMCLEDRPILEPNAAGIDIGAREIFVAVPPDRDEHPVRVFSTFTEDLVKMAQWLVSCGVTTVAMESTGVYWIPPHDVLEQHGVKPCLVDARGMKNVPGRRTDWHECQWLQFLHSVGLLRAAFRPDGEVCAVRSLMRHRSEQVLMANQHIQHMHKALTQLNVQIQHVISDITGLTGLAIVDAILDGQRDPATLAQLRDPHIKASEETIRKSLEGNWRGEHLFTLKQSRQSYRHYQEQIASCDEEIEKLLLAFEPRVDPAERPLPPDRKRKQRGRKKKNVNPRTGFDVRTESYKLFGVDLTQIPGLMAMVLTLFSEVGRDMSRWPTSAHFVSWLALCPDNDISGGRVLWRGLRKVHNRAGDLFRLAAYSLHHDQTPLGDYLRRMKSKLGPAAATTATAHKIAIIFYTMVKKQVEYDATIWAERDAEREKRFDAKLKRQAQQRGYKLVPIEEKPAA

SEQ ID NO: 259181 - protein, 368 aa, unidentified
MKKNNTCLKSPKRNKTRKRSLTIGMDLGDKTSRYCVLDSDGEIVREGTVTTTKKGMRQRFGSLAGCRIAIEVGTHSPWVSRLLSSLGHEVIVANARQVKLISASSRKDDRLDAQTLARLARMDPQLLRPIRHRSEKAQGDLMQVRVRAALVDTRTGLVNAARGLAKAMGERLPKCDADQMGVAKTQGMSAELSEALRPLLETVEALTKQIKASDQKLEQLAERDYPETELLRQVSGVGCLISLTFVLTIEDPSRFQKSRDVGCYVGLRPRRSESGESRPQLGISKEGDEYLRKLLVQGAHCILSHKSPDTDLKRWGLKLAGKGNKNAKKRALVAVARKLAILLHHLWVNGEVYEPLRNSRLLEQKAVA

SEQ ID NO: 259182 - protein, 404 aa, unidentified
MNAIGIDVSKGKSTVAVLRPYGEVVVSPFDVAHTGSDLRALADLIKKLPGETKVVMEATGNYFESIARYLHEQNIFVSVVNPVLISDFGGNTLRKPKTDKKDSVKIASYALTYWLDLKEYTPQEDLRKSLKLLNRQYQQSIKLKTMMNNNLISLLDLTFPGINKLFTSPSRESDGHEKWVDFVLEFSHCDMISKLTIKAFAKKYKKWSNKNSYHFTESSCEKIYAFAKDCVSSVSSDKAIVFSVVQAAKMLISATENCHAIQSEMNRVASKLPEYDTVMNMYGVGKAVGPQLMAEIGDPRRFHSRKAITAYFGYDSENNDSGQKTTRSNPMTKKGSGALRRTLFIIMQVLLQTKPQDNPVYDFLIKKKSEGKHYYSYINAAANKFLRIYYARVKEVLNVSEQMT

SEQ ID NO: 259183 - protein, 348 aa, unidentified
MALTIVETRAITGGVDTHADMHVAAALDPVGGLLGVREFPATAAGYGRLMSWLGGFGTVALVGIEGTGSYGAGLARHITTAGVRVVEAGRSDRQDRRRQGKSDSFDAVSAARAAQSGRARGASKGRDGAVEAIRALMVAKRSAAGERTQTINQARALILTGPDDLRARFTRHTAAALVAELASLRPRPGSTVGYATRIALREPGRRAEFLDAQLERLDELIGPLVAARAPGLLALFGIGPNTAALLLIAAGDHPERLRSEAAWAHLCAVAPIPASSGKTVRRRLNPGGNRQASHALWRIVFTRMGTDPATRAYVERRTAEGKSKKEIIRCLKRYVAREVYPHLRATAG

SEQ ID NO: 259184 - protein, 416 aa, unidentified
MEVIYPRCGALDVHKKTVVAGVRLAEESKVTTDIKTFATTTKGLLALSDWLSGYGVTHIVMEATGVYWKPVWQVLSGDEEFTLALANAAHVKNVPGRKSDVSDTHWLMELHAHGLIRPSFVPDTATQELRTLMRSRKQFVREQTRQTQRIQKTLEEANIKLDSLLSDLLGKSGRAMLDAMAAGETDPVKLAALAHKGVKASQEQLREALCGRVTEHHRFLIDLHLQQIDRLDGAIAKIDERVEANLKPFRDAVELVRTAPGIGDVSAETIVAEIGIDMSRFPTAGHLVSWTGICSRQDESAGKRRSTRLRRGNPWLKTALIQAAWAAKNKKGSYLQAQYLRLKSRRGPQKAICAVAASLLTSVYHMLKNGVPYADLGAEHFKKRSSKSHANRLVRQLERLGYAVNLNPTQAEFAPA

SEQ ID NO: 259185 - protein, 399 aa, unidentified
MKHVIAFDISMGKSYMVIYNEQKQCVFESEIKHSKPEFEKIHELTDETGESPEIVFEATGIYSRQLERFMQDNQYTYCLLNPLEAKLQCDSLRIHKTDRSDAHRLALTHFTVTRRVSTGTDNLFYQLKSLSRLYSELDSELSMIRGRMHKVIQLTFPELEKMFTSKSDLFLNFVQLFPHPDCVLGLSKTIIKNRIRANTNKKISTITAEKKALQVLEIAKTSYPAVSQNDVLCDQLKLYARRYQELLHQKECCINKMVHIAGQRAEYNIILSLPGVGPNTAIRLMAEIGDITCFTSNKQLNAFAGIDIRRFQSGKTCFKDRINKRGNKHLRKLLFLIIQNMIKQRRYGQNHIVEYYDKLKTQPYNKCHKVASIACVNKLLKLLFYLITHNIYYDYRLTA

SEQ ID NO: 259186 - protein, 357 aa, unidentified
MTSDKYVGLDVHQASTSIVVLDCNGKLICESVIRTRADAIRDFISGLSGTIHVTFEEGTQAAWLYEVIRRLVAELVVCDPRQNKVLAVGNKGDRIDAKKLAELLRAGMLKPVYHSNHDTKMLKQLTHNYDSFVSDTTRVMSRIKAVFRGQGIPCSGRDVYYKRNREQWMTRLAEPGLRTRAQFLFDELEPLKALRRAAKNVMLKEARRHQAFRILSEVPTLGPIRIAQIIAAVGAPHRFRTRRQFWAYCGFAVVTRSTDDYRFEENGPLRRSRPPATRGLNRNFNRRLKHVFKSAALQGASKEPFKSYYQARVAAGMRPEMARLTLARKIANITLTLWKNGGQFNEHKLSEQHDRAT

SEQ ID NO: 259187 - protein, 400 aa, unidentified
MRQDGPTAGVDWASETHVGCVVGQDGAMVDRFDIIHDAGGLRQMVRRFRAAGVQDVAIERGDGPVVEVLLDAGLSVFVVPSRQIKSLRSRYGSAGNKDDRLDAYVLADTLRTDGHRWRALREDSDDTRALRALCRARKDLVETRVQVLNQLRSNLELAVPGAVGLFTRPNSKIALAFLTRFPTADKVAWLSPRRLQAWLVSVGYTGGITAETLFTRLTQAAPGLSGVEGAARGRITLGLVAIIEALNAEVEQVEVDISRLFAAHPDQHVFASLPRSGMVRAATLLAEIGDCRERFPSDDALAALAGASPSTRQSGKREQTVFRWSCNKKLRAAVMDFANGSRMADPWAADIYRRATARGCRHPHAIRILARAWIRIIWRCWQDGVAFDTALHKGRQPAAA

SEQ ID NO: 259188 - protein, 339 aa, unidentified
MFYSGIDQHKLDSVITTYNAAGERLRQHRLRNDRAALVRYFAAFPGPHRAVVESTGSWYWLRDLLVAHGVDLQLAHATRLKAISSAKVKTDAIDSDTLAQLCQADLIPPAHMIRPEVRGARDLLRTRLRLVGKRTSCRNSVHRLLEKFNVPTVAELPAIYQLQAACHLEQSALLLAQIRRLEQELNPEVLRLPAVQRLLWVPGVGKLGAPTLVLEIDAIARFPSDRQFVSYCRLVPGADNSGGKTRHRSGSKDGNRYLKIAFTHAAIRAIQYYPEIKAWYTRLARRKHVRVARTLVAKELARIVYHMLRTQTDYNGTFKGKALSRTKRSQWPRLASPDA

SEQ ID NO: 259189 - protein, 399 aa, unidentified
MEQGVAVGIDVAKDFHWVRAVDRRDSEVLFDGSVDNTPAALAGLIECLERLRDRGPMTVGIDVVGGIASLLSAMLLDAGTEVVHVSGLAVNRAREGTSGGEHKSDPRDAAVIADQVRHRRDLRAIEPVGELDAEIRLLVARRRDLVVDQTRRINRLRDLLASIHPGLEHIVDPTTKAGQQLLRRYVTPAEIRQAGRRRLIEHILRAGRIPRRHAEELADQALAAAREQTIALTGERVAAGLVRELAAEAAGTRDRLASLDRDLQAALQRHPDAALIQSLPGMGATLAAEFIAQAASIDRFPTPDKLAAAAGLAPVLKQSGKVRYLTRAHGGNKALKRVFFQSAFCSLSHPDSKAFYRRKRDERKTHHQAVLALARRRVDVPHAMPRNRTPYELRHAKAA

SEQ ID NO: 259190 - protein, 426 aa, unidentified
MRVLYERVAGIDVHKDMIKVGIRAPGHRAWARTSEVLEYRTFYGVLQQMAADLRERGVTHVVMEASGVYTEPVFYALAERDFEQVAVINPAHAKALKGHKTDAKDALRLAELFECGLLRGSYIPPQALKDLRDLTRYRTKTVQARTSEIQRLAKALESAGIKLDSVVSQLTGKSATAMIEALIDGERRGQVLADLAIGRLRTAGKLADLSQALAGRFTDHHAMLCRLHLDRIALFDTAVAGLEAKIAVQVTPYQRELGLLTSVPGFGDTVSQAWLAEIGPAPHEYFASHEKLASWVTLCPGNHTSAGKRRHGRTGDAGTYIKPMLVQAAWSAIKTQGRLQARYHKLVRRFGGPKNPAAVKKAILAIAHTLLKIAYQVLKSGKPYEDLGGDFYTKRESPDQRRAYLLRQLEKLSPGCTITITPAEAA

SEQ ID NO: 259191 - protein, 309 aa, unidentified
MKVSTLGIDLAKNVFQLHGVGCNGQTVLKKKLTRDKFLPFLMQLEPCLIGMEACASSHHFARVLRQYGHEVKLIPPQYVKPYVKTNKTDAADAEAICEAVARPNMRFVQIKTAEQQAILVLHTERNILIRERTACANSMRAILAEFGIIVPRTLSQLYKKIPEILEEYDNELSPFVRCSVARQLEHLQGVEDQITLIEQELSRWAKTQPACQRVMKVPGVGLMTATYLAASVGNGQQFHSAKQFAAWLGLVPREFSSGGKQRLGRISKRGDRYFRYLLVHGARAVAAVIERHKDNMPWLYRLLIKRPIT

SEQ ID NO: 259192 - protein, 254 aa, unidentified
MSAVPCFVGIDVAKAQLDIALRPSGERWAVPNDASGVTTLVDRLQALHPTLIVLEATGGLERAVTGALATAGLSVVVVNPRQVRDFARATGQLANTDALDARALAHFADVIRPTPRPLPDAQTHERRALLGRRQQLIVMRTAEQNRLAGTSGRLQTDIAAHITWLNERLATLDDAIETLLRASPLWREHDDLLQSVPGIGPVCARTLVLELPELGMLTRQQIAALVGVAPLNCDSGTLRGRRTIWGGRAHVRTV

SEQ ID NO: 259193 - protein, 455 aa, unidentified
MKLLYRRCAGLDVHKSSVTVCVRRRVSGSSQVEMEEAVFATFTQDLRRLGAWLKQHKVKHVAMESTGVYWIPVWNALEGRSLSLTLVNPATVRALQGRKTDRIDARRIAEYMQYGLLGGSFVPPRGVRQWRELTRMRVHVQQDRNRVINRIARQLETVNIKLSSVASNIVGKSGRAILAALAAGRSTPEQMANQALSRLRDKRAALVLALDGKPDAHFRWMLSRLLRKLESLDMELAEIDAQLDQQMSEQADLIERLSTIPGVDRTTAQAVIAELGTDMSVFPDAAHLASWAGLCPGNAESAGKRFSGRTRKGDRYLRRVLVQSAWAAARTRNCFLRALFFRIAGKRGLKKAAVAVAHRVLTIIWRIIRDGGAYEERGGDYFDQRDPQRTARKLTRRLEHIGFQVEIKRRAIDPVPNDQAVPASLCGKCHRWHLAHCIHHNPRPLRKRRPPKSLE

SEQ ID NO: 259194 - protein, 340 aa, unidentified
MRQLYVASDLHSNNNLVGIIDGEGKRIFKKKLSNDPLLISDVLKPFREEIVGIVVESTYNWYWLVDALMEEGYKVHLANPAAIQQYSGLKHADDKHDAFWLAEMLRLGILPEGYIYPKEERPVRDLLRKRGHLVRLRTSLILSLENIISRNFGSKLPVNHVKGLRKDQVTPLFEGNEDLALAGRVSKETIDFLTHQIRQIEGVVEKRIQLKEAYRYLLTLHGVGKILGLTIMLETGPIGRFETVGDYTSYCRKVPSQWISNGKRKGSGNRKNGNKYLSWAYAEASDFARRLHPESRAYYNRKMQQSNPAVAHSALSHKLARAAYYIMRDQVAFRPEKLFG

SEQ ID NO: 259195 - protein, 330 aa, unidentified
MKKWLFILGVDISKLTLDIHCAELNTHIKIVNSTEGFKVFKKWVKEFKIDLANSIIVMEYTGGYEYKLIQFCESLSIAYTRIPGLAIKKSLGITRGKNDKVDAKRIATYADEKIKTITPDKPLNKRIFQLKELLSFRKRLVRTNAGLKSSLKERIYMYEVTGKDTIRKITEDNIKRNEADIKKLDLAMLELLKDDESMLKNYTIITSLKGIGPINALMTIVYTENFTSFSNPRTYAVYVGVIPFDHSSGTSVRGRKRVSQIANKELKQELNQAARTAIQWDKELAAYAARKLESKLYPVVLNNVKFKLILRMFSLVKRGELFVENYKNVA

SEQ ID NO: 259196 - protein, 341 aa, unidentified
MVSLGAIGTRQCDIDKLIRQLQSKGPAQLVFVYEAGPCGYWLYRYLTHKGLACHVVAPSLIPRKPGDRVKTDRRDAITLARLMRSGDLTSIYVPQVQDEAIRDLSRAREDAMRDLKSSKHRLKAFLLRQDIRYEGRATWTAAHLRWLSEVVCPTPAQQIVFQEYLRAVTEQHERRGRLESELHAQVKSWRLYPVVEAIQALRGVELTGAVIVIAELGDLTRFDHPSPLMNYLGLTPSEHTTGQRRRQGGITKAGNTHARRALVEGAWAYRYPAKISRHLQLRLEKLPAEVQAIGWKAQVRLCKRYRQMTARGKHVNEVVVAIAREMAAFAWAIARIVPLAN

SEQ ID NO: 259197 - protein, 367 aa, unidentified
MKKVSTRAAAQSRNISQQKLTVGLDLGDRNSWYCVLDESGQIQLEQRVRTNAIALREVFGEMPRSRVTLEIGTHSPWISRLLRELGHEVIVANARQVRLIGESRKKDDRLDAQTLARLARIDPELLYPVKHRSAQAQADLMMIRARAGLVRARTGLVNTARGLAKSYGERLRGCNVRNMNPEKAESLSPELQRALEPLLSAIEELSERICEYNDQIEALAQQSYPQVALLKQIKGVGTLIGLTFLLTLEDPHRFRKSRDVGCYLGLQPGRRNSGQSAPQMHISKQGDPYLRTLLVQGAQHILGPFGVDCDLRRWGLKLAERGGRTGKKRAIVATARKLAVLLHHLWVSGEVYEPLHNRCGTTLATAA

SEQ ID NO: 259198 - protein, 358 aa, unidentified
MKYVGIDVHKKMCQAAILDEDGTLLDEIRFANTPEEIEEFSGKLTTFHDEVKAVVESTGNLWIQIHDRLEEHGFDVALSNPSKTRLIAEAKVKTDKVDARTLAALLRADMLPTCYVPGEEQRSRRELLRHRLNLVKVRTGVKNRVHGLLDKHGLRMPETTPFSNGNIAWLRERSLGFMDDAIVRSDLAVLEAVDGQVTLIEEKIATIAAEDRRVRLLMTMTGVGYFTAMFVMAEVGDVNRFRGDKEFASWMGLVPSVHQSGERIRMGGVSGPGNKRLRWALVECAQAAVRFDPRFSGLYERVSRRRGKGCAVVAVAHEMSRIMYFMLVRGEPYRGENRGLTERKLKNMSKRAYGGLRN

SEQ ID NO: 259199 - protein, 381 aa, unidentified
MGNKRRPTVSAADAQVGNVVGIDPHKHTLSAAVVDQRGGILGCRHFPVSGDGHRDLEAWVLSLGPVLRWGIEGASGWGRHTALYLLTRAQDVRDVCPNRTAERARNRRQGKSDSLDAERIARELLAHPDLPLAFKRSQQAAKPDQVVELLGLWHQARRSVLKSQQHLLNEAEDMLQAMPEAIRDRLPASKAVWLRLRALTTLSDEMSGEDWDAPTALRLRLLGEHARALSELEQREEEICCEMAKLVKQTGSTLDQLCGISTRSAAELLVEVGDPCRFTDGGFARFNGTAPLPASSAEGDDEPVRHRLNRGGNRRVNAVLHRMAVTQLRCEPRAQAIFNEARRHGHTKKEAMRVLKRQLSNVVHRRMLSDLQSRSDMAAAA

SEQ ID NO: 259200 - protein, 374 aa, unidentified
MLELSAQMKTITTKELVQGGERSQKRIGAKVGAGRRLLLGLDMHGRQVTVAMQEDGGLIRAVGRMGHGPCLMWVERKVLEGWEVHSCYEAGVYGYWFARKLVGLGVKQLVVAPRAMGKTGKKQKTDRLDSHQLCQGLDSFLRGNKKALSVVPLPSEELEAQRSLVRFDRQLVKDKTRFMSRGKNLLCAQGVMVSNWWKAKSWAAIEASKGLAGIYLEMLASYRAKILELEAEEKPLRKRIEALAPAGLPKGMGRYSAAVLFLEMRDWNRFTKASQVSSYTGLCPGVHTSNGQGQEGSINRCGNRAVRWILVEMVWRLRKWQPGFKPLGELNERLCLSRRAKKRLVVKAARQLAVGLWRLMTGRASAQELGLIIG

SEQ ID NO: 259201 - protein, 424 aa, unidentified
MKVTYPTCCGVDVHKSFLVATIIKTNGGIEPSYQKKRFSTFNNSILDFKSWLLENECHDICMESTGKYWVPVFNLLEDQINVTIANPKWVKAVKGNKDDTKDSKWIGDLFRLGLVKGSYIPCKSIRILREYTRYRYKLVSCRSSEKNRYQNALTVCNVALDSVVSDIFGKSSSSIIDYLLEQSATTINHEEIASKLLKRLKSKEDAVIESIEGYQMTDAQKYRMRLIRAHMDYITAEIDDVDKQIESLISSVPDYVKAIRFLTTIPGVKRDSAITIISEIGIDMSQFCNSKRLCCWAGLTPGNNESASKKKSVRITRAGVYLKPALVQCAHAAVKSDKSPYYKKKYESLVKRRGKKRAIIAIARMILTAIYQMLSTGEVWNPSDLYKIDMPAPLVERQKAKAIKQAKKLLQKEGLLPPDEPLAS

SEQ ID NO: 259202 - protein, 344 aa, unidentified
MVTTIGIDPHKATHTAVAIDESESVLGELTVPADRYQTTRLLDWAGRLNGNGRIWAVEAAGGLGYLLSQQLVVSGEEVIDVPPVLASRVRVLSSGKSDKNDPNDARSVAIAALRQPGLARVLREDHVQVLRILAKRHLELTSLRTQAVCRLHSVLVQLRPGGIPARVSPNRASQLLRNMRTLDYVSEQRRAYARRHLADIRRLDRDIKANKTMIKRAVTVSGTSVTDVYGVGPIVAAFLIGYTGDIGRFATADHYAAYNGTAPIEYSSGGKTRHRLSLRGNRKLNHAIHMAAVTQIRFDTPGRSYFDKKLAEGKTKKEALRALKRRVSDAVYRRLIADQQRATS

SEQ ID NO: 259203 - protein, 378 aa, unidentified
MKLPHPQDLIIGLDRSDKEADLCLIDTRSLQRVSFTIDTSPEALWEWLLQLRQQHPQARVALCLEQPAGHLISFLEAYEWITLFPINPITLQKFRETFVTSRAKDDAKDAFYLAQLFLSHHDKLKLWAPEDSATRAVQQLVFHRRSLVDERTGLTNRLQALLKQYFPQALQLCGEDLWRPLATRFLLKWPTLQAVQKTKPATLTQFYYLNGSRSQKLLDQRLALVRVAVPVTDQAVILQSFAWRVQLIARQLQLLQQTIASFDDQIALVYRQHEDHAIFDSLPGAGPTLGPRLLGSLGSQRERYPRNTNLQSYSGVAPVTKKSGGSCHIHRRYLCPKFHKQSFHEYAKESVLWCRWAAAYYLQQRTRGAFHHTAVRAL

SEQ ID NO: 259204 - protein, 335 aa, unidentified
MDIRYYIGIDISKATLDWAVFDGKVTVLQTQTENSETGIKIALKAIADLPGFSKSEIVCCLEHTGIYNAHLLTHLHKLHIPLWLENSLQIKKAGGLQRGKNDAIDAVRIAEYAFRFQDKMRLWQPSRPVLQKLAALSALRHRLIGVRRQLEQPLAEQQSFGEPALYKQLTKTCRTSITSIKADLETVEKQIQAIIDQDDRLKQLFSWITSIPGIGPATATELLVATDEFIAIHDPKKLACHAGVAPFEYRSGSSVRGRTSVSQHARKRLKYLFHLAAMSAIQVKGEIRDYYQRKLAEGKNKMLVLNAVRNKLIHRVCSVVQRQQKYDKTYVPTLA

SEQ ID NO: 259205 - protein, 358 aa, unidentified
MAVYGGIDLHSNNAVLALIDAEGGTLFQKRYPNALGRILEGLAPFRAELDSVVVESTYNWYWLVDGLKDAGVDVRLCNPAKADRYDGLKYADDYFDARWLAEMRRLELLPEGYIYPRAERAVRDLLRRRSRSHLVRMRTALLLSNQNLVARNTGERLRANAVKALDWETVERHLPEPNLGLAVQANVAVIEPLTEQIALLERQAKRQARRKPAFRQLKTVAGIGEILALTILLETGDIQRFARPGQYASYCRCVKSERRSNDKKKGEGHRKAGNKYLAWAFVEAAHFAVRYHAPVQRFYQRKRARTNGIVAIKAVANKLARASFYVMRDGVPFEMERAFPGVGGAVSQRRGLAISHQN

SEQ ID NO: 259206 - protein, 364 aa, unidentified
MNATAALPVVGIDLAKNVFQLAVADANWKVVERQRLTRSQVERWFANRAVGLVVMEACGSAHHWARWLGSLGIEVRLLPAPYVRAYVKRNKTDAADACALLEAARCAEIVPVRVKSLDEQALQALHRTRSLWMATRTSRINALRGLCREFGIAIAQGARTGLEQIARVLAEPNSAIPELVRPTMRLLLEEIRLLEARVGQLERELTQTARASAACTTLLTIPGVGLLSATAMVAATSGNVSHFRDARHFAAWFGLTPKEYSSGTTRRIGRISKRGDRYLRMLLTHGARSVLLAAGAAVRAGRTVDGLRLWALALKARTNHNKATCALANKLARICYACLRDGTPYGEVKRFEKKIARSAYPIPA

SEQ ID NO: 259207 - protein, 414 aa, unidentified
MRIVHQNVAGLDVHRKVGVAATIVLQADGRWQQTKRTFGTMTADLLQLSDWLLGQGVTHVAMESTGEYWKPIFNILENTFEIILVNAQHLSKVPGRKTDQSDAEWIAELMQYGLLKASFIPPPGQRELRELTRYRTSFVRERSNLVNRVQKVLESANIKLASVAADIMGVSSRAMLEAIITGQASPEEMAELAKGRMREKREALAKALEGRVKAHHRFVLTELLCQIDSLEETITRFDQEIEAYCRPFEAAVALLDTIPGVARQTAEIIVAEIGTDMSRFPTAAHLAAWAGVAPGNHESAGKRRSGKTRKGNQPLEAALTQAAQAASHTKNTYLAAQFHRLAGRRGKKKAIVAVAHSILVIAYYLILRNEPYRELGGNYFDQRNPEAVTKRLVKRLEKLGYQVSLLQSVPALEA

SEQ ID NO: 259208 - protein, 457 aa, unidentified
MRQKKGKMQKVGFHERLRPMRTDAAGIDVGASEIWVDVGIENDADPVRSFQTFTADLNRMAKWLQQCGVRSVAMESTGVYWIPVCQILEDHQVDVVLVNAAHAKNVSGRKSDILDCQWLRTLHCYGLLSASFRPARDIGVLRTLMRHRQMLVECAASHVQHMQKAMTQMNLQLHHVISEITGLTGMRIIRAIVAGERNPARLADLRHETTKADHATIAKALEGDYRSEHLFALKQCLELFDDYQKRIEQCHEQIAEHLRSLESKVDPDSLKPGRQRKRKRRNQPGFDVRGQAYRISGVDLTQVDGIHETAALGLIAEIGVDMSPWKTEKHFASWLTLSPNHKISGGKVLQRSTRKSASRARNILCMSAQTLFNSRSALGAFSRRLRARIGAPKAIVATAHKLALLIYRMLKFGRDYVDIGQQRYQEQFKERTMKSLARKAKELGFQLVPNAHEQAVP

SEQ ID NO: 259209 - protein, 317 aa, unidentified
MSIIWIGCDFHPSFQCIAMLDTETGEYVQRKLDHRSGEAVRFYEGLKGRRVVIGMEACGNSGWFEQMAAEMGHELWLGNAGKIRSLVVRKQKTDRRDAEHLLELLQQDRFPRIWVPSAKMRDSRQLLLHRHKLIRMRTQVKNELQHLALNQGLQQKRKLWTQAGRKQLESLPLTGWTGQRRQDLLQMLDELEGKIGKLDEAVKEEAAQYEDTALLQTQPGVGPITALAFVLTLGPVERFGRSKQVASYLGLIPAEHSSGGRQKLLGISKQGNPFLRTMLVEAGQSAARLYWMLRTHKPYAPVRMQGSPSHSVVAGND

SEQ ID NO: 259210 - protein, 402 aa, unidentified
MSDITIGIDWGSELHAVCVLDGSGAVLDQFEVAHDAAGLQRLLERLQRRGEPDALRIAVERPSGLLIDTLVDAGHAVVPIHPNVVKASRPRYAAVCGKSDRGDAYLLADLLRTDGHRFSELCPLSDEVKALRALVRGRDDLVAERVALGNQLRSLLDSYWPGAVAIFARVDSSIGLAFVKRYPTPGSAARLGEKRLAAFVARHAYSGRRSAAELLRRLRAAPVGLASDMEADAKRHVALALVAALEVLVARIKTLTSEIEHAVAQLAVGQVMMSFPRAGRINAAQIIAELGDDPGRFPTEASLAAQAGVAPVTYASGKRRGVVFRWAANKRLRRAITTWADNSRHESEWAKDIYRRARARGCDHPHAVRILARAWVRVLWRCWRDVTPYKLAEHGAAARMAA

SEQ ID NO: 259211 - protein, 336 aa, unidentified
MNEAACVVGIDVSKRKLDIALLIDGKRKSKVFDNTTTGHAALSQWLVDRGAVQERTHICLEATGPYSEVVAIALVQAHWQVSVVNPARIKGFAQGELARNKTDRADAALLARFCVAMRPGLWEPPSVQLRQLRAWVDRLQALKDMRQQELNRIEALEASEQQALIAHVKHHVTWLDGEIAKLERDIDDHIDRHPELKRDAQLLHSIPGIGNTTVAKVLAYAGDVRRFANAKALAAFIGVTPRQRISGSSVRGRTMMSRSGHAQLRRALYMPGLVARRHNPVLKAFGDRLSATGLAPKAVVGAVMRKLAHLIYGVINSGQPFDLKIAAPRLDLQDGI

SEQ ID NO: 259212 - protein, 297 aa, unidentified
MNEITTYVGIDAHKKDLFVAMLIGDAQTPVTWTVPNEPAAVRRLVRKLERESPGPVRVCYEAGPCGYVLQRQMTTARVTCQVIAPALIPRKPGERIKTNRRDARKLGELLRANVLTEVRPPTPEEEAVRDLCRARDDAREDRQRCRHRVGQFLLRRGLHFPRCHWTQTHRAWINSLVWTHAAERTLMEEYLLALDQIDARLLALDQQLTDIAETAPYREPVGWLRCFRGINTLSAMLILAELHDFRRFTSPRALMAYVGLVPSEASTGETHRRHHVTADGYYRGRKVFDVPQETEQE

SEQ ID NO: 259213 - protein, 462 aa, unidentified
MRRKAKSEATHSGMAVVNPNAAAIDIGATMHVAAVGADRASDPVRSFGTFTADLHRLADWFAECGVKTVVMESTSVYWIPIFELLDERGFEVLLVNARDSKHVPGRKTDVSDAQWLQRLHSYGLLRASFRPKGEIVELRAYLRQRERLLDTAASHIQHMQKAMTEMNLQLHHVVSDITGATGMRIIRAIIAGERDPAVLASMRDTRCHSSVEVIEKALTGHYRGEHLFVLEQALALYDVYQQKVAACDIRIESVLKELSSIRGRKEDARADGSGSSRRRSRQSNGPDFDVGEALHSLLGKDLTRIHGIGPYLALKLVSECGDDLSAWPSAKHFTSWLCLAPSNKISGGKVLSSRTRRSGSRAASLLRLAAVTIGRTETALGAFYRRLSARTGKAKAVTATARKIAVLFYNALRHGMDYVDPGASYYETRYRERVVKNLHRRAKAFGFVLQAADISAAEQAVS

SEQ ID NO: 259214 - protein, 357 aa, unidentified
MEKRLKQSLGIDVSKLNLSLSLGSLNENLVKEFESHPDVSNDIMGYKVLLKWLKASVDLDVELLVVMEATGVYHQGIAHFLYEQGYSVCVMQSGRVKRYAQSLDQRSKTDALDSRMLSMLGLERNIRLWHPPSEELQELKGLSRERSSLLNDRTMETNRQGAIASSVHNNARALKRHKIRLKLLNTQIAAVEEDMQLLISKNEVLKRKLDYLTSIPGISFISAATVIGETLGFESIVNAKQLASYAGYDVVLRESGNFKGKTRISKKGNSHIRAVLHMPSMTCVRCNPTLKQFYNRLKPNKAKPLVALVAVQRKLLILMYTLWKNEENYDAGYEIKKQQKHEALAARDNSLINQPVS

SEQ ID NO: 259215 - protein, 340 aa, unidentified
MTIVMGMDQHRAQITAEWIDTDTGEIARRRIAPAHREPVRRFLERFAGRQLGVALEATTGWRFVVEELRAVGAEVHLAEPAETSALRGSKKRPKTDRADARHLRELLMLGKLPECWIPPEHLLDLRARVRLRHTLVDDRGEWQQRIRAVLYHHGIRHRPDLVLLRADGHAWLEQAPLPETAREQVTVALGMIDSLDRQLPALDRQLRAYARRQVGCKALMGHYGIGELTSVAILSELGDCRRFSSSRHAVRYAGLDITVYQSDQRRSPGHLSRQGPPTLRWALYEAAVIASRIGSPDHDYYLQAQARLGHKRACLAIARRLLKRSYHTLRELGEEALGPA

SEQ ID NO: 259216 - protein, 368 aa, unidentified
MSLQAKSLFVAMELSNKKWKLGFGDGSRERERTIPARNGTALMQEIEVAKAKMGLASDAPVICGYEAGRDGFWIARMLKTQGVKVYVMDPASIKVSRQARKKKTDRLDVKKLLQALIHRELWGEQESFSEVRVPSEAQEADLRLHRERERLVGERTGHQTRIRSLLALHGIIIKSPARVVLESLRDWEGKPLSPAWLDELRHEQQRLLAVKERIDEIEKEQIAALNDPQTPAVVKASKLHRLKAVGIQSAWTLSMECFGWRRFQNRKQVGSFAGLTGTPFASGDTTREQGISKAGNRRVRRVMIELAWSWVRWQPESALTHWFIDRYIRGADSRSRRKGIVALARKLLVALWKYVEQDIMPEGAMVRA

SEQ ID NO: 259217 - protein, 401 aa, unidentified
MTSEYAVFLGLDVGKGEHHAVGLDPAGKRLHDAPLPNSEPKLRAMFDKLTVHGPVLVVVDQPATIGALPVAVARACGHEVAYLPGLAMRRIADLYPGNAKTDARDAYVIADAARTLPHTLRRLNVDDEALAELDVLVGFDDDLAAEATRVSNRIRGLLTGIHPALERVLGPKISHSAVLEILSRCGGPIGIRKAGCRKLAAIATTHAPRMGTKLVEDILAALDEQTVTVAGTAAADKILPRLADSLKTVLQQRKTVAAEVEEILDAHPLAQVLTSMPGIGVRTAARILLEIGDASGFKTSGHLAAYAGIAPVTHRSGTSIKGEHPARTGNRRLKRAFFLAAFAALSDPTSRTYYDRKRAEGKKHNAALICLARRRCDVLFAMLRSRTNYRHPEPTSTPAAA

SEQ ID NO: 259218 - protein, 342 aa, unidentified
MTYYAGIDVSLEYSSVCVVDGAGKIMREQKIASEPEALIAWFRGLGFELERIGLEAGPLSQWLYAAMRAAGLPVELLETRHVRDAFRAMPVKSDRNDARGIAQLMRLGWFRPVHCKSMAAQEVRALLTARKLVQSKLLDVQMSLRGLLRGFGLKVGATTPSRFAGRIRDLVEGNATLEVIAAALLVVHETLRRELAGFEKRVRSIARSDGRVRLLMSTPGVGAIVALTYVAAIDDPARFKSSKGVGAHFGLTPKKYQSGETDITGRISKIGDEGVRTALYEAGHIILTQPLKGCTALKSWAMRLAKRAGMKKAKVALARKLAVIMHRMLVDGTLFASAAVAA

SEQ ID NO: 259219 - protein, 424 aa, unidentified
MKPKPDVEFAAFAGIDWADAKHDICLQAAGSVEREWAVVPHRAAAIDAWASTLRQRFHGRPVAVCLELAKGPLVYALQKHDFLVLFPVHPATLAKYREAFTPSHAKADPTDAELALELLLRYRAKLKPLTPQSGPLRMLLRLVEQRRRLVGDQNRISSRLADALKQYFPDVLAWFPEKDTLLFCDFLTRWPTLKQLQRARRATLLSFFHEHHVRSQSRIDERLLAIKSAIPLTDDLAVIRPNQLLVLTLVEQLRVTLRAIESFDAEIATVSQTLPDYDLFRALPGAGATLAPRLLVAFGEQRERYQSAAEVQRYAGIAPVTERSGKKCWVHWRLQCPTFLRQTFVEWAGATIPRSFWAAAYYRQQRDKGCSHQAAVRALAFKWIRILYRCWKTRTPYDESTYLNALKRRGSPLLNSIAATAKNT

SEQ ID NO: 259220 - protein, 317 aa, unidentified
MTKTSTGTAGIDTAKDKLDVAVHGREQRWQVANAAAGWRRLAADLAKAGVTKVGIEATGGYERGVVSHLRAKGFVVLVLQPIQVKNFARLHLRRAKNDVLDAVLIAACAALLDTPSIEADERLTDFADHLTFVEQIEEDIVRLKTRLEHLDEPRRRRLVLDDIDRLKARRLAELERIDDQLREHVDLARRLDLVLSVPGIGARTALALIIRMPELGQISREKAAALAGLAPFDDDSGKRKGERHIAGGRARLRRSLFAAALPASFRWNKALCALYARLKARGYAHNYALVACARKLLIYANTVVQRGSPWVENKAAP

SEQ ID NO: 259221 - protein, 461 aa, unidentified
MAVVMIGVDPHKASHTAVAIDAAEEQLGQLRVRACAAQAGQLLGWAQAWPERAWAVEGAGGVGHLLAQQLLAAGERVLDVPPKLGARVRLLATGNINKNDPNDARSVAVAALRSAGVREASRDDHAAVLKVWSKRHKDLGRIRTQVACRLHQVLCQLIPGGVPKAITAAHAAHLLETITPGDPVAAARRELAADFVADLRGIDARIRETRKKLAAAVAADGTSLTGLFGVGPVIAAAVIGDVRTVSRFPSRGHFAAYDGTAPIEVSSGGRKVYRLSRRGNRRLNHAIHMAAVTQIRHPGSEGRAYFDKKLAAGKTRKEALRALKRRISDAIYARLQADARRAAGAQGPGGQPGNDSDSSAAGSHPGHRLFGQATPGPGHHPTTTASADGRAGHSPIAATSPPATPQAQVERPQRSEDERPGGVARRRRYSAAGKASKPRPPAKSPPPKATSSAAKKTARTP

SEQ ID NO: 259222 - protein, 317 aa, unidentified
MSRSETVMGIDVSKVLLQVAVVPEETTWSANNDETGIGVLVERAKALEPRLIVLEATEGLEAPVVAALATGGLPVVVVNPRQVRDFAKASGRLAKTDTIDALILARFGGAVNPPVRPLKDHHTQQLSALVVRRRQLVAILTAEKNRLSSAPPAIHENIKSHIAWLEHCLDGINRDLQQAIKDSPVWCEKDALLRTARGVGPVLSVSLLAGLPELGSLNRKQIAALVGVAPFNRDSGAFRGRKSVWGGRSHIRAVLYMGTLSAIRYNPAIRTFYQRLCMAGKEHKVALTACMRKLLTILNAMVKNHTTWELRVEQKTA

SEQ ID NO: 259223 - protein, 340 aa, unidentified
MEYFAGLDVSMAETHICIMRRDGAVICEVKVPSTPSEIAAALAAAPTCQRVVFETGRMAPMLYHGLSQLGLPVVCIESRQAYQALKSLATHKTDRNDARGLAHLARTGFFKPVHVKSLPAHALRSLIIARKKLVGQRVTLDNQIRGLAVVFGVRLPRALTAAFIRQALRASEGITGLSAAVRGLVAARTAVLAAVAAIDADIKQLVRASAACRRLMTIPGVGQLTALAFTAAIDDPGRFQRSRDIGAYLGLVPRRYQSGEVDYTGSISKCGDRRMRALLYDAANVMLTRYKPALKLKDWAFAIAKRSTMRKARIALARRLAIIMLAMLRDGTEFSPAKQQ

SEQ ID NO: 259224 - protein, 347 aa, unidentified
MRFYTKQHRHYCGIDLHTSKMYLCILNQDGHIVFHRNLRTSPDAFLHAIKPFRDDLVVAAECMFSWYWLADLCEDENIPFVLGHALDMRAIHGGKSKNDKIDSHKIAALLKGGLMPVAYVYPRKMRATRDLMRRRNHLMRKRAELLAHIQNTASQYNHQQPLGRIAKPENRQGLVERFELPSVRMSVAANLDMIATYDKVLARLEKDIIENAMVHDPGAYALLKTIPGVGRIIALNLLYEIENINRFPTVQDFASSCRLVKCAQESNGKKSGTAGKKIGNAHLRWAFSEAAQLFLKGNEAAQRYLQKISNKHGKGKALSILAHKLGRAVYFMLRNKEGFHLNRFLAA

SEQ ID NO: 259225 - protein, 384 aa, unidentified
MTQVTLNTNITTNLNKLFLAFDLSHKSWKLAFSDGKKYRFCSIEGKNLAELREAIDKSIEKFHLPKDCEIFSCFEAGRDGFWLHHHLESLGIQNLVVDSASIEMNRRKRQVKTDKVDAKKLLGMLMRHMAGERKHWSIVNVPTREEEDIRRIQRGVDRLVKEQGQHTTRLRSLLNLHGIVIEGVIGGKDWEKTLDQIRLWDNQPIPRFIKAELIRENKRLMLVREQRQELEKEKKRLLEEELDNNPMLQQVQKLQLLRSIGETSSWIYVMEFFGWRDFKNRKEVGALAGLTPTPFTSGDNAIEQGISKAGNKRIRHITIEIAWLWLRYQPQSELSLWYEKRFAHAGPRMRRIGIVAMARKLLISLWRYLETDELPKGAVLKPCH

SEQ ID NO: 259226 - protein, 304 aa, unidentified
MQISTIGIDIGKNSFHFVGFDARGGIVIRRQCSRPQLIRALANLPPCLVGMEACCGAHHLGRMLVAQGHDVRLIPPQYVKPFVKSHKNDLLDAEAIGEAVQRPTMRFVPLKTVAQLDLQAIHRLRTRLVARRTAVINQMRGFLLERGVTFPIGREALVKRFPEVLDNPALGLSVRFCRLLQQLRDEWRLLDDDIHDVDQDILSLARDDEACERLMEVPGIGPLTATALVAAVGNGAAFAKGRDLAAWLGLVPRQHSTGGKTVLRGISQHGNAYLRCLFIHGARSVCRHHHQKPHRLGRFCTGLG

SEQ ID NO: 259227 - protein, 351 aa, unidentified
MNVNHYIGFDVHKKTINYCVKMADGQIVEEGKLRATHDALRQWASRRREPWCGAMEATLFSGWIYDTLKPFAAELQIGHPAMMKAIGASKKKNDKIDARKTADLVRCNLLPECYVAPAEMRELRRLLRYRNVVVAQAVRIKNKMSGLLMEVGAEYNKRQLHGKKYFTELLGNVEEVPESVKDLLRLSQGALEVFEATQRQLLNRLQKEPQLVERLAVLKSIRGVGEVTALTWALEICDPQRFRSIADAVSYCGLTSALDCSADKQHRGPVSKQRNGHLQTVLIEAAKLAPRWNPQLAAVHDRELERGNRNRATLAVARTLVAYLLAVDKSGQPFRIRNQAAAPTTEVETAA

SEQ ID NO: 259228 - protein, 465 aa, unidentified
MKLDEDMPKKSSNKAKSQRSRERALLQKVHLNAAGIDIGADAHWVAVPEDRDASPVRSFGVFTRDLILLCEWLKRCQVETIVMESTGVYWIPLYQMLERKGFEVRLVNAHHVKNVPGRKTDVKDCQWLQQLHTFGMLGGSFRPQAQMCVVRSYLRLRDTLSKDCNSLVQRMQKALTEMNVQLHRVISDITGVTGMSILRAILAGERDCLKLAQLRHPQIKSSALDIAKALEGDYCQEHLFALQTALELYDSYLLKIMACDRHVQEALSTFEPKTSAPAPELNRMRSAEKRQEALRRHHLEQMTGADLTKLPGLDLLAVERILSEIGLDMSRWPSEKHFCAWLNVAPNNRISGGRILSSKPRKNANRAAAALRLAAQSAMQSKSAIGAFIRRIKSRLGAPTAINAGAHKLARLVYRMLKFGKAYVETGQEAYEKFFKERTLRNLQRKAHQLGFQVTPITTPTVPVS

SEQ ID NO: 259229 - protein, 413 aa, unidentified
MLKIVFPVCCGIDVHKDFVVACIAGTDSKNITTYQTKRFSTFTKSLRELSEWLRSNSCTDVCMESTGKYWHPVFNILENTCKVIIAHPKYVKAIRGKKTDKKDAKWIADLFKHDLIVSSFIPELCIRQLRDLCRYYEKLTNMSSSEKQRTQNCLTTSNIQLANVVSDIYGKSAQRILTKILETPPGVPFDVAPLLHKSMKSKIEDIEYAIDGIITKEQAEKLKIIEQHFNSLQLCRENLEQIIFDLAEPYAHEIELLQTVPGISSKLTAIRIISEVSADVSSFPTSKHLCSWAGLTPQNNESAGKKKSVRVSKAGCYIKPLLVQCGLAAMRSKNNLEFVNRYQNLKKRRGHKKAIIAVARMLLTAVYHILKGKVAYNADLYSHYKLLPTSKEITMEQALFLVKKQGYQVISAS

SEQ ID NO: 259230 - protein, 392 aa, unidentified
MYIVGIDIGKNHHEASIVSPEGKQIGRSLRFATTHKGADSLMSFIFKNIGNSPCVFGMEATGHYWYPIYSFLKAKGYTICVINPIQSDSLRKMYIRQTKNDSIDSFFIAEVIRFGQFGTTSMADENILAMRQLCRYRDSVISSRTEIKLRIGTIMEQIFPEYEKQFSSLWVSTSMGILEKYLTPENIENAPIDELFEIIKDKSHNRLTKAKAISIKEAAADTFGIKIAQDAFSFQLKQLIDRMNFLDKQIEALDCQILEYYEKFDCYLHTIPRIGMIAAATILAEIGDINRFKSSSALVAFAGIDPTVRQSGEFSSTHNHMSKRGSPYLRHAIFLAATTCSFHNSPLNAYYKKKREQGKHHLTATGAVARKLTTVIYAVLRDGKPYEPKSFC

SEQ ID NO: 259231 - protein, 367 aa, unidentified
MKKHTAMVVGLTLNRKCERLTIGLDLGDRSSCYCMLDEAGDVLLEQKLSTTPKAMRDVFGALPKCRIAVETGTHSPWVSRLLSELGHEAIVAHARSVRLIGESKRKDDRLDAFTLARLVRIDPQLLCPVKHRSAEAQADLIVIRARAALVRNRTTLVNAARGLTKSYGERLGRGNARSMKPKAAQDLSPELKNALGPLMREIESVSERIRDYDELLESMAQNKYPEAERLKQIKGVGTLIALTYMLTLEDPSRFRKSRDAACYVGLQPGRRNSGQSEPQMRISKEGDPYLRALLVQAAHHILGPWGVDSDLRRWGMKLAEHGGKRGKKRATIAVARKLAVLLHRLWASGDVYVPLRQIGHAAVPTVA

SEQ ID NO: 259232 - protein, 355 aa, unidentified
MNTIYIGVDFHARQQTICYLTTEGGEVVFHQLQHHDKTAVRSFYAQFTGRVVVGLEAMGYSPWFEQLLAELGHEVWLGNAKEIRRRARSRHKNDRRDAELILDLLLHNEFPRLFMLPLQSREVLRLLRYRQKLIKMRTMVKNSLQALALQSGLAKRSYLFSKAGQRELQTAPMTPAMQWQRDEWLQLLEPLNERLLQTMLWLKQQSADDHRISRLRTHPGIGLLTALCLVHALEPVSRFRNSRHVVGYAGMDPLEDSSADRIRFGAISKAGPRILRYLLVEAAHSSVKSDADLKRFYKRLAERRGRPKAKTAVARKLLVRAYIMLRDEIDYAEFQRRAVAARLARQNGGTPCPSS

SEQ ID NO: 259233 - protein, 363 aa, unidentified
MTDGICFVGLDVHARKTVAAAVQLGSGEVFKAQLPGSPAAALQWLATLPGPVRAVYEAGPTGFGLARAARAAGVQMMVCARGAITRQPGDGIKTDTRDALKLARLHAAGQLRPVVVPAPELEGLRDLVRAREDLRGDLMSARHRVGKLLLRRGLVWEGPGDAWSQRHLRWLGTIRFDDALVELVFGEYLAHHEVLLARRDRLDAILLEQSTQGSWAPTVARLRCMRGIDTLTAVGLVAEIGDITAFKHPKQLASYLGLVPSEHTSGTKRRQGAITKAGSSHARRLLVEAAWHYRRPPRASETLRRRQVGQPAAAIDAAWRAQLRLHRRWAHLDAARAKKRTTVAVAVARELACFVWEIARQPD

SEQ ID NO: 259234 - protein, 316 aa, unidentified
MLIGIDVAKAELVIAARPSGERWTVANDERGVRTLLDRLTHERPELIVLEATGGYELLVVAALAAAALPVVVVNPRQVRDFARATGQLAKTDRIDAAILALFADRVRPVVRPIADEAAHELEALLARRRQLLEMLQAEKNRQGQVFGRSQRLVKKSLKAHLTYLERELRIADTDLGAMVRESPAWRERDDLLQSVPGVGPVLSLTLLADLPELGRLTRREIAKLVGVAPLSRDSGTFRGRRFVQGGRATVRAVLYMAALVATRRNAVIRAFYQRLIAVGKPKKLALVACMRKLLTMLNVIVRTHTPWRAPESIVSA

SEQ ID NO: 259235 - protein, 359 aa, unidentified
MSDRPIVSNKKSVDGKKAFVGIDVHARTYRVAALVEGEVLKSWTCPANPGVLIDTLNRLCQGAESVEVVYEAGFSGFSLHRALEGAGFSSIVANPASLETAANDRVKTDKKDAKKLALHLSQGRLKGIRIPSESEELERQAHRTRSQLVSQRKRVMNQIRSKFHQFGILGCEDKSVLREKRVLKLLEDAPEALKAVINPLLRVWQTYNEEIDNLNLIMKRQSQAPEALDELYQSIPGVGPIGSRILSSELGDMSQFKNERALASFVGLTPTEHSSGDKTRKGHISRQGSSRLRGMLVEAAWTAITKDEILRQYYAQLTIRAGAKRAIVAVARKLLLRARAIAKTGEVYQVTEQVLEVAA

SEQ ID NO: 259236 - protein, 344 aa, unidentified
MWIIGCDYHPSFQQIAFVNQATGEYDERRLEHKGGEAEQFYRSLAGQQVRVGMEATGGMRWFERLLGELGIELWIGDPVKVRAAAARKPKTDKEDARLLLRLLLEKRFPRIWIPTVEQRDARQLVLHRHRLVQTRTRAKNQLQAIARSEGLHAKCRVWSQAGQRELMALPLSPWGTVRRQDWQELLVELNQRIDPLDRALEQEAEQRPEVRLLMTHPGVGPVTAMAFVLTLCDPWRFSTSKQVAAYLGLVPQENSSGKNKQRLGHITKQGNRLLRGLLTEAAHAAAKHDPEWRRKYVRLAMKKNRSIATVAVARCLAVRLWWMWKLGLDYGQMQESRSHAEQPA

SEQ ID NO: 259237 - protein, 400 aa, unidentified
MVDIDAVGVFLGLDVGKQTHHGHGLTPAGKKVFDKQLPNSEPKLRAVLDKLTAKFGTVLVVVDQPASIGALPLTVARDAGCQVAYLPGLAMRRIADLYPGEAKTDAKDAAVIADAARTMPHTLRTLDLTDEVTAELTMLVGFDQDLAGEANRTSNRIRGLLTQFHPSLERVLGPRLDHPAITWLLERHGSPQALRKAGRRKLVEVVRPRAPRMAERLIDDIFTALDEQTVVVPGTGTLDVIVPSLAKSLAAVHEQRRALEARIEALLEAHPLSQVLTSMPGIGVRTAAVLLTTVGDGSSFPSAGHLASYAGLAPATRQSGTSIHGEHAPRGGNRQLKRAMFLSAFAALHDPASRTYYDRCRARGKTHTQALLRLARHRISVLFAMLRDGTFYEPRSPRPA

SEQ ID NO: 259238 - protein, 358 aa, unidentified
MTKHTTIIGIDLGDKHNQFCVLDNEAGEIEEEGRVKCDAKSMRRFFAARKPALIAMEAGTHSAWVSRLAASEGHEVVVANPRKLRAIYENERKSDKLDARMLARLVRADPKLLHAVQPRSAHTQADLALLKSRQAAVEARTKLINHARGIVKSFGGRLPACSTTSFHAKTLEAIPEELRAALEPVYEAIAKLTETIKTYDHRIKKMCESEGYETTELLQSVPGVGPLTALAFVSVLEDPALFATGRSVSAYLGLTPRKAQSGQRDPALRITKAGNPFLRKLLVGCAQYILGPFGPPGVLRDWGHKLIERGGRAAKKKAVIAVARKLAAILHRLWSTGELWRPFPDAPDDEACMAEDMA

SEQ ID NO: 259239 - protein, 351 aa, unidentified
MIIIGVDYHPSFQQIAFTDKDTGEYGERQLNHSEGEAEKFYRDLKLKAAKVRVGMEATGHARWFERLLAELGFELWIGDPAQIKAKRVRKQKTDREDARLLLKLVLEDRFPRIWVPDPENRDLRQLLWHRHRLVQMRTRIMNQLQALAMNEGKRWKSKLWSGQGRADFEKLPLAPWANRRRKELLELLARMNPTIAELTAAVEQEATKRPEVQRLMTHPGVGPLTALAYVLIIGTPTRFQCGKQIGSYIGMIPSEDSSAGKQWLGHISKQGNSLLRFLLVEAAQATVRLDPDWRRRYLHLAFRREPRIAKVAMARKLGVRLFWMWRKEWTYQQVLEFGSHTGQLVTGHGVK

SEQ ID NO: 259240 - protein, 593 aa, unidentified
MGAAVSITRLDVTAAELRMAAGREKDGSAARRMLAIAMILDGADRKIAAETCGMDRQTLRDWVHRYNAEGMRGLHDRKTLGPEPKLTVDQQAKLAELVETGPDPARHGVVRWRRVDLRDELERRFGVVLHERSVGKVLAKLGYCRLSVRPRHPQTDEAAQEAFKKTSPQRSRHGSPTTPKTSPSKSGSRCYGDGLSRYFGSPNQSDGAATMQPNDPVNPTILLAIELSASTWLVAARVSGAEKPHLHRIDGGDTAALLALISSLRDRVARRLDASQIGVVCCFEAGRDGFWLHRLLTAHGVTSHILEPASILVNRRARRAKTDRLDAEGMLRVLAAYLRGDHQACSMVRVPTLDEEDAKRTHRERENLVHERLRIENRIEALLFTQGIRKRPSLRSWERDLDMLRTGDGREIPHHLRAELDRLRRRLVTTLELIREVEAERDQAAEAKPQDQACRKIAALCRIRGIGANFAAVLTREVFYRSFDNRRQIASYVGITPMPYQSGGMDRDRRISRAGNPRARATMIQLPWLWLRYQPGSELAEWFRERVGTLSGRTRRIAIVAMARKLLIALWRYTETGVIPAGAEIRAETTVAA

SEQ ID NO: 259241 - protein, 339 aa, unidentified
MKLYSGMDLHSNTTQVGIMDETRKPVIDRKLRNDPELILKFLEPYRADLEGIVVESTYNWYWLVDALQEEGYRVHLAHPVANQQYRGLKHSDDRHDAFWLAELLSLGILREGYIYPRELRSVRDLLRKRLQLVRYRTALLLSVKNMIHRNRGVIVEASQIRRLTQDVVSPFLEGDEALGLAGRASKEAMDCLSRQIQQIERWVLKRVRLEQQFSNLLSLPGVGEILAMTILLETGPIGRFAKVGHYASYCRLVSSQYTSNDKVKGQGNVRNGNRYLAWAFSEASDRARRYDSACRDFYNRKLNQTGAKVAHKALAHKLARAAYFILRDHGPYREDKMFS

SEQ ID NO: 259242 - protein, 343 aa, unidentified
MSACYFIGLDIHKKMIAYCIKTIEGRLVDQGVVSADRVSLSAWAQRLPGPWIGAMEATIFTGWVYDFLAPQALALKVAHPEMLKAITAAKKKNDQADAEKITDLLRVNLLPECTMLPQEIRELRRILRYRNHLVRTAVNMHNKMSGLLMEVGAGYSKNRLRGKKYFHDLLDRLDEMPPSVKELLMLSRAGFEMFQTFQKRLIQALRTNPLIQERVTRLMTIAGVGEVTALTWVLEIGPVSRFGSIRQAISYCGLCSAQRESAGKQQRGPISKKRNKHLQTILVEAAKLAPRWNPQLAEIHQRELNRGNRNRATLAVARRLVAYMMAVDKSGSHFVVREEQKAA

SEQ ID NO: 259243 - protein, 387 aa, unidentified
MGVVIGMDPHKRTVTIEVMDAQEQILRHQQFTTDAGGFDQMLAYTQAWPERTWAIEGCAGIGRHVAERLVLRGEKVVDVPAKLSARMRMFATGQGRKTDDTDAHSIALVGVRIAGLQPVVTDEQLEVLRLLVDRRRRLGQEPTVKVCQLHQVLLDLVPGGAPKSLSAAQARRILAGIRPKDVVGKTRKRVALELVEDLERIYARKKAANKELVGLVRETRSALLDLHGIGPSGAARLLVEVGDITRFPDKGHFASWTGTAPVDVSSGDHPHHRLSRGGNRQINRVLHMMGVVQLRNPTEGRAYYDRKRAEGKSPNEAMRALKRRLSDIVYKTLLNDYVATKGAGSGRQSGASTGSGAAGSQPDTGTSEKSLPEPATRNPRTRLPLAS

SEQ ID NO: 259244 - protein, 341 aa, unidentified
MEKATTIGLDIAKHVFQLHGADAAGHVLFRKRITRVKLLGFLAAQTRCVVAMEACAGAHYWAREIAKLGHHVRLIAPAYVKPFIKRQKNDAADAEAICEAAQRPSMRFVPVKTEEQQANGIVFRARDLLVRQRTQCVNALRGHLMEYGYVFPKGITHVKTLVALVEDLQSSLPDSVRIILKLLVDTFTGLEAQIAVLDAEINQRSKSDPTARRLMTIPGVGPIASTAITALVPAPEGFPAGRDFAAWLGLTPLQKSTGGKQKLGAVSKRGERTIRRLLIIGASAVVQQASRRGAPKGSWLAQMLARKPKMLVTVALANKMARIIWALLVKGGTYRTPAVAA

SEQ ID NO: 259245 - protein, 377 aa, unidentified
MSNIFKGPGEADGPNPNQFLYVGVDIHKDKHTAVATNCFGHKLLEMEFANTAKGFKQFVAGMQSLADRENREFIFGLEDSFGYGLHLAKHLFNSNLPVKMVPPVLVDRARKYETHPEKSDSLDALGVAKVLIQRIDTLPDYSISITDELAKEIKELAMDRDFLVKEQTRIKNQLHRLLHKTYGSEYQGKFKDVFSLKALRHWKKYPTGKAYILVDDSILKNQVRRKINRLMDIRQECKEIENELKILLDRTGQKLPTMNGCGTVLASAVMAEIRNIERFHSPAALAKYAGLAPRQKSSGKTIRHIKSKSGNRKLNMAIHRIALSQISNSGNQYAKAYFKKKITEGKSKNQALCCLKRKLVNIIYMMLKHRQAYNYQK

SEQ ID NO: 259246 - protein, 355 aa, unidentified
MNSTKYIGMDVHKESISIAVRNAAGKLVMECVIETKSSMILQFFAGLRGDLHVTFEEGTWAAWLYDLLRPHVTKLVVCDPRRNALLQNGNQNDRVDARKLSDLLYLNKLSAVYHGDHGLRTLKELGRSYLTITRDQSRVMTRVKAMYRSWAIPCSGKQVYGSRHRAEWLAKIHEPGVRRRAELYYQQLDALRILRQEVRRDLLAESKKHKVWKRLCEIPSIGPIRAAELLGILQTPHRFRTKRQLWTYCGLGVVTSSSADHEMSKGQLRRKKKHVQIRGLNENYNHDLKDLFKGAAVVASIKPGPLAEFYEALVCKGMWPEMARLTLARKMATIVLIVWKRGVCFDANHLKPQTA

SEQ ID NO: 259247 - protein, 351 aa, unidentified
MPHKSTVHAVTAIGIDMGKNTLHMIGLDLRGAIVLREKVLRGRIASRLANLQPCLIGIEAGMATHYVARELAALGHDVKQVPPTYAKPFRQGHKNDFRDAHAVAEAVQRPTTRFVPAKTNEQLDLQALHRVRSRLVSERTAVINQIRGFLLERGIIVRQGVRFLRQQLPDILAKRTDVLSPRMVRIVADLAGDWRQLDERIETVTDEIETLAKSDDNCRRVMTVPGIGPIISSAMVAAIGNGAAFGRGRDYSAWLGLVPKQMSTGDRTILGRISKRGNGYLRTLFMQAARVILLRPANWPKHGFGAWLIRAAQRLHPNVLAAALANKLARIAWTVLAQERSYEARVTKAAA

SEQ ID NO: 259248 - protein, 370 aa, unidentified
MSVRRILAKTIDTDLEYEAIGIDLAKNCVSAALLTTDGEVVCIDRLDYSELEKSAQALSSTTFAMEPCTEMNYLVQKLEALGHRCLVIGGKNVQNYVENHFSGQKTDLNDAQALAFLAQDTQLRTIKAKDVEQQKYASLTTLREQYIKQYRQTIVSLKGICQAWGLNISKGISGKARLKDLIENHAAFPEELKESLVDMVTHAQTAQKALNKITKTLEELAKSDKVCQLIQTIPGLGSICSCRLRATVGDIKRFKSPKDFPAYYGLVPRSIATGHNERKGKITHRGDRTMRSLMVQAAGSLVNMATKGKLKSKQLTKWILKKQKEKMPWGKLVCAVAAKLLRIVRAVLISNKPYNSKIAGVAKCSLPKGS

SEQ ID NO: 259249 - protein, 457 aa, unidentified
MCLDDRPVLEPNAAGIDIGAREIFVAVPPDRDEHPVRVFTTFTEDLEEMARWLANCGITTAAMESTGVYWIPLYDVLEQQGVKPCLVDARNMKNVPGRRTDWHECQWLQYLHSVGLLRAAFRPESDVCAVRALMRHRSGLAEMSHQHIQHMHKALTQMNVQIQHVISDITGLTGLSIVDAILGGQRDPVELAKLRDPHIRASGETIRKSLVGNWRPEHLFTLKQSRQIYQHYQEQIAACDEEIEKLVTRFPPRVDPETRPLPPDRKKKMRRRNRHNPKPGGADSKPVFDTRMESYKLFGVDVTQIPGLLLMIFRLFSEVGRDMSRWPTAAHFVSWLGLCPDNDISGGRVLWRGRRKVKNPAGQLFRLAAYGLHHNQTPMGDYLRRMKSKLGPAAATTATAHKIAIIFYTMVKNQVEYDATLWAQRDTERDKRIEAKLKRQAQQRGYRLVPIEEKPAA

SEQ ID NO: 259250 - protein, 355 aa, unidentified
MTEIRRLVTGGVDAHADSHHAVALDEQGQLLGDAVFATTARGYRELLAWLEGFGQVRLVGVESTGAYAAGLVRFLSVRAVAVVEVNQPHAHTRRRRGKSDPVDAEAAARKALAGEATVVPKLSSGIVESIRQLRVAREGAVKARTAALNQLSVLLVTAPGELRQQLAARKTNRGKVSLCLRLRPDPARVHEPLQAAKLALRSVAERARELDRQISLLDQQLSGLVASAAPRTTSLLGISTQHGGQLLVSAGENIERLSSEAAFAHLCGASPIPASSGRTTRHRLNRGGDRNANRTLYLIAVCRLRNCARTRAYAERRIAEGLSKKEIIRCLKRYIAREVYHTLRADLAALAPPRT

SEQ ID NO: 259251 - protein, 360 aa, unidentified
MKNVTNSGHEVTVVVPVWMIGLDLGDKISRVLVMDANGKTVHEQSVRTTSSALQGFFGRHPGARVALEVGTHSPWISRLLESLGCEVIVANARKVRLISHNERKNDRMDAELLARLARVDPALLYPIRHRGATAQADLALLRARDALVRSRTRLINHVRGAVKSLGERLPGCSAPAFARKVGERLPKTLRPALEPLLAEVARLTALIRAYDRRIEALCAQSYPETARLRQVRGVGPLTALAFVLTLEDPGRFPRSRKVGPYLGLVSRRHDSADSRPQLRISKAGDAFLRRLLVSCAQYILGPFGMACDLRLYGEAIARNGGKNAKKRAVVAVARKLAVLLHALWRSGADYEPDRASAMAA

SEQ ID NO: 259252 - protein, 419 aa, unidentified
MAFKIFRKNCCGLDVHKTWIYACIGITDANGRTEYFEKRFSSFSRGLRELAEWLAKYHCVDVCMESTGKYWIPVFNILEKSCNVVLAHPKYTKPQKGNKTDRKDAKWICDLFMCDMIKPSFIPPADIRHLRDLVRYRFKLICMITGEKNRALNCLTVSNLKLDEVFTDVFGKSSRSITEYILKHPGECFDVTPFVDRRCKHPIEEIQAAVDGAICKEQAIKLRQCLDHIDELEKHKNEIEREIFRVSDPYNDALALIRTVPGLDKNPFTAIQILSEIGGDMSVFPTDKHLVSWAGCCPRNDQSNFKIKSTRISRAGIYLKPVLVQVANALIKSKKHPEITERYRRIKSHRGHKKAIIAICRMLLTAIWHILTDLKPYTPDGYFIQKSVEEKKTLTTAQALNLLKSRGFIIKDDLAEVTS

SEQ ID NO: 259253 - protein, 350 aa, unidentified
MLYTGVDYHRSFSYVTTMNEKGEIINQKKLPSNGEIIDFLKEFGEEMEIAVEASPSWYWLYYHLEEEGFDVKLSHPLKTKAIAYAKVKTDKLDSATLAHLLRSNLLPLSYVPEKTVRLNRELLRYRASLVKIQTSVKNKIHMILAKNNVSHSYSDLFGKQGMAFLHSLTLGENYKIALEGYLSVLDSVRQEILTASKKVRQLAEEDSDTRLLMTIPGMGYYSALLTKSEIGDVRRFRSAKQLCNYAGLVPSTYASGNTCFHGHITKQGSRWLRWILVEAAIHAVKRPGVLRRFYFRIERKKGGQIAKVATARKLLEWIYHILKDGRTYPEMEEIADLLGRGELGNYSGRV

SEQ ID NO: 259254 - protein, 318 aa, unidentified
MNPSAGPFVGIDVSKDHLDTAVLPTGKRWCTANQDEDIQSLVKQIWSLKPKLIVLEATAMLEMPLVGALAAGGLPVAVVNPRHVRDFARASGILAKTDRIDAQILARFGEVMQPDVRPLKDKDTQELTALMTRRRQLMGMLVAEKNRLSAAPKAVSKDIKNHIAWLEKRLWDMDDHLADTIKNSSVWREKDALLQSVPGVGPVLSTSLLAGLPELGTLNRRQIAALVGVAPFNRDSGAFRGKRSVWGGRSHLRSVLFMATLSAIRSNPVIRTFYRHLREAGKPPKVALTACMRKLLTILNAILKSQTPWKVSCVPSTT

SEQ ID NO: 259255 - protein, 374 aa, unidentified
MPDVISTAPADVRLWVALDVHKLSIVAATLPPVGGKPELARIETTPKAIRTFIAKLGGPDGLAVSYEAGPGGFALWRLLTGMGVACDVIAPSLVPVRAGDRVKTDRRDAKKLVTLYRAGLLRFCQPPSVETEGLRDLLRCRDDIRCARTAARHRVVKQLGRHHRIYREGTTTWTKMHVAWVKAQRLDDPLAQLALEQMIIHLEAIDTQLATLDARLEEIAREDRWTRQVQALVAFRGIKTLTALGLIAEIGDFARFSNPGELASWLGIVPSEYSSGESQHRGHITKTGNRHARRLLVEAAWHYRHAPRRPSTGPEPSPRAWQAQVRLNHRYRHLAQQGKRPTVITVAIARELAGFLWAELTDQPARPEETLAAA

SEQ ID NO: 259256 - protein, 343 aa, unidentified
MKITTVGVDIAKTVFQVHGVNEQGAPVLRKQLKRGQVLSLFANLTPCVIGMEACRGAHHWARQLQKFGHTVRLMAPQFVKPYVKTNKNDMADAEAICEAVSRPTMRFVPMKNGEQQAVLALHRARQGFVRARTAQANQIRGLLEEYGIVIPQGICQISKRLPAVLEDGENDLPGLFRQLLQRLGEHLKQLDLQVRELDSQILLWHRQHEGSCRLAQIPGIGPLTASALVASIGDAGSFENSRQLAAWMGLVPRQHSSGGKTLLLGISKRGDGYLRMLLVHGARSVLRVAERKPDYGTSWIAGLVKRRHLNIAAVALANKNARVVWALLRHERNYDARYQAAAA

SEQ ID NO: 259257 - protein, 377 aa, unidentified
MKKVRFIGLDVHADTIAVAVAEPGGDVRSLGVIPNRPESVRKLMKKLGPPASLRVCYEAGPTGYVIYWQLTALGVPCEVVAPTLVPTKAGDRVKTDRRDAEKLARNYRAGDLTAVWVPDGAHEAMRDLVRAREAAKKDQLRARHRLGKFLLRHGRRPPTAMTAWTQRHLTWIRQVQFEHPAQEATRLDYLHEVDHAVGRIERLERAIDEAVKTAPAGMRAVIEGLQALRGIARVAAVTIVAEVGELSRFTRAPQLMGYSGMGAREDSSGPRTRRGGITKTGNAHLRRIAIEAAWAYRHRPAVGGTLRKRQATLSEEVKAIGWKAQLRLHARYRKLLGRGKCQQQVVTAVGRELLGFIWAIGVTVERQHPKTSSSIAA

SEQ ID NO: 259258 - protein, 385 aa, unidentified
MSQLNDLSRSPTPLQQDSTIIAVIEMSQSSWLVAGIVPGIERHPLKKLEPSEEELIHLLMRWRAEATKHGRTITRIAVAFEAGRDGFWLARWLRARDIEIYVIHPTSVAVSREHRRAKTDRLDTGVLKRVFIGWLRGEPDHCHMAAIPTLAEEDAKRPNRERERLVGERTRIVNRMKSCLVRFGVRNFKPTLRKAPERLETLQTPEGVPLPPNTLLELRRDMARLRFVMDQIKQVERARAQRLEQAPQEKSHAMVRLLARVIGVGIETADMLVHEVLARNLRDRRAVARYAGLTGAPDESGSKRREKGLAKAGNARVRRGMIQLAWRFLIFQKDSALAQWYQTRTAGAGKKRKTMIVALARKLLIALWRLVTTGEVPAGVILRAA

SEQ ID NO: 259259 - protein, 311 aa, unidentified
MKSSIFVGIDIAKASLQVACKELSLECSIAYEAQALTALVKRLKKRRSKVQVICEATGGLEALLVQCLSAAKISFSVLNPRQVRDFARAQNQLAKTDKIDAALLADFGRRMQPAPTAAPHRVIQQLAALSARRQELLAFCVAEQNRLAQATQRWVRQQHLALLSQLRAHLCQLDQRIQTLIDSTPWLKARFERLIQTKGIGPLSALTLLATMPELGSLSPGKAAYLLGVAPLNCDSGRYRGKRRIYGGRRLARSVLYMAALSASRFNHILRPFYKRLRANGKPPKLALVAVMRKLIIYLNSCLASLPTPAE

SEQ ID NO: 259260 - protein, 339 aa, unidentified
MTLQTPKIIQESKPSFAGIDVGAEELILTIRKNGTSYKAQKFTNTPADRARLVKKMLGMPGIVVCLEATGVTHFDLSLALHDAGVALMVLNPKSSHNFAKVLMKNSKTDAVDAETLAQYAERMDFVAWTRPSDEKIALRCFARRIDALTRQKAAAKNQFHALTASQETPKGVLHDVKLAISQLEKRIAHLSKEARLLIEKQTDLERIFQLLTGIKGIAETSAIALMGELLLLPPGLSHREWVKFAGLDPRAFESGKSVQQQARLAKAGNRPIRSALTMPALSASQHDPYVRAYSRHLVDNGKKPLQALCAVMRKLLHAIHGMLKHDQPFDNTRFYAIPA

SEQ ID NO: 259261 - protein, 426 aa, unidentified
MQYALPLVLPDVPPGGVCAGIDWATADHVACVVDMAGRVTDRFSAAHDKAGIAALITRLRKNKVSEVAIERGDGPLVDALLAAGLTVVVITSRQVKNLRSRFGAAGAKDDRFDSFVLADTLRTDRARLRPLVPDTPATISLRMAVRARRHLVRHRVAVCNQLRAHLAVAFPAGITLFHDLDSPISLAFLARFGSQDAAAGLDEQAIGAWLATIAVRGRPAPASVLHARLHAAPPGATGADGAAQAGITAALTVTLAALSAQIKALATQIAGQLAAHPDGHIFTSLPRPGTVRAARLLAEIGDCRSRFPDPESLAGLAGVAPVTRRSGTRIAHGFRWAVNRQLRDALCDFAADSRHASPWAAAIYDDARARGKDHPLAVRITARAWTYVIWRCWHDGTAYDPAKHNALQAVLARHAAQTASARQQDQ

SEQ ID NO: 259262 - protein, 372 aa, unidentified
MSAAFKPTKKNEGEEGMAVYVGIDVHKKFCQAALMNNDGRILHEFRFDNTSEGASGLLDLARSIDPHVKAVVEPSANYWVRIYDKLEDEGVEVKLSNPLRTKAIAEAKVKTDKLDAKTLAYLLRGDLVAESYVPTRKNRDRRALIRHRASLMQMRVEVKNRIHALLDKHELSYKYTDLFGKQGLEWLRNLQLPTPDQQILHSSLKVFEALSEQVQSMDIQIAKDAVTEDQAKLLMTMPGVDYYAAMILLSEIGDVKRFASPEKLVSWVGLAPQVHQSGETHWTGHITRKGSKRARWILGQCAQSARQHDPRMREFYMRIERKHGSSKAIVAVARKMLSIMHVMLTRNEPYRGENRELTQQKHKRLENLANTT

SEQ ID NO: 259263 - protein, 283 aa, unidentified
MMLVMGMDQHREQISAEWIDTITGEISRARIAPADRGTVRTFLARFDGAGLEVALEATTGWRFLVEEIQRVGAEAHLAEPAETSGLKGNKQRAKTDWADARHLRELLLIGRLPESWIAPAHLLDLRARVRCRHTLVHQRTEWQQRMHAVLYHHGVPHSRKLLTLANRERIAGLKLPAAAREQLTIAIEMIDAIEIQIGPVDLALRAIARTQPGCRTLIDQIYGIGPLTSVTILAELGDTRRFANSRDAVRYSGLDVTVYQSDQPRRRRSPVPPRTTRVALGAL

SEQ ID NO: 259264 - protein, 349 aa, unidentified
MQEYIAFDSHKRYTLAERQEVRTGRTRQCRIEHRPGAFCEYLEGCARGTPVAVEATGNWYWIVSEIEQAGLVPRLVHPRKAKLMMGMINKTDKLDVAGLNRLQRTGTLPTVWIPSGELRDLRELTRTRMVLTTQRTRLKNRLSATLRKYGLAVMDCSDTFGREGRRQWQVLLERLPEQTRWGSRMLLEQLDVLEGQIRQQEQRLKALVELTPAIQRLMSLPGVGMILASVIALEIGDVGRFPSGEHLASYAGTTPRVHASGGKVRYGQLRSDVNRYLKWAFVEAANVVAMHRHRWPRRHVSRLYTRLRRRKGHAKAVGAVARHLAEASYHVLRRQEPYRDPALGSTRKV

SEQ ID NO: 259265 - protein, 360 aa, unidentified
MQTQRNELNFEGQNIYVGLDVHLKSWTACIMTEHLEHKKFTQPPEAKVLYNYLTRNFPGATYHSVYESGFSGFWAHRQLEALGIHSMVTNAADVPTGQKEKIQKDDAVDSRKLARSLRSGDLEAIYVPSESILEERSLIRTRAALVKDMTRFKQRIKSFLYFFGIRIPERFNKSGSHWSKNFMRWLKEEVKLSQETGRQSLDILIQEVEEQRKLLLLVNRLVTSLSTNERYASSVRLLKTIPGIGLLTAMTLLTEMETVERFADTDHFAAYVGLVPNRHNSGDVKNDGEMTFRGQSTLKKCIIEATWIAARRDPALSLAYNRYVQRMNSNNAIIRIARKLLNRIYFVLKNKKEYVTCIVK

SEQ ID NO: 259266 - protein, 399 aa, unidentified
MGEGMVAGIDWASEVHVACVMDGDGAVASRFSFTHDGAAIRAMAGQLRAAGVAGVAIERGDGTVVEELLSAGLAVFVVPSRQIKGLRTRYGSAGNKDDRFDAYVLADTLRTDGHRWKPLRPDTGPTRALRAACRSRKDLVETRVQVLGQLRANLELAFPGTIGLFTKLYSTISLAFLQRFPTAAKAAWLSPKRLASWLASVGYTGGVSAGILYDRLATAAPGLTGAEGEARGQITLALVRVIGALNTQIAALDAEIGRLLAAHPDRHIFASLPRSGTIRAATLLAEIGDCRQRFPTDDALAALAGACPSTRQSGKRTQAVFRWSCSKKLRAAVMDFANGSRMADPWAAAIYAAAIARGCRHPHAIRILARAWLRIIWRCWQDGAAFDPALHRSRQTATA

SEQ ID NO: 259267 - protein, 300 aa, unidentified
MPDDIRWVGLDVHAHESTLAIFDQATGELITRRVVGRPHELMPWLRGVARPARMVYEAGPTGYGLARRARAEGIELAVCAPGRTDRDPIDRVKTDKRDAIRLARRLAAGELTMVTVPSVEHERLRDLVRGREDIRADLMRARHRLGKFLLRREIYYEGPHTTWSRRHRAWLASLKFADRASQLTMADYLHAHDVLLARRDRIEGELEQLAGDSPWTATIGRLRCLRGIDTLSALGLCAEVGQFDRFGHPDQLAAYLGIVHSENTTGQQRRQGAITKAGSPHARRLLVEAAYHYQRHPAVG

SEQ ID NO: 259268 - protein, 321 aa, unidentified
MPTFHLGMDVAKAKLDCALRLPDGKFKSKVVENNPQGFKALIEWLEKHGATTPPVCLEATGIYWEAVAEVLAAHGMTVSVVNPAQIKAFGASRMVRTKTDKVDARLIAEFCVERSPEPWQAPSQSEQALHAMVLRLEALQTMRTQESNRLAVAREAVKPGIAEHIEWLDKQIDALAKTIRDHINDDPGLKDKRALLDSIPGVGERTIATLLAFYANVERFGNARQAVAFAGLDPRQHESGSSVKGKPRMSKVGHAFLRKALYMPAMVTLYKTAWGKRFRERLAASGKPPKLIIGAMMRKLVHVVFGVLKSGKMFNPALHGG

SEQ ID NO: 259269 - protein, 354 aa, unidentified
MKKIFIGIDFSKEKFDATLIKAEGLKECAPSVHEVFDNKTSGYRCLAKWVKAHADGCAADAWLFCGENTGGYSIGLSNYLYASGYDMWLECAYKIKHSAGIQRVKNDKADSRAIAEYAMRNYDKMILHKPQSASLTCLREVFLYRHSLVRQKVALTVRRDEKRLTQEKSDARAFMSFTSKHLITEVNKAIVKCDQKIKEIIASDDELREVFDIITSMPGIGVQNATCLMVYTDNFQKFDLDSRKIACYYGIAPFGRQSGTSVNSRPQVSPFANRMIKSLLSQAALAAIKFDINVHSYYQRLIERGKHPLLVHNNIKNKMLHILVAMVRDRVKYNPDNVYRTSNELSLAPQVLNI

SEQ ID NO: 259270 - protein, 427 aa, unidentified
MPYRIAGIDVHKRMLAVVVTDVEVDGDFHFDRQKVGATPVDLRGLAEWLVAQDVEEVVMESTAQYWRPVWEALEQHWRPRRRARDGAPCLAGTLHLAQAQSNRGPGGRKKDFPDAERLVKRLVAQELTLSFVPDTEQRLWRTVMRRKYQITRNRVQLHNRLEALLEEAHIKVSSIVSDLLGISARRMLQALADGETDPAALAALAAARLRATPEQLCDAFQACPTLHPVYRRLLKLTLEELRVIEDHLGQLDQQMADLLAAHHDAVQRLAEVPGLGVDSAQQIIAEVGAAAATFPSPKHLASWMGACPGNEESAGVNYSHRCPKGNRQMRRVLNQAANAAVKAKGTIFAVVYRRIVPRLGHAQAIGAITHRLCRLIWKILHERVRYEERGPAVSAEAKKVRARKMIRELRSLGYSVELAPAPSSSPA

SEQ ID NO: 259271 - protein, 352 aa, unidentified
MKIIGCDFHPGFQQISMLDVETKQRVKKKLHHASGAAEQFYRSLQGQRVRVGIEACGNTRWFERLLQRWGHELVVGDAARIRAAAVRKQKNDERDADHLLELLATGRFPAIWVPSPEERDLRQLLLHRHKLVQMRTRIKNQLQHVALDQGLQKKRQLWTERGRQWLLELSLPPWTERRRSDLLVLLDGLEPAIAELSQAVEMAAQQDPRVQLLRTHPGVGPITALAFVLVIGDVQRFARSNQLASYLGLIPSEDSSAGRRRLGAISKQGNTLLRTLLVEAGQSAARCDPQLKRAYQRCCHRKSLTGIGKVMVARKLAVRLYWMLKSNQPYTPARMQGSPSHPVSTREGSSIV

SEQ ID NO: 259272 - protein, 362 aa, unidentified
MNKLRVVDAHGQAPERPGAGERVTCGVDLARNKWVHAVHWGEAVHRQVVTPSGLEHVQALVGAYHPAHAVRLVYEACGFGYELAWWAQAAGIEVVVVAPSRVERVPGARVKTDRLDARTLATKGATGQLKSVAIPTRTQHAQRQLLRTYVQARSDRARTQARMRSLFQEHGRLGPPPRSGWGAYERWMAQQTLPPPVAVALAELRGLRAAAAASAARLNTHLLALAASAEHRAVVAALTTQAGVAEFSAIRLLLEIGDPRPRFRSAEAWVNSLGLTPSEYSTGDGPAHRGHLQKCGHAPLRAALVQCAWVAIRTDAPLRAVFDRLAPRLGKKRAIIAVTRRLAIRLRARWLEALATPPAAAA

SEQ ID NO: 259273 - protein, 422 aa, unidentified
MRSVALDVHLDFCEVAIVEDGELRSAGRIETKPEQIELFASSLAPDDRVALEVTGNAWEIARIIEPHVAQVLVVSPSDTGIRQARAKTDRLDARTLARLLAAGSLDGVWMPDRWTWMMRRRLSRRSQLVWARSRSKNQIHAVLMRQLVGRPPFADVFGVKGRQWLSELELPLEESETVGAAMRQIEFLEKEIAEVERLIAVASMESAEIKRLMSVPGVNVIVAASFMAAIGDIHRFGSPRKLAGYLGLDPRVRQSGVGPATHGHISKRGSSRARHALVEACWTTVRQPGPLHAFYQRIRARRGHSVAIVAAARKLACLFWCLLTREEDYAYQQPSLTKKKLRRLEIAAGAERYTAKATGIWSANDAVREAERELARQAEVAYARTVSDWHSSQAVKVGASVTPGRASNKPTKGEAARQTTSP

SEQ ID NO: 259274 - protein, 311 aa, unidentified
MTDDTIGIDISKATLDIHRLSDGKMMSLSNCPAGFKALSRFCAQTPVTRVVYEATGAYHSGLERTLGAHLPLVKVNPLQARRFAQAQGVRAKTDAVDAKMLAVMGSSFVLEPDEPATKIQHDLKELRAFRSGLIKDRTSIMGRLKTQTLSITSRQSKTRLAQVDKHIAEINAEVDRLINASDTLAHSMKILRSIPGIGPVCAATILIEMPEIGSMDRKQVASLTGLAPMTRQSGQWRGKSFIQGGRKIVRDALYMPALVAMRHNPDLKAKYQAMIKAGKPPKVALTALMRKLIELANALIKANRNWVKKGA

SEQ ID NO: 259275 - protein, 340 aa, unidentified
MHVTTIGIDLAKTIFQVHGVTEDGGVAFNRSLRRHQVLPFLAKLDACLIGMEACSSSHYWAREISKLGHQVKLMPPVYVKPYVKRGKTDAADAEAICEAVTRPTMRFVAIKSPDQQALLSQHRARQLLIGQRTQLSNMIRGLIGEFGHVVRKGLNHIRDFAEDLQAGNGPALPPAAQTVILSLCEQLLLLHARIKDLEAEIFAASRADKRVKLLETIPGIGPVTASAIVATVGSPHQFKSGREFAAWLGLTPLNRSSGGKERLGRISKMGDRYLRALLVAGMTSRVRAARARPDRVDPWLVSLLERKPVRLATVAMANKAARIIWAVLIRGEPYRTPVTA

SEQ ID NO: 259276 - protein, 419 aa, unidentified
MDEELIARLSRRYLALDIHKYYSSIVAGANFDSQVILELKRIEHADLEAWLEKHIQPADYVVIESTTNAWHIYELLEPLAEKVLVANPIKVKQIAQARVKTDIRDTLILARLLAANMIPAIWVPPVHVRNLRYLLSQRRHLVGMHTQTVNRMHSVAHRHHLSHPKGKRFNAKNTGWQADAELSDSEKFQLELDMSTKQHLDEQAGKITQKLARISHKQPWAESMLYLVQLPGFGVITGMTVLAAIGEITRFENFKKLSSYSGLTPGIEQSGTKNKGKGITKEGRKDLRWAMVEVAQRAVKSDPLWGRRFQELCRRMHRNQAIVVIAHRLLELVWFVLTRHQPYRNFSDEQIAYKYLSWTWQVNENDRDGLTRQQFARYYLMRLGIGHDLERIALNLKYPRKLASEAELLALRPELIRTE

SEQ ID NO: 259277 - protein, 353 aa, unidentified
MRIVVALDVHRRQITYKTLDRESGEVCRGRIVPATRGAVREWLDQFVGCEAEFALEGTTGWRFVVEEIERAGHRAHLADPAETAAKRGRKRRAKTDSADCDLQLRLLCAGELPESWIPPAHILELRTRVRMRKTLIDQRTAWQQRLQAQLFHQGVPAGLRPRTRAGREALAQAELSPAGRELVALALRTIDMIDRELVALDRALRSFARRQPACRALIANLYGVGAISATAILAELGDCRRFTSSDAAVRHSGLDVTVYQSDNKRSAGHLSHEGPELLRWALFEAAHQSARRSSPDHDYYLQVAARIDHNRACLSVARKLCRRAHHLLRELGDAALAPVEREPQSEEAIQAAA

SEQ ID NO: 259278 - protein, 355 aa, unidentified
MESVKYIGLDVHQSTISVAVLDAEGKQRMQSVIATKATAVLDLVKGLRGALHVTFEEGTYSAWLYDVVVRQVARVVVCNPRKNALLKSGNKSDQIDARKLAELLRAGLLSPVYHGEQSTRTLQQLVAGYSALTEDTGRAMRRIKALYRSQAIACAGQKPLGKRHREEWLARLSDSGQRRRAEWLYQELDAVQVLRREARQAVMVECHKNPAAKLLRTMPFFGPLRAAVLIARVQTPHRFRTKRQFWTYCGLGLETRSSADYVEKDGQILRRRKPVYIRGLNWNYSHELKNVFKSAATTASAMDGPFRAFYEMRVANGMLPAMARLTLARKMAAIALILWKRGETFAAEHLNLQAA

SEQ ID NO: 259279 - protein, 354 aa, unidentified
MSKILNAAIAVVGIDIGKNSFHVVGHDERGAIVLHQKWSRGQVEARFANMPPCLIGMEACVGAHHLSRKLKALGHDARLMPAKYVRPYSKGQKNDFRDAEAIAEAVQRPTMKFVATKTADQLDLQALHRVRERLVSQRTGIINQIRAFLLERGVAVRQGLRFLRAELPRILATPPDVLSARMVRVIEDLAGDWRRLDDRVESLSGEIEAVARQDAGCERLMSVPGIGPIISSAMVAAIGSGEVFSKGRDFGAWLGLVPKQTSTGDRTILGKISKRGNRYLRVLFVQAAWVVLIKPKSWERHGLKPWIEAAKKRLHPNVLAIALANKLARIAWAVLARGRNFEARTNTNASAQAA

SEQ ID NO: 259280 - protein, 406 aa, unidentified
MNMNAVGIDVSKRKSTVAILRPGGKVVVKPFDVPHLSADFQSLERFIRELEGETRIVMECTGRYYEPVARELSQAGFFVSAVNPQIIRNFQGQDNPLRKVKTDKADSVKIARYTLDSWANLKQYSLMDELRSQLKTMNRQFDFYMKHKTAMKNNLIGLIDQTYPGANTYFDSPAREDGSQKWVDFIDTYWHVDCVRKMSLSAFTDHYQKWCSRRKYNFSKSKAEEIYRKAKELIPILPKDNFTKRIIKQAIDQLNIASQTVEQLRALMNETASRLPEYPVVMAMKGVGPSLGPQLMAEIGDVTRFTHKGAVTAFAGVDPGVNDSGDYSQKSVHASKHGSPVLRKTLFQIMDVLIKTKPDDAVYLFMDKKRSEGKPYYVYMTAGANKFLRIYYGRVKEYLSSLPKSE

SEQ ID NO: 259281 - protein, 346 aa, unidentified
MEHYVGLDVSLKLTAICVVDRSGKIEREGVVTSDPETIAAFVKSHAPHVARIGLEAGATSTWLWTELNKMGLPVICIDARHAKAALKMQINKSDRNDAVGIARIMQCGWYKEVRVKDLDSHAIKALLVSRALLVKIKRDIENQIRGLLKNLGLVIGRAKMNVFAVRAAELADARPAVAAAVEPLLKARDAVGRQIADLDRKVLRLARNNAQVRRFMTAPGVGPITALCFLATIDDPTRFKRSRSVGAYAGLTTRRYASGEIDWTGRISKCGDKMLRTYLYEAANVLLTRIEKWSALKAWGIRLAKRSGLRKAKVAVARKLAVILHRMWIERTEFKWSSKEAANQPA

SEQ ID NO: 259282 - protein, 434 aa, unidentified
MRIVYERCCGLDIHKASIAVCVVITRDGKIEEETRRFGTMTADLLELAAWLKARGIEHVAMESTGVYWKPVWNILEAEGFDLLLANAQEVKIVPGRKTDQKDSQWIADLHQHGLLRKSFVPPRQVRDLRDLTRTRATLAQEHSSTCNRIQKVLEDANIKLGTVASDVFGASGRAMLLAMMKGESDAEALAELSKGRLRSKIPELRRALEGRVTGHHRFLIDRHWRQMESLENQMRQFEEEIAERMKPTAEEIARMRESLPAEAPLPPSPREEAIRLWMELPGVGLTTACSMVAELGVNMEQFPSSAHVASWAALCPGNNESAGKRMSGKTRKGNVWLRRTMCEAAWAAAHSKKTYFAAQFGRIAARRGNKRALLAVAHSLLVAAYEMLKHKEHYREFGADFFDGLNKDQVKRRLVQRLAKLGFQVTVTPTPTAE

SEQ ID NO: 259283 - protein, 387 aa, unidentified
MVQVNDLSRSLAAFDPISTLVVVVEMSKMSWLVSGVVPGVERQPLKKLEPDATALLRLIERWRIEAVRAGRPIRRVALAYEAGRDGFWLARWLIARGIESHVIHSASVAVSRERKRPKTDRLDAVMLMRVFLGWLRGERGHCGMVAIPTMEEEDARRPSRERESLVNERSRIVNRMKSALARLGIRGFKPHLRRAPERLACLRTAEGTGLPANIIEELRRDMARLALVREQISSIEKTRAERLERAPDTGPHAMVRLLSKVIGIGIETADMLVREILSRKLRDRRAVARYAGLTGSPDESGLKSREKGLAKAGNARARRGLIQLAWRFLMFQKDSALARWYRTRTEGPSGARKTTMIVALARKLLIALWRLVTTGEVPEGVELRPAA

SEQ ID NO: 259284 - protein, 395 aa, unidentified
MEAPMTVAKDPGRCVTRFEPKRTLIAVIEMSQSSWLVAAIVPGLKRQPLKRLEVDEAGLLQQLERWREEATRAGHTVKRIAVAFEAGRGGFWLARWLRARGVEAHVIHPTSVAVCREHRRAKTDRLDTELLKRAFLGWLRGERGHCSMAVVPTLEEEDARRPTRERESLVAERTRVVNRMRACLARLGIRSFRPTLRRAPERLEELRTPEGDALPPNTRAELQRDMARLRLITDQIRELEIARAARIDHAPAQGANVMVLLLARVVGVGLETADMLVHEILSRGLRDRRAVARYAGLTGSPDESGARRREKGLAKAGNARVRRGMIQLAWRFLRFQEGSALAQWYRTRTAEARGGSRKTLIVALARKLLIALWRLATTGETPTGVTLRPTMVVAA

SEQ ID NO: 259285 - protein, 343 aa, unidentified
MDYFAGLDVSVKETSVCIVDDTGKIVRETRVASEPEALLQVLTNTIYRFKRVGLEAGPLSQWLYSVLAEAGLPVICVETRHMRAVLKAQINKTDRNDARGLAQMMRVGLYRPVHVKTLRSQKLRMLLTHRKLLQSKAIAIENDLRATLRNFGLKVGIVGTVKFEARIKELVENLPDVAVLVEPLLVVRRVLREQVGILHRRLLAIVRDDDVCRRLMTVPGVGPVVALTYRATVDLPARFRNSKAVGAVFGLTPTRYQSGESDRIGRISRCGDEMTRMMLYEAAQSMLAHSAKWSWLKAWAMKIARHRGMNKAIVALARRLAVIMHRIWVDGTEFRWTREVAAA

SEQ ID NO: 259286 - protein, 367 aa, unidentified
MSYSVALSEGPIHLGLDVSKNKIAVGVLRWDEQVPDVELISSDEASVRRLIDRFPDRGVLRTCYEAGPTGFGLYRLLGSIGVACEVIAPSLIPTAPGDRVKTDRRDCRRLARLHRAGQLVGVRVPTEAEEAVRDLCRARADMVDDRSRTRHRLSGFLLRHGRVWRDSAWTSMHYRWLDAQRFDDAALTATYGHYRGVLDARDAEITAIETELASWYQQGPFVEALSRLCAYRGVAHLGALTIASEVGDWRRFASARTFMGFTGLVPSEYSSGDAVHRGHITKAGNRHLRTQLVESAWAYQHQPHISLLLRRRQAGVDPATLARSWTAQQRLCSRFRRLSAKKTSRNIVTVAVARELAGFLWAEMTAV

SEQ ID NO: 259287 - protein, 331 aa, unidentified
MKEISIVGLDLAKRVFQVHAAGSDGAVVLRRKLSRGQILAFFMELPKCIVAMEACATAHYWAREIGKLSHEVRLLPPAYVKPFVKRHKNDAADAEAIVEAALRPSMRFVVPKTESQQARSMIFRTRDLFVRQQTQLINALRAHLAEHGVIAPQGIANLALLSEIIEEGNLGLELVVVETARLYLEQIEVLSARIAGLEKTLRSEAKRSEASARLMSMPGMGPITAMAIEAFAPTMSTFRKGRDFAAWLGLVPKQHSSGGKQQLGRTIEDGPTRYPAASDHRRDDRDPMGMPQIPSRELMAGAYVGAQATHARCDRASQQDGSVDLGNDDEE

SEQ ID NO: 259288 - protein, 317 aa, unidentified
MKRGKTITKVGGIDIGKRSLDVAVHGGHERLQTTNDAAGVSELVGWLRYQGVSRVGLEASGGYERAVRVALQAAGFEVVVHQPLEVRLFARLKRLKAKNDRIDAALIAAATAQVDKVKAASDPRLQDLAERLTIYEQVSDQAAALKGFMEHVTLKGPARRLRAQIRALESLKAAFAEEILTAIRASEDLAERLRLLTSLPGVGTIVAVSLIVRMPELGQMCHGQAAALLGVAPFDRDSGQYKGQRFISGGRSRPRRMVYLAALSARRCDPSFKAFAERLTAKGKPPKLVLVAVMRRLIEAANLVLGRGQPWTKLCPT

SEQ ID NO: 259289 - protein, 352 aa, unidentified
MKYYIGCDAHKKYSVFTAINEAGEITPAKRVEHDRNSFRSFLKTLPPASQIAVESTGNWYWLIDEMEKAGHVPSLVHAAKAKLMMGQINKTDKLDAQGLAILARNGTLPAVWIPPGELRDQRELPRMRMALSQVRTKFKNRIHSTFAKYGITFDEVSDLFGKKGRILLAKSLDELPPETRNSVQEQLWLLDQLEQSINNAEKRIREVIKVDHDMQLLLTLPGVGPILTIVIALEIGSVDRFPTGERLSSYAGKVPRVKSSGGKTYYGKVRPDVNRYLKWAFTEAANAVVLQQHRLPDCHVLRLYWRIRKHKGHAKAITAMGRHLAEAAYWMLKKNEPYHEPKVKTLVSYNQG

SEQ ID NO: 259290 - protein, 349 aa, unidentified
MRYIGVDLHKTNFVVCFLNEDETLQLETFPLSKAGISRFTSELRKEDAVAIEVTQNIYYFYDRIKEFVARVVLVDTYRFAIIASSKKKTDKADALALARFLKLDHLPQVPVPSERVRQLRHLLQARETLVGLRTKLKNLGHAALTRNGIALSRSAFASGVARERLRTRDDLSAADKVILQSALRQIAELDKEIEQLEAEVVRLGKTLAGIKRLLQLHGLNLLSAISLLAEIGDIHLFETSKQLVAYSGLATSIRQSNQTTKQGHITKQGRKRLRTVAIRAVLSMVSRTNTPLMDFYARKKREKGSGKAICATARKLLTIIFVMLKKELDYWYLEERLYNRKLRQLNAAA

SEQ ID NO: 259291 - protein, 338 aa, unidentified
MALQCGMDLHGKNVLCSLTDEKDKVVAERRVATKLDEVLLFLGPYKSDIKGIAVESTYNWYWLVDGLIDEGYCVHLANPNAVKTYDGLKHGDDKGDARHLAHLLRLGLLPTGFIYPREQRGMRDLLRRRMLLVQERTRFILSLQSLCERVNGGKHAAEKFKRMKPEKLVELIEDPYHQAGALEYLDVVRRLNQGIYRLETKVLGECKDTRVFELLNTIPGVGRVLGMMIAFETGPLKRYAKPGNYASYARTVNANRYSDGKKKGENNRKCGNKYLAWALVQAAHQLIRYCPEARSFYDRKKAKKNGAVATKALACKLARCIYHMLTNDEEFDVKKIFG

SEQ ID NO: 259292 - protein, 416 aa, unidentified
MDEYGVLVGIDWASQAHEVCVMSPAGETLERFEVPHSNPGIEALLERLETLAGGDLARVAVAIEVPRGALVEALVERGAHVYAINPKQLDRFRDRYSPAGAKDDSRDAFVLGDSLRTDRHCFRRVEPDAPECIALREASRMDEELGNELKRITNRLREQLHRYWSEVLRLCPAADEPWLWELLARAPEPKAGHCLTGAEVASVLKAKRIRRLSAGEVLGALRSPALPVAPGTVEASAAHVQLLVEQLQLLHRQRRTVEARLRSLLAQCRTTAEPPAGKHADVEIVCSLPGVGLRVASALLGEAGQALARRDYQALRNHAGLAPITRQSGKSRRVSMRRACSRRLRSAMYHWARVSTQHDPHSKARYAALRARGHSHGRALRSLADRLLAQLMAMLKHGCVYEADRTRRVSAGVTDG

SEQ ID NO: 259293 - protein, 393 aa, unidentified
MRPQTTRCEATTTPHTPTLFLSIELSGKSWLMASRDGQAETVRHKTISVADLPALLREVRDAKSKFGLPPDARVLSCYEAGRDGFWLHRFLLENGIENLVLDASSLQVDRRMRRAKTDRLDASSLVAALIRFHRGETEACRPVFVPSPEAEDARRGSRERDRMKHEENGHRCRIAALLALVGVVLDTLAEHATFTKMRTPDGNALPPNLVLELEREQTRLRLVCEQRRELEKSQRLAIKAVVDQSQKDGKQRPANPLVVKVVSLMALVGVGQRSAWKLVHEFFYKEFANRRQVGSAAGMVNAPYASGGEERDQGITKAGNRRVRGLMIELAWAWLRLQPESALTLWFHRRFGQGKRTRKVGIVALGRRLLIALWRYLEQGVVPDGARLKSSPA

SEQ ID NO: 259294 - protein, 400 aa, unidentified
MYIVGIDIAKRKHEAAVIDGEGAVIIKPFSFTNNCSGYNRLLAMLTKAKLPLDEVSFAMEATGHYWLALFTRLQKEGFRVQVINPVQTNSIRSFYIRQAKTDPRDALLIAEVIRFGHFSESTLHPENIYELRELCRGRHAIVSMQADVKRKAVALLDQVFPEYETAFTNLFSDTSMAILQTCPTPKELSEMPLEELCHLIEVSSRKRFRMVKAQELQELARNSFGFAMAGDVFSTMIRLYAKHLVFLKQQVQEMDRKIAEIMDTLDTPITTITGIGPTLGAYILSEIGDISRFSSAAKLAAYAGIDPTMRQSGEYNGVRNRMSKRGSPYLRHAIWLAASSAVLHDPALKLYFQKKRDEGKPYMASVGMPAGRWFPSFTLLCGTTRPIHLTSQMRFRLDKL

SEQ ID NO: 259295 - protein, 357 aa, unidentified
MERYIGLDPHGTSCTFAVIGPSGRKLRHDVVETNGAALVDFLRSIPGRKHLCLEEGTQSAWLYEILSPHVKEIVVAGVGESRGQKSDLIDAYRRAEELRTGTIKMPVFKAPRLYSRLRELGRVHSMLVRDVVRVQARLKAMYRARGIATPGKSVYGPSQRDRWLQQLPVSARWATEKLHEEYDLLVELKREAEHELVAESRKHRIARILATAPGLGPIRVAQLLPIVITPQRFRTRSQFWAYCGLGIVMRSSSDWVQSPNGGWMRAQVQRTRGLSRRHNSSLKNIFKGAATTVVTKLHTDPLYEHYMQLTSAGTKPNLAKLTIARRIAAIVLRMWKDEEEYDPGKLKPKQEVATAAR

SEQ ID NO: 259296 - protein, 340 aa, unidentified
MELKVLGIDLSKNLFQLHGVDLAGRAVLRKRLRRDQLVAFISALSPCTIGTEACASAFHWGREFERLGHRVRIISLQFVKPFVRGNKNDGNDAEAICEAMQRPNMRFVPAKTIEQQDIQSLHRCRQRLVNHRTALISQMRGILLDRGIAFGKSASRARRLIPQIIAEPGNGLTVMAREMLASLFEFLQQLDQRIRDFDRRIEAVFQKDAACQRIAKVDGVGPKTATAIVAAVGDAKDFENGRHMSAWLGLVPRHQATGGRTVMGSISKRGDQHLRTLLVHGARAVVRISAGRTDSRSRWVNDLVARRGTNRAIVAVANKNARIIWSLLAKGEDYRPALAA

SEQ ID NO: 259297 - protein, 347 aa, unidentified
MNGRTIGLDLAKNVFQVHGVDEHGKVVLRKQVTRHQVAAFFANLPPCLIGMEACGSAHHWARKLQSMGHAVKLMAPQHVKPYVKTNKNDAADAEAICEAVTRPNMRFVPIKNVEQQSVLALHRVRQGFVKARTAQANQIRGLLAELGLILPQGMGHIANQVPELIEDASNELPGSFRLLIQRLLDHLKALDKQASELETQILAWHRQSELSKKLEQIPGIGPITASALVASLGNAKNFDGGRQVAAWLGLVPRQHSSGGKQNLLGISKRGDTYLRTLLIHGARAVIFQAARKTEPDATCNWVNQVVNRRNKNVAAVALANKNARIVWALLAHDRQYQAGYAPIKPRA

SEQ ID NO: 259298 - protein, 386 aa, unidentified
MQTVAALIAAAVDYERTLVLAIEVSNENWVLAAQVPGLPHTKAKRTINPDAESLMAAIAGYRARATATGHSVERVITVYEAGWSGFWLARWIMRHEMEAYVIQPSSVPVDRRMRRAKSDGIDAELLLRTLLAWLRGEPRVCSMVPIPDEADEDARRCVRERTELISERVGLTNRIGAVLATLGVSDYNPLLRSRYRRLTELRTGLGESLPRNAQAKIERLLARLELVLAQIAELERERDAVVEAEASDKASKMIQQLTNLRGIGVQSATVLVREAFVRRFANGKALGSYAGLASSPYSSGGIDREQGIGKAGNRRVRTVMVELAWLWTRYQPGAAQVRWFRERVGSTGRRARKIMVVALARKLLIALWRFVIEGVVPEGAILKPAA

SEQ ID NO: 259299 - protein, 350 aa, unidentified
MKIVGCDFHPSYQQIAVLDTETGEVLEKKLMHGNGEAERFYRELQGPALIGMEATGNARWFELLVEKLGHELWIGDAAKIRASYVRKQKTDKRDAAHILKLLVEKRFPRLWVPDGQQRDIRQLLTHRHKLVSVRTRLKTELQHLALNQGVQKKRQLWNENGRALLASLPLQGWTQQRRKDLLQLLAVVEPQIVQLDKAVEQAAKTDAQAVLLMSQPGVGPITALAFSVTIGDVSRFERSKQVSSYLGLIPTEHSSGSKRRLGSISKQGNVFLRALLVEAAQSVVRHDPGFRKEYQHRCHHKVKGIAKVAAARKLAVRLYWMLKSNKSYSELVLNGGSPRHPVAAKAKPLT

SEQ ID NO: 259300 - protein, 359 aa, unidentified
MKGISMPDQQQAVIGGIDCHTDFHVAVALDPLGRVLGTEAFPATSAGYRLTHRWLTSFGPIAAVGVESTGSYGAALTRALVEQGCRVIETCQPHAHLRARRGKNDAIDAEAAARKVLSGEATAAAKDTSGIVESIRQLSVARSSAVKARSAALCQLGDLLVTAPATLREQLDTRRSLEGKAAVCARLRPDTDRLADPAQAAKAALRSLGHRIAQLGAEADELGRRLDRLVATAAPTTTSRLGCGTHHTAALLVAAGQNIDRLGSEASFAHLCAAAPIPASSGRTSRHRLNYAGNRSANRALHMIVIVRLRYCERTRSYLNRRVAEGKTKKEAIRCLKRFVARELYRTLRADLATLKTRT

SEQ ID NO: 259301 - protein, 427 aa, unidentified
MAQVIIGVDPHKLSATIEVVDKHERLLGSGRFSTDQAGYTAMRSYAKNWPQRLWAIEGSNGAGRPLAQRLLEAGEHVVDVPAKLAARVRLFDTGHNRKTDARDAHSIAIVAVRTKTLRVLRPDGELEALRMLCDRREELTRLRVQTVNRLQRLLAELVPGRAKKDLTALQAKAILATVRPRDIAGKTRRRIAAQELADLVAVEAKMKKATAELKALVKARGSRLMDLHGVGPVVAARTLADVGDVARFADRNRFASWTGTAPLDASSGEQNRHRLSRAGNRRMNHMIHIAAISQIRLDTDGRAYYRRKRAAGKTTLEALRCLKRRISDALYRQLLADAQQAADANALVAVETGPGGHCGATQESSAADLHPLVGTSDQPLPGPANPTLQASTPVRKEEHPEKDSSDHRLTTKGSRKDAPWPTLGSRA

SEQ ID NO: 259302 - protein, 371 aa, unidentified
MSVYVGIDVHRKRSQVAVVDQVGEVQVNRNVVNGVAPILKVIGDLPIGTPVAFEAAFGWGWLVELLEDYGYDPHLVHPLRCKAIASARLKNDKVDAATLAQLLRADLLPEAWIAPPAVRALRALLRHRIALVRVRTQLGNRIHAVLADHGLDRAGGFRSGVGRAWLAELSLPPVSRTVIDDSLAVIDGLQPTIDRLDVEVAQRAKADPRVQVLTRLPGVGPFTALVILAEIGDITRFRNARTLASWAGLTPTVRGSDLVVRHGHISKQGSAWLRWILIEAAQTAKRSAVFAPSYQAIARRRGKKIATTAVARKLLARAYHLLADADGTADLKNPTAHSRAVPADRTRPEGREVTKPRASSQNRMSRPRATR

SEQ ID NO: 259303 - protein, 460 aa, unidentified
MTRAKQARRRHEPVKMELPVELKNVNLNAAAIDIGSKRHYVAVPEGRDTVSVRQFGVFTRDLEAMAEWLHQCGVTTVAMESTGHYWIPVFELLERKGFEVKLVDARQTKNVSGRKSDMLDCQWQRELHTVGLLKGAFRPPDEVCVLRGFMRQREMLVQAATMHIQHMQKALTQMNLRLDNVVSDITGVTGTRIIKAVLEGERDPQVLASYRTRECKNSEAVIAASLLGNYRVEHLFALRQAFELYQVYQEKLQECERELMKVMQARPHKTEAEPPAFERKLRRRDKVRGEIDVRRELYQQTGVDLFRVPGLGPDTLLTLSGEVGTDMSPWPSEKMFASWLGLCPGTRESGGKVLSRRSKRSRNRAAAAFRIAAASLRSSPTALGAFYRRIRARGGEAKAVTATAHKLAKIYYRLLKHGEDYVEAGEKAYEEKYQQQRLKTLKQQAALLGFALVAASTLAT

SEQ ID NO: 259304 - protein, 410 aa, unidentified
MVKENFIYVGIDLHKETHTAVMIDCYNQKLGEITFPNRPADFPKLVTKVKKCNTDAKEVVYGLENAYGYGRPLAVWLIDKGYFVKDVNTAISHRQAKHRGAMYRKSDSDDAEAIALATLNMLDKLPDACPNDAYWSLGQLVHRRDNIMKQRTRLVNQLHEQLCIAYPSYKQFFNDISRPTALYFWEHYPSRKYLKGKSVEDLRKELVPVSHNRCSTKNCEKILDAAASDKVKNNAYQDARDMVTLSIVSDLQHYDSQLAEVDKMLEQMYKMLGCTLTTIPGVNVITAVKILAEIGDIKRFSNANKLAQFAGIAPLHLSSSGKGKDVATKQGNRRLQATIYFLAIQMVQVSSKGTPRNSVVRAYYEKRKAEGKTSQQALICISRRLISIIYGMLKHGTEYRMPVVESAGEK

SEQ ID NO: 259305 - protein, 346 aa, unidentified
MNATTYGMDIAKNVFQVHWVDGNTGEICRKKLPRGKVTEFFAVRPAGRIAMEACGGAHHWGRTLGPLGHQIELLPTHQVRPFISGNKDDAADARGIWLAAQHGDIRRVAVKSSEQQAMLSLHRMRTHWVSVRTATVNALRGLLYEFGVTLPRGRHSGLRQLAQQRAEINGAVPAVMVRLVDDQLLALADIERHVQAMEEEISLMLKSQESARRLRDTPGIGVLGATALAATLGDGTSWRNGREFACCLGLAPGHRGMGGKVRIGSISKRGNAYLRTLLINGARALASREHPAPWIVALLGRRPFNVVVVAIAHKLARIAWALVAHGRAYEASWKASAPPAASAGAV

SEQ ID NO: 259306 - protein, 479 aa, unidentified
MAVRMWPADVGRTWFCETVHKIDAGSLAFGCSRLRREREYQSLCSFQGSAGGMRAGVVTDLGGSMQVIYERCAAVDVGKDVIVIAVRLPGGGPDGRDTVKRTFTTFYGVLGEAARWLVSLGVTHVAMEATGIYSMPVYHALVEHGDFEKVLVCNAGHVKNVPGRKTDFSDAEWLVHLLECGLLAGSFIPPAEIKATRDVLRYRTKVAQQRVSEIARLGNVLQDAGIKIDSVASSIATKSGRAMIEALIDGERRGPVLADLAKGKMRAKIADLAMALEGRFGDHHALMCRLHLDHIDHLEAMLARLDAQIEAMMIPFRAARDLLTTAPGIGPLSGAAVISEIGAEVRAHLASWTGLCPGNHESAGKRRGGKRRKGNPHLQSILVECAWSAVRHDGYLKSLYHRHVMKWGGYRSQLAKNKAIIVVAHALIVIIWHILATGKPYQELGAGYFTSRLDPERETRRLIAKLEALGHQVSLQPAA

SEQ ID NO: 259307 - protein, 435 aa, unidentified
MPMSTNLYKPFISVGVDVGADISWMSIALPNQMFVGKPFKITHSDLASLEKAISAMKEAEEAHSLESRIFLESTGVYHYPLFCYLRDRGFHVAVINPIITKNSTNINIRKVHNDKFDSKKVALIGLKADLKTSVMPSNLVLELRHLVREYYNLMDNRSAYVNKLNGQLRMVFPQFINIFSKLTTATSLALLDKYTSPESFLAADKQEVIALIRKVSRFGLAYAEGKYDAIIAAAKSASVFGHSTNSNLSLIRLYISFIRKYDDEIEAILKAMNGLVDANPGELFVKQIRLIQSIKGAGFLSAVTVMCEIGDFSVFKKPKQLFAYFGLDPSVRQSGNFTGTKNKMSKRGSRLARRAIHTIALVSIGKSKSGEPHNHVLSAYYQLKCKSKPKMVALGAVMHKVCNIIFAILRDNKGFVILSPDEHRANYQSRFNQAS

SEQ ID NO: 259308 - protein, 392 aa, unidentified
MKVTYQTCCGVDVHKSFLVATIVKTTGGIEPSYQKKRFSTFNNSILEFKQWLLDNDCHDVCMESTGKYWVPVFNLLEDEINVVIANPKWVKAVKGNKDDTKDSKWIGDLFRLGLVKGSYIPCKKIRILREYTRYRYKLVSCRSSEKNRYQNALTVCNVALDSVVSDIFWKSSTSIIDYLLKQSGTSVNHEEIASKLLRSLKSKEDAVIESIEGYQMTDAQKYRMRLVRAHMDYITAEINDVDKMIENMISSNPDFENAIQFLCTIPGVKRDSAITIISEIGTDMSQFSSSKRLCCWAGLTPGSNESAGKKKSVRITRAGVYLKPALVQCAHAAVKSDKSPYYKKKYESLVKRRGKKRAIIAIARMIFLLPSTRCCLLVSSGIRAIFTKSICL

SEQ ID NO: 259309 - protein, 361 aa, unidentified
MTASNIVGVDPHRKTFTATVLDTRGGALGHAHFPNTRDEHDTGLAWAAGLGPADRWDVEGASGLGRHLAEFLVAARCDVRDVPPHKTSIHQRGRHEGKTDRLDAHRVAVETQPNPRLARAFKHSASAAPDAVRDRIAPWHNARTSLTKVRVQLLGEIDALVHDLPEGLRTQLRPAKTVSARVNSLCRLDTTGVTDPTVVLRLRLIERRVAMLRDVLEQDQASTAELTTLVDETNSTLTELVGIAPRSAAKIIVEVGDIRRFTEAGFARFNGTAPIPASSGEGENAPARHRLSRGSNRRLNPAIYRIAMIQLRYEPRARQIHDQARARGHTRREAMRVLKRHLSDAIYRTMLRDTRRDANLT

SEQ ID NO: 259310 - protein, 395 aa, unidentified
MFIVGIDIAKRSHEAIIIAEDGQVVRKAFSFRNNCTGYNLLLEQVRRLTLVKSQIVFAMESTAHYWLALYARLLKDGYAVMVLNPIQSHSLRELYIRKAKTDARDSLIIADLVRFGRCKASNVPQDKILALRELCRSRAYLVDMAADLKRKLIALLDRIFPEYESLFDSVFSKTSIAVLRKYSTPQKVKNAHLGKLTYLLMESSNGHFGEWKAHQLKEAACSSFGIDDSDGVYSMLLGMFLEQILSLTAQADSLEKQISVFFQEFNNPLTSIPGVGTVLAATILSEIGDITRFSSADKLLAYAGLDPSVKQSGEFKSNQNRMSKRGSPYLRRAIWLASTVAVHRDPMFQTYYEKKISEGLHYMNVIGHVSRKMTAVIFAVLRDGQPYQPILQSAG

SEQ ID NO: 259311 - protein, 370 aa, unidentified
MKETITSYVGLDIHKGSIAIAVADAGRAAPRFIGTAVPELASLCKALRRIADAKKTLVVYEAGPCGYGWVRHLRAHGWTCDIIAPSRIARSPAEQRIKTDRRDALMLARESRAGNLVSIALPDERDEAIRDLSRAREDVLRARMTARHQLKALLLRHGRAYQGKSSWTLAHERTLASIHFDHPAQSIAFTEYRQAVKDAHERLERITEALRVQSADWRMNPLVKALMTLRGFDFIAAVTFVAEIGDLTRFAHPRSLMAYLGLVPSEYSSGQSRKQGSITKNGNTHARRILVESAWSYRHVAHVGRDLEIRQQGQPKILCEISWNAQLRLTQRYRKLRMGRGMHQNKVCIALARELAGFIWDIGRHIKLPA

SEQ ID NO: 259312 - protein, 389 aa, unidentified
MIYVGIDIAAAKHACCILSEEKKVIKQFTFANSASGYEKLHSALLSPAETKIGLESTGVYGNNLVEFLRRNGYTTHIFNPLLVKKSIQATTLRKTKTDKSDAKQIARYTMEHSQPDQLPSYHISELKSLSRGRFSLVRERSKAKTQAKTLLIQLFPEFSEAFSDMFGVTASAVLRSFPSARALSLCPANVLADILSQTSRGRFGKAKAEYLIGLSKDSIGTQSIALELELQMLLQQIDLFTAQIAGYEAAIKSIMEEIDSPITTIPGIGYVLGAVILSEIGDINRFSTPAKLQAYAGVDPSISDSGSSVSAPGRMVKHGSCYLRWALCQAARCVSLYDPVFAAYMQSKRNEGKHYCVACSHVAKKLTRVIYSLLKNNSVYSPTYSLLSA

SEQ ID NO: 259313 - protein, 376 aa, unidentified
MKVVFPICCGIDVHKSFLVATIIKTPQDSLQPSYQKKCFSTFNSDLNRFADWLHTNGCLDVCMESTGKYWVPVFNILEKRGIRVVIANPKWVKAVKGNKDDTKDSKWIGDLFRIGLVKNSFIPAKNIRILRELTRYRYKLVSMRSSEKNRFQNAFTVCNVALDSVVSDMFGKSATAITDYLTSNEKFNAEHCVSLLQRSLKKKADAVLESIEGFEIAAEQKTRIAIVRDHLHFIDTLIERVDACIDTMVQQYEGYITLLCTIPGIDRNSAITIISEIGVDMEQFASSKRLCCWAGLTPGNNESAGKKKSVRISRAGVYLKPALVQVAHAAVKDKGSPYYGLKYERISKRRGKKRAIIAIARMILTAVYSMLSTGEV

SEQ ID NO: 259314 - protein, 313 aa, unidentified
MSQEEQRIVVGIDVSKARLDIAAGDEEWPVTNDLEGIGRLISRLQTLNAGLTVVESTGGLERLVVAEMWAAGLPVALVNPRRVREFGKSIGLLAKTDRIDARLLVRFGEAVKPNPICLPSEEEQKLSALMTRRRQVIEMLTMEKNHLCSSHPAAKESITKIKTVLQQELDELDHQIDDFIDQFPIFKKKDEILRSTPGVGKVTAAILLSDLPELGTLDRKKIAALVGVAPFNNDSGRFRGKRRIKGGRPSVRTVLYMATISATKFNPIIRTFYEHLVLQGKAKKVAIVACMRKMLIYLNAMIRDMQLWRSSIA

SEQ ID NO: 259315 - protein, 411 aa, unidentified
MRDRQNYVFIGADVHKEQHTIVIINCWSEVLGDFTFESKISEYPKVMEKINEVIPDGLIPIWGLEDVCGNGRSLAVFLKENGYTVKEVNPSFSSSERKNHATTKKNDYWDAKCIADVLIRKLNELPEATPNDLYWTLKQFVYRRDSLVKSATTAKIQLHEQLVKNYTSYKKFFSNIDGSTALDFWEKYPSPTTLKGVTVIELRNFLRKVSKNSCSTKKAITILELIEGDGDTFREYQSSRDQLVKSYVRSLKYYKEEIEKLNKEIKGIISNLDYKLETLKGVGTVTAAQLIAEIGDINRFKSAEKLAQYAGVAPVRFSSAGKGKDKKSKQGNRNLNGVLYFLAMQQIQISKQSKMPRNEILYEYYQRKLTEGKTKVQALICIMRRLVNIIFGMMKNKTEYVMKYRHERIAS

SEQ ID NO: 259316 - protein, 348 aa, unidentified
MNATTVAVDLAKSVFQLAAADENWKVVERARLTRGQFERWFQNRSVRLVVMEACATAHYWARTLRARGIEVRLLPAKYVRAYVKRNKTDAADALALLEAARASDIKPVAVKSIEQQALQALHRMRSAWMATRTRRINTMRGFCREFGMEVPVGAVKGLAQMARLLADDHSAVPAMLRTPMRLALEEIRLLEARIDSLERELAQIARQSEPCQALASVPGIGLLTSTAMVAAVGDPRSFDSGRRYSSFFGLTPREFSSGDSRYLGRISKRGNRYIRMLLTHGARSVLRAATVARRAGRSLDRLRTWALTVQDRTNHNKATCALANKLARIAWAVWVKHERYRDVALTMK

SEQ ID NO: 259317 - protein, 355 aa, unidentified
MHGVAAQSEAPIAIRTDLRAIFVSLELSRSTWLLTSLSPGAGEKMSKHLVSASDTAGLFSRFAELQQKARTRTGRTFSIITIQEAGLDGFWIHRLLQGEGIESWVVDPASVLTSRRRRRAKTDKIDGETLVRTLLAYKRGEPRVCAMVKAPTPEEEDRRRICRERKTLTAERIRHVNRIKGLLFAQGIGDYEPLRRNRRGRLEELATGDGRPLPEHLKAQISRELDRLEIILAQLKAVGSERDAMLEPAKEGPPTPASLLAQLKGIGPEFAAVLWSEGLFRSFNNRRQVAAYAGLAPTPWQSGSVAHEQGVSKGGNPRLRTTMIQLAWLWLRHQPGSALSIWFRERVHNHRGVGK

SEQ ID NO: 259318 - protein, 342 aa, unidentified
MTMIGIDPHKATHTAVAIDDNEDVVGEFTLRASSRQVRRLRDWADGFAKREWAVESANGLGYLLGQQLVAAGETVFDVPPMLASRVRVLGSGRSQKNDPNDARSIAIAALRSDRLAVVRPDDHARVLRLLVKRHRDMARLRAKHASRLHALLGELHPGGVASPISVGKANRVIDRVTVDGEVTRYRVLIVRELVGDIARLDETLAASKRRVATAVSASGTTLTDIVGIGPICAAIIIGYGGDATRFPTRGHFATYNGTAPIDASSGDNTRHRLNTRGNRRLNHAIHIAAVTQLRHDTEGRIYYNKKLGEGKTSKEAIRALKRRISDVVYRHLIADARRQQTS

SEQ ID NO: 259319 - protein, 354 aa, unidentified
MTSPNFKNVNFYIGIDTHLKNWTVTIRSTGIELKTFSMNPSASELNIYLNKHYPNGNYNIVYEAGFAGFSIYRNFKELGLSCIVVNPSDIPSTNKEKVIKRDPSDSRKLSRELENGSLKAIYVPDIVSEELRSLMRLRFRYVQQQTRLKNRIKGFLHNYGIAIPKEYLSNTRWSKNFITWLENLQLTTEAGSFVLTDLVTQLKENRDGLKEILRQLRKESRKEHIAPIIKVLCSVPGIAFITAMTLYTEIIDINRFKNFDNLASFVGLVPSTYSSAETDYSRGITFRHNKFLRPLLIEAAWTAIRRDPAMSKKYFELCKNMSKQRAIIRIAKKLLRRIKHLWVEKEEYSFSLVA

SEQ ID NO: 259320 - protein, 408 aa, unidentified
MNTLYVGIDVSSKSNVVYLMLPNGDKHSNFSVANSHEGSTQLVKRILSALTSLSLDTVLIGLEATSVYGDNLVYFLREDASLAPFHRKIHVLNPKQVKKFHDTYNDLPKNDYVDSFVIADCLRFGRINKEVYLGDYRYKALQNITRARFFAVQNLIKEKQRFMNVLFKKYSTMTQEKVFSDTFSTTALAVYDEFDSAEALANMDLHELTDFIIKKGKNRFPDPDAVAKAIQKAARSSYRLPKTVNDSVNQVLSISITSIKALESQIKEFDKAIKAQMELLPNVLISIPGIGPVYSAGIMAEIGDINRFDNQAALAKYAGLAWKQHQSGDFEAEVTRLIPSGNRFLKYYLCEAALSLVRCDKEYSDFYPLKYKEVNRCQHKRALALTARKFVRLVFRLLKDNRLYCPAK

SEQ ID NO: 259321 - protein, 399 aa, unidentified
MNSMNYAGLDIHKKSISCCVRQADGTIIQESTITATRHALDEWMRQLPQPWMAGMEATLFTGWIYDHLVSGGAMVKVAHPAMLQAIASGKKKNDRVDARKIADLLRCNYFPECHMASREIRDRRRVLRYRNLLVRQAVQMKNKVSGLLMEAGVPYNQQKVHQKKYFAELLQTQKKEMPPSMPELLRLSRSTVEALTGMQRQLIRALESDALLAARVERLASIPGVGRVVALTWALEMGDISRFGSVKKAVSYCGLCGAEKSSGGKTERTPISKQRNKHLQTMLIEAAKLAPRWSAELALVYERAKQKGNRNRATLAVARKLVAYLMAVDRERRPFDTQIRVAGEASTFGFRGWQVNPNLIFGDGEIRLRPQMEVWFCAIAGTYAARHNALMGTGESEQN

SEQ ID NO: 259322 - protein, 409 aa, unidentified
MRYYLGVDWADQEHAVWTLDEGGRKISARTVAHTATGLSEWGRELDEWRAQGIELWAAIERPEGRVVDFLLDHGVVVYPLNPKALDRARDRFRQSGAKSDPFDARVAAEFLRTDHGHLTALQPSSAAAQELKYLTEDCQRLIRQQTRLLNQLTATLKAYYPRALEVAELPTALARAFLTAYPTPDALSRLTERQWQRWARAQHLSASRTAELWSTLLAPQLPVPAHVVRAKARLMQTLLAALDPVLAGVAGYRQTIDDFFAGMPAAPTARTLPVGERGLLVPTLWARLGDAPDRWRSFRHLQAQAGTVPVTERSGKQRSIHFRYACDKTLRYVVDHLAFRSLQRSDWARAYYDQQRTRGHGHRQALRALGAKWLKIIFVMWRDGVAYREEHHLANIARQQLRCSARKTA

SEQ ID NO: 259323 - protein, 424 aa, unidentified
MKNCNKQNEKIELVDEKTLVIGVDVGSYDEYARAFTCRKQELSKKPLHFHNTAEGFKTFKYWAVNIMKTNGLEKIIVGMEPTSIYWEALATYCKDNGMILVHVNPAAVHKSKELDDNDPSKNDRKDPKVIADLVTDGRYSFPYMPEEEYAQLRELSNLRIRTQESLTQCKNRLARWYSRYFPEFKEAYKNVVSKTAMIIMDMYPLPEDIVTLGVEGILQIWRDKKVRAAGESRAKKLYEAAKNSIGRKEAAAVARLEFQSIREDLDRYQERLEAINKEVDEILPKIKNVDKLFEIKGVGKATVLTFLSEVGDISRFENPKEIQKLAGYAIVTNESCKHQGEKRISYRGRKRLRWALYQTALSVIGKNEEFRQIHQYYTTRKKNPLKGIQSVVAVACKMIRIFYKILTDGVSYDGTKMTQDIVRV

SEQ ID NO: 259324 - protein, 448 aa, unidentified
MDVMFTHCAGLDVHQKRITACRVTPDPTGQQAEGLRELREFGTRTIDLLALSDWLAEAGLTHVAMERTGEDWKPVSNLLEGSLTVFLVNAAPVKQVPGRKTDQADARWLAKLMRDGLLKASVIPPVGQRDLRDLTRDRTKLVQERGREVNRVHRVWERANIKLGAVAPNIFGVSGRAILAALIAGRADPATMAELARGRRRSKIPLLEQALTGLVRDHHRRLLSIQLAHLDFLDEQIAAWSDEMARVLTELSGGEPLAPLANAADPAHPAAPLPRPTASQGPLTFARAVSVLDTMPGVDHRGAELLVAEWGTDLARFGTAERLAAWSGVAPGNDESAGKRRSSTTRQGNRALRAGLTQVAHAAARTTGTYLSALYHRLAARRGKKRAIMAVAHSIVVSAFQMLSRNEPYRELGANYVDEHRRHQLVDRLARRIERLGYRVSLQPVAAA

SEQ ID NO: 259325 - protein, 444 aa, unidentified
MLRFVGCDVHKRTAVFTILLQDGTLFGTYTVPVTREALAAFAERQLAAGDRLAMEATTNTWAVAGVLRPFVQEIVIGNPLKIRAIAEAKIKTDKVDSRVLAELLRCDYLPRVWQPDQETQRLRRLTHRRAALVSDRTRLKNRLHSILHHTLVPLPDCDLFSKRGIAWLRHVPLAQEEALARESDLRLLELTELEIAQMDDLLVREAWQDEKVRLVMSIPGIDYTVAQTCLAAIGDISRFANAKKLSAYLGLNPATRQSGAHCYHGPITKQGNAHARWLLVQAAQHLGQYRGPLGQTMRKIVKRKNRNVAVVACARKLAVLLWHVLSSGEPFRYAQPKSLQAKFSRLRIRATGQRRRGGVAKGTPRSAQYGHGRTRAVPSLPQVLAENGLPGVAPLAKGERVMLDRKRLDTFYRELQTPSRVQANTPTPQVEEAEEDFKSELTQS

SEQ ID NO: 259326 - protein, 384 aa, unidentified
MSVDHRPEQTSIYIDLGAIFVSLELSRATWLITSLSPGRQKMSRHRVRGGDSAGLLVRFAELQAKAHTRTGQLFPLIVIQEAGLDGFWIHRVLQTEGIESHIVDPASVATSRRRRRTKTDKIDGEALVRTLLAYKRGEPRVCAMVRAPTCREEDERRICRERRVLTAERVTHVNRIKGLLFAQGIANYEPMHRHRRVRLDELKTGDGRPLPPQLKAQVCRELDRLELLLEQLKAVEAERDALLAATETANKPALPTLLLGLKGVGPEFASVLWSEGLYRSFANRRQVAAYAGLAPTPWQSGAVNREQGVSKAGNPRLRTTMIQLAWLWLRHQPDSALSRWFHERVERSTSRRKTTIVALARKLLVALWRYVTAGVVIEGATMKA

SEQ ID NO: 259327 - protein, 345 aa, unidentified
MWIIGCDFHPGFQQLAIFDNQTGEIKEKKLSHPAQATEFYRGLEGEVRVGLEAGSPCQWFRRLLQECGHQLWVGDAARIRAAETRQQKTDRRDAELILRLMLEDRFPRIWVPTEAERDVRQLLMDRHHRMRMRTKVKNQLQSLAMNQGLQKGLRLWSIEGLRQLRDLPMMEHAGRRRDQLLQTMAALDAQIAALDVLVRREAEAREEARRLMTHPGVGPQTALAMVLTLGEVSRFASSKQVASYLGLTPREHSSGGKQRLGHISKQGSSFMRFLLVEAGQTAVRGDAQLQRAYRRLAARKNSRALAKVMVARRLAVRLYWMLRNRWTYAELARHAGKPESFRGEQ

SEQ ID NO: 259328 - protein, 407 aa, unidentified
MEVLYPRCAGLDVHAGSVTACARMATGPQVRYEHLTVATTTRGLLELAEWLTAHGCTHVAMEATGVYWKPVWHVLEELFTLVLANAMHIRNVPGRKSDMNDATWIADLLAHGLIRSSFVPPAPIQELRDLTRTRRQLVHEIARHVLRIQKTLEDANLKLTQVMSDIVGVSGRAILNALVAGETDPDRLVDLTRGRLKASRTDLLDALHGRVTDHHRFMIKLHLSQIDALETAVATIEARIGDALGPFRAAVSLLTTMPGLSETTARVLIAEIGTDMTRFPSVGHLISWAGLCPRLDESAGKRRSTRTRQTTPWLKPTLINAAWAATHKKDSYLRAQFLRIKSRRGAKKAILAVASSMLTAVYFMLRDGVDYHDLGSQYFDQRDKHQLAKRLLQRLRDLGVNVEVKAA

SEQ ID NO: 259329 - protein, 392 aa, unidentified
MYIVGIDIGKNHHEASIVSPEGKQIGRSLRFATTHKGADSLMSFIFKNIGNSPCVFGMEATGHYWYPIYSFLKAKGYTIYVINPIQSDSLRKMYIRQTKNDSIDSFLIAEVIRFGQFWTTSMADENILAMRQLCRYRDSVISSRTEIKLRIGTIMEQIFPEYEKQFSSLWVSTSMGILEKYLTPENIENAPIDELFEIIKDKSHNRLTKAKAISIKEAAADTFGIKIAQDAFSFQLKQLIDRMNFLDKQIEALDCQILEYYEKFDCYLHTIPGIGMIAAATILAEIGDINRFKSSSALVAFAGIDPTVRQSGEFSSTHNHMSKRGSPYLRHAIFLAATTCSFHNSPLNAYYKKKRDQGKHHLTATGAVARKLTTVIYAVLRDSKPYEPKKFC

SEQ ID NO: 259330 - protein, 400 aa, unidentified
MYSVGIDWADQKHNVCILAPDRRVLSEFTIKHDWSGFEQLRSVLNELKDVEINLERSDGLLVDWLVSQNWRVFVTPPKIAASHRPRRSKDDRGDAYLLADLLRDHDADCRPLVIHSPIVEELKQLTRAHDHFQTQLQSTTNQLRQVLKQYYPAAIDLFKELHSAISLALLKRYPTPETARQATRENIEAFLRQRHYRAMDRLGEICQQLHAAAPTARVVAGYEQHMLALVAVLEVLTEQVQHLERQMDKVFKTHPEAAWWRTFPGVGPLTGPRLLARIGDNRAQFPSYEVLQTTAGTAPITRRSGKQILVEFRWACSHPLRDVAMDLARNSLRKSGWARSYFFDQLKKGHSKIRAFRALANRWLRIIWTLWQRRERYDESRHVANRARQGLPPTSAKKAA

SEQ ID NO: 259331 - protein, 423 aa, unidentified
MKKRIYRGVNVKKVDEEKLADAVRGERVVFGLDVAKEAMVGSVVVDGNDVKLNVKWTHPAESIELVELLLGLPAASIEVAMEPSGTYGDALKCQFAMRGVPVYRVSPKRSHDAAEVYDGVPSWHDVKSAGLIARLHFDGASEPWRDRTDEERELAASIRTMEMYDCQENNNTNRLEALLARHWPEVTQGLRLKSATLVTLIKHFGSPQGVVRQASQARALMRRVGRGGVREETIEAIVRSARTTVGVPMIDAEARMLQTLAGEILRCRKAASKARADVERLSEAHEAAGRMGQTIGKATAAVLVAKAGDPRDYASASSLVKSLGLNLKERSSGKHKGQLKITKRGPSVCRYYLYLAALRLIQDDPVVRAWYGKKVVRDGGRMKNKAVIAVTRKLVKGLWHVARDEPFDSRLLFDVNNLDLVQA

SEQ ID NO: 259332 - protein, 408 aa, unidentified
MDVVHRRCCGIDVHQASLAVCVSIKEEGVSEKHKLLCGTTTAELLRLLDWLREQAVTHVAMEATGVYWKPVWHVLEGQFELLLANPLQVKALRGRKTDLKDGERIADFLQHGLLQGSFVPPRAIQELRDLTRSRTQLKQEQVRISNRILKVLEDANIKLNTVMSDVMGVSGREMLRAIIEGKTDAGELAKLARGRLRGKIPLLQQAARGSLNEHHRFLIEQWMALWDEQAVRIAKFEERIEEKMRPFEPVVKTWASLPGIERVTAWTVVAEMGVDMIQFPTAAHAASWAALCPGQEESAGKRQSGRTRGGNVWLRRALTQAAWGASVTKGSYFKAFYHRLAARKGKKRAIVAVAHALLVTGYLLVATGRKYEDLGVDYFDRLDQERLTKRLVKRLERLGHRVSLQPAA

SEQ ID NO: 259333 - protein, 430 aa, unidentified
MEEVDEQELHVERVAALDLGKAALEACVRVPHQTKPGRRLQEVRGYATTTAALLGLADWLHSWGVTRVVMESTSAYWKGVYWLLEAEGFDCWLVNARDVKNVPGRPKTDKADAVWLAKVAERGMCRPSLVHPRPIRQLRDLTRYRRALIQDRTREMQRVEKLLEDAQIKLSSVATDIFGVSGRAMLEALIAGQRDPKALAQLARRRLRAKLAALEEALRGFFTDHHAAILRMMLDNIDRLSQQIAALDTTIEEAITPFAAQVAQLDAVTGVGLTAAQELIAEVGVDMGRFPSAAHLVSWARFCPQVHESAGRKKPKGRGKGNPWLAGTLGNIVATAARTDSFLGARYRRIAKRRGKQKAIVATGNSVLVIVYHLLADPTATFVDLGGDHYLSRINHERRARSLASQLQAVTGQRIVIRDGQAIIVQPDAA

SEQ ID NO: 259334 - protein, 428 aa, unidentified
MDEVNRNRLEEFRQLRQAIRHSQEYLIVGIDVAKDRHHAFFGMATGKTLLRRLVFSNDHEGFRKLLDQAEALRVGHGLKKVVYGMEPTANYHKPLGEYLITLGRTVVLVSGVTVKRNRESLDGRWDKHDVKDSANVADLISQGKCLYYEYPSAQLRGLRGLLSLKRRLKKQEHGYRVRIRNHLIAQYFPEMDRDYERLGAVGLSVVRWCFPTSQITALDIEPFIERVTSRRIRMETRRRLEGVWEKAGASIGCEGVPGLDHEAKVMVEGLRQIREVIKETEDKIQQLCERFPEYPYVLTVPGFGPDVSAKVLGAIGDPNRFQNGKQVLKMSGLDLSADRSGNDSDKAIPEISKRGKADLRYALYQAALIASHKNRDVMIYYTNKLRGREREKGIHNKMRVKLAAKLLVIAWTLMKKREKFDSTYLNIG

SEQ ID NO: 259335 - protein, 433 aa, unidentified
MIKINYLSTLFVGIDVSSKSNVVYAMDFDENKFLASSFSNNHPGAEQLVGMIYDCMLRHPNLDTIVVAMESTSVYSIHIANYLSSCESLMPYKPFVYCLNPKATANYRKSYVAMDKTDPLDAFLIADFARVGRTKKCSPWRGSQFLALKRLTRHRLHLAECITREKTYMVSNLYLKFSELQLLDGDNRPFSNIYGSTASAVLTDFMSLQDIIDSPEEELLHFLANKSRNRITDISRTSDLLKKAARDSYRMDKCMYEPLNVSLASSFNCIQTYQKEIKLINQAIEKCICGMNPNALTILKSIPGIGPVWASGIIAEIGDISAFHSSDALAKYAGLTWKKSDSGDFTSEDNHISKAGNTYLRYYLGEAANSVRRHSSEYGEYYLKKYTEVTKHQHKRSLALTSRKLVRLVFGLLAKNQLYTGETLDAELNIDQN

SEQ ID NO: 259336 - protein, 427 aa, unidentified
MYRIAGIDVHKKKLAVVVSDVEVHGEYQFERGWFGANPEQLRCLSQWLVEHQVEEVVMESTALYWKPVWGALERYWQPICQKGEGAGATSGILHLAQAQSNRGPRGRKKDFRDAERLVKRLVADELKLSFVPDGEQRLWRTLTRRRYQLTRARVQLQNQLEALLEEAHLKLSSLVSDLLGVSARRMLQAIADGETNPEALAGLADRRLRATPAQLSDALGACTELHAVYRRLIKMMLGELKVIEEHTAELNQELATLLRPHQDAVERLAEVPGLGVDSAQQILAEVGANAVVFASDKNLCSWVGICPGDEESAGESSSHRCPQGNRQMRRLLNQAANAAVKTKGSIFEIVYRRLVPRLGHNQTIGAVAHRLCRLIWLLLRKGVRYEERGPAVSQRSRQNRTSKMIRELRTLGYRVEFLNAVPSNPMP

SEQ ID NO: 259337 - protein, 343 aa, unidentified
MDEYDGRQFVGIDLHRRHSVIVRQTDTGERLSAVRIVNDPVALGLQLEEAGPDPEVVLEATYGWYWAVDVLQAAGATVHLAHPLGVKGFRYRRVKNDVRDAADLADLLRMGRLPEAWIAPPETRELRELVRYRAKLVAIRSGLKAQVHAVLAKAGVLIAVADLFGVTGRQRLAKVALGPAYAQRIRSLLELIDILDGHVARFAAMIAERLDTHRGYHAIQHVPGIGPVLAAVFVAEIGDVHRFTDPAHLCSWAGLTPTHRESDTVVRRGHITKQGSKLVRWAAVEAIQRQPDTTKIALDRQRIEARRGRNIAKIAAARKLLTLVYYGLRDGHIRAVAHRQVAA

SEQ ID NO: 259338 - protein, 429 aa, unidentified
MNVYETVNCVGIDVSKGKSTIAIMRPLGEIVQSPREVKHTLSDLKALETTLRQLEGETRIVMEYTGKYYQPIARFLNNAGFFVCAVHAKLIHDFANNSIRQIKTDKADAVKIANYGLTNWNLLRRYSNEDETRLLLKTYNRQYNMFMKQYVASRNNFISLLDQTFPGINDLFSGHRRPDGHEKWVDVAARFWHAECVSGQSLNAFTKVYKDWCDRNGYRGRDDKAEAIYLLAKESIPSLPKNDYTKAVIQQAARELRNTCLTLVELQQKMNFIASTLPEYPVVLDMGGVGTTLGPQIMAEIGDVRRFPRREKLVAFAGVDVPPYQSGQFEAKDRHITKRGSSDLRKNLYQVIGCLMQHSMEKDPVYRFVAHKKAEGKHFYSYMVAGCNKFLRIYYARVKAYLNLLEQQEPDSLGDGSGGSEVVLQPLDC

SEQ ID NO: 259339 - protein, 387 aa, unidentified
MRPISQTTTQKLSHCRRDDATLYASLELSQATWLVTSLSPGSERMSKYSTLGGNGAALLGLLRRLQVRAEQITGGPVEIVVIQEAGLDGFWVHRLLNANGIESHVVDPASIAVPRRRRRAKTDSIDGETLLRTLLAWRRGEPRVCAMVVPPTPEQEDRRRTSRERAVLMQERVRHVNRIKGLLAGQGITDYEPLHKDRRAHLAALKTGDGQPLPLRLKAELLREIELIELLIRQIAEVEVERDTVELDAEGKQSPVALLARLKAIGPQIAAVLYLEGLYRSFANRREVAAYAGLVPTPWRSGTIDREQGISKAGNRRLRHIMIELAWLWVRHQPDSALSRWFRARVGTERGRIRRIAIVALARKLLIALWRYVTHGEVPEGAVLKAA

SEQ ID NO: 259340 - protein, 409 aa, unidentified
MRIIGLDIHRAFAEAVAWEDGKLNRLGRVDMRRDLLSAFAARLSPEDVVVVEATGNAASVAAVIAPHVKKVVIANPMQVRIIAHAKIKTDTIDARVLAQLYASGFLPEVWIPDEPTQALRRQVTRRNQIVRQRSRLKNIIQSILHAHLIPSCPHQDLCGPRGRDWLAVQVVPEDERLAIERHLREFDRLGEDLKVIERDLARSALADDGVKRLMTIPGVDMVVALAMAAAIGEATRFDKPQKLVSYLGLNPSVRQSGPGPAYHGRITKRGRGHARGMLVEAAWAAARAPGPLRAFFLRVRARRGQHVAAVATARKLTIIIWHLLIKGESYTWARPSLHAKKLRDLELKAGHKAARGQKGEAHAYNVKSHRDEERRWVEQAETAYTRFVAGWNRRGPKKVRAGAAKEERL

SEQ ID NO: 259341 - protein, 343 aa, unidentified
MQTITTIGLDIAKSVFQVHGVDAAGEVVIRRPLKRRSVLAFFQKLPPCLVGIEACASSHHWSRELQALGHTVRLMPPAHVKPYVKRQKNDAADAEAICEAVTRANMRFVPTKTLEQQSCLMLHRTRHLLIRQQSAVINSIRAHLAEFGIVAPVGRKGVTELLHVVADPSDKRVPEVGRTCLAALGDQLLGLKRQILEFDRMIMAWHRSNQTSKRLHYIPGVGPMLATALVASVADPGAFRSGRNFSAWIGLVPKQHSSGGKDRLGSISKQGDRYLRSLFVARALAVIRYAKIHGTRHRPWLTALLGRRPTKVAAIALANKIARMARAMMAKGERYKQPAALAA

SEQ ID NO: 259342 - protein, 325 aa, unidentified
MFVILDENDKVVFKKRLPNKLPTVLDALNPFRKKLAIVAVESTFNWYWLVDGLMDAGYPVCLANPAAIDQYDGIKQANDLTDATFIAHLARLGILPTGYIYPKDDRPVRDLLRRRILLVKYQTSTKLSLQNMFMRQTGQSFGYADICKLSDNELRLLLSDNDNLLFVTSQQLDLTRQLKKKIKQFEKMIQAKAELKPEYELLLTMPGVGVILALMIMYETGDIRRFAKVGNYTSYCRCVRAHCTSNGKVKGRNNSKNGNKYLSWAFVEAVHHAKGCCPRAKKFYDRKFSKRNGALATKALAAKWSKAAYHIMKNQEAFDLTKMFG

SEQ ID NO: 259343 - protein, 355 aa, unidentified
MIMIGADSHKRSHTVVALNEVGRRLGQKTVSTDIDGHLALLQWSGQFDDVQFALEDCRHLTRRLEGDLLAAGQRVVRVPTRLMADARRAGRDRGKSDPIDAEAVALAALRHPDLPVASLDGASREVKLLSDFRRDLVRQRTQVCNKIRWYLHELDPSLHIPSRGLRRRCVVDRIARELDRFDGVVARLARELVARCADLNRQITGLESELRILVRQLAPSLLAVPGCGVLSAAVLVGETAGVDRFKSKDHFARFTGTAPIPVWSGASQGKVRLNRGGNRLTNTALHMIAVTQSRTDGAGRAYLEKAQARGKTRTEAIRLLRRRISDAVFAALRADAELIKLAVPSTRHHTMPAAA

SEQ ID NO: 259344 - protein, 362 aa, unidentified
MHEISLNLICRVGVDLAKRVYQIHAVDGFDKIVLARAMSPERFFEWCKSLQPGCVVAMESCSGAHHICRQLRPSGLDARILPAQHVGAYRVVGTRSKNDATDAAAICEAASRPHLHPIPVKTAAQQGILSIHKLREGYKEERTAVINRIRGLLAEFGLVFAQSPESLQATLPGVLEDASNELPGDLRLALDRNLKHWSRLDEEMAWCEQRITQHARTDERAKKAAQLLGIGPITASAVVATVNDFTQFKSAKQFGGWTGLAPSQNSSGGKTRLGGITKRGDVYLRTLLIQGAKSAVMTAHKRSDPISLWLVQLKERVGWQKAVVALANKNARILWCVMTRGDRFDPHHQPKRSEATTNLATA

SEQ ID NO: 259345 - protein, 432 aa, unidentified
MNPFSVSPEPSPVAAWVGLDWADQQHVICLYEVATGQSTVSRLEQKPEALQDWLSQLRQRFGGSPVAIVLEQARGAVIYALLSADFVRLYPVNPQSLASYRKAYAPSGAKSDPADAVLLMEMVRNSPERFRAWKPDDADTRSLQLLTQNRRQLVDQKTALTHQLTSLLKTYYPQALELPGVLDSLQACDFLTQWPTLEALQHARPGQIRQLYREHGHPSPEQLDRRLEQIREARPLTTDPAALLSGSMMVQALVQQLRPLLGAIERFDRQIAVLFRKHPDRPLFDSLLGAGAVLAPRLVAAFGTDRDRFQSAQQAQQLFGIAPVTEQSGRQRWVHWRWACPKFLRQTFHEFAGHSRHWCGWAKALYHRLRRCGKGHHAALRVLAFKWIRILFHCWKTRTGYDEQIYLKSLQKRNPTLWAEIQLLPPRKKKVA

SEQ ID NO: 259346 - protein, 375 aa, unidentified
MKEKVRFLGLDVHAETIAVAVAEPDGSVRSLGTIANRAESIRKLVKKLGSVERLKACYEAGPTGYVLYWQLAELGIHCDVIAPTLAPVKAGDRVKTDRRDAERLARSFRSGDLTAVWVPDEGSEALRDLVRAREAAKQDQLRARHRLSKFLLRSGQRPAAGLKAWTQHYMAWVRQLHFAQVAQESTRLDYLQEVEHMAERVKRLEQAIAEAVKLASPELQEVVKDLQALRGIAQISAVTIAAELGNITRFEGARQLMGYSGAVPSEDSSGKRTQRGSITKTGNAHLRRIAVEAAWSYRLRPGVGPALRKRQEGVADEIKEIAWKAQHRLHRRYSRLAAAGKDQRKIITAVGRELLGFIWAIGVKAETAAKQRMAA

SEQ ID NO: 259347 - protein, 339 aa, unidentified
MQVTTIGLDLAKNVFQVHGISDNGDVVFNRALRRAQVLSFFEKLEPCLVGIEACGTSHHWAREISKLGHTIKLIPPVYVKPYVKRGKSDAADAEAICEAVTRPTMRFVEVKTPEQQAILAVHRTRDLIVRQRTQTINMLRAQLAEFGIVRPQGIYHALQFAKDCLNGEQSDLPEVAGDVVFELCDQLLFLHSKILRCSRQMNQIAKLEKRVALLRTIPGVGPITASAIVATVGSGKQFNNGREFAAWLGLTPLNKSSGGKERLGHITKMGDQYIRRLLVLGMTSRIRSIRTKPEKFDPWFADILSRKPGRLAAVAMANKTARIIWAVLTRNEPYKVRTV

SEQ ID NO: 259348 - protein, 341 aa, unidentified
MQITTIGLDIAKNVFQVHGIDVAETVVVRKQLRRSQVMAFFASQPPCLIGMEACASAHYWARELTKLGHEVRLMPAKDVKAYVKRNKNDAADAEAICEAVRRPTMRFVRVKSGEQQGLLMQHRTRDLLMRQRTQVINALRAHLAELGITAAQGREGLKELLAIITDERDDRLPIDARASVMILAAQLQALQTLIGSIEKRIVAQHRGSEPSKRLKTIPGIGFIGATAITAVVTDPKAFRSGRDFAAWIGLVPRQDSTGGKQKLGPISKQGDRYLRRILVVGAHSVLRRAKHNPEKYPWLTRLLARRPFKVVAVALANKMARIAWALLAKGGVYRTRQIAAA

SEQ ID NO: 259349 - protein, 402 aa, unidentified
MNAVGIDVSKGKSMVAIMRPFGEIVSAPFEIKHTASDIHSLVELINSVEGESRIVMEHTGRYYEVLAHQLSKANLFVSAINPKLIKDFDNDSLRKVKSDKADSVKIARYALDKWQNLKQYNVMDELRNQLKTMNRQFGFYMKHKTAMKNNLIGILDQTYPGVNTYFDSPARSDGSQKWVDFASTYWHVDCVRKMSLNAFIDHYQNWCKRKKYNFSQSKAEEIYGKAKELVPVLPKDDITKLIIKQAVNQLNSASTTVESLRTLMNETASKLPEYPIVMAMKGVGASLGPQLMAEIGDVSRFTHKGAITAFAGVDPGVNESGSYEQKSVPTSKRGSSDLRKTLFQVMDVLIKTHPQDDPVYQFLDKKRAQKKPYYVYMTAGANKFLRIYYGRVKEYLASLPES

SEQ ID NO: 259350 - protein, 316 aa, unidentified
MTSTRFVGVDISKATFDVAFSADLRAVYSNDPAGFTQFRQALADDDHVVMEATGTYFLKLATFLSAQDITVSVINPAVISYFARMRLVRTKTDRVDADIIREYGCLEALPAWTPTEDVFIELNQLDSHLNGLQGDRNRVIGRLEALQQCAKINAYTLEDLQQQLTDLEVRIKQTEKELVVLTAAHFPELLTLLTSIKGIGKKTAIMFIVLTRGFTRFSSPKHFASFLGLSSFIRQSGTSVRGSGGISKMGNPRMRQLLYMAALTARTRNLACKTFAERLAGNGKPPKVVRIAVANKLIRQAFAVCLKGESYSECYA

SEQ ID NO: 259351 - protein, 466 aa, unidentified
MSRLSNRQDSSEIIVRPFDGLARIHPNAAGMDIGAHEIMVCVPGPDSTQAIRAFGTYTVDLYAIADWLQQSGIRTVAMESTGVYWIPLFETLEARGLQCCLISATAIKRFPGRKSDVLDCQWIQTLHSYGLLADSFRTEADLVALRTLLRHREKLISHRSPHVLHMQKSLLQMNIQLSQVLSDVTGVTGQAIIRAIVTGERDPQKLAAMRNYRCQKDEQEIAKALTGTWRAEHLFVLQQSLGFFDFYTQQIEACDAEIERTYAAIRPHWGDPDNQAPLPPKKAKSHSRNAPKGVQVRFHLRRIAGVDIIAVHGISVSLAQTIIAEIGTDMSKFPTEKNFCSWLGLAPHNEITGGKVIRSYTLKNHNRAGQAFRQAAASVIRSNCAFGAFYRRLKSRLGPAQAVVATAHKIARTVYHMLKFQLEYQTISATEYEQHFREREIKYLQRKAAQFGFALSPSTVSAYAVS

SEQ ID NO: 259352 - protein, 358 aa, unidentified
MTTVSKKQAWFKQVHLTKDDDLYVGIDAHKKSLHVALWLNNAAAIDFVSPPDNEKLIETLNKLRPALRMVVYEAGPTGYSLARAIQNAELPVSVVAPSKTPRQAAPDCKTDSLDARKLAEYAAKGLLRHVAIPTIKQEALRQLTRLREQLVAKQTRIKLQIKGFLLQHGIDQPLNRSRWSKAAVDYLKNIRLSEPLRYCLDTLIGELLFLAEQIKSADLKIKETFSEKTLATTCKLLATHPGVGPVIATQFAAEIFNPKRFTDKTQLAKYVGLAPSVRQSGQMLRDGPILKTGRPQLRSMLIQGAWLWILKDHDAYKTFCRLSRNSGQKNKAITAMARKLAIHLWKMACDNKPYNCAV

SEQ ID NO: 259353 - protein, 408 aa, unidentified
MNTLYVGIDVSSKSNVVYLMLPNGDKHSNFSVANSHEGSTLLVKKIYSALTSHSLDTVLIGLEATSVYGDNLVYFLREDATLAPFNRKIHVLNPKQVKKFHDTYNDLPKNDYVDSFVIADCLRFGRINKEVYMGEYRYKALQNLTRARFFAVQNLVKEKQRFMNVLFKKYSTMTQEKVFSDDFSTTALAVYDEFESAEALANMDLHELTDFIIEKGKNRFPDPDAVAKAIQKAARSSYRLPKTVNDSVNQVLSISITSMKALESQIKEFDKAIKALMELLPNVLISIPGIGPVYSAGIMAEIGDINRFDNQASLAKYAGLAWKQHQSGGFEAEVTRLIPSGNRFLKYYLCEAAFSLVRCDKKYSDFYHLKYKEVNRYPHKHTLALTARKFVRLIFQLLKDNRLYCPAK

SEQ ID NO: 259354 - protein, 333 aa, unidentified
MGFEPEPSKEGSWMMAQNDLIVAGIDVAKDKVDVCIRPLSLRRTFASTTEGRRELASWLRRKKVGKAVMEASGGYEREWAKALRDAKIEVRIVDPKRVRDFARSAGRLAKNDTIDAEMIAWFAETFDEAPGQAHDAVREELAQIVNARLGLIDLQTRLLNRDEHAGPEPVQKMHARMLKKIAVEIAKLETVIAAMIKATPRFVELAEIIESVPGLAETTSATLIAKMPELGQVNNKIGAALLGAAPYDDDSGCRRGERHIKGGRRKVRNLFYMACLGAATQHNPVLKAFYDRLIAKGKEKKVALVACMRKLIVILNIMIARRQKWDPNLHVLG

SEQ ID NO: 259355 - protein, 427 aa, unidentified
MAKHKYRAVALQSVDVAALVEVLGTRVVVALDIGKEEVFAAMMDETERVHVTVKWRQPAEGPAFVSFVRRLGASRRVEVVMEPSSTYGDPVRAALEAADVPIHRVNPKRSHDASEVYDGVPSWHDAKSAAVVGKLHLDGASEPWPIRGDDERALAAALRVLWIHQKEFGRNRDRLEGLMARHWPELCAVLDFGSATCLELLCAFGGPGEVTAREAEARELMRRVGGRYLLQEKIDLTIASAARTFGMGQVEEERQLVRVVAAEARRSATEARRARRRVEALTDRNESAVRMRSTVGRTTAAVLVASVGDPLNYHSPGAYLKSLGLNLKEKSSGKEKGALHITKRGPSVARMFLYMAALRMIARDPVTRAWFAQKVRRSGGKEKSKGVVAIMRKITKAMWHVVRGSPFDSTRLFDVRRLGDPHLAVAK

SEQ ID NO: 259356 - protein, 465 aa, unidentified
MKRRRRSARVVPGAAPSLLERINPNAAGIDCGAETHYVAVPPDRDASPVRAFPSFTHDLQRLADWLGACGVTTVAMESTGVYWIPLYEILEARGLEVILVNARHVKNVPGRKTDVLDCQWLQELHSVGLLRGSFRPSAAIAALRAYLRHRETLVQSAATHVQRMQKALVEMNLQLSVVLSDISGVTGLGIIRAIVAGQTDPHVLAQQRDYRCQASEADIIAALTGHYRPEHVFVLQQNLELFDAYQRQLAACDAAIEAHVQTLAGQAEPPAAPLPDPRTRRRPRDNEPRFDIRTPLHQVTGVDLTQIDAIGPYNALRLLAEIGTDMSRWPTEKHFTAWLTLAPRNKISGGRLLGSKTQPSANRAAGILRMAAMSLARTETALGAFYRRLAYRVGKAKAITATARKLAILVYRTLKDGLLYQDPGAAAYDAQHRTRVLRRLTQRAAHLGLSLIDTKTGEVFRGAVS

SEQ ID NO: 259357 - protein, 350 aa, unidentified
MKKHSYIQMGLGMDIAKSDFSACIMVFEGKKKYKVLASSKFSNTPSGFEKYWSWSQKHLGKHDCEDIEYLMEATGVYHENLAWFLYDKSVKVVVALPSQAKDFMKGEGIRSKTDKIDAQGLAKMVLVKDLRAWQPISSSMQALRSLTRHHETIQKDLTQSRNRLHALDYSHNPDKFVAKQLKAQIKFLEKQRDQTHDQIEATVKEDEKLHEKIKHLTSIHGVGLLTAAVVVAETNGFELFTSEKQLTSYAGYDIVENESGTRKGKTKISKQGNAHIRRILCMPAFNAINVEGVFLNLYNRVFERTKEKMKGYTAVQRKLLCMMYTLWKKDEDFDYSINNKTVEEQNALLH

SEQ ID NO: 259358 - protein, 411 aa, unidentified
MKTYLLRHANPVEPQRRSAPRTTTSAILGRPASAKNGPVLFVGLDVHTDSIAVSLAPSDTTEVRRYGLIGGTHDEVLRLAKKLRAAHPDTELRFCYEAGPHGYPLGRCLRSHGYECILVAPSKIPRAAGERVKTNRRDADQLARLDRAGELTAIYVPDPQDEAVRDFLRARYQVQRQQHRARQQLKMFLLRHNFHYAGTKAWSAAHLRYLATVKLPYPEQQFLFQEMVQVITEAGERLERYDAQLPRVVAGWRWAPVVRALMSLRGVALWTAATLLAELGDLHRFATARQLMGYLGLVPSEDSTGDQRRQGGITKMGNGLARRALIEAAWNYRTPARISRELLKRQEGLSKQIKDLSWAAQTRLHHRYQHLTGVRHKKSPVAAAALGRELSGFVWALGQIVAPHAPKPVAA

SEQ ID NO: 259359 - protein, 400 aa, unidentified
MLSIGIDVSKGKSTVCGMKPGGEIVYTPFEVQHTREGMSELVSLLRSSGEEVRAVLESTGSYHCPVVAALLENGIFVSVVNSLRMKRFCSQSIRKVKTDRIDAMQIALYGLAYWQELQPTKLPEDTYRELQLLARQYYQMTSLLIKAKVDFNAICDQVLPGMQELMNDHAGRHKLSDFVLRYHHTTHILEMGETRFRKDYCKWAEKKGYRNCERMAALIFATAQNGIPVLPNAPSTQIVITEAIRVLHTVEASRDTILAQMQALAKTLPEYSLVREMPCIGDTLAPRLIAEIGDVRRFHSKRALIAYAGIDAPPYQSGKFCANNRHISKRGNRYLRKTGYEVMQSYVMHKPANDPIFTFIEKKRGEGKSGKLAMVAGLNKFLRVYYGKVTELYRSLPAIE

SEQ ID NO: 259360 - protein, 385 aa, unidentified
MANQNDLSRSLVAFEQDNTIIAVIEMSLNSWLVAGIVPGIERHPLKKLSCDEQMLLQLLYRWRDEAAKAGRVIARMVVAFEAGRDGFWLARWLRARGIEAYVIHPTSVAVSREHRRAKTDRLDTELLKRAFLGWLRGEPDHCSMAAIPSLQEEDAKRPTRERENLVGERTRIVNRMKACLVRFGIRNFNPTLRRATERLNALCTPEGVSLPPNTLAELRRDMARLRFVMEQINEIEAARLQRLEQTPAEGPHAMVRLLARVTGVGLETADMLVHEILSRKLRDRRAVARYAGLTGAPDESGSKRREKGLAKAGNARVRRGMIQLAWRFLLFQKNSALSQWYRTRTESAGKKRKTMIVALARKLLIALWRLVTTGEVPAGVVLRAA

SEQ ID NO: 259361 - protein, 339 aa, unidentified
MNTIKTLGIDLAKNTFSLVGMDEHGKVVFRRTLSRKKLLPFIVQLHPCLIAMEACSGAHYWAREFKSIGHQVAIIAAKFIEPFRKGGKNDNNDAEAICEAATRPNIWHVPVKTAEQQAIMTLHRVRQGLIKERTSMINQIRGLTAEFGITIPKGRYSLQDKIQDILEDADNNLPPLARQMIDNLWQRIKQANEQILSYDRALAEQVREDTVAQRLMTIPGVGEQIATAMSANVPDPRLFKSSRQFCAWLGLVPRQYTTGGKIRLGRITKRGDKYIRMCLIHGARAVMANLKDKQDKVSRWVRELVERRGYLRAAVALAARNARLIWTLMIKQEDYKVVA

SEQ ID NO: 259362 - protein, 356 aa, unidentified
MTNAIPMDVIIGVDTHKDVHAAAAISGAGVHLATITVPASGKGYGALEAWAKSMGAIQAFGIEGTGSYGAGLSRFLRERGHTVVEVNRPNRQLRYQQGKSDAVDAESAARAVLAGQAAGQPKSGTGTVEMIRHLKIARDTAVKARTQAMQTLKAIIVCSPDALHEQLDQVRGKMTLLRRLVALRPGPLTSTLASAKASLRAIARRWLLLDAEIKQHDTHLQTLTAARAPELLEAHGMASGTAAEMLLLVGDNPERIHSEAAFAKLCGACPIPASSGKTVRHRLNRGGNRQANAALYRVVITRMRGHHPTLDYVRRRTAEGKSKLEIIRCLKRYVAREIFGYLCPRPAVADAAAISS

SEQ ID NO: 259363 - protein, 369 aa, unidentified
MGDYSEAFVAFDVAKMKHAVAVAESGREGEVRFLGEIENRPTSIERTIKKLARRYCRLHVCFEAGPTGYGLCRQVRELGHDCMVVAPALIPRRSGERVKTNRRDAVTLARLHRAGELTGIWVPDLVHEAVRDLVRAREAAADDLRRKRQQLLSFLLRHGRIYEGGGHWTLAHRRWLARQAFEHAAQQIVFQEKIDAIEDTARRLARLEEQLAAIVPTWSMAPVVAAYQAMRGASFLVAVIFAAEIGDVRRFDTPSQLMAFLGLVPAERSTGDTVRRSGLTLAGNRRARRALIEAAWTYRYPARVSETLRARREGLSSAVRDIAWKAQLRLCARYRRLSAAGKKPPVVVAAIAREIAAFLWAIGREVAPS

SEQ ID NO: 259364 - protein, 384 aa, unidentified
MIESSDYESVQVFIGVDVGKDTHHAVAINRSGKRLFDKALPNDENKLRSLISDLKQHGQILLVVDQPATIGALPVAVARSESVLVGYLPGLAMRRIADLHAEAARTLPHALRTLKLADEQIAELSMLCGFDDDLAAQTTQASNRIRGLLTQIHPALERVIGPRLDHPAVLDLLQRYPSPEKLASLGEKKLATQLSKLAPRLGKRLAADITRALSEQTVVVPGTNAAVVVLPRLALQLITLRKQRDEVALEVEQRVLAHPLYPVLTSMPGVGVRTAARLLTEVACRAFASAAHLAAYAGLAPVTRRSGSSIRGEHPSRRGNKTLKRALFLSAFAALRDPISRAYYTRKMSQGKRHNQALIALARRRCDVLFAMMRDGTFYTPAAS

SEQ ID NO: 259365 - protein, 373 aa, unidentified
MPKYSTAFGMDVHLRSTTVCALDADTGEAVTRRFPGNPWGEIAGWMDGFPGPSLAAYESGYLGFAPQRELAGLGVECVVAAVSKIPRSAADSASKNDRNDAARMAKAILAHDISPVWVPSPEVEGIRDLAGAYDGATARLATAKQRLLAFLAKRGFAYGGATPAGNPRKYWTYDFLRWLDKVRPEDDGGVRTLAALRNEVEAAAEARADLLSEYRAAVDASPIAAEVAALQSIKGCAFALAAAFSAEVGDFTRFRSGRQVTAYFGLAPSQRSSGDSVRLGGISGAGNALVRKLAVEGSWCYAAARHQPKLMPRDTGVPLEIRMHGRKGSERLLRRREEMLARGMPAAKANAATAAELVRWLWALGMMCREATE

SEQ ID NO: 259366 - protein, 487 aa, unidentified
MNSIFRHRNADVERLFNAAGRPDKVMCVALDYAKRDHTVAVCDGSGRRLRSAFNVRNNREGLDFLIGVVEGLCRKHKIERGHVFFGGEDCGRYAFNFIYALASKGFLVVGINAGDAKHERDCSSASTDAIDAVGVAGMMIKKAGRTIGATFNDAYVIRRLRHQRDALVRAQSASAHRLHSLVDELFPGFLDTKLSGLTPFGRASLWLMEERFSAAEVHARKRPALVKALRDFAVVDPDGAADKLRALADAGLPAPERMIPVYQRCLRDELALYRGLGESVHAMDADIAKALARTPGAMLATIPGIGTRWAAALYSELADPLRRRRVDSMSALAGIVPRVKQTGGKDGPTVVGRRTKQCNPFLKSALVSAAVSVSQYGHAEMRESFRADEAQGRDARMRMARRLLRLCLCLADNGAFFLPPSLHKGGATDAVREYYAQVWPKVLIKWRDSGAILEAVAEGSPLKTWHDMAEELYGLELSVKSPQYVRK

SEQ ID NO: 259367 - protein, 381 aa, unidentified
MKTVHTKRTGQAGRPSVGADRCVARVVPSLLPKSSNSCQGYPSPHLSQGRASLEQIKSIKEDCLLEAPLIFVGIDVSKAQLDVAIRPSAQSLSVTNDRAGIKSLIKHLKKLRPQLVVLEATGGLERQVLSALIAGEIPVVMANPRHIRDFAKSIGQLAKTDRIDASVIAHYAEAVRPKPRPLPDEASLELRALSARRRQVLDMIVAEKNRLATASKVVKKRITAHIAYLEQELNDADQDLDRFIEKNAAWKENQQILCSTPSIGPVSSRTLLVELPELGALDRKKISALVGVAPFPRDSATLKGRRTIWGGRASVRSALFMATVVATRFNPVIRDFYKRLKAKGKPSKVCLVACMHKLLTILNAMIKNKIRWSENFTRQTT

SEQ ID NO: 259368 - protein, 389 aa, unidentified
MVYLAAAIHVSVLFEWQVSEEHEVLQKAELSCEADSENYLGGSSETMYYIGLDVHKRTISCCVKDAAGRVQMEGKIGSSRRELDVWIKTLPQPRTIAMEATIFTGWIYDHLVPHAEKVKVAHPLMLRAVAAAKRKNDKIDASKIADCLRCDFLPECYMTAAEIRDRRRTLRYRGLLVKQMVQMKNRVSGLLLEKGVTHTKKRLHKVGYFAELMAGNEEIDQSIRPLLKLSREHIVRAQRLDYALVSSLERDPLLQERLKRLRTVPGVGPITALTWALEIGDVSRFRSIKQAISYCGLCGAERSSADKVTRMPISKQRNKHIQHVLVEAAKLAPRQNHELALIYEKEMQKGNRNRATLAVARRIVAYLLAVERKQQDFVPSEKFGGTRAA

SEQ ID NO: 259369 - protein, 343 aa, unidentified
MHTTEASELYCGADLHGNNVVLSLCDASGKRVFKRRVKANLNAVNEALDSYWPRIRTVAVESTYNWYWFVDGLRAQGRDVRLANPAKMEQYEGLKNTDDRSDAAWLAEQTRLGILPESYVYPKDTRSVRDALRRRQLFVRQRTKILLSLDSLFSRYGFESPCSEQLKKWGYPDIESLDLDDFSRLQVTTLLESVRNSDALAKQIEAEVLARVKPTVQYQRLQQLPGIGQTLSMVIALESGEFSRFASAGQYASYCRAVKSIRSSNGKKKGRNNGKNGNPYLAWAFIEAATFAVRYYPRIKSWYERKKQRRNVAVAKKALACKLAKATWHVMNGKDFDETMLFG

SEQ ID NO: 259370 - protein, 311 aa, unidentified
MNNTIGIDVSKDKLDVFDLVGLEHHQVANSGFGLRSLQRLIAKLGASLVIFEASGVYHRELETSLAKNAVPYTKVNPRQARRFAEATGKIAKTDKVDAEMLARMGAILQLEPQEPKVEYLNDLREMMVARRGLVKDRVAVKTRSQTTTQTLLKRHLKERLSQIERHLDQLDCRIRDLVAQDEQILARFKILTSIPGISSITAFSMLIEMPELGSMTGKQAACLAGLAPISKQSGRWQGKERIQGGRAFFRRAMYMPALCTIRHQLSSKVKYDQLIKAGKPPKVALTAIMRKLVVVANALLRDGRMWSENRA

SEQ ID NO: 259371 - protein, 342 aa, unidentified
MEISTIGLDLAKSVFQIHGVSDAGDVVVRKALRRSQVLPFFAKLPPCLVGMEACGTSHHWAREILKLGHEVRLMPPAYVKPYVKRGKTDANDAEAICEAVTRPTMRFVPVKSPEQQAALALHRTRDLLVKQRTQLVNMIRGLLAEFGIEMARGLHHALALAKRLTEGHAADVPALAQRVVASLARQIGILQEELATLEKELLTWHRSSELSQRLATIPGVGVISATALAASVSEPERFRSGRQFAASLGLTPLQQSSGGKEKMGRITKMGDRYLRRLLVVGMTSLVRRARTAPESVDPRILAMLERRPARVVTVAAANRTARIAWAIMTRGGSYRRPAAAIA

SEQ ID NO: 259372 - protein, 347 aa, unidentified
MTIVEAAPGVTGGVDTHLDKHVAAALDPLGRLVGTESFGADAAGYKALLSWLEAFGEVTKVGVEGTGSYGVGLARFLRRKNIEVVEVNRPNRQARRNHGKSDPLDAVEAARAALSGRASGAGKSKDGPVEAIRALVVAKRSARQARIKAIVQMRHLGISAPEQLHCRLKGLSVTALVAECTRLRPARSSDPVTAATKAALSSLAHRVQALDDEIAELDEKIESLVAATAPELLALFGVGPDTAAAILVAAGDNPQRLHSEAAWAHLCGVSPVPADSGKSSGHHRRHNGGDRQANSALWRIVMVRIAHDPETRLYFERRVKEGRTKRDVIRILKRYVAREVYRYLPRG

SEQ ID NO: 259373 - protein, 340 aa, unidentified
MQVVRIGLDVAKNVFQVHGVDADGAVVLRRRLRRDDLLDFFATLPRCVVGLEACSASHHWARELVRLGHEARIMPARYVKPYVQRGKSDALDAAAICEAVSRPTMRFAAIKTVEQQSALALHRSREILVKQETMFVNLIRGCLGEFGIVAPLGVRRVEELVAIVRDEADDRLPPEARLAMTTVAGQLDDLQRRIRDLERAMLRWHRQNEASRRLASIPGVGPITASAVVATVGSVESFKSARHFAAFLGLTPKEHSTGGRQRLGRISKQGDVYIRRLLILGGTSLVRYARGPGATSWAAGLLQRRPTRVVTVALANKAARIIWALLARGGVYRAPPAVAV

SEQ ID NO: 259374 - protein, 338 aa, unidentified
MTPFKYFVGVDIASATFTACIGTMPGAIVVKPETFDNHEDGFVSFLGWLQERSLPPEQTVVCMEATGVYGEGLAYFLYASGYTVAVEPPLNIQRKFPANSSKNDSQDSQNITEYACRYADKLSLWKPRDEILEQVKVLLTTRQQFSGQLTAHKNALHAMNRKKVSSELAKKVHADMIEQISKHIKAIDSEIRRLIDSNPTFKATLLLLLSIPGIGLQLAAHLIIMSQYSLDPRVLSAFVGICPYEHESGSSVYRNPTSRHYGPPAIRKLLYLAACSVSTHRKEFKHYFARKKAEGKPGKLVLNNIQNKLLKIACAVIRTQKPFIPNYVSVNPLALKNA

SEQ ID NO: 259375 - protein, 398 aa, unidentified
MKLLSCISLDVSKDSSHIQAFDFKLNKLTKVEIIEHNLLGFRQITNLYKSLEKPIIVFEATGVYHRGLQKFLIESSIPYVMINPLVSAKIRKQSLRSIKTDKKDCRTIAKAYFNADAKDTIVEQVVDSHYHQMRQLNRYYQDTLVHLVKAKVSYNAKLDVVFPGYKNLFTSLYSDAATAVVMKYKHPDVIKSKKKQTIINDLTKSSGHSKAFSEKHVDKIISYVENCCSGCSKTDIDCDILVNLLKTVKLFELECSQILTQLIELAKETDYYEFVCSIPGIGENLASRIIAEIGDIKRFKGAAQLIAYAGTDPHIYQSGIREGHHLSISKKGNKNLRTLLYLGTSCHLRLKTKQNTVITEFYAKKKQQGKPHRVAQVASLNKLLKVIYSVSINKTIFQ

SEQ ID NO: 259376 - protein, 459 aa, unidentified
MKRGKRKEKSLPPQLAAVNLPAAGIDIGAPEHWVAVPPDSDTEPVRRFGACTADLEALADWLRQCGVTTVAMESTGVYWIPLFELLEARGFTVVLVDAREVQRAPGRPKSDVQDCQWRQRLHTYGLLAAAFRPPEQICVLRSYLRQRAMLVTYAGQHIQPMQKALTQMNRKLQHVVSDITSVTGRAILKALLSGERDPATLAQLRARNCQHSEAEIARALQGTWRAEHLFALQQAVELYECSHGQSAACDRQIEAHLQTFADHSGEKTLPPAPRTPKRRRNEPHFDARLPLCRVTGVDLTAIEGINEPTALVLLSEIGTDLSRWPTEKHFAAWLGLWPQHKISGVTVLASKVRPVANRAATALRLAASCLHHSHSALGAFFRRLKARLGTPKAVVATAHKLARLVYRLLKHGEAYVAQGMAEYEEAYRERVVQNLVRKAKALGYQLLPTPHTTGSVTSA

SEQ ID NO: 259377 - protein, 338 aa, unidentified
MNYVGIDHHRQYSHLTVMDQTGQVLRSGRVPNLQSEIERFLEGLEAMEAVIETGRSSYTMVDVLEEMGVAVKIAHPHEVKAIARAQIKTDKRDSEVLAHLLRMNMVPEVYRRSQENRQAQRVLRQRAFYVSAMTALKNRVHAFLAQQKEEVRQEVARETNIFSVKGQKMLLGLNLSREEKSLLEALLKTYRHLETRVEESTALVGRLYEEIREAQLIRTIPGFGKYLAVLVAVEIGDLARFADAAHLHAYAGVIPSTHSSGDRTHHGKIVRAGNRWLRWAAVEAVWPAIRADFDLRCFYERLARGKGANKAKVATARRLLTIIYKVWKEGRNFIAYRR

SEQ ID NO: 259378 - protein, 380 aa, unidentified
MLASSQSCPSARRRDRPPSEEKTITSMPDSIIVGVDTHKDVHVAVAIDILGRRLAQLEIPATAAGHEQLHRWATDLGPNQTFGVEGTGSYGASLSRHLRLAHVVVIEVNRPDRATRHRLGKSDPIDAEAAARAVLARTATATPKHGDDHVEMIRILKLTRDSAVKSQTQASNQLQAVLVTAPTELREALQSLPRISLLERCAAFRPGDLTTPLAAAKHALRLLARRALTLREEAKDLRVELDRLTTLTSPALVAMTGIGPDSAAALLISAGDNPQRLRSEAAFAALCGTNPIPASSGKTTRYRLNRGGNRQANAALHRAVVTRMHWHQPTKDYVARRTAEGKTKAEIMRCLKRYLARQVYRALLPSVTPQPSHNELQQAA

SEQ ID NO: 259379 - protein, 409 aa, unidentified
MRVIGLDVSRTVAEIAYLEGGTVQPGGRVELVSPALDRFARSLRRTDEVVLEATGNTAAIVVALRPHVAKVVVANPMQVRLIAEARVKTDKIDAAILAQLYASGFLPEVWMPDADTQALRRQVARRNQIVRQRTRLKNEVHAVLAAHLLPKCPAADLFGKKGRAWLAEQPLPIDERLGVEQRLRELDRLGEDLATIDRQVGESVLEDARIHQLLTITGVNTTVAIGLLAAIGDVARFRSPEKLVSYFGLNPCVYQSGLQPAKHGHISKRGRAHARAMLVEAAWAAAKAPGPLRAFFFRIRERRGMQIAAVATARKLAIIVWHVLARREDYAWNRPALTAAKRRALELQAGWPARRGQKGDAAAYSVKAIRERERALAEQAERVYARQVARWRAQPKSKSTGAAMPTRTE

SEQ ID NO: 259380 - protein, 355 aa, unidentified
MPSKADSAVARTIGIDTGKNTLHVIGLDEKGTIVLREKVSRTRIAARFVNGPPCLIGIEAGMASHHVARELVALGHEVKQVPPAYSRPFRQGHKNDFRDAHAVAEAVERPSTQCVPIKTDEQLDLQALHRVRSRLIGNRTAVINQIRGFLLEHGIPVRQGHHFLQQQLPQLLATRTDVLSPRMIRIIGDLMADWKYLDERSERVTDEIEARARVDEGCRQLITVPGVGPIISSAMVAAIGNGAAFGEGRNFAAWLGLVPKQMSTGDRTILGRITKRGNRYLRMLFIQGARAILMRPTSWTKHSFGSWLMAAVRRMHRNVLAVALANKLARIAWTVLAQGRSYEARVEPRVEPATA

SEQ ID NO: 259381 - protein, 337 aa, unidentified
MLHYGLDVHRKYTSICVMDDGGLILAEGKAITQELTSHPAFSLEGEKRVVLEAGGNWHYLYELLEPAVNEVLLAHPLRVRAIAAARVKTDAIDARTLAHLLRADLIPAAYIPPPAVRESRELFRFRYDLVKQRSALKNRVHALLAQEGLNSPFTDLFGRHGREWMAQLALADSKRTRLESFLRVLDGFTAEIQAADKTILERVKMDEKAKLLMTIPGVGFRTALVILAEVGEVSRFPDANHLVSYAGLAPRVRSSGGRTKLGNITKQGSSALRWALVEATHLAVRKPGYLQEMHRRLRRGKSAAVANTACARQLLVAIYFMLLRGDAFQPTATRTMS

SEQ ID NO: 259382 - protein, 388 aa, unidentified
MTQASCSLSPPITLDYENTLVLAIELSKTKWVLSAQVPGLLRVRAKQTIEPKAEALLAAIDGYRNRSRAAGRTVERVVAIYEASWSGFWLARWLGRHGVETHIVQPSSVPVDRRARRAKSDGIDAELLLRTLLAWLRGEPRVCSMVPIPDEADEDERRRTREREDLMADRVSLVNRIGAVLATLGVDDYNPLRRDRRARLESLRTALGDPLPPHARARIRRMLDRLDLVCAQIAELEQERDAVLEKEAPDKTEKMIQQLVALRGIGIQSATVLVREAFVREFANGKALGSYAGLTPTPFSSGAMEREQGIGKAGNRRLRTVMIELAWLWQRYQPGSAQVSWFRERVGGTGRRMRKVMVVAMARRLLIALWRFATQGVLPEGAIVAPAI

SEQ ID NO: 259383 - protein, 348 aa, unidentified
MIIGVDYHPSFQQIAFMDQQTGECGERELNHSDGEAERFYRELKQRGVGVRVGMEATGHARWFERLLAELGFELWIGDPAEIKAKRVRKKKTDREDARLMLKLLLENRFPRIWVPSPENRDLRQLLWHRHRLVQMRTRIMNQLQAVAMNEGYRWKKKLFSEKGRGLLEKLPLAPWASRRRKELLELLDQLDPKIAELTAAVEQEAKKRPEVLLLMSHPGVGPITGLVYVLVIGTPDRFPCGKQLGSYTGLIPCEDSSGGRQRLGHISKQGNKLLRNLLGEASQAAARCNPDWRRRYVHLMMRREKRIAKVAMARKLAVRLYWMWRNNWQYSQLVEYGRTRESSGSSMA

SEQ ID NO: 259384 - protein, 344 aa, unidentified
MTSIDYIGLDIHKKTISFCAKAQDGTILDQGTIVARRDTLLAWAKARPRPWIGAMEATLFTGWIYDLLKPLAQELKVAHPAMLKAITAAKKKNDKVDARTIADLLRCNLLPECYMAPCAIRDLRRVLRYRNLVVRQATRMKNRIAGLLMETGTPYNKERLHGRAYFSELLASLREVPRSVVELLQLSRGQLEFFATIQRRLLKGLCQNPDLSARVARLQTIPGVGEIMALSWALEVGEVKRLPSIAQAASYCGLTSAQHNSAGKEQRGPISKQRNKHLQTILIEAAKLAPRHNPQLAVVHERELQRGDRNQATLAVARKLVAYLMAVDKSGKPFAMRASGEEAA

SEQ ID NO: 259385 - protein, 377 aa, unidentified
MHKASVVACVMITVSDGTVHSEVKTFGTMTRDLLELGDWLKAQQLTHAAMESTGSYWKPVYNLLEGQIELLVVNAHHIKAVPGRKTDVKDAEWIADLLRHGLLRGSFIPAKPQRELRELVRHRSNLVGRRAHTGVSATEMLQAILAGQTQPEVLAEMARGRMQRKKELLHKALEGRVEEHHRLMLSQLLVDIANYDDQVNEVGALIAKRLEGQQELLDRLDQIPGVNRRVAEVIVAEVGTDVKRFQSAAKLASWAGICPGNNQSAGKRRSSHIRPGNRSLRAALVEAANAAGKKKDCYLATMYHRLAGKRGKKRALIAVARTILQSIYYMIQRGLAYQDLGADYYDRRDPEGLARRLARRIEKLGFAITLEPLAKVA

SEQ ID NO: 259386 - protein, 363 aa, unidentified
MLKTPDRVVIAVDPHKASWTAAAVNASLQPLDIIRVPVSRDGYRALRRFARRWPDPTWAIEGASGLGAPLTARLRADGADVVDVPAKLAARVRMLSTGHGRKNDDADAVSVGIAALSARTLNTAAVHATVTALRAVVEHRDDLVKTRTQTINRLHVLLTHLVPAGARRELTADQAAELLRGVRPHDAAGKALRRLAADLVAEIRQLDRYIAKAAANIQTAVSASGTTLTELSGIGTLTAGKILGRVGTIKRFRSATAFATYTGTAPIDVSSGDVIRHRLSRAGDRQLNLCLHVMALTQIRQDTPGRAYYQRKRAAGKSHKEAMRCLKRRLSDVVYRQLVRDETRLEAGPGGHSGAALLSSAAS

SEQ ID NO: 259387 - protein, 410 aa, unidentified
MTYTIAGIDVHKKVLMVVVADVSAPDLRFERRRFGATTSELEALAAWLDQHAVKEVVMESTAQYWKPVWLALEPHFQLHLAQAQSNRAPGGRKSDFRDAERLLRRLVADELFLSYVPAPEQRVWRTLTRSKLQLVRERVRLQNQIEALLEEGRIKLSSVISQLLGDSGLRILHALAAGESDPHRLAALGDRRLRASERELADALNGDLRPAHRAILTLFLQRLDLLDRQIAQLHQLAAEQLHAHQNAVARLAAVPGLGLDSAQQIIAEVGPQAQAFPTPQQLCSWVGVCPGRNESAEHNRSGHCAKGNRYLRRILCQGAQAAVKKNGSYVQSLFRRLLPRLGYLKAIWAVAHRLCLIVWKILHEGAEFIEHGQLGTPLQQQRRTRNLITQLRKLGYAVQLSPLPPAPQAG

SEQ ID NO: 259388 - protein, 339 aa, unidentified
MDQVNTIGFDTAKHVFQVHGPDAQGRVFRRKLRRKEVISYFASLPPSVIGMEACGGAHYWARQLQALGHEVRLMPPAYVKPYVKRGKNDAIDAEACWEAVGRPTMRFVAIKSEEQQSVLMLHRARELLIGQRTQTSNALRGHLAELGIIAKQGRGGTDELLALVEGHEEGQLPELARTALLVLADQLRELRVKINKIEREIHAWHRSNATSRRLETAPGVGPITASAMVATVPDPSRFKSGRQFAAWIGLTPNEDSTGGKQRLGHITRAGDPYLRRLLVVGAHAVLRHSGNAKSAPTKWAAELLGRKPYTVAAVALANKMARVIWAMMMKGEAFRDAAA

SEQ ID NO: 259389 - protein, 364 aa, unidentified
MHYVDNTTELSSLEETRCQFNGGKAIIKLGIDVHQHFYVVVEQVGGSNPNPPQRFRKEAFLHWAAKLKNQGKQVHAVYEACGFGFGLQRQLSALGIDCHVVCPQKLDERNRRVKTDGLDAKALCLKLDRFVQGNGDALALVRVPSEKEEQRRAIHRQREQLVKARKRLEAQGRSLMVNHGIEPIQQWWKGRAFAQLQVPAWMQELLATSQPILLALEEKIKTLTVQLQNAAEPNQPRGFGALTSVVIDREIGNWQRFSNRRRVSSYTGLCPGEYSTGDTRLQTCVTKHGNPRLRAALVEAAWRLVRFQPNYRPIIKWRATLSKGALVTRAARKKAIVAVARQLAVDLWRIRTGRVSAQELGLIN

SEQ ID NO: 259390 - protein, 338 aa, unidentified
MEHQRQYVGIDLHRRRSVIVRITDDGEILETVRVANDPLEFALAAGRAGPGSEVALEATYGWYWAADLLEAEGAHVHLVHPLGLHWDARRVKNDVLDATELARRLFRGDLPEAWIAPPELRELRELVRYRAKLVALRISAKAQVHGVMGKLGILPPLEDMFGPGGQRHLDEMPFTGAYAIRIESLRDLLEIYERELTTVEREVARRLRGHSGYRAIQAINGVGPVMAAIFVAEIGDVTRFESAGHLCSWSGLTPRHRESDMKVTRGHITKQGSNLVRWAAIEAVARYHGGAPIAPAYERVAARRGAMIARVAAARKLLCLVYYGLRDGEIRCLAEAVA

SEQ ID NO: 259391 - protein, 344 aa, unidentified
MMIIGCDFHPSWQVIAFVDSDTGETGELKLVHASGEARRFYEGLTGSVRVGLESTGNCHWFTDMLSEMGHEVWIGDAARIRAAQVRKQKTDRRDAAHILDLMLKNDFPRIWTPSRQERDHRQLLLHRHKLVRMRAQIKTELQHLAMNQGMQKGRSLWSKENQKQFLELALQPWASVRRQNLLQLMQGMDQQITVLDQAVKQAAEKDARARLLMTQPGVGPITSLAFALTIGDVRRFEYSKQVASYLGLIPTERSSAGKQRLGSISKQGNRFLRMLLVESAQVVVRYDPGFRKEYLHRCHQKPKAVAKVAAARKLAVRLYWMLRTNTPYPEVVRIESSPRVPLAG

SEQ ID NO: 259392 - protein, 314 aa, unidentified
MSPIHIHVGIDVAKDRLDVAQRPGTEAWGVTNDERGIADLVARLKALRPTLVVLEATGGIELPVVGALAAAGLPVVVVNPRQVREFARATGRLAKTDAIDAQVLARFAEAVRPALRPLPDAATHQLSSLVARRRQVIVMLTAEKNRLRTAAPVVRDHIKEHIVWLERSLSDMDRELGQVIHSSDIWRAQDNLLQSAPGVGPVLSTTLLAELPELGSLNRKEIAALVGVAPLNRDSGTLRGRRTVWGGRSQVRTALYMAALAATRFNPVIRAFYQRLETAGKPKKVALTACMRKLLTILNAMMRHQTPWQICSTS

SEQ ID NO: 259393 - protein, 342 aa, unidentified
MDHYAGIDVSLECSSVCVVDASGKIVREAKVASEPEALIAWFASLGFGLERIGLEAGPLSQWLFAAMRGAELAVELLETRHVRKAFEAMPVKSDRNDARGIAQLMRLGWFRPVHCKSMSAQETRTLLTARKLVQSKLRDVENSLRGILRGFGLKVGKTTEGKFARRIEELVVGHPHLQVIAKALLAVRAVLRKEFAAFEKQVRKMARSDIRTRLLMSMPAVGPIVSLTYASAIDDPTRFRSSKQAGAHFGLTPKKHQSGETDYTGRISKIGDSSVRTALYEAAHIMLTKPLKGCTQLKSWAMRIAKRAGMSKAKVALARRLAVIMHRMLADGTPFNAAAAAA

SEQ ID NO: 259394 - protein, 401 aa, unidentified
MKRLSGGIDIGSEHHHIIIMNDEEKILYDQKIAHKFSDFYQAIKESKEIEKRERGIISFAIEGKNGYGAPFDRILIEEGFTLYNVDNLKLKRFRNVFGAEWKNDQRDAKMLAKMLKLKDHLDSENEKVFIAIEKTPEVNEKLKILSRHQQTLIDEKIRIQNRLQKRLLEVCPEILNFGDTDSKKLLRLLIKYPDFSRYKRLTLKALLKIKTIGKKRASSMLESLRNIQYVEELADIYKTIILSYSRRILELKEEIEMLDKKLDEIGKKSPEVKRLQTIPGAGTKLASRLVGEIGDINRFKKESQLAVYCGVACIDDESGKKKKSKAVFKANKICKATMIGIAGCTIRYVQESKNYYAKKRAEGKEHNHALRCLARQLIKVIFKMLTEDRDYMVREELKKAA

SEQ ID NO: 259395 - protein, 338 aa, unidentified
MYYTGIDLHKKTSFLTTVDEKGHIVTRANVLNVESDILDYFVELDRETKIVIESTASWYWLYDLLVGNGFDVVISNPLKTKAIASAKIKNDKVDSHMLAQLLRSDLISTVYVSSLELRKLKELLRHRERLVRDATRMKNRIHNLLMKNNEQVPFSDLFGVQGLRYLNEIGLPPYHRVQVETYLSLYQDLVREIEPLTETLHALAEEQPMANLLMSIPGIGPIVAMSLVAEIGDISRFPSYRHLASYAGLVPSLDASGGKERRGSITKRGSRYLRTALIQSAHAIPRMKKCRLNLFFRRRIVKAGYKKAIVATAHKILQIVFYVLKNQTPYSEKYPACA

SEQ ID NO: 259396 - protein, 257 aa, unidentified
MNYHTFIGIDIGKHEFVTAIHGEKVVKIYSNTQDGNSSFLSDYKGILTNSLVVLENTGGYENELLLFLLNNNVAVHRADTRKVKNYIRSYGQKGKTDKIDALALASYANERQFSLDVFRPRNKSQEMLRELEERRRELKQMLVQEKNRLKSPLSKYSLKSITSVIECLKKQLEIIDNEMKNLIESDEELVKKKEIVQSIAGIGEITSTTLLALLPELGSLGRKQIASLCGLAPYPKQSGTKSWYSRTQGGRRISKAF

SEQ ID NO: 259397 - protein, 343 aa, unidentified
MQAITTIGLDIAKSVFQVHGIDAEGNVILRRQLKRRYVLVFFQKLPPCLVGIEACASSHHWSRELQALGHTVSLMPPAYVKPYVKRHKNDSTDAEAICEAVTRPNMRFVATKTSEQQSCLTLHRTRHLFIRQQTSVINAIRAHLAEFGIVAPVGRNGVEQLLGVVSDASDKRLPDVARACVAALGAQLQTLKIQILEFDRMIRAWHRSSEASRRLDDIPGVGPALATALVASVADPGAFRSGRDFSAWIGLVPKQNSSGGKDRLGNISKRGDRYLRSLFTAGALAVIRYAKIHGTKHRPWLTALLTRRPTKVAAIALANKIARMAWAIMTKGERYKEPAALAA

SEQ ID NO: 259398 - protein, 359 aa, unidentified
MQVQSNELNFEGQNIYVGLDVHLKSWTVCIMTEHLEHKKFTQPPQAQVLYNYLTRNFPNGNYYSVYESGFSGFWAHRKLEAFGINNIVTNAADVPTGQKERIQKDDGVDSRKLARSLRSKELEAIYVPSELTLEERSLLRMRATLMKDMTRFKQRIRSFLYFIGISYPERFSKSCSHWSKNFLYWLKEEVDLSKSGKQTLNSMIEEVEEQRKLLLVIYRQIKQLAEDEKYASNVKLLKTIPGIGLLTAMHFLTEMEMVERFNDTDHFAAYVGLVPDRHNTGEVKNDGEMTLRGQSLLKKHIIEAAWIAARKDPALSLAYNQYVHRMNPNKAIIRIARKLLNRIYFVLKNKKEYVNCIVK

SEQ ID NO: 259399 - protein, 313 aa, unidentified
MINIICGVDVSKARLDACIEPGAIFASFDNDAAGVAELAAFCRQHQAGLAVMEATGGYERPAFLLLWEAGMPCAMTNPRSVRRYAEAMGVLEKTDRLDASVIARFAHAKNLQPTPAPTPAQQRLKALVARLRQVTDDLTVQKQRRSSLADNAEMLASIDEVIALLKRQSRTLEGEIASMIDDDPLWEKLAEAWRSVKGVAGRTVARLMADMPEIGTYSNKAIAKLAGLAPLADDSGKRQGKRSIRGGRASVRSILFLVARIAAKYDKSLADFRDRLLAAGKPKMVVRIALAHKLLVRLNAKARDARAAYANAT

SEQ ID NO: 259400 - protein, 387 aa, unidentified
MSQSNDLSRSLEPLDQASTLIAVIEMSQSSWLVAGVVPGVERQPRKKLEPDQEALLRLLQRWRDEAARSRHTITRIAVAFEAGRDGFWLARWLRSHGVEAHIIHPTSVAISREHKRAKTDRLDTAMLLRVFLGWLRGERGHCSMVSVASIKEEDAKRPSRERENLVNERTRIINRMKSALVRLGIRGFKPELRRAPQRLEGLRTPEGLPIPPNTLDEFRRDLARLALVRKQIETIERDRLARIDQAPQVRSNAMVRVLASIRGVGVETADMLVQEVLSRNMRDRRAVARYAGLTGSPDESGSKRREKGLAKSGNARVRRGLIQLAWRFLLFQKDSALAQWYRARTAGPKGRRKTTIIVALARKLLIALWRMVSVGEVPKGVVLRPAV

SEQ ID NO: 259401 - protein, 362 aa, unidentified
MAGMDLHGNNVMVGIVDDQGARLQHRRLACELPEIIEFLDPYKAELESVAVESTFNWYWLVDGLRAAGFPVVLANPAKIDQYSGIKHADDKNDAYFLAELQRLKILPTGYVYDPELRPVRDLFRRRMSLMRQRTTLFLSAKSLHQRTTGRGLELRRLKAMEPEEAAALYTHPANQLIAQIQKEHIDSLDQSIRQIEKAVLKVALQQPYYQRLQTIPGVGIILGLTISMEVGNIDRFAGPGQFASYCRTVDAKRISNGKTKGDNNQKCGNKYLAWAFVEAAHGARRFDATCRRWYDRKAGKKCTTVATKALACKLAKAAWYVMAKGTEYQAGKIFPGLTEPKAEEISGEQASASKGVGPNPED

SEQ ID NO: 259402 - protein, 312 aa, unidentified
MDKAPTFVGIDVSKHRLDVHARPSGESFATDYDDEGVAGLVERLAALAPALVVLEATGGLEVRLAAALAAAGLPVAVVNPRQVRAFARATGRLAKTDRLDAEAIARFAEAVRPPVRPLPDEATRHLGALVARRRQLLEMLVAERNRRHAADPALHEGIDAHLRWLEEALAGIERDLGTAVRESAAWRAKEELLRSVPGVGPVSARTLLAELPELGSLTRRQAAALVGVAPFSRDSGKMRGKRTVGGGRATLRACLYMAAVAAARGANPPIAAFYERLRRAGKPAKLALTACMRKLVVTLNAMLRTGTAWKQA

SEQ ID NO: 259403 - protein, 334 aa, unidentified
MENIALIGIDLGKNSFHIHCQDRRGKAVYRKKFTRPKLIEFLATCPATTIAMEACGGSHFMARKLEELGHSPKLISPQFVRPFVKSNKNDFVDAEAICEAASRPSMRFVQPRTESQQAMRALHRVRESLVQDKVKTTNQMHAFLLEFGISVPRGAAVISRLSTLLEDNSLPLYLSQLLLKLQQHYHYLVEQIKDLESQLKRKLDEDEVGQRLLSIPCVGTLTASTISTEIGDGKQYASSRDFAAATGLVPRQYSTGGRTTLLGISKRGNKKIRTLLVQCARVFIQKLEHQSGKLDDWVRDLLCRKSNFVVTCALANKLARIAWALTARQQTYVA

SEQ ID NO: 259404 - protein, 350 aa, unidentified
MFVGIDVHKHTHAAALLDARGGELGVLTFANSPAGYQRLIGWLADRDAARAVIGVESPGSYGRCLVGALATAGHEVLHVPAWRTHRERRREGPGKTDPGDALAIADVVRRKRAELGPALQPELIRAISILELQRRRFVLDRTQAIQRLRSDWTQVDPVAEARIVRLDRQRELRKLKRLDLGNGLAERIAAATIRQLARDIEDLNGRIAGLEGEIAALLEEHGNPVGDLLGAGNQIAAALISQAGDVRRFKDAAAFARYCGAAPIPCGSGQTSGRHRLHRGGNRQLNAALYRIAIVQQRHHPQAKAFLARKIREGKTPREARRALKRHLANVVYRRLLAWADNTPAMNLLT

SEQ ID NO: 259405 - protein, 402 aa, unidentified
MNPVVGLDISKEESHGQAFLARGKPFRGTFHFEHTRDGLANLHQVLKDVETASKLRPLLILEATGHYQSPVVQFLEEHHYIYIIINPLISNRLRKTQLRKVKTDAADAYLLGELYYKEEFEPFKKRGVQLLNLCYLTRQYESLSKMCVQTKLQFQAVLDQVFPAYKGVFGAMYSRISLRFLSKFPTSYSVLQTDEITLKAKMKELLSSKRGRSEGWINQRVQRLLDAAKQNPFQQTMYASHLINLKVLITLILQYQEHLAELEQNIDALAEEIEEYELIQSIPGIGHKIVATILSEIGEVDRFDHPKKLVAFAGIDPSVFASGKFTATRNRITKRGSRQLRYALVMAVQCGLIRSRNMRLKAFYDRKRAEGKPHKVALIACANKLIHWLYAILKNKKEFRPI

SEQ ID NO: 259406 - protein, 355 aa, unidentified
MNSIKYVGLDVHRDTISVAVLNAAGKLVMQCVLATHAPAILDFFHGLHGTLHVTFEEGTHSAWLYDLLVRRVAHLVVCNPRKNALLKAGSKSDAIDARKLAELLRAGLLSPVYHGQNSTAAVKHLGRSYAALTEDTTRTMGRLKALYRGQAIACAGKKPYGSRHREEWLAQLRDSGLQRRARRLYQELDLLQQLRREARRDLILECRKHREAKLLRTIPWLGPIRVALLIGRVQTPHRFRSKRQFWAYCGLALETRSSADYQMVDGQLERRKKPVFIRGLNRNHNHDLKNLFKSAATAAGGSDGAFGQFYENLLKKGMRAEMARLTLARKIAAITLHVWKKGEAFDAEYVKPQAA

SEQ ID NO: 259407 - protein, 385 aa, unidentified
MTIQRTACKFIPRDYDVFAGLDVDKRSMSVVFADHDGAQRALRMANKATPLLNYVRKHYPGQRVAFAYEAGPTGFGLHDELVRQAYTCVVAAPSKVPRARGDRVKTNRLDSRKLAESLRGGQLPGIHVPSLIYRDLRHLVQLRDTHVRQLMASKLRIKSLLLYEGIPFPDPQEKWTARAMCELQKLPCSPAVRFKLDDLLETLHFHFQAAAGATKQIRQHCLHDPELQQSVDLLLSLPGIGWIVASHLVARLGDPQQIKNGKQIAGFLGIVSSEHSTGEKENRGEITRSGDSRLRSKLIQSAWTAIRKDPELRDFYRRIYQRHPKKVAARKAIVAVARKLTQRIYVVLKEQRPYVVRPDSSIAPLTAEETVGPRDRLDGAQNDQP

SEQ ID NO: 259408 - protein, 331 aa, unidentified
MAVYAGIDVGARNAAMGWREKGRAAGSWDIAQTAKGHKAVVKKLLALKPLAVVMEATGIYYLDLAMALAAAGLPVSVINPKSFHNFAKLTLTNSKTDGIDAQLLAEYGERMTPRLWVPPTPTQLELRAIGRHINRLTCHRTRAKNELHALQATETTMALLIEDEEDAIAMFDRRIERFRQAGRDLIAKSPELTAQFKHMVAAPGMGEISAFAALAELTTLPVTLKSSQVSRHAGLDVRLTQSGTSINKPGRMSKAGNAYLRSAMFMPAMTAIRCDPYVKAFYEALVGRGKKKMQAIGAVMRKYLTGLWACMRAGEDFDPAKLFSKIHLPKA

SEQ ID NO: 259409 - protein, 343 aa, unidentified
MNHVAIDLGGKESQICIRHPDGAIVEERKVPTRKLTELVATWPTSRVVMETSAEAFRIADAAIAAGHEVRVVPATLVRLLGVGDRGVKNDQRDAQQLSKASWQTDVPSVHIPSKAARELKSICGARDVLVGTRTKLINNVRGWMRTQLWKIRGGTTATFADRVRGHAATVGEPLPEHIERQLRLLSAVLEETKAADKQLKTLAGEHAVCLRLMTAPGIGPVTALRFVAAIDEPGRFSSAHRVQSYLGLTPGEHSSSERERRTGITKAGPMELRRTLIQAAWVAMYRVRTSHPMTDWALRLAERRGRPVAAVALARKLAGILFAMWRDGTSYQSKRSAEAVQHS

SEQ ID NO: 259410 - protein, 316 aa, unidentified
MSETISRVVAIDVSKAWLDVATAVDDDVERIAHDPSGIEAVVSRAEALDAQRITVEASGGWQTRLVAALLHAGLPVVVVNPRQVREYARATGRLAKTDRIDARVLVAFTLAVQPPLRRLKDAQAEALSALLARRDQLLKMRSAEKNRLKLGATGLVRKNLKAHIEWLDRHLRDTDHEIKQLIEASPAWQAKQDLLTSAPGIGDTTARVLIGQLPELGQLNPKQIAALAGLAPFNRDSGSLRGQRIIWGGRHDVRKALYMATVSAIRANPPIREFYTRLKAKGKPSKVAIVACMRKLLVTLNAMLRDQTPWQFTAET

SEQ ID NO: 259411 - protein, 316 aa, unidentified
MSTPNSPFVGIDVGKSQLDAARHDNPTTHSFPNTPEGLVKILTWIQDVSPSLVAVEASGGYERALVHFLSIAGITVAVVSPNQVLDFARAHNQKAKTDKLDAHNIAYFASIMKPRVFSPPSPVQERLLALVTRRRQIAHMIIPEKNRLMQASPDIKPRIQEHIDWLEEEEKEIEEKMRDLINSDPDMQEKLKILSSAKGVGSVSAFSMLAQLPEMGTIDGKQVSALLGVAPFNHVSGKQKGKRRTGGGRYNARSAFYMATLSAIRWNPVIKRFYERLLSQGKEKNVAIVACMRKFIVILNAMLRDRKPFMVQSMFA

SEQ ID NO: 259412 - protein, 323 aa, unidentified
MTIMTYIGIDVSKDSFVAAYPTKSGYTTKSFPNTTSGVRKFISSLPKESHCVMEATGNYSMLLLYLLQQANITVSMENPQKIKHFARAMLSTTKTDEIDAKLIALYGEKMNPSPYKIPSECIILLKQKRTVLRQLKKQLTATLNLQHALSALPKQDPTSKVTVEKTISFLRKQISKMEEEITNLSNKEFNRQMTLLTSIKGISNTIASALITATGGFTYFSSAKQISRFLGLCPTYQQSGTSINVKGHINRNGDTYLRSQLYIAACASLRCNTACKETYERLRAKGKSGKGAIIAIANKLIRQAFAVVTNNRPYIDGYVSSFA

SEQ ID NO: 259413 - protein, 341 aa, unidentified
MLKFTIGADISKDKINFALRFLNEYLLEKEIENTTSALNKFIKHVQSLIKDIAKEKKSEYCLEFIMEHTGIYGNLLIECLAGHSVTMYVVSGLEIKNSIGISRGKNDKIDARRIADYGVRFADKLKPYALCDQGLSELKGLYTKRSQLVRLKSQLTQAKDDNKKFQNKDLLKKLNKIDDPIVKALDDAIDKIEAEMLELIKSNTAVYDNYKIAQSVPGVGKVIAIAFICATNNFNKFESAKALGSYCGVVPFGKESGRYKGKDKVSRIANKTLKTLLHLGALASITGKNAFATYYQRKITDDKKNKMLAINNVRNKIVKTLFACIKNKTKYTAEYTFSFAA

SEQ ID NO: 259414 - protein, 375 aa, unidentified
MKNKVRFLGLDVHAETIAVAIAEPDGEVRSLGTITNRAESIRKLVKKLGPVEQLKACYEAGPTGYVLYWQLAELGVACEVIAPTLIPMKSGDRVKTDRRDAERLARSYRSGDLTAVWVPDEGSESLRDLVRAREAAKQDQLRARHRLSKFLLRMGRRPAVGMKAWTASYMAWVRQVHFAQVAREATMLDYLHEVDHMSERVRRLEQAITEAVKLAAPAVQEVVKGLQALRGIAEISAVTIVAELGSITRFDTPRQLMGYSGAVPSENSSGKRTQRGSITKTGNAHLRRIVIEAAWSYRLRPGIGPALRKRQEGVSEPIKEIAWKAQVRLTKRYARLAAAGKDQRKIVTAVGRELLGFIWAIGIKAEAAGKLQMAA

SEQ ID NO: 259415 - protein, 394 aa, unidentified
MSQPNDLSRSLVALDQNSTIIVVVELSQSSWLVAGMLPGIERQPRKKLEPSPERLLSLLHRWRDEAVRAGRTITRIALAFEAGRDGFWLARWLAARGVEAHVIHASSVAVSREHRRAKTDRLDTELLKRAFLGWLRGEPGHCSMARVPTIAEEDAKRPNRERDCLVGERTRIVNRIKSTLARLGIRNFKPTLRGPAPAKAGGGRASCTRAHPEGMPLPPNTLAELQRDMARLGFVVSQIREIEDARQKRLEQEPETGPHAMVRWLARIVGVGIETADMLVHELLSRPMRDRRAVARYAGLTGSPDESGARRREQGLARAGNARVRRAMIQLAWRFLMFQKESALALWYRARTADSRMGTRKTMIVALARKLIIALWRFVTTGEPLEGVVLRPAS

SEQ ID NO: 259416 - protein, 607 aa, unidentified
MSTIASLDRIGVGIDTARYGHRVSFLRPDRKPAAKPLTVMENRAGYQALQDRLNQLHEQHPTAHFHVRIDAAGQYAVNLELFLRGLKLPMTISVGEPKRNKDYQKAHFPKRTTDDTESQAMARFAVVELPNATPAPSTPMILLREVAGRLQSKVKQTTQAINRLHNLLARVFPELATLTEDMSAGWVLKLLDKYPTAERIAQAQIASLEKIPYLSVEQAQAVHQAAKQSVASLRGDLAEALVRDLVEQLRQSQRAEEKLRQMLITAFADLPASPHLQVLTITGIGEATAAALVAKIVDINRFATPNHLVSYFGVFPEESSSGVDKRGRPLPPGTLIMSPKGNDLVRFYLWNAARNAIQHNPAIRALYRRLRAKGKRGDVAFGHCMRKLLHLVYAVWKTDRPFDKEHFPWEGSSDTQPSATTPPSADAGTTPSANEKAVGHKRDLPAEEVVTTADSTLEPASPAVKPASQSAAPRPKVDFACVREHVTMEQVLQHLGYFASLRGRGQQRRGPCPVHSQPTAPERTFSVHLGKNAFQCFHAECAVKGNVLDLWAAIHRLPLYEAALDLAETFQVPRNREEEPVKGTSSPRTATAKTSAPAAATATDGAK

SEQ ID NO: 259417 - protein, 402 aa, unidentified
MDKNKRYLRFVGIDIAKNKHVFCVIDRDGKAIHKSQSFTNNKQGYHLLRETLKNIGQARTFLIGMEATAHYWYSLHDDLTRHGYQGVVLNPIQTSQQAKKAIRKCKTDRVDAWHIATLIKNGDYKPALVPGPLAMTCRQLTRLRMRLIQQNAMLKQLIWSRLHPIWPEYEALFSNPFCATGRKLLSVAPSPADILAMDSHELSELIRKTSRGKYGVNQAQKAWQAAADTVGMQRGLDGARICIRTLLSQMEATKPVHEQLKQEIVQLSQRLPTYLFSLPGVDPIRAVSLFGETDPITDFKRPSQLVAFAGLDLTVFQTGQYEASHRRISKRGSPFLRYTIWRMAYQAVYQEGDLRSYWLRKLSDGLTHRAAVTAAAIKLCRITWRILTDKRDYLTQSCPNQS

SEQ ID NO: 259418 - protein, 452 aa, unidentified
MEEKEISMEIINPHAVGIDVGSRSHWVAIGQQEQDVREFGVFNQDLFEMADWLTEKQKKTVAMESTGTYWQNLYAVLISKGFHVILCNGKFTKNIKGKKTDIKDCQWIQKLHSMGLLTSSFLPDGKTEQLRTYCRHRANLLHSSASTTKKMQKYLRLLNLRLDVVVRDICGLTGLTIIRAICEGEINPEKLASLRHGNCRKTEAEIAMALQSNGRKDYLFALQQELDMYDHLQKKISECDIKINQMLNEIIDNDENKKQHHIDPKTYKKINKNTPKDIDLNLKAYQMFEGTDLLSIEGLSYSTVIALMSEIGFEGIKKFPSAKHFASWLRLAPNNKISGGKVLSSKIPKGSNRLKIALRNAANAIGNLKESTPLRDFFQRINFRKGRVSAVSATARKLAVIIWNMIVKGVPYHNPEGYLFLDQKRKLGIVKRIQKQIDKFALTTEDLQFAKT

SEQ ID NO: 259419 - protein, 346 aa, unidentified
MKVLLGVDPHKASVAVAVVDEVVGELVECATFPQNRAGLRALERWAKRFPERRWAVENAGGLGRHLAQMLSAAGESVVDVAPKLSARVRVLSTGNARKNDELDALATALAAWRNKRLPTVASEAGTEVLRLLSERREDLVAERTRGLNRLHGLLRDLVPGGVPGTLSTHRAARIVRGIRPQGVSARVRRRLASDILRDIRTLERKIADLNERIETEVEASATSLTQIFGMGPILAAKIMGTVGNATRFPTKAHFASYCGTAPVEVSSGEVVRHRLSLAGNRGLNNALHMVAICQARSDVRGRAYYRKKIAEGKSRKEALRCLKRRISDAVFKSLMADLEGPSCSAA

SEQ ID NO: 259420 - protein, 363 aa, unidentified
MDESTTVSVGLDVHARSVRLAAVRADELLEERTLPYDEEAVERTLRRWPGVRCCYEAGPTGFGLYRHLVERGIDCAVVAPGLVPQRPGDRVKTDPRDARKLARLLAGGLLEPIHVPSPELEAARDLVRAREDARLDRMRDRQRLSKFCLRHGRLLPTSAWTVVRRKWLGEQQFAYAAEQQTFDTYLHAVDLVDARIARLEQAIRETAEQGPWRELVARLRCFRGIDSLTALALVAEIGDFSRFRRAEEFMAFVGLVPSEHSSGERRRQGSITKVGNAHVRRLLVEAAWHARRRPKVGYELSRRQRGQDARVIERAWRCQQRLYQRWQRMAGRGKPQQKIVVACARELAGFVWAIATNQPLRTT

SEQ ID NO: 259421 - protein, 355 aa, unidentified
MNDAKYIGLDVHQATISVAVRDCTGELVMEAILETKAETILQFFRGLRGSLHVNLEEGTWAAWLYDLLQPHVTRVVVSDPRKNALLKDGNKNDRIDARKLAELLYLNKFNAVYHGQHGLRTLKELARSYLTLTRDLTRVMARIKAIYRGWGIPCAGQRVYAPGHRAEWLGKLSEAGVRRRAEFYYQQFDALALLRQETRRELLVESRKHSAVKLLRQIPSIGPIRAALLVALLQTPYRFRTKRQLWAYIGLALTTHTSGEYRFERGQLQRSKKVLAIRGLNRNHNHDLKNIFKSAATWAAANSGPFKDFYEACVARGTKPHLARLTLARKIAAITLLVWKKGACFDAEHLKPQAA

SEQ ID NO: 259422 - protein, 411 aa, unidentified
MQAYYVAGIDVHKAMLAVVVSEVKAGESEFQRRRFGTTRKQLRELAEWLAEWGVQEVVMESTARYWRPVWVALEEVGIKRQLAHAHSNGARRGRKSDFRDAERLVHRLVAGELVLSYVPEDEQQGWRWLTRTRYQLVCERARVQCQIEGLLEDAQIKLSSVITDLLGASGRRILEALAEEQGRHDPAKLAELGHAKLRATREELTDALDGRWLSRHRFLLGLHLDRIRQLDGQIEKIQQQTAAAMQGCQEAVARLIQVPGIGTEGALQMLAEIGPSAAAFPSPEQLASWVGVCPGQQESAGQSHSRRCAKGNWQMRRLLSQAAHAASHAKGTFFESLYRRLVVKIGPQKAIWALAHRLCRLIWKILHQGVEYREQGHPTASPKSIRRRQLKLIADFRKLGFQVQFTPINPV

SEQ ID NO: 259423 - protein, 340 aa, unidentified
MEQIIGIDLAKRVFQVHIVSAQGEKKANKMITREKLTTFIVQQPPSRIVMEACGSANYWSRQFRQYGHEVKQISPQYVAPFRMGSKNDKNDAVAIVEADSRPGMRYVPEKSIEQQDIQCLHRVRQRLMKNKTALINQIRGLGLEYDIAIPEGAHKIMAHLPDHLEDAENELTTLSRELLHEMLQELQDNQQRIKILDLRFALISQQNEDTLRLESIPGIGPLGASALTVALGDSADFQNGRHFASYLGLVPKEHSSGGKVRLLGITKRGDGYLRGLLIHGARSVVYRVINLPEERCGGLQRWLKGIITRSGVNKAVVALANKNARIAWALINQKTEYIVK

SEQ ID NO: 259424 - protein, 340 aa, unidentified
MSLYGGIDLHANNSVVVLINEQDEVLYQKRLPNALSTILEQVAPYQTALQGVVVESTYNWYWLVDGLMEAGYRVHLVNPAAMQQYDGLKYTDDHSDARWLAHLLRLGVLPEGYIYPKAERAVRDLLRKRTHLVRQHTANVLSVQNILVRNTGVRRSIKQIRELPKRELERLLPEADQILAVTSSLAVLDCLRRQIKALEQAVQTRLKHTPAYEQLLTVQGIGAILAQTITLETGAISRFPTVGNYASYCRCVDSTKISNGKRKGQGKVKNGNPYLSWAYMEAAQHAMRFQPEAQRFYQRKLAKSNKNIILARKAVAHKLARACYYIMRDLVPFDVTKAFG

SEQ ID NO: 259425 - protein, 430 aa, unidentified
MEVIYPKACGVDVHKSFIVAVICDSTSVKPQYLRKRFSTFPNSLIDFRNWLLANDCQNVCMESTGKYYIPVYNALEGYISNVVVSNPKWVRCIKGEKDDNKDAKWIADLFKLGIVRHSFIPPKNIRVLRELTRYLYKLTNMRTSEKNRFTNALTVGNCKLDMVFSDIFGKSSSAIINTIISQNQYSDKDILKNVDKRCKASEEDILNSINGISWVDAQKERMLLIQNHIDYLNSTIKSLKEIIDIVVKPYEDYIKFLCTIPGVDRNSAISIISEIGTDMSQFSSHYRLVSWAGLAPGCNESAGKKKSVKISRAGVYLKPALVEVAHAAVTDKDCDYYAVKYKQISKRRGKKRAIIAIARKILVAIYHMLSTGEVFNPSDLSKVETSDKDRIKYTKNNFMQSAKQLLSLGLTSEEIILLVNSQNSNLTPIT

SEQ ID NO: 259426 - protein, 366 aa, unidentified
MGWMAPLRHLSAKMLVDSTTSEREPSMGEIRTIGLDLAKHVFQLHGVDAEGAVVLRKRLRRGQVLAFFSRLPACVVGLEACATAHYWARELGALGHEVRLMPAQYVKAYVKRNKNDAADAEAICEAVLRPTMRFVPVKTAEQQAAVLLHRGRERLVRQRTMLVNALRAHLAEFGVIAPQGLRNVSKLIAFVRDDGDARLPDLARQVLQVLAAQIEQIEVAVAELEKQLMAWHRSNPVSQRLATIPGIGPIIATAIAAIVVDPVAFCSGREFAAWLGLVPRQNSTGGKTRLGGISKRGNRYLRRLLINGASANLLRSKATNADPWVIGLRRRRPSLVVAVALANKTARIAWAVMHRQEDYQHVATAA

SEQ ID NO: 259427 - protein, 352 aa, unidentified
MQHFIGCDVHTRNQVVAWIEEETGEIKKRRLAHEGKEVKEFYAQFPRGTVVGIEATFPAYWFERLMGELGHELWVGDAARIRASEVRYQKTDPRDAEGILDLLRTGRFPRIWVPSLEERDLRQLLVHRMKQVRVRTQVKNQLHALAISQGVCRKGKLWSVKGRKELESLALLPWAARRRKELLESLDRLDEQVRELDRAVEEAGRAREEVALLRTHPGVGMVVALAFVLTVGPIERFSNSRKLVSYWGLNPRENSSGGRQRLGSISKQGNTMMRWLLVEAAQTAARLDPQLRRIYQRLKKQKTSAVAKVAVARRLAVRLFWMLRTRNNYAQLVHMSGSPSSAVVPPTAEPKL

SEQ ID NO: 259428 - protein, 370 aa, unidentified
MSHTSTLFVGLDVHKDTITVAYIASEPGAEAVSYGTIGTRHSDLDRLIRKLQSKGKRLVFVYEAGPCGYWLYRYLRRKKLRCFVVAPSLIPKRPGDRVKTDRRDAIALARLMRSGDLTAVYVPEVEDEAIRDLARAREDALKDLKAAKCRLKAFLLRQDIGYTGRANWGPAHLRWLAEVVCPTPAQQIVFQEYVRAVDEHHERLDRLEVELQDHAKAWRLYPVVEAIQAMRGVAFTVAITVIAELGDLTRFEHPRQLMSYLGLTPSESSSGPRRHQGAITKAGNTHARRALIEGAWSYRYPAKVSRHLQLRLETLPKAAQDIGWKAQVRLCKRYRRLTARGKNPNQAVVAVAREMAAFIWAIARDIPIAA

SEQ ID NO: 259429 - protein, 403 aa, unidentified
MNSVGIDISKGRSTVAVMRPFGEVVISPFEVRHTDSELSELARQLKSLNGETRVVMEATGNYHAPVAKLLHDAGLYVSVVNAKLVHGYGNNDLRRVKTDRKDAVKLANYGLDRWLTLPRYIPEEDTRLLLKNCYRQYRQYSKVQTVLKNNLISLLDTVFPNANRLFSSPIRGDGSEKWVDFVAEFWHCRCVSEKSERAFTSKYLRWCRKHGYNFSEAKAHTIYAEASGHIGVMPKSETTKLLVEQAVAQLRATSTALAALKHKMQTLASQLPEYPAVMDLFGVGPTLGPQLIAEIGDVRRFYSKKALVAYAGLDAPPNDSGDVTGRHKSMSKIGASSLRRTLFLVMTVYLQNAPLDEPVYQFMDRKRAEGKPYRVYMMASANKFLRIYYATVKAYLESLEHTA

SEQ ID NO: 259430 - protein, 370 aa, unidentified
MDERIKFFVGLDAHKDSIAIAACEAGREPARFVGTMGPDVNGLLKLLAKGGDPAQVSVVYEAGPTGYGLHRELCRRGYCSQIVAPSLIPRRAGERIKNDRRDCLRLAELSRAGELKAIWVPDEAHEAMRNLWRAREDAVGMRLKTRQQLQAFLLRHGRRYPGRTNWTKSHERWIAEQCFEHDGDRIALAEYQLAAQAAQQRVDRLTTALMEAAKGWRFEPVVAALRALRGIDTVCAIGLVTEIGDISRFSTARQLMAYLGLVPSEHSSGNSIRRGSITKTGNAHARRLLTEAAWSYRFPARLSQHLRQRSSDLPVPVRNHAWKAQQRLCGRFARLSSRGVQINKVCVAVARELAGFVWSIAHQASRTQVH

SEQ ID NO: 259431 - protein, 401 aa, unidentified
MGSLWAGVDVGKTHHHVCVVDDDGTVVLSEKIPNDQQAIGGVVGRLGKRRKPIRWAVDLRGGPASLLLAVLFDRGADVRYVSGTVTSRMAEAFHGERKTDAHDAYVIAQTLRMRADLPTLTLADGVQQQLKLLVSRRLDLVADRVRITARIQDLLTMISPALEKALNLSSKGALRLLAQWQTPAGLRRAGENRILAYLRQHGVRAAKALTVKVLTAARTQTVAVAGEATAAGIVAQMATDLEAVNDRITMIEETIAGIVAEHELGEIVTSLPGIGTTLAAEFLAHAGTLTTYPSAAALAAHAGLAPISRDSGRRQGHQVRPHRYHRGLRRVFSMSSFTALTHCPRSRAYYDKKRAEGKTHRQATAALSRQRLNVLWACIRDKTPYQPKQPRSAELASCELA

SEQ ID NO: 259432 - protein, 435 aa, unidentified
MNLKPIAGIDVGKFFSELVILSPTNEIFARMRIHHDSNNDMKRAIELLKKAEKDFASRPFVVMESTGHYHKILFHFLCKFGFEVSTINPIQTNSIKNIGIRKVKNDKIDARKIALIYRFQELKATNIPNEDIECLRSLCRQYYKLSDELTAYKNRLTAIVDQLMLNFKDAFPNIYSKAAIAVLEKYPTPTAIIKADKDELISTIQKNSRKSFEWATKKYELLVLKAKEFEPLSIDNAANLAMLAVYISMVKTLQENLDKVLMAINQLIADDLSKDMPVMALTIQLLQSIPGVGFLSAAAIVAEIGDFKAFSNSKKLVAYFGIDPSVRQSGEFTGTRNKMSKRGSRLLRRLLYTIALANIRTKRNNEPCNSVLMDFYKKKSQYKPKKVAIGAVMHKLVFIIFAVLRDRKPFELRTPEEHAKMLAKKHAVALDSTCI

SEQ ID NO: 259433 - protein, 343 aa, unidentified
MDHFAGLDVSVKETSVCIVDETGKIVREVKVASEPITLLAVLKNSAYHFKRIGLEAGPLSQWLFSALAEAELPVVCVETRHMQAVLKAQINKTDRNDARGIAQMMRVGLYRPVHVKTLRSQKLRMLLTHRKLLQSKAIAIENDLRGTLRNFGLKVGMVGKVKFEARIKELVENLPDLAVMVEPLLIVRRVLREQIVILHRRLLAIVRDDDVCRRLMTTPGVGPVVALTYRATVDVPARFRKSKAVGAVFGLTCSKYQSGEIDRSGRISRCGDEMMRVMLYEAAQSMLRSKKWSWLKAWAMQIARRRGMKKAIVALARRLAVIMHRIWVDGTEFRWTREQPVAA

SEQ ID NO: 259434 - protein, 419 aa, unidentified
MNYVGFDWASRAHDVTVLDEAGGVLDRWAFPHSETGWVTTLDRLARHGSAAEVPVIIERTSGLIVDRLLAAGHPVVPVHPTAFYAARPRWGASGAKSDPGDSYKLADYLRTDGHRLRRLTPTDPGLHELQALVRLRDDQVRARTAATNQLTAILDTYWPGPKQLFMSLASQIALAFLTDYPTPTSAAHLGEARMAAFCRRHAYRGGKSPAELLSRLRAAPVAPVGLPPATLAAMVTAQVTVLKTLQTVISDVERLIAIRVVAHPRSNLFENLPGVGMINLAQLLAEVGPILDRVDSAEQAATECGAAPVTRSSGQTRGVYFRWAANTRARKAITSFAHNARMQDDWAAALYADARARGKRNPHATRIVARAWLRVIWACWTSGQPYNPDRHHSSRFLHRCHPAGAQARSRWSPPPEERS

SEQ ID NO: 259435 - protein, 392 aa, unidentified
MYIVGIDIGKNHHEASIVSPEGKQIGRSLRFATTHKGADSLMSFIFKNIGNSPCVFGMEATGHYWYPIYSFLKAKGYTICVINPIQSDSLRKMYIRQTKNDSIDSFLIAEVIRFGQFGTTSMADENILAMRQLCRYRDSVISSRTEIKLRIGTIMEQIFPEYEKQFSSLWVSTSMGILEKYLTPENIENTPIDELFEIIKDKSHNRLTRAKAISIKEAAADTFGIKIAQDAFSFQLKQLIDRMNFLDKQIEALDIEIMKYYEQFDCYLHTIPGIGIIGAATILAEIGDISRFKNSSALVAFAGIDPTVRQSGEFNSTHNHMSKRGSPYLRHAIFLAATTCSFHNSPLNAYYKKKRDQGKHHLTATGAVARKLTTVIYAVLRDSKPYEPKKFC

SEQ ID NO: 259436 - protein, 342 aa, unidentified
MKHFIGLDVSLKETHVCVVDETGTAVAVCREATRPDLLASAIGRLAPSVERVVLETGGQSSWLQRSLRGLGVPTVIVDARQAKAALSCRLNKTDANDAEGLAQLARTGWYREVRAKRPEAALGRSVLLARQQLVKQRRDMENQVRALLRGFGLAVGAVSRGRFEERVWELVRCQPQLENAIGPLLMVRRCVDDHIQELEGRIRSVVGGSAVCSRLMTVPGVGPITALAFVTAIDDPYRFARSASVGAYLGLTPRRHQSGEVDWAGRISKRGDALARCMLYEAANVLLTRVRKWSAPKAWAAKLARKAGAKKARVALARKLATILHSMWVNGTEFQWTREATA

SEQ ID NO: 259437 - protein, 444 aa, unidentified
MSTRNDAVAETQPYAAWIGLDWADRKHFWSLRTADGKLERGQLDNTPEAVDLWAAELAQRFGGRPAAVALEQARGAVIGMLSKYAHIVLFPVHSTTLANYRKSFAPSGAKSDANDGDLILDLLLKHPERLRPLQPDTVETRRLQFLTEERRKQVNQHTSEVQRLTNWLKQVFPQILRWFDDPAAPVVGELLLRWPTVRQLQKASPQTLLKFFHQHNCRSEERIQQRLVEIRQAMPATTDAALLETGALCIQSCVRALAHMRTAMAAFDRQIAEVYRCHPDRAIMESFPGAGPALEPRLIAAAGSQRERFDSASSMACFTGIAPVQQSSGNSCWIHWRWACPKFIRQTFHEWAGCSIRTCGWARAYYDQQRARGKGHHAALRALAYKWIRIFFRCWRDRVPYSEPRYLESLRARAPQPTPTTVPALVQFQWKTCAGFSKLAKVSS

SEQ ID NO: 259438 - protein, 423 aa, unidentified
MPLRIVYPICCGVDVHKRFLVATIAKTNEKNITEYKTESFPTLNSGLAAFRTWLVEHKCEHICMESTGKYWIPIYNVLEEAGLHVVLTHPKYVRAIKGQKTDKKDSKWIADLFKHDLIRSSIIPPKEFRAMREVARYRTKLVQMRSSEKNRYQNCMTVSNIGLGNILSDSLGMTSTRIIDYLLTSPEIDEEVVKGYIHRNVKASPEEIMDAVRDCKIEIDQQFKLRESRGHMEYLNAMIKRTEKALRILIEPHKEIIKHLAGMPGITELSASLIIAEIGVDMSLFDTSKSLVAWAGLSPTNNESAGKKKSVRVSKAGKYLKPIMVQCANAAVKDKKNPYFGIKYEGIKARRGSKKAIIAIARMMLTCIYNMIDTGEVFNPTDYDEVVGSNRVKKEITLTDDQAIEFLAAQGYDISNLRKPPPD

SEQ ID NO: 259439 - protein, 358 aa, unidentified
MPGLPRRRRARCHLGCTPLGSWGRRRIFISPNGCEGLYPAHARKGTKMAQGKMFVGIDVSKARLDVCPWPAGEGFAVANDRAGRSELIRRLKRLRQAAIGLEASGGYEREALAALLGAGLAARRLNPLRVRRFAQSCGFLAKNDRLDAEAIARFLAAVPQREAEHDPAAAALAELVTARRQLCDELTRCINQAEHATQTVVRRLAARRAVRLKADIVLLDKTIAQAVADDSRLARKEMLLRSVPGVGPVLAHTLLALMPELGRLTGRQAASLVGVAPFDCESGAFRGQRRIAGGRRPIRDVAYMAALVGSTHNPTLAAFKQRLAQAGKKPKVVLVALIRKLITILNAIVRDNQPWRVA

SEQ ID NO: 259440 - protein, 427 aa, unidentified
MNTVRPIAVQNRKYVLSVGLDWADQKHTLCQRCWADGQRQQFEIGADPASVEAWLAQLKALAGPEGRVAVGFEQNRGALFAMLRAHTDWIDLYPLNPLTVSKFREALFTSGAKDDPLDSQLIEELLYHHLDRLRPYMAPEPELRELDLLCQQRRKAVDAAVACANELCSLLKVYYPLPLDLHEELRCSLTLHFLKRWPTLEQLKKAKPQTLRSFYYQHHSRSQSLITERLEKIARAQAVTEDLALIRPSVLSLQRLVNQLLTLQASVAAFDKAIQALFAKHPDHLIFESLPGAGPRLAPRLLAAFGSNRAALSHSSEMQKKSGTAPVLDRSGQAKTIARRWCRSKFLCQTFHEFAAHSIPHSTWAKACYQQLLARGKSHNAAVRALAFKWIRIIFRLWHNGTLYDESHYLKALENRRSPLSKKISKL

SEQ ID NO: 259441 - protein, 427 aa, unidentified
MPYRIAGIDVHKKMLAVVVSDVEVYGEYQFERRMFGSYPEALHSLATWLVEQEVEEVVMESTAQYWKPVWGALERYWKPIGQKREGAHPKSGTLHLAQAQSNRGRRGRKKDFPDAERLVKRLVANELVLSFVPDTEQRLWRTVTRRRYQLTRNRVRLQNRLEALLEEAHIKLSSFVTDLLGVSARRMLKALAEGETNPATLATFADRRLRATPEQLRDALGASTELDPVYRRLLKMMLDELQLIEDQISQLDQEMAGLLRLHQDAVQRLAEVPGLGADSAQQIIAEVGPAAANFPSGKGLSSWVGACPGDQESAGVNYSHRSPKGNRHMRRLLNQCANAAVKMKGSVFEIAYHRLVPRLGHNQAIGAIAHRLCRLIWLILHQEVRYEERGPAVSKRSKQKRTARMIRELRALGYRIEALNVQTVASM

SEQ ID NO: 259442 - protein, 337 aa, unidentified
MEFYAGLDVSMEETHICIVDRNGIVLQEVKAASTPQAIVEELAKAPACTRVVFETGRMAPMLYHGLIECGVPVVCIESRQAYQALRSLVTHKTDRNDARGLAQLARTGFFKPVHVKSLPAHAIRSLIVARKKLVGQRVTLENQIRGLAIVFGVRLPRALSPTFVGRVLAASDSIDGLSAAMRGLVAARDAVIAAVTAIDGDMKRLVRASDACRRLMTIPGVGQLTALAFTAAIDDPERFKRSRDIGAYLGLVPRRYQSGEIDYTGGISKCGDRRVRTLLYEAANVMLTRHKGPLKLKTWALAISKRSNMRKARVALARRLAIIMHAMLRDGTDFTAA

SEQ ID NO: 259443 - protein, 412 aa, unidentified
MQVIVERCCGLDVHQETVVACLLIGLTGARPSKEVRTFGTMTRDLEALCDWLKAAGVTHVGMESTGVYWRPVYAVLEGHFDLIVGNARHIRNVPGRKTDVKDAEWIADLVRHGLITKSFVPPAPLRDLRELLRYRRKLMESQAAERNRLLKLLETANIKLASVASDVFGVSGRAMLKALIEGNASAQEMAALAKGQLRRKRAELVLALDGKMKEHHRFLLAMQLRRLEAAEQDVAALDLRIAERLEPYRAQHALLMQIPGVDWVVAAVLIAEIGVDMSVFLSAYHLASWAGVCPGNHESAGKQKSGRARKGNVHLRTMLVGAAISAGHTKGSYLKDKYYRLKARRGALRAALAIAHKILVAAYHMLAKGLAYRDLGNAYLDQIGQRRTVANLQRRLERLGYHVTLQRTAEVV

SEQ ID NO: 259444 - protein, 411 aa, unidentified
MPNPLFVGIDVSSKDNVVCCLSNDDEKRPLSRFTVLNNRPGILELKQRINQLVQKHSFDQILFGLEHTGCYSTHAAMYLQHHLDFGCKDVNVYLFNPSLIKEFKKAHFLDAPKNDRVDAWYIASKLMAGHLPHPFTWSEPLMALQRLTRARYHLMQALVRESNFLMTNLYLKCSDYTLVFDNKLSATSLAVMEEFESAEALAEASLNELTQFLIQHGKNRFDDPQTVAKELQKAARSSYRLPKAMADSVNLAMASSIRVIRTLQEQLKSLKKAIEYHLDTIPQTLDSVPGIGPIFASGILAEIGDINQFENHKQLAKFAGLAWTQHQSGNFTANNTRLIRSGNRFLRYYLIEAADSVRMHDPVFAQYYALKKAEPKQYAHKRALALTARKLVRLVFYLLKTNQLYQPGGRN

SEQ ID NO: 259445 - protein, 349 aa, unidentified
MIIIGVDFHPEFQQIALLNTTTGEVEEKRLAHPDEAEKYYRALAGAGETVRIGMEASGHGGWFERLVAELQFELWIGDAAVIRAKRGRKQKADRQDAQHILQLMLKDDFPKIWVPNWENRDLRQLLWHRHRMVQARTRVMNQLQAVALNEGLHCKKKLWRERGRQQLESFALAPWASRRRHDLLELLDRLSPAIAELTQAIEREVENYPAAQRLRTHPGVGVLTALAFVLILGDAERFHCGKQVASYLGLVPLEDSSGNRRRLGHITKQGSSIVRFLLVEAAQVTVRSLPEWRSKYFHLVLRRGRKIAKVAMARRLAVQLFWMMRKEWDYEHVKKFGSHAGQPGNRHGV

SEQ ID NO: 259446 - protein, 345 aa, unidentified
MTDVTTIAIDLAKKVFQLCGLNGGNKMVFNRSVKRGQLLQVVREYPDALFAMEACATSQYWARRLMGMGFRVVLIPAQHVKAFTRGNKNDAKDALAIAEAAHRPGIHEVPVKSCHQQDIQTLLRIRSGYVESRTALVNRVRGLLAEYGMVMPRGVGRFRKALPEVLEEGENALTPRVRAAMGIQYQAFVELCDRIRAADAELREVARQDPICRKLMRLRGIGPMTALALYASVGGATQFKNARQFAAWLGLVPKHTGTGGKVTLGPMSKRGDRAVRTLLVHGARSVLTWAHRRDDAFSQWALAVAQRRGKHKATIAIANKTARMVWVALTRGLDALPRHHLSSAV

SEQ ID NO: 259447 - protein, 402 aa, unidentified
MAAGQLWAGVDVGKEHHWVCVVDDKGTAVLSRKLTNDEQPIRELISEIDAVGRDVSWTVDLTTVYASLLLTVLADAGKPVRYLAGRAVWQASATYRGGEAKTDAKDARVIADQSRMRGADLPVLHPDDDLITELRMLTAHRADLVADRTRTINRLRQQLVAVCPALERVAQLTQDRGWVVLLTRYQRPKAIRHSGVSRLTKMLGDAGVRNAATIAAAAVTAAKSQTVRLPGEDVAAELIADLAGEVVALDDRIKSTDADIEDRFRRHPAAEVITSLPGMGFRLGAEFLAAVGDPALIGSADQLAAWAGLAPVSRDSGKRTGRLHTPKRYSRRLRRVMYMSALTAIRCDPHSKAYYQRKRDEGKRPIPATLCLARRRTNVLYALIRHNRTWQPESPPITKSAA

SEQ ID NO: 259448 - protein, 309 aa, unidentified
MALKIVYKICCGIDVHKNFVVACIAKTDKQGITTYERHHFSTYTKGLKQLLKWLLDRNCKDVCMESTGKYWIPVYNVLEHDCSIVLAHPKYVKAIRGKKTDKKDAKWIADLFKHDLVAGSFMPPADIRQLRDLMRYRFKLTCFKSSEKNRYQNCLTVSNIQLASVVSDTFGKSSQKIIAKILENPDNTSFDIESLIHGSMKDKLPELELAIDGYITPEQAAKLKIIKEHFDNLESRKAELEELILALANPYQQEISIILTAPGFKNTFTAIGIISEIGTNMEAFPSAKHLCSWAGLTPTNNESAGKKKS

SEQ ID NO: 259449 - protein, 360 aa, unidentified
MAKARTLVGLDVHATKIVAAVLDAETGELQCFTLSGDVNEAAGLCAGLPRPVRATYEAGPTGYGLARELTRRGVQCVVAAPSKIPRAAGDRVKTDRRDAEHLVRLLLAGKLHAVRVPGPEEEALRDLVRAREAVRADLMRCRHRLSKLLLRHGIRFDDGQAWTQRHRDWLAEVALDWPAAQATMLDAQGAIDALAHRRDALDREIVALLPASPWAGQVARLRCLRGIDTLTAVGLCAEIGDFERFAKAEQLMSYVGLVPSEATTGQKRRLGAITKTGSGHARRLLVEAAWHYRPRPRIGKALADRHDGQPAEAIAVAWSAQQRLHRTWTRLEQRAKRRTIIAVAVARELTGFCWAVTRIE

SEQ ID NO: 259450 - protein, 361 aa, unidentified
MKRKVYVGMDVHKETIQIASLTSNTKDLVKEQQIKHEEVQIKKFIQKLKLEKSEIHCCYEAGVTGYPLYRYLKTLGVNCTIVAPGKIPRQSSDKIKTDKRDAIKLARLLRSGELESIHVPSEEDEAVRDYLRSRDSLRLDLGRNRQRLMKFLLRKGIKYSTTKYWTTSHYKWLNNLHFENEILQTTFNDYYSRVRVQEENLKAMDKKIQEIAESEPYQEKVGILRCFRGLTAMFLLSEVNDFKRFKTAGSFMSFLGLVPGEYSSGSKRKQTGITKTGSPRLRRILTEAAWQHRFSGTGSKVVVARRVGQSALVVSLAEKASLRLHKKFKNLQLRGKSPQVMITAVSRELSGFLWAAMNLVV

SEQ ID NO: 259451 - protein, 345 aa, unidentified
MKIVGCDLHTRYQQIAMLDQETGELIERRLEHESGEARAFYAALSSPVRVGIEATGHTRWFERMLAELGHELWIGDAAQIRASVVRKQKTDARDAAHLLELLLSERFPRIWRPTMAERDLRQLVWHRQKLVWMRNAAGNQLHALAMGEGVCRKKKLFTKKGRAELESLGLGVWASYRRQELLTMLDRFDGSLGELDRAVAEQAEQNAAAVLLMTHPGVGPVTSLAFVLTLGPVERFERSKQVVSYLGLNPREHSSGGRQRLGAISKQGNPMIRSLLVEAGHTAARLDGELRQDYQRLKLRRGSGVAKVAIARKLAVRMYWMLRGQASYAQLVRMQGSPWATLVTE

SEQ ID NO: 259452 - protein, 317 aa, unidentified
MTEQQTTFVGIDVSKARLDIAVRPGGRYWHCPNTPERFPELIAQLRAIAPTLIVLEASGGLETALAAALAEAELPLAVVNPRQVRDFAKATGTLAKTDALDAHVLAQFAEAVRPAGRPLPPAPLAALDALADRRAQLVKMQSAEQNRLASAPPCVRPDIQAHLDWLAQRIDITNRELRRLIESRPGWRAKDDLLQSMAGVGPVLSVVLIAAVPELGTLNNRQIAKLIGLAPLNRDSGKHRGKRRIFGGRAQVRSTMYMPARAAVRFNPVIKALYERLKAAGKPENVAITACMRKMLVILNSMVKSNTHWHQTAVPQP

SEQ ID NO: 259453 - protein, 353 aa, unidentified
MEHKYVGLDVHQSSTVAVVQDEKGKSVMESILATEAEAIRDFLRGLRGTIHVTLEEGTQEAWLYEIVKPVVAEVMVCNPRRNKLLAVGNKADRVDAQKLAELLRCGQLKPVYHGTPGVRLLKELVHSYDSLVSDTTRVMNRVKAIYRGRAIGCSGRDVYYQRNREQWLEKLTEPGVRQRARLLYQQLDTLRGLRREARKAMLKESRRHLAFPILKEIPVLGPIRIAQILAKVASPHRFRTKRQFWAYCGLAVVTRSSADYQFREGKAEKRKRAPMTRGLNPNFNHRLKYVFKSAALDGIHQAPFEGYYARLLVKGIRPELARLTLARKIAAVTLTLWKRGEPFDELKVSEQAA

SEQ ID NO: 259454 - protein, 347 aa, unidentified
MTIVEDARAVTGGVDTHLEFHVAAALDHVGALLGTAPFPTTPAGYQGLLGWLESFGPVGKVGIEGTGSYGAGLSKFLAQAGISVLEVNRPNRAERRRSGKSDPLDAIEAARAALGGKAKSIAKSKDGPVEAVRTLHVAKRSARTARTSALVQMRELIVTGPDQLRSRLRGLSICALTTEAARLRPARQGDPVLSATKAALSSLAHRVQTLDEELAELDARIEALLMRHCPDLLGLFGVGPDTAAALVVCAGDNPERLHSEAAWARLCGVAPIPTGSGQTSGRVRLHRGGDRQANAALWRIVMVRIAHHPKTTAYYHRKLAEGRSKTEIVRLLKRYVAREVYRYLPRS

SEQ ID NO: 259455 - protein, 349 aa, unidentified
MKHYIGLDVSMKETSICIVNEKGKVVYEGKEKTDPSLLTHHLKNKNLKIEKIAMESGSLSHYLISEMQKLGLSVTCVDARQMSKVLSVKVNKTDRNDARGIAEALRSGYYREVALKSQKNVETSTVLGSRRMLVQQKVSLKNGIRGFLKTYGICVPVKGKRCFLQKVRDVLEEQPSYIQKSVEALLTSFEKLDSEIIGLEKMIKELAKDDEDVKLLITIPGVGIITALSFKVAIDDPSRFQDSRNVGAYLGMTPKQYSSGETHRQGGISKCGNPAVRSLLVEAGTVMLTRTKVWCKPKAWAFKLARKKGTKKAAVALGRKLGVIMHRMLVTREKFRLGDPEEEQGKKAA

SEQ ID NO: 259456 - protein, 383 aa, unidentified
MQITTIGVDLAKHWFQVHGVDADGKIVVKRRLCRSEVIEFFKALDRCLVGMEACATAHHWARELMGHEVKLMPPAYVKAYVKRNKNDAADAEAICEAVTRPSMRFVPVKDADQQSVLMMHRARNLLVRQRTMLVNALRAHMAEFGFTAPQGPCHVDRPVAAIEEENSALPELARSILRLIVAQLNDTQAKVRQLEAKLAQWHRNSRVSKLLATIPGVGIMGASAIAATVCDPNLFRSGREFAAWLGMTPRQNSSGGKEQLGRTSKRGDKYIRCLLVAGAVAVLRHARTRATKDAEWVRGMLARKFKWGRTGVAIAGASGLDVRASGLRAESATNVSCIDIWYNSNLRRKGRPRRRRKVPIFLTDEQQTNGQKLGLTRTAGAYT

SEQ ID NO: 259457 - protein, 433 aa, unidentified
MEVMHERVAGLDVHKAMIVACVRRIVGGKVSRECRTFETTTAGLEALLGWLTEAGCTDVAMEATGVYWKPVWNILSDGAFELIVANAAHIKNVPGRKTDVNDAMWIADLVACGLIKASFVPEEEIQELRSLLRARKQLTREQTSHIQRIQKTLEEANIKLDSVISDILGISGRRMIEAMIAGVRNPLRLAELADRRIKASPKALYDALHGRLTDHHRFMLKLYLGQHDSLSEAIARIDRQVHGLIIRMDAEVKAGQATFRALIILLCSIPGISTLAATVILSEIGRDMSRFPTSGHLVAWAGMCPGQNESPTGQARGLKAHGKRKSSRLRKGAPWLKTMLVQCAWAASRKKDSYYKAQFNRLRGKRGPKKAICAVAASMLTAIYHMLKDGTFHQDLGADHFDRRSTEVKAKRLVAQLTKLGFQVQLQPLAEAA

SEQ ID NO: 259458 - protein, 353 aa, unidentified
MQRPEAGSVVVGVDTHKEVHVAAVVDHDGNLLDESSFPTTRQGYRMLERWAESFGPICRVGIECSGSYGSGLMRHLLKSGIEVLEVTYPDKSVRHKRGKDDFIDAEMAAEAAFTGNRTVTPKTRDGMVEALRMLHKTRQTAVRSRRIALQMIDGQIVSAPEELRDQLRGMTRMQLIRHLVATRPDKTAFRTPDGAARISLKHLAKRYVELDDEVSELDDAIAAILADLAPKLIALPCVGPQTASQLMITVGDNPGRIKSEASFAMLCGVAPIPVSTGMKSRHRLNRGGDRAANSAIHIIAVGRLRTDERTRAFIDRKMSEGHTKTEAIRCLKRYIAREVYYVIKEQNRSINSA

SEQ ID NO: 259459 - protein, 450 aa, unidentified
MNLYIGVDIGKELNYVSFLNEKGAEIDKRFKFKNNYLGFLKLKDNIDKLTYDYNFNYNDILIGFESTGHYWINIDWFLTEKLNIKTVMVRNDAVRHTRALNSQGKGKNDSLDSRTIAECLKNGYYFDVQGRKEDYIVLRRLTRERSELEKEIARYKNRFRAWLDVNNPIFLENFSNVFSSGALALLKVYPSPLDIIKDSYLEVREKLREVGYNRTNKTLKIYYEEVEIYKNIINGISYADRLEISEYIEALEMYIKKKENLDERIEALMNFLEGKVYTSLSEIKGMPKAQVASLLAEIGNVNNFESARHLISYAGLNVQGEGSGKNKGYSWISKTGNRRIRKEIYVITFTLVKHNDYFRGLYCYYKSYKRANEKSNKAMLIALACKILRVIYGMLKYNMEFDLNEMLKNYDFRNINKEKFIDEFLGSSEKKQKIISQEIEDIFLSNRKSN

SEQ ID NO: 259460 - protein, 421 aa, unidentified
MKAWNEVTHFAGFDWAKDHHDVLVLDNTGKIAAELRFEHTAAGWSLCQQKLAAFPHLAIAVESGHGAAIERLMVLGYRVYPVHPRSSKSYRTRKLPSGTKTDHFDCWALADALRLEGESWHMLNTPEPLVQRLRLLCRDEVALIEQRTALINQLQQALYEYYPAALAAFDDWTSLSAWAFVARFPTPQALVKAGKRQWEKFLHTQKLYHPEWYQKRLAIFAKAAEFCGPEAVIAAKSVLATALVKLLQILEQQLAGYRLLITECFKQHPDYHVFASLPGAGPKLAPRLLAELVALQPLADQPQVLQCLAGMAPVSYQSGKVSVVYLRRQCNRFLRATLHLWVDLSRHYCDWARIYYEAHKKKGQSHACALRCLGMRWLKIIAAMIRSHTPYDAALHARSQLQHGSWVLQLQPKLSITKDAS

SEQ ID NO: 259461 - protein, 297 aa, unidentified
MSTIADGDDLRVVAGVDTHKDVHVAVVLDEVGRLLDTASFPATARGYRRLTGWVTGFGEVLAIGVEGTGSWGAGLSRHLRARGLCVIEVNKPNRHNRRRRGKTDPIDAEAAARAVLAGDATATPKAGDGPVEALRQLRVARAGALKARTAAANQFHSICDTAPEVVRGQLRGLPTRTKMTVAGRYRAAGALTPTSAAKTALHCIARRWAALDTEIRALDRDIKTILDTIAAPMLARHGVGYETAGALLCAAGDNPDRLATEASFAALCGTSPVPVSSGRTNRHRLNRAGDRQANAAL

SEQ ID NO: 259462 - protein, 323 aa, unidentified
MSSSSETESRCYVGIDISADRLEVQVLPTEQRQSLVYEQAGVTHLVGFLQQLKPALIVVEATGKLEMAVVASMAAVELPVVVMNPRRIRDFARSLGLLAKTDRVDAYVLARFAESVRPQPRPLPTEQQQAMQELVSRQRQLVEIRAAESNRLRRTRTTAVRHNLQIHLAWLDKQIQEMDRQIRQLITASPCWRQKDQLLQSVPGVGPKLSSVLVAHLPELGQLNRRQIASLVGLAPFNRDSGRWRGKRFIGGGRSKVRCTLYMGSLVAAYHNPVIRALRQRLENQGKPFKVVLTACMRKLLVILNAMVKNGTQWNSTSCRTFA

SEQ ID NO: 259463 - protein, 353 aa, unidentified
MSQQNARIAVVGIDIGKNSFHIVGQDGRGEIVLRQKWSRSQVEARFANMSPCLIGMEACVGAHHLSRRLRALGHDARLMPAKYVRPYSKGQKNDFRDAEAIAEAVQRPTMKFVATKTADQLDLQALHRVRERLVSQRTGIINQIRAFLLERSIAVRQGIRFLRAELPRILAMPPDVLSPRMVRIVEDLACDWRRLDERVEGLSNEIETIARQDAGCERLMSVPGIGPIISSAMVAAIGAGDVFTKGRDFAAWLGLVPKQISTGDRTILGKVSRRGNRYLRVLFVQAAWVVLIKPKIWERHGLKPWLEAARKRLHHNVLAIALANKLARIAWSVLARGRAFEVRKINQAAPQPT

SEQ ID NO: 259464 - protein, 350 aa, unidentified
MQGNGRWIGLDLSKKTYEMCYFDQQGKVGRSGGETTKDGRAKLYAKVKPEDIVAMEVNSLAFVMEKEMRAIGCTVVILNASQLSVIYASTKKTDKEDALKLARLVKIYEKEDLPIVDVPTDKEYYRRKLTKECKTLKDDRTQEINRLHALFLQCGITTMKRSNLQTDANRQKVLPQLFGYEVGQAKRVCERLTLLDAQIKELEQTITKECKADKDIERLKTIPGVGDKTALAFAAYVGDGKRFNNGDEVANYLGLVPRVDCSGSINRYGHITKKGNRIVRALLYQAAWSIVRSKHGGALKAKYFYMTEHGKGKKISITAIARKMAKLMYLIMKNKGEEYKELPAPASRAG

SEQ ID NO: 259465 - protein, 345 aa, unidentified
MYRTKVGVDLAKQVIQVCIYRNKKVQSNIEMTPNEFLCWLINHKPATIIFEACGTSNYWKQKAIELGHDARLISAKLVATVRQNQKTDKNDALAIVQAASLPDVTFIGGKTIEQQQLQSIKRFRELAVKHQGACQKQIVSLLLELNIRISTRKGGILCAIDGVLEDASNGLSAECRVAIDTAKEYLRISIEAVQRYDECLEKSVTAHADCKKLLKLEGVGTMNAINLYLALGCWDIGVFNKGKDASACIGLTPIQYSSGGLVKLGSIGKHCKNSILRSQLICGAMAAVNQAVIREAKTKKDVWIKGLVERRGKKCAAVALANKTVRTAYAMLTKGTEYRAELLAA

SEQ ID NO: 259466 - protein, 347 aa, unidentified
MSPDGMRSNKRGRRSSHGMSACVCGLDVHKESTYATILTREGKIVNQMKMSNEKVLPYLSRFNICKVAMESSNQVAVLYRKLESKGYTVIVSHPRKTRYIAEAKIKCDRVDSNVIAELTRLDALPLAYMPEKKISNLREQVRRRAFLVRERVKLRVKVKSVLTYEGIKWPTDYGLFTEKGVLWLHSLNLEPVESYLRVLGPLNDEIKLVSSKLKGIADDDEDMKLLMTIPGIGYYSALLVKSEIGDINRFPFGERLCSYAGLVPSTFASGSMVRHGHITKEGSRWLRWAMIEAAQVHVNRYDTAITRAYHRIAEKKGKQVAVTAAARRLLMCCFSVLRNKKPFHDQA

SEQ ID NO: 259467 - protein, 388 aa, unidentified
MTPTSGSLSHPITLDYENTLVLAIELSKASWVLAAQIPGLPRIKAKQTVEPRTEALLAAIDGYRARSRAAGRTIERVVAIYEAGWSGFWLARWLVRHGVETHVVQPSSVPVDRRARRAKSDGIDAELLLRTLLAWFRGEPRVCSMVPIPDEADEDERRRVREREDLVAERVSLVNRIGAVLATLGVRDYNPLRRDRRARLEALRTALGDPLPPHARARILRMLDRLELVCAQIAELERMRDAVLEEEAPDKAEGMIQQLAGLRGIGVQSATVLVREAFVREFANGKTLGSYAGLTPTPFSSGTTEREQGIGKAGNRRLRTVMIELAWLWQRYQPGSAQASWFRERVGGTGRRMRKVMVVAMARRLLIALWRFATQGVVPEGAVLNPAP

SEQ ID NO: 259468 - protein, 346 aa, unidentified
MKEHSHDDSVSVVGIDLGKNAFHVHGVNASGHVVLKKQVTRKGLVQLMSQLPACLVGMEACGGSHDWARRLMAMGHDVRLMGAQFVKPYVKSNKNDFADAEAICEAVRRPNMRFVPVKGMEQQDVQSIHRARSLAVSHRTAQANQIRGLLAEYGIVMPQGMASLRGRLPEILADADNDLTPMFRDLLAGLMDEVHRLDKRVTSYDEQIRRLAKASDACQRLMTIPGMGAMTATALVSAVADAKAFGNGREMAAWIGLVPRQCSTGGKSKLLGISKRGDVYLRKLLVQGAQAVLRHAEGKPDRQSRWLCDLVARRGKNVAAVALANKNMRTAWALLTRHETYRPAMA

SEQ ID NO: 259469 - protein, 324 aa, unidentified
MIDGILGIDVSKNTLDASMSSRNKVRARSFANSSDGWRDLLDWLITQKIRRVHACMESTGRYSLGIACALYEAGHIVSIVNPAQIRDFARTKLGRNKTDGVDAAHIREYCELFKPKPWAPPSAAHRRLGELQTIRAGIVAGLTEWKNRKSSGMIDAVAQSLANVTISHFTSQLRAVDEAIAQTIDNDSGLRRKRDLLLSINGVGETLAGVVMAELPGPDELRSSAEVVAYAGLNPRQHQSGTSIDRATRISKIGNAVLRAALYMPAMSAMRYNPAIVALVGRLKSRGRLKPKQILVAAMRKLLVLCFGVLKTGKPFDPAIAMGR

SEQ ID NO: 259470 - protein, 408 aa, unidentified
MGRAAEIVAPSSSLRTDGGFPVAQVNDLSRSLTAFDPISTLVVVVEMSKASWLVSGVVPGVERQPLKKLEPDATALLRLIERWRNEAVRAGHPISRIALAYEAGRDGFWLARWLIARGIDAHVIHSASVAVSRERKRAKTDRLDAAMLMRVFLGWLRGERGHCGMVAIPTMEEEDARRPSRERESLVDERSRITNRMKSALARLGIRGFKAHLRKAPERLAGLRTAEGTGLPANTIEEFRRDMARLALVREQISLIEKTRAERLERAPDTGPHAMVRLLARVIGIGIETADMLVREILSRKLRDRRAVARYAGLTGSPDESGLKRREKGLAKAGNARVRRGLIQLAWRFLMFQKNSALAQWYRTRTEGPSGARKTTMIVALARKLLIALWRLVTTGEVPDGVELRPAA

SEQ ID NO: 259471 - protein, 430 aa, unidentified
MKSNTQNAKIEAITEKTLVLGIDVGSEMHYARAFDYRGIEYSKKPFKFSNTEAGFVTFKEWILDLKGRHGKDKVVPGMEPTRHYWFNLGKFLQDNEMKPVLVNPHHVKKSKELDDNNPTKNDRKDPKVIAGLVREGRYMIPYLPDGVYADLRTASNIRFQLQAELTRIQNRISRWFNIYFPEYRTVYGKPDAKSGMLLLKAAPLPEDILTLGIDGVNQIWRDAKLRAVGKARAKTLIEAAEHSVGSKEGTVSARMEIRMLLEDYESRNIRLQEVMTLIEELIKQIPMAEKLLEIKGVGIKTVSGFLAEVGDISRFNNPKELQKLVGLALVENSSGKHKGETTISRRGRKRLRYLLFEVAMSLVAKNPEFRELHNYYTTRRLNPLKKMQSLMAIAAKLIRVFYAMLTKGVDYDPKKMVSDIKRPAVYLQAA

SEQ ID NO: 259472 - protein, 412 aa, unidentified
MKRIYQRCCGIDVHKATLTACVRVHGAGRKLSQEIRSFGTTGDELLSLHDWLMTHRVSHVAMEATGVYWKPVFYVLEQGFTLLLVNPADIQRMPGRKTDVSDAAWLAQLLENGLLRPSFIPPRAIRELRDLVRYRSELKHDHTRVANRLHKVLQDADLKLSSVMSDILGVSGRQILRQLAAGHSDPAALAELARGSLRAKRPALRQALTGRFSEHHAFLIGQALTELDNLEESMSALAARVEQHLVPFAQQIEQLTTIPGIKRVAAAVILSEIGTDMSCFPDTAHLASWAGMAPGNHESAGKRRRAKARHGNRWLRTILVECGHAAGKTRNTALAAIYRRMIIRAGRKHAAFVTGRHILNIAYHLLTQHNTYRELDPSFFEQRRSEHLKRRCLDQLRNLGFQATLTPLPKAA

SEQ ID NO: 259473 - protein, 368 aa, unidentified
MSDIIRIGVDTSKSVFQLHGVDAAERPVLRKKLRRRDFLSFFAQLPPTKVGLEACGGSHYWARELMALEHEPKLLPAQHVRPYVRRNKNDKQDADAVCEAMSRPRMSFVRIKSAEEQAAQMLMTTRQRLIDYRTQLINTIRGHAAEFGLTAAKGPAHVEPLLARLAKDVTVPALAKELFAIHGQEYDRLKIELREIEAKLKVWHRGNEMSRRLAEVDAIGPIGGCLLAIKAADPRAFRCARDFAAWIGLTPKDHSTAGKMRLGVITRAGDEALRRTLVVGATSVIKQVRNGKAHPSPWLRDLVARKPPKLAAVALANKVARIAWKLMVSGERYDAARAGIVSPTARVAPCSRRQGRCAPPAAVACGQP

SEQ ID NO: 259474 - protein, 433 aa, unidentified
MRQDPRAFVKVNVPHIQSRKEVILMPNSLLVGIDVSSCDNKIRLLDSSGNSLSKFTVSNSHPGAQTLSSKITSAMTLNRFDSLVIGLEATSVYGEPLVHFLKQDAGISSFKPSIHVLNPKQVNAFKKAYPDLPKTDDVDAWIIAENLRFGRISQEVYMDDKVTALKKLIRARYYAARNLTREKNHFLTHLFLKFSSLTQEKVFSDKFGATALAIIEEFLSVDEIAYMPIEELSAFVNEKGKGKFDVPEDIAKLIQKAARSSYRLPKTVNDSVNQILAISLVAIRALKDQLKLFDKAIEEQMKVVPNTLTSVKGIGPVYAAGIIAEIGDINRFKNQAALAKFAGICWSKYQSGKYTADNTHLISSGNRYLRYYLMEAANKVRVHDPEFRRFYELKYRETPKTPHKRALALTARKLVRLVFALLQSNRLYIPPKE

SEQ ID NO: 259475 - protein, 342 aa, unidentified
MQISIIGLDIAKHVFQVHAVDAEGHAVAQVRLRRAQVLDYFAKVRPCLVGMEACATAHHWARELVGLGHEVRLMPPAYVKPYVKRNKTDAADAEAIAEAVTRPTMRYVAVKSADQQAALMLHRVRELLVRQRTMLATALRAHLAEFGIIAPQGIHRVEKLAAEVHSPAVPALAREALMLLVDELAGIWRRIEAIEARLVALHRADQVSRRLASIPGIGPITAMAIANSVPDPTMFRSGREFAAWLGLTPKSHSSGGKDRLGRISKRGDRYIRHLLYIGAGNAVRFAKARAATGEAWIEALQKRRPPKVVIIAVANKMARIAWALMMRGGTFRSPAAAALAAV

SEQ ID NO: 259476 - protein, 435 aa, unidentified
MIDTILPGFAALDLGATKLFAATAETPVKVFGTFTCELRALCAWLEQHQVRAVAMEATGVYWIPVHDLLQAKGFKVTLFHGAHARNLPGRKSDVSDCQWHAMLHSHGLLRACFIPAEPIRKLRSFYRLREDHLSMAGAHIAHMQRALDLMNVRLHHVLSQLHGVSGLRVVDAILAGERDPAVLSLLCETQVLKKKKAQVLASLEGDWQEHHLFALRQALEAYRFYQAQINACDGQIEALLHALTAELPVQAPRPGQKIKIVRHNAPAITNLHGQLLTLAGGCDATLIPGLSPLGWMKLTGEVGTDLSAWADEDHFTAWAGLAPQRHQSGRRRRRLPRPKPVVGQIFREAVLSIAKSKHLALGGFYRRIKGRRGAAVAVVATARKLAVLFYRAMTRGLEYVERGLAQYEAAYRKQSERHLRKMAARLGFTLQPKNT

SEQ ID NO: 259477 - protein, 347 aa, unidentified
MRFYTNQHKYYCGIDLHARRMYVCIIDEKGEVREHRNMRTDREAFLKTIGPFREDIVVAVECIFTWYWIADLGQSEGIPFVLGHALYMKAIHGGKAKNDRIDSRKIAVLLRGGMMPMAYVYPARMRATRDLLRRRNHLMRKRSELYVHIQNTNIQYNLPDKFGPISRPRNREGIAGQFEHPSVQKSIAADLEMIRTYDGILSQLESSIVRMANHHDPASYTLLQTVPGVGRILALIMLYEIEDINRFESVQDFASYSRLVKCAKESNGKKCGYGGAKIGNVHLKWAFSEAAVFFPKGNDPAKRLLDRLVKKHGKSKALSILAHKLGRAVYFMLKNGEAFDQKKFLNT

SEQ ID NO: 259478 - protein, 337 aa, unidentified
MEMLYAAIDIHKRVFQAAVLDPTTGEIAEARFPATREALHEWAMPLQGTVAAVAVEATCGWRWVWRELSALGFEVRLAEPAQTRALKGRKRKAKTDRLDARWLALLLAKEMLPVSWIPPEDIQRLRDLTRLRQALRHDRTRWAQRLHAILQHEGWPCSRGQLLSTRGRRWLDGLALDRHVRALVDAHLAMIDATTEQMTEIERELRRLAPADRRLVALQQIYGVGPVVACHLLAEIGDARRFRRAEQIVRLSGLDPVVLESADSKRRGKLSKQGSPHLRWALVQAAQHAARRPASSPDGDHYLALRERVGSQRAALSTARKIAKRAYHVLAALEDAA

SEQ ID NO: 259479 - protein, 376 aa, unidentified
MVPVACRPANKKEMIERVISVGIDVHKKRCQTCLKDEKGRLIEELSFQNNQEGITQLRALLTSYPEAKVALESTGNLWTRIYDELDKEPTLKVTLANPYKTRIIAEAKIKNDRMDARVLADLVRADLVAESYVPDAEIREQRALLRQRRAFVEDTVTIKNRIHNQLDKYGLKPSFTDIFGKQGREWLRNLQLSPSEKTILNVNLDQLQNIEHAIETLTTQIAKEAVNRPDVKLLMGFTGIDYYSAMLLINEIGDIHRFPSADRLVSYAGLAPSQRQSADHTLHGHITRQGNRYIRWILIEAAQHASRFDPQLKPFYERVAARRGRQRAIVAVARKLLIYIYQVLAKQEPYRAQRSDLLEKKLKRLTQKASASLQAD

SEQ ID NO: 259480 - protein, 394 aa, unidentified
MKLVGIDVGKNSHHFCVMDKETGEFNVAPSSFSNNKEGFDFLINSLKPYSKKSILIGMEDTGHYHVALLKFLLSNGYTVALINPKTTDLTRKMEGGITKNDKLDTITICDVLDTPERKKQYRITKVDRFDLYEQRQLTRHHHNLKEELNVYCNRLQKSIDLVFPEFNTLFGSKYGVVYMNLLKTFGSAEAIASTDIRTIRKCFQIEGRGNRISLTPEKLKECAKNSIGISSEVETIQIKHLVSQIMLIKEQIAEIDKKIEEFSITNNSPILSIPGISHFSGTSILAELGDIGNYSKPSQIIKFAGVAPYHYESSQYNAQHTGITKKGSKYLRKTLYQIILPVIKYNPAFKKYYLLKISQGKGHRCAQGHCIRKLLRIIYHLLETGQSFDPALLR

SEQ ID NO: 259481 - protein, 342 aa, unidentified
MNYYAGIDVSLEWSSVCVVDGAGKIVGEAKVASEPEALIDWFGKLGLSLTRIGLEAGPLSQWLYAAMRRAGLAVELLETRHVRTALKTMPVKTDRNDARGIAQLMRLGWFRPVHCKSMEAQETRALLTARKLVQAKLHDINMSLRGILRGFGLKVGPTTPAGFEARIRELVHGHPSLQTIAQALLTVRTALRRELDGFERQLHAVARNDIRARLLMSVPGVGVVVSLTYSSAIDDAGRFQSSKNVGAYFGITPTRYQSGETDVSGHISRIGDAGVRAALYEAAHVILTKPVKGCTALKSWAMRIAARGGMKKAKVALARKLAVIMHRMLVDGTFFIDAAKAA

SEQ ID NO: 259482 - protein, 326 aa, unidentified
MNNGAVVYIGVDVSKASLRFDAGSCFSGDVKNTPAAIRRALATLAGKLPERSSPHVCFESTGRYARNLSGACAAAGIPASTLNPHKVRLYARSMSVAAKTDPVDARMIRLFAEHRRPRPDAPLREGGEESRELAGMRALLVKQLTALLGFLEGAGAASVRKIARAQVKALVRKIAAVDARLVELRDADADTAGVCSELVKISGVGELTAMLVCALVPELGTLGRRRAASLAGLAPHPDDSGTIRAPRHICGGRFNVRRVLYMASLSAAHFNADLKPVYERLVGAGKPKKAALVCVMRKLFAHMDRVAARWLRERAAAGMPPTPMHA

SEQ ID NO: 259483 - protein, 344 aa, unidentified
MAIVGGLDIHRRQITFDYLDTGTGELRRGQIAPGDRAHLRAWLARFAGRDDVVFALEGCTGWRYVSEELAAAGIEPHVAEPADTAALRGRKRHAKTDKTDSRHLRQLLADGRLPECWIPPGHILECRALLELYHDLREEHTAWVQRIHAALFHQGAPQLAGQSLRTGDGLAALASAAGQLSPAGQLQVATALDMLAAVEGHLDVLRRRLLAAARRLTGAQVLTARLYGVGPVTALALCCWLGGAGRFSSARKAVRFAGLDVTVFSSDGKRSAGHLSRQGPEVLRWCVYEAGKTHARGGAPDHRYYASVKERIDGKRAAISQARKILRQAVHILAELGDDALTMA

SEQ ID NO: 259484 - protein, 352 aa, unidentified
MPWVSWIARRSFQTRTVAGAAYASSNLLGWDFMKPNEKTTKVFVGVDVSKATLDVYHPDTNQVVQIENSDEAIGVLCSMLQKKKRRIMVVMEGTGGYEYLLVKHLASHEIEAAVINPKRVRDFAKGIGLDAKTDPIDAKVISRYAEVVEPKPMATKSEHELKHGALVARRNQLLELVNQENNRLKQSWDEDAKQSIRNVLEILKNELKSVDSQLAKMIKVDTQNHRKIEILESAKGVGPVMISTVIAELPELGNLNRGEVAKLVGVAPINRDSGKKSGKRFIGGGRGQVRRVLYMATIVAIRHNPAIKKFYSHLKSQGKASKVAIVACMRKFITILNFLIKTDQLWQNKVSV

SEQ ID NO: 259485 - protein, 327 aa, unidentified
MNITTIGLDLAKLFFQVHGVDAHGKACLRKQLERAEMMKFFAKLQPCLVGMEACGSAHHWARQLTELGHTVKLMAPQFVKAYVKTNKNDAADAEAICEAVSRPNVRFVPVKNASQLSLLSLHRARQKFVAERTAQANQIRGLMAEFGLVINKGMAAIERQVPEILEQADNGLPERSRALFARLFEHLRVLDRQVRELDADIKTCHAEDSASQRVAAIPGIGPLTATALVASIGDAKTFHNGRQLAAWLGLVPPQNSTGGRTTLLGISKRGDTYLRTLLIPFRAAEAQNTSRAGRRLAGETCSATQRQYCGRRSGQQKRSYCLGATRK

SEQ ID NO: 259486 - protein, 392 aa, unidentified
MVFLGIDIAKTNHVACAVDETGEKLTRPLPFKNAEEGFEKLAAWLEGVAEDPCDAFIAMEATGHYWMACFSFLAAREYKACVVNPMQVKAMRKLKGRSRVKNDPIDSWLIAETLRLGEAVETKMATDEVQSLKTLTRYRQALKQELATIKTQCICVLDSYFPEYAGHFSDPFGAASLAVLKKCPMPEDLGRVRASTLAKEMSEASRGRISGEKAAELKAAAKKSIGVKLGADAASFQIKSMIGQMEFLDETISKVEGRVADLLMAIEPLIVTVPGVSTATGAQIVAEIGDVRRFRNASAIVKYAGLDSGVSQSGQFEAKGEPITKQGSPYLRRSIWLAANQCRRFDPTMKAYYDKLRAQGKCHRVAVTACARKLCHIIYAIMRDQVAYGANR

SEQ ID NO: 259487 - protein, 395 aa, unidentified
MSAEGEAIRSNDYRKDTTVKAPSTRPAAVLGLDVGKSSHWACLIDRDGEVLDSAPVRNREAELDALFASAPADTLVVVDQFRNIGSLAVRRARAAGLGVAYLPGLAASRAAGLFAGEAKTDERDAAVIARTALGVPDSLSGVPGRGEALEAARALSSQRDHVVACATRDKNRLRAVLLESCPALEAAVDLSDRRWLELLAGFGGAWGIARSGAEGPRAEAAGEAAAASTAPPPALVEAENRQVRFLAARISEALDEAGALEAETAALLEGDETYACLLTVPGIGPRTAAQLAVSVDIGRFPDHDHLASYCGIAPRVRSSGTSVRSVRASRRGDARLKSLLIFSCNSLVRSSGRYGEYYRACRARGMGHGRALKAVARKRLRAIYAVMRDRVPYRE

SEQ ID NO: 259488 - protein, 340 aa, unidentified
MDDYIGLDVSLKETAVSIRRDGKRVWRGKCPSDPQLLAALIRKHAPAAKRVVFETGPLSVWFFHALAAEGLPAICIDARHAKAALDMAANKTDANDADGLAHLAEVGFYKEVRVKSFDSMLTRTLVAARTRLVRIGTELSNQIRGLMKTFGLVVPAVMGGKFEHHVHALLADHTDLGQIIRPLLDAWHAVRLRAAELGRKLLADARRSAACQLLMSIPGVGVVTATSFVSAIEEPTNFKHSRSVGAFVGLTTRRYQSGEIDYDGHISRRGDSHLRGLLYEAATVLLTRSRSECDLRKWGLQLRERLGFKRATVAVARKLAVIMHSMLITGEPFREKSAAA

SEQ ID NO: 259489 - protein, 388 aa, unidentified
MQTVADRPEAPTAIRTDLGAIFVSLELSRSTWLITSLSPGGGEKMSKQVVRGGDVAGLLERFARLREKARARTGKVFPFVVIQEAGLDGFWIDRALQNEGIESHVVDPASIATSRRRRRAKTDGIDGEALVRALLAYKRGEPRVCAMVKAPTPEEEDRRRLCRERKVLIGERVQHVNRVKGLLFSQGISGYEPLRRDRRERLDTLQTGDGRLLPVHLKAQVCRELDRLELLLEQIKAVEAERDVLLAAQQVAAPAPAAMLLDIKGIGPEFAAILWSEGLFRHFDNRRQVASYAGLAPTPWQSGSVDREQGVSKTGNPRLRTTLIQLAWLWLRHQPHSALTLWFVERVRRNGGRLKKTTIVALARKLLVALWKYVTAGVVIEGAVMKRT

SEQ ID NO: 259490 - protein, 422 aa, unidentified
MKVFKIDDFAALVGIDWADKKHDVCEMPIDTRHYQFSIISSKPQVLHDWANGLKKRYPNKQIAVACELKKGPLIYALSKYEHITLFPINPSTVAKYRKAFSNSGAKNDPSDALIQTEILTLHMDKLVPIVPESSEIRTLGQLVEYRRKLVQDRVNLSNKVTATLKNYYPQALDWFKEKDTVIFCDFIAQWPTLAEAKKARKLTLMKFFNRHNSRYPSVNEKRIEEIKTACSLTDDPGVIEPNAIMVEVLIAQMKVLLIGIEHLDKAIKVRYKSQTDKRIFDSFPGAGAQLAPRLLVAFGVNRDRYDIADEVQKYTGVAPVIEQSGQKKWVHWRYSCPTFLRQTFVEWAGLSIRYSFWAKAYYEQQISKGKPHNTVIRALAFKWIRIAFRCWKNNTPYDETTYLNALKKRGSPLLKFMVSEQI

SEQ ID NO: 259491 - protein, 339 aa, unidentified
MNKLYGGIDLHANNSVVVVLDEEDQVQYRKRLPNELEQILQQLAPFRAHLQGLVVESTYNWYWLVDGLQAEGYCVHLANPAAMQQYAGLKYTNDDTDARWLAHLLRLGLLPTGYIYPKEERAIRDLLRKRSQLVRQKTANLLSIQNLLTRNTGQALKGTQIKQLTPSTVRALVDLPEQALALEVTVAVMQHLAEQITQVERAVHARVKLRPTFQSLLTVPGIGQTLALTIMLETGEIDRFPTVGQFASYCRCVGSTKLSNGKRKGQGNPKNGNKYLAWAFVEAAHFAIRYEPQIAQFYQRKRAKTKVVVALKAVAHKLARACYYLMRDTVPFEVTRAFA

SEQ ID NO: 259492 - protein, 418 aa, unidentified
MNEDGNTRGSRRYVALDIHKKYCVIGGVDREGRVVLHAVRVEHADLEGWLKKNLRATDHVVLESTTNAWHVYDLLEPLVERVMVANPAKVKQIANARVKTDVRDTFILARLLAANLVPEVWVPAAHIREMRQLLCQRRQLVETHTQIVNRMHSVAHRHHLQHERGKRFNEQNTAWQKDKRLSKVEQFQLELEMENRASMEKQIQRIGREVTKMCHQKPWAESMTYIMQLPGFGVITGMTALAAIGEVQRFGSAKHLASYSGLTGGLDQSGTHLVQKGITKAGRKELRWAMVEAAQRAVKSDPHWKRKFQEMEKRMHRNQAIVAVARQLLELVWYVLTRRQPYRHFSQERIAYKYLTWAWQMDDEARDGLTRQQFTRYYLMRLGIGHDLTRIALDPKHPRKIASEAELLTLRPELNHIE

SEQ ID NO: 259493 - protein, 405 aa, unidentified
MTEVVVGQQLWAGVDAGKAEHHCMVIDAEGRRLVSQRVANDEPALLELIGAVTALAGGGEVTWAIDLNAGGAALLITLLFDRDQRLLYIPGRTVYHASGGYRGDGKTDAKDAAVIADQARMRRDLQPLRVGDDLAVELRILTSRRTDLVADRTRAINRLRAQLLEYFPALERAFDYSKSRAALILLTGYQTPDGLRRAGAARLAAWLRKRKARNADVVAATAMEAANAQHTTVAGEQLAAAMVARLAKEVMDLDTEISDTDAMIQDRFRRHRHAEIILSLPGFGVILGAEFLAATGGDMSLFASVDRLAGVAGLAPVPRDSGRISGNLRRPRRYDRRLLRACYLAAQIAIRTDPASRTYYDRKRAEGKTHTQAVIALARRRLNVLWAMLRDHKPYQPTAPTAAAA

SEQ ID NO: 259494 - protein, 411 aa, unidentified
MSVRGVVVSVQSAPATSSTIVVAVDVGKTSALFSVTNAARHQLISPTEFAMNRSGLMCTAQRAMAVVPASGQVKVAVEAAGHYHRPVLDYRWPDGWQVVELNPAHVAEQRRVQGRRRIKTDVIDLEAITELVLAGHGRLVSDRDSVFGELSAWAGHRSRRVATRTATKNQLLGQLDRAFPGLTLALPDVLATKIGRLVAAEFSDPARLAALGPNRLIRFAAARHVRLRRPVAERLVGAAREALPTRDAVIARQILAADLNLLADLDAQIQAAEDELAVLLPRSPFTTLTTVPGWGVVRVSNYAAALGDPVRWPGPRQIYRASGLSPMQYESAHKRRDGSISREGSVALRRALIDLGIGLWLTEPAAKAYAGGLKARGKRGGVIACALANRATRIAHALVRDHATYDPTHWS

SEQ ID NO: 259495 - protein, 378 aa, unidentified
MPSSVNFWVGLDVHKDSVTAAVFRNRDPEPMRVDRLPYDLRKIRRYFQRLQAEGNVRACYEASGAGYVLQRALTDWGVECQLAAPSLIPRRAGEHRKTDRRDAIKIGRDFRDDRLVLIQVPTEADERVRDLVRCRETFQREIIQSRHYILKFMRRRGLVFLDGNHWTLRHLTWIRQALAPGKLAEEDCVVLSEYLALLEYKLQRRDELDHRIAALALTPRYKPLVDRICCFRGFKAQAAMVIATELGDLRRFENPRQLMAYVGLVPSEHSSGDRRRLGAITKAGNARVRHILIQAAWQYRKRPAIGAPLRRRQRGQDPDVLGHAWKCQHRLHSLFHRLAFKKPTPVAATATARELVGFLWAILRDIDVSSLQEVNAAA

SEQ ID NO: 259496 - protein, 324 aa, unidentified
MSDAIVGIDVSKETLDASCARGHRKQGKTFANSPDGWKLVRAWLKAMGSKQAHVCMEATGRHSLGAALALHDAGHVVSVVNPAQIRDFGRTKLGRNKTDKVDAALIREYAELFKPEPWTPPSPAMRRLCELQTVRAGIIRSRTEWKNRSGSGLGDSTATKLAAATITLFTRQLEAIDRAIGETIDQDAELRGRRELLLSVIGVGETLAASLMAEMPEPGVLRRSGEMVAYAGLNPSHHRSGSSIDRPTRISKIGNATLRSSLYMPALSAMRFNPAVAALVARLKSAGRLQPKQIVVAAMRKLLVLCFGVLKTGKRFDPAIAMPA

SEQ ID NO: 259497 - protein, 353 aa, unidentified
MTIVVALDVHRRQITYKTLDRESGEVRRGRIVPATRGAVREWLEQFAACEAEFALEGTTGWRFVVEEIERAGQRAHLADPAETAGKRGRKRRAKTDNADCDLQLKLLLAGELPESWIPPAHLLELRTRVRMRKVLIDQRTAWQQRLQAQLFHQGVATGLKPRTRAGREALALVELSPAGRELVALALRMLETIDGELAPLDRALRAFARRQHGCRALIANLYGVGAISATAILAELGDCRRFASSDDAVRHSGLDVTVHQSDNKRAAGHLSHEGPELLRWALFEAAHQSARRSSPDHDYYLQVAGRIDHNRACLSVARKLCRRAHHILRELGDQALAPVESEPQAEEAMQAAA

SEQ ID NO: 259498 - protein, 391 aa, unidentified
MIFIGIDAAKDKHDCFIVSSYGEVLCDVFTISNTLTGFNDLLSKIKSFSKDLSKTKVGLEATGHYSYNLLGFLLDTGLPTYVLNPLHTNLYRKSLSLRKTKTDKVDARTIASMLMSCQSLKPYTRALYHNEELKSLTRYRFDKVSERAKLKTSVSRLITILFPELEKLVSVVHCISIYALLSEFPSAKHIANANLTRLTNLLYSASKGHYNRGTAIRIREAARNSIGSVMPAKSLELKHTIKLIGELDDEISEIEAAIKQIVDSLGTTILTIPGIGYATAASILAEVGDFSNFETPDKILAFAGMSPSTYQSGQLSNCYAHMEKRGSKYLRFALYNATKYVCKWDSNFAAYLAKKRSEGKHYNVAISHAAKKLVRLIFALEKSRLPYMPVA

SEQ ID NO: 259499 - protein, 343 aa, unidentified
MQAVTTIGLDIAKSVFQVHGVDAEGKVLIRRKLKRRYVLAFFQKLPPCLVGIEACATSHHWSRELKALGHTVRLMPPAYVKPYVKRQKNDAADAEAICEAVTRANMRFVETKTPEQQSCLMLHRTRHLFIRQQTSVINAIRAHMAEFGIVAPVGRQGVEALLEVAADGGDNRVPEVARSCLAALGAQLRALKAQILEFDRRITAWHRSNETSRRLDAIPGVGPALATALVASVADPRAFRSGRDFSAWIGLVPKQHSSGGKDKLGGISKQGDRYLRSLFTAGALAVIRYAKIHGAKHRPWLTALLARRPTKVAAVALANKIARMAWAMMARGERYKEPVALAA

SEQ ID NO: 259500 - protein, 423 aa, unidentified
MEVMHKCCAGLDVHKNVIVACVRLTLGRKVERECRTFDTTTTGLLALLSWLSASGCTHVAMEATGVYWKPVWNILSDGTFELIVANAAHIKNVPGRKTDMSDAMWIADLVACGLIRASFVPDERTQELRSLLRTRKQMTREQTSYIQRTQRTLEEGNIKLDSVISDIVGVSGRCMIEAMIAGETSPVRLADLAHRRIRAPREALCEALRGRVTDHHRFLLRLHLRQYDALAAAIAEIDQQVEVLIEDIDEQIEAGQATFRALIMLLCSIPGVGPLAAVVILSEIGRDMSRFPTAGHLLAWAGLCPGQNESAGKRKSSRLRKGAPWLKTLLIQCAWAASRRQDSYYKAQFSRLKARRGPKKAICAVAASMLTAVYHMLKDGTGHRDLGASYFDRRSIDAKAKRLVSQLTKLGFQVQLQQIAEAA

SEQ ID NO: 259501 - protein, 410 aa, unidentified
MEEKDAVEAQTRFVGLDVHRRYATVAAVDSKQQVVLTARHIDFEDFDDWVRKHLRRTDLVTLEATSNAWHLYDKLVPLVASVTVANPMQIALIGKTLVKTDPRDALTLARLLAAGILPSVWVPPVEVRELRALGGHRSRLIKQRTQARNRLRAVLFAHNLFPPTGEAFGPANRGWWEGLDLPGSEKLRVRQDLSILDSLEPLIKEVEAELVRQSSLEPWAEQTAFLVQLPGIGVHNAMLLLAAIGDIGRFDAAHKLVGYAGLGARVHSSGEEQYGGRITKQGRRDIRATMVEAAWVAVGGHPYWKELFERLAYRVGKPKAIVAIARKLLVVVWHVLTKHVADRAAVPEKIAGKFLEWSWKLGRVNRAGLTSGAFIRRELHRLELGENITAISRGNRKFPIPLAEHAEAVG

SEQ ID NO: 259502 - protein, 369 aa, unidentified
MKKIVKYVGLDVHKDSITIAFADEGRDGNVRLFGKIRNDLEQIDKVMRKLISKNGELRCAYEAGPCGYTIYRHLKRQGIDCAVVAPALIPKKAGDRVKNDRRDATNLATLHRSGDLTPVYVPDKTDEALRDLVRARKDVSIALRKIKQQINAFVLRQGLNYPGKTKWSKAHLNWLTALKMPHPAQQIALTEYIDAMENHQVRVKRLETAIIASCESWRLLPVVDALQALRGVSMISAVTLIAEMGDLTRFDQPAQLMAYMGLVPSEHSSGPTVKRGPITKTGNTHARRALIESAQAYRLPARKSTAIRKRQAGLPEDVRDIAWRAQLRLCHRYRRLIAKGKNHNVVVTAIARELAGFIWAIACAVPIAA

SEQ ID NO: 259503 - protein, 342 aa, unidentified
MKLFIGWDVSLAKTAVCVVSEHGQIVKEAETGSEPEALVRWLDELDGSIAAIGLEAGPQSQWLHRGLTEAGLEAVLMETRQVKGALKAMPIKTDRRDAEGIARLLHLGWFRPVHCKSVSAQETRAVLGARKAIQQNMIALEMSLRGLLRNFGLKVGAISRGRFEARIQELAEGNPMLETATAPMLRARATLRQELAALEKQVRQLAQDDPVCHRLMTMPGIGAVVALTFRAAVDDPARFRSSKRIGPWVGLTPSRNQSGERDVSGGITKAGDVNLRRALCQAATVMMNRGRSTWLRTWGAQLAQRRGRKIAMVALARRIAVILHRIWVDGITFQSDAAPNPV

SEQ ID NO: 259504 - protein, 348 aa, unidentified
MLRYYTGQHQYYCGVDLHARTMYLCVVNQQDEILVHREIPTDADRFLAQLAPYRTDVVVCVECIFTWYWVADLCAAEGIPFVLGHALEMKAISGSKTKNDRIDSRKIAKLLRGGMIPMAYVYPRPMRSTRDLVRRRMRFVQHRAELLTHIQQTNAQYNLPKIGKTLKYKANRAGVAERFDDASVQKTVEVDLALIAALDTSIQQIETHILATAKDHDPMALQSLRTIPGIGKILSLVLVYEIQTVTRFPKVQQFASYARLIRPVKESAGKRTGRGNGKMGNAYLKWAFSEAIVLFLRETRESQPYIRRVERKYGKDKAKGILAHRLGRSVYYMLKTRQVFDLKKFVNQ

SEQ ID NO: 259505 - protein, 387 aa, unidentified
MTKNKGRVVGLDVHPDSFAGAVVQGRDPASAVVLSTSTRVELERLEEWARRHTSTEDTLVLEASGNAFAVAARLRAIGREVEILDSHHAGKVGKVYCANDRVDAVKIARIYLSALSPIVWQPDQKTLERREIFSAYQAVVKESTRAKQQLRSMLNEHCVRLEKGFRLCHPQAITRLLKLREWTPARRMLLQQLHGSLLAARARRTMLRRHMAQEIVAEEALLRLTRLCGINLITLYGVVAAVGDVHRFTQSKKLVAYLGLNPSVSQSGNFQGSGALKRHGRGALRALLIQSGKKLLEVNNPLQKWGLALAARRGRNKAAVAVARKLCVALWHVMMGHAIGTLERLDTLQTKLSKFATEIGPAALTAFGYNNKADFVEKKLYVLRSYP

SEQ ID NO: 259506 - protein, 411 aa, unidentified
METAYNVAGIDVHKRMLAVVIANARETELEFECRRFGTTVSEVRALSAWLKERNVQEAAMESTAQYWKPVWLGLEGQCHLHLAQARSNRGPRGRKTDFRDAKRVVSRLLSGDLILSFVPEAEQRCWRTLTRTKHQLTRDRVRLQSQLESLLEECQVKLSSVVSDLLGASGRRILRAIAKGETNPVRLADLGDKRLHASEAELIDALSGHVGSLHRQVLSLYLDRLDLIESQVAKLEKMVADAMKTHDAAILRLAELPGLGVDSAQQIIAEIGPKAAAFPTAAQLASWVGVCPGRQESAGESGSDRSAKGNRSMRRLLDQLAHAAVRKEGTQMQIVFRRLCSRMGYNKAIWAIAHRLCRLIWKVLHDGVHYVEHGLPPSPIALKRRRQRLVTQLRRIGYQVELIPLVPNPNG

SEQ ID NO: 259507 - protein, 359 aa, unidentified
MNKISMFFVGLDLGDKFSYLTILDQEGELIEESRLPTTKASFQRRFSTLQPSRVAMEVGTHSRLASHLLTGLGHDVLVANARKLRAIYHNPRKDDRADAETLARLARLDPELLSPIHHRSPQAQADLTVLRSRDALIRSRTLLINHAHGIVKSSGARLPSCTANCFASKTASAVPAALRPALSPILETITSLSQQIREYDRHIEQLCRDNYPETKLLRNVSGVGPITALAYVLTLENPKRFLKSRDVGPAIGLVPRRDQSGDRDPQLRITKTGDAYLRRLLVSSAQYILGPFGPDCDLRRWGLKLAERGGKNAKKRAVVSVARKLAVLLHCLWKTGEIFDPFYLAKKHDQAPEAVPAAA

SEQ ID NO: 259508 - protein, 348 aa, unidentified
MSEIIRIGMDTSKHIFQLHGVDASEQVVLRKRFGRNAMLSFFAKLPPTVVVIEACGAAHYLARELGKLGHTVKLIAPQLVKPYVPRNKNDGRDAEGLCEAASRPRMRYVPVKTAEQQAALMLLGTRDQLVARRTQLGNTIRGHAAEFGLIEAKGLDKLASLLSAIERNESVPVLAREMFAMLARQYAQVQAELKAIEARLLAWHRADGLSRRLAQIPGVGPVTAAALVMKAPDPHAFRSGRLFAAWLGLTPKDHSTAGKTRLGKITRAGDEKLRQLLVVGATSVVKQAKARGRGPSWLIELLKRKAPKLAAVALANKMARIAWKLMITGESYDSARIEARSGAQAAAA

SEQ ID NO: 259509 - protein, 341 aa, unidentified
MNKTNTITIGIDLAKNVFHLCTQDAKGHILKKTKLGRQQFKYFLAITPPRRVVFESCATAHDWSRVATRHGHDVKLIHPAYVKAYLKTNKNDFNDAEAMCEADSRPTMRYVSSKSIPQQDIQWLHCIRRRQVHQRTALVNQIRGQLLAYGITIPVGISQVRCQLSGLLEEAENELSGDSRILFHEWQQELYLMDDLVKQADKKINLIAKEHPVCHRLMGIPGIGPMIATALINTVGNARHFKNGRELSAWLGWVPKQYSTGGKQRLLGISKRGDSYVRSLLVQGALSAMTRCKNRSDNPLVWARQLKETKGLQKAAVALSNKMARIIWSVMAKDHDYVAHV

SEQ ID NO: 259510 - protein, 348 aa, unidentified
MSQSIVLAVDYHDQNCVIRQFHANSGEEQVMTVITDPSELRQVVKRAQSAVGRRARVVWIQESTTGWPRVQALLGDSVEFLLANVLQMPRPPKGRGRKTDKIDTARIQREYRNGSLPLAHQPPAWWRQVRRLVSYRENLVARRTSLRNWINRYLAHETWHDRTGLWSVRGQKRLRSILAEQPPRDATVALAKLDELQQLRTRLSAAELELLAVYHECPAAQRLDAVRGIGFVSAVSIVARIGPVTRFRDAEHLIAYAGLAPGVQQSDQTRRDGRIGGGGTDVHLRHYLIEASLWARKIPRYQATYERCKKRRGVKIARIVVARLLVRSIYKVLKDGMAFTPAVAAAPA

SEQ ID NO: 259511 - protein, 422 aa, unidentified
MVLKGVPMALKIVYKICCGIDVHKNFVVACIAKTDKQGVTTYERHHFSTYTKGLKQLLKWLLDRNCKDVCMESTGKYWIPVYNVLEHDCSIVLAHPKYVKAIRGKKTDKKDAKWIADLFKHDLIAGSFMPPADIRQLRDLMRYRFKLTCFKSSEKNRYQNCLTVSNIQLGNVVSDTFGKSSQKIIAKILENPDDTSFDIGSLIHGSMKDKLPELELAIDGYITPEQAAKLKIIKEHFDNLEARKAELEELILALANPYQQEISIILTAPGFKNTFTAIGIISEIGTNMEAFPSAKHLCSWAGLTPTNNESAGKKKSVRVSKAGCYIKPLLVQCANAAIKSKKHPEIRDRYLRIKKRRGHKKAIIAIARMLLTALYHMLKNGENYNSDLYQKSDILPTTREITVEQAILMAQFQGFRIKSATE

SEQ ID NO: 259512 - protein, 372 aa, unidentified
MKTKTKQTTPFVVSTPKPTPVAASGFTIGLDLGDRSHYVCVLDAAGEILHEGPLLNDRVALTLLLTKYPAATVALEAGTHSPWISRYLTGLGATVIVANPRKLHAISRHERKCDRRDAVMLARLARADAALLHPIQHGSAQAQHDLLGLKLRDSLVRTRVSLINTVRFTLKSLGHAVSNPSSEAFHKSIVTAVPADCLPVVQPVLAVLALLTEQIKTLERGLVARGKEDYPVTQRLQQIAGVGPLTALCFVLKIGEPARFGRSRDVGPYLGLCPGRDQSGGTDKQLRISKCGDGLLRRLLVSAAHYILGPFGPACALRAYGQHLVGTSAREKKRAVVAVARKLAVLLLSLWKHGMDYEPRVPATPALILVPA

SEQ ID NO: 259513 - protein, 341 aa, unidentified
MDIAVLGIDLGKNSCSVVGLDGSGKVILRRRMQRKTIVVLTSKLSPCIVAMEACCGAHHLGRVLSAQGHTVRLMSPEYVRPYVKAQKNDDRDAEAIAEAATRPTMRFVALKSEEQLDMQTLHRARDRAVGERTSLMNQLRAVLLERGVIVPQGRAKLRLRITELLRQPPEQISSRILLLIEDMLMRWQALDERIAVFDGEFAAEAKRDEAARRLTSIPGIGALNATALVAAVGNAQTFARGRDLAAWLGLVPRQATTGGKPRLLGITKRGSKYLRKMLIQGARAALPTLSRSNTRLGQWLRGLLARAHSNTVVVALAAKMARTVWALLRYGTTFEPRAIAI

SEQ ID NO: 259514 - protein, 421 aa, unidentified
MRATAVAEMPNLVPPGALVAGIDTHKHTHHIAIVDHLGRAVGDRQFTTTSVGYEQAIDFLRSHDNLNRVGVEGTGSYGAGIARKLAQTGFTVVEIIRPNRQARRLHGKSDPLDAHQAAIAALTDTDTVVPKSGDGPVESLRILIGERRSAVKAKAQAMNQIHSLLTTAPDQVRNTYRALGGAKLLATLARTRPGTVGELDPELVARQTLKRLALRCLMLQDEIDMIEQQLDQLARRINPTLRSLNGVGPVTAATLLVTAGDNPDRLESKSSFAALTGAAPIPASSGQRTRHRLSRGGNRHANAALHRIVLLRKRHREPRTVAYIARRRAEGLTDRDIVRCLKRHIANEIYSALLNPAADNPVGQQLRDRRQRIGIPISVLAATLAVPYQRLRRLEIGTRADPELEHRATVLLAQIEQRRDA

SEQ ID NO: 259515 - protein, 335 aa, unidentified
MDRQYVGIDFHRRRSVIVRKDAAGEKLSSVRVPNDPLAIAAVVADAGPEPEVVIEATYGWYWIVDWLQAQGARVHLANPSGLNWGTRRVKNDERDAIDLVDMLRLGRLPEAWVAPPATRELRELVRYRAKLVALRSGLKAQVHAVMAKEGVLPAVTDMFCKAGNAQLDDMALGDVYAIRVESLRDLIEVYDREVAMLERNIHQRLRGDTGYRAIQAINGIGPTMAAILVAEIGDVTRFRSAAALCSWAGLTPKHKESDTTVHRGQLTKQGSRLVRWAVVEGTVRYHAGGKLAADFRKIAERRGKNKATVAIARKVLTLVYYGLRDGTIRCLANTA

SEQ ID NO: 259516 - protein, 405 aa, unidentified
MHHQDREVTGGVDTHGDVHVAAVIDSTARILGAKSFDATPSGYKKLLAWMRRHGTVVSVGVEGTGSFGAGLARYLAGEGVTVVEVNRPDRQRRRRRGKSDTVDAESAARAALSGDASGQPKSADGRVEAIRVLRLARRSGIKARTQAANQIRDLIVTAPDQLRSRLRALSTDQRVEACARFRLAEINEPLGATKAALRTLALRHQSLTAEIAALDAQLAQLCAAVNPALLAAPGVGTEVAATLLVTAGDNPQRMRSEASFAALCGTSPVEASSGKVTRHRLNTGGDRQANNALWWIVLVRMSSDPATKAYVARRTAEGKSKKEIIRCLKRHVAREMFKLLTKPPAVPLGSELRAQRTQARLTLAAAAEVLGTWPIAISRLERGITHDAELARRYQLWLQPKAQAA

SEQ ID NO: 259517 - protein, 356 aa, unidentified
MSRDIKYIGMDVHKEAIVIAILNSNGKLIMETIVETKASSILQFIHGLRGELHVTWEEGTWAAWLYDLLQPQVQQVLVCNPRRNALSKEGSKSDKVDARKLAELLRTGMLRPVYHGENGLGTLRELARSYQTISKDLIRVMNRLKALYRAWGIPCAGTKVYAPRYREEWLSKISQAGVRLRAELFYQHLDGLQVLRRQVRGDFLAESRKHKATNVLRQIPCIGPIRAALLLALMQTPHRFRSKRQLWTYSGLGVETHDSAQFRFVRGQLQRSKKPQQIRGLNQNHNHEMKEIFKSTATSASHRAAPLCDFYATLIAKGMKPEMARLTLARKVAAITLTLWKKGARFDADQLKAQAA

SEQ ID NO: 259518 - protein, 344 aa, unidentified
MEYIAFDAHKHYTLASVATLDGQLVREERIEHDRGALRGFLERCERGSPVAVETIGNWYWIVDEIEAAGCLPRLVHARKAKLMMGEINKTDRLDARGLNRLQRNGTLPTVWIPPGELRDQRDLPRTRMVFVRQRTQLKNRIHATLAKYALHDLEVSDLFGVRGRALLRERLELLPPHTAYASQQLLGQVEELGRQVRAFEQRIQATFQPTPAVQRLLTLPGVGLTLAVVIALEVGEVARFASAEKLAAYAGTTPRVHASGGKTPFGPSRPDVNRYLKWAFVEAANAICLHRGRAARKLDDVPFEPWLAKRISLDVVQPVQHDRFRRRGRSVPSSSTRAGSAGAT

SEQ ID NO: 259519 - protein, 369 aa, unidentified
MGKHSEVFVAFDVAKKKHAVAIAEAGRAGEVRFLGEVENSPGPIERTIKRLAERYDRLHVCFEAGPTGYGLYRQVRALGHACLVVAPALIPKRSGERIKTNRRDAVTLARLHRAGELTGVWAPDAAHEAVRDLVRAREAATDDLRRKRQQLLSFLLRHGRIYSGGGHWALAHRRWLAGQKFEHAAQQIVFQEAIDAIEDALQRLRRLEKELALIVPAWSMAPVVEAYQAMRGASFLVAVTFAAEIGDVRRFDTPRQLMSFLGLVPAERSTGDTIRRKGLTLAGNRRARRALVEAAWTYRYPARVSETLRGRLEGLPKGVRDIAWKAQVRLCARYRRLSATGKKLPVVVAAIAREMAAFLWAIGQEVAPA

SEQ ID NO: 259520 - protein, 359 aa, unidentified
MIVVGIDPHKKTHTAVALDAATAAVRGEICVGSDRAGHGRLLAWVRALDTEHLFALEDCRHVSGSLERFLISRSERVVRVPPKLTARARRSSRCRGKSDPIDARAVAEAALREPNLPEAHLSGPEHDVRLLIDHRDDLVGERTRIQTRLRWHLHDLELGSDVPTGALDRFVWLDRLAAEIAAVPTSVQTSIAADLIERCRSLTVEIRRLEREVTAVMRTIAPELLAHPGCGAIIAARLVAETAGASRFRSEAAFAMHAGVAPLQASSGQTSRHRLNRSGNRRLNSALHMMALTQARSHEPARRFMERKRAEGKSNREAMRCLKRHIARSVFGTLKRIERSAAGQLIEVAFRTEGVAIAV

SEQ ID NO: 259521 - protein, 338 aa, unidentified
MQFKHFFGIDVSKNTLDLTVLDIQGNQIAYEHLANDLKSIKKCFLGVLTRHQILMEDCLFCLEYTGIYNLPLVQWLTSLEAHIWLESGSQILKSQGIVRGKSDKVDSLRIAKYAFLNRNEVRLWKAPREIIQHLALLMSLRSRFIKNKKQLEVPVKELNGFFNKETIRSINKHNKAPLNALKLQIDKIEKEILEVIKSDERIHQLYKIITSVDGVGLVTATQVIITTNEFINITEGRKYACYSGVVPFEHRSGTSIRGKTRVSHMANKKIKTLLHLAAISAIRVKGDIQDYYLRKVAEGKHKMSVLNAVRNKIILRIFACVTQERMFEKKINFCLEKP

SEQ ID NO: 259522 - protein, 431 aa, unidentified
MTRSDTTPMTAVLVAIDVAKSRNEVLIEMPGSRRRRRLTVANTRIEHDRFVAELQALAPRPVIVGFEPTGHYHRPLAWRLVQAGFDTRLISSVALARTREALHNGWDKNDPKDAQVILHMLQIGATKPYHDPLANRINDVQELSVTHEVISRAKTEVQHRILTHYLPLYFPEIERFRGNTRSDWFFALLEQFPVPASITALGKDAFVAAAWDVVGRKVSKSRLLGDIWETAQTSIALPIAPDAPAIRMFRLVLGEARRLIAQRDDIEVAAIELLGEHADFRRLQQVPGIGPIHALTILAEAGDLRRFRHHRQFLKFCGLDLSTYQSGQYRGKTKLSKRGNARLRRTLWMAAQVAIRQRENSFRDKFDRYVARDRHDPDLRRKAFTAITAKMGRVVHAIIKRGDDYRPFVEGPVPGGGTPLTQCREGASATL

SEQ ID NO: 259523 - protein, 402 aa, unidentified
MPKAFVSSESAATIQTSLAAIFVSLELSQKTWVVTSLSPGDGERMSKHSVPAGDVTALLTRFAELKGKAEARSGMDFPIVCIQEAGLDGFWLHRLLMDEGIESHVVDPASIAAPRRRRRAKTDRLDGEALLRALMAFKRGEPRVCAMAVPPSPEEEDDRRLGRERKALLVERVRHVNRIKGLLFSQGISDFEPLSKNRRQRLEELQTGDGRPLPRRLKVAVGRELDRLELLLDQIKAVESERDEMLELKKGKVQKADERKSDEPAGAPPPACAKMLHDLKGIGPEFAFVIWHEGLYRDFDNRRQLASYAGLAPSPWQSGSIAREQGVSKAGNPRLRCTMIELAWLWVRHQPQSALSLWFKQRVEGGGRKKPNIVAMARKLLVALWKYIRFGAVIEGALMKSA

SEQ ID NO: 259524 - protein, 351 aa, unidentified
MNNPIVVFNPCGIEVSYLTLVVALGGHDHAEPLREFPNTRAGHQALLRFLERSARPVRVALESTGLYGLDLALTLHQAGVAVMVANPRAVRHFAQALLQRSKNDQLDAVVLREFAARMPFQPWRPPSAAALKLVAVARRLEALTDLMAAEKNRAHAASLSEALPVIVRRDIQRSIQTQQRAIDRLTRAAQEFILDDRELARRYELLLSIPGFGATSAVHTLAELTLLPPDMDVRQWVAYAGLDPREYTSGTSVHKKVRISKAGNKHLRRALYMPALVAVQHQPQVRAYYEHLLARGKTKLQALVATMRKLLHAIFGMFKHDQLFDGQKVYASTSTTLAPVPSNSEVVCSQT

SEQ ID NO: 259525 - protein, 383 aa, unidentified
MENTQRKWSRIIGLDLSKQTFKGCILSGESFTDKEMFDGRMSQDSGGYGLIRARIRDGDIVLMEAGSSTFNLARYLIRESSAAQIVVLNPANLRIIWDSMRKTDKSDAVKIACIARDMRPEAWPTVPVPSAQEQAERSVITQHVFLRKQETQLFNRLFALYNSLGYPDIDKARLKEDSGYRMELADKLLSVSELSLLNGMMLNDQINLVQLQLENHEERLRRICLAHPRQALSWLSIPGIGLVNAATLIAYVGDGARFSKADQLLNYAGLVPKLNQSGTVDIHGRITKRGCSAIRRNVVQGAHVLMKMRVQCPLTRFAYRKRQQCPFNGKVAVAVATHMLRTGLAMLHKDNALYVTAAEDNYEKLRRKLAEYKVKALAAHLPK

SEQ ID NO: 259526 - protein, 352 aa, unidentified
MTLVGCDLHSRKQQVAVLDTDTGEVLEQELLHEGDAVERFYRGLPRPVTVGIEATGYTLWFHALMQKLEYTLLVGEAAQIRAMVVRKIKTDRRDAQHLLDLLKHDRFPTVWMPDPATRDLRALIAHRVRFVRMRTMVKNGLHAIALNHRVALGPALWTKRGLAQLQALALPPHTAQRCGESLELLTWLTTRIDQLDAQIAAAAAADTRAQLLLTHPGVGPLTALITVLVLGPATRFPTSKHVVSYVGLAPAINASADKSHLGKITKQGNALLRWILGQAAPLAARADGELKRSYFTVLHRRGRPKAKVALARKLLVRLYIMLRDQIDYDEFRRRGGVRRSQPAWHPVAAPTM

SEQ ID NO: 259527 - protein, 345 aa, unidentified
MQPMYYIGLDVHKRKISYCVKDPRGAIHCEGSIPATRFDLDRWMRTLPQPWSAAIEATMFTGWIYDHLKPHAAALKVAHPLMLRAIAAAKKKNDRIDANKICDCLRCDFLPECYMASTAIRERRRTLRYRNLLVRQMVQMKIKISALLMEAGVSYNKQRLHKAGYFRELLATNPHIDEGLRLLLRQGREMVVRLGKTENALIRSLRNDRFLAERVERLMSIPAVGPITALTWALEIGEVQRFSSIKKAVSYCGLCGDQQSSADHVQRTPLSKQRNKHLQTTLIEAAKMAPRYSPTLAMLYDREKQRGNANRATLAVARKLVVYLMAVDRGQTHFLVVDRAAGAAA

SEQ ID NO: 259528 - protein, 381 aa, unidentified
MTTPATRNVQERPTEGTLFVAFELSEKTWKLGCTTGHGQQPRERTVPARQQERVLDEIAHAKRRLGLPDTAPVVSCYEAGREGFWLHRFLQGHGITNHVVDSSSIEVNRRRRRAKSDGLDVRKLLSMLLRYAHGERQVWQVVKVPSVEAEDQRHLHRDLETLKQERASTTNRIKGLLSSQGIRVTSLRNLPEQLEALRLWDGSPIPPGLRRRVLRVYAHHTFLSEQIAAVEAERRAQLQASTDANIDKVRQLMQLKGIGINGAWLLVMEFFGWRAFKNRREVGGLAGFTPTPYQSGESAREQGITKSGNRHVRWMTTELAWSWLRFQPDSALSVWFRERFGSGGKRLRRIGIVAVARKLLIALWRFLETGVLPAGAVLKEA

SEQ ID NO: 259529 - protein, 388 aa, unidentified
MKRIIKIGMDVHSTNYTLCAMEPTIGSEDRIFGELQVAPDYKEVIAFIDTLQLRLGLNDDYSFECGYEAGCLGYTLYHQLTNAGIKCVILAPTTMLTQQGQRIKTDKRDARLIAQCLCYGGYHSVYIPTGEDDSVKEYLRMRDDHKLALKKLKQQINAYVLRHGHQYTGTKWTVKHVTWLKKLELDPLYRETLNEYLASFEEQEAKIERYDKRIEEIAAEARYQENAKKLGCFLGIRTHTALSLIVETGDFNRFAKGNTYAAFLGLAPGERSSSTNVNRLGISKAGNTHLRCLLIEAAKGICKGAIGHKSKELRSRQNGQSADIIAYADKANTRLRSKYYKMIRHGKKKNVAVAAVARELACFVWGMMTGNISITSAGGTSGPAVSQG

SEQ ID NO: 259530 - protein, 319 aa, unidentified
MDETRRVMTCVGIDVSKDRLDVHVRPSDEAFAVARDSQGLGRLVECLRALEASLIVLEATGGFETTVAAALAGAGLPLAVVNPRQIRDFARALGKLAKTDTIDAEVIALFAERVRPEPRPVAGEEARRLGELVARRRQIVEMIGMETNRRRQAGDKRLAKKIERHLAFLERELADIDADIDAGVRASPAWRETEELLTSVPGVGPVTARTLIAELPELGQLDRRKLAALVGVAPFNRDSGAWRGHRMISGGRTCLRNALYMAALVATRCNPVIKAAYQRFVARGQPGKVALIACLRRLLTILNAIVRDRQPWSAETRHA

SEQ ID NO: 259531 - protein, 389 aa, unidentified
MSQPSLYVGLDVSKATLDVAIRPTEAQWQLPHTEEGIRELVAIRVPRHPTIIVLEATGGLEMSLVAALAGAELPVAVVNPRQVRDFARATGKLAKTDRLDALVLAHFAQGVHPTPRPLPDAEVQALEGLLTRRRQVVGMLTAEKNRLQRAVPRVHPQIQQHIAWLEQSLAKLDDDLGRTLRESPLWREQEDLLRSVPGVGPVLSLTLLAELPELGTLGRRQIAALVGVAPLNRDSGTLRGRRTIWGGRARVRATLYMAALVASRWNSVIRSPGKAQPRSLLYPRQGQASGGGDGAPRRALTGRHRGTGEASGAGLRGETWPTKHLVRSTIARLRRESGGSHSCEQATSNRVPLTRHVDGGWKSCPVRMSEGRLAQYTAAEIGIVEGGFE

SEQ ID NO: 259532 - protein, 455 aa, unidentified
MAKKNPTTRQSQGKVRQNILERINLHAAGIDIGANFHFVAVGEDCTEQNVRKFDAFTSDLHRMADWLSEHHIQTVVMESTGVYWIPAFQILEQRGLEVKLVNAAHVKNLPGRKSDVSDCQWLQQLHSFGLLNGSFRPKDEVCVLRSFLRLRDTLVKDSSSHILRMQKALTQMNIQVHRVITDITGYSGMAIIRAILDGERNALKLAQMKHPLVKAPTEVIVEALQGDYRTEHLFELQTALDLYDVYQGKILECEAQVEQHLQQWETKVDFEQALAQTAALQTRSASVRLELHRQAQLLSVCGVDLTRVPGLSTLAVRTIIGETGLDMNCWKSEKHFCSWLKLCPDNRISGGKVLSSRARRTRNRATAMFRLAAQSAMRSQTAIGAFIRRIKARLGAPIAINAGAHKLAQLFYRMLKFGETYVERGQTYYETKYKERLLRNLNRRAKEFGLQLAPS

SEQ ID NO: 259533 - protein, 313 aa, unidentified
MSYTSRFVGIDISKSSLDACVLPDGQTVTYQNTAAGIASFLAFLATVDDIERLVLEPTGGYERLVVAALQAARLPVAKVNAKQIRQFARACGQLSKTDRIDAFILADYARRMETRILPQRSSQERALADLVSRYRQLSHMIVQEKNRREKLTGRTKVWIEESLRFLLDQRQAIVDEMTACLKADAELGRKAEVLMSLKGIGLRTACFILADLPELGHTDKGQIAKLVGVAPLNRDSGLMRGKRMIAGGRRHLRDALYVAALPAIRFDPDMKAFFMRLKQQGKPGKVALVAVMRKMIIILNARMRDANATVLDA

SEQ ID NO: 259534 - protein, 463 aa, unidentified
MSKKRTREGTAKPNRPQVDWKASDIVHPDAAGIDIGGSEHWVAIRPDRDEQPVRCFDCFTADVEQMAQWLLQRGVRSVAMQSTGVYWIPVFEILQQHGLEVYLVNARHTKNLPGRKSDVAECQWLLKLHTFGLLNNSFQPSATIRRARTLWRHRGGLVAQASSTIQRMQKALTEMNIQLSTVLSDLSGVSGMAIVHAILDGERDPRALAALADPQVKASKQVIAKSLEGNWREELLFVLAQEVGLYRTYQDKIAACDRMLQPLLQTMPPKVDLRTQPLGPRPKGKRARGNAPKFDLRTELYRMTGVDWTQVDGIDVQVAQSVIVEVGVDLKEFATEKHFTSWLGLCPTNESSGGKILNRRTPKVVNRAKVAFRQAATALLRSQSYLGAQYRRLRTRLGAPKAITAMARKLACLFYRLLKHGQQYVDKGVQYYEQRHREQQIRLLLKRAKQLGVEVVTPATTNA

SEQ ID NO: 259535 - protein, 319 aa, unidentified
MENITEEDVIVGIDVSKDRLDVAVRPGDACFNVARTAAGIDSLVERLGRSTVRLVVLEATGGLEGMVVAGLAGAGLAVAVVNPAQVRAFAKGVGRRAKTDPIDAAVLAHFGEVTKLRPRPLPDTATRQLADLVARRRQIVDMITAERQRQKRATPEVKNSIARVVAALERELASVDGDIDGLVKNSPAWREKEDLLASVPGVGPVISRTLIAALPELGTLDHKQIASLAGLAPFTRQSGQWRGKSFIGGGRAPVRQVLFLGAMVAMRHNPTLKAFHARLIAAGKAKKVAIIAVARKLLVMLNAIVRDRRPWTETVAAAA

SEQ ID NO: 259536 - protein, 353 aa, unidentified
MESTKYIDRTKYIGMDVHKETVSIAVMNSTGKLVMESIIETKTATILQFIQGLRGDLHVTFEEGTWAAWLYDLLKPHVTKIVVCDPRRNALLKEGNKGDKVDARKLVELLRAGLLRPVYHGENGLRTLKELSRSYLTISKDLTRVMNRLKALYRGWGICCEGATVYAPHHRSEWLGKITEAGVRRRAEFFYQQLDALQALRQQVRRDLLAESRNHSARKLLRQIPSIGPIRAALLIALIQTPHRFRTKRQLWAYSGLAIETHDSAQYRYVAGQLQRSKKPQQLRGLNRNHNHDLKAIFKGAATKAGSGAGPFHDFYQALLTKGLTPSMARLTLARKIAAITLIVWKERSTFRR

SEQ ID NO: 259537 - protein, 348 aa, unidentified
MKYFIGLDAHSSTSTFAVLNQEGQCVLRKTVDTSEKNLWNVIESINGERILTLEESTISQWLYISLRDKVDRLLVCNPTYVAKKSGAKTDFRDALHLANELRCGHLKEVFHDDSIWVQLRTSVSGYLDIVQEIVRFKNRLKSVFRANGLKTDENDFYKNKDRVKELKNDSARFVTENLFRQIDFLEVEKIKYLDWFKNNQKKYRPIRNLMTIPGISLIRANIITAIVCQPDRFKNKHQFWGYCMLVRHIQISGGKIYGNKRVHGRRELRDIFIGAAESAMRSDSVLRDYYDSLKAKGTSHKDAKVALARKVASLSLSLLKNNDTYNDNYEEYLKERKKLRLLVGQKKH

SEQ ID NO: 259538 - protein, 319 aa, unidentified
MFIGIDVAKAELVVAVHPSDAQWTVANDERGVRTLVDRLRETPPTLIVLEATGGYELLAVAALAAAELPVVVVNPRQVRDFARATGQLAKTDRLDADILARFAEKVRPAVRPIPNAEAQELDAMLTRRRQLIEMLGAERNRLGQVFGKGKRAVKKSLKTHIAFLERELRIADSDLNDAVRGSPVWREQDDLMQSVPGVGRVLSHTLLADLPELGRLSRREIAKLAGVAPLSRDSGTFRGRRFVQGGRGPLRGVLYMGALVAARYNPVIRAFYLRLVAAGKPKKLALVACMRKLLTILNVMVRTGSRWLAPAVEQVLVEA

SEQ ID NO: 259539 - protein, 413 aa, unidentified
MDVLIERCCGLDVHQATVVACMLRPGRGTRVEKTVRTFRTVTSELEELREWLLESGVTHVAMESTGVYWMPVYEVLATGEMQLVVGNAAHIRNVPGRKSDVKDAEWIAHLVRHGLIRASIVPTPLMRRLREYTRLRRKLTEERTSTRNRILRLLETANIKLASFASDVFGTSGTLMLDALIEGTQSPREMASLAKGVLRKKRVDLELALRGRVQEHHRFLLGLHRARIAEIDKTIAMLDERIDSELVVVADVVERLRQIPGVDRVIAATIVAELGTDMTYFPTAAHAAAWAGLCPGSNRSAGKRTQAETARHGNVALKTALTQAAVCAQRVKGTHFQEKYRRIQRRRGAGRAAVATAHAILVAAYNMIKSGQAYNERGPHQHSDAERQAIARRLRHRIEQLGFEVDVRSKSAA

SEQ ID NO: 259540 - protein, 345 aa, unidentified
MKKHIEGVMVYGIDIGKNTFHVVGLDGSGKPVLHSKFRRDRLLVHFANAPAAMIGMESCPGSQWLARKLQAAGHTVKIIPAQFVKPYVKSNKNDMVDAAAIAEAVTRPTMRFVQVRQPEQSARQALHRVRDRYMSQRTGLINQIRGFLLEFGIAVRQGAGVFRLDVPRVLGDEENELPPSMRTLLSDLWNDFKLLEIRIEELSKQIQRSVQYSDTAQRLMTVPGIGPLAASALEASAGNGHQFANGRLFAAWLGLTPREYSTGGKTTLLGISKRGNTYLRRILIHGARSCVQTCDRQRHPLGAWITKLEQRMHRNKVIVALANKIARVAWKILTRPEEIYRWADA

SEQ ID NO: 259541 - protein, 355 aa, unidentified
MDSTKYIGMDVHKESISIAVRNGAGKIVMECVIETKASMILQFIDGLRGDLQVTFEEGTSAAWLYDLLKPHVKKLVVCDPRKNASLREGNQNDKIDARRLAELLRLNHLHPVYHGEHGLRSLKELVRSYLTITKDLGRVMSRVKAIYRSWAIPCSGKQVYAPRHRAEWLGKITEPGVRRRAEFYYQQLDALRTVRQEVRRDLLAEGKKHPAWKRLCQIPSIGPIRAAVLLGILQTPHRFRTKRQLWTYSGFGIETQSSADHRRVDGQLERAKKQISIRGLNRNCNHDLKNLFKGAAIVAASKPGPFQEFYTTLLTKGLRPEMARLTLARKIATIVLIVWKRGACFDAQHLKPQTA

SEQ ID NO: 259542 - protein, 397 aa, unidentified
MYIVGIDIAKRKHEAAVIDGDGAVIIKPFSFTNNCSGYNRLLAMLARAKLPLDEVSFAMEATGHYWLALFTRLQKEGFRVQVINPVQTNSIRSFYIRQAKTDPRDALLIAEVIRFGHFSESTLHPENIYELRELCRGRHAIVSMQADVKRKVVALLDQVFPEYETAFTNLFGDTSMAILQTCPTPKELSEMPLEELCHLIEVSSRKRFRMAKARELQELARNSFGFAMAGDVFSTMIRLYARHLDFLKQQVREMDRKIAEIMDTLDTPITTITGIGPTLGAYILSEIGDISRFSSAAKLAAYAGIDPTMRQSGEYNGVRNRMSKRGSPYLRHAIWLAASSAVLHDPALKLYFQKKRDEGKPYMASVGHACRKMVSIIYAVMRDNKAYTPCIPNEISA

SEQ ID NO: 259543 - protein, 319 aa, unidentified
MQDAPAEARVFVGIDVAKHSFDVALLPGEQSVSLTHNDVGLQQLLEWLRPWGSCFVVLEATGGLEHRLTGELIDAGHQVAVVNPRQVRDFARGCGKLAKTDRLDALILAKFAQQVQPRLVEKASEKQLELAALITRRRQLQAVVVAESNRRDPAGSPQTRRSIDKHLTWLRKEVAHMDATITRLIAADDNWRGQAQRLESVPGVGPTTSATLVAELPELGRLNRREISALVGLAPYNHDSGGLRGKRSIWGGRANIRSVLYMAALTARRCNPLIRTFAERLQQAGKPFKVVLTACMRKLLTILNVLTKNNQVWCPKLPS

SEQ ID NO: 259544 - protein, 400 aa, unidentified
MRTVFGIDVSKASSEVAILVNGERVHSYTMPNDIIGFSHLLKDLKTVSNPEIIFEATGVYSRRLQAFLEENSYDYTRLNPLEAKKQLDSLRVRKTDKIDAEKLASSQFVLNRKPTYVQEEVYQNLHDLSRFYQNLTEDIVRTKNRLHKVLQVAFPEIENILSTPTGEQYWNLVSIFPTKHWVLELSEVELKETIRNSTSKRISENRVGNLAEKLVGLAKQSYSAISKTSPMIEEVKYNAQELIRLTNRREQVLQQLIALAEPLPEYEILLSIPGIAETTATSIIGELGDIRRFKSANQINAFIGIDLKHYELGDFLGQEHITKRGNPYARKIMYKCIHNIASASHTNPCHIADFYEKRKRQSQTTSTKPHTIASIHRLIRTMYYLIMHNKLYDYTLAKSH

SEQ ID NO: 259545 - protein, 354 aa, unidentified
MIIIGCDYHPAFQQIAFVDTETGELQERRLQHREEAEKFYRDLAAQEMRVRVGMEASGHARWFERLLAELQFELWIGDAAEIRTKRVRKQKTDRQDAQLILKLMLKDDFPRIWVPSWENRDLRQLLWHRHRMVQARTRMMNQLQAVALNEGLRCKKRLWREQGRVQLESFRLAPWASRRRHDLLELLYRLNPTITELSQAVEQEAEKCPEAQRLMTHPGVGPLTALAFVLIIGRAERFQCGKQIASYLGLVPLEDSSGNRRRLGHITKQGNSLLRFLLVEAAQVTVRSLPEWRSKYFHLAMRRGRKIAKVAMARRLAVRLYWMWRKGWDYEQMKKFGSHAGQPGHRHGVQQNTE

SEQ ID NO: 259546 - protein, 277 aa, unidentified
MEQSSVCVVDAAGKIVREAKVASEPEDLVRFFRELGVRVVRIGLEAGPLSQWLHAGLAAAGFEVVLLETRHVKAALSAMVVKTDRKDARGIAQLLRMGWFRPVHAKSPAAREIRALLVARELLQAKLLDVELSIRGILRGFGLKMGEVSKARFVARVRELVAGQAMLERVIEPMLRAREALRIEYAQLHREMLSIVKRDAVCRQLMTVPGVGALVAITFKSAVDDPGRFAKSRAVGAHFGLTPKKYQSGETDMTGRISKIGDEGVCERRSTRPATSS

SEQ ID NO: 259547 - protein, 341 aa, unidentified
MKNKSFIGIDISKNVIDISFFCEGTPIKDFPHDVFNNSRKGFGEMCTWLKKNHVVLSNCLFGMEFTGSYSMELEKFLNAKKYQFCMLSTHVVKHYPMGPKDKSDKIDSAKIADFLYRYNGTECVKPYKMPDKTMQRLKALMNERKFLVEQRTCFINRRQLCTTKEDALLYDGYIKKFDHDIENIELEIQKLLETDDSLSTTYKNLLAIPGIGFVNAMNVIVITRNFTAFETARQYASYVGVAPHSHTSGTSVKWRPRPSARCDGQAKADLSMAATVAVQYDAELQSFYNRKLGGKQDSDTKRKALNAVKFKLILRMFAIGKQNRKWDPLDSKSSNEKLAIS

SEQ ID NO: 259548 - protein, 366 aa, unidentified
MNKISTDAMNRIENLKGDQLTIGLDLGDRFSHYCILNESGEVIGEHNLPTTPKGIEEVFHSIPRSRIALETGTHSPWISRQLARLGHEVIVAHARNVRLIGDSSRKDDQFDARTLARLARIDPGLLGPVRHRSAEAQIHLTVIRARAGLVRARTALVNTARGLTKSYGERLRKCGTQKMHREMAQGLSQELRDAWDPLFGEIESLNQRIAEYDRRIEQIAKEIYPQMALLKQVKGVGTLIALAYVLTLDDPHRFRRSRDAGCFVGLRPGRRNSGMSQPQLHISKEGDVYLRTMLVQGAHYILGPFGEDSDLRRWGLRLAERGGKNAKKRAVVAVARKLAVLLHKLWVSGEVYEPLRNNHKVVAAVA

SEQ ID NO: 259549 - protein, 402 aa, unidentified
MYNAVGIDVSKGKSTVAVLQPAGVIIRKPFNVNHTSSELDELAKYIGSLEGETRVVLECTGRYHEPVVKTLSEAGLFVSAVNPHLIKNFGNNSIRKVKSDPADAKKIARYTLDNWIELRQYSSMDNTRTQLKTLNSQFSFFMKQKVAAKANLIALLDNTYPGVNKLFDSPVRDDGSEKWVDYAYSFWHVDCVRKIGLKTFTERYQAFCKKHHYNFQPTKPAELFLASKDLIAVFPKEASYKLLIQQSIQQLNLASSHVEELRSKMNELASTLPEYATVMGMYGVGKTFGPQLIAEIGDISNFSHREALTAFAGVDPGVDQSGTHNSKSNKASKCGSNRLRKTLFQIMSTLLQTAPENDKVYQFLAKKRAEGKPYYVYMTAGANKFLRIYYGKVKECIHNLEQ

SEQ ID NO: 259550 - protein, 348 aa, unidentified
MLIIGCDYHPGFQQIAFVDTENGELRERRLTHREEAEQFYTGLKGQSVRVGMEASGHSRWFERLLGELQFELWIGNAAEIRTKRVRKQKTDRQDAQLLLRLMMEERFPRIWVPDSENRDLRQLLWHRHRLVQMRTRVMNQLHVVALNEGLRRKKALWRPAGRQELESFVLARWASRRRQDLLDLLDQLTPKILELTRALEAEVERRPVTRRLMTHPGVGPLTALAFELVIGTPERFHCGKQVASYVGLAPSEESSGDRRRLGHISKQGNALLRFLLVEAAQVTVRSQPQWRSRFFHLAMRRGRRIAKVAMARKLAVHLYWMWRKGWDYGQLQKLGSHAGVPGNLDGVQ

SEQ ID NO: 259551 - protein, 430 aa, unidentified
MKSNTQNAKIEAITEKTLVLGIDIGSETHYARAFDYRGIEYSKKPFKFSNTEVGFVTFKEWILDLKERHEKDKVVPGMEPTGHYWFNLGKFLQDNEMKPVLVNPHHVKKSKELDDNNPTKNDRKDPKVIAGLVREGRYMIPYLPDGVYADLRTASNIRFQLQAELTRIQNRISRWFNIYFPEYKTVYGKPDAKSGILILKAAPLPEDILTLGIDGVNQIWRDAKLRAVGKARAKTLIEAAEHSVGSKEGAVAARMEIRMLLEDYESRSIRLQEVMTLIEGLVKQIPMAEKLLEIKGVGIRTVSGFLAEVGDISRFNNPKELQKLAGLALVENSSGKHKGETTISRRGRKRLRYLLFEVAMSLVAKNPEFRELHNYYTTRRLNPLKKMQSLMAIAAKLIRVFYVMLTKGVNYDPKKMVNDIKRPAVYLQTA

SEQ ID NO: 259552 - protein, 390 aa, unidentified
MLGFLGLDIGKDTFTAAFLWLGDDGKQHTLNPQSFSADQAGWQAFLRLWQSQPPAEWHVGLESSGPYTRLYLHHLQTLPHPVYLISPLQARHFRRSRSLRKAKTDRIDAQTLAAWLFSAWQEGRLPRPAQPPTSLRDLAFLYHQLTQELTRLQNRFRQVLHTLFPELERRQRRFPKSLRRLLLLYSSAQQIAQAAPEDLQPFCHRLACSPETLQALATTSWGIHDEVAIAHLRHLLALWEELEARRHQVWLTLRQQVRQTYPDAWRRLRPIPGLGDRLLTLFLALLGDLHRFPSAKSLIAFVGLDPSVYQSGSFLAHGRLSKRGSPLLRHVLFLIAQALVRFSLRFRRTFLHHRQRGRAYREALVIVARKALSIFHLLIVRQQSFQDLSP

SEQ ID NO: 259553 - protein, 453 aa, unidentified
MSQSRLRSKELKVSALQKQLQHVNLNAAGIDVGSDRHLVAVPEGRDDVAVREFGAFTADLQALANWLSKCGVTAVAMESTGVYWIPVFELLERLGFEVKLVDARRVKNVSGRKSDVLDCQWLQQLHTYGLLTGAFRPSDEVCVLRGFMRQREMLVQASSMHIQHMQKALQQMNLLLHNVVTDITGMTGMKIIKAIIAGERNPHVLAKHRDNRCRSSAATIAKSLVGNYRAEHLFALKQAVELYETYQAKVRECELAIAHYLSTQVNRTEAEPPASERTIRARDCMRGEVDMRVQLFKLTGVDLFSISGFGADTLLTLAGEVGFDMSAWKTEKHFTSWLSLCPGTNKSGGRVLTGKTKRSANRAAAAFRIAASCVAKSKSALGAFYRRIKARAGAPKAITATARKLAVLYYTMLKNGSSYVEVGQAAYEQRYRQRRFSAMQKQALAMGYQLVPA

SEQ ID NO: 259554 - protein, 406 aa, unidentified
MEVIYERCCGMDVHKDEIVACLMCGNRKEVRSFSTKTNSLLEMVDWLKNEGCQKVAMESTGVYWKPVYNLLELSDLSAMVVNAQHIKAVPGRKTDVKDSEWIADLLRHGLLKGSFVPSREQRELKELVRYRRSIIEERSRELNRIQSVLEGSNIKLGSVVSDIDGKSAREMLAAIVSGSTDVKAMSEMSRGRLKKKTAELEQALTGLIGDHQRLMLAEMLKHIDSLQETIFRLDDEVKQRMRPFEEEVALLDEISGVGERVAQIIIAEIGVDMSVFPSANHLASWAGMCPGNNESAGKRKSGKTRKGSISLRSCLVEAANAISHSNKSYLSAKFHRIAARRGRKRALVAIGHAILVICYHILKDKVHYRDLGPDFYEKYKKQEIAKRTVKRLEALGYKVTIEDTAA

SEQ ID NO: 259555 - protein, 372 aa, unidentified
MGHHTEAFVGIDTSKSRNAVAIADSGRGGEVRYLGEFPATEAAIRKLVAKLAAKCCHLTFCYEAGPTGYGLYRLLKSLGHDCLVVAPSLVPKKAGDRVKTNRRDALSLAKLLRAGELTAVWVPDERHEAMRDLSRARLAVKKDLQGKRQQISSLMLRLGRIYPGKTTWGRAHMRWLMEQKFEHREQRIAFEELLEGIRQESERMERLEDAIREVVPDWSLAEVVAALQAMRGIDLIAAVGVLAEIGDLSRSQNPRELMGYLGLVPTEDSTGDKVKRGGITKAGNGRARRILVEAAWSYRYPPRVSRDKQPKVEAAPRRAREIAWKAQTRLCGRFRSLERKGKRRTVIVTAIARELSAFIWAINRELLPPRQA

SEQ ID NO: 259556 - protein, 410 aa, unidentified
MYYVGIDIAKRSHVACVINEENKLVVKPFSFPSTKRGFETLVERLQSLPCDAGDILIGMEATGLLFDNLYRFLRSLHYRVVLLNPYQTAKFREMDTMKRVKNDNIDAQMIAALIKSGRFSEGYVSDDQLQSLRTLYRHRASLEDQLKSLKRQTQTILGVVFPELEQVIADPFSVTGLALLEKYPTAKHYEYASASRILKTFRGIKGNNFNETKAQKLLKLAKESVYSGAGKEGYAATIRSNIKLMRLLQTQMQEIEVAMLSLFELKETTEEEEREMNQLIDNLRTIPGVSDKTILALLAECGQLERFHNAKALVGYLGLYPTIEQSGENRKSGKLAKRGARLAKRAIYLAAIAAIRHNKELRQVYMNYRSKGRAKKECIIITARKLLAIIYAIYKHNVPYDPKRVFVAKP

SEQ ID NO: 259557 - protein, 392 aa, unidentified
MRVLHERCCGLDIHKRFVVACLLETSPDGAVHKEVRTYSTMTADLLALSDWLRAEDCGPVVMESTGSYWRPVFNLLEGQCEVLVVNAYHVKAVPGRKTDVKDAEWLADLLRHGLVRASFIPSPTQRHLRDLTRYRIHLVDERARLTNRLQAVLEDANIKLAAVVTDVRGLSAREILQRLLDGETDARALAELARHHVFLLREQLAHLEYLDAAIARVDAELEARLAAEHEAIALLETIPGVGLRTAEVLVAEVGTDLARFPSAEHLASWAGMCPGNAESGGRHLSGRTRRGNPWLRRTLAEVANVASRTKGTYLAAQFRRIAARRGKGRAVIAVGHSVLVAIYHMLTRREPYHELGAQYFDEHQRDHVQRRLVRRLERLGFAVTLEAIPATS

SEQ ID NO: 259558 - protein, 338 aa, unidentified
MKTYAGIDLHSSNNYIGVIDAKDKRLYSKRHDNRIEDVLKVLGKFKASLQGVVVESTYNWYWLVDGLMDQGYTVHLANPNAIQTYDGLKHTDDKWDSFWLAHLLRLGILAEGYIYPKHQRPIRDLLRRRLMFVRQRTSQILSLQSMITRNRGLNFSGAQIKRFRDEFIDKLFSDRHLVFTAKRNIETIRFLDRIVSEIEIEVKSQIKLKKEFVSLLTTPGIGNILGLTIMLEVGDIHRFAKVGNYSSYCRCVESKRTSNGKKKGENNKKNGNRYLAWAYVEAANHTIRCCPKAQKFFQRKMAKSERVLATKALANKLTKATYYIMRNQVAFDEEKLFG

SEQ ID NO: 259559 - protein, 314 aa, unidentified
MTSQIPVIGIDVAKESLSLCDTQSEEVFELANDRRTIKAWLKTLPPCCAIAIEATGIYHMEVATLAYAKGHRIYVINGFRLSNYRKGIGGRNKDDRRDAQLLARYLSHEQAHLEPWQPPSKVYSRLQTLLHRRAVLVRSATSLRQSFSQDRVLARALQPVLKRMAALEKRLEKTIQATLDEAGLKEQSKRCQAIEGIGPLTAAALNLAFLRGHFRNSDAFIAFLGLDVRLKESGRYSGRRKLTKQGDPEIRRLLHNASMAAARTERWRELYQGYLARGLKKTEALTILARKLARIAFALMQTQAAYQAQETKTS

SEQ ID NO: 259560 - protein, 458 aa, unidentified
MTPKRSKPKNDRTMPMIHPNAAAIDIGATMHMAAVRADRTPEPIRSFGTFTTDLHRLVDWFTECGVETVVMESTSVYWIPIFELLDARGFAVFVVNARDAKHVPGRKTDVSDAQWLQRLHSYGLLRASFRPKGQIAELRAYVRQRERLLEYAASHIQHMQKALTEMNLQLHHVVADITGATGLRIIRAILAGEHDPKVLAQLRDYRCHASAETIEKALTGSYRAEHLFALEQALALYDAYHEKVSACDARIEAVLKELSIGRGRRSDSLLSPRRPRTDPVNGLAFDVRAALFALLGKDLTQIDGLGPYLSLKLIAECGDDLSAWASSKHFTSWLGLAPSNKISGGKVLSSRTRRCGSRAAALLRLAAVTVGRTDTALGAFYRRLSARIGKAKAVTATARKIAVLFYNAVRHGMEYVDPGASFYETRYRTRVIDNLHRRAKVFGFVLQPMEPTPGAAVS

SEQ ID NO: 259561 - protein, 479 aa, unidentified
MKENLRRCCGIDVHKNSVMVCVLAPAGQRHIETKKRKFRTFTRDLKQLRAWLKNCQVTEIAMESTGQYWRPLWNLLEGEFTKLILVNPQHIKGLNGYKTDPKDAQWIADLLDSGKLRGSWVPPRSIRELRDLTRHRVNILEDLNRAKNRIEQLCQSGNIKVSSVATDLFGVSGRKMLKAIVENQHDAGWMADYARGQLRNKRRELELALQGTFTDEQRWLLEKELRQVEWLEGQVEGLEEEIERRVSGFEEAIQRLLTIPGIDRKTAWTIVAEVGVDLSAFADAKHLASWSGLCPGNRESGGKRMSGRTRKANRYVKRAMCQAAWAASHSKNTYLSAFYRRMAIKKGAPKAVMALAHHRIVVIYQVLSRKEEYVEMGGDYYDQRNKPRTIARLVARLGRLGYQVDLKLLENAMPADPTEKDNESEPAIQPDAVPEEGLGAKRKRGRPCKCRQRGIICKHQAAREVNPLIRQPPSEGRFS

SEQ ID NO: 259562 - protein, 479 aa, unidentified
MPPITKSRTNLKRKCAAPVTALASRDRVDVPTAKRRARRRSGQADPATLPVDVHTVAENRATLPPSGENPDGAPTRSETQISQGAEGRMTMRIVALDLGAKKTSYCELSQGQVVHRTTVSEVESLRPLLGPDQPAAKVAIEACREAWFVHDLLVEWGNEVVLVDTTRSRQLGIGQHGRKTDRIDAETLARALEAGRIPKAHVLSPKRRELRRVLGVRRALVEARAQLVTTVRGLVREQGGKIPSCTTGNFVSRAREQKLASCIAELIEPLLVLAQGIDTQLANTDEQLAVLCAQEPIIALLTTTPGAGTVVAASFMSVVDEAKRFHSAHQLESYVGLVPSEDTSGGKRRLGAISKKGNCYLRSLLVQAAWTIVRSSDKSDPLYLWAKKLEQRRGKRIAVVALARRLVGVLWAMWRDGTVYDAQHLAQQGVRGLHSAVQSLELQKEKLAQAAKKESVKHPHIQSTAKARRSSKTPAVKAA

SEQ ID NO: 259563 - protein, 518 aa, unidentified
MTQRSSLLCAEEPVSKTDPGVRRNHPLLHLSEAVFRANSTQKRIFVQAHPRQSILPRGKDVSDEGSSKMEVRYARCAGLDVHKQTVKVCLLIRQENGQIHKEFRTYGTTTQELLDLADWLKEQGCTHIALEATGVYWKPIYNLLEGGFELLVVNARHIKAVPGRKTDIRDAEWIADLLSHGLLRASFIPSAPQRELRELTRYRVRLTEERAREVNRIQKTLEDTNLKLGDVVSDILGKASRMILEAIADGETDPGALASLAVGRVRAGQQQLEAALKGTVTDHHRFLLREHLTQISHLDQAIQRVTTEIARRFTPPPSPSEAGEDSQQEAIPPEERPGDAAQEPLTSAKAPLSWAEAVVLLCSIPGISERAAYGILAEIGINMQQFPTAGHLASWAGVCPGNNESAGKRFSGKTRKGDPWLRRLLIQAAHAAARQKNCYLAAQFRRIAARRGGKRAAMAVAHSILVIIYHLLSEGTTYEERGEIFFEERDRQAIEKRLIRQLERLGNQVTIEPLVQAG

SEQ ID NO: 259564 - protein, 344 aa, unidentified
MKIKLLGIDLAKNVFQLCALNQANTVLYNRTVRRARLSSTIAKLEPITIAMEACSSAHYWGRTFEAMGHKVLLVPAQHVTPFVRGGKSDTRDALAICEAAQRPGLHPVPIKSIDQQDIQLLHRLRQRQVQHSTALANQIRSLGREYGVIFPAGIKSLISHLPEALEDGSNELSPVARYALADQHRCLIEVRQAMKDFLNQIEQLAGQHPAYVNLLPLPGIGPMIASAYIAAIGNGNQFKCGRQVSAWLGLVPRQYGTGGKIQLKGMTKNGDRYLRTLMIHGARAVITRGLKTRPELAQWIQPIIDRQGFNKAVVALANKMTRICWVIVTTGEAFDMKQAFKPVA

SEQ ID NO: 259565 - protein, 367 aa, unidentified
MDSVALSGGPIHLGLDVSKNKIAVGILRWDEQVPDTEMLFNDEPSVRRLINRFGDPGRLRVCYEAGPTGFGLYRLLGSMAVACEVIAPALIPRAPGDRVKTDRRDCRRLARLHRAGELVAIRVPTEAEEAVRDLCRARAAVVGDRTRIRHRLSKFLLRHDRVWRQTAWTLAHERWLLGQRFDDAALRTTYAHYRAMLSAREAELAAVEADLAYWYTHGPFADAVARLAAYRGVAQVGALTIASEVGDWRRFPAARTFMGFTGLVPSEYSSGDAVRRGHITKAGNTHLRTQLIESAWAYQHHPNLGVTLRRRQEHVDPATAARSWHAQQRLCARFRRLSARKTSRSVAAVAVARELAGFLWAEMTAAS

SEQ ID NO: 259566 - protein, 402 aa, unidentified
MRIETQPQDHPTAPGSEPGTVLVSFELSQSRWVLTVRAPGSTKLSRFTVPARDTEKVLSLLTTQRQQVERRTCRPVRIVSIYEAGLDGFWLHRWLETQGVESHVVDAASMLGPQRRRKPKTDRIDGEKLLRSLAAWLVGEAGVCSMVVPPGVAQEDIRRLARERGELVAERTKLSNRVGGLLANQGIAGFKPLKKAAWQVLRTLRTGDGRELPPHLRTTIERILQRLELLSDQIKAAEAERDALLRAARVNAAPDRVPEAATAASPEMAAAPLLLRLRGIGPEFSTVLPLECLNREFDNRRQVAAFAGIAPTPWASGRTEREQGISKAGNRRLRAILIELAWSWQRHQPDSALTQWFHKRIKGQSGRVKRIAIVALARKLLIALWRYGKHGVVPQGAVLKAA

SEQ ID NO: 259567 - protein, 413 aa, unidentified
MQDLLEICCGLDVHKESIVACLLTGATDVKPTSEIRTFSTMSYGLKELKEWLSECNCQHVAMESSGIYWIPVYEILESESHPMHLLVVNARHMKNVPGKKTDMRDSEWIATLLRAGLLRSSFIPEKRIRELRHLTRYRKNIVRDVTTQKNRIEKFLQSTGFRLSVFLSDTFGASGRNVMRHLIARGSINLEELDLCLKGQTRRNINNILVSVNGTMSRHQQQFLAISLDHLEVLETHLNQVEQAIDEETKKFEASMTILTSIPGIQKIAASTLLAEIGTNMSCFPTAEHLSSWAGMSPGNNESAGKRKSASVNHGNPYVKSMLCEIAWVVAGKRDSYLSKWYWKLKQRKGAKKAIIALGRKLLVMIYAMLKKGAPYDEGCFEQRRKQLENKRVSRMVSELNRLGYRLSSPALE

SEQ ID NO: 259568 - protein, 392 aa, unidentified
MVCVGIIVVLYIGIDVHKKFCYVCIKDEEGNIIKEFKVRNNRSGTETLLSIIGDKRAKAVLESTGNFWIRLYTQLEEAGVEVVLSNPKKNKAIAGAKIKNDRRNARTLADLLRTNLITPCYVPPPKTREIRTLIRHQINLTRSRTRSKNRIHALLSKYELEEDEEEDFTGSDQFGKAGWEWLKKRFGGGQLSEADQFTLGAEFRQVELLDQLIEEVNLKIAEESFGDENVKLLMTISGVDYYTALLFVSEIGDVSRFPSAAKLASWLGIVPELRESGERSRRGGITKEGSPRVRWALVQAARSAVRWDPHFAEKYNRIMKRRGDGKAIVAIARELAVAMYHMLTRGEQYRFRREESVKRKFKKLERRVRNANNSRTGIALEELPPKMRELHV

SEQ ID NO: 259569 - protein, 366 aa, unidentified
MKKINTVQIFRNEIFKEQKLTIGLDLGDRWSFYCVLDEAGEILLEQKVATTPEAMKQTFGKIPRSLIALETGTHSPWVSRLLTELGYEVIVAHAQKVELITKSNRKDDRHDARTLARLARIDPALLGPVRHRSAQAQIHLTVIRARAELVSARTALVNAARGSVKSYGQRLPKCGTQQVSRELAAALSAELRDVLEPLLKEIESLNERIQEYDERMEKIAKEMYPEVSLLKQVKGVGTQIALTYVLTIEDPYRFPKSREVGCFLGLRPGRRNSGQSEPQKKISKEGDRYLRTMMVQGAHYILGPFGEDSDLRRWGLKLAERGGKNAKKRAVVAVARKLAVLLHRLWVSGEVYEPLRNSHKAMRAVA

SEQ ID NO: 259570 - protein, 350 aa, unidentified
MVVVGADVHKRSHTFVAVDAVGKQVGQVTVPAVTEGHRKALAWARERFGDELVWAIEDCRHMSARLERDLLASGQKVVRVPPKMMAEQRRVARTRGKSDPIDALAVARAYLREPSLPVASHDEASRELKLLVDRRETLVAQRTATINSLLWRVHELDPAHAPKARSLDLAKHQQALRAWLVTLEGVVAELALEELDDVIALTARANAYAKRITDLTAQAAPTLLAMPGVGPLTAAKLVGESAGAARFHSEAAFARHAGVAPIPVWSGNTAGRVRMTRSGNRQLNAALHRIAITQVRLQGSLGKAYYEKKKAEGMSNREALRCLKRRLARVVFNHLTTDQATPATGLAAAA

SEQ ID NO: 259571 - protein, 430 aa, unidentified
MGLIVPPTIHPEREDQPLPYDWFVGIDWGSQQHQVYVLDRDRRRVGERVVDHDGASLARLADWLWTLSAGQPQRVAVAIEVPRGAIVEGLLERGFHLFAINPKQLDRFRDRHSVAGAKDDRRDAFVLADSVRTDQPSFRRLQLDAPQFLLLRELSRAEETLLEEFRRSANRLREQLHRFYPQMLQLCSAADEPWLWDLITLAPTPTHAMLLSEEQVQRGLKAHRIRRIKATEVLACLQAPALPVAPGTAEAAQAHCGFLLPCLRVLAEQLQACGQQVDALLRTMADEPGEGERPSDVAIVLSLPGVGRKITAWLFAEAAQPLTERDYQVLRTHSGVAPVTKQSGKRRLVVMRRGCNPRLRHALYHMARVAMQRDAHFSSVYTALRAKGQRHGQALRTMSDRLLRILVAMLRNGTCYDASRIRRESAVQMG

SEQ ID NO: 259572 - protein, 401 aa, unidentified
MLDTRDVAVFLGLDVGKGEHHATGLTPDGKKVVDKPLPNSEPKMRAMLDKLTAKYGKVLVVVDQPASIGALPLAVARDAGCEVAYLPGLTMRRIADLYPGEGKTDARDAAIIADAARTMPHTLRSIELDDETIAELHMIVGFDDDLAGEVTRVANRLRGLLTQIHPHLERVLGPRIQHPAVLTLLEQFGSPEAIRKAGRRRLVTLLRPKAPRMAERLVEDIFTALDEQTVVVTGTDAAAVIVPKLAKNLAALLDQRKQLAADIEELLKSHPLSELLTSMPGTGVRTGARILIDVGDATAFPTAGHLAAYAGLAPVTRRSGSSIRGESPSRRGNKHLKRAFFLAAFASLSDPASRAYYERKKAEGKRHKQALMCLARRRVDVLFAMLRDGTFFEPQAVPQAA

SEQ ID NO: 259573 - protein, 422 aa, unidentified
MLAESQDEEQIIARVAALDIGKAELVCCVRIPGPGNTRRRLQEVSTHSTMSRSLAELANHLVDLRIERVVMEATSDYWKPVFYLLEAHGLEPWLVNARDVRHLPGRPKTDVLDSVWLCKVAERQMLRPSFVPPAPIRRLRDLTRYRIDLVGTRTAEKNRVEKLLEDACIKLSVVASDIFGVSGREMMAALIGGERNPKVLAQLARASMRRKISELEEAFTGLFDDHHAFLLARMLSRIDGIDADIAAVDEQIEAQLAPFAAAAERLDEIPGIGPVAAAIILAEIGVDMTRFPTAGHLCSWAKFSPGINSSAGKTKGNGSTGHGNRYLARILGEAAVGAGRTDTFLGERHRRLARRRGKKRAIVAIGRSILVIIWHLLQDPDARFHDLGADHFNRHTNPDTSKRNHVRQLEALGYTVTLTPAA

SEQ ID NO: 259574 - protein, 385 aa, unidentified
MERQPFVPRDYDVFAGLDVDKRSIAVTFTDHQGVSRSMRIPYSVEHLWTYVRKHFAGQKVAFAYEAGPTGYGLYDGLVAHGAPCVVAAPSMIPKAPGQRVKTNRLDSRGLSETLRGGQLKSIHVPTPPYRDLRHLTQLRDTFVRELVGMKLRLKALLLLEGIAFPPAPAGSQWSGRVKQQLRTLACSGTVRFKLDQLLDSVEFSEQQVLKTTREIRRFCQHDPELARCIALLRTIPGIGWLVASQLVARIGDWRVLDNVRQLGGFLGVVPSERSTGEKTERGSITRTGDSRLRSKLIQAAWSAIRQDGELRAFYRSVYRTHPRPLAARVAIVAVARKLTTRIAAVLMQQRPYVVRVRVHADSLTEEETPPQGTTRRLAEPGGSRS

SEQ ID NO: 259575 - protein, 442 aa, unidentified
MNPSPTAPIVKYVGLDVHAQTVAVAIARQDGDVVSYGTVPAHSHSIDRLHKKLTEDGAQVRYVYEAGPTGFWLARHLRGKKITCEIVSPSLVPRKSGDRVKTDRRDALTLARLYRAGELSFVHVPDEADEAMRDLVRTRLRAVEDLRRCRQRIKGFLLRYGRRYDGRSAWTAEHLNYLSRQKFDHPGQQIAFEELLNAVADPADRIERLTKAIEAQVEVWSRRPLVQALMCLRGLALLNAVTWVAEIGDFTRFTHPSQLMSYIGITPSEDSSGQKRRQGAITKTGNEACRRAIIEAAWQYRLPARVTPHIRARQHGQPQAVIQIAWQAQTRLCARYQALIRHRKKTVVVVTAIGRELVGFLWAIAREMAAPGTAAAEAMKRKTPEAMEKETAVPVKPKNKAGRTYALEGRKKYAPAKPAVGNRALKSGARKALKKKKNAAAH

SEQ ID NO: 259576 - protein, 386 aa, unidentified
MRRAAKRGPGPSHLLITPDHAGNVVGIDPHKQTLTATVVDPCGGIVASEHFKVSGDGHRALEAWAKQFGAIARWGVEGAAGWGRHTAIFLTGRGYDVRDVCANRTARNDRGRQRGKSDVLDSERIAREVLAHPLLPKAFKRAGQDQGPDEQHQLLAIWHNRRQSILKSRQHLVNEAEHLLCELPLELREQLPASKAVRPRLTALAARNRRRRYDPPTKLRLQMLDEYHAQIAALDREEKQVVAHLTELARESGSTLAELCGLSVRSVAELLVEVGDVRRFTEGGFARFNGTAPLPASTGEGPGEPIRHRYNPGGNRRINAVLHRMAITQLRCEPRAQAIYANARASGPHTKKEARRVLKRHLSDVVYRRMTRDLAAHTTTEPLLAA

SEQ ID NO: 259577 - protein, 362 aa, unidentified
MDYRIGCDAHKHYSQFAVMDDGGNLLAQRRVDHQPGAIRTFLENLPEGTPVALETVGNWYWIADEIEAAGCLPLLTHAAKAKVMMGNVNKTDKLDAKGLAKLLHLDSLPTVWLPPGEIRDERELHRTRMALSKLRTALKNRIHATLAKYGITSTEHSDIFVGTGRAWLETTLSHLPPQTERCVAQELEALDGLQNQIALLEQYIRERTALTPSIQLLKSLPGVGNILAIVIEREIGSIDRFDASGRLTSYAGLVPTVHASGGKTHFGHMRKPSNQYLKWAFIEAANVVVRHRHHPAWKVTYVCQIYDQVSQRKGHAVAVGAVARHLAEGAFWILKRQQPYRPPASRQASPKQVRGRAQLVST

SEQ ID NO: 259578 - protein, 339 aa, unidentified
MAEYYAGIDLGARSSWLCVVDAKGEKQLNRKVPNDPARILDWLDPFRPSLQVVIESTFNWYWIVDLLEDHQIEVKLAHPLYLKAIAYAKVKTDQVDAHTLAQLLRLDYIPEAFIYPRDLRPTRDLLRRRHRLVSWRSDLVRVLHFQLISHNVTTFGRNAIRQLDDRQLRGLLTHPHDRQVGRSILHLIASLDLEIAELEKQVSASVFRKKPVVLLKTIPGIGKILAATIYFEVGQIHRFASDKAFASYCRLAPTVAQSGGVTRQGRNRKQGNRLLKWAFSEAAQLAIQGYPTIREQFEQLLRRKKKRILVKSILAHKLAVAAFHVLHDETPCQPGFLTN

SEQ ID NO: 259579 - protein, 342 aa, unidentified
MAVQSLHSPRYFYGGGFVVKVVFPTCCGVDVHKSFVVATIITTPTDSLQPHYQKKRFSTFNSDLNRFATWLLEHNCLDVCMESTGKYWVPVFNILEKRGIRVVIANPKWVKAVKGSKDDTKDSKWIGDLFRIGLVKSSFIPELKIRILREFLRYRYKLVSMKSSEKNRFQNAFTVCNVALDSVVSDMFGKSATAITDYLTSDESFDPEHCVSLLQRSLKKKAEKVLESIEGYSISDEQKARIKIIREHYDFIEKLIAKVDTCVNEMVEKYEGEINLLCTIPGIDRNSAITIISEIGTDMSQFGSSKRLCCWAGLTPGNNESAGKKKSVRISRAGVYLKPALV

SEQ ID NO: 259580 - protein, 388 aa, unidentified
MQDVAHRPVAATTIGSDLCAIFISLELSRSTWLVTSLSPGHGEKMSKHSVKAGDIAALLARFSELRTKACARTGKSLPIIVIQEAGLDGFWIHRVLLSEGIESHVVDAASVATSRRRRRAKTDRIDGETLLRALLAYKRGEPRVCSMVRAPTPEDEDRRRICRERKVLIMERVQHVNRIKGLLFSQGVSGYEPLHRDRRAQLDALQTGDGRRLPQHLKAQIGRELDRLELVLEQIKAVEAERDALLNAEQTKVSAPPPMLLALHGVGPEFASVLWSEGLSRHFDNRRQVAAYAGLAPTPWQSGSINREQGISQSGNPRLRTTMVQLAWLWIRHQPVSALTLWFKDRNERTGGRRRKTTIVALARKLLVALWKFVSAGVVIEGAMMRPA

SEQ ID NO: 259581 - protein, 429 aa, unidentified
MIDEVSRYNYFCQFRSTIRSSRNHLIVGIDVAKDKHHAFFGTAYGKTLLRRLLFGNDKNGYLRLIEQVNALKSQHQLEQVIFGMEPTGNYHKPLANWLIENGYEVVLVGGKAVKDNRQLLDGRWDKNDSKDSANVADLMGQAKCQFYEYPEDDLVGLRSLLSLRKRLKKEEHRLRMQTRNSLLSKYFPEADCYLKNCTEEDLAIIRWYLDPRKIVSTDFKEFVKHVTTKDRGDRQVQRLRTIYDAAENSVGLPVNSATVFEAQMIVDRIRNVKKEVLKVMSEMKVVCDNLYGYTLLQTIPGFGPYITALVLATIGNPFRFKSRKQVIRLAGLDLNAKRSGKTSSVSIPVISKKGDADMRYGLYQAGLIASNCNESFRQLFYNMLEGRQRERGIRTKMRVKLAARLLVIAWTMLKSNEPFDASRLTTDLN

SEQ ID NO: 259582 - protein, 352 aa, unidentified
MDATTVAIDLAKDVFELAFADAHGRIIERKRLSRNAFSRYLANRPPMRVVMEACGSAHHWARVFQAQGHAVRLLPARAVKPYVQGNKTDRADAAGILEADRCGQIASVAIKTPEQQGVQAQHRVRERLKAQRTSLLNLLRGALREFGVVIPLGATKVKPAVRDALEDGDNALPMSLRQTLASVLDQIDTLGDMMADIERQLDAFASRDLDSRRHQQAPGVGVLTATAISASAGDLHRFASGRHFAAWLGLTPREHSSGRKRQLGSITKRGDPYLRTLLIHGARSALCAALLRRKRGQALDRFQTWALEVAERRGHNRAAVALANKLARRLWAMTRDGKPFDGDHVSVAPAAH

SEQ ID NO: 259583 - protein, 366 aa, unidentified
MDQGITFIGLDVHKRSIVVAVREPGSGGVQEERIPHEIPVVKRWAQRWKRRSGGQLLCAYEAGACGYALQRQLESLGVPCQVVAPSLVPRKPGERIKTDRRDARKLAEYLEGGLLTEVRPPTPSEEAARDLCRAREDAKQDRMRCRHRLSKFLLRRGRSYPAGRRSWTLAHRAWLKQQSFEDLYEQAVFDDYRLAVEQVDARIAALDRQIEGLAQAPPYRAAVGALRCYRGIATHTALGLVTELHGIERFDRASGLMAFVGLVPSEASSGDRQRRGAITKAGNGHARKLLIEAAWHARHKPAIPVALRQRREGQPPEIIAMADVAQNRLHRRYWRLVQRGKPTTVAATAVARELAGFVWAALRAVA

SEQ ID NO: 259584 - protein, 314 aa, unidentified
MKEQTEYFVGIDISQKELEVAVKNAPIHFTETNTSKGIENLVERLKQVSPKLIVMEATGGLESDAAEALYIAGLPVAVVNPRRTHAFARAIGELAKTDEIEAKMLSRFAEAVQPEVSRFRTSEEEKLMALVRRRKSLVEMRAKEKTRLKSANNSLNDNIRQHIAWLNKAIDNLQEEIDNQIEQTPLFRKKNKIIQSFKGAGQASSQILLAEVPELGYLNGKEIAALVGVAPMNNDSGNSQGNRSIQGGREAPRTCLYMVAVTAIHYNSVIQQFYERLRENGKAFKVAITACMRKIIVILNAMLRDMHYWDPQFT

SEQ ID NO: 259585 - protein, 414 aa, unidentified
METGYRGLAAIDVHKSMLAVVVREDHNGQVVYSQRKFGTTQNEIQHLAAHLQQYQVTEVVMESTAQYWRPVWYGLEPHFRLHLCHPLRTRGRRGRKSDFRDARRLVDRLHSGDLEDSFVPGAEQREWRWMTRTRVDLKDKMGVVQSQIEGLLEQGGIKLSAVVSDTLGVSGWAMLQLIAKGETNLDVLIAEARGTLRKKKGVLREALAGRFSRVCQSLLKQYLQQVELLRQQIVEIDQLLMESMKAYALTLHRLCRMPGVDMTAAQQMLAEIGPEAEAFASASEFASWAGICPGTQESAGVNYSSRCPKGNRYLRRLFCQVAWAAVHTKETFFASLFARLKPRIEARGAAWAVAHRIAKLVWLMLHEGVEYQEKGPAAKNPKTLQRKFRRLLKDLRAMGIDPSTLDPSLAEVRA

SEQ ID NO: 259586 - protein, 375 aa, unidentified
MEEGMTKEQLTIHVGIDVSKDKLAVAIAGGGVRDEVLSLGTFENTPASVDRLLKKLSGRGLPVSVCYEAGPTGYGLYRQVRAFGFECCVVAPSLIPVRAGDRVKTDRLDAIRLARLFRAGELTPIWVPDETHEAMRDLVRARESAAEDQRHKRQLVSAFMLRHGRIYHRTKSWTMRYRRWLQSQSFDHPAHQIALQEMLQAERNATERHDRLTGHIEALVPEWDLAPAVNALQALRGVALISAVTFMAEIGDVRRFETPVKLMAYLGLVPSEYSTGKTTKRGGITRAGNSRVRHKLIEGAWTYRLPARPGARKLYILQEQPAEVQDIAWKAQSRLTARYRKLSQRGKKSTVVTTAIAREMAAFMWDIARRTMPAC

SEQ ID NO: 259587 - protein, 350 aa, unidentified
MLHAGLDLSRRRLDYCLLGEGSSEPVGFGAVSPDADGLAGLARVVALRHRGHDGVCAVIESMNGARFVHDTLERCGWDVQVADAARVKGFAPVACKTDRIDAWVLAELSRRDMVPAIWLPDFEQRSERQRARFRLYLVRQRTSLKNHVHAQLMAFGHACPVSDLFGARGRALLARLDFPEPWRSGVLTAVGLIDELERQISAIERDLKALGAEHRYVRRLVTVPGIAWVLGYTIAAEIGDIERFRTPTKLIGYSGLCPRVYQSGDSDRRGALTKQGPKYLRWALMEAATNAAKHPLYRQRYQHTKTRLGKQRGAKVAQVQLARTLTEAIWHMLTRDQDFAPAGAPLPLAA

SEQ ID NO: 259588 - protein, 348 aa, unidentified
MLADQLDYIVGVDPHRDSHALAVVHVVSGAVVFEANVAANSDGYAHALRLVDRHAPGRHAFAVEGTGSFGAGLTRFLSGRDELVLEVGRLRRERRSGGKTDALDAVRAARSLLAQERPATPRAGGERQALQALVAAREGAVNAKRAGLCQLRDLLITTPEPLRSELRPLTRTRLLHRLAATRPHGRHDAELRGSLLALRSIARRVLQLTTEERELAREIETITRRLAPQLLEQPGIGPHAAAQLVLSWSHRGRIGSEAAFARLAGAAPIPASSGQTVRYRLDRSGDRKLNRALHMILVTRKRSHPATIAYIERRLQEGKTRREANRCLKRYLARSLYRLLEHGPPLAT

SEQ ID NO: 259589 - protein, 338 aa, unidentified
MAIVYVGIDLAKNVFAVHAVDEAGKPVLVRPAVPRARLHELIASLPPCTVAMEACSGAHHWARLFAARGHTVRLIAAKFVTPYRMSGVRGKNDAADAAAICEAVQRPNMRFVPLKSQQQQSQLMVHRARQGYVQARTACINRIRGLLAEFGQVLPLKANTVRRQAGALLEDLPGWANTVIGDLLSELHRLDERIAQYDRHIAQIAREDERAQRLMALPGIGSTTATAVVAMIGNGHEFNCGRQFAAWLGLTPGQYSSGGKTRLGRITKAGDSYLRSLLILGARAVLARAKASTDAIGSWALALQQRRGYWKAVVAVAAKNARLAWAVLRRGEAFKMPA

SEQ ID NO: 259590 - protein, 317 aa, unidentified
MNTKNNQNEINVGVDTGKTQLDIYIRPLDIYFTVENNQSGIKHAIQILKKHPVTRVTIEATGRLEQPFIIACAEVNIPFVIANPVNIKRFAGAIGQKAKTDKLDAQLIAHFGEAIKPPLSSLKPEQMRLMSDLLSRRRQLMDMQTMEKNRSQIMPKTLSSLIKPILTALKNQIDKVDLKLQKLIEECDEYKAKNAIIQSVPGVGNVVAFNLLSDMPELGYVNNKEAASLVGVAPFNRESGVYQGKRMIRGGRPKIRTAMYMAMMSAIQCNSKFKDLYQRMVKAGKPKKVAIIACIRKLVVIINSMVRDGVMWDPKMV

SEQ ID NO: 259591 - protein, 332 aa, unidentified
MSAVVCGLDVHKESTYATILDERGQILVQRKMPNEDIPAFLDMTRPEKLAMEASTYIIPLYRKLTEQGYDVTVSHPKKTRYIAEARIKSDRVDSRALAELLRLDSLPESYIPPREIAAVREKVRRRSFMVRQVTKLKVKIRDTLAYEGIKPPTGFGLYTIKGVEWLRGLGLEPVDCYLRLMEPLKYEVKTLSSRLKREAGVDPEVKLLMTIPGIGYYLALLIKAEIGNVHRFSSGDHLASYAGLVPSTRSSGGVERHGGITRQGSRWLRWALVEAARVHTRYDTPVTRFYHGVAERRGHKAALVAAGRKLATVCFSVLVNGRPYFNPLDAQA

SEQ ID NO: 259592 - protein, 341 aa, unidentified
MKKFIRIGVDLAKNYFQVHALESENGPAVTRKLKRSKMHEFFSQVEPCLIGMEACGSAHYWARELKAMGHEVLLMPPAYTKPYVKRGKNDAVDADAICEAMSRPGMRFVPIKSAEQQATLMLHKTRELLIKQRTMSVNALRGHLSEFGIVAAKGIGRVDELLDLAESDATLPNAARASVKVLVHALEGLDKAIDDLEKEISSAHAQNEMSRLLDKVPGIGKLIASVIAASVPDPSVFKSGRDFAAWLGLTPRQNSSGGKQTLGSITKQGNRYIRKMLVLGATSLLNVVGKRKGALRDWIVALLTKKPARLVTVALANKLARILWAMMKTGECFRTEMFAKA

SEQ ID NO: 259593 - protein, 403 aa, unidentified
MGAISGIDWASEWHDVHIADEHGAVLAIERFAHDERGIGALVELLLTHQVECVAIERPDGLLVGRLLAAGIFVLAIHPNQVKAARDRFRAAAGKNDRFDAFVLCELARTDRHRLPALAPCGDETLALRTLVRSREDLVAARVALANQLRAQLQAFWPGAERIFADVDSPIALAFLERYPSPSDAHNLGEKRLQSFLARHAYSGRRTPAQLLTRLRNAPQASIGELEADARRTTVLALLAVLRPIVEQIAQLTSQIAGATRAHPDGPIFQAFFRDPKSVTTAAGLLAEIGDNRARYPTDDTLAADGGQSPVTIQSGKHTAATFRWACDKRLRNHLCVLADSTRHWHPWAHDVYQRARARGADHPHAIRILGRAWTRILWRCWHDHTPYNPTQHHALNKILAQQG

SEQ ID NO: 259594 - protein, 338 aa, unidentified
MAIVMGLDQHRAQITAEWFDTETGEVSRGRIVPADRSGVRKFLARFVGRELEVALEATTGWRFVVEELHRVGARVHLAEPAETSALRGNKQRAKNDRADARHLRELLMAGRVPESWVPPGHLLDLRARVRLRHTLVDQRGEWQQRIQAVLYHHGLPKRAGLLTCENRAWLEQLPLPAAGREQITVALGMIDAGEARVAPLDKELRSYARRQPGCHALQALYGIGELTSVVILAELGDARRFSSSREAVRYAGMDVTVHASDKRRAPGHLSRQGPPALRWALYEAAQTARRKTSPDYVYYQQAAERLGGNRALLAVMRKLLKRSYHTLRELGEEGLRPA

SEQ ID NO: 259595 - protein, 342 aa, unidentified
MSLIKAIGIDLAKLVFSIHGVDEYGKTKLKQTVKRNKLLEKIANIPPCIIGMEACSGAHYWAREFTKYGHDVRIMASKFVIPYRQSEKNDANDAEAICEAVTRPKTRFVCIKSEEQQAVLCLHRIRQGQIKDRTAMINRLRGLLSEFGIIMPKGRYPAQKHIVEILEDAENGLPDLARELLHDLWLSIKQQNQDILRSDRKLYALANQMKDAKRLMTIPGIGEVTATAVVATVSDAKHFSTSRQFAAWIGLVPKQYSTGGKPTLGRISKRGEKHIRTSLIHGARAVIANCANKIDRTSLWIKALIERRGFKRAVIALAAKNARLIWSLLQSGQEYQVNYVKT

SEQ ID NO: 259596 - protein, 372 aa, unidentified
MNYNTVYVGMDVHKENFTFCAYTIDAEKGSRFQRTEVDYKNVLRYLEFLRTVYGNDANFICGYEAGCLGYTLYHQLTEHHVNCVILAPTTMLEQRSKKRIKTDKRDAEIIAKCLAQHNYSPVHIPTAADEETKEFLRMRDDHKLALKKVKQQILAFCLRHNYRYDGNSHWTAAHIKWLKSLKPEALYKEILDEYLLTYTALSDKLERLDKRIEELASKDAYKESVKKLCCFIGVKTHTALSVLVEVGDFHRFASAQNFASYLGLVPGEDSSGDGQTRLGITKAGNRHVRMLLTEASQCYARGQIGFKSKKLKSRQAGNSPRVIAYADKANERLRRRYYKMVLGKSKKPNVAKTAIARELACFMWGMMTDHVA

SEQ ID NO: 259597 - protein, 325 aa, unidentified
MKKIIIGIDISSKTLDICLKNADSTEHLSIANQVKAIHGFLKKFVNQQVVVAMENTGRYNWQLYEALPKYDFQVYVISALHLKKSMGLVRGKNDKIDAERICRFIQKNQDECPVWKPVAVNIQKMKVLLAERNARIKMKRQLAGQKSDYKLMKTIGLEKQLTSLNQGLISALEKQIEKLEAEIEKIIRSDESIRQQAKQIRSIPGVGPVSCWMMIAKTEGFSLIAEPRKMACYCGVVPFEHQSGTCINRKPRVSSYADKDMKSVLHLAAMSAIRLDNKLRDYYRRKVAEGKNKMSVLNAVRNKIIHIIFALIKNQATYQDHLVLS

SEQ ID NO: 259598 - protein, 426 aa, unidentified
MKYTQNEKILQIKETTLIIGIDVGSEKHYARAFNFRGVEYGKLLIFDNNAEGFAKLRVWIAKIAESNGFTEVMLGMEPTGHYWFNLAENTKKMGMRIVLVNPHHVKKSKELDDNNPTKNDRKDPKTIAMLVKDGRYIEPYIPEGIYKELRVAMDSRWRLVKELSAIRNRIGRWICIHFPEFTKVFRDWEGKAALLILKECPTPKKVVEKGIEGIIALWKKHKIRAVGIKRAERLLESAKTSIGTSEGLISAENELSMLLEDYESKMRQLERTMALIEELAMQIPGFEKMLEIKGVGLVLAAGFLAEVGDIFRFSHPKQIQKLSGLSLKENSSGKHKGQTTISKRGRKRLRYYLTFGIMPLLSNNEEFRALHQYYTTRKERPLKKMQSLVALSNKLIRIFYVILTKDIAYDPQKMMSDIKRPEVKVA

SEQ ID NO: 259599 - protein, 457 aa, unidentified
MPRKKAKSKNDRTMSMVHPNAAAIDVGATLLMAAVRPDRTPEPVRSFGTFTTDLHRLVDWFAECGVETVAMESTSVYWIPIYEMLEARGFTVFLVNARDAKHVPGRKTDVSDAQWLQRLHSYGLLRASFRPKGQFTALRAYVRQRERLLEYAASHIQHMQKALTEMNLQLHHVVADITGATGLRIVRAILSGEHDPKVLASLRDYRCHATAETIEKALTGNYRAEHLFALEQALALYDAYHEKVSACDARIEAVMKDLSIDRSHDAATLTPSRRRTDQMNGLAFDVRAALFALLGKDITKIDGFGPYLSLKLVAECGDDLSAWPNAKHFTSWLGLAPNNKISGGKVLSARTKRSGSRAAALLRLAAVTVGRTDTALGAFYRRLSARIGKAKAVTATARKIAVLFYNAVRHGMEYVDPGASFYETRYRKRVVENLHRRAKTFGFVLQPIEAASSGAVS

SEQ ID NO: 259600 - protein, 367 aa, unidentified
MKMYIGLDVHSKQTTFCAQDCEGTVIKEGRVPTSNEGFEDLLERLDAPEGAAIGLETGTQANWVARRLSMLGMNPVVIDAREVRLKARRVGQKSDRRDAFEICDGLRRGIYTGIVYVPSPEVERLRRIISRRRHFIKVRTGQVNAVKYQLRSLGLGDKAKTLTTVAAWEKLLAQTLPDWLGQHISLHFQVWRVVQENIEELEEELKQALGPFAEEMRLLSSAPGVGPITAATFIAVIARPERFAHSGKVVSYCGLAPSTYDSGGRERHGRITKRGSAELRSMLCEAAHHAGKPQHPLNPYFVRVCARQGYKRAIVAVAHRLARILYRMWLNREEFDESKLNVTYEKKEKTRTVYYRIRKPGELARQA

SEQ ID NO: 259601 - protein, 362 aa, unidentified
MMKLKYSICCGLDIHKNVIVATIVITNKDGISEYRQKSFSTINSDIQRFHNWLIENNCYHVCMESTGKYWIPIFNYLENDIDVFLTHPKYVKAIKGKKTDKKNSKWIADPYKFDLVRCSFIPPNDFRQLRKLSRYRFKLVCMKSSEKNRIQNCITVSNVGIASVLSDPFGKTATEITSYLLKHTADSMDEKAVRKLIKKGAKSKSDEIIETIKGYNIETDQTKKLELARGHLEYLDDMITQTEVELYVRIKPYYEFVEFVSTMPGMTELSSTIVLAKTGVDMSIFDDAQHLCSWCGLSPANNESAGKKKSVRIAKAGNYLKPLMVQCALAAIKNKKQSYFAIKYRRIKKGVVTKKQSLPSQE

SEQ ID NO: 259602 - protein, 538 aa, unidentified
MSRTCTRRSSARRPDADTASARPAPGAAMDPADATPQPTLPVNGLASPGITPIGVGIDTSRYGHYATFLRPDLQPAAADLAFVESAQGYAQLRQRLGGIAAKYGQVHFHFRVDVAGRYADNLLAFLWALPEPKTVSCGDPQRNKNYRAALFGHKKSDPVESAAAARYALTEKPQPMPVVSPQIRLLGHLASRLEAQARQVTRLVNQLHNLLARAFPELALVVADISAGWVLELLDRYPTAAKLARARRSALERIPYLPDQHIPHLLDSARISVASLSGPVAEELVRAQVRQVREAHVRQKSLEKMLAKAYRQLPEPNQLDTIIGFGEVTAAILTAKIVDPQRFVEPGKLVSYFGIFPVEAASGIDREGKPRAPKRMVMCPRGNDLVRRYLYMAALSAAQHNPAVRPLYQRARAKHPNHPGIAVGHAMRKLLHLALAVWKTGKAFNPEHYPWDQAAHLEGSAQPEPATAAATSTQAAGHNPETVPESSVVTAACATANVAAQPVVGNFTSAEADSASAPADGPALPPADAASPWIDFDH

SEQ ID NO: 259603 - protein, 461 aa, unidentified
MARSRARQQPPRPTPPGSLPAVSTNAAGIDVGAMAHFVAVPAGRDAEPVREFGPFTNDLYRLAEWLQACGIETVALESTGVDWIPLFQVLEERGFEVKLVDAHQLKRVPGRKSDVLDCQWLQQLHTFGLLAGAFRPDDQICVLRSYMRQRAMLAQYAGQHVQHMQKALVQMNLQLQVVLDDITGATGLKIIRAVLAGERDPHRLAALRHGKCKHSEATIAEALRGDWREEHLFALEQAVELVEAYQAKIAACDARIQAHLQRFEDRGTGAPPPPGPKPRADRHDLSFDATAELYRCTGVDLTAIDGLQAHTVLKILSEIGLDMTPWPTAKHFGAWLGLAPNNRVSGGKILSRRTTPTANRAATAFRVAAQSLHRSKSALGAFLRRKAAHLGMPKAITATAYKLARILYAMLTTGSEYVDLGQDAYERAYTARVVRRLSRRASELGYTLVKHDSPHAVAPSA

SEQ ID NO: 259604 - protein, 339 aa, unidentified
MGLYTGLDLHSSNTYVGIIDGDGRRIWKKKLQNDPGLISSTLRPFKEDIAGVVVESTYNWYWLVDLLKEEGYEVHLANPSRIQQYSGLKHGDDEHDAFWLAEMLRLKILPEGYIYPKEQRPLRDLLRKRGHLVRLRTSLIQSLQNILARNMGSKMNTNRMKALRTDHVTPLLAGNDDLSLAGKVSKDAIDALTRQIKAIEVVVEKKMDIRRPYDLLLSMPGVGRVLALTIMMETGPIERFPKVGNYVSYCRKVPAARFSNEKKKGTSNRKNGNKYLSWAYAEAAELARRFDPEARAYYDRKRRRTNEPIAYNALANKLSRAAYYIMRDGVSFMAERMFS

SEQ ID NO: 259605 - protein, 407 aa, unidentified
MEVIIEYACGMDIHKDSITACIMTPKGKEIRTFSTKTVFLLQLIDWIKEHGCTHVAMESTGVFWKPIVNLLEAENIEFLVVNAQHMKAVPGRKTDVKDAEWIAKLLRHGLLKASFIPDRNQRELRELVRYRRSIIEERARQHNRIQKVLEGANIKLGSVVSDIMGVSSRDMLRAIADGEDDPEKLASFARRTMKKKKDELELALRGYINPHQRLMIKTILNHIDFLSDQIELLNLEVASRLSSHQEDIERLDSIPGIATRMAEQILAEVGTDVGNQFPSSSHLCSWAGLVPGHNESAGKRKSSNMKKGNKYLKSALIEAAHSIRGSKTYLGAMYRRTAARKGKKRAGISVAHAILRIAYYLLTRKEMYVDLGEDYFDKQKEQSIVRYSVRRLENLGYNVTIIEPNAS

SEQ ID NO: 259606 - protein, 352 aa, unidentified
MKEFIALDAHKRYSWMEREEIKSCKVWHARIDHAPGAIRQSLEGRAKGTAVAVEATGNWYWIVDEIEQAGLEPKLVHPRKAKLMMGMINKTDKLDAHGRNQLQRNGTLPTVWIPPRELRDLREITRARMVLAGQRTRLKNRIQATLNKYGLVPEGEASDPFGKKARLSLEEAVQKLPLQTAQVTEMLLRQLDFVQKQIEELERKIRALVKDTVEMDRLRSLPGIGWILSAVIALEVGEMTRFASAERYASYSGTTPRVHASGDKTRYGRMRTDVNQYLRWAYMEAAHSVSLHRKTYPERQVSCLYERIRGRKGHGKAIGAVARHLAEATFHVWRKGEIYRDPGLQQGQSRVG

SEQ ID NO: 259607 - protein, 342 aa, unidentified
MQISTIGFDLAKHVFQAHGVDMHEKVVVKKQLRRAQVIAFFEKLPPCLIGMEACASAHYWARELTKLEHKVKLMPAKDVKAYVKRSKNDAADAAAICEAVARPTVRTVPMKTPDQQARLMQHRTRDLLVRQRTQLSNAMRAHLAELGLIAAQGREGLKSLLAIVANENDDRLPADARASLGVLAAQILACNAQIATLEKRIHTQHRTCEASQGLETIPGIGVIGATAIAATVPDPSVFKTGRDFAAWIGLVPRQDSAGGKQKLGPVSKQGDRYLRRILVVGAHAVLKHARTHPEKHPWLMQLLARRPAKLVAVALANKMARIAWAVLARGETYRAPRIAATV

SEQ ID NO: 259608 - protein, 347 aa, unidentified
MKFYTQQHTHYCGIDLHARTMYLCILNQAGAIVLHRNMKADSDSFLKAIAPFRDQIVVAVECIFSWYWLADLCAREGIAFVLGHALYMKAIHGGKAKNDKIDAQKIAVLLRGGMIPQAYVYPQDMRSTRDLLRRRMHLMHHRSQLLAHIQNTNSQYNLPEIGKKIAYKSNRAGVAERFADVSVQSSIRFDLRRIDFYDGLLNEVELEILRHAKLHDANTFRLLDTVPGVGKILALVLLYEIHDISRFPTVQDFVSYCRLVKPKKESAGKTYGFIGAKIGNAHLKWAFSEASVLFLRNNPEGQAYVARLEKKHSKGKALTILAHKLARAVYYMLRRNEAFDMKRFLNR

SEQ ID NO: 259609 - protein, 347 aa, unidentified
MVIVDSACVVVGGVDTHRDSNVAAVIDLNGGVLGVESFPTTADGHRCLSSWMAGFGVIDRVGIEGTGSYGAGLARHFVAGEVMVIEVDRPNRQKRRRHGKSDQLDAVEAARGALSRRCDGQAKSGVGYAEALRALLVVKRSARSTRIRTIVQLRHLMFTAPDELRARFAGLSAAHLVIEAAKLRPRPGGDPALHATKTAATTLARRVQALDVELAALDAQIEPLVKAAAPALLNVYGVGFDTAAVLLVAAGDNAQRITSEAKWAMLCGVAPVPAMTGRVDNHYRLNIGGNRHANNAMWRIVLTRLGQQEPRTVAYMNRRLAEGKTKRHIIRCLKRYVARETFRALPR

SEQ ID NO: 259610 - protein, 345 aa, unidentified
MKYFAGLDVSLEETAICVVDESGRIVKEGRAVSEPQALSQALRKVDLQLERIGLEACSLAAWLHDGLRAEGLPVICIETRQANAAMKTMPNKTDRNDARALAQIMRTGWYRQVHVKSQQCRLWRSLLVARRTVLNEMRTIENVVRSILREAGIKLGTPSRAAFADRVRELIGADTVVLALVEPLLAILATMLRELGRLTKHVLNIARKEQVCRRLMSVPGVGPITALAFRATIDQPDRFRRSRDVGAHLGLTPARYQSGETDIQGKVSRCGDELARTALYEAAHSLLVVSKKWSSLRAWGMNVAKRRGMARARVAVARKLAVILHRMWSDATEFRFGKETSSASA

SEQ ID NO: 259611 - protein, 286 aa, unidentified
MQVTTIGLDIAKNVFQVHGIDAAEKVVVRKQLRRRQVLEFFKALPSCLVGMEACATAHYWARELTKLGHQVRLMPAKDVKAYVKRKKNDAADAEAICEAVRRPTMRFVQIKSTEQQGRLMLHRARDLLMRQRTQVINAMRAHLAELGIVAAQGRDGIKELLKIIASEEDARLPVDAHTSLVVLAAGLQAVQTLIGSIEKRIMVQHRSNESSQRLETIPGIGVIGATAIAATVPDPKVFGSGRDFAAWIGLVPREDSTGGKQKLGPISKRGDRYLRRILVVGACAVL

SEQ ID NO: 259612 - protein, 346 aa, unidentified
MIPVASDVHKGRCWMAMIPPGEDLRMLEPIECTREAWRERLAELPPDAEIALEVSTSGYFVMSVLEEAGWRERAHWVHTAGIDSLRKQKSDRLDTRRLVKKLAVHDVDPLPEAWFPPPPIRELRLLARQRCGIARLRAQTKNRVNSLLEMHGLRPQRCVFTAKGRAWIQQQALSSAAQLCFERMFRLYDFLSAERASSEAELLAAAAAFPQVALLQTIPGLGHMLAAVVWSEIGDLARFDSADALLNHTGLVPSSYDSGEVSIHGPITRQGPVWLRWALITAANALTRSKSPLGRRYWHLRRCHKHPNVAKAAVAGSVARCVYGVLKHGAPFQAERWGRRAGNLGQ

SEQ ID NO: 259613 - protein, 346 aa, unidentified
MMIIGCDFHPSWQQVCWLDSETGETGERKLVHAEGEAERFYRQVPAPALVGMEATGNSHWLVDLLAEIGHELWVGDAAQIRASYVRQQKTDKRDAAHIMKLLAEGRFPRIWMPSSEVRDLRQLLLHRYKLVIIRTRVKNELQHLCLNQGVQRKRKLWSQAGQKLLRELPLRPWAARRRDDLLRLMAMLNQQIEPLDAALKAEALRDKMALLLQSQPGVGPVTSLAYVLTMGDVSRFPRGKQVASYLGLIPREHSSGGRQKLGAITKQGNRMLRMLLVEAAQTTVRLDPGFRKQYLHRCHQKPKGVAKVAAARKLAVRLYWMLRTQTGYPEIVRIESSPRVPLVGAS

SEQ ID NO: 259614 - protein, 412 aa, unidentified
MTTIDQFAAHVGLDWADKKHDVCVQFKNGERIFYVVEHTPEALDIWLSELHQKVKGRIAIALELKKGPVVYALQKYPFVTVFPVHALSLARYRQTFWPSGAKDDPQDAELALELMLRYPQKIKAIEPDNADIRLLQQLVEQRRLLVEDKRRFVNRLINTLKQYYPQPLEWFSHRDSSLFCELIIRWPSLQQLKRARSDTIRHFMNAKGGPAVAYTEQRVASIAIAIPLTTDKSVIEANALMATALASQIKLVGDLIRTYDERIESLFNTLPDADLFKSLPGMGPCMGPRMLAALGDNRNRFNSAEEIQNYAGIAPVTERSGQKSWVHWRWQCAKFVRQTFVEWAAKTVNSSYWAKLYYQGLREKGKSHQSAIRALAFKWIRIIYCCWKTRTQYDEAKYLLALEARHSPLLMP

SEQ ID NO: 259615 - protein, 354 aa, unidentified
MGSANSHQLTRKGKSMAILFVGIDLAKNVFAIHGVDEHGQAVLVRPSVQRARLHQLVAALPPCTIGMEACSGAHHWARLFVQHGHTVRLMAPKFVSPYRMSGKRGKTDAADAQAICEAVQRANMRFVPIKSQDEQARLCIHRVRQGFVEQRTATINRLRGLLSEFGIVLAQKAATVRREAAAHLEDLPGWANTAVGDCLSEVHRLDERLAEYDRHIGKIAGEDERSSRLMRLHGVGCTTASALVSTIGDARDFKNGRQLAAWLGLVPGQYSSGGKTRLGGITKAGDGYLRTLLVLGAKSVLAAARSKHDRLSRWALALEVRRGYWKAVIAIAAKNARMAWAVLAKGEDFKLIEA

SEQ ID NO: 259616 - protein, 356 aa, unidentified
MAEGTWVGLDVHARKVVAGVLDAETGELRSWRAPTLPAETVEWLRQFAAPVRVAYEAGPTGYGLARACAAAGIVCTVAAPSKIQRAPADRVKTDRRDAERLARLLRLGELVAVRVPEPHEEAARDLIRAREDARGELMRARHRLSKLLLRHGLVYDAAAWTLAHDAWLRRQRFDSRPLQLALEESYAAAMQAKARRDGLDEAIVELAGEPPFAETVGRLCCLRGVGTLTALALTVELGDWTRFRPQSLGPFLGLTPSEDSSGERRRLGAITKTGNTHARRLLVEAAWHQRRPLRESATLTRRRQGQPAAVCARADRSARRLHQRWHTLERRGKRRTIVAVAVARELAGHCWALATM

SEQ ID NO: 259617 - protein, 439 aa, unidentified
MSRRAYRATGVNEVNWEQIAHGKEGLDVTLGVDVGKFDVLVVCRWADERFERPWRVKNPREIPTLVALAKRVQTDRKLVVAMESSGTYGDALRQALSDNGIEIQRVGGKAAHDYAEVFDGVPSQHDGKDAAVVAELAALGKGRPWPYEAPDSWEEELTYWVEEMVIQRQLVTCWQGRLEGLVARHWPEAFQVLKLSSGTLLRMLKRYGSPQALAADPQAPRQLARWGGALLSAKKIDQLLAGARSSVGVRLGPWQQRQIQECAEKALAARRQSNQAQRRLRQLAVGHQVLQAQGKVVGIPTACVLWVCTGDPRKFDSAAAYRKAMGLNLVERSSGTYQGQLRISKRGHARTRQWLYFAALRLVQKRGVRPWYEAKKARDAGDARRLLVAVMRKLAVALYHVGVRNEEFQPRRLFGRIGKHRGRGAQRAIAVAEPSKIQG

SEQ ID NO: 259618 - protein, 410 aa, unidentified
MEEVFTCCAGLDVHKESVEVCVRRMESNGRVHHQTRHWDTMTRDLVAMADWMTAEGVTHVAMESTGVFWKPIYNILEGRFTMLLVNARHLKQVPGRKSDVRDCQWIAQLLQYGLLKGSFVPPRSQRELRDLTRHRTQLVEEKARTANRIHKILQDTNIKLSSVASDVLGTSGRAMLEALITGEEDPVKLADLAQRKLRGKIPELEKALEGHLTEHHRFMLKLLWKQLAQQEELIAELDRKIEEQTRPFAAEIDRLDLVPGVDRRVAEVLLAEVGPDMKPFPTHANLAAWAGMCPGNEESAGKRVRRRITPGNRWLKRTLAQATWAASRTKNTYLASQYRRLAGRRGRKRALIAVGHSILVIFYHMLKAGTNYTDLGGDFFDRLEPQRLTRYYVKRLESLGHKVTLESCAA

SEQ ID NO: 259619 - protein, 351 aa, unidentified
MWIIGCDYHPSMQDIAVADTETGEYLERTLNHSTGEAEKFYRDLKQKAVTVRVGMEATGHGRWFERLMAELGFELWIGDAAAIKAARVRKQKTDREDARLLLRLLSENRFPRIWVPDPGNRDLRQLLWHRHRLVQMRTRVMNQLQAIAMNEGVRLRKKLWSESGRAKLESLQLASWAARRRKGLLELLDCLTPKIEELNVAVEQEAQKRPEVRRLMTHPGVGPVTGLAFVLVIGTPQRFRCGKQIGSYLGLIPCEDSSAGRQRLGHISKQGNSLLRFLLVEAAQAAVRCDADWKRRYLHLAMRREKRIAKVAMARRLGVHLFWMWRKGWDYQQVLQFGSHAGELVTGHGVK

SEQ ID NO: 259620 - protein, 467 aa, unidentified
MYLPNSQTLDIAPLSRIFSNTSAAYKFFWFLCLLEVFQKGQTEIAYSDIVARMIAKAWYPRLMTWNPLSSQVGKYGCNQITTEDSMSIERILVNKLDANQSWDVIGLDLAKHDLSCVGIATNGEISRIDRISYESFLEWASTIEPTVFAMEPCCEANYLCNQLESFGHSCRVISGKAVQQYIDVYFSGQKNDINDAEAIAFLGKNSRLKNIRTKTPDEMRLQTLMTTREHFVDEYRKTLTTLKGLAQFWGLKLAKSLSSEPKLIELIENASLPPDITILFKQLVKTYKELQKVANALTRQLMTLAKSDELCQKLMDIPGIGPICSTRLKVSIGPIDRFDSPRKLPAYFGLVPRNKTTGHSQKMGQITKRGDKMTRSYLVQAACSLMMLDAKGKFRDCQLRRWMHKKRGKLPYGKLVVALAAKLLRIVWAVLAKGERFDYRKAGVAKCSLPKPETKISQKAITGHSDT

SEQ ID NO: 259621 - protein, 319 aa, unidentified
MTTNSVVVGVDVAKERLDVAVRPSGEVWSEANDEAGITALVTRLRPLRPALIVCEATGGFERAAIAALAAAGFPVVVANPRQVRDFARATGQLAKTDRLDAGILALFAERVRPTARPLPDAAAQLLDAVLTRRRQLLEMLVAEKNRLGFAPKPLHRGIQAHVRWLERQLEDVTKELAGLIEASSVWRAKDDLLQSVPGVGPIVSYTLLGELPELGTLSHKQIAALVGVAPLAHDSGTLRGKRLVWGGRASVRTALFMAALCGRRWNPALKRCYERLKASGKPAKVALIACARKLRTILKAMVRDDKRWAVPATSVQYSC

SEQ ID NO: 259622 - protein, 429 aa, unidentified
MNYTQNEKIEQVTDSTMVVGVDIGSQIHYARAFDNRGRELTKRIFSFHNDLEGFNSFNLWAETLKTENKKTAVLVGCEPTGHYWFAFAKYVNDHQKRLVMVNPFSVKKIKELDDNSPKKTDLKDPKTIAKLVVDGRYSIPYMPEGIYAEIRDLVYSRDRIMKQHNISANRIQRWLAIHFPEYLGLYTRFDAISGLAVLEKAPLPKDVIALGVNGIRKIWHDKKMRGRGVTEDRAKTLVEAAHNSVGLDGGIGTKSELYMLLEEHRLWTSQLEAVNKVLEEMILKVPHVEKLLAIKGVGSITIAGFIAEVGDIRRFDSPKQIQKYAGLELVENSSGKHKGRTRISKRGRRKLRKILYQVMVPLLARNKEFRGIYDYYVTRVKNPLKRRQAMVAVSCKLIRVFYAVLTKGVEYDRFKMMSDIHRKSDIIAA

SEQ ID NO: 259623 - protein, 410 aa, unidentified
MSILGVAVDPATVIVAVDPGKVLNRVWVSNGSGLLDDPISLPVSREGIDHLERLLTAHAAPGPLVAIEATGSLHRSWASELERLHPGAVRLFAPSETKAARVQLGSGRFKTDDRDCAALTYLARQGTGRRHCEEVAVDALRAAVRHRRGLVADRKVAQQRLHDQLNALCPGLSAPSGHGRRLAIETSTGQAVLTCAAAFAGKAPKTRSLIDRAPGRLTEATAGYWVQRWRGCLPAPADAEQRARRLGRDLERYRILRLDIAAVEDEICVLLRATDGQILTSLPGVATLRAGAFAAHSLPIGRFPDAEHLYSATGLAPALYESATVRRRGRISRQGLAEHRDALMGIAWGLSRCSPSFARRDAELRARGMRPIQARVAIARNACRLAYRLLVTQEPFDEEAYLRGRLSRGR

SEQ ID NO: 259624 - protein, 369 aa, unidentified
MEQETTSIGLDVHKATSTAAVLPPGAERVVETLKLPNTPRALAVLVRRLQPRGPLAFVYEAGPCGYEVQRQLTALGQPCAVIAPALTPRRPGDRVKTDRRDAEQLARWYRAGELTVIRVPSRAEAAARDLVRAREDVVADRLRARHRLGQCLLRQGRVHHLAHSRGGQYRRWLKIQRFDWPALQQTVEAYLRAVEEAPGRLEALETQWQAVAQQAPYQEPVQALRCLNGLDTLSALTIVVETQDFQRFPTAAAFMSCTGLVPSEASSGERVRRGSITKVGNAHLRRVLVEAAWGNRHGQVVSRELALRRRDAVPDVLAIARKAQARWHRRYWRLVSRGKRQTVAVTAVARELAGFIWAIGQQVSTPPTS

SEQ ID NO: 259625 - protein, 411 aa, unidentified
MDIVHPRCAGLDVHKATVVACVRIPGARPRERRAETRTFSTTTTGLAQLREWLLSHEVTNVALESTGVYWRPVYAALEDRLELVLVNARHVKMVPGRKTDVRDCEWLAHLLECGLLRASLVPPRAVRDLRDLTRRRKSLIRERGHHVNRIAKTLELAQLKLSCVVTDIMGKTGRAILDALSMGIDDPDRLAGYAQGNLRKKQAELRQALRGGLTPHYAFLLRQHLSLIDALDAHIATVDGRIETAMAPFAAEAALLRTIPGVATRSAEAILAETGVDMSRFPTAAHLASWARLCPGNHESAGKRHAVSTGKGATWLRATLQETAWAAARSKKTYYHALFQRIRARAGAKKAVVAVQHAILVALWHILKKRVPHRDLGPDHFDRRNTDRLRRHHIRRLERLGYNVVLVDKVA

SEQ ID NO: 259626 - protein, 353 aa, unidentified
MNATHYIGFDVHKKHVSFCAKTADGEIAEEGRLLAQRSALRQWAAERQQPWQGAMEATLFSGWIYDTLKPYGQRLEMAHPAMMKAITAGKKKSDKIDARKIADLMRCNLLPTCYVAAPEIRELRRLLRYRNLVVRESVRMQNKIAGLLMETGTPFQKEKLHGKKYFANLLKNLEEVPESVKDLLQLSRGSMEMFEAAQKRLIRRLLGNPELGQRVERLASIPGIGAITALTWALEIGDPQRFCSAAKVMSYCGLTAALKSSADKQQRGPISKQRNKWLQTALIEAAKLAPRWNPQLAALHARELERGHRNRATLAVARKLAAYLLAVDKSARPFQLRPLPAADEAAPVLDKAG

SEQ ID NO: 259627 - protein, 349 aa, unidentified
MTKTSHAGAIATIGIDIGKNTFHLIGLDAAGAIVLRQKLSRGQVGVRLANLPPCLIGMEACVGAHHLSRQLLALGHDARLMPARYVKPFLKGQKNDFRDAEAIAEAVQRPTMRFVRTKSIEQLDLQALHRVRARLVRHRTAVINQIRALLLERGIAVRQGYQHLRAALPDILGRESERLSPRMVHMIAELSSDWRQLDERLEAVTDEIETLARADEACQRLMSVPGIGPIIASAMVSAIGDGAAFAKGRDFAAWLGLVPRQISTGDRTILGRISKRGNSYLRTLFVRGARVILLRPANWPKHSFGPWLQAASRRLHRNVLAVALANKLARIAWSVLAEERPYQSRPLAA

SEQ ID NO: 259628 - protein, 339 aa, unidentified
MMIAVGVDTHKHEHLAVAVDALGQLLAEITITATLAGYRELLAWITGLEGEVRVGIEGAGSYGAGLCEYLQDNAITVFEVERPKRRERRIGKSDQLDALLAAKKVLADDGLSTPRGHGKRVALQMLLVAYHSVVSERSRLYNQLQALHVTAPATLRERVGTARNGAKLAQRLTGMRTRPNASLQENTTLQVLRDIANRTRALDQQAQEYNRQIDTLARELAPALMDEPGVGPICAAKLIAFNPARFTSEAAFARANGTAPQPASSGKTVRHRLSRGGDRQINTAIYTIALSRSVHHAPSRAYIQRRTKEGKTKREAMRSLKRYLSRDLYNKLSNTPLTT

SEQ ID NO: 259629 - protein, 337 aa, unidentified
MGQLYVGLDYHKAFIQVCVVKGDGDVLGNRRCANDWRAVVECVQPLGIVHRCSIESCSGAANLAEQLVVLAGWSVDLAHPGYVSRMKMSPDKSDFSDARILADLTRVGYLPKVWLAPEVIRELRRLVRYRQQLAQERRDAKLRLRALLREHRIIEPSGKPWTKRWLVWLAMCDGLGEQSQWLRDQYLLCLQRSEEDIRTVERRLALVTKDDAQVNRLLEQPGIGPVTAWTIRAEIGRFDRFNNGKQLARFCGLSPRNASSGQRQADAGLIKAGNAMLRATLIEAAWRLIRCDERWRTLALSMKARGKPACVIAAAIANRWVRSLYYEMRMLGQATAA

SEQ ID NO: 259630 - protein, 421 aa, unidentified
MTQSYGNTGGDVLVAIDVAKRQNAVLIRLPDGTRKKLTVTNNLADYRELSNYLKKLEVPCKIGFEATGNYHRALAYYLQQRGFDLKLISSVAASRTREAMFNSWDKNDPKDAQVILHMLQTGLTQTYHDPLVHRINDIQELSKTYCQVSLRKTRVQHSIMTHYLPLYFPEASKYFHTSRAEWFTSLLMTFPNPVSVLKYSLEGFIKAAQTVSGRKVNKAAWLKDFYETARESIGLPVPEDSEAIRMFRLVLQEHQDLCRMRRAIEARAELYLKDNADYLRLRTVPGIGAVIALIILAEAGDLRRFSHYKKFLKYCGLNLSTQQSGAYRGMSKLSKHGNSRLRYAFWIAGTSAIRMRENTFRKKFENYIKTDPQNPDLKRKAYTAVAAKIARVAYGLVKAGCDYRCYHESSIPSGIILSVGR

SEQ ID NO: 259631 - protein, 447 aa, unidentified
MKKVFIGIDVGKFKNSISIIDIEGNPIIKKGLSIENDYYGFARLEEQIDLIINNYGFTYDDCIAGVESTGHYWFNLRDYLKDIGIETVMIKTDSVKHRRALEEGQKGKNDTLDARVIASCLRNGNYVYIRENERELRALQKLTRMRNDISDELVALKNKIHRCIDICNPVFFKIFENLNSKTGVALIKLYPSPEDIINVDLDNIKRELGEIVDKPNMRMVSLYREECEIWGRIIKEPSYAEKVEMVAYIDKFLLQNKSKEHLDKQIKEIAKNIIPLYSEFEQIKGIPLIQLISVLSEIGDIRNFKNTRAILAFLGLSLKGNASGKYIGERRINKAGSRIVRKHLFNIMDTLVKHNEYFRIAYCYYKSYNHKNPTKKRSMQIAVMCKFVRVMYGMLKYNTPFDYKEMLKGYYFGDCNIKVFKEEFEGEKRSKKIENYKLAYSIFINYS

SEQ ID NO: 259632 - protein, 400 aa, unidentified
MISVGIDIAKGKSTVCMLKPYGEIVCKPFDIEHQNKDLSELASMILKFDDEVKVVMEATGIYHLPVLTYLQEKGIFVTVINPYLMKVYRSESLRKAKTDKIDSRIIANYGIEHWFTMEEFKVSEDIYGELKLLGQQYRHYMKLHVTSLHELTHLLDYTMPGIKTMLASWNEGNRKDKLSDFVEQFWHFDEITKYSESEFIDAYAAWAKDKKYHQSQTKAKAIYELAHEGIPTLSSETPSVKMLVTEAVRVLKEIDATLGVILSRMQELAKSLPEYSVVREMGGVGDVLAPKLIAEIGDVRRFHSGKALIAYAGIDTPPYESGQFIGSNRTITKRGSAALRKVGYETMRCIKTCPRLDDPVYQYVIKKEAEGKAKKSAKIAGLNKFLRIYYARVKEIYNNS

SEQ ID NO: 259633 - protein, 390 aa, unidentified
MRYFIGIDVAKFKHTACVIDADGIALVEPFDFTNDIIGFQSLLKNIKPFLKKKHLVGMEDTGHYGDNLRNFLLDKQYKVVMLNPIVTSHIRKASNKAKNDRIDCFVIANTMMNPNFYRDQHVQSIDYTTIRQLTRMHHTHTEEINRYKCQLQKSIDIVFPEFNSLLNTKYSKTYLEILDTYHGAHTIANTDIRLLRNTLKNVGVGRSVSISAEQLKKAAKESIGQHNLAIEMDIPFLISLIRRLTSILGEIDKKIEEFSHQLNSPILDISGISHFSAMSIISELGDITYFSNEKKLIKFAGVNPCVYESGTYSMTHTRLEKKGSKYLRKTLYQIIDVVIRFNPVFQAFYQKKISQGKSYRCAQGHCIRKLLRVIYKILSTGERFNPEKLK

SEQ ID NO: 259634 - protein, 467 aa, unidentified
MVCFNPSTKLTRVRPAELIVARWKQLSTRRKFVSYFAPLVGRGSDEERLLREVGTGMQVVHERCCGLDVHKKTVVTCILITLANGEVQRHIRTFSTMTAGLLALSDWLESLTVTVIAMESTGIYWRPVFNLLEEGRSVILVNAQHMKAIPGRKTDIKDSEWLADLLRHGLLKASFIPPAPIRELRDLTRYRKSLVQERAREVNRVHKVLETANVKLSSVATDVLGKSGRDMLSALIEGTTDAQILADLARGKLRKQLPQLQQALDGRVQAHHRLLLKHILAHIIFLEETLEQLQQEIEQHLGPLEEAMTLLMSIPGIAALAAAAILAEVGDDMTRFPSAKHLASWAGVCPGNKQSGGKRLSGKTTQGNATLRAMLAEVVWVISHMKDNYLSAQYHRLARRLGKKKAVVAVSHSLLVIIYHVLSTKQPYSDLGADYFEQRDSTRLTQRSVRQLEALGYTVTLVPKEVA

SEQ ID NO: 259635 - protein, 390 aa, unidentified
MERPMQKLNDFSRSLVALEPDSTLIAVIEMSLSSWLVAGIVPGVERQPLKKLAADESALLKLLHRWREEAEKAGRRIERVAVAFEAGRDGFWLARWLKARSIEAHVIHAASVAVSREHRRAKTDRLDTELLKRAFLGWLRGERDHCKMVDIPTIKNEDAKRPNRERENLVSEQSRIINRMKAALIRLGIRGFNPKLKRAARRLEDLRTPEDEPIPPNTLAELRRDIERRRLVRDQIRQIEEARLQRLDHAPGDGPHAMVRLLARVIGVGIETADMLVHEVLSRSLRDRRAVARYAGLTGSPDESGRKRREKGLARSGNGRVRRGMIQMAWRFLLHQKDSALAQWFRARTENARGTRKPMIVALARKLLIALWQLVRQGVVPDGVVLRSAQ

SEQ ID NO: 259636 - protein, 431 aa, unidentified
MLKEQPIETQDKQEQKPDKEQKEKYLPVGIDPGKNICGVVLLHPDSGNDTVLSSMFMDNCSFEDADALIAESRPSGRERAEKVANSFGLKPIFVIEATNILWRPLFSYLKSKGCLVHTVCATQTKSSRGTKMRKTKTDLIDAKHIARIYKQGESHPTKFPEGIHMDLRELVRLHSFFTDMKGRILNRVYGYLFQVFPEFVSFFNSNSFLGTMWTLLKEGLVHPDCLQKVRIDKLTSILRKASMGRFKREKAIMLKEKAKNSFGISEGREGFSSCLKLLACMYEFVEKSIACLEEDKIKPIVDQIPNKLNTIKGLGIAQAYFLAESRKPEEYENVDDVVAWFGVDPRLSESAGKKKKNRHISKCGTKYGREAMFLSTDMVMIHNPTVMVKYRRLRKNGRTNREAKTIIAADLVKACYSMQRDNVPFNPSLIH

SEQ ID NO: 259637 - protein, 487 aa, unidentified
MRSFTMKKRNIFQNQSQEILTLFEAAQDRSKVMCIPIDYAKKDHVVMFCNGNGKIIRKPFSIKNSPEGKDYLIDQVKKSCRHHGISSQHVFYGGEDCGAYADNFIAALRLENYLVAGVNALDAKKHRENVQASTDRLDLLGICKVLLNCRGNCSPAQSGIYWNLRALVRERRKLVHIATGMRNRIHNTVDRIFPGFLNEKKSGIYPFSKGSLALMENRFSVNQIRRRRRSTLAKFLARHLVHHSDDCTRKLQGYASQVLQPPIDRIATLQISLKQQVKLFNCLQESILHLNKEIAEHLAQTPGAFLTSIRGIGITLAAGVSAEIGDPNKQGSLSNLVSYAGIIPRIKQTGGIQGKTLVKKVGKRCNRILKDYVVQSANHIGLYGPDDLKMDYKRRDAQGQHADFGMARRYLRMAICLMRTDQTYLPKNLRNAKSDMKERAEYYITSWSTLHEKWKRSGALDIAFDKNMRLGQWRNMIQELYGIELTL

SEQ ID NO: 259638 - protein, 367 aa, unidentified
MIFSQRVGNAQAAIEALIVRACAGAVSVRWALDMTSGTAALLIALLHSGGQQVCYVPGKLVNRMSGAFAGEGKTDAKDAKTIAETARLRTDLTAITPSDRLIVDLQVLTSRRDDLKADWVRGVNRLRALLAGFFPALEGALDYSTRSPLILLIGFQTPSGLRIAGPDAIRDFLLEHRAFAKTTPTIVGKAIAAAEQTIAVATEAVSAPLVARLAGDLLDLDRQINDLDKVLGAALLADTGGDPQRMFKTPARLAAYAGLAPVPATPGEYAGTCTAPSATTAGYDMSSIWPRSPRSPSTDHRKCSTDANAQKGNATSKQSSPSPAASSTSSGHCYAMNASSSSPHRPAPPPPGGGVAAAAISPSARRR

SEQ ID NO: 259639 - protein, 464 aa, unidentified
MPLRLGIDIACRAAHQVSLADDEGRFVWSGRRFRTTPSDLAGLWAMLPAGTDPAQVLVVMEPTRNAWVPLAAWFRRQGARVVLVPPERSADLRSYYAKHTKSDRLDSQLLARLPMLHPEGLHFEEGLGPADALKRAAKLHSTLVHRRSQSLARLDALLEILGPAWHTAIGTDLANRTVLKFLAAGYADPHVVRRLGRTRLTRFCYRHSRGAWGEPQAEALLAAARETLELWAEGELDYPDLAEDIAIEARLALQLTEELKDLDERTALVLKDADPTGILTSAPGVATITAVAILGRLGDPNRFGSLAGARAFTGLVPILDSSGLTGRHGGPTKRGDAVLRQALFMAAGQARRIDPTLAAKYHRLMVEAGKHHNSALCHIATTLLTRIIACWRARQPYQLRDIDGRPVSIEQARAIIADRYAIPKDLRARRNTLTATRNGPAKQGVANAPSTGPSTCDATTRQPT

SEQ ID NO: 259640 - protein, 308 aa, unidentified
MIAQNYVGCDISKQWLDFFDETSGRLRRIDNQADAIAAYVAGLDPSRDFVVMEATGVHDRLLRHALAKAGVPFSRHNPAHTHHYSKSTRRRAKTDPLDARMLSDYGRRYNPEAEPAPREEVERLQSLAGHRDHLVEMRAALKKHLAEAFDEIVIADLEETISFLDTRIKAFESQIAEVIRQNQDTARDHALMVSVPGVSKVGALSLLALLPELGQRSPKAIAALAGLAPFDNKSGKLNRRSHIQGGRSRVRRALYMAALTAVRTCERFKTFYTALAARSGSKKLAIIAVARKLLVVLNAIMRDKTAFA

SEQ ID NO: 259641 - protein, 344 aa, unidentified
MKATTIGIDLAKNVFQVHAVNEYGKTVLKKQLKRDQMAKFFANLPATLIGMEACSGAHYWARKLTGMGHDVRLMAPQFVKPYVKTNKNDAADAEAICEAVARPNMRFVPVKNIEQQAVLSLHRVRQGFISARTAQANQIRGLLSEYGIIIPQGISNITKLVPDLLEDASNELPGMFRLLVDRLMDHFKELYRQVAEIDVQIKAWHRQSDLSCKLEKIPGVGPVTATALVATIGDAKNFDNGRQVAAWLGLVPRQHSSGGKSNLLGISKRGDSYLRMLLIHCARAVIFSAKRKGVQEGWVHELVKRRNHNIAAVALANKIARTVWALWAHDREFRPGYTTTAVAV

SEQ ID NO: 259642 - protein, 402 aa, unidentified
MWFAGIDWADSHHDAMVIDETGQQAGSLRVAHTKAGIEELKRFLLGIAKTPEQLACIVETSQGLLIAALLEAGFTVYPVNPKTVDRRRNAAGVKTDVVDAYLLAKTGRSDLADLHKLQPDSPIVGELKLLTRDQDGLIQSQTRLVNQLTACLKTYYPVALTLFSKLHQRSTLVFLQTYPTPQAAMTASVEEIATLLGKAHHPHPRERAELIVDLLHQPQLVADAVTTRAKSRLLLALVGQLLPLVEQIAHYDKEIARLFLSHEDNEVFSSLPRAGKRLAPRLLAEIGEDRSRYADAASLQALAGTAPVAFQSGNYAKAHKRYACLKPLRNALYQFAWQSTLAEPWALAYYQRKRAQGKSHTMAVRALANVWVRIIYAMWLNHTCYDPATFEAAQRAHATLAA

SEQ ID NO: 259643 - protein, 313 aa, unidentified
MLGIDVSKDWLSVCCWDARRGCVRWLREVPNSEEGVRLLLEGTSSREAWALEPTGRYSELVARLGIAQGRQVLLAPPRAAKQFLASLRPRAKTDRLDAQGLARYASSVPLKPFRLKEEAMERLWQLLGARRSLALSLATFRQQRQALPQAQQHLRAACAALGEQLKALDREIAELARREPAAARLQKVPGIGPVSAATLVVRLKTSQFSNYDQFVAYMGLDLRVCDSGERRGRRVLSHHGDAELRRLLYLCAQASLRTKDSPFALQYERERAKGLASTQALCAVARKLAKVAWALVRSGADYDPNRVYSHPTH

SEQ ID NO: 259644 - protein, 316 aa, unidentified
MSDTTIGIDVSKDHLDAHALPAGTVLRVPNTARGIAQLLRWIGAEPVARIVYEPTNRYHRALEARLAAAGLPLAPVNPLKARRFAQALGLQAKTDKIDARMLAEMGLRLTPGLQVPNPKNLQHLKDLVAARRALVADRVADGNRTEGHSLALLRRLARRRRAAIEADIARIEAAIAALIAADPALTDKARILQSLPGIAALTAATLLAEAPELGQIEARQIAALAGLAPVTRESGTWRGKATIQGGRRHLRRALTMPTLTAIRRNRDLAALFTRLRAAGKPAKLALVAAMRKLLILANTLLRENREWQETRPVQTA

SEQ ID NO: 259645 - protein, 497 aa, unidentified
MSTAPQQEQGKKGSDAQRSASKRKARGRQCPQGKGYRRRSKRSNLAKSKLTITNPDAAGIDVGARVHYAAVPEGRAEVTVRSFGAYTAQLDELVKWFKDCGITTVAMESTGVYWVSLYQKLEEAGLEVLLVDAHQAKHVPGRKSDVQDCQWLQQLHSYGLLRAAFRPEDSICRLRTFQRHRKSLVEYAGMWIQHIQRALNEMNLHLHHVLSDISGQSGLAILDAILAGERDPRKLASLADHRVKKSRAQIEAALTGDYRPELVFVLSQALQNYRQIQQQITQCDLGVEKQLAQIADCTNPSQASEPMAPSPDSAGGKPRKTKPKDALELNLAAHLKRILGVDLTTIPGLNVLAILTLLSEIGTNMAKWRNEKAFVSWLGLSPNNKISGQRVLSSRTRKVVNRAATILRLAAMVLGHSNTPLGSFYRRKRAQLGAPKAITATARKLGCLIYRLIKSGQGYQEPDMHLYELKYKDQILNSLRKRASSFGFELVEVPKAA

SEQ ID NO: 259646 - protein, 355 aa, unidentified
MKSTAGVTTIAIDLAKDVFQLALADASWRIVRGLRLKRAEFLAFWANHAVVHVVMEACGSAHHFGRWLRAMGHRVTLLPAQYVRPYVRRNKTDKADCAALLEALRASDIKPVPIKTEHQQVIQLMHRSRQQWQHDRTARINLARGILREFGVVVPEGAERGLKVMSAQLANDQLDPNVRKLLKTILDEIDGFEQKVIQLDRSLAALSESDPVLEKLESVPGVGWVTATALRASVGDIHRFKDARTLSSWIGFTPKETSSGSSRILGGMSKRGDVYVRTLLIQGARSVLAAARRKQQSGKPLDALRQWALDLADRRGFNKAAVGLANKLARIIWATWKHDREFNGDHNLKHATATA

SEQ ID NO: 259647 - protein, 343 aa, unidentified
MEHFAGIDVSLEHSSVCVVDGVGKIVREAKVASEPEALVRFFRGLETGVTRIGLEAGPLSQWLHAGLVAAGFEVVLLETRHVKAALSAMVIKTDRKDARGIAQLLRMGWFRPVHAKSPRSQEVRALLVARKLLQTKLLDVEFSIRGILRGFGLKMGEVSKGRFAARVRELAAGHAMLERITEPMLRAREALRTEYARLHGEMLAIVKPDPVCQRLMTVPGVGALVAITFKSAVDDPGRFARSRVLGAHFGLTPRKYQSGETDVTGAISRVGDAMVRMALYEAAHIMLSRVTRFSSLKRWALDVARRRGLKRAKVALARKLATVLHRMWVDGTSFRWGKPAASV

SEQ ID NO: 259648 - protein, 366 aa, unidentified
MKKISTVRVKGNMIFKGHKLTIGLDLGDRWSFYCVMDEAGQVILEQKLATTAEAMKQTFAKIPRSLIALETGTHSPWVSRRLGELGHKVLVAHAQKVQLITKSTRKDDRHDARTLARLARIDPELLGPVRHRSAQAQIHLTVIRARAELVRARTALVNAARGLVKSYGERLPKCGTQQVNRELAAELSVELREVIEPLLQEIESLNERIQEYEVRMEKIAKESYPQVALLKQVKGVGTQIALTYVLTLEDPQRFRKSRDVGCFLGLRPGRRNSGQSEPQKHISKEGDRYLRTMLVQGAHYILGPFGEDSDLRRWGLKLAERGGKNAKKRAVVAVARKLAILLHRLWVNGEVYEPLHNSQQAMRAVA

SEQ ID NO: 259649 - protein, 348 aa, unidentified
MKYIGLDCHKQYDHATMIDTETGEIKAKKLSHIKEEFKEFIGDRTGTRMVIESCRDWSRTYELSEDLVEEIILAHPLKVKAIASAKIKTDAVDSRTLAQLLMADLIPQAHLRKGDNRVKQRVIRHRTFMVVMRTRVKSRIHVLVDSQLLPPDVLQAKPINLFSKKGMEWLSSLEWAKAEDKELVESHLRIMEAINQEISTTNDMVKEIYEKDRDAQLLVTIPGIGVTLAMLISTEIDGVERFRSPSKLCSYAGLVPSTHSSGGKTYHGKITSEGNRWIRWALVEAVVPASYADAEIKERLDTLRKTKGANVAKTAIARWLLKVVYHVLKERRPYIATYNGMVKVGAAF

SEQ ID NO: 259650 - protein, 379 aa, unidentified
MRQVCGLDVHKDSVFVCILNENGVVFQNKYGVLTTDLENMLGVMMGYHVDEVCMESTSIYWMPVWRVLEPYVSLKLVNPYFIKQLPGKKSDVKDAEWIATCLLKDLIKGSYVPEDRIQQLRQYDRRIFDLNNEINYKLTKLDMALQRCNIRISNYVSSTDGKSYREVVRLISEGVTSAEELEKVIHSRTVNRVGKETIRGALTGVISSVDIDIIRQLREELELDYRHKDECQRKMDELCSQWFPSQLENLKTIPGVSQRSATAIIAEMGTDMSSFQDAAHLVSWCGLKPRNEESAGKIKARKITHGNKYLRQTLIECSWAASRKQGCFYNRFSYHQTVVRRKNTMKVRVAIARKILTVVWYVLHDNLKYRDFSTDITTC

SEQ ID NO: 259651 - protein, 344 aa, unidentified
MDYFAGLDVSVKDTSVCIVDDTGKIVREVKVASEPAALLAVLKNPACHFKRIGLEAGPLSQWLFSALAEVGLPVICVETRHMRAVLKAQINKTDRNDARGMAQMMRVGLYRPVHVKTLRSQKLRMLLTHRQLLLSKAIALENDLRGTLRNFGLKVGMVGKVKFEARIRELVENLPDLAVLVEPMLIVRRVLREQIVILHRRLLAIVRDDEVCQRLMTTPGVGPVVSLTYRATVDIPARFRKSKSVGAVFGLTCAKYQSGEVDWDGRISRCGDEMMRTMLYEAAQAMMRSKKWSWLKAWAMQIARRRGMKKAIVALARRLAVIMHRIWVDGTEFRWTREQATATA

SEQ ID NO: 259652 - protein, 369 aa, unidentified
MKKNSKNNKEKARQRALQAKSRKMKLTVGIDLGDEWSHCCFLGEDGEIVEECRVKTTREAVKSRFGELKLAVIALEVGTHSRWVSQMLSEFGHEVIVANARELRAITGSDRKSDRVDAEKLARYARVDRRILRPIKHRGEEAQVDLVVIRARAVLVKTRTQLVNSVRGVVKSFGYRMPNCSTERFVKLNNEVPEKLREHLAGLMEVLEHVQKQIEEYDQRVEKLAKEKYPETTVLRQIWGVGEITSVSYVLTIEDKGRFEKSRDVGPYLGLRPRRSQSSESDPELRITKAGDCFLRSLLVECAQRILSKKGPDTALKQFGLRIEARGKKKAKKRAIVAVARKLAVLLHKLWVTGEVYEPFPETTVRKAA

SEQ ID NO: 259653 - protein, 447 aa, unidentified
MTKVFIGVDPHKLSATVEVVDHREKVLATGRFGTDKAGYAAMRKRLAAWPERTWAVEGSNGAGRPLAQRLLADGEHVVDVPAKLAARARLFDTGHNRKTDAHDAHAVAVVAVRTQGLRVLAYDVELETLRMLAGRREELTRQRIQTVDRLQRLLSELTPGQAKRNITALQAKAILASVRPRDLAGKTRRRLAVEQLTELVAVEKKIKALTKELKAMVQARGSTLMELPGVGPVVAARILADVGDVARFADRNRFASWTGTAPLDASSGEQIRHRLSRAGNRKMNHMLHIAAATQVRLDTEGCVYYRRKLAEGKTRMEAMRCLKRRISDAVYRQLLADAQAAALPADPEETDRRATELGTGPGGHCGASQESSAVDLPPHIDTSDQPLPGPAEPTVLPPQPGPKPHAASAASPPRRRAGAVKMQRPTGRTTLTATSAGAPSKATRPRP

SEQ ID NO: 259654 - protein, 378 aa, unidentified
MNNCTRYLGLDVHAETITAAIAEGRGRIRSLGKFSNRPEAVRKLIEKLGGGKNLKVCYEAGPTGYALYWQLTKLGIDCEVIAPSLIPKKAGDKVKTDRRDAEKLAQSYQAGDLTPVWVPTPEHEALRDLVRQRAAAKADESRAKHRLVKHLLRRGLREPDENGAWTHPWWRWVQSLKFEHEAQQVALADCIAEVLHMGERLARLDKAIDRLVESAPAHMRAVIEALQALRGVAKLTAVTIVTEVGTFKRFRRPTEMMGYTGFVPSEYSSGGRESKGRLTRTGNAHLRHVLGEAAWHARHRPWLNLRMKKVLPTLPAGVAEIAWKAQERLHRKFTKMTYCRKPAGKVAAAVARELVGFIWAIGTLLESRLDSNSKARSA

SEQ ID NO: 259655 - protein, 337 aa, unidentified
MKYSGIDLHSNNSVVTITDEEDRVMAEKRLPNDLTRILDFLKPWKEELAGVVVESTFNWCWLVDGLQEAGYKVHLANTTAIKKYDGLKHSGDETDARHLAHLLRLGILPTGTILPKEQRAVRDLARKRMQLVRSRTAHILAVENITARQLGARISSNQVKQLGGDDVEQMPLPDDVALAVKANVAVIETLSEQIKLLEKRLQERVGARAEYEYLTNAPGIGKVLATTILLETGPIERFADAGNFASYARCVDSVHTSNNKKKGEGNTKNGNKYLAWAFVEAANFALRNNPEAKRFYDRKKSKTNNVVAIKALAHKLARACFHMLKEKKLFDAERCFA

SEQ ID NO: 259656 - protein, 339 aa, unidentified
MRKDEFECIGVDVSKKTLDVALFRGKVDWNEGHIKVDNNSSGYKELRKWLRLKKAEKKQLRICMEATGLYTHDFRSWLEQEGITYYVVDPKRMRHFAPPQSIKGIRQTKNDKADAFRIAIYCSLFHESMEPSRLPSAAYFKLKRLLAERRQYVKQSVLYKQQLHDISVYDSVGSRIRKEDEVKNLNANIKQTDAEMKEIIDSDLTIKRNYDLLTSIVGVGIVVAVTTIVLTENFTVFASPRKYASYIAIAPFPHESGTSVRGATRVSKQGFRQAKADLSISVLSAMSHDSELKEYWLRKKAEGKHAGTILNAIKFKIVLRMFAVVKRGTPYVNTKGYRR

SEQ ID NO: 259657 - protein, 337 aa, unidentified
MNNSVIGLDIAKNIFHLYTIVEGKAIKKKLKRTELLAYFANYPVSLIGIEACGSAHHWARELTKLGHEVILLNARYVKSFVIGNKNDFNDAAGIFDAVTRPNKRQVMIKTIEQQDIQLIHKVRQGLVSKRTAVVNQVRGLLSERGIIMPKSLNKVREQLPLILEDAENNLTPISREVFSGQYERLVALDEEIKEQDQRIVRLCKTNATAKRFLDVPGVGPMTASIVASDIGNGKGYQRSRDYAASLGVVPRQHSSGDKQVYLGISKRGNRYIRTLLIHGARAVLKNCSKKEDKLSLWLQTLIERRGFNKAAVALANKNARILWAMASQEKEYDALLV

SEQ ID NO: 259658 - protein, 340 aa, unidentified
MDMTTLGIDIAKSVFQLHGVDADGAVVVQKKLRRGAVLNFLGKVGPCLIGMEACATSHYWAREIAALGHEVRLIPPAYVKPYVKRQKNDAADAEAICEAVTRPNMRFVPIKTEEQQSVLVLHRARDLLMRQRTMILNAIRGHLAEFGIIAAQGPRQVMGMIARLRDDGDASLPEIARSALLALGAHLEALAGEIRALERQLIVWHRADPTSQRLETIPGVGLITATALAASVSDPSVFKSGREFAAFLGLVPRQNSSGGKDRLGRISKMGDRYLRKLLVVGATSVIRRAGSNPTKTGAWVRSLMERKPARVVTVAMANKTARIEWAVMTRGEAYRASPIA

SEQ ID NO: 259659 - protein, 397 aa, unidentified
MSKYINHKTLDVNTEYSVIGLDLAKHDLTLAAFSTDGEVFIVDQMTYTDFLELAKSLNPTLFSMEPCCGFSHLSLELQNLGHEVRVISGLAVSNWIKTYRAGQKTDANDAYALASLVSDRNVKFIRPKTLNERRIMTVQGVRRQLLGQRTKTIVSFKGLIQDWGIKIKIGHRNLARMQQFVDDNAKLFTEPVAKALTHMIEQIRSLDARIKELDRDLEAMVMSDAQGRQLRQVLGVGTQIAARFITVVGDISNFKDARALVAYLGCIPRNKITSHKNKPKIKKGLAPDMSGKGQGKISRHGDKYLRSLLIQGAASIYMQYSKGALADCPLRRWLEKQIEVRKPYGKIMVSLAAKLIRIMWAVLTHGEKFDISKVSVSRSVFAAAGGQKAQLETAAVT

SEQ ID NO: 259660 - protein, 388 aa, unidentified
MEARTMSLPPAASNDDAERCLLAIELSKKSWIVAVSTPLSDKISRYTLKPCDWKELLKLSERIRTRAAGELKKRVDVVSCYEAGYDGFWLHRLLEAQGIRNYVIDPASVQVDRRARRAKTDRVDVERLLRSLMAYLRGEPKVWSVVRVPSVVEEDDRRLHRERGRLIGERIQHVNRIKGLLAIHGIYDYQPLHRDRMQRLKGLQTADGRQLSPRLKAEIVRELQRLELVLGMINTIEAERDAIASAKAKVEHSNAKKIQNLVKVKSIGPEFATALVSEVFYRSFDNRKQLAGYLGLTPSHFQSGAMCRDQGISKAGNTKARTTMIELAWMWLQYQPGSALSIWFHNRVGKLKGRIRRITIVAVARKLLIALWRYLETGLVPDGAILKV

SEQ ID NO: 259661 - protein, 369 aa, unidentified
MKKTIKNIGLDVHKNSISIGIADDDRDGEVRYYGKIDNDMNQLDKVIRKLISKGAILRFVYEAGPCGYGIYRYLSKNDMDCIVVAPSKIPQQTGNRLKNDRRDCLSLARLHRAGELTPVYVPTEEDEALRDLVRAREDVIRAFRTAKQQLGAFLLRHDIIYSGKTKWAKAHFNWLATIAMPHPAQQIVFQEYIDTVADCSNRVARLTEQIRQQSRQSRLHELIKALQSMRGISLIVAVTIAAELGDLSRFEHPGKLMAFLGLIPSEHSSGDKVKKGAITKTGNGHVRRALVEAAHAYRFPARKSSAIRQRQKELPKAVIDISWKAQCRLCTRYQYLIAKGKKTNVAKTAIAREIAAFSWAIAKTLPKAA

SEQ ID NO: 259662 - protein, 390 aa, unidentified
MEARTVNNLPPTAPHDDAVLCLLAIELSKKSWIVAVNTPLSDKVSRHTLTPCDGKGLLDLCERIRTRVAREMKKPVEIISCYEAGYDGFWLHRLLEAHGIRNYVIDPASLQVDRRARRAKTDRVDVERLLRSLMAYLRGEPKVWSVVRVPSVVEEDDRRLHRERDRLINERIQHVNRIKGLLAIHGIYEYQPLRRDRMQQLERLRTADGQTLPPRLKAEILRELQRLVLVIGMIKTIEAERDAIASAKTEAEHTSAKKIQDLVKIKCIGPEFANSLVGEVFYRSFDNRKQLASYVGLTPAHFQSGTMSRDQGISKAGNAKARTVMIELAWLWLRHQPDSPLSIWFRDRVGKLKGRIRRITIVAVARRLLIAFWRYLETGLVPEGAILKVK

SEQ ID NO: 259663 - protein, 360 aa, unidentified
MLLKYSVGVDVSCKSLKCCISTIDKEQKVKVKSSTTVSNNLSGFKSLIDWVKKHYNDPEVPLLVCMEATGVYYEQCAYYLHDKGFKVVVVLPNKSKKYFQALGLKSKNDKIDAKGLAQMCAEQHLKIWEPMDDFYYVLRHLTRHHQSLQEQKSALNNQLHAIQHSAYQSKTILHQMNQTIALFDKQIKQIEKAITEHITSNPEAKAKFDNVCAIKGLGIISVATVVAETNGFILFENYKQVVSYAGYDVVENQSGNHIGKTRISKKGNPRIRRILYMPALVVKTCQEPAFINLYNRTFERHGIKMKSYVAIQKKLLVMIYYLWKKNEKYNPNYGMNIQEKELVLPSLLAFEKGKNEVASL

SEQ ID NO: 259664 - protein, 406 aa, unidentified
MRLFVGDDWAEDHHDVELMDAAGQVLARRRLPGGVAGMARLHELTGQQLGEAGEDAEVVIGIETDRGPWVAALVAAGYTVYAVNPLQASRFRERLGVSGAKSDPGDAHMLADMVRTDSHQLRAVAADSAEAGGIKVVARTHKTLIWERTRQVQRLRHQLREYFPAALEAFEDLAAPDALELPGKAPDPARAARLTRAQVSAALKRARRRAIADKSTQIIAALRSQQLGQPAALTAAYAVTVRALAAVITTLNEQVKALESQVEAHFGQHPDAEIYLSQPGMGRILGARVLGELGDDPHRYPDGRARKNYAATSPLTRASGKKKTVTARFIHNDRLIDALMAQAFSALNVSPGARALYDDLRARGIEHNDALRRVANRLVGILHGCLRTRTLYDEATAWSHRQNLAA

SEQ ID NO: 259665 - protein, 354 aa, unidentified
MIIIGADYHPGFQQIGFVDTDTGEFQERRLQHREEAEKFYRDLAAQGMRVRVGMEASGQARWFERLLSELHFELWVGDAAEIRTKRVRKQKTDRQDAQLILRLMLEDRFPKIWVPSWENRDLRQLLWHRHRMVQARTRIMNQLQAVALNEGLRCKKRLWREHGRQQLESFRLAPWASRRRRDLLELMDRLNPTITELSQAIEQEVEKCPEARRLMTHPGVGALTALAFVLIIGQADRFQCGKQIASYLGLVPLEDSSGNRRRLGHITKQGSSMMRFLLVEAAQVTVRSVPEWRSKYLHLMMRRGRKTAKVAMARKLAVRLYWMWRKGWDYAQWSKFGSHAGQPGNRDGVQSITE

SEQ ID NO: 259666 - protein, 420 aa, unidentified
MVYLERGYNLKELPWSKTVSNSFLFKEACMILVGVDVAKDKHDCYIMTSEGEVLFKSFTIANNMEGFNQLYEKILSVIDNFDNVKIGLEATGHYSYNILGYLLDKGLTPYVINPLHSNLYRKSLSLRKTKTDKVDSRIIASMLMSDVSLKPYSNTLYHNEELKSLTRYRFTKVQERAKLKISISRLVTILFPELEKLVPTLQMNSIYALLYEFPSAHAISKAHLTRLTNLLNTTSKGHYTKDKAVLIREAAKNSIGSNMPAKSLELKHTIKLIKELTSEINEIEEEIKIIMNKINSPILTIPGIGLSTGAQILAEIGDFKNFSSPDKLLAFAGLSPSTYQSGNMYSSNTKMEKRGSKYLRFALFNAAIYVSYWEPTFSQYLKKKRVEGKHYYVAISHVVKKLVRFIFHLEKTNERYSTVV

SEQ ID NO: 259667 - protein, 341 aa, unidentified
MEEYIGLDVSMKETAVSIRRAGERIWRGKCASDPSIIAELIRKRAPSVKRVVFETGPLSVWFYHSLRTEGLPAICIDARHAKAALDMAANKTDANDADGLAQLAEVGFFREVRVKGFDSMLTRTLVAARTRLVRITTELSNQIRGVMKTFGLLVPAGKGSTFEKNVRSLLTDQDRLASIVLPMLEAWRGIRVRAAELGRQLVRDARQSRACRILMSIPGIGAITASSFTTAIEEPDNFRKSRSVGAWVGLTTRRYQSGEVDYDGHISRRGDHHLRGLLYEAAAVVLTRSSTHSTLRTWGLQLRERIGFKRAAVAVARKLAVIMHTMLKTGELFNPNAGAAA

SEQ ID NO: 259668 - protein, 312 aa, unidentified
MIVVGVDVSKDTLVAVAIDKSIRVKQSFTVENTRERVEEWLTSLPYKKLLLSCEATAEYHRPLALLALSRKIPLRLLNPIVTKQYTKATVRKRKTDPQDALTIAKLALAGEGRLVSSQTFQIAKTHERTAIKLTHAKQRLLLIQQHIREVDPDDTSSYEQLQLCIDTLEASIKVFRSKAENEVDSKEVRLLCSIPGVGETIATVLLAEIGDINQFKSDKALVAYAGLDPKVKQSGGRLHHNTHLTKRGSPYLRQMLYTGASIAQRHDQELKTYYEKKRAEGKRYKEATIAVSRKLLNRVYAVLKRQTPYVPG

SEQ ID NO: 259669 - protein, 342 aa, unidentified
MGEVSTIGLDIAKSIFQIHGVDADGAVVMRKRIRRAKLLEFFAALPACLVGIEACPTAHYWSRRLQALGHTVKLMPPSYVKAYLKRSKNDANDAAAICEAVTRPSMRFVATKSEQQQSGVTLHRSRQLLVCQRTMLSNAIRGHMAELGLICAKGRNGTAELLKIIADEHDDRIPAAARFSLGVLARQYAAIREEIVAIEKRIHAWHRSCEESRRLEEIPGVGPIVATALVAEVGDWKEFTSGRSLAAWIGLVPRQHSTGGKERLGRISKQGNRHLRWLLVAGAMAVIRYARQHGTKRPWLARLMDRRPIKVAAVALANKIARMAWAMMVRGERFKEPKLLPA

SEQ ID NO: 259670 - protein, 521 aa, unidentified
MVEREGPLLGLRARSRVSSFPPGLSRGLTWCMTPDNHKHDDAWHPAILNKGGNTMKSFYMGIDVSKGYADFVIINQQKQPVVKSFQLDDTFDGHSRLHEIISRFSTDHPQAVMCAAVESTGGYENNWYNTLLRLQASLNIKTARLNPLGVMHNSKADLKKNTTDKISAKNIAEYLIAHPEKVVYQQQDKFASLRKQWGFVQMLTKQCTQLLNQLHSLLYTANPELLNYCRNEMPAWVLKLLLQYPTAAKLKKARDKTVAKIPYVSLTRAKQLIAGAKLSVASATDPVTAQLVTATAEQILQLKKTIAAQIDLMAAQCDVPEVKLLKTFTGIGDISAIGLILEIQSVARFKSVKKLASFWGLHPVYKISGDGSGAFKMSKQGRVNPRKILYTVTLSAIEHNPVIKPIYQYHLQQGKHKMDAIGICMHKILRIIYGMLKNNTAFDPKIDAANRQRSLPDMTGNPKKNKNRRFQSYDSKAPVSRRQRKKRLEREQSHSVITDTKPGISAPVPIGDIISDMLCNI

SEQ ID NO: 259671 - protein, 410 aa, unidentified
MRYYLGVDWADQTHAVWVVDESGTKITERAVPHTAEGLGEWGRELDEWRAQGIALWAAIERPDGRVVDVLLDHGVVVYPVNPKALDRARDRFRQSGAKSDPFDARVLADFLRTDHAHLRALQPSSEAAQELKLLTEDCQRHIRQQTRLVNQLTATLKAYYPRALEVAELTSALAREFLPAYPTPAALTALTERQWQRWARAHRLPEARTAALWAVLQQPQLPVPAHVVRAKARLMRTLVEQLMPVVAAVAQYRKAIDDFFASLPAAQWARTLPIGKHGITAPTLWARLGDAPGRWESFRHLQAHAGTVPVTKRSGKQQRVVHFRFACDKALRHVVDQVAFLSLLSSTWARAYYDQQRARGHTHRQALRALGAKWLKIIFVMWERHVPYDEQYHLATMTRQQLRQRQEQIA

SEQ ID NO: 259672 - protein, 335 aa, unidentified
MERQYVGIDLHRRSSTIYRMAEDGEVLGCVRIPSQPFELTQAMADAGEAPEVVLESTYGWYWAADVLTELGANVHLAHALGNNWGNRRVKNDERDAKDLCAMLRLGRLAEGWIAPPETRELRELVRYRHSLVGHRTSAKAQIHGVMAKNGILPVVGDLWGPSGTAQLDNLELPEAYTVRIESLRDLLEIYDREITMVDGYLHRALKDDPGYRTLVTLPGVGKVIAAIFVAEIGDITRFDSPKKLCSWAGLTPKHRESDQTVHRSRRQSVWHRAVATTRCASPWARPDSSIVSMAASSASTRWSTVSQRPTSSCSLRRRWGQHRLDVLSSRTAHRA

SEQ ID NO: 259673 - protein, 428 aa, unidentified
MNYNQNDKIAQITSQTLIIGVDIAKHKHVARAQDFRGLEFGKAFYFENTNSGFNHFLDWIQQLMNQQGKEKVIVGMEPTGHYWLNLAHFFKEQHINFVVVNPLHVKKSKELDDNSPTKNDVKDARVIAQLVKDGRYAVPNIPQGVYAELRVARKIRDLLSVDLQAVQGQIHNWLDRFFPEFLTVFKDWEGKSALQLLKLNLLPHELSKLTDQEILMHLRKVVTRAVGLSKITELKEAASHSIGIREGSAMAKLELRTLIDKYELINEKFEELTSNIDDLLEQIPGVEQMLAITGIGKDTVAGFFSEVGDLSYYSHPRQIIKLAGLSLRENTSGKHKGQTKITKRGRKTLRALLFRVAMPLVAKNSAFKALHQYFTKRSENPLKKMQSLIAICNKLIRILFTIGKKQCEFSEERMLRDIPHLAELQKAA

SEQ ID NO: 259674 - protein, 412 aa, unidentified
MKDLLEISCGLDVHKEKIVACILTGPLGKPTHSEIREFTTLIPDMIALRDWIISQNCHHVAMESTGIYWTPVYEILEEAFSGNITLLVVNACHMKNVPGKKTAMRDSEWISTVLRARLLNGSFIPEKTIREFRDLNRYHKSVIRDITPQKNRVEKFLQSSGFRLSSFISDIFGISGRNIILHLIEHGQIDRTALDSCLKTKTRNRIDEILMSVNGTLSEHQKTFLKILMDHYDSLKEHLAEIEKSLEADMAPFALQVEQLSSIYGISTTASCAIIAEIGIDMKPFKTAEHICSWAGLCPGNNESAGKRKSTSVTKGNPYIKSMLCEIAWVIAGKRNTYLSAWYWRIKQKKGAKKAIIALARKLLVIIYTMLKQGTLFDESCFEARRKSSEQKQLSRYIRELEKHGYHVEAQA

SEQ ID NO: 259675 - protein, 392 aa, unidentified
MVVSVGIDVSKDKHDCFIVSSDGEVLADVFTISNTLDGFHGLLQRIQECSAPQDKIRVGLEATGHYSYNLLGFLLDNGLATYVLNPLRTNLYRKSLSLRKTKTDRVDARTIASMLLSDAGLKPYTDTAYHNEELKSLTRYRFDKVKERAKLKSSIARLVCILFPELEKLVPSLHIASVYALLEEFPGAKQVAAAHLARLKALLETASNGHYKRDMALEIRDTAKNSIGSQMPAKSLELQHTIRLIRELNREIDEIEEQIQSIMDELHSPITTIPGLGFRMAAMILAEVGDFTRFDSPDKLLAYAGMSPSTYQSGQLKNCYPHMEKRGSRYLRYALYIATKYVCHLDSAFADYLAKKRAEGKHYNIAISHAAKKLIRLIFAMEKSRQPYCSAA

SEQ ID NO: 259676 - protein, 305 aa, unidentified
MMENVFGVDVAKAWVDVVGPDGHERVGNDDLKAFALRVGKAGGRVAFEASGGYETPLRTALGSAGVPAIRVNPRRARAFATSLGRLAKTDRVDAGAIREMAARLDLPECPPETKEVSQLKALQLRRRQMVEDAKREKIRLSQTFDKGTRASVMRVMRLLQREIDSIEAAISRCIAGSEDLRSKAALLRTAPGVGPVSATALLAEMPELCTLTPRQVAALAGVAPMARDSGVRTGKRRIGGGRKSLRDVLYMAGLSAARHDPSLRAFSDRLRANGKAPKQAIIAVTRKLLIILNAMIRENRPYQPT

SEQ ID NO: 259677 - protein, 333 aa, unidentified
MTGIICGVDISSTSLAARIGRDGIAATFANTTDGVVELAGFCHSHEVELVAMEATGDYEQRSFAQLSEHGLPVAVLNPRSVRQFAQSMGALEKTDAIDAGMIAWYAETKKSQPTCLAPATQLELRARVTRLRQLTEVRTAQSNQQRLVTNAAVRKGFSAMLQFLDQQIEELEEAIAALIDADPLWHELNRAFRTIKGVADRTVSRLMAEMPEIGTLSNKTISKLAGLAPLANDSGKRQGRRAVRGGRSSIREILFIVGSVVARYEPDFIAFQQRLRAAGKPPKVVRIAVAHKLLVRLNAKARQVRLQIQDLAAINSTAPTSSYSNPEVLVPCI

SEQ ID NO: 259678 - protein, 344 aa, unidentified
MTQYIGLDVSQKMTALCVVDAEGRKLWQGQCGSTPEQIERTIGRHAEDGACIGIETGPMTPWLVHELRGYGLDVVCLDARHARAALKMQLNKTDQNDAEGLAQIMRTGWYRSVYVKSFAAHRARALLGARAQLVGMRTRLSNHIRGVLKIFGLLPGALRGLSFDRRIEILVADRPDVAPIVRPMLAAWRQLRVQIAVFDKAVRGLVKANPTCRLLMSVPGIGVLSVLAFVSTIEEPARFNRSRSVGAHLGLTPRRYQSGEIDRSGRISRCGDGLARTLLYEAAVVVLARVKRGSGLKDWAQAIAKRSGAGKARVALARKLSVILHSIWRSGEPFRWSEHPVVAS

SEQ ID NO: 259679 - protein, 369 aa, unidentified
MPHDRSGLERLRVALTTLGDPSEVGVAIERREGLLVDHLLAWGHPVYPVNPKVAARAREGYRAAPVKSDALDAFALADLLRRQAAAWRPLRPPSPTHAELQALVRDRERFVIEHRRLQHQLRAVLETYYPAATKLFSGLDRSITFAFLRRYPTPAEAERLTAHRLARFLARQGYSGRTAPEVLIERIRAHAGTPNVGVDVARARAMLALVDFLDQVGRVLDEYAAAIANVLERHPDAALFASFPGTGLVTTATLLAEIGEDRTRFPSPGSLLAEAGLAPVTRQSGSSRRVGFRYAANHHLRAIWGQWMLTAIRISPWTRAAYDAARARGQSHSRAIRSVGARWGRILWRCWLDRQTYDPALDRRVAMAA

SEQ ID NO: 259680 - protein, 349 aa, unidentified
MSKIAHHYVGIDLHKSVLQVCVLDCRGATIAEQRFTGSDFQSGLEVVGYLEQWRVGGRYAVEALGLNRWFVNACLERGLDIVVVDPVQLKLKRSGKKTDRRDAHEIARRLYLGDIDRHALTYYPDESEYGVRKVVRTRHKLVSIRQQLGNQIRSLLNAYRICEVKGRLYSPGNLAKLLALPLPEQLQVSLQALVESLRAVQAGVEQLTTQQHKLARLPVPELLVCALPSVGPQTAVTLVCELGDVSRFRNARAVASYAGLVPRVSQSADRSHHGKLTKRGNKELRWIVSQWAVRMLTHSPLVQNWAAPYLRRMHKNKVRMALARRLLIGVYIMLSRGEEFSLERCLAQH

SEQ ID NO: 259681 - protein, 343 aa, unidentified
MQTVTTIGLDIAKSVFQAHGIDADGKVVIRRQLKRRYVLPFFQKLPRCLIGIEACASSHHWSRELQALGHSVRLMPPAYVKPYVKRQKNDATDAEAICEAVTRANMRFVETKTPEQQSGLVLHRTRHLFVRQQTAVINAIRAHLAEFGIVAPVGRNGIEELLGAAADPSDKRVPEVARACLAALGAQLRVLKAQILEFDRLINAWHRCNETSKRLDEIPGVGPALATALIASVADPRAFRSGRDFSAWIGLVPKQHSSGGKHKLGGISKQGDRYLRSLFVIGALAVIRYAKIHGATRRPWLAALLARRPTKVAAIALANKIARMAWAMMAKGEPYREPVALAA

SEQ ID NO: 259682 - protein, 408 aa, unidentified
MTRYVGLDLHKHVVQASLINEEGKRLESYRFACTQESLLAFARERLRPEDQIALEATTNTWAVVALLRPFVARIVVANALRTRAIAEAKVKTDKVDAESLAQLLRCDYLPEVWQPDQETQQLRELSVQRSGLVADQTRLKNRVRSLLAQRLISAPMPTLFGVAGRHWLRQAVLTPTDRVIIDGFLHLLEGLEAEQERIEKRLAELSYPKEEVRLLMTLPGVGAAAAQALVAALGDWRRFADGDVAASYLGLTPRVHQSANTCHYGRITKAGNPQARYLLTQAAQQVAQHPGPLGVFFRRLKAKKNHNIAVVATARKLVVIAHLMLKNREPYRYAVPATTRDKLAGLRVAATGVRRRKSGPLREPMQSQPEGIRVHKTPALNEVYSDEGLPAAKPLSALGAVRPKCWQK

SEQ ID NO: 259683 - protein, 355 aa, unidentified
MVSITTKEVVMHVVIGVDPHKASHTAVAIDEAEDELSSVKVRATRRQVDQLVSWAEPFEKRTWAIESASGLGYLLAQQLVARGEEVLDVPATLASRIRVLATGRSNKNDPNDARSVAIAAFRAPNLRSVEVANHCEVLRLLAKRNRDLRSHRTRVICRLHALLAELAPGGIAKELYVSDAERLMAKITPETPAEQVRYDLALELIDDVRRLDAQTKESHRRIRVAVKASGTSLTDVYGVGPIITAQIIGYAGDVGRFANRDVFASYNGTAPIEWSSGGRVVHRLSRRGNRRLNHALHMAAITQIRNPGTNGRIYFERKVAEGKTKKEALRSLKRQISNAVYRQLVLDAERGPGGQ

SEQ ID NO: 259684 - protein, 413 aa, unidentified
MLLFAGIDGSDRMLDFHLRNAEGRVLTEGQVAKTFDGLAELFTRLEAHAPPGEIGLAIETTHGAWVQALLDRGYLVYPVNPKTAEHFRRALSAAGNKSDKIDAKVLALFLASCQQQLRPLRPDAPEIIALRIACEDRLHLVEERTAKLNELQAVLKGYYPAFLGFFGDVESRIALAFLENFPTQNEMRSLTPRRLQGWLKRHQYRYLDRLDGMLLHLLQPVLPVANHLQTAKAARIRYLASSLTALQDEIGECEKHIGELFASTPEADWVRSLPGAGPTLGPALLACIGRDPDRFPTVGDARALMGTAPVTKASGTSRVVHFRFGCWKFARRTMHLFADLSRHQCAWAQAFYKHQRSTGHKHHAAVRALAHKWLKIILAMKRSGTPYNDAVFAQSRRRYLSKTPLLRTVNQGV

SEQ ID NO: 259685 - protein, 347 aa, unidentified
MNFYTLAHKHYCGVDLHSRTMYLCIVGRDGAVLLHRNLPCNRDRFLLAIAPYREDLVVAVECVYSWYWLADLCVKEGITFVLGHALYMRLIHGAKDKSDRVDSEKTAVLLRGGLMPRAYAYPADMRATRDLMRRRLLFVRQRGSLLAHIQITHHQYNVDPPGKRITYRSNREGLGEGFEDSSVRHSIAADLALADHYEVTIGELELAVLRQARIHDPNALALLTSVPGIGKVLALTILYEIHDISRFPSVRDFASYCRLVKCERRSAGKSLGSGGNKIGNAYLKWAFSEAAVLFIAKSEQGRTVLTRLERKYGKPKALSVLAHKLGRAVYYMLARKQAFDPQRFATS

SEQ ID NO: 259686 - protein, 340 aa, unidentified
MDRIPVYVGLDYHQSSVQVCVLDRAGRVLSNRPCGNDAEAIVSAVQRHGVLAGAAIESCSGAADLADELVNGWGWSVNMAHPGYVRRMKQNPDKSDYTDAQMLADLERVGYLPKVWLAPEEVRELRRLVRYRQQLADERRNVKLRIRALLRDQRVRPPTGRAWTKPWLYWLRSTEEISTQGRWIIDAQLRRIDQLRIEIAEVELRLTRLTVEDVQVQVLQKQSGIGPVTAWTMRAEIGRFDRFRTGKQLSRFCGLSPRNASSGMRQADAGLIRAGNRQLRAVLIEAAHRLIRLDPRWGRFAGKLVSRGKPKCVAVAAVANRWMRWLFHEMQGVGGSKQAA

SEQ ID NO: 259687 - protein, 345 aa, unidentified
MDQISRIGMDTSKHIFQLHGVNVAEAPVLRKKLRRKDMVAFFEKLPPTVIAIEACGASHHCARLLQAFGHSVKLIAPQLVKPYVKRSKNDAADAEALCEAMSRPTMRFVPVKTAEQQAALMLVGVRDRMIRNRTQLSNAVRGHAAEFGLTAAKGMAHLVPLLERIEADESLPALARELFAVQAEEFAQLQARIGEIDARLTTWHKADECSQRLGKIPGVGPISAVLLRMKTPEPELFKSGRQFAAWIGLTPKDHSTAGKVRLGVITRAGDEGLRSVLVAGATAVIRHAQHSGKASPWLAGLLTRKSPKLAAVALANKTARIAWKMMITGETYIAKSVPAALARTV

SEQ ID NO: 259688 - protein, 272 aa, unidentified
METLYFLGIDISKKKFDAALTIDGKQFHEAQIENTPAAIQLFFRDLKKQLSSLNRLTVCLEHTGIYCLPLLNFLVKHKIRVSVEPALQIKQSQGMTRGKNDQADAKRIALYALKNCENLRFWQPQRHCIQRLKALLVLRERMVKMKVQLEVPLHESREFVATSIFKQTLANCQKTIRALQSDIKGIEKEIDTLVSNDEQISQQCRIATSVPGVGKITALNMIISTQEFSRIQDAKKFACYAGFYIWLLCQRSSATMNLEYSTNEKLIQERIK

SEQ ID NO: 259689 - protein, 372 aa, unidentified
MRHTASELSELARLLKNLDGETRVVMESTGNYHAPVAWLLHGAGFYVSVVNAMLVHDYGNNSLRRGKTDKKDAVKLANYGLDHWLTLPRYVPEEDTRLMLKTCYRQYQQYSKVQTMLKNNLISLLDTAFPDANRLFTSPPRADGSEKWVDFVATFWHCECVCGLSKKAFTAKYQKWCRKHGYNFSQDKALDIYASACGRFGVMPKTNTAKLLVEQAISQLQTTSAALAALKQEMQSLAASLPEYPVVMEMFGVGPTLGPQLIAEIGDVRRFHSKKALVAFAGIDAPPYQSGQIDVRSRSISKRGSASLRRTLFLVMGVLLQCAPMDEPVYQFMNKKRSEGKPYRVYMMASANKFLRIYYASVKAYLDSLEHD

SEQ ID NO: 259690 - protein, 461 aa, unidentified
MSSRYAGVDWAAEKHDVVVQNETGEELFAGSFAHDENGLRSLCRMLVRMEVSLIAIERPDGLLVERLLDAGLRLLPLHPNQVAATRARFRAAGGKSDRFDAFVLCELARTDHHRFRVLEPDSEQTKALRAMTRAREDLVQTRVALCNQLRAELERFWPGPIGLFKDLDSPISLAFLASYPSPRDARALGPKRMQAFLAGQGYSGKKPGSQLVAKLRCAPEGRAGEVEMAARRQVVLALVATLTPLVGQIRQLERQIAAAVRAHPDGEIFLSLFKGSTTTAAEMLAEIGDCRARYPTRDALSGDAGQGAVAIESGKRKAACFRWACNKRLRDAFTTLANTSRHWHPWAADHYARAIARGHDHPRAIRTLGRAWCRVVWRCWQDGVPYDPARHRGLQQHCTVTIPASLGPRPDLAAAQRMLGAAVTGTADRRSEREALDGKPTSANPLPLFRQPTMLRNRAGG

SEQ ID NO: 259691 - protein, 355 aa, unidentified
MSQEKYIGMDVHQATISAAVMDAHGKLIMECLLETKASTIVEFMQGLQGTLSVTFEEGTSAAWLHDLLQPHVDRLVVCDPRKAALLKEGNKSDRIDARKLAEMLRTNQVKPVYHGEHGVRTLKELGRSYLTITKDVTRVMNRIKAVYRSWAIPCAGTTVYAPRHRTEWLAKIAEPGVRVRAEHLYQQLDSLQPIRLEARHELVRESQKHSAVKLLRQIPSIGPIRAALLVGLLQTPHRFRSKRQLWAYSGFAVETHDSGEYRYVRGKVQRNRERITVRGLNDNHNKDLKSLFKSAAISASTRPGPLRDFYVARVDKGMRPTMARLTLARKIAAISLTMWKKGVSFDPQNLPRQAA

SEQ ID NO: 259692 - protein, 312 aa, unidentified
MGTKKVYVGIDVGKDWLDLAMADIDRITRYGNHKEGIEKMVAQIKLLQPKLIAVEASGGYENAFVEALMLQKNRVAVVNPTRVRSLANAKGLLAKTDAIDARNIASYAKMINPEPKKPREDLDIRIRALITRREQLVNIRSAEGNRLGTCHDSTKADIREHLDWLQRQIGILDDEIKQLVKSSEKWTQQTKLLETMPGVGFVTSVTMTANMPELGELNRQKIAALAGLAPYNRDSGKKRGKRRIFGGRQSVRRVLYMAALSATKCNPVIKKFYERLVEKGKPFKVAITACMRKMITIMNVMVKNQTAWRYPV

SEQ ID NO: 259693 - protein, 417 aa, unidentified
MGSMKKCCCGVDVHKSFIIAVIAIFRNDEVVFSRHMRFSTFTNGLCDFKEWLRLNNCYEICMESTGKYYVPVYRIVSDEQFHVDVVHPKYVRAPRGKKNDKRDAKRIADMYMRDHIAEYSIIPPADILAVRDITRYRRKTVNTMTAEKNRMSNCLTVSCIKLDEVLSDVHGKTGKALIGQIIERGGCDFDPAPYIDKRVKAPLEAFQQALDGDVTPATLTKMKIIQKRLDSLESQKAELESTMESLSQDFSRQIELLVSVPGIDVISAITIISEIGVDMNVFGSVKKFLSWVGLVPQNDESAGKKKSTRIGKGNQWLKPVIVQCANAAKNDRNHPEIPDKYLALKKRRGYGKAIVAIAKRIMTAVYYMLLRDEMYNPQTCVDRAPARGKIQLQNLINYYCSRGYVVVTDDGEVLQTA

SEQ ID NO: 259694 - protein, 415 aa, unidentified
MNRLIERCAMLDIHKSQITACARVPDGDGGRRQEIREFAATTSGLLTLADWLRSFQVTAVGMESTGIYWRPVFYLLEDEFECQLFNARHLRHVPGRKSDVQDAEWGCQLLEHGLVRASFVPPRPLRELRDLVRYRKAKIQERTREVQRVEKTLQDAGIKLSSVASEVLGVSARKMLDALISGTHDPEILAELAKGTLRRKIPALREALQGRFSGHHALLVGQMLAQIDFLDETIATLSARVEELTAPFSRELELLDTIPGVDRRAAEMLLSEIGPDMSRFPTDAHLASWGGLCPGQRESGGKQHSGKTRKGSKWLRGNLPESAKAVVRTKGTYLSARYHRIKSRRGHAKATIATAHKILTAAYHVLNQGVPYHELGEEFFYRRDTENTERYRRRLIKQLERLGHKVTLEPLQDAA

SEQ ID NO: 259695 - protein, 418 aa, unidentified
MAETFEWFLGIDCGSEAHEICLLDAQGRIRGTRTVAHTALAVHDAVQWVREQTGAAPSAIAVGLETPRGALVDTVIEVGFSVFAVNPKQLDRFRDRFTAAGAKDDQRDAHVLADALRTDRRAFHRVRPDDPLIIQLREVTRLREDLQEDEQRLANRLRDQLYRVDAAWLTLSPAADEPWLWAILSDAPDPATWAQLPRRRVAAVLRAHRIRRVSADAVLEQLRQPRLLVATGVTDAVATRIAALVPQLQVIYEQRLTAERRIDRLLERLATVEAPDAEPREHRDVEILQSLPGVGRIVTATMLTEATGPLADRDYSTLRAHAGAAPVTKRSGKRVFLVHMRYACKQRLRQAMYHWSRTSLQHDAAARAYYDRLRTRGHSHARALRSVADRWLRILVTMLRRGSLYDPSHFAVAVESPA

SEQ ID NO: 259696 - protein, 318 aa, unidentified
MIIGIDISKKTFDIAFFKDHHWHSQVFDQQLEHYQALLHQVGMVGNWFVMEATGSYFLKLADFITEQGGNVCVLNPKTIHHFGKMRLKRAKTDKKDARLIAQYGMDYEAELKKWQSADQDIIHLRQLQSLIALLIQQRTMLTNHQEALAQQPEQSESVNKELAEEKTALNERIKRLEQEVEERVQRKWSDEYQRLISIAGIGKVTATALLVMTYGFSRFTEVKEFLSYIGLAPAPHQSGTSIKGKGHISKIGSPVIRRLLYLYSWTAKKQNPPCKALYERLKNKGKPEKVIKIAIAHKLLRQAFAVVLKAQNFDPKMA

SEQ ID NO: 259697 - protein, 428 aa, unidentified
MKNRMKFDHLSTLCVGLDIGSRINFITALNFDSDRLINMRPVPNASNGVEAMESMILAVLEANPQFRYLLIAMESTSFYGVHVANYLSTTDKLKPYGVKVFCLNPKTIANYRKSFTGLGKNDGIDSFIVADYVRAGRINIEPWRGAQYLALQRLTRQRRHINEAIAREKNYVLNNVFLKFSEFALLSGKESPVSDKFSATAEAILTEYKTTEDIANAPLKELIDFISASGHGRFSDPDQVASLLQKAARNSYRLDKALYEPITTSIACSFNCIRAFEKEQKALDKAIAATVAGLNPTEYQILKSIPGIGPVYAAGILAEIGSVRCFNSNNALAKYSGIIWRDNQSGEFDSEDTPMMKAGNRYLRYYLIQAAGSVVRYCPEYTDYYNKKFAEVPKHQHKRALALTARKLIRLIFGLLDKNQLYSPAKSR

SEQ ID NO: 259698 - protein, 344 aa, unidentified
MTIVTFGIDLGKNLNSVVGLDAEGQVVLRRRVRRATLVELAGRLSPCTVAMEACCGAHHVGRLFAAKGHEVRLMSPEYVRPYVRAQKNDDNDAAGIAEAATRPTMRFVELKSQDRLDLQTLHRARSRLVAARKALVNQLRAILLERGYTFRQGRKVLERDIDPFLAEPPSDLSTRILTLIGDMRAEWRSLDERIDALNNDLTAHARADEAASRLTSIPGIGVLGATALVAAVGDGEAFRRARDMPAWLGLVPKQMTTGGKPRLLSITKRGNTYLRMLLIHGARAALPSLSKQATPLGEWLRGLLSRAHRNVVIVALAAKLARVAWASLRRGISFERGWGQPVAV

SEQ ID NO: 259699 - protein, 346 aa, unidentified
MKKIFIGIDFSKEKFDATLIQAEGLKECAPSVHEVFDNKTSGYRRLVKWVKAHAEGFTADMWLFCGENTGGYSIALCNYLYASGYDMWLECAYNIKHSAGIQRVKNDKADSRAIAEYAMRNYDKMIPYKPQSPSLNALREVFLYRHSLVKQRVALQVRRQEKRLTQDKSDIKTFMSFTSKHLVTEVNKAIAKCDEKIKEIIASDDELREVFDIVTSMPGIGVQNATCLMVYTDNFQKFDYDSRKIGCYYGIAPFGRQSGSSINGKPRVSPFANRMIKSLLSQAALAAIKTDIDIYNYYQRLTQRGKHPLLIHNNIKNKMLHRLVAMVRNRQKYNPDYIYRNSKEVA

SEQ ID NO: 259700 - protein, 400 aa, unidentified
MSTKQPELAAFIGLDWADERHAVCLRVAETNKIRTFSIEQQPEKLHAWLSSLREKFNNRKIGIAVEKSRGGLIYALMEYDFLILYPINPKSLAKYRESACISGAKDDPSDAELLMDLIYRHRERYRPWSPDTTQTRTIQLLCEYRRKVVGDKIALTNRLEATLKGYFPQALDWAGALDTVQACDFLTKWPSLQAIQKARAASIRKFYMDHSCRRADVIERRLKSIRSAQLLTDDEAVTHASILMVQTTVNALRPVIASIKRFNDDIAEVFQQHPDRELYESFPGAGEVMEPRLLAAMGSDRERFGSADEVQTFSGIAPVTKRSGKIHYVHRRYACPRFIRQTFHEWARLTLKESIWARAYYEHQRSIGKRHNTAIRALAFKWIRIKKKQTGLGCPGRPGS

SEQ ID NO: 259701 - protein, 398 aa, unidentified
MLYLGIDIGKNNHEAGIVNADGSHNGKSLRFSNTSEGFDKLLKFITAKNSTGDELRIGMEATGHYWLALYSFLHKQGFSISVINPIQSDSLRNFNIRQTKTDAVDCFLVADVIRFGQYTETHLADEDMIALRNLARFRESMVDTCAEYKMQVIAILDQVFPEYEKLFSNVFGESSKAFLKSYGTPEQCLEANTKSLATLLRKASKGHHGTAKAQELKAAAKSSCGIDLATDAFAFQIRTLIEQIDYTESQVDKIDQQIKQQLEKINSVILSIPGVGPATGAIILGEIGDIDRFSNPKKLVAFAGIDPTVMQSGNYTGTHNRLSKRGSPFLRRAIWMSAVVACRHDPVFKAFYEKKRAEGKAHGTAIGAVARKLTYTIHAVLKANKPYEVRMNQDSPES

SEQ ID NO: 259702 - protein, 327 aa, unidentified
MKKNPAPVYVGMDVAKATLQVHLNGHQFEFKNDSQGHAQLSKKLAKLTLPHVVCEATGGYERPVVEACHQAKILVSVLNPAHTLAASQAQGKRAKTDPCDAAALTDYGQRFHPEPTVAVPPATREITELTLWLKQLIDNRAVVKTQAEHHGNTFVGLQHEALLAHYQSQIDTVEQEIKKLVQASTPFQQRVDCLTQIEGVGFRTALLTLVFLPELGSMNRGGTAALAGLAPWTRDSGTMKGKRCIGGGRAQVRPVLYMAALCASRCNPVLAPFYQSLKKREKLSKVALTAVMRKLLIHMNSELKKLAAKPVQEKSETAKKTKKCLAN

SEQ ID NO: 259703 - protein, 409 aa, unidentified
MYDKTKYIYVGLDLHKEQHTAVIMDCFNEKLGEITFQNKPSEFSRLLVKAKRYCTDGKGIVFALENSYGYGRALAAWLIEQNYIVKDVNPALSYAYRKSVPQYKKNDSYDAQCVARVAINELNKLPDAMPEDMYWTLSQLVNRRANLKTHHIRLKNQLHEQVCVAYPSYKQFFQDIGRPTALYFWEHYPSPRLLQGKTVEELSEELIPVSHNQFSTRKCQKIMDAIKADGDTTRDYQPERDEITRGLVRDVRHYVAQIEEVDKAIADFLPRFECTLNTIPGVSDTTVAKLLSEIGDIRRFPNADKLANFAGIAPVNFSSAGKGDDKPSKQGNRRLQGTIYFLAIQMIQLSSKGLPRNPAFYAYYQRQLARGKSKPQALILISRRLISIIYGMLKNKTEYVMPKVQDNWD

SEQ ID NO: 259704 - protein, 390 aa, unidentified
MIYVGIDIAKLNHFASAISSDGKELMKPFKFTNDGDGFQMLNSRLTDLSCEDSSIIIGLESTAHYGDNLVRYLVACNYNVYVLNPIKTSVMRKDNIRKTKTDKVDTFIIAKTLMMQDSYRFVSFYDLDLMELKQLGRFRQKTIKHRTRLKIQLTSYIDQVFPELQYFFKSGLHQKAVYELLKEAPTPQDIASMHMTHLSHLLTAASHGHFKKEQAKELRVLAQKSVGASDSALSIQITHTIAQIELLDSQLNSVEAQMTEIMKFHDSVIMTIPGIGYINGGMILGEIGDIHRFSSPSKLLAFAGLDPSVYQSGNYSARRTRMSKRGSKVLRYALVNAAHNVVKNNATFKAYYDAKMAEGRTHYNALGHCAGKLVRVIWKMLSDEVEFNLE

SEQ ID NO: 259705 - protein, 366 aa, unidentified
MKQVTTFVGIDAHKKNLVVTMLNGPAAAPVTWQLANDAGAVRRLVRKLEREASGPVHVFYEAGPCGYALQRQMTTARVRCEVIAPALMPRKPGERVKTNRRDARKLAELGRAGLLTVVQPPTPADEAVRDLARARDDAREDLQRCRHRLGKLLLRRGLHYAGKNWTQAHRRWVDSLTWSHTAERAVVEDYQLAIDHTEARLLELDARLAELAEQAPYREPVGWLRCFRGIDTLTAMLILAELHDFRRFGSARALMAFLGLVPGEDSSGEKQRRGRITKMGNALVRRILVEVSWHYQHRPGVGRALKARRTGQPTRVIAIADKAQQRLCRRFRRMLAEHKPAPKVAVAVARELAGFIWAALQPPVVA

SEQ ID NO: 259706 - protein, 346 aa, unidentified
MYVGLDVHKESIEIALAPYGGGEVRHYGRIAGDLAAVDKAVSRIRKSHPKLNFVYEAGPCGYALHRHLTRKGHTCAVVAPSMIPKCSGDRIKTDRRDAVMLARLHRAGELTAVFVPSAEDEAVRDLTRSREDAVANHRRSRQQLGALLLRQNIRYTGKSAWTQAHLRWLSRVVMPRPTQQIVFQEYLNATQETDQRVARIDEQLRIAVEGWRMAPVVRALQALRGVSLNVAATTVAELGDMTRFDNPRQLMAFLGLVPSQYSSGPRVRMGHITKTGNGHARRVLVEAAWAHRFPAKIARAHQIRQENLPQAVRDIAWKAQLRLCRRYQRLLAKGKLKNVVMSSFEV

SEQ ID NO: 259707 - protein, 343 aa, unidentified
MGEISTIGLDLAKNVFQVHGVDASGGVVFRRQLRRGAVEKFFAQLPPCTVGVEACGSAHHWGRVIGRYGHQVRLMPPAYVKPYVKRNKNDGRDAEAICEAVSRPTMRFVPVKSVEQQATMAVHTTRALLVRQRTMIANSLRAALSELGIVAAQGLEGLRELIAKLEAPNEEVPEMMRGALSLLAKHWQALDADERLLERQIAKAARSDHKARRLMEVPCVGPIIASTVLAKVPDAKVFRSGRDFAAWIGLTGRDHGTGGKHRPGRISKQGDRMLRALLISGASAYLRHQKARGVSDPWLRDLLARRPYKVVMVALAAKTARILWAMLVKGEPYRDRTSAPAAA

SEQ ID NO: 259708 - protein, 347 aa, unidentified
MTTVTIGMDLGDRKHQICVLDEAAGKVAEVTIDNTATALRKYFRPYAGALVAMETGTHSPWISRLLGSLGCRVLVGNSRKLRAIWNSPNKSDLHDAEMLARIARFDPQLLYPVQHRSEQAHADLERIKARDALVRCRRSLINHVRGAVKAFGVRLPACSAESFAGRVKPQVPKVLAEAITPLLETTERLTEQIRDYDRQVATISRARYTCSERLQQVSGVGPLTALAYVLTLEEPQRFEKSRAVGAYLGLTPKRDQSGQTDKQLHISRAGNGYLRQLLVTSSHYILGPFGPDSDLRRYGLRIAERGGKNAKKRAVVAVARKLSVLLHYLWKTGADYVPLRGADAPVV

SEQ ID NO: 259709 - protein, 355 aa, unidentified
MDEQRVVVGGVDTHKDLHFAAVVDDQDRVLANESFATTRHGYKQMLAWLRSFGQLARIGVECTGTYGAGLLRYLQHAGVTVLEVTAPDKQDRRKRGKDDTIDAENAAHAAFAQVRTVTPKTRDGMVESLRVLKVCRKTAVAARRVALQLIQNSIVSAPDELRESLRTMTRMQLVRTLAAWRPDLSDYRNLTSAYRIALKSLGRRYLELHDEIADLDVMIAKLVDELAPELIARNSIGYESAAQLLLTAGDNSGRLQSEASFAALCGVSPVPASSGKVSRHRLNRGGDRAANSALHIVAIGRLRTDARTKAYVEKRLSQGHSKLEAIRCLKRYIAREVFYIIQRRQREINSTKIST

SEQ ID NO: 259710 - protein, 310 aa, unidentified
MEKVIEYPQIVETGCGLDVHKDIIVGTISCGNQRFETREFGADTSSLTSLRDWCKQAGVTHVAMESTGIYWKPVFNILEEDFEILLVNARHVKNVPGHKTDKKDSVWLSKLLLSGLLKASFIPPQDIRELRDMVRYKKKLVGQIASEKNRIIKVLEDCNIKLSSVLSSIDGSVGTRIIDAIIFGEHDVDILMGFYHGKIKASKEEFRKALTGRITPHHIRMLQFHKKHIEDTEWLIKDIDKEIDKAAEAYKVEIDLLQTIDGIGKESAIAVISEVGVDMSKFPNEHHLASWAGVSPGNNESGGKKKAPKP

SEQ ID NO: 259711 - protein, 346 aa, unidentified
MTESLFAGIDLHSNNVMIGIVDQNGQRLKHQKLGCDLKRVTEFLEPFKARFKSLAVESTYNWYWLVDGLRALSYPVVLANPAQINQYSGIKHADDKNDAFFLAELQRLGILPTGHIYDPVLRPVRDLLRRRLSLVHQRTALLLSFKSLYARTTGQALSLGRIKSMELAEAKTLYEHPANCLIATVQKEHLEQLDRSIERIEKAVLKSARDLPSYDRLNTLPGIGRILGMTITMEVGEIQRFPTPGDLASYCRAVDSKRMSNGKKKGDNNRKCGNKYLAWAFVEAANFAKRFDDPCRKWFDRKAAKTSTVIAIKALACKLAKAAWHVMNQETDYDPKRMFPELAQGQ

SEQ ID NO: 259712 - protein, 426 aa, unidentified
MDVMYPRVAGLDIHKKLIVACRIIPGAGAQVQREVRSFGATTAAIEDLGDWLAEGDVTHVAMEATSVYWKPIFNLLEDRFALVLANAQHIKGVPGRKTDVKDSEWIADLLRHGLIKGSFVPDRAQRELRELTRYRTSLVRERAAVANRIQKTLEGANIKLGDVATDVLGQSGRAILEDLVAGESDPTVLAGHARGQMKSKRSALQEALRGSIGPHQRFLLEQQLGHIDCLEWLIGRVEAEVSARLEADAASVPGVPDGDGAPASGTEAVARLDTIPGVGRRVAEVVVAEIGRDMSRFPSADHLASWAGLTPGHHESAGKRYSGRTRKGSPALRVALVEAARAAARTHTYLAAQFRRLAARRGGKRAAVAVAHSILVIAYHLLRDGGVYEDLGQTYFDQRDKTRVTQRLLQRLRNLGVAVEVQPATT

SEQ ID NO: 259713 - protein, 417 aa, unidentified
MDTLFVRVAGLDVHLKRIQCAVRCRQQTGKLFAQVRSFGTMTGDLRALADYLQGLGVTHVALEATGVLWKPVWNVLEGRFALLLVNPRHLKKVPGRKTDVTDAAWIAQLLQCGLLRGSFVPGRPLRDLRDLTRHRAQLAGEHTRVANRIHKLLEDANIKLGSVASDVLGKSGRKMLRALLDGEQDGAALADMALGVLRKKIPELRRALEGNCTEHHRYVLGRLLSHLGYLEAQAELFSQRIAHRLDDLLPPPRRRRLDKIPGVNRKTIENVIAEIGVDMSIFPDEHHLASWCGMCPGNEESAGRRLRGRTRRGNRWLRRALAEAAWAASRVKHSYLRAQFRRLAARRGKKRALVAVGHSLLVIVYHLLKRDVEYSDLGADYFERLEPERLRRYLVRRLQNLGYEVTLSAKNPDDSEP

SEQ ID NO: 259714 - protein, 389 aa, unidentified
MIVIGADRHKGSHALAAVDEGTGRVRGSREIGADGAGHLAAVRWARGLHDDRVWAVEDCRLVSHRLEQALVAAGERVVRVPPQRMGASRKGQREPGKSDEIDALAVARAVVKDGVEQFPVAYLNERAMEIRLLLDHREDLVADRTRAVSRLRWHLLELCAELERQLKRGAFNDARVLDRVDRRLRKLPAGVGVRVAREQIAQLRSLNRHIDQLHRELAELVAAHRPKLLTEQGCGALVAAILIGHTAGNERFRSEAAFAQQTGTAPIPCSSGRRTQHRLNRNGDRQLNHALHIIAVTRAQRDPATKRYLARKQAEGKTTKGALRCLKRHLARHFHQLLAEPPADQSQPVEPKLAPTNGKPTEIRDRREPHPDAIRIQGGPHTSACLNTH

SEQ ID NO: 259715 - protein, 339 aa, unidentified
MSEDYSGQQLVGIDLHRRRSVLVRMTKDGQKLETTRISNDPEYLRAVMARAGDFPEVVLEACYGWYWAVDTLIELGASVHLAHPLGVKGFAYRRVKNDARDAADLADLLRMGRLPEAWIAPPACRELRELVRHRAKLVGLRTNLKCQISAVLAGAGVQGLAADTFGVAGRELLECVALPAAMRAKVNSALRLIDAIDFEVGTFTHLVTTRLRADPGWVAVQTIPGVGPILGAIFVAEIGDIARFRRPEQLTSWAGLTPKHHESDTKVRRGRITKQGSKLVRWAAIEAVQRIGPHTRLGAYREAVAQRRGRNQAKVATVRELVECVFYGLRDHHIRRLAA

SEQ ID NO: 259716 - protein, 342 aa, unidentified
MPHSPKREVEVFAGLDVSAREISAARFRSQEGTLTVASFANTASGHKALLAYLLQATEGVRVCLEASGNYSLDLALTLHAHHHVEVSLVNPRRARRFAESLGERSKTDPVDARVLCEYAARMPWVVSRPPTARALRLRAITRAIESLGVMHTQEKNREHALKASQALPSLVIREMQRHQRYLENRMEQLRREARRLIAKDPELDRRFRLMVTVPGIAETSALQILGELAVLPDSLDARQWVAFSGLDPSQFTSGTSVEKRPRISRGGSRHLRRALYMPALVALRREPHLRTFYQRLVNRGKARLQALVAVMRKLLHALFAMFRCHQTYDGAKLCSVELASCA

SEQ ID NO: 259717 - protein, 429 aa, unidentified
MNYNTQNAKIASITEKTLIVGIDVGSETHYARAFDWRNYEYSKKPFAFNNDEAGFAAFKVWMEDIAEKHEKEAVIPGMEPTGHYWLNLGAYLQEQGMKPVHVNPHHVKKSKELDDNNPNKNDRKDPKTIAGLVNEGRFSYPYIPTGIYAEIRNLSNLRIQTQEELTRIKNRIARWFSIYFPEIKDVYKNLDAVSGMMVIKKAPLPCDIKELGVDGVNQVWRDAKLKGAGLKRARTLVSAAEHSIGSTEAPGSARIEIRNLLNDYEVYKNRMDDLMREIEAKLSEIPYIDKLMEINGIGLKTVSCFIAEVGDIRRFDNPKQLQKLAGYAIVADSSGKHNGESRISHRGRKRLRYALYEAAISVIGKNKEFREIHDYYRTRKQNPLKKMQSVIAIACKLIRIFYTILTKGVDYDGQKMLSDIVRPEIIMAA

SEQ ID NO: 259718 - protein, 361 aa, unidentified
MNPSMPEQPRLVTGGVDTHADFHVAAVVDEVGRVLGTEKFPASINGYKALLSWVTSHGQLTKVGIEGTGSYGAGLARYMATAGTEVVEVIRPNRQARRRRGKSDVTDAVAAALAALNGEASGTPKSHDGAVEAIRALRVARSGAIKARTQAANQLRDLVLTAPEALRQDFAGLSTESRVAKAARLRPGPLLGPLEGAKAALASVARRYQELSAEIDRLDAALDELVDRTAPEDFLAKLGVGTQVTAALLVTVGDNPGRLKSDQSFAALCGASPVDASSGKQVRHRLNRGGDRQANSALWRIVMTRLAHKDPRTQAYVERRTKEGKTTKEIMRCLKRYVAREVYKSLVAPALGQERAALVAA

SEQ ID NO: 259719 - protein, 336 aa, unidentified
MKKIFVGIDISKKWIDVCVTADGKSISHLQFGNNKAGFKAMVKWNKQFSKQQDEWLLCMEHTGIYALPLWYFLTEQKIAYCVVPGSLITSGLEIRRGKNDKIDAADIARFTMRYADELKPHCIPAQILQRLKMLFAYRERLVKASVLIKVPANEAKQFASKESKEVRTDSSSLVQVIEARIKKVEKQMLEVINSDEQTAKCYQLIISVPGFGIVTACYLLIITQCFAVLTKSRELSNFGGMAPHPHTSGKSVKGKTRVSPIADKKLKALLSRGASSLIQYNEGMQLYLARMMARGKHENLVRNNIKNKMLHTVCAVVKRGTPYIENYVSPYPQLVA

SEQ ID NO: 259720 - protein, 422 aa, unidentified
MENNYILYVGMDSSKGKADAAILKVSDRRSVKPKFLRKKLSFKFVKSEVTSFLETVRNYSDVNCTSICFALEVTGIYSTNVYNFIKDNLNDNESIKFLNTDFVNQWRNAHNIAKSDPLDAQTISTIIGTDSDVQYVNDNVFENKNGYQDLKALVHRHYQIKKIYSQEINRLIAQCDCLFPELQYVFEPKSAAFIAVLSSYPTTHDIINASRLEVFNVVYEATKHRCSMDKIDKLFDLCHDTLVPDNISSYGRSIILDLVENIKNIKGQLKMIERYIRDIASLNPAYKLLLTITGCGPLTAATVIAETGDIKRFKNADCFVSYSGTSPRNKRSGTSVETMGKISKRGSRYLRHAIYMIAEFARRHNPVLKHQFERIKNGNKKRHKLANIAIANKIARYIYSIMKNESSFVIFHEHIMKLPEET

SEQ ID NO: 259721 - protein, 375 aa, unidentified
MEGAPMLDTTTFVGLDVHARSIKAVSLDVMTGEVRCATFGYDAGAVAEWVRSVDPRARCVYESGVTGFDLQKRLSGLGVDCVVGAVSKMIKPSADRRRKNDRNDAEFLARMLSVGNVVEVWVPDDECEAARDLTRALEDARDDLSRAKQRLSKFLLRHGLAFDERTPTGRRKGNWTRAHWSWIESIRFAERADEEVLAYYVDAVRRAAEEKSRLEGLVEAEARKPRWRKRVDSLRCLKGVDTASAADLVFEAGEFSRFRNARSFAAWVGLTPSEHSSGESDRRGAITKAGNKHLRKTLVEAAWHYLTCSGRPKDLARGQAPDRGARRHAAKGVRRLAERREALLARGVHGNKANVATARELACWVWAVGLMAEEA

SEQ ID NO: 259722 - protein, 366 aa, unidentified
MKKISTVQVLGNEILQEQKLTIGVDLGDRWSFYCVLEEAGKIILEQKVATTPEAMKQTFGKIPRSLIALETGTHSPWASRLLTELGHEVLVAHAQKVELITKSNRKDDRHDARTLARLARIDPELLGPVRHRCAKAQIHLTVIRARAELVSARTALVNAARGLVKSYGEGLPKCGTQQVNRELAAGLNTELREVLQPLLKEIESLNERIPEYDERMEKIAQEVYPEVSLLEQVKGVGTQIALTYVLTIEDPYRFEKSREVGCFLGLKPGRRNSGKSEPQKKISKEGDRYLRTMMVQGAHYILGPFGEDSDLRRCGLKLAERGGKNAKKRAVVAVARKLAVLLHRLWVSGEVYEPLRNSQKAMRAVA

SEQ ID NO: 259723 - protein, 412 aa, unidentified
MEVVYARCCGLDLHKRTVVACRIVPGPNGQPDKAVRTFGTMTAELLELAEWLAAVGVTHIAMESTGVLWKPIYNLLEDQFTLLLVNAQHIKQVPGRKTDVRDCEWIADLLRHGLLRPSFVPERPQRELRELTRYRTTLVRERAAEVNRLEKTLEGANIKLAAVASDLRGRSARAMREALVADATDPAGLAQLARGRLREKRPQLEQALQGRCGAHQRFLVAQQLAHLDYLDEAIEQVSAEIEERLRPFEGALAQLDTIPGVARRGAEIIRAEIGPDRSRFPTAAHLAAWAGMAPGNNESAGKRRSGKTRKGSPYLRARLVEAAQAAGRTKDTYLAAQYRRLGARRGKKRAAVAVGHTILVIVYHVLRRGTIYEELGGAYFDERDRQALERRLVRRLEALGNQVTLQPIDPAA

SEQ ID NO: 259724 - protein, 344 aa, unidentified
MQKIQTIGIDLAKNVFQVHCVDEKDQIVLVKQLRRNQVIAFFAKLEPCLVGMEACATAHHWARELIKLGHDVRLIPPVYVKAYVKRSKNDAADAAAICEAVTRPSMRFVPVKTEEQQAALMVHRARDLLMRQRTQLTNALRAHLAELGIVAETGREGGMQLVKIVGQARSSGALPAEMIEALSALIDQIFSLEEQINELNKCIKRQYRTSEVAKRLEAIPGIGIITATAMAATVTDPGQFKSGRDLAAWLGLVPKQYSTGGKVKLGPISKKGDRYLRRLLVVGGTSVVKLAKIFPWRYPWVAKLLEKKPAKVVAVAVANKLARIAWALMNSGGNYRPQLRGARP

SEQ ID NO: 259725 - protein, 391 aa, unidentified
MIYVGIDVAKDKHDCFIMDSDGTVLFDVFTISNTRTGFMELLDCIKSVARSSENVTIGLESTGHFSYNIQSFLTDNNMPPVVINPLYTNQFRKATSLRRTKTDRIDARNIAFLLSSGFDFKPCRCESYHISELKSLTRYRFEKAQERGRLKVSVTRLVTILFPELLHCVYSIHSTAIYQMLLNYPSAKLIAEAHLTRLSSLLNKYSLNHFKKDFAIRVRAEARQSIGLDLRAKSIELQHTIKLIHEYDREINELDELIKDYMNQLHSPITTIPGIGTNLGSIILAEIGDINRFENADKLLAFSGMSPSTYQSGTYESNNARMEKRGSKYLRYALFNAARYVSQWDPTFAAYLEKKQCEGKHYYVALSHVVKKLVRVIFHLLKTNQEYISRA

SEQ ID NO: 259726 - protein, 469 aa, unidentified
MKKHQSAKTKSKALKPIHDPQPDAAGIDIGANEIWVAVPPDRSQDSVKRFGAFTRDLQAIVQWLVDCGVRSAAMEATGVYWIPLYQLLADAGLKVCLVNARHVKNVPGRKSDVRDCQWLQYLHSVGLLMGSFRPPQAICAARSIYRYRQNLLSTAAQHLQHMQGALEQMNVKLHHVIDDLTGLTGQAIIEAILAGQRDPEQLAKLRDKRIKASEERIVKALEGDWRREHLFVLAAAWRSWKELQQQVQSCDQELLNYSRELEACTTVAKPTKVMRLTQLAAPNPVGPKGRKARKKTSKNEPQGPWREELLRFFGVDLTAIPGISVLSSLTLMTELGNDLSAFKTAHHFASWLCLCPDNQTSASKVLRRATRRSQNRVRQALRMAASSLHHNKSYLGDKYRRLRAKLGAPKAITAMAHQLARIIWTLITRRVDFDLSIFALQEQANEQHRLKRLSASARQMGYQLTPIAL

SEQ ID NO: 259727 - protein, 354 aa, unidentified
MNATQVFEKRKIAVAIGIDLAKDHCDVVAYNADNKICFTKANWAYPHLMEWLANAQPAVVLMESCKGCHVRARDIADLGHDTRLVKGADVKALRNVCQKNDIRDADYIARLLYVPGTKFVFVKNQRQQSLQFLQNEYKSFQELRIQVGNQIHAGLEEFGCPAPKSKKFIQSRMMAHLEKNAELIPDEVMSSFLRRREMWLNLFEQEEEAKKRMEEIAKTDDDAQRIMTVPGVGAQTAVGMLVHIGGDIGRFKNSGQFAASIGLVPKQNSTGGNTTLNGITKCGPKRLRANLVQCGQVILMHADKLKGNFGDWVRKMRDSGKKRGVIACAIAAKLARIIYRLMKDKVDYTPVPSR

SEQ ID NO: 259728 - protein, 342 aa, unidentified
MQQSIYVGLDLGSSRCHQTVINSDGSLQMSRSIPTSEQHLRSAFTALGDHVRVHLEAGELSTWVYSIIKPMVAEVVVSHSRTLAWIGKDSQKDDSIDARKLAELLRLNRVHPVYCETADDRRLFKQLVTHHEDLSREQARLKSKIKARLRTLGIIRFDARLFSKSGNALLLGELKEPSVRQMLAQSFAVLNQLLEAETQAKQAMTAASKQFPEVSLLQSAPGVGIITACRFVAYVQTPHRFSNKRKLWRFCRLGITRRESNGKRLAHPRLDSAGVGSLKDVSRKVFEAARRTKKDNSFKRAFEYALLNTKNAVHARLSTQRKILSTLRAMWLSMQPYQDTGR

SEQ ID NO: 259729 - protein, 329 aa, unidentified
MQAILHNCCGLDVHKDSVVACILKTQESLINAKSKEDTTKEIRVYKTFPDDLAQLRNWLESEGCCHVAMESTGVYWTPIYDALEGACDGSMELLVTNARHMRNVPGKKTDIKDAEWIASLLRAGLLRGSFIPPIEVRELRQLTRYRKNVVQDINTQKNRIEKFLQQAGFKLSTFLSDIFGVSGRNLLRVLTKKGRITPTDVEYATTRIAPAKKAEIKLAINGKLTSNQRSFLKLQISHLDVLISHLDTIEASITELSKPFEEAIVRLDTIPGIAETSATAIIAEIGTDMSKFPTAEHFCSWAGVSPGDNKSAGKKKVLVSPLETPTLKD

SEQ ID NO: 259730 - protein, 423 aa, unidentified
MLGVGIDWAEQFHLVAMGRSENGVFEVTRVEHTPVAVTALLARIAGLEPDPAEVRVVIETSHGMLVEQLLDAGFTVVPVNPDLIARRRGPARKKDDAEDARIACLLALDRFTSLRPLIPHGAVAAELRAIARDDERANRDERRLLNRLRADLIATFPAALQIAGTDMGKPTFLRLLERWPTQEALRQVPREEIKAFARSGHHGWPDRFADQVTAALVSETFSARDYLVRAKADTIRLTATQLLAIGAQRRVWEKRMGQLLLGVPRRGRRSATEEQPGNRFPGGEIYLSFPGLGDRLAARVAGEIGDHIEQFDSPNALACYAGKAPVTRRSGKSEYVVACRLACNRHLRDAVQQWAFCSLRQSRWAREFYDRHIADHHSHQAALRALGNRWLEVLWHCLRRRVRYDETVHAANRNRAMAHPRAA

SEQ ID NO: 259731 - protein, 385 aa, unidentified
MKSKTFMPTDYDVFGGLDVDKRSISVTFSNHQGFIRSLRMPYSVEHLVNHVRKHYGDKKVAFAYEAGPTGYGLYDRLVAQQYPCLIASPSMIPKAPGQRVKTNRLDSRGLSENLRGGQLKSIHVPSAVYRELRHLTQLRDTFVSEMVGMKQRIKSLLLFEGIEFPAAPAGRQWSFMVKDKLRKLECSQTVRFKLDQLLDSLEFSEKQVLKATREIRRFCRNDAELSQCIGYLMTIPGIGWIVASQLVARIGDWRELQNIRQLGGFLGLVPTEDSTGERTDRGSITHTGDGRLRSKLIQASWSAIRQDGELRDFFRSVCRTHARHLASRVAIVAVARKLSVRISVVLMKQRPYEVREKVQSTPLTQEETSPQGTTRREPEPGEKNS

SEQ ID NO: 259732 - protein, 575 aa, unidentified
MSTATPLDRIGVGIDTARYGHRVTFLKPDRLPAAKPLTVLENRASYRALQQRLQRLHEQHPQAHFHIRIDAAGQYAANLERFLRQLSLPKTVSIGEPKRNKDYRKAHFPKRTTDDTESQAMARFAVVEQPAATAGSAPAMVLLREVAGRLQAKVKQSTQAINRLHNILARVFPELATLTNNLAVAWVLNLLDKYPTVERITQARSSSLEKIRYLSEDLATQVRRAAQQSVASLHGDVAAALVRDLVAQVRHTQQAEEGMRQLLKQAFADLPPSGHLQIETIPGIGPTTAAVLMAKIVDIDHFATPDKLVGYFGVFPELNTSGVDKQGQPLSAGTLHMSHKGNDLVRAYLWNAVRSAILHNPAVRALYHRLRAKGKRGDVAMGHCMRKLLHLVFAVWKTNRPFDPEHVPWEQHTDMVVSPKTTANTDDTNNEAVGHKRVKPAQEVVTTADVTVVPATPSVKPPLRTAKPFKLDFAFLRQQVTMEQVLERLGILSNLRARGQQRRGPCPIHSQPTDRQRTFSAHLGKNLFQCFHADCAAQGNVLDLWAALHHLSLYEAALDLADTFHLRRNREEEPV

SEQ ID NO: 259733 - protein, 355 aa, unidentified
MDSKKYIGLDVHQATISVAVRDSAGKLVMESILETKSEHHPGLIRGLGGNLWVTFEEGTSAAWLYDLLKPHVAHLIVCDPRKNALLKAGNKSDQIDPRKLTDLLRAGLLSPVYHGESGVRTLQELARTYLTITKDATRVMNRLKGVYRSWAIPCAGQTVYAPRHRSAWLEKLVQPGVRRRAEQLYQQLDKLVEIRREARRELLRESRKHPAREFLSQIPRFGPIRVALLIALLQTPHRFRTKRQLWAYCGLALQTRSSGEYRYTGGQLQHSKRPPAIRGLNVNHNHDLKSLFKSTATQASGANDPWGEFYQNLLARGMKPAMARLTLARKMAAVVLRLWKKGEHFNPEPLKRKSA

SEQ ID NO: 259734 - protein, 415 aa, unidentified
MEATVERCAGLDIHQASVVACVLVGPPGCKPRKEVRSFGTSTRELEALRAWLEELGVTHVGMESTGVYWKPVHAVLEGRFELIVGNAHHIKAVPGRKTDVKDAEWLADLVRHGLIRPSFVPPPPIRELRDLVRLRRSLTEARSTERNRTLKLLETANIKLASVASEVFGVSGMAMLRALVEGEAAPAEMAELARGKLRRKRERLTLALEGRLTEHHRYVLAFHLRRLAAIEEDLRALDARIEAKAEPFQAQRRLLQEIPGVDALVAVTIIAEVGIDMSVFGNAKRLAAWAGVCPGNHQSAGKRRGGATRRGNVHLKTALVTAAVSGSRRRGSYYKDKYHRLKARRGRLRAAVAIAHKILVAAYHMLAEGVPFRELGEAFLDQQARQRTVRHLLSRLDHLGYDVMLRPKAAEAAGP

SEQ ID NO: 259735 - protein, 357 aa, unidentified
MRQQNYKKDFNGQNIFVGIDVHLKTWSVSVALPGGYLKTHTQKASAKELFEHLNKHYPNGTYHVVYESGFSGYSTCYALRELGIDCIIVHAADVPTTQKEKVTKSDPTDSRKLARSLMNGEIEGIYVHSKDNLDDRGLIRHRTMLLKLSGGIKSRIKHLLYNNGITYPEEFAQESKHWSRRFISWLQHDVQLLSKTRVTLDLLIEELLYFRVRILDVSRKIRALAMTDKYREQYENLLSIPGIGATVSMCLLTEIDDIWRFSNQRQFASFLGLVPVMQASGDNCYVGEKTFRGNKILGPKIIEASWITIKHDTELAARFGYFCKKGMKRNKAIVRIARKLSNIIFAILRENRKYVCR

SEQ ID NO: 259736 - protein, 433 aa, unidentified
MGFIVPTVMHPEREEQPLQYEWFVGIDWGSQQHQVCVLDRDRRRVGERAVDHDGVSLARLADWLWTVSAGQPQRVAVAIEVPRGALVEGLVERGFHVFAINPKQLDRFRDRHSVAGAKDDRRDAFVLADSVRTDQPSFRRLQLDEPQLLLLRELSRAEETLLEEFRRSANRLRDQLHRFYPQMLQLCSAADEAWLWDLIDLAPTPAHAALLSAEQVQRVLKTHRIRRVTAQEVLTCLQASALPVAPGAAEAAQAHCAFLLPCLRVLAEQLQACSQQVSALLRTLAEAPGESEGPSDVAIVLSLPGVGRKITAWLFAEAAQPLAERDYQVLRTHGGVAPVTKQSGKRRRVVMRRGCNPRLRHALYHMARVAMQRDAHFKSVYAALRAKGQRHGQALRNIGDRLLRILMAMLRHRTCYDASRIRRVPVVQMGQKN

SEQ ID NO: 259737 - protein, 475 aa, unidentified
MMQAGFRRAWSDSEGDGPSALQHDLSTTLVLESHTNRSDGRDLIGALPSTVYVLSAVPAGGAIPSTTKVGRYSMAHEPTVVLGGVDTHLNVHVAAVVDDQGRLLESQEFPSSADGYRELLTWMRSFGTLERVGVEGTGAYGAGLARYLADEGVEVVEVNRPNRQMRRQRGKSDAVDAEAAARAVLNGEAAVVPKSKDGLVESIRVIRVAFTSARNSRTRVTLQIRDLILTAPDQLRAVLSPLPAELRVERCAKLRSGELTDPGEATKYTLRILARRYQRLTTEMTELSAGLDDLTARANPALRGAKGVGPDVAAILLVAAGDNPERLHTEAGFAALCGASPVQASSGKVTRHRLNRAGNRQANHALWTIATVRLTNDPATQAYMIRRTAEGKSRREVLRCLKRYIAREIFQLLTAPELVPVGTDLRVTRTNARVTLETAASALGISATHLSRLERGLQHNVTLAKRYEKWLADAA

SEQ ID NO: 259738 - protein, 405 aa, unidentified
MPYILALDVSMGHSYSVLYKDDTCLFEDEIEHTQRGFHALLEEIQHLPERPLIVFEATGIYSRPVEKFFQDHHFSYCLLNPLEAKKQMEENTLRSWKTDKSDAHRLAQTHLKSQRQPKEVQSNFYLKMRDLARFYQEIEKKITRLRMDLHNYLQLTFPELEQFFSNRLTPYALTLIRLFPHPDFVLASTRTKIKNKLINETRKKISANRAEQKADQIIHYAQCAYPAVEKDSIHCQKTIYYAELLQDLLEQKKALATQMIKKAEGSPCFLLYQTFPGIGALTAALLLGELGDITRFKTHKQLNAFVGIDIRRYHSGKYTGQDRINKRGNPKARKIIFFTIRNMIRQQRAAPNHIVDYYYKLKKQPIPKKEKVATVACMNKLLKCMHAMVRAHTEYDYAYAVSVDH

SEQ ID NO: 259739 - protein, 344 aa, unidentified
MRLFIGLDVSLAKTAVCAITEHGKIVKEAQVASDPEAVAGYVLALGGTVATIGLEAGPLSQWLHRGLTDVGLDVVLMETRQVKGALKAMPIKTDRRDAEGIARLLHLGWFRPVHCKSISAQEVRALLGARKAIQQGMIALELSLRGLLRNFGLKVGAISRGRFDVRIRELAEGNAMLEAATAPMLRARASLRHELAGPERQVRLLAQEDPICRLLMTMPGIGAVVGLTFRSAVDDPTRFSSSKKVGPWVGLTPSRNQSGERDVSGGITRAGDANLRRALCQAATVMMNRGRSSWLRSWAAQVAKRRGTKRAMVALARRIGSILHRMWSDGTVFQSDVPPAAMSA

SEQ ID NO: 259740 - protein, 381 aa, unidentified
MTKDTRFVGLDVHAETISVAVAEAGRDGEVRSLGHVPNTAEAIRKLMARLGKAEQLRVCYEAGPCGYVVYWQLAELGVACEVVAPSLIPVKSGDRVKTDRKDAEKLARCYRAGDLTPVWVPDAAHEALRDLVRGREAAQRDLFRARQRVLKLLLRHGRRSPEGGKNWTKAHFEWLGRQRFEEAPLEAIFADYLNEVRHALERVARLDRAIDEAVESAPERTRAVVAALQALRGVAKTTAVTVAVEVGSFSRFERARQLMAYSGAVPSERSTGGPGKARRGSITKTGNGHLRRILTEAAWHYRHPPRVSHALRARQREQGEQVKEISWKAQVRLSSRFRRLLGRGKPPQKAVTAVARELLGFMWAIGREAEARYLKPAKVAA

SEQ ID NO: 259741 - protein, 413 aa, unidentified
MQTGYTVVAGIDVHKRVLMVVVGQVGGEEHGTAQGKFTSTRTGLRDLARWLEEHDVDAVVMESTAQYWWPVWMELETDWPLYLAQARSNAAPHGRKTDFRDAARLVRRFFSGDLRYSFVPKPEQRAWRRLSRTWKSLGEQIIETSNEIEALLEEGQIKLSCVVSDQLGVSGKRVLRALAEGQSDPEQLARLFDRRVRASEQERVDALDGRLPAAHRLVLKQHLDRIELLEQQRDELQKSLEQLMGHCSPAVKRLTAVPGINVVAAQHLIAEIGPDVSAFPSAGQLASWVGVCPGRQESAGVSRSNRCAKGNRFVRALICQIAHAASRTKGSYWEALFQRWQKRLGPNKALWAVAHRMLRLIWKMLAEAAEYIEYGPRVLDPVRLAARMKRLRREFRLHGFQVDFTPINGESMT

SEQ ID NO: 259742 - protein, 313 aa, unidentified
MLNTTTFVGLDVHARSIKAVALDAMTGEVRSATFAYDAAAVAEWVRSLDPAAKCVYESGVTGFDLQKRLAALDVDCVVGAVSKMIKPSADRKRKNDRNDAEFLARMLSVGNVVEVWVPDDECEAARDLVRALDDAREDLKRCKQRLSKFLMRHGYAFSETTPTGRRKGNWTAAHWAWIKSISFPEKADNDALAYYVDAVRQATEDKARLERLVEAEASKPRWKRRVDSVRRLKGIDVTSAADLVFEAGEFSRFKNARSFAAWLGLTPSEHSSGESVRQGGITKAGNKHLRRVLVESAWHYLGCSPHSKDLAKG

SEQ ID NO: 259743 - protein, 399 aa, unidentified
MLAVGIDISKSKSVAAILNQDGSMHTSPFEFHHTQPELDAFIKYILNSKQSATILMENTGHYHYPVLKALQEAGLPVCMVNAYQIKKFGDMDLRKAKTDKKDAVRIARYALEKSYSLVPYTSMEQKYEDLKFLARQYNQRMLTLKTNKVFLLNLLDETMPGITNILPLTTRTPETSLSVLFINRFKSYDRIKKMGKSRFLDAFEKIARKSRSRQTKTYGLAIYEAALRNITTRGENEYTLAAQNQCLELVCESQKATDSIILKMQTLAETLPEYAVLRSMAGVGDRLGPLILAEIGDIRRFHSGKALNAYAGNDAPPYQSGTFESHNRHISKRGNAALRKYCFEVMQALKLTRPQDDPVYLFLLKKEQEGKPYNVAKMAGVNKFLRIYYARAMETLKQQ

SEQ ID NO: 259744 - protein, 398 aa, unidentified
MKVTTLGIDLAKSVFQLDGVDARGVVMLRKQLRRKQVLPFLTRLSPCLVGMEACAGSHYSAREIGKLGHRVRLMSPHLVAPYVKSNKNDRNDAEAICEAVSRPSMRFVPIKSAAQQDLQSLHRVRSQLIRSRTALANEIRGLLGEYGIALAKELRVLRRALPLILEDQDNGLSGVFRETLVEMVERLKFLDERIKRYEQRVKQLFEQDERCQRLAQIQGVGPLIATALIAAVGNAREFRSGHELSAWLGLVPRQQSSGCRNVLLGITKRGDRYLRMLLIHGARAAVRYAERRTDPGGAWISRLRRIADPTSPQSRSRTKTRGSPGSYSAPAKAIVRRNHCPPPTRKRDERAPLGGQRTGRRGAVRVVADPKPAVFPPPSKSARGRAKKPLLAAGAKQP

SEQ ID NO: 259745 - protein, 430 aa, unidentified
MINYKPSSVDTILVAIDIAKSRNEVLIEFPNKKRRKRLSVLNSKIEHDLFIENLMAFELPVTVGFEATGNYHRTIAWRLLEAGFDVRLISSVGLARTREALHNGWNKNDPKDAQVILHMIKIGATQHYHNPLATNINDIQELSKTHEIVSRSKTQIWHRLLTHYLPLYFPEAELFKGNSRSDWFLAFLEKFPIPASITTMSKDDFIAVAWDVVGRKVSKNRVIADIYEISSSSIALPIALNSPAVDMFRMVLAEARGLVRQRDQIEKYAIQILGDHPDYITLRQIPGIGPINALTVMAEAGDIRRFKHHRQFLKFCGLDLATYQSGQFKGQSKLSKYGNARLRRTFWIAGQIAIRQRDNAFRDKFERYIAKDRDNPHLRRKVLSAIAAKMARVTHAIIKSGTDYRPFFERAMPGGRTSLCKGRGGASATS

SEQ ID NO: 259746 - protein, 392 aa, unidentified
MKTKPEEQNKRATNHPTQHHWHEMNRKQRREMLRKMQTEDLSLEVLHPDAAGIDIGNESHYAAVPPSRDSQPVREFGCTTAELKTMAAWLKQCRIRTVAMQSTGVYWVAVYDILEQAGLEVYLVNARDTKNLPGRKSDVQESQWLMKLHTYGLLRNSFRPSQEIRVMRTNWRQRNDLVQSAGRHILRMQKTLTQMNLQLANVLTDISGATGQAIIKAILAGERDPHKLAEFRDPRVKASEQQIAQSLEGNWQEDLLFVLKQEHEGYEFCQKQMAECDRQLAQYLQQREDRSQGAPLPEEKRQGRLKKKRANKPQCDLREGLFRMTGTDLTRIDGIDVMTATTVISEAGYDMSKWQTENHFVSWLRLCPDNRISGNKVIGSKTPHCACAGLGC

SEQ ID NO: 259747 - protein, 422 aa, unidentified
MSQNQPEIQYAAFLAIDWAEEKHAWSLQEANSSTRESGEVGHMPEAIEAWAAQMSQRFAGRPIAVAVEQTRGALVFLLSKYEQLHIFRVPPAMTANLRKAFYSSRAKTDPADADLLLDLVERHRDKLRRLSPDTEATRRIQNLVEERRKLVDEKTAQSNRLEAHLKIYFPQIPHWFEDVDSPLVCALLERWPTLEALQKARPDTLRSFFRRHHCRKEELIESRIKPIGEARPALKDHAVVEAKVAVVKVLVQLIQVLHEGIEGLNQQIQEAAEAHPDFFIFESLPRAGATMAPRLLAAFGSQRERYQNAAEVQILSGIAPVTESSGKSSWVHFRFACPKFLRQSFHEWAALSITQSQWARAYYELQRRRGKKHHAAVRALAFKWIRVIYRCWKERVAYDENVYLAALAKHNSPLVATTKAAL

SEQ ID NO: 259748 - protein, 385 aa, unidentified
MDRTSCSTPSGRTLHCALELSKNSWLLAIQFPDREQPSVYSIKGGDTEKLMAKLTAARDCWAKVSGSLPVITLCYEVGYDAFWLARFLKARGIECLVIDPGSLQVNRRGRRVKTDRVDVKMLLRTLIAWCRGERHVWSPVRIPSVEEEDLRRSHRERSRLVRERTAHINRIKGLLFAQGIRDVNVKSQYKTLAVDRLLTADGHRLPPRLASEIARELQRLAMVQEQIAEIERERDTAPTPCEATERKRQLLLQLKSIGPAISALLSREVYYRQFANRRQVGSFLGLTPSPYSSGEEERCQGISRAGSGQVRAIMIETAWLWIRHQPKSALTRWFVERTAGQSTRMRKIMIVAVARKLAIALWRYVEQGLVPQGAILNPPTTGRAR

SEQ ID NO: 259749 - protein, 349 aa, unidentified
MAKLRDRVDFVIGVDTHKATHTAAVVNPQGAELATATLPADTHGYRRLREFAQEHAQGRRVWAVEGSGSFGSGLTTHLLAKGEWVVEVDRPRRPARRTGAKSDELDATRAAREALSRNHLAQPRRRGEREALRVLVRTRHGAVQARSRAICHLKSLVVTAHERLRDTFRRLDTTALVNRCARLRTSIRHSPEHRATVTALRATARRVLHLEAEANDLESQIEMLVLEMAAPLLAEPGIGVLTAAEILCAWSHPGRLRSEAAFAALGGVAPIVASSGQVTRHRLNRGGDRRLNCALHTIVLSRLGHHEETQEYAARRTLEGKSRKEIRRCLKRYLARRIYRLLEGLPEAA

SEQ ID NO: 259750 - protein, 375 aa, unidentified
MNVSLEEREVLRKAGLSCEADPENYLGGSSQIMYFIGLDIHKKTISYCVKDAAGRVHQEGKIGSSRLALDDWIRAMPQPRAIAMEATIFTGWIYDHLLPHAEMVKVAHPLMLRAIAAAKKKNDTIDARKIADCLRCDLLPECHMCSTEIRDRRRTLRYRHLVIRQMVQMKNRVAGLLLEGGVSYDRPRLHHQGYFTALLASNEEISDSIRPLLKLSREHILRAQRLDSALIASLEKDPLLSDRLRRLRTIPGVGPITALTWALEIGDYTRFRSVKEAISYCGLCSAEKSSADKMVRTPISKQRNKHIQQVLVEAAKLAHLRSHELALVRDKELQKGNKNRATLAVARKMVTYMLAVERRQQDFVSAENMVAKAVA

SEQ ID NO: 259751 - protein, 411 aa, unidentified
MDRFVERCAGLDVHKDSVGATVRVPGGGRERLQQTRTFSTTTRGLVTLADWLASYGVTLVGMESTGCYWKPIFYLLEERFECWLLNPRHLRNVPGRKTDVQDSAWICQLVEHGLLRASFVPPRPIRELRDLTRYRKAQIEERSREVQRLDKVLQDAGIKLSSVASETLGVSVRRMLEALVAGTHDPAVLAQLAKGRLRRKLPALREALEGRFRGEHHGLLVAQILAHIDYLDETIATLSERIEQVIAPFSRERELLQTIPGVGRTGAEVLIAELGVDMSVFPTDAHLASWAGQCPGNHESAGKRRSGRPRHGSKWLQTTLTESAKAASRSKGTYLGAQYTRLRGRRGPRKATGALRHSILIAAYHILDQHVPYQELGADYFDRRTSQQRTNRLVRQLEQLGHKVNLEPLPA

SEQ ID NO: 259752 - protein, 391 aa, unidentified
MIFVGIDVAKDKHDCFILNSEGTVLADVFTIANNRIGFETLLSRIQRCSQGESKIKVGLEATGHYSYNLLGFLLDSGLATYVINPLHTNLYRKSLSLRRTKTDRIDARTIAMMLMSDVDLKSYSNTAYHNEELKSLTRYRFDKVKERAKLKSSVARLVNILFPELEKLVSSLHIAVVYALLSNYPGASYIANANTEELAETLCTASKGRYTKSKTAEIQVAAGVSIGSKMPAKSMELKHTIALIRELDKEISEVESAIDKITSQMDSPIFTIPGIGRHMGAMILAEVGDFSNFASADKLLAYAGLSPSTYQSGQLQNCYAHMEKRGSRYLRYALFNAAKYVCLWCPTFSAYLEKKRSEGKHYNVAISHAAKKLVRLIFAMQRSGKAFLADY

SEQ ID NO: 259753 - protein, 435 aa, unidentified
MSTLGIDLAVRAAHVATLTNDRGEVIWSRRRFQSHPLDLAALSEAAGPASELTVVLEPTRNAWVVVAAHFRATGAKVVMVAPEKSADLRKYYKKHTKNDRLDSFVLSRVPLLHPEGLIEVNGLGPADPLRRAVRRRVRLVGERHGSHQRIDAMLDLLGPAYNEALGTRDTRTFAVILERHGSPKSLRRLGLSRLTDLVRRTSGGHFGTEYATRLLGAANEAIELWKGGGLDFDELAWDLAQEIRIIGQLDVEIGRLDARIAELYGAADPKGIVRSAPGVGPVLSAGIVGRLGDVNRFANLAGIRSFTGIVPGVNQSGLAETRPGITKQGDPGLRRDLFFAADLARHHDPQLAAKYHRLIIERRLHHYAAVCHVATTLITRIAACMRSGQHYVVRDIDGRPVTPVEARAIIADRYVIPPEARRRSRVPDVKSEPTR

SEQ ID NO: 259754 - protein, 340 aa, unidentified
MNYYTGIDVSLEYSSVCVLDSNGKIVREAKVLSEPEALIAWFGSLGFSVERIGLEAGPLSQWLYAAMKEAGLAVELLETRHVRDAFKAMPVKSDRNDARGIAQLMRLGWFRPVHCKSMEAQETRSLLTARKLVQSKLFDVKNSLRGILRGFGLKVGKTTELEFAGRIKELVAGHPHLEMIANSLLAVHEVLRNEFKAFEKKINTIVRSDTRARLLMSAPGVGPIVALTYASAIDDPDRFKSSKQVGAHFGLTPKKYQSGETDYTGRISKIGDSSVRTVLYEAAHVILTKPLKGCSALKGWATRIARRAGMSKAKVALARKLAVIMHRMLVDGKPFNAALT

SEQ ID NO: 259755 - protein, 360 aa, unidentified
MSFNGTSVGLDVHALSVVAHAVDEQTGRVERARLCPDHGEILAWLRRLRDPVRVAYEAGPTGFGLARALAGAQIDCVVAAPSKLIRPAGDRVKTDVRDAAHLTRLLRLGEITAVTVPEADVEAVRDLVRAREDARADLMRVRHRLSKLLLRQGRIYSGGHAWNGVHETWLRRQRFDDVHTAAAFDHHFDAVLTATAARDRLDEQIVVVAASPRWADPVNRLGCLRGISALTGLALSVEIGDWTRFSGSSIGAYVGLVPTESSSGTSRVQGSITKAGNAHVRRLLIEAAWHHRAAYRNPGPTMRARWAKVDPALKARGHAGNRRLHQQWCRFNERKKPHVVANVAIARELAGWCWSLATLK

SEQ ID NO: 259756 - protein, 366 aa, unidentified
MEKYKYVGLDVHKATIAVAVAEGNGGEVRYVGEIANTPEAVVKLVRQLKKEGATPTFCYEAGPCGYVLYRQLKGLGLECLVVAPSLIPTKAGDRVKTDRRDSLNLARLYRAGELTAVWVPDGAQEALRDLTRAREDMKHAEKQIKQRLLAFLLRHGKRYGGETNWTKMHFRWFETVKFEHPVQQIVFQEYIDTVKAMVKRVEGFDDQIGTSSAESVFWPVIQALMALRGISLLAATIIVAEIGDLRRFASAPQLMAYLGVVPSEYSSGASKTRGAITKTGNGHVRRILVEAAWTYRHPARKTEYLQRRAKHAPLPIQEIAWDAQKRLCGRYRLLEAKGKLKQKTCTAIARELAGFIWAIGQALPQQ

SEQ ID NO: 259757 - protein, 408 aa, unidentified
MEVVYRRCCGIDVHKRKIVACLMTGQRKRDTREFGTTTGALREMAHWLKAEECEMVAMESTGSYWKPLYNVFELEGLSAMVVNAAHMKTIPGRKTDIKDAEWIADLLRHGLLKASFVPNKDQREYRELTRYRASRVEERAREVNRLQKMLEGANIKLSSHVSDIMGKSAKELIRLAISHEELTHEQIGVACTGPLKATIDELKASLEGIISPLQRTLFAEVIRVIEEQTMQIERIEAMIRQYTTEAYDSAAKAIDAIPGIARRSAEQIIAEIGVDMSRFPTAHHLCAWAGVAPGNNESAGKRKSGKTRQGNKTLKKTLVLCANSAINNRESFFYAQYQRLVVRKGRKKAIVAVAHSVLIAIYHVLSGNEFRDLGADYYTQFNREKKAKSLVKQLNRLGYKVDCPDIAA

SEQ ID NO: 259758 - protein, 345 aa, unidentified
MNKLMAGIDLHSNNLVIGIMDMDGKRVASQKLSCKLKEVVGFLSPFKQRLEQVAVESTYNWYWLVDGLQALGYPVVLANPAGMEQYSGIKHADDTNDAFFLAELLRLKILPTGHIYDEQLRPVRDLLRRRMTLVHQRTALMLSFKSLYTRTTGQEMSLGELKELAIKEAQDLYDHPANQLIAGMQIKHIEQLTGSIEKIEEAVLDCARELPFYSKLTTLPGVGTILGMTITMEVGEIKRFAEPGHFASYCRTVAAQRMSNHKKKGENNSKCGNKYLAWAFVEGANFARRYNEQCRKWYDRKAAKTSNLIATKALACKMAKAAWHVMAEGTDYDSKRMFGQAASRK

SEQ ID NO: 259759 - protein, 314 aa, unidentified
MESNVGIDVSKKQLDIAVRPGGEHFTVERNANGLERLIARLGPLKPARVIVEATGGFETVVAATLAAAGLPVIIVDPAKIRAFAKAAGQRAKTDAIDADVIARFGEGVRPVPRPLPDEATRHLADLLARRRQIIEMIGAERQRGMRATARSLQRSIARLIRALEKELSSVDTDIDEAVRKVPAWVEMEDLLTSVPGIGTKIARTLIAELPEIGTQDRWQAAALAGLAPFTRKSGKWKGKSCIGGGRSCVRAALFMGALVASRHNPVLRTFFQRLVAAGKPRMVALIAVARKLLTILNAIVRDRRPWNATPATAS

SEQ ID NO: 259760 - protein, 321 aa, unidentified
MQPVTVTVYAGVDVAKATLQLHLQGRQAEFANHTAGLVQLCQQLKTVPHVQVVCEATGGYERPLVQALHQAQIPVSVTNPAQVRAAAQAQGQRAKTDRIDAALLTDFGQRYRPKPTPPTTPSQEQLVALTQWLTQLVPARALAKTQAEHHEAAFVCGRHAKLMAHYQSQIGAVEKQIRDLLAQDARLQQRVECLDEIKGVGPRTAWLVLAHLPELGQVNRQEVAALAGLAPWTRESGTMKGMRCIGGGRPEVRLALYMAALSAARCNPVLQPFYQRLRAKEKPAKVALTAVMRRLLVYMNHQLKALQATQAITKIQPPKIP

SEQ ID NO: 259761 - protein, 317 aa, unidentified
MTTPSEAYVGIDVGKAWLDVALWGSDEVWRVSNDEAGVAKIMERVTALDPRLIAVEATGGYEQLVVQAMLMKSLPVAVVNPTRVRALAKATGKLAKTDVIDARLIAEYAFKIQPEALAPKEANEIRLKALVTRREQLVAMRTAEQNRLGTAQNSLQADIGEHIEWMTARIKDLEAEIEELVDSLPVWRAQAKRLDSIPGVGMVTAVTVLAEMPELGQLDRQKIAALAGLAPFNRDSGQKRGKRRIFGGRKGIRRVLYMACLSATRYNPVIRSMFQRLMKKGKLFKVAITACMRKMLTIMNAMTRDQVNWKVPEPISA

SEQ ID NO: 259762 - protein, 387 aa, unidentified
MARKRTLSTLDTSIAYEAVGLDLAKEDTAIAAFGPDHEGPYLIDRMPYDKLYELLADMAPTLVAMEPCSGAHQIAEQIQELGHEVMMISGRHVQAWVKDHCNGQKTDLNDAFAILNLAYDRWLTPIRGKTREECRLLALQSSYRQLKGQRTKTMVHVEATLHAWGFPIRAGSFNQKALHELIDANREAFGDEVVETLHLMINRVHDLDHDIATVLKLLTEATQRDPRASLLRSIPGFGVLTTSRWCAVVGDIARFDTPKQTMAFIGLVPNNRITGHHTETSSGREARGQGKMSKRGDKMLRSLCILGAGALCLMVRNDRLPDCPFVASIKERLASPRPWFKVLVYVAAKLVRIATALLKYGETFSFEKAGISKAVLKQWELEQAKAA

SEQ ID NO: 259763 - protein, 412 aa, unidentified
MQALYECCCGLDVHAKTVVACLLKSGSKQVRTFGTMTDDLLNLADWLGQSGCTHVAMESTGVYWKPVFNILEGLFEVILVNARHIKAVPGRKTDVKDCEWIADLLRHGLLRASFIPPLEIRELRELTRYRASLVKDRATLANRIQKLAESGNIKLGQVASDALGVSGRLMLRALSNGETDTEKIGDLARGRLKEKKPELRRAVSGRLTSNQRWVLSELLDRYEEAESAIERVERQIKQEMENSAAPFVAEAVRLLDTIPGVGESVAQTIVSEIGVEMECFPSDKHLASWAGMCPGNNESAGKRKSGKTTKGSIYLREALVQAAWAATRSKETYLAAQYQRLVKRLGKKKALVAVGHSILIIIYHVLKNKTSYRELGGDYFDRRNVTEQRKRLIQKLESLGVKVTVEELPAAA

SEQ ID NO: 259764 - protein, 348 aa, unidentified
MPVYIGVDFHARKQMLSYLTTEDGEIQQIELLHEQDDVRRFYAQMRSEGPVIVGFESSGYAAWFEEMLEELGCEIWIGHAAQIRKSARRRQKNDRRDADLILELMLRGDFPRIHRYSRENREVLQQLRYRQRLVKMRTMTINSLRFMAASRGITLRGKLQSQRGQGRVLALALPTPMDQQRNELCRLLMELQQKIETVESCLTETAAADQRVKRLRTHPGIGLLTGLCLVHTLDSIERFANGRKVTAYAGFDPVEDSTGERRRMGSISKQGSRLLRSLLVEAGQVAARHDQELGQVYRRLLVRRGHATAKVAVARRLLVRAFIMLRDEIDFAEFCRRGVAARSSRRSA

SEQ ID NO: 259765 - protein, 478 aa, unidentified
MEAKRTKAYRSVKQNLHNQNRPIRPAARMPVVNRHAAGIDVGAVKHYVCVPEDAVPEGQSNVRSFGAFTADLDQLVEWLQACGVRTVAMESTGVYWIALAQKLEAANLEAVLVNARHLKYVPGRKSDVKDCQWLQQLHSYGLLNGSFRPAQDICCVRSLMRHRGNLIESCGREVQHMQKALQLMNVHLHHAVNDLVGATGLRILDAILAGERDPNKLVELRDSHCSKTSVEDLKKALQGVVLKQALETYRHLLQQVVECDAQVEKALSEVVIPEPIEPEVFIPKNPKAKEGAKPKKKRFHHRKTGTSLKQDLTQELERICGVDLTQVIGLNVLSVLIILSEIGVDMRPWRNVKAFCSWLGLCPGNKISGGKVLTSRTAHVVNRVAILLRTLGPSVGQTDTWMGIFHRRMRARLGPAGANTATARKLACLIYHLLKYKEEYIDVDHLFLLEKIRRQRISRLRKHAAELGMEVVEKKMAA

SEQ ID NO: 259766 - protein, 420 aa, unidentified
MQVLYPCCSGLDIHKKFVVACVMTTNAEGHVQKESRTFSTMTQDLLALLDWLHAAGCTHVAMESTGSYWRPVYNLLEGQFTLLVGNAYHMKTVPGRKTEVKDAEWIADLLRHGLIRGSFIPTPAQRQLRDLTRYRTHLVEERARLTNRLQTVLEDANVKLASVVTDIRGVSARAILAALIAGETDPVVLAELARGRMRSKREVLAQAVVGRFTPHHAFLLTEHLSQLDYLEEAVARVSAEIAQRLQAEQEALELLDTIPGVGRRAAEIILAEIGTEMARFPSAKHLASWAGMCPGNKESGGKRLSGKTRKGNPWLRQVLIEVAHAASKTKDTYLAAQYRRLATRRGKQRALVALGHTILVIAYHLLTRRGPYHELGPLYFDVLDRQRVQQRLVQRLERLGYTVNLQPSAAYSDWRVDATW

SEQ ID NO: 259767 - protein, 354 aa, unidentified
MSQNLSSAIAVAGIDIGKNSFHIIGLDARGAIVLRQKWSRGQVEARFANMPPCLIGMEACVGAHHLSRKLNALGHHARLMPAKYVRPYSKGQKNDFRDAEAIAEAVQRPTMKFVATKTAEQLDLQALHRVRERLVSQRTGIINQIRAFLLERGVAVRQGLRFLRADLPRILATPPDVLSQRMVRVIEGLAEDWHRLDERIAQLSGEIVAIAQQDAGCERLMSVPGIGPIISSAMVAAIGTGDVFSKGRDFAAWLGLVPKQISTGDRTILGKISKRGNRYLRVLFVQAAWVVLIKPKIWERHGLKPWIEAARKRLHRNVLAIALANKLARIAWSVLAHGRNFEARKIDEAAAQPV

SEQ ID NO: 259768 - protein, 366 aa, unidentified
MREQDEGNRITIGLDLGDRRHRFCALDGKGQVVEEGTLSNKRESLSELSRRYRRALVVMEAGCHSPWISRHLEGAGCEVVVSNPRKTRAIYQHERKSDRRDALMLARIARMEPALLYPVQHGSAQAQQDLLRIKLRDSLVRARVGVINSLRFTLKSLGYAIANPSTERFHKVIQEQVPESVGSVIAPSVQALKELSLRIKLLDREIITLARSKYPETTWLEQIPGVGPITALYFVLKIQDPGRFERVRDVGAFIGLCPRRDQSGENDPQLRISKRGDAYLRRLLVSAAQYILGPFGPPSALRQYGLALASGGTPRAKKRAIVAVARKLAVLLLTLWKNKSLYQAFPLSRDGEKMRTSDPERLRCIA

SEQ ID NO: 259769 - protein, 398 aa, unidentified
MLSIGIDVSKGKSTVCGMKPGGEIVYTPFEVQHTREGMLELVSLLRSSGEEVRAVLESTGSYHCPVVAALLENGIFVSVVNSLRMKRFCSQSIRKVKTDRIDAMQIALYGLAYWQELQPTKLPEDTYRELQLLARQYYQMTSLLIKAKVDFNAICDQVLPGMQELMSDHAGRHKLSDFVLRYHHTTHILEMGETRFRKDYCKWAEKKGYRNCERMAALIFATAQNGIPVLPNAPSTQIVITEAIRVLHTVEASRDAILTQMQALAKTLPEYSLVREMPCIGDTLAPRLIAEIGDVRRFHSKRALIAYAGIDAPPYQSGKFCANNRHISKRGNRYLRKTGYEVMQSYVMHKPANDPIFTFIEKKRSEGKSGKLAMVAGLNKFLRVYYGKVTELYRSLPQ

SEQ ID NO: 259770 - protein, 465 aa, unidentified
MTKQVEEILDEPHERIVQRVCAVDVGKDSGTVCVRVPAASGTGRRVSKVWDVPARTGAVLGLAAQLSDQGIEKVTLESTSDYWRIWFYLLEAHGLDVQLVNARDVKNVPGRPKTDKLDSVWLAKLTEKGLLRPSFVPSAQIRQLRDYTRMRADLTGDRTRYWQRLEKLLEDALIKVTSVASRIDTLSVRDMIEALIAGQRDPRVLAGMARGRMRLKHADLVESLTGQFDDHHAELARMLLHQIDTLTDQIDVLTARIEALLASLPAGHTPDPDRPAPDGQARPGTGANAPADEAAQRRKPPTAADMIKILDQIPGIGPSNAQVIIAEIGLDMSRFPTAGHLVSWTRLCPRTIQSGKRSTTGKTGKGNRYLRAVLGEAAATGGKTQTFLGERYRRLIKRRGKLKTIVAIARSILVIIWHLLANPGTTFHDLGVDFNDQRIDIGRRTRNHVRQLEALGFNVTLTAAA

SEQ ID NO: 259771 - protein, 339 aa, unidentified
MTIVAGFDVHRAQITVDQLDTESGEVSRGRIAPADRMHVRRFLKRLGDVELVVALEATTGWRFVVEELRRVDAEVHLAEPAEASTLRGTKRRAKTDRTDARHLRELVMQGRVPESWIPPHDILELRSRVRLRKTLVDERTSWLQRIHATLFHHGVVPSVKRLNGLQARGELGKLDLPPAAIGQIEVALSMIDHLNAQIHPIELELERTARARPGCRALTAIYGIGPRVATAILAELGDARRFSSSRQAVRFAGLDITVHESDGKRRGGRLSRQGPPVLRWAVFEAAQTAARPASPDHSYYLELKQRLGANRAALAIARKYIRRSHHTLRELGEEALATN

SEQ ID NO: 259772 - protein, 356 aa, unidentified
MSVHFIAFDVHCEFCEMAALSATGRVVKRVRCDTNVPALVAALESVSGPRTLTFEEGPLADWLARSLRPHVERLIVCEPRRNAYIAKDGDKDDPLDAERLAQLLRGGYLKEVHQTGSLDRAVLKQHVGFYHDRVRERVRQGHQLTALLRRHGVFVSIDDVREAPEWTRILKALPARKTLRDDLEAVREVYELLRTQEERLRAELVRLARREEPVRRFEQLPGFGWVRSLTFYVYVDTPQRFPSKSALWRYCGLGLERRHSGGGPTKVRLTHRGNRRLKDLLIGAAKSAVAQASSPFADKYRYWTREEGLHPSAARRNVARCLATTLWSLWKTGERYDPARVRGVGRPSASNEVELA

SEQ ID NO: 259773 - protein, 337 aa, unidentified
MIILGCDFHPSFQQIAMLDTECGTTTEHKLMNASGEAERFYRALASPALVGIETVGNDQWFVQLLQRLGHEVWVGDAAQIRASYVRKQKTDRRDAGHILKLLIEGRFPRIWVPEAEMRDHRQLLVHRHKLVQIRTRVKNELQHLMLNQGMQKKQKLWSTEGRAALQALSLDPWADRRRHDLLHLLGILDAQLEQLDEAVKQVALQYPDVRLLLSQPGVGPITALAFVLTIGDVRRFPRGKQVASYLGLIPREHSSGGKQKMGGITKQGSRLMRFLLVEAANIAVRFDPDFRKEYSHRCHQKHFIVAKVAAARKLAIRMYWILRTQKPYPQVLSSRAA

SEQ ID NO: 259774 - protein, 302 aa, unidentified
MSDSNKSVFVGLDVHKNSIVVAVAEVGRGPARAVATVPFDVKALKKVLERLGPIANVSCCYEAGPTGYGLARSLHALGWACDVIAPSLVPKKSGERIKTDRRDAAKLAINHRNGDLVAVTIPNETSEAIRDLERARDAAKKAERVARHQLSKFLLRHGRIYPGKTAWNDAHRAWIVAQEFAEPAQKYVLADGLAAVESATLRVAQLTERLRELVVAWDRAPLVKALQSLRGVEFVTAVTVVAEVGDFRRFATAGDFMGYVGLIPTEQTSGETRRRGPIARWEMLMCVGFWWSRRGTTGGSLG

SEQ ID NO: 259775 - protein, 392 aa, unidentified
MIYAGVDVAKANHVIGAVGDDGRPLCKSMEFKNSDAGFERCSAWLEGLAEEPSDVLVGMEATGHYWMALFARLAAEGYSVCVINPMEVKAVRKLKGKSRVKNDRVDALLIAETLRIGEYVETKLASDEVQSLRTLTRYRQAIKEEAAQVKIRLTCVMDSYFPEYAGVFSDMFGSASLAVLEKSPMPSELLRRKAPSLASDISKAARRQIGQAKASELKAAAKSSVGITLGLDAASFEVRSMVSQVRFLEERASEVEERIEELLMGIEPLVLTIPGVSLATGAQIVAEVGDVSRFRSAAALVSYAGLNSSVSQSGQFDSGGGPITKQGDPYLRRAVWLAANRARQHDPALKAFYDKKRAEGKRHRVAVTAVARKLCHIVYAVMRDQVPYDPNR

SEQ ID NO: 259776 - protein, 323 aa, unidentified
MKKRPPRFVGIDVSKDHLDLACRPEPTRWRVAHDSAGIAECISQLRQLKPALIVLEATGGWQCSLVAALAVAKLPFAVVNPRQIRDFAKATGQLAKTDELDAGVIAHFAEAVRPTPRPLPDEMTQQIDALLQRRRQLLDMLVAERHRLALAHSTVRDSLARHIDYLQRLINETDEEVATIIRTSPAWREKDDLLQSAPGIGPVLSATLQAALPELGVLNQREIAKLVGIAPLNDDSGKRSGTRHIRGGRAEVRAVLYMATLTATRCNPVIKAFYQRLLARGKAQKVALTAAMRKLLIILNAMVKTQTLWNARVNNSPVPEQAL

SEQ ID NO: 259777 - protein, 400 aa, unidentified
MRVVFGIDVSKVSSEVAILVNGEKVHNYTMSNDALGFARLLGDLKTVHKPEIIFEATGVYSRRLQAFLEDNGYAYTRLNPLEAKKQLDSLRVRKTDQIDAEKLAQSQFVLNRKPTYVQEEVYQELRDLSRFYQNLTEDIVRAKNRLHKVLQVTFPELETILSTPTGEQYGNLVVAFPCKDFVLDLSKDELSESIRQSTSKRISDKRVAYLAEKLIALANQSYCAVKKTSPMLEEVRYYAQELLRLSERRKAVLDQMVELAQPLPEYDILLSIPGIAETTATSIIGELGDIRRFQSANQINAFIGIDLRHYESGNFLAKEHITKRGNPYARKILFKCIHNIASASHTNPCHIADFYEKRKRQSQTTSTKPHTIASIHRLIRTMYYLIMHNKLYDYASTQNR

SEQ ID NO: 259778 - protein, 342 aa, unidentified
MPHRPRREVAVFAGLDVSAREIRVARFRRKEETLTVASFANTASGHKALLAYLLQGSEDVRVCLEASGNYSLDLALALHAHRHVEVSLVNPRRARRFAESLGERSKTDPVDARVLCEYAARMPWVLWRPPTTRALRLRAITRAIESLGVMHTQEKNREHALKASQALPSLVIREMRRHQRYLEKRMEQLRREARRLIAKDPELDCRFRLMVTVPGIAETSALQILGELAVLPDSLDARQWVAFGGLDPSQFTSGTSVEKRPRISRGGSRHLRRALYMPALVALRREPHLRTFYQRLVNRGKARLQALVAVMRKLLHALFAMFRSHQTYDGAKLCSVELASCA

SEQ ID NO: 259779 - protein, 355 aa, unidentified
MNQEKYIGMDVHQATISVAVMDSSGKLIMECILETKAATILEFIDGLRGSLSLTFEEGTSAAWLHDLLKPHVSHLVVCDPRRNALLKDGSKSDRIDARKLAELLHGNKLHAVYHGEHGVRTLKELGRSYLTITKDLTRVMSRIKALYRSWAIPCSGATVYAPRHRAEWLAKILEPGVRLRAERLYQQLDLLQPVRQEARRDLLVESHKHHAVKLLRQIPSIGPIRAALLVALLQTPHRFRTKRQLWAYSGFAVETHDSGEYRFVRGKLRRNRERISVRGLNHNHNHDLKNLFKGAAISASTRPGPLCDFYVALVEKGMRPTMARLTLARKMAAITLTIWKKGVEFDAKQLNRQAA

SEQ ID NO: 259780 - protein, 340 aa, unidentified
MEKASMIGLDIAKNVFEVHGRNAAGEVVLRRRLKRGQVEKFFAKLPKAVIGLEACGSAHHWARVLSRLGHEARLMPPSYVKPYVKRNKSDAIDAEACWEAMGRPSMRFVQVKTVEQQAALSLHRSRELLVRQRTQLGNALRSLLSEFGIVAAKGREGLARLVEELRAGTLALPQEAAFAALTLADQRAALDLAANALERRIIAQAKADERTTMLQTAPGVGPFSAHAVLATMPDPAIFKSGRDFAAWLGLTPRLDGTGGKTRTGHITKQGDQTVRRLLVLGATAWLRQVQAHPEKASPWLRGMMARRPKKVVAVAQAARTARILWAMLSHNQPYRAPAIG

SEQ ID NO: 259781 - protein, 345 aa, unidentified
MPIVGGLDIHRKQLTFDYVDTVSGEVYRGQIVPADRPHLRAWLGRFAGCDDVAFALEGCTGWRCVTEELTAAGCAAHLGEPADTAAARGRKRHAKTDKTDARHLRQLLAEGRLPECWIPPPQILECRALLETYHDLRRERTAWAQRIHAVFFHQGAPRLGEGALRTEAGIAALRAAAAAHLSPAGQLQVATALDMICALDARLYVLRHQLLHAARHLTGARVLAARLYGAGPFAALAMTCWLAGAGRFSSARKAVRFAGLDITVYSSDGKRTPGRLSRQGPPVLRWALYEAGKTHARACAPDHVYYAQVKDRKNGKRAALSEARKIVRQACHILTELGDDALTAA

SEQ ID NO: 259782 - protein, 412 aa, unidentified
MTAINQFAAHVGLDWADKKHDVCVQFKNGERIFQVVEHTPEALDIWLNELHQKVKGRIAIALELKKGPVVYALQKYPFVTVFPVHALSLARYRQTFWPSGAKDDPQDAELALELMLRYPQKIKAIEPDNGDIRLLQQLVEQRRLLVEDKRRFVNRIINTLKQYYPQPLEWFSHRGSLLLCELIIRWPSLQQLKRARRDTIRNFLNAKGGRAMALTEQRVASIDNAIPLTTDPSVIEANALMATALATQIKVVSEIIKTYDERIETLFDTLPDAGLFKSLPGMGPCMGPRMLAALGDNRDRFNSAEEIQNYAGIAPVTERSGQKSWVHWRWQCAKFVRQTFVEWAAKTVNSSYWARLYYQGLREKGKSHQSAIRALAFKWIRIIYRCWKTRTRYDEAKYLLALEARHSPLLKP

SEQ ID NO: 259783 - protein, 421 aa, unidentified
MSYRVAAIDIHKKVLMVVVASGADQVEDAAGEALEFECRRFGTGNAERRHVVSWLKERGVREVVMESTAQYWKPVWLELEPHFEKLHLAQAYSNKAPKGRKSDYRDAKRLARRLLADELLLSFVPEPEQRLWRTLSRSKHQLVRDRIRLQNQLEALLEEARIKLSSVISDLLGVSGRRILAALAKGTTDPAKLAELGDVHLKCSQQELIDALTGSPEPLHLQVLQLFLDRLELLDQQIQSLDTLLAGELKRHEAAVIRVAQIPGFGVDSAQQIITEVGVDAETFPSAAQFSSWAGTCPGSEESAGQNQSSRSPKGNRFVRRILTQAAQAAVKKKGCHFQTVFRRLSPKLGYKGAIWAIAHRLGRLLWKILHDHISYMEQGQETNPKAKKRRAQKLAQALRKLGYQVSLTPINPQLRLEAQA

SEQ ID NO: 259784 - protein, 355 aa, unidentified
MSQTLNTAIAVIGIDIGKNSFHVVGHDARGAIVLRQKWSRGQVEARLANIPPCLIGMEACVGAHHLSRKLASLGHDARLMPAKYVRPYSKGQKNDFNDAEAIAEAVQRPTMKFVATKTAEQLDLQALHRVRERLVSQRTGIINQIRAFMLERGIAVRQGIGFLRTELPTILATRTDALSPRMLRVIEELAGDWRRLDQRIDGLSGEIEALARQDQACSRLMTVPGIGPIISSAMVAAIGTGDVFSKGRDFGAWLGLVPKQISTGDRTILGKISRRGNRYLRVLFVQAAWVVLVRIKDWERYGLKSWIEAAKRRLHHNVLAIALANKLARIAWAVLAKGRAFELTRTDDAGVAQPA

SEQ ID NO: 259785 - protein, 363 aa, unidentified
MTPDYFTGLDLHKRSVTATTLDASGAVVATAKMPCRPQALLAYFAQQPGRHAATVECTTGWYWVKDTLASGAGDIDLHLAHAKGVKAIAAAKVKTDSADAAMLAHLLRTDLLPEAHMISDEMRPLRDVLRTRLRLVERRVAAQNSISCLLEKHNVLDVSDLDAFGQLQAETHIEQAELLHAQVKRLESALVPHLVPDADVQRLLRIPGIGKACAFSIRLEVDDITRFESDRAFFSYCRVVPGASNSGDRVRHKRSRDGNRYLKLAFSHAGVRAIQYYPEVKAWYHSKKRKKPVAVARALVAKEIARIAYHVLRKQENFNGRFKGRPLSRTKKELWPLLPSPAGITGAGERENAQPPSVGMGGE

SEQ ID NO: 259786 - protein, 397 aa, unidentified
MIEVCSFKSINALTGAKRRLALKKNTKTTRPRENAAQKTAATMSPRRTVGIDLGDQTSHYCILDEQGDVVSEGTVRTTESGLEEQFRRMAHARIVLETGTHSPWVSRHLEQLGHEVLVANARQVRIIYDNDRKTDKIDARTLARLARVDKNLLHPIRHRSAEAQADLAVLRARDQLVSVRSTLINCVRGMVKSVGGRLPSASGAYFSTKVRDQLPGCVRGALVPLLEEIENLTIRIRVYDKQIEELAKTKYPKTEFMRQIPGVGVVTSLAFALTIDDPNRFHKSRDVGSYLGLRPKQSDSGSSKPQLSISKAGDHLVRRLLVNCAQYVLGHWGPDCDLRRWGLSLMAHGGKNAKKRAVVAVARKLAVLMHKLWVRGEVYEPLRQASKATQTQAAPAA

SEQ ID NO: 259787 - protein, 420 aa, unidentified
MKLSNIEFTAFVGLDWADSKHDVCVQAAACEVREFDRFPHQVAAIDEWAHSIHQRFGGKIAVALELSKGPIVYALQKYDFFVLFPINPSMLAKYRQAFKPSRAKDDPTDAELALDLLLRHRERFQPLKPQSVPMRKLCMLVEQRRRLVGDKTRYTNRLGNALKQYYPQALQWFEQRDTVVFCDFLTRWPTLIQVKRARKATLTTFFKVHNVRFERVIEARLCAIKSATPLTRDMAVITAYQLQAEALIEQLRVTLKAIARFDAEIASTAAKLPDYALLFKPLPGAGPALAPRLLAGFGEDRQRYASAEEIQQYTGVAPVTERSGNKTWVHWRWQCPTFLRQSIIEWAGQTINKSFWAGAYYRQQRDKGASHQTAVRALAFKWLRILYRCWQSRTPYDESKYLEALRRRGSPLLKHLGETM

SEQ ID NO: 259788 - protein, 416 aa, unidentified
MRTDASVTQMGLDIHRKFSKVTARDEQGKIAWRQRLEHADRPRMRERLADWPKGAPVVLEATFGWGWMSDELTAAGLDPHLASSSKVAAWRKARGMAKSNRKDADLLSELWSEQGRWWEVWLAPPEVRQQREWLRYRMTLVRTQTGLKNRIHAVLHRHGILREQSDLFGRDGRRFLELLIAPQAGGAGVPAGECLPDSARATLRGYLELLDHVRRQIAAVTRQCRKQITASPAAMRLKTIPGIAWVLSYTILAEIGRIERFPDAKRLASYSLLAPVANDSGDEDDEPPLGRHVGHFGRRTLKWAFIEAAHGAVRKGGRFRAIYDRRTNGGKRDKNRGYITVAHALCRVAYVCWKKQVDYTAEPPPRPGRRRGGHRRTHRAVVAKAASAKQTSRPELGQPEHPMAAAAVVGRLQASI

SEQ ID NO: 259789 - protein, 345 aa, unidentified
MNEHTTEVVRLAVDLAKQVFQVAGEDARERVVYEERLKSRQAFSKLLASLGPQVEVLMEAGPGAQAWARQVQSTGARVRILPAQRVAEHRSGAKNDRNDCLAILRAGRDRAIHAVPVKTLDALTMQAEHRVRVGYMRRQTFIGNQIRGLLLEHGIAVARSNALLATWVARIQDDASYPILEVLREMIVELWAEWEHLAQRRARLDSRLEQVARTDETARRLMGIRGFGPITSTALVAKQTQPERFPNARQFAAYFGLVPDQHSSGAHVRLGRMTRRGDSYIRSLAVTGAQAVLRQLRPDATDADSKRLLRWCRQHGKKGAAIRLANRNLRIAWVLMTRKEAYQAR

SEQ ID NO: 259790 - protein, 397 aa, unidentified
MYIVGIDIAKRKHEAAVIDGEGAVILKPFSFTNNCSGYNRLLAMLAKAKLPLDEVSFAMEATGHYWLALFTRLQKEGFRVQVINPVQTNSIRSFYIRQAKTDPRDALLIAEVIRFGHFSESTLHPENIYELRELCRGRHAIVSMQADVKRKVVALLDQVFPEYETAFTNLFGDTSMAILQACPTPKELSEMPLEELCHLIEVSSHKRFRMAKARELQELARNSFGFAMAGDVFSTMIRLYAKHLDFLKQQVREMDRKIAEIMGTLDTPITTITGIGPTLGAYILSEIGDISRFSSAAKLAAYAGIDPTMRQSGEYNGVRNRMSKRGSPYLRHAIWLAASSAVLHDPALKLYFQKKRDEGKPYMASVGHACRKMVSIIYAVMRDNKEYVPCIPNEISA

SEQ ID NO: 259791 - protein, 318 aa, unidentified
MDQPIIGIDVAKATLDAYVHPSGARFPVTNDDEGIKTLLERLKAFPQAAVILEATGGLEFGVAAALTSAGFRVAIVNPRQVRDFARALGRLAKTDPIDAEILALFGDRLRPEPRPIPDSALRSLEAHVARRRQIVDMITAESNRLGQTTDADIKKQIKRHITWLQHELKSVDTDLGDAIRHSPIWRAKDQLIQSAPGVGRVTSFTLLAQFPQLGTLGGKQAASLVGLAPFNVDSGTLRGQRHIWGGRASIRSVLYMATLSAVRYNPVLAEFYQRLLRAGKSKKLAVVACARKLLVILNAMLRDNRPWTPAHLDPQHGC

SEQ ID NO: 259792 - protein, 356 aa, unidentified
MFYGVDLHSDNVKVALLGEEEKIPLTMRCSFGSSSFEKFLKGLTKDDYIAVESSTNTFWFYDLVVERVKRCIVIDTHQFDIISKSMVKTDKRDAIHLVKFLKYAILNGETLPEVYVPPKEVREIRQLFTTYNLFKKQIVMDKNRIHSLLKQNGCKISKESLDKEKTKQLIFSLPLSSTVKVEIELIYQNIENLTEAINKVKEEILKKGKIFDKEIRILISIKGISVFTAIGIMSDVVDINRFPNAKKFCSYLRSAPKVDSSNQTTRIGKINKQSRKLSITLLIQSINHFRSCKKFDRFYIEKRKGKSAGKVRVAIARKVLVSIYNMLKREQYFYYMDKGCYEEKIKEYENFLKKVA

SEQ ID NO: 259793 - protein, 371 aa, unidentified
MQDSIFIGLDVHKATISVAIAKDERGGEVRHWGTLPHSADQVRKLAQKLGGSGCRLHFCYEAGPCGYGLHRQLVELGHDCIVVAPSLIPVKAGDRVKTDRRDAIMLAKLHRAGELTAVWVPDTAHEAMRDLVRARATAVRVLGKARQHLQGFLLRHGRTFPGKKGWTVAYRRWLTTLGFQHPAQQIVFQDYVDAAINAQARVDRLTGQIAELVPAWSLAPVVEAVQAMRGVAFIVAVTVAAEVGDFHRFDNPRQLMAYLGLTPSEHSSGTSIRRGGITKAGSGLARRALIEGAWSYRMQARVGRKMFDRLEGLPQAVRDIAWKGQLRMCQRHRHLIAAGKPKVVVTTAIAREMLGFIWAIAREVSIMPART

SEQ ID NO: 259794 - protein, 460 aa, unidentified
MKKRAYKATNVKKANIENLQKKVKDKEIIIGIDIAKKDNYATIMTRDKEKIITIKYEQPAETMQFIEFIQNLQPSHCEVAIESTGTYGDPLCEQLSNADIPIFRVSAKRSHDMAEVYDGVPSLHDAKSAAIIAHLHIEGMSQPWQSKSPEFRNLKASINEMSIYHAQYHENLNRMEALLARFWPEVTDILSLTTITLISILEIHGSPIVLAKMSEKLLFEQMKKIGRGFLTDKKINAVIASAKTTTGVKMTEGEARVVRHIATEILRNYRLNKTAEKEVLRLSKGIKEIERMGEIVGLITAAVIVTESGNPNEYHNPKSYKKSAGLNLKEKSSGKYQGKLKITKRGSSKVRRFLYFAALRLIQDDPLVRAWYNGKVERDGGMKMKAIIAIMSKLIMAMWHVGRGAKFDSHKLFDAAKLDKEYNRILKEQENNEQKKRKIMKIKKIVIVKPIKSTSLKNNA

SEQ ID NO: 259795 - protein, 346 aa, unidentified
MKQVIRIGMDTSKHIFKLHGVDADEQPVLRKRLRRKEMVLFFAKLPPTVIGMEACGAAHYWARVLSGLGHQVKLIAPQHVKPYIKRNKNDGRDAEGLCEAMSRPTMQFVPAKTEDQQAALMLAGVRQQLITRRTQLSNAIRGYAAEFGLTTGKGLDKIEPLLARIAQDSRVPELARELFAFQGRDYMRLQTELKVIEARLMAWHRTNACSKRLAQIPGVGPISATALVMKTPDPRAFPSGRQFAAWLGLTPKDHSSGGKTRLGKITRAGDEMLRSLLVAGATAVIQQARKARGRPSRWLLDLLKRKPPKLAAVALANKNARIAWRLMATGESYDSARMSGISASAA

SEQ ID NO: 259796 - protein, 349 aa, unidentified
MEEYIAFDSHKHYSWVEQERVNTGKVRQYRVEHAPGAIRQALRGSKPGTAVALEATANWYWIVEEIEQAGLVPKLVHPRKAKLMMGLINKTDKLDAHGLNRLQRNGTLPTVWIPPGPLRELRELTRTRVVLVAQRTRWKNRLTATLAKYGTPASESSDPYGKRARPELESRLERLPGQAGWASQQMLEQVDGLSEQIGQFEQRLKELVEITPEMQRLMSLPGVGVILAATVALEIGEIGRFPSAEHLAAYAGTTPRVHSSGDRTRYGRTRPDVNRYLKWAFAEAANSVAVNHTRCPDRHVSQLYLRLRLRKGHSRAVGAVARHLAEAAFHVLRRQEAYRDPTLGRTREV

SEQ ID NO: 259797 - protein, 347 aa, unidentified
MRFYTKQHPFYCGIDLHARTMYVCILSQDGEVMLHRNMKASPDALLKAIAPYRDDIVIAVECIFTWYWLADLCAQEGLPFVLGHALYMKAIHGGKTKNDKIDSQKIAVLLRGGMLPQAYVYPAAMRATRDLLRRRTHLMRKRAELLAHIQNTNSQYNLPEIGKKIAYKANRDGVAERFPDPAVQKSIEVDLALIGHYDQLLRDVELSILKTAKQHNAQTLYLLRTVPGIGEILSLVLLYEIHDITRFPRVQDFLSYCRLVKCTKESAGKRYGTSGTKIGNAHLKWAFSEAAVLFLRANPAGQKYLTKLEKKHGSGKALTLLGQKLGRTVYYMLQRQTAFDMGKFLNG

SEQ ID NO: 259798 - protein, 413 aa, unidentified
MDSYKIAAIDVHKSMLAVVVTDAAVEGELPFERRRFGALGTDLKALAEWLAVQQVQEVVMESTAQYWKPVWRQLEGQCQLHLAQAHSNRARRGRKDDFRDAERLARRHLAGELILSFVPDPEQRLWRTLTRTKHQLTRDRVRLHNQVEALLEDARIKLSTCVTDLLGVSSRRMMEQLAQGATDPAVLAALADPALRATAEQLIDALSGAPEMSTLHRQILRLFLDRLELMERQMEVLDRTIAATLQLHQSAVVRLAAVPGLGADSAQQIIAELGPQAATFHSPQELASWVGVCPGREESAEVSKSDESPKGNRTMRRVLNQGANSARKTKGSIFQALYQKWVPRLGHNKTIWAIAHRLCRVVWIILHRGEQYIEFGNSRDPKSAAKRTAKLIHRLRSLGYQVTPPMPTPRVAG

SEQ ID NO: 259799 - protein, 344 aa, unidentified
MTIVEAVRGVTGGVDTHLDVHVAAALDPLGALLGSKAFDTTPAGYQALLNWLESFGTVTKVGVEGTGSYGAGLARFLRQAHLEVIEVNRPNRAERRRSGKSDPLDAVEAARAAIGGRATSISKTGDVEAIRVLVVAKRSARQARVKALTQMRHLVITAPDQLRCRLKGLTVFVLVSEASRLRPSRSGDPVMAAHKASLCSLARRIQGLEDEIAELDERIEVLLARTAPELLARFGVGPDTAAALLVSAGDNPERLHSEAAWAHLCGVAPIPASSGKTTRHRLDRGGDRNANSALWRIVMVRIAHDPDTTAYFERKVKEGRSKRDVIRLLKRYVAREMYHYLPRG

SEQ ID NO: 259800 - protein, 365 aa, unidentified
MQFIGVDLHTNRFTCCYRNEETGEKQTETFKLDAMGLEFFCRTLTAETYVLVEATITTFCFARLIQPLVKGVIVANTYELKQISLARKNTDKIDADILCRIIKMQVLSREKVISPVTIPPIEIQELRGLFTTYRLYKKQTTQIKNRIHSLLKEKHYGFTQEEIFDQKSRKKIRGIKNDTVLSFQINDLFDLLENLETRIGLLQDKIKEQAEPFMKEIEILTSMKGVSVFIAIAIITDIIKVDRFKNSKAFTSYLRSAPKVANSNTSVSIRGINKKGRKLSSTLLTQSLNHVLDVSPKLNKWYQKKVQFKKAGLVRTGLRRRVFAEIYQMLKKREYHYGREALKHEVKMRQYRNFLKKRKNLIETA

SEQ ID NO: 259801 - protein, 364 aa, unidentified
MNVEESIRLKAFRQLKKEIRGSKEYLIVGIDVAKEKHHAFFGTATGKTLLRRLIFENSIDGFEKLHARMEAIKVDHALEKVVFGLEPTANYHKPLAEYLIRCGHNVVLVSGSAVAKNRELLDGRWDKHDTKDSANVADLISQGKCLYYDYPSMPLRDLRNLLSLKRRLKKQEHGTRIRIRNHLLAQYFPEFDRYFGKGCSESLPIVKWCLNPSMISGMGYEEFVQLVAPRIKTMGQEKRLKSIWRMAVDSIGCEVGQALDFEAKLMVEDLQQIKDSIRAVDEHIEDICLGFPEYSYLLTIPGFGPDVSSKVLGAIGNPSRFDNGEQVLKLAGYDLGANRSGKTSDSAVPVISKRGKAYLRYALY

SEQ ID NO: 259802 - protein, 338 aa, unidentified
MNLYAGIDLHSSNCYLGIIDEQLVKVLGKRVRNFLPLIVDRLAPYKKDLQGVVVESTYNWYWLVDGLQENGYTVHLANPAAIKQYEGIKYSDDKWDSLWLAHLLKLDILPQGYIYPKETRPMRDMLRRRMLFVRQRTADILSFQSMIARNTGTRVSANNIRKLTEANLGQLFSDPDLVFLAQRYLSIIDLLSVQIKLIEKQVMEKVGLTEPFKWLSTITGVGKILAMVIMMEVGDIGRFKKVGNYCSYCRCVRSERISNGKKKGVGNKKNGNKYLSWAYVEAANFCIRHNPRAEKFYQRKKAKSNGIVAIKALSNKLARASYYMMRDQVPFDSQMLFA

SEQ ID NO: 259803 - protein, 416 aa, unidentified
MENIFPCCAGLDVHKESVEACVRRIEPNGRWHQQTRHWGTMTRDLLAMADWMAAQGVTQVAMESTGVFWKPIYNILESRFTMLLVNARHLKQVPGRKSDVRDCQWIAQLLQYGLLKGSFIPPRSQRELRDLTRHPTQLVEEKTRTANRIHKVLQDTNIKLSSVATDVLGVSGRAMLEALITGEEDPVKLAHLAQRKLRSKIPELEKALEGHLTEHHRFMLQLLWKQLAQQEELIAELDRKIEEQTRPFAAEIDRLDAVPGVDRRVAEVVLAEVGADMKPFPAHENLASWAGMCPGNEESAGKRRRRRITPGNPWLKPTLAQAAWAASHTKNSYLASQYRRLAGKNSYLASQYRRLAGHRGRKRALIAVGHSILVIFYHMLKAGTSYTYLGGDFFDRLEPQRLTRYYVKRLERLGHK

SEQ ID NO: 259804 - protein, 343 aa, unidentified
MQTITTIGLDIAKSVFQVHGVDAGGQMVIRRQLKRRFVLAFFEKLPPCLVGIEACASSHHWSRELQALGHTVRLMPPAYVKPYVKRQKNDSTDAEAICEAVTRPNMRFVPTKTAEQQSCLMLHRARHLFIRQQTAVINSIRAYLAEFGIIAPVGRRGVEQLLEVVADRADHRLPEIARACVAALGSQLRALKAQILEFDRRIIVWHRSSATSKRLDAIPGVGPALATALVASVADARAFRSGRDFAAWVGLVPKQNSSGGKDRLGSISKQGDRYLRSLFTAGALAVIRYAMIHGSGHRPWLTGLLARRPAKVAAIALANKLARMAWAMMARGERYNEPAALAA

SEQ ID NO: 259805 - protein, 312 aa, unidentified
MPSPSIYVGIDVSSQRLDVAIGDDPVESFDNDDAGVIALCQRLSGISCELIVLEATGGYEALAVATLAGGGLPVRVINPRQVRDFAKATGLLAKTDALDARLLRQFAERIRPVVLPHKSEATRELAALVARRRDLVQMLSAEKNRLKLATRVVGRDISAHIRFLEKRISESDDELKRRIENYDDFRITDELLRSVPSVGPVSSSTLIALLPELGALPHRQIVALVGLAPLNDDSGKRVGRRRIWGGRAEVRAVLYMATISALRSNPVIRTTYQRLVAAGKPKKVAIVACMRKLLTILNAIVRDQTPWNPAIA

SEQ ID NO: 259806 - protein, 359 aa, unidentified
MRTQSNKLNFEGENIYVGIDVYLKSWNVTIYTEYLHHKTFNQPPVPSILRDYLNTNFPGGTYYSAYEAGFCGFNIHFELKKLNINNIVVNPADIPTSQKEQILKNDSRDSMKIARSLRANELIGIHVPFIETLENRTLIRTRDVMVKDMTRFKQRIKALLYFYGISYPPEFEKSTRHWSNRFLKWLKEEVSLNTASGNDALSLLIREVEQQRALLLEINRKIHSLAVSEKYVEEIELIRSIPGIGLVTGLTFLSEIENIERFPNTDKLAGFVGLIPTCHSSGEVENYGEITFRKKTTLRRWLIESAWVSVRIDPALTRCFSQLCKRMEPNKAIIRITRKLLNRMYYVLKKRQKYECGVV

SEQ ID NO: 259807 - protein, 355 aa, unidentified
MTTKIPLITIGLDLGDKKHALCVLNQDGEIIDERTITNHRESLRRLSQKHPGARIAFEVGSHSPWIKRFLTDLGHEVFVANPRKLRAIYTSDRKSDKNDARMLAKIARMDPQLLHPVEHGSEEAQRDLLRLKLRDNLVRQRVDIISSVRFTLKSLGVALPSPNSACFAKRCRTLLAERDNALLESIEPSLQVIDLMTQKIRELDRAVETLCETKYPVTQRLRQIVGIGPITALGFVLTIEDPELFENPRDVGAYLGLVPKRDQSGGLDKQLRISKAGDAYLRSLLVGCAQYILGPFGPDTDLKRHGLMLAERGGGRGKRKAVVAIARKLAVLMLALWKHGRDYEPLRGAEAAQAA

SEQ ID NO: 259808 - protein, 400 aa, unidentified
MRAVFGIDVSKASSEVAILVNSEKVHGYSMPNDAIGFSRLLKDLNTVSNPEIIFEATGVYSRRLQAFLEENGYAYTRLNPLEAKKQLDSLRVRKTDKIDAEKLAESQFILNRKPTYGQEEVYQNLRDLSRFYQNLTEDMVRTKNRLHKTLQVTFPELEQLLAAPTGEQYWNLVSSFPSKDFVLDLSPSELAEVIRQSTSKRISEKRVTLLSDKLTELAKQSYCAVKKTSPMIEEVKYYAQELLRLTKRRQVILDEMVNLAQPLPEYNILLSIPGIAETTATSIIGELGDVRRFQSANQINAFIGIDLRHYESGNFLAQEHITKRGNPYARKILFKCIHNIAAASHTNPCHIADFYEKRKRQSQTTSTKPHTIAAVHRLIRTMYYLITHNKLYDYTATQSH

SEQ ID NO: 259809 - protein, 341 aa, unidentified
MNDMIGVDLAKNVFHLHGASMTGDVKYRKKLSRVQFFRFMSEQSPALVVMEACGSAHYWARELVKLGHAVKLIAPQYVRPFVKRQKNDAVDAEAIVIAARQPEMRFVEPKTADQQARAVLFRARERIVRQRTELVNALRAVLYEYGQVVPQGIGHIKRIEEILENTEIDVPEMVQEECRDLLAQISEKTARIEAKARKLAELSRRSGAARRLQTMPGVGPLTALAVEAFAPAMQSFRCGRDFAAWLGLVPRQFSSGGKERLGRVSKAGQADIRRLLIIGAMARLSWAGRKPPVQGSWLSRMLAKKPRMLVAIALANKVARTIWAMLTKQEDYRDPALAMAA

SEQ ID NO: 259810 - protein, 319 aa, unidentified
MEKKIYVGIDVSKDTMEVAVHGEKHHWSFSSDEAGISKIVSKFMEISPELVVLEATGGFEVPLAAELAVTKIPTAVVNPRQIRDFAKSVGMLAKTDILDARIIARFAAAVQPSPHPIPNIEAQELGAITARRRQIVNMITAEKNRFSTAGKEVKPRIRAHINWLEKELDEINGNLRQKVKDSPIWREKDELLQSVPGVGPNFSTTILAELPELGTLNRKQIAALVGVAPLNRDSGTLRGKRTTWGGRETVRTALYMATLVATRYNPIIRRFYKRLCASGKVKKVALTACMRKLLTILNAMLKYRTPWNYDVSQIYGPCC

SEQ ID NO: 259811 - protein, 338 aa, unidentified
MTQHKIIGIDLAKNIFFLFEINHKGKNIGRKKLQRAKLMNYIAVQTPSTIAMEACSGAHYWAREFEKFGHEVLLYPPQHVKAQRRKQKNDYNDAEAIAELALYQRHPPVPHKSIEQQDIQSLIRIRRLCVTERTRLINQVRGLIAEYGIVLPKGKASFRQAIPEILEDAENQLSPILRELVSRQYERYLYIDEQIKWFEDKLNQTVKQFDNAKRLMSIPGFGPLTSQAVVVWLGSGQQFKTGRDASAAMGLVPKQDTTGGNIILLGITKQGNTYIRSLLVHGARAALRRAKFKSDKLSKWMLNLQERRGPNRAAVALANKLMRIAWAVTTKNEEYQPT

SEQ ID NO: 259812 - protein, 342 aa, unidentified
MYYIGLDVHKKTISYCVKDASGQVHREGTIGANRNELDWWMKTLPQPWTVAMEATIFTGWIYDHLLPHAAQVKVAHPVMLRAIALAKKKNDRIDAGKIADCLRCDFLPECHMASTAIRDRRRSLRYRHLLVRQMVQMKNRVSGLLLETGVSHNKQRLHKVRYFQKLISNHEEVPESIRPLLKLSRETIVRCQKTEYALVSSLQRDPLLAERIKRLRTVPGVGPITALTWALEIGDVSRFRSAKQAISYCGLCGDEKSSADKVLRTPLSKQRNKHIQSVLIEAAKLAPRHSPELALIHEREKQKGNANRATLAVARKMVAYLLAVDRRGKHFVPSEERSTAAA

SEQ ID NO: 259813 - protein, 397 aa, unidentified
MGEGMVAGIDWASEVHVACVIDRHGAVASRFSFSHDAAAIGAMVRRLRAAGVAGVAIERGDGPVVEALMEAGLAVFVVPSRQIKGLRSRYGSAGNKDDRFDAYVLADTLRTDGHRWKPLRPDTDPTRALRALCRSRKDLVETRVAILGQLRANLELAFPGAIGLFTKPYSAISLAFLQRFPTGAKAAWLSPKRLASWLSSVGYTGGVSAEILHARLAAAPPGLAGAEGEARGQITVALVAAIRTLNTQIAVMDAEIGRLFAAHPDQHIFAGLPRSGTIRAASLLAEIGDCRQRFPTDDALAALAGACPSTRQSGKRTQAVFRWSCSKKLRAAVMDFANGSRMADPWAAGIYAAAIGRGCRHPHAIRILARAWLRIIWRCWQDGAAFDPALHRSRHLT

SEQ ID NO: 259814 - protein, 371 aa, unidentified
MNYNTVYVGMDVHKESFSLCAYTIEAEKASHYQRTEADYKKVLNYLEFLRTIYGDDANFICGYEAGCLGYTLYHQLTANNVKCIILALTTMLEQRSKKRIKTDKRDAEIIAKCLAQHNYSPVHPTAKDEETKEFLRMRDDHKLALKKVKQQILALCLRHNYRYDGNSHWTAAHLKWLKALTLGALYKEILDEYLLTYHTLSDKLERLDKRIEELSTQDEYKEAVKKLCCFIGVKTHTALSVLVEVGDFNRFASAQHFASYLGLVPGEDSSGNDQNRLGITKVGNRHVRLLLTEASQCYARGQVGFKSKELKARQSGNTPAVIAYADKANERLRRRYYKMVLNKCKKHNVAKTAIARELACFMWGMMTDNIA

SEQ ID NO: 259815 - protein, 314 aa, unidentified
MEQQIVGLDVSKAWLDGYLASSGRRLRISNDAAGIQTLVRTLGETAGCLVVMEASGGYERTAHCELVAQGVLAAIVNPKRVRDFARGMGLEAKTDRVDARLIARYGQVMRPAATPAPDPARTELREILACRRQLVDEITVRTQQLEHLQAPAMRERVSKALTFLRQEAKELTKLLRQTLQADAALAADFALLTSMPGCGPILAATLLAELPELGSLDRRKVASLAGLAPVARDSGLREHKRVIKGGRSQVRRALYMAAVASLRIKASPAKARYDQLIARGKAPKLALTALMRKMLVALNAMLKTRQAWKDPRES

SEQ ID NO: 259816 - protein, 350 aa, unidentified
MLIIGCDYHPSFQQIAFMDTDTGELSERRLGHREQAEQFYRELKQRNLAVRVGMESSGHSRWFERLLHELGFELWIGDPAEIRTKRVRKQKTDRQDAQLLLRLMMEDRFPRIWVPDAENRDLRQLLWHRHRLVQMRTRVMNQLHVVPLNEGLRRKKALWRPAGRKELESIALAPWASRRRQDLLDLLDQLTPKIQELTRALEEEVEKRPVTRRLMTHPGVGPLTALAFELVIGTPQRFHCGKQIASYVGLVPTEESSGDRRRQGHISKQGNVLLRFLLVEAAQVTVRSQPEWRSQFFHLAMRRGRKIAKVAMARKLAVHLYWMWRQDLDYGQMQKLGSHAGEPGNPDGVQ

SEQ ID NO: 259817 - protein, 408 aa, unidentified
MDSAFQFFAGIDWGSDKHRVCLTGRDGQIMAERWIEHSGDSLAELAAWLRQHTSDSPSLLAAAIEIPRGAIVETLLEHGFTVFSINPKQLDRFRDRYSPAGAKDDRRDAFVLADALRTDMHCFRAVKLDEPAMIRLRELSRLDDELAQEQNRAVNRLREQFHRFFPQLLRLCESADESWLWDLFELAPLPARAAKLSEAKITRLLQQHRIRRITAAEVRAVLKTKPLTLAPGAAEAAVEHALLLLPRLRLLHQQRVDLGRRISALLDELATPAEDKHEHRDAAILLSLPGLGRKIAATMLSEASQAIADRDYHALRCYSGAAPITRQSGKKKIVLMRRGINQRLRTALYHWARVSVVFDPQSKKRYAAMRACGHSHGRALRGMADRWLKTLTSMLTTRTLYDAQRRAA

SEQ ID NO: 259818 - protein, 335 aa, unidentified
MKHYAGLDLSMETTHVCVVDADGRKVGAQCVDSTPESIATALERYGPIERAVIETGRMTPSIALGLRELGVAIICIDARQAHQSLKAMKANKTDPHDAAGLAQLARTGFYKEVHVKSPAAHGVRSIITARGHLVETRVRLDNTLRGLCATFGIRLGLGQSERFLARMQVAAAIPGLGEAVASLLRAREGIVAEIGQLDRQLKAISTASPVCQALMSIPGVGVQTSAAFAAAVDDASRFKRSRTAGAYFGLVPRRHQSGEVDWTGRITKQGDSTVRKLLYEAANSILTRTKQSFALKTWALKIAKRRGLKKARVALARRLAVIMHAMLRDGTLFEA

SEQ ID NO: 259819 - protein, 415 aa, unidentified
MALKIVYKICCGIDVHKKFVVACIAKTDKQGVTTYESHHFSTYTKGLKQLLKWLLNHNCKDVCMESTGKYWIPVYNVLEKDCSIVLAHPKYVKAIRGKKTDKKDAKWIADLFKHDLVSGSFMPPADIRQLRDLMRYRFKLTCFKSSEKNRYQNCLTVSNIQLASVVLDTFGKSSQKILAKILENPNDTSFDIESLIHGSMKDKLPELELAIDGYITPEQAAKLKIIKEHFDNLEARKAELEELILALASPYQQEIAIILTAPGFKNTFSAISVISEIGINMEAFPSAKHLCSWAGLTPTNNESAGKKKSVRVSKAGCYIKPLLVQCANTAIKSKQHPEIRNRYLRIKKRRGHKKAIIAIARMLLTALYHMLKNSENYNSDLYKKSDVLPTTREITVEQAILMAQFQGYRIKSATE

SEQ ID NO: 259820 - protein, 362 aa, unidentified
MTKSTTIIAFDQHAATTVAAVLLPADRTPALHKLTSDIPTILRFLERMRRGHAVQCCYEAGPCGFELQRALSGRGIRCDLIAPALIPRRSGDRIKTDRRDAAQLAVLYRAGALTAIHIPTEQEEAARDLLRCREDIRADLLRARHRLSKFLLRHGRRFTGTKKAWSKRHDVWLRAQAWPIPALDQTHRAYLRAVDDALARLRSAEEDLRALVTLEPLQERVQRLRCFRGMDDLTALTIAAELGDPRRFASAPRTMAFVGLVPSEHSSGTRQARGAITKTGNAHLRRVLVEAAWHYRHRPFVGAALRRRQRGAPDAIVAQAWTAQDRLYRRYHRLAGRGKPHQQVITAVARELTGFVWAALVQ

SEQ ID NO: 259821 - protein, 412 aa, unidentified
MKDLLEISCGLDVHKEKIVACILTGPLGKPTRSEIREFSTLIPDMIALRHWIVSKNCHHVAMESTGIYWMPIYEILEDAFYGDITLLVVNARHMKNVPGKKTDMRDSEWISTLLRAGLLNGSFIPEKRIREFRDLNRYRKSVIRDITSQKNRIEKFLQSSGFRLSSFISDIFGASGRNIILHLIEHGQIDKTALDSCLKTKTRNRIDEILMSVNGTLSEHQKAFLRILMTHYDSLKKHLAEIETSLEEDMAPFALQVEQLNSIYGISTTASCAIIAEIGIDMKPFKTAEHICSWAGLCPGNNESAGKRKSTSVTKGNPYIKSMLCEIAWVIAGKRNTYLSAWYWRIKQKKGAKKAIVALARKLLVIIYTMLKQGTLFDESCFETRRKRCEQKQLSRYIRELEKHGYHVEAQS

SEQ ID NO: 259822 - protein, 327 aa, unidentified
MTASVSSHNHIFIGIDVGGASFEAAWHRGGCTQYQNRPDAIAAFVARLSAEKQIIRIAVEPTGGYEKRLVKALGGAGLPVEMVHTSRFAAYRTLIGAKAKSDTSDARLLAAYAAAPEEVRGRKAGHVVLPQDDVREQLAELAARRDQLKHMIHAETCRLSTVRSRSIRDDITAHLQALRQADCKTYDAMMQLVRQRDELRNAKRLLQTIKGIGDKTALTSIAAVPELGLISNKAAAALVGVAPFVRQSGTMRAPAHIRGGRAAVRNAFYMAAVTASRHNPVLAPFYARLIAAGKPVKVALVAVMRRLVVFANAVLRSGQPWKGAQII

SEQ ID NO: 259823 - protein, 354 aa, unidentified
MPSSAETAVARTIGIDTGKNTLHMIGLDEKGAIVLREKVARTRIAARFVNLPPCLVGIEAGMASHYVARELAGLGHEVKQVPPAYCKPFRQSHKNDFRDAHAVAEAVERPSTRCVPIKTDGQLDLQALHRLRSRLIGNRTAAINQTRGFLLEHGIPVRQGHHFLRQQLPQILATRTDVLSPRMVRIIGDLMTDWKYLDERIEGVTDEIEALAHADEGCQQLITVPGIGPIISSAMVAAIGNGAAFCKGRDFAAWLGLVPKQRSTGDRTILGRITKRGNRYLRMLFIQGARAVLLRPASWAKHGFGSWLTAATRRLHRNVLAVALANKLARIAWTVLAQGRRYEARVEPRVEAAA

SEQ ID NO: 259824 - protein, 426 aa, unidentified
MKEHIDYLSTLFVGIDIASRIHVISALDFNQDFFIKMKPFENTKDGAGIVEKLIADVLADNHQFKYVVIGMESTGFYGVHLANYLSTSELLAPFSVRVYCLNPKEVKNYKKSFNDIGKNDGIDSFVIADFARVGRIAIKPWRGSQYLALQRLTRHRMHITECITREKTYMLNNIYLKFSEYALLRNGEHPFSNKYGATAEAILTEFTTNEDIVNSSIEELVEFINSKSKERIADLEETAKIVQAAARNSYRLDKCLYEPLTISIASSFNCISSFEKELKAIDKAILQTVQGLNPEEYTVLNSIPGIGKVYSAGILAEIGSIKAFQNANQLAKYCGIVWNDNDSGDFESEDSRMSKAGNRYLRYYIIEATGSVINHCPEYKAFYQKKYAETRNHQHKRALALTSRKFIRLLFGLLDKGQLYSPEKGR

SEQ ID NO: 259825 - protein, 354 aa, unidentified
MFHVGLDIHTKHIAICALDEKGQVVHRSQVRTIQDLVRVLTGLPDRCEVCYEASCGYGHFHDLLRPLATRVLVAHPGQLRLIFRSKHKNDRNDAERLAKLLYLGEAPAVHVPSLEVRTWRELINCRSQVIAKRTRAKNTVRALLRSAGVTPPKNPGLWSKKGLAWLRQLELPTASQQLRRDLLEEIEGLIRPVRRVEQQLNRQAGQTGAVARLRSIPGVGIRTAEAMAAFIDDPQRFGDAKAVGCYFGLVPCQDQSGDKNRLGHITREGAPVVRQLVAEAAWQAQRRSPTVRAYFERVQRDDPQRKKIALVATAHYLVRVMWAMLKRGTDWQEGPALATASGAAAGGDPAPEVD

SEQ ID NO: 259826 - protein, 333 aa, unidentified
MNKLETTLLPCGIEISSQVLVIDLSGKAPCEFPNTPAGHESLIGWLQRAGLEIRVCMEATGLYGLDLALALHAAGIAFMIVHPRSARNFARAMMQRSKTDRLDARVLREYAARMPFEPWRPPSPQALHLMAIAHRLQALTRMITAEKNRLHAASLSRALPAVVRYDLARSIQSLERALKRLTLAALELVLSDPQLARRNELLLSVPGIGVTSALNLLAELLRLGPDCGVRQWVAFAGLDPRHYTSGTSVAKKTIISKSGNAHLRRALYMPALVTVQHEPHFRGFYQRLVARGKTKLQAIVAVMRKLLHAIYGMFKHNQPFDGSKVYALETSCA

SEQ ID NO: 259827 - protein, 387 aa, unidentified
MPRPNDFSRSLTPFEQDSTLVAAIELSQSTWLIAGTVPGIDRQPLKKITPDETALLRLLHRWRDEAIGKGCTVTRIAVAFEAGRDGFWLARWLAKHGIEMHVIHSSSVAVSREHKRAKTDRLDTAMLTRVFLGWLRGEHGHCGMVAVPTIEEEDAKRPGRDRENLVGERTRIINRMKSSLVRLGIRGFKPQLRKAPQLIETLRTPEGGPIPPNTLEEMRRNFARLAILREQIKAIEEARLQQLEDAPQAAPNAMVRLLASVIGLGVETAYMLVQEVFSRTLRDRRAVARYAGITGAPDESGSKRREKGLSKAGNARVRRGMIQFAWRFLQFQKDSALAQWFRTRTEGAAGAHKTQMIVALARKLLIALWRMVTTGEVPHGVVLRQAA

SEQ ID NO: 259828 - protein, 318 aa, unidentified
MPEAVFIGIDVSRDTLEIGSSTASSTWQYANNSDGIEAMTAELAKLAPALVVLEATGGYEFEAACALQAAGLSVAVVNPRQARDFARAMGTLAKTDSLDARMLAAFARVLHQHPQRERFIKQLPDAQLQRLQALVLRRRQLVTMLTAERRRLTLAHASARPSIEQTIKFLKSQIDDVEHDCADHVRTHHAELAQALSSVKGIGPATVATLLAELPELGSLCRRRIAALVGVAPLNRDSGQMRGQRTIWGGRAEVRRALYMATLVTVRHNMVFKSFYARLTALGKPKKVALVAAMRKLLTILNAMAKSGSHWNDSLHLA

SEQ ID NO: 259829 - protein, 331 aa, unidentified
MQTMTRDGEFSAATPSLLLAFELGERTWKLGFTVGMGQRPRVRQIPAGAVGLLAAEIAHAKRRFGLPAEVPVISCYEAGRDGFWLHRYLVAHAIINHIVDSSSIEVNRRARRAKTDRLDLGGLLSLLARYVQGDRRVWRVVRVPTLAEEDARQLPRTAESLTRDRTRLVNRLKALLVTQGVRLRIDRHFVEALDGARLWDDTPIPAGLRDRVLHDWEIFGWRQIRNGRQLGALVGLVPAPYQSGETRYDQGITRAGNTHVRRVMVQLAWGWLRFQPTSALALWYQRRFGHGGMRLRKIGIVALARKLLVALWRYLETGAVPDGATLKPVMA

SEQ ID NO: 259830 - protein, 346 aa, unidentified
MEQIIRIGVDTSKHIFQLHGVDAAERVVLRKKLSRKQVLEFFAKLPPTVIGMEACGGSQYWARELCKLGHEVKLMAPQLVKPYVSRNKNDWRDAEALCEAMSRPKMRFVPVKTAEQQAALMLTGIRDGLVARRTQLGNTIRGYASEFGLIAPKGLDKLEELLSRIAQDETLPALAQEMFTVLGRQYNRVQSELKEIEVKLMAWHRADAVGRRLAQIPSVGPIIATMLVMKAPDPHAFRSGRHFAAWLGLTPQDHSTAGKTRLGKITRAGDEDLRRLLVIGATAVIQQARRRRGQHSPWLLALIARKPPKLAAVALANKVARIAWKLMVTGESYDAARMNADPAPAA

SEQ ID NO: 259831 - protein, 312 aa, unidentified
MDAMVVGIDVSKDRLDVAVRPTGESFVFKRTAAGIEDLVARLKARSPTLVAIEATGGFEAVVAAGLAGAGLPVVVVNPAQVRAFARALGKRAKTDPIDAVVIAHFAEATKPQLRPIPHEMTRLLAELVARRRQIVDMIAAEGQRAGRMSDHRLTPSIGRLRKALEKELDELDRLIDDHMRGSAVWVETEKLLVSVPGVGKTIARTLIAELPELGSLDRRQIAALVGLAPWTRQSGQWRGKSFIGGGRKSVRSSLFVGAMVAARYNPQLKRFRDRLVAAGKPKLLALVAVARKLITILNAILRDRRPWQPLAA

SEQ ID NO: 259832 - protein, 411 aa, unidentified
MEVMVERPAALDVHKAQVTACVRVPGKGGAREQEVVQFQTTVRGLLTLRDWLKAQRVTQVAMEATGVFWKPVWAVLEDDFELLLVNARHVKQVPGRKTDVSDAAWLCQLLEAGLLRASFVPPKPIRALRQLTRYRKAQIKERQREANRLHKALEDTGIKLDCVATDILGVSGRAMLDALVRGTTDPEVLADLARGRLRKKLPALREALEGRFDSLHALLIGSILAHLDFLDEQIERLSDAIEEQLRPFAPAVELLRSIPGVERRTAQVIIAEIGTDMSVFPTAGHLASWAGQCPGNHQSAGKRRSGRTRKGSKWLNQALKEAAMAALRSNDSYLQALYRRKKSQLGHGRALGAVKHSSICACWHMFSTGELYTDLGGDYYTRRDPERQTRRLIAQLERLGHTVTLQEANAA

SEQ ID NO: 259833 - protein, 378 aa, unidentified
MKKSMRYVGMDVHADSIAIAVVEGNGVERDLGTIPNRPEAIRRCLKKLGRADELHCCYEAGPTGYVLYWQLVRMGIDCTVVAPTLIPTKAGDRVKTDRRDARKLARYLRSGDLTAVWVPDEAHEALRDLVRARQAAKIDEKRARHRLQKFLLRHGQRPAPGVKAWSSAHRAWLHALKLEHATLAVVLSEYLHELLHSEQRVERLDTAIDRAIDEAPETIRAVVAALQGLRGVRRVTAAGVVAEIGQFSRFAHPRQLMGYSGAVPSEFSTGGPGNHRRGAITKAGNAHLRRLLGEAAWCYRFRPAVRYPLQKRQQGLPAAVTAISWKAQLRLCNRYRRMVARGKTKQKVVIAVARELLAFMWAIGVEVETHQAQARTAA

SEQ ID NO: 259834 - protein, 322 aa, unidentified
MEEPTVVGIDIAKKKFDVALLREDREKSGAFQNTPEGFAMFVRWLERNGAGHVHACMEATGVYGDDLSRYLHDAGHVVSVVNPAKVKGFAQSELSRTKTDKADARLIARFCRAMRPEPWQPPALEEKQLQALVRRMDELTGMLTQERNRLATAHDVVKPSIENVISLIEEQIKEVRRLIREHIDQHPDLRGKRELLESIPGVGPATSAMILAEFGDVARFQDARCMAAFCGLTPRQRQSGSSVRGKTRLSKTGSARIRKALYMPALVAMRWNPVIAAFCERLKGYGKCPMVIVGAAMRKLIHIIFGVLKSGRPFDPSIAMAA

SEQ ID NO: 259835 - protein, 420 aa, unidentified
MKRQRVEDLAVLHTSCCGIDVHQKSISACVLAADRSGKLTSEVRQFATTTRELLALTDWLAEHKVTHVAMESTGVYWKPIFNLIEGQVEVVLANAAHLKNVPGRKTDTADCVWIATLLRHGLIKASFVPPKPIRELRDLTRSRTTLMRERGAIVNRIQKVLEDANIKLASVVTDILGVSGRAMLKHICDGEVDAEVLAGMARGRLRSKSTALMFALEGRVSIHHRFLLRRLLAQAEWLEAEVAIFEREIMRHAAQFAEQVTLLDTIPGIDRIAACALIAEIGTNMAQFPSARHLASWAGLCPGNHESAGKRLSGRTRHGSPWLRGLIAQVAWIASRAKSTYLASVFRRVMVHRGKKRALIAVAHSVLVIAWHMLTDRRPYQDLGPDYFERSRAEQIKRYHTRKLEHLGYAVTLQTQSATE

SEQ ID NO: 259836 - protein, 408 aa, unidentified
MAIIGMDIHRAFAEVVALEGKSRRRLGRIAMRCDRLAAFAAGLTKDDIVVVEATGNATAVAEVLAPHVGRVVIANPKQVRVIAHAKIKTDKIDAAVLAELYASGFLPEVWIPDKDTLALRRQVTRRNQIVRQRTRLKNIVQSILHAHLIPAYPAGNMFGRKGRAWLAAQKLPEDERMAIERHVREIDRLGEDLKVIQRDLAQYGLADLRVKRLMTVPGLDMIVATALVAAIGDVGRFGSPQKLVSYLGLNPSVRQSGSGPAYHGRISKQGPGRARGLLVEAAWAAARAPGPLRAFFLRIRGRRGQHVAAVATARKLAVLVWHLLTKEQDYLWVRPGLHATKLRRLELTAGHAPARSQRGSAYDYNIKATRDQERRRVQQAEKIYERFVAGWNRSGPRVRTSAAKEERQ

SEQ ID NO: 259837 - protein, 403 aa, unidentified
MTVRPVVWVGIDVGKTSHHACAVDETGKVLWNQKVSNEQRAIEQLIARAHKGADEARWAIDLTSPMALMLITVLLGAEQSVVYVPGHVVNTMTGAFRGEGKTDAKDARVIAETARMRSDLSEVAMPDELVVELAQLTGYRTDVMADWVRGVNRLRSLLGSIFPGLEAAFDYSNRTPLILVAHLCTPAEIRAAGIKGVTAYLGDNGGWPTAIAKTAATAVAAAKQQPLALPGEAGTAALVKRLAGKLLDLDHEIKDIDKTITERFRDHPYAHIIESLPGFGPRLGAEFVVVTGGDLASFATAGRLASYAGLVPVPRDSGRISGNLHRPKRYNRRLRRVFYMAALSSIRGDGPSRQFYDRKRGERLIHSQALLALARRLVDVLWALLRDGREFTPHKPTPATAAA

SEQ ID NO: 259838 - protein, 403 aa, unidentified
MRTIGLDVHRRFAEVAILEGKEERRLRISTEPAALRDFAQTLGPDDQVVLEATANTWAIADLLSGHAGSVVVSNPLRTKAIADAKIKTDKVDAKTLAQLLAADFIPAVWVPDPATRALRGQIARHRTLVQQRTRLRNQVHAALIRSLVQCPHSDLFGKAGRRWLAGLTLASHERDGVESSLRLHDAFDAELAQLERELSAAALAHPDAQLLCTISGIGPVTALALCAVIGPIDRFSSPSKLVGYLGLDPTVRQSGDRPARIGHISRAGQAHARGLLVEAAHGAVRSPGPLAAFHDRVVDRRGPAIAAVAVARKLAVLVWYLLRRRTAYRFVQPTLLADKQRRIELAAGAPRRQRGTRLPLTRAERLGTERAALEEAERTYRALVRERTRKQKRDAAAATGERP

SEQ ID NO: 259839 - protein, 363 aa, unidentified
MNTTTVGVDLAKLIFAVCMLDGNGRVLLRRELRREAFAEWLAQLPAGAIVAMEACSGAHYWARRCLALGLQPRLIAAQFVTPFRKSRRSKNDRNDAEAVATAARQGNMRFVAVKTVDQQARLSWHRVREGYKEESLKVTNRIRGLLAEFGVVLAKSHVALRRALVDILEREDLPREFVEMLQGLREHWQQIQARLRMCDQRIETHALGDERCRRVRKLTGVGALTADAVVASVGNGCDFKHGRQMSAWIGLVPQQDSSGGHQRLGPISCSGDAYLRTLLIQGARSSVQAANRVTPEKATPEQIWIRQLATRLSFGKLLVAVANKHARQIWAMLARGEAYDPHAWLRHPMTQRSASRKSVPAAA

SEQ ID NO: 259840 - protein, 321 aa, unidentified
MTKETVYVGVDVAKNSLDVAVSSSKEVCQFANDPEGVTNAVQYIAGLKPAGIIIEATGNLEMPLAAALQVGRLPVAVVNPRQVRDFARAIGALAKTDSIDARMLALFGIRVQPEIRPLPDQKARDMRSLLTRRRQLIEMLTAEHNRLFHSSNDIRPSIKTHIKWLEEALSDINNDLDRRIRLSPSWLKKDNLLKSVPGIGKVVSSSLLIELPELGMLNRRKIAALVGVAPFNRDSGTMRGRRTVWGGRAKLRAVLYMAALVASRCNPIIAAFYQRLLEAGKAKKVALVACMRKLITILNAMIRTMTAWQPEIILNHISVEV

SEQ ID NO: 259841 - protein, 391 aa, unidentified
MRKDVTVYVGIDFSKEKFNACLLMEAGVMGESEFPNTKAGYLKLLRWVRKTSELGRLFDATSVLFCGEHTGTCSIGLCEYLYSAKMKVWLETPLKIKYGSGLNRVKDDKSDAEMIAYYAKRFYEPDTCELFEPDSEDLKSLRSLYQFRNRVVSDRVAMGNRILSGAFDCSPLVKARMKKHHKAAQEDEKEIEEEMVKIMEASSELASNYRILVSFKGIGPITAAALIIYTSNFKKFDNPRKFACYCGIAPFGKQSGTSINTKPHVSRFAHIGIKAALVQACKSAIQHNPVIKAYAKRLYEKGKHEGVVMNNVKNKVIHIIFKMIETQNNWNANYQGTHISNKNENKKGAAKTTPFIGETLNVLYSNLSECASINKNSTFQEKSLFFICRET

SEQ ID NO: 259842 - protein, 380 aa, unidentified
MARKKDMTVRDEDTAKTPTIYVALDLGRRRWTVGVLLPGDRAARIFQIASGDREGLSRLIGRQREIIVGPDVRVVSCYEAGRDGFWLHRWLRDQGIDNRVLDPASLEVPRRRRRVKTDRVDTLGLLRVLLRLDRDETEIARAIWVPSPPIEDARQRTRARERLVKERTAHLNRIQGLLVAQGVTSVKVGARDWLDQLTAERTGDGRPLGAALLADIRREVERLALVERQIEEVEAAQRAVLKTHTPLAVRARKLKRLKGLGEVFANGLTHEAFWRDFENRRQVGGAFGLTPWPWESGDTHTDQPISKAGNRRARTLAIECAWMWTFHQPGSALTRWWQQRFARGSKRQRRIGIVALARKLMVALWRYLKEDLIPEGAVLG

SEQ ID NO: 259843 - protein, 362 aa, unidentified
MSKISKQARGKEARKDKPEMTMGIDVGDRYSHLCLLDEEGEVVERDRVRSTEAALRRHFEDGPRLRIALECGTHSPWMSRLLKQLGHQVIVANARKIPTITESESKNDGRDAEQLALMAAFSPKLLSPLQHRSLARQQDLNLIQARAILVKARTMIVNALRGLVKSAGGRLPGCSTESLPDRAAGAVPPALADVAGPLVEQIARLNMQIGAMDQQIEKLAMKYPEIGTLRSTPGVGALVAAAYVLTLDGPNAVPSSRSAGAFLGLRPGQSQSGASDPQRRITRTGNTYLRCLLVQSAQYILGRFGPDCALRRWGLKLAASGGKRGKKRAIVAVARKLAVILHSMWRSGQRFEPFPQPAQARA

SEQ ID NO: 259844 - protein, 312 aa, unidentified
MDGLFVGLDIAKDRVDGYVQPTGERFSAGTEEPALAGFVSRLRALAPTLVVMEATGGYEIPVTAALTAAELPVVVVNPRQIRDYARATGQLAKTDGLDARIIARFAEAVQPAVRPLPTPQAQALADLMARRRQVVDMLGAELNRQRQARQPRLQKRIADHVAWLQKALTKLDEDISELIRKSPVWREKENVLTSMPGIGDVTAHALIADLPELGQLDRRRIAALVGIAPFNRDSGQWRGRRMIGGGRATVRRALYMPTVVAIQHNPAIAACYHRLVQSGRPKKVALIAAMRKLLTTLNAMLRDHRPWQPQNA

SEQ ID NO: 259845 - protein, 370 aa, unidentified
MGQDKRAFVAFDSAKAKHAVAIAEDGRDGEVRYVGEIDNSPDAVRKLVTKLSRQYGPLHFCYEAGPTGYGLHRQLTDLGHVCDVVAPTMIPKRCGDRVKTNRRDSVTLVKLLRAGELRAIWVPDAVHEAVRDLTRAREAAMIDLKIKRQQLLSFLLRHGRNFPGGKNWTKMHASWLAKQIFSHPAQQIVFQDQIEAINAAQVRLLTLEQQLRDIVPTWTMAPVVAAYQALRGVSFLVAITFVAEVGDVRRFATPQQLMAFLGLVPSERTTGDTVRRGPITKTGNRRARRVLIEGAWTYRYPARVGETLRSRVKDLPLAVRTIAWKAQVRLCARYRRLVANGKKAPVVTTAIARELAAFLWAIGHQVAPAA

SEQ ID NO: 259846 - protein, 414 aa, unidentified
MEQETITWFAAVDWGSEKHQGCILDSQGVIAGERVFSHSGAGLAELCDWVLSIAGSASVVAIAVEMPHGPVVDALLDRGFVVHAINPKQLDRLRDRFSVAGAKDDRRDAYVSADGLRTDRHLYRRVQLADPRLVELREWSRLAKELQEERVRLGNRVHHQLWRYYPQMLELTDDIAANWFLDLWTMAPIPSKAKRLRKATVEQLLKRYRIRRIDAATALHTLRQPAIKVADGVAEAAGIRIRSLVARLRVVNSELRDAARKLDELCAALGERPPATAQSDGRRDVAILKSMPGLGRINLATLLAEASGPLSRRDYQALRTLSGVAPVTKRSGKSHIVVRRYAAHVRVRDAVYHWARVAIQHDTKSRSRYVALRQRGHSHGRAIRGVADRLLAVACTLLERQTLFDPELGKTVTA

SEQ ID NO: 259847 - protein, 438 aa, unidentified
MPTLAFVGLDVSQDDASVCFLLTDGAEPVPRWTIPNTAPGAETLATTLAQLAQRYQIDQLRIGMEATGLLWWHLACALKDAPALGSFAPRIYALNPHLIKTFRANYGALPKTDYTDAFLIAERIRFGRQLPSPFQLDARYAPLQRLTRFRCHLAQNLAREKSYFLSFLFLTFSTYGQIAPFGDPFGTTSSAVLDEFTTEELAQQTLEELAAYLQQKGRNRFADPDALAATLQRAARDSYRLDKVLQQPLRLVLGTTLATIRTLQIQLKTLDKTIAQELAALPQTLASVPGLGPVWTAGLIAELGDISRFDDEAAIAQFAGLTWEAKQSGNFQAEDTALTKRGNSYLRYYLVEAANSVRTHCPEYAQYYAAKYAETPKHAHQRALVLTARKLVRLIDVLLREGKRYLAPAERGARGETTPPHHARPAHQRRSKRVSALE

SEQ ID NO: 259848 - protein, 408 aa, unidentified
MLTPIVKRCAGLDVHKMGVMATVVLEQEDGSLREETREFGTFRRHRRQMVRWLDGLGVDLAVMESTGIFWKSIFACLEEAGIATYVVNARHVKKVPGRKTDVSDSEWLATLGRLGLLKPSFIPPKDLRELRLITRQRIKLRRMLAAETNRLHKVLDDAGIRLGGVVSDINGLSARALIRGLIEGKAPQDIVPHVHGRLKEKIPQLLDALDEPLSERHRFLLRFLEEHIGYLEKAMASVDDYLFAAMSPYQKQWEILQTIPGIDAVSAAMLLVEIGIEMQCFGSAHRLASWAGMCPGNNESAGKQKGGRTRKGNHVVRQVLCEISNAASKSKSQFKGQYQGLVIRRGHKRAIIAVGHKVLRVVYAMLKSLQPYRDPEIDYTRLVVQRNAPRWLAALKRYGFLPAVGAAA

SEQ ID NO: 259849 - protein, 347 aa, unidentified
MTVYIGVDFHARKQTVSYLTTEEGEIQQVELEHERDIVRAFYDQFRGQKVIVGFESSGYAAWFEELLEELEYETWIGHATAIRQFARRRQKNDRRDADLILELMVRGDFPRLHRYSRESRETLQQLRYRQRLVKMRTMVINSLRFMVASRGVTLRGTLQSRPGQARLMQVALPGPLGPQRDELLRLLVEIQQKVETVEVWLKQKAEADERVQRLRTHPGIGLLTGLGLVHTLESIERFSHSRKVTAYVGLDPVEDSSGERRRMGSISKQGSRLLRLLLVEAGQVAARRDPELGQVYRRVTLRRGHATAKVAVARRLLVRAFIMLRDEIDYAEFCRRGVAARSSRGSA

SEQ ID NO: 259850 - protein, 463 aa, unidentified
MNKVRSAENDTDPALEENGLAVLRRNVAGIDVGSTSHWVCAPTVDGTAREVEQFGATTPELEKLAQWLKQRKVESVAMESTGVYWIPLHEVLERHGLEVVLVNTRELAHVPGRKKSDRIDCKWIQRLHSCGLLRGSFRPAEQVCMLRTLVREKANLAAERADWVRRMQKSLDQMNVRVHRAVSDTEGTTGMAIIQAIVKGERDPMQLAKWRDPACRKSVEEIAEQLSGHWREDHLFSLEQSLKMHAAIEERIKAYQTEIQRRLAEMERADREGQQAPALKNKNKAKKIRQRREEPMRQALYRMSGVDLTAIDGVGVGVVEIVLTEYGSDLSCFPTEKQFVSHMTLAPKKPVSGGKPLKKKKRGSASSRVASALRSAALSLRHSQTALGAYFRHIQHRLGADVAAFATARKVATLIYRLLRWGHAYVDEGAEAYEQRYQAARINRLVSTAADLGYQLVAKPTNS

SEQ ID NO: 259851 - protein, 411 aa, unidentified
MNRYVGLDWASEIHAVCVIDTTGEVLERLRVPHTRLGLAELVSRLARHAEPVDLPVGVERSDGPLIEALRAGGFPVVVIPPHVVKAARPRFSAARAKSDPGDARLLADLVRTDGGRFRVLAPSDPTTAALRRLVRTRGELVAERTRLANRLRGLLEDAWPGAAEIFARVDSPIGLDFCERYPSPRAARTLGEARLASFLVRHHYSGRRTAPELLARLRAAPVVAEPAIVDDATADAVRALVACLRAILARLADLEGAIRAALAAHDDGALFRSFPRAGEISAAMLLAEIRVDRERFPSADALAAQAGAAPVTRASGKSSVVGFRWACDRRLRQALMQFADNSRHASPWADDVYRRAHSHAIRILAKAWARVIWRCWQDRTPYDPSRHGGLKRLAQTAAGRSGLTQGSHAVR

SEQ ID NO: 259852 - protein, 414 aa, unidentified
MGLKIVYPICCGIDVHKTFVVACIASTNKGVTTYKRHRFSTYTKGLKELSQWLCENNCKDVCMESTGKYWIPVFNVLEASCNITLAHPKYVKAIRGKKTDKKDAKWIADLFKHDLVAGSFMPPLAIRQLRDLMRYRFKLTNFMSSEKNRLQNCLTVSNIQLGNVVSDTFGKSSMNIIDKILGNPLDTTFDIEPLIHGSMKKKLSDLELAIDGYITPEQADKLKVIKQHYEDLQSRKADLEKIILSLAESYTEEINLILTVPSFKNIFSAIAVVSEIGVNMDVFPTAKHLCSWAGLTPTNNESAGKKKSVRISRAGCYIKPLLVQCATAVVKSEKHPEIRNRYLKLKKRRGHKRAIIAIARMLLTAIYNILKKKEPYNPELYKKSDVLPVNREITVEQAILLAKSQGFRVTAVTT

SEQ ID NO: 259853 - protein, 357 aa, unidentified
MIIIGADYHPGFQQIAFVDTETGDYRELQLQHSEEAEKFYRELAAHGMKVRVGMEASGHARWFERLLAELKFELWVGDATEIETKRVRKPKTDREDARLLLRLLMEDRFPRIWVPSWDNRDLRQLLWHRHRMVQARTRIMNQLQAVALNEGLRFKKRLWREAGRQQLESFPLAPWANRRRHDLLALLDRLNPTIAELSQAIEQEVEKCPEAQRLMTHPGVGPLTALAFVLIIGTVERFQCGKQIASYLGLVPLEKSSGSRRRLGHITKQGNSMLRFLLVEAAQVTVRSIPEWRNKYFHLVLRRGKKTAKVAMARRLAVRLYWMWRRQWDYEQVKKFGSYAGQLGHRDGVQLEHRVID

SEQ ID NO: 259854 - protein, 366 aa, unidentified
MTSVPSAAGLIHLGMDTSVNEIVVAVLRPGEEIPVVDRIPGDEESVRRLIGRFPDRRLLSACYEAGPGGYELHRLLASMGVACDVVAPSLIPKGSSDRVKTDKRDSVRLALTHRAGLLTPVRVPSPAEEAVRDLVRARGDLLDDRKRMQQRLNAMLLRHGRIWRGGKKWSYAHRAWVDRQVFDEPALAEAFALYRGGLEAREAELAAAGARLAAWAAREPLAGPVARLGGYRGIAQLTGLTLAAEVVDWRRFASARAFMGFAGLIPTEYSSGSRSRRGHITKAGPEGVRTALIEAAWAYRYRPAIGATLRRRQAGLPPETLARSWKAQQRLHAKYKKMTARGKPPGVAVVAVARELAGFVWAEMIS

SEQ ID NO: 259855 - protein, 426 aa, unidentified
MNTNNDETPNDYAAFIAIDWADQQHVFSLQVRGQTKKETGILEQKPEAIGPWVAQLRERFGGRSVAIAVEQSRGALIHALLRYDFIVIYPLHPTTVAKFREAFKSSGAKSDPLDTRQILEIVTKHLDQLKPLNPDTQETRLLGRLVEDRRNAVHLRTRHIQALLASLKEYFPQAIELANGNLTSRLACDLLKKWPNFQAFQQAKPSTIKRFYYGHNIRSPKVLEKVLHLAQRAQPLTTDPAIVESGGRLSQMHAQLIQTLNPAIEDYDRRIQQVFQAHPEASLFRQLPGAGPALAPRLLSFFGTDRSRYETAQNVHSFSGIAPVTQSSGKTRVVYFRRACPKFDRQTFHEFARLSLAKCQWARNYVDYYKAKGKKYHTIIRALAFKWIRILFRCWQDQTPYSDDTYLKALKKRGSVFATLHLEQKS

SEQ ID NO: 259856 - protein, 339 aa, unidentified
MKAYAGIDLHSSNNYIGIINDKDQRLFKKRLPNSLDVILSALEPFQQDLHGIVVESTYNWYWLVDGLQDNGYTLHLANPSAIKQYEGLKHTDDQWDSFWLAHLLRLNILPEGYVYPKEERPVRDLLRRRMMLVRQRTTHILSLQSMITRNLGINLSGNAIKRLTGDDAEQMFKDPCLVLAARNSISIMKFLKEKIRLIEQSVLSRVKLRKEFAPLLTLPGIGKILSLTIMLEVDSINRFPKVGNYSSYSRCVKSERISNGKKKGAGNTKNGNKYLSWAYVEAVHHAIRLYPYAKSFYQRKKTQTNGIVAVKALSNKLCRASYYVMRDQVPFDKEKLFRS

SEQ ID NO: 259857 - protein, 354 aa, unidentified
MSRYYIGADVHANNTELAVEEKGAIIARYSVPTTIPAISDVLKSLKGTKQLTFEEGPMAGWLYRNLHMKVDRLVVAEPRRNKLITSDGDKDDRIDSGKLAMLLRGKFLKHVHHTEDAHRAHFKHWVNLYHGRVRNATRNINMIRACCRAHGLAIPRKVIRNTKNRDQWLSQINNPVLAEQLNMLWIGYDAARTQVTITLGQLNTMARRYSIIKLWSQIAGVGLIRASTIFAYLDTPWRFKNKSKLYKYCGVGLERSASGKDKNGNYKPARLHLPFFVNGQLKDAVMGAAATAIYQKNNVFYDYYERMTSNGIRPSNAKHSVARKMIAIMAAMWKKNSTFDDTLVNSSLKRRVDF

SEQ ID NO: 259858 - protein, 416 aa, unidentified
MKRSKPPKGKSVNDHEMIVGIDVAKQKHFARIRFPEGSESQPFWFSNHRKGFETFLAWLSFNQKRAKCDSIIVGLESTGHYWEPLAFFLDEIPGIRVVQVSPKHVKKTKEVYDNSPGKTDRKDAGVIAMLIQMGRFQKLALPKGPFAELRGYARLRERKIVELSVQRNLLHSLVDLVFPEYGSLFKKIEGKASLYILKHYTTPEQILRAGPKSLSSAIHKASRGKLSATCAQRIIEAASATVGLKEGMGATTFAIRNIVTSVERIQEEIAAIEKELAQLLAHIPYAPQLLSIPGVGKISSAVLLGEAGDLRRYQKAEELIKLAGLNLFEISSGAHQGRRHISKRGRPLLRKCLFYAALRTVKTGGAFRAVYVLFTQVNRMQKTKALVAISRKLLRLVFALVRDDVAYRPREELRAA

SEQ ID NO: 259859 - protein, 354 aa, unidentified
MKRVKKELQPGDKVFVGIDMHKLKWHVTARTADFELFSGSIPGKWEALQRILDRYQGHRIYTVYEAGYFGFWLHDNLVEYGAECVVTPPSLIPQEYGNKVKTDRRDSRKLAHFLAKGLLKRVWVPTEKERYHRQVIRRRRQLIGDRIRSQSRIKAELQLHGLNLSAPHGKWTKIFLRNLDRIRFNNRWMQESFKRLLEQYYFLDEQINKQTGLLKKLSETALYRERVEILMTIPGIGMIAAMELLLELQDVNRFQRADQLAAYVGLTPSQYSSADKVRMGRITCVGKNSLRATLVQASWALIRKDGVMREKYDRLKSRSGGKRAIVAVARTLLIRMRRMLLDNNPYVIGLIATN

SEQ ID NO: 259860 - protein, 493 aa, unidentified
MEDERNWFVGVDWASETHHVQVSDARGRKCGERAFAHSGEGLAAMAAWILELTGAAPEAVFVAIEVPHGPVVESLMERGFRVHAINPKQLDRFRDRFSPAGAKDDSRDAQVLGDALRTDPRCFRALQPLDPVVVELREGSRMAEDLKQERNRLGNRVRELLWRFYPQMLGLTDDVAAPWFLDLWRLIPTPEKAARVREATVDRLLKRHRIRRLSAADVLERLRTPAIPLAPGTVSAATAHLAAVAKRLDLVNRQMLAVDERLDRLTHCLVAAQEGAEGQRPEPCDVMILRSLPGVGRIVLATLLAEAFEALQRRDDRALRCLAGVAPVTKRSGKSRIVLMRQAAHVRLRNAVYHWARVAVQHDPRSQAKYAALRARGHGHGRALRSVADRLIGVACAMLEAKTIFDPNLASQRALNLGGSCCVSGWWVWVARSEGIWCDGWSASSQPARARSFCHHGCTGPGQPLGAVGRRQVLRAGAPASLAGGHALSRVSP

SEQ ID NO: 259861 - protein, 359 aa, unidentified
MQELTFIGLDVHARSVKAALLDGGSGEVTLHSARPRSEALVGWICGLPGPVTVAYEAGPTGYGLARALEQVGVPCLVAAPSRIERAPADRVKTDRRDALRLARLLRLGELTAVRVPSPAEEAARDLMRAREDARGDLMRARHRLSKLLLRQGLLWEGVTWTAAHERWLAEQRFAARPLQIAYQEAFVTMQGACERRAALDAAIAVEAGEPRWAEVVGRLACLRGVSTLTAFGLAVEIGDWQRFSGRSIGAYLGLVPSESSSGERRRLGAITKTGNGHARRLLIEAAWHQRRPPWRASHELRRRREGQPAAVRARAELANRRLYQRWAAFDGRGKRSTVAAVAVARELAGWCWSLATMEA

SEQ ID NO: 259862 - protein, 346 aa, unidentified
MLVTIGADSHKATHTVVAVDEVGRVLGEKQVRATSEGHLVLVQWAARFDEVVFALEDCRHLTRRLEADLLKGGHRVVRVSTRLMAQARRSAREPGKSDPIDAQAVAQAALRYPDLPRAELDGPAREVKLLSDHRRDLVGQRTRIAAQVRWHLHELDPGLDIPSRGLRRRSVVGQLQSRLAGASGVVARITRELLARCQELNTQINGLDAELRVLVRAQAPALLAIPGCGVLSAAVIIGETAGVHRFSSRARFVRFTGTAPVPVWSGASAGKVRLNRGGNRAMNCALHTIAITQARQAWAQARATSPNRPDAARTVDALRIGSRVRSWKRGPRFVVCSVCLFDADAG

SEQ ID NO: 259863 - protein, 321 aa, unidentified
MSKKNETCFVGVDISKNKLDVYRPDTKAFSQLNNTEEDTHEFSKTLQRKRQRTIVVMEATGGYEKMLLHQLEQSGIEAAVVNPRRVRDFAKGIGIDAKTDPIDSAVISRYGQVVQPNPVACKSDHEKKHRALVDRRNQLLGLINQEKNRLKQTWDEDAKESIRVVLECLKKQLKQIDSDLAKMLKVDEENKRMIEILGSIKCVGPVLISTLITSLPELGKLNREQIAKLVGVAPINRDSGSKSGKRFIGGGRGNVRRVLYMAAVVGIRHNTVLKAYYTHVKSKGKESKVAIVACMRKLLSIINTMVRTDSLWKDVKQGGAA

SEQ ID NO: 259864 - protein, 318 aa, unidentified
MRKVFVGVDVAKDKLDISITLDGLKNDSLSILNNEGSILGFFEYLKNTYKKSEFFFGYEATSNYMHVLQKLLTINKFKQIMINPYMMSHYLKHLNSRTKSDLSDSIGIAKFIQTLDQEDFKTTFNQDDKSLRKYTSSINLLRKLETQLKNFIHSQKENPIISLDNLLFELQKNIKTTKKQLEKEAEQVLKELFPHVLELQKEIKGVGYALLLELIPIFLKSENYTLKQLQSFVGLSPRIFESGSSVRRREAMSKRGSSLVRKLLYLSTMSAIRFNPIIKEKYIRLVNSGKNKMVALVACMSHLFRAVYVKFHQGLVNV

SEQ ID NO: 259865 - protein, 350 aa, unidentified
MNNNATVIGLDIAKDAFYAVGKDARGKEVLKRKMSRAQVLEFFVNLPVAKVGIEACATAHYWARELNKLGHEVKLIAGQRVSRRVLGNKNDYRDAKAICDLRSEPETLYVPINSEVQQDVQMLHRVRQRLVENRTALMLQIRSFLGEYGLSFPSGATTLRKGLKSVLGGEHHGLSSGALEIFAEMQAQLTLQDEWIDAYDARVKRLSRQEEKVVRLMEMPGFGPLNSTAFIATIGDPHHFPSGRCFSANIGLTPHEHSSGGKQKLYGISKRGDCYLRTLLIHGARSALRCAEGKNDRLLQWAMKLKESKGFNVAAVALANKLARVAWALLAHGRHYQAQWINDVKATAPR

SEQ ID NO: 259866 - protein, 362 aa, unidentified
MYIGVDTHKKAHVLVAIDDQGQICDTHTVANTPSGWAAALCWAHDLDAVCIWGIENSGSLGKGFAQFLLIQEEPDVHEIVPHRTAQYRRRGRSQDKTDAADALAMARLLRAETAFLPIVPRDDVSTELRLMSDHRDNLVAERTRLINQLHAQMLQIDPCYEEKSGALTSLAGVRSCRDLEVPHAEGVVRTRLLIVRQLVSQILQLAEAIETVETALTQRVQASETPLVQLCGVGTIIAARLIGELGCSPRVHSAAALAALAGIAPVAVSSGGKHGHRLNRGGNRRLNKAFHMIALSQLRCEPLARTYYAKKRAEGKTARAALRCLKRRLVDVVYRLWCKGNAERVDSVGAHRVDLALCRSAA

SEQ ID NO: 259867 - protein, 386 aa, unidentified
MHDSTDLPFPERTAIRGDSATLFVSLELSRSTWVATSLAPGSKKMSKHTLVGGDGRKLLDLLARLKTRAEQRIAAPVKVVAIHEVGLDGFWIHRLLEANGVESHVVDPASIAVPRRHRRAKTDAIDGETLLRTLMAWQRGEPRVCAMTVPPSPSEEDCRRVSRERATLLRERIQHTNRIRGLLFGQGITNYNPLHKNRRECLEELRTGDGRSLPTHVKAEILREIDRLELVLRQIGEVEAERDEILRPAEASSPAALLMRLKGIGAEFATVLYFEGLFRHFENRRQLAAYAGLAPSPWKSGSIDHEQGISKAGNPRLRTTMVELAWMWVRYQPDSALSCWFRQRVGSERGRTRRISIVALARKLLIALWRYVTHGEIPAGAVMKPV

SEQ ID NO: 259868 - protein, 405 aa, unidentified
MEIVVERACGMDIHKDNITACILTSKGKEIQTFSTKTEFLLQLIDWIKQHECTHVAMESTGVFWKPIVNLLEAEGIEFLVVNAQHMKALPGRKTDIKDSEWIAKLLRHGLLKASFIPDRNQRELRELVRYRRSIIEERARQHNRIQKVLEGANIKLSSVVFDIMGVSSRDMLRAIADGEDDPEKLANFARRTKKRKKDELALALQGYVNPHQRLMIKTILTHIDFLSDQIVILDQEVATRVVPFHDDVERLDSIPGIATRMAEQILAEIGTNIKKQFPSAEHLCSWAGLVPGHNESAGKRKSAKAKNGNKYLKSALVEAAHSVAASKNYLGAMYRRTAARKGRKRAAISVAHAMLRIAYYLLTREEMYVYLGEDYFDKQKQQSIVKYAVRRLENLGYSVTIAEVS

SEQ ID NO: 259869 - protein, 307 aa, unidentified
MRNYGVDVSKDTLDIACEGRVVRIANDKREIKTFLKKMPSGSLVALEATNIYHLTMADACFAAGMQVYVVNPRITRHYREVRSLRGHNDRMDALTLAAFIEREYSQLRPYEPKSSDIRRLQTLIRRRSKLVGIKTQLRHSLQGIADLKEEFNAIIKHLDELITKIEMLIDKQLEGDQDRKRLEGIPGVGPVVSAALLSDLKAAEFARADSLVAFYGLDPKPNQSGKYNGKRKISKQGQKLGRTLLYNAAMAAVTTALWAPIYQHYLDHGWSKVQALVIIARKIARTAWSMYRYKTTFNPNRLRGALT

SEQ ID NO: 259870 - protein, 433 aa, unidentified
MKHKRHEKTKKAICGPTQGNWQQMNRKQRREMTRKIQSEDISLEVIHPDAAGIDIGNESHYVAVPPPRDSQPVQRFGCTTAELKDMADWLKQCGIRTVAMQSTGVYWIAVYDILEEAGLEVYLVNARDTKNLPGHKSDVQESQWLMKLHTYGLLRNSFRPSQEIRTMRTYWRQRNDLVQSAGRHIQRMQKTLTQMNLQLANVLSDISGVTGQAIIKAILAGERDPDKLAEFRDPRVKARKGQIARSLEGNWQEDLLFVLQQEQDGYEFCQKQMTECDQRLEHYLQQRDDRSAGASLPEEKRKERRKKRKGNKPRFDLRTGLFRMTGTDVTRIDGIDVMTATTILSEVGWDMSKWETEDHFVSWLRLCPDNRISGDKIIGKGRLPTNNRVSTALKMAASTLRTSQTYLGAQVPWRSRRWPLSWHVWSTACSATE

SEQ ID NO: 259871 - protein, 355 aa, unidentified
MTSTKYIGMDVHKESISIAVINASGKIGMECVIETKASMILQFFDGLRGDLQVTFEEGTSAAWLYDLLKPHVTKLLVCDPRKNASMREGNQSDKIDARRLAELLRLNHLHPVYHGEHGLRSLKELVRSYLTITKDLGRVMSRVKAIYRSWAIPCTGKQVYAPRHRAEWLGKIGEPGVRRRAEFYYQQLDALRAVRQQVRRELLAEGKKHSAWKRLCGIPSIGPIRAAVLLGILQTPHRFRTKRQLWSYSGFGIETQSSADHRRVNGQLERAKKQVCIRGLNRNCNHDLKNLFKGAAIVASSKPGPFQEFYTVLLSKGIRPEMARLTLARKIATIVLIVWKRGACFDAQHLKPQTA

SEQ ID NO: 259872 - protein, 414 aa, unidentified
MDVVHRRCCGLDVHKQSVVACVLLGDPSGQPQPQIRTFGTYTNDLLALGDWLAEQSVTHIALESTGVYWKPIWNLLEDRFALLLVNPRHIKAVPGRKTDVQDAEWLAELLRHGLLKASFVPDRAQRELRELTRYRTSLINERSAAVNRLQKTLEGANIKLASVASDVLGLSSRQMLAAVVAGTPLEANGLADIAHGKLRNKLPELEQALSGRVGPHQRFLLAEQLAHIDSLDASLERLSAEIAERMRPFDQLIDRLDAIPGIGRVIAEVLLAEIGVDMSRFPTANHLASWAGMCPGHNESAGKKRSGKTRKGSPWLRAALVQAAHAAAHSKQSYLAAQYRRLTARRGTRKAAVAVGHSILVSVYHLLSHDCPYVDLGPTYFEQRDPRAQRRLVHRLEALGYNVQLTPLAESPAA

SEQ ID NO: 259873 - protein, 332 aa, unidentified
MKKDTSKSKGKKETKEGFAFYIGIDLGDKNSDVCVLDQRGEVGKEFRLRMKEEDFQTYFANIPRSRVAVEAGGQSRWVAEVIEKCGHEVYVSNTRKVPYIHQSDDKDDPGDAYKLAELLYFKPRLLHPIQHRSREAQADLSWIRAREVLVASRTQLINAVRGIRYYDEMEEHIARERYPKYWLWEQVNGVGVHTALSFMLTIGDPERFEKSRMVGSFLGLRPKKQESGESKPQLGIAKAGNVYLRKTLVNCAHYILGPKGKDSDLRRCGLRICARGGKNAKKRAVIAVARKLAVVLHRLWITSEVYEPLRNSKQLIAASARAEDERKFVTRI

SEQ ID NO: 259874 - protein, 339 aa, unidentified
MNITRMGIDLAKNVFQLHGVDKHEKIVFRKQLKRTEMLTFFANQQPMLIGLEACGGAHYWARELIKLGHRVNVMAPQHVKAYVKSQKNDKRDAEAICEAVSRPTMRFVEVKTVAQQDMQAVHRVRERLLKARTALTNEVRGLLGEYGIVIACTGVAATKRGMQAALENADNSLSHKMRAIVFDALEELSAMEDRLKRYDEKIQQHARDDERVKRLLAIEGIGPISASALVTSIGNATQFKSGRDLAAWLGLVPRQHSSGGKEKLGSMSKRGDKRLRTLLIHGARAVIRFCEQKNDTRSRWVNGLIVRRNKNIATVGLANKNARIIWSLLAREETYRPAN

SEQ ID NO: 259875 - protein, 310 aa, unidentified
MESIIVGIDVSKDRLDVAVRPSRAAFTVERNARGLEVLVARLREIAPQVVALEATGGFETVAAAALAGAQLPVIIINPAQVRAFARALGQHAKTDPIDAAVIAHFAEATKPEIRPLPDEATRLLADLVARRRQIIEMIGAERQREQRMPIPRLKKSIGRLLKALEKELASLDHDIDDAVRGSPAWREKEDLLASVPGVGPIIARTLMAELPELGTLGRKQIAALAGVAPFTRQSGKWRGKSFIDGGRTAVRSALFMGALVAKQHNPILKAFFDRLVAAGKPKMVALIAVARKLLTILNAIVRDNRPWQTA

SEQ ID NO: 259876 - protein, 391 aa, unidentified
MFYIGIDIAKKNHEASIIDSSGKSLSKSISFPNSTKGIEKFNNFIAEFGITTNNCIIGMEATGHYWISLFSYIVDLGFTCYVINPIQSDAFRKMYVRQTKNDSVDSFIIAQIMRFGEFSISNFSDENTFALRNLTRYRFALVDECSDWKRKLVAILDQVFPEYSSLFSNIYGVASKELLSKYPLPEDMLSIPAEKLGNLLYECSKGRLGINKAEEIQSRARESFGIKFAKRSFSFQIKQIISQISFLEEQLKEIEIEISCLLEDICPVITTITGIGSVLGASIVSEIGNISRFERANQLVAYAGLDTRIKQSGDFSATNTKLSKRGSPYLRRSIWLAATVAAFKDPALSIYYQGLRARGKAHGTAIGAVARKLTNIIFAVLRDQKPYTPNI

SEQ ID NO: 259877 - protein, 381 aa, unidentified
MGNDLDKAGGLDIHKKSVKAAIASSDDSMVEAEFGMTILQLSKLKIWLLDNGCKRVAVESTASYWYRVVQVLSDEIKVIVVNPLYVKDRSGKKTDKIDARRLATKCLKNEVKPSRKFTKEELELKRLTRAREQNVKIRTQLRNQIHKVLDAAGIGLSLFVSDIFGKSGMYLLRGLVERKRLEELIPGIPSNRIRRRARELPELIPVQLDDVQILLIRRALATLDSVQKSIDEITALLYKKAESYKDDLLILMSVPGIKFTSAITILAEVGRYRDFENGDQLACYAGLTPFVYDSGEKHTQGNRITKHGSKHLRWILNQVANAAANTKKSRLRKVFLRLLRRKGKPKAITALSRKILSIIHHLLINREMWEEEGFRKRRSDL

SEQ ID NO: 259878 - protein, 384 aa, unidentified
MSLYFVGIDISKYKHDCCIISATDQKVISKFSIKNDKVGFEELITTFNSLSSPEDIRIGFESTAHYALNLELFLENAHHSFMEVNPVLIKEYKKSTTLRRTKTDSVDCESIARWLMTVEYKPHSKGFYHAYSLKSLTRLRDRLIRQRSFYLVKITNVLDHTFPEFKPFFNERLSKTALYLLENYGSAEKMARMNSVSYEKLRSISRGKFSPQQFIALKELAANTVGVNNSIFDVELNSLLILYKTLVTEINTLEKEINPHYLSVPGIGSISAAIIYSEYGDISNFDNPGQMLAFAGIEPGINESGTESHGGRMVKRGSSQLRYALINCCLPLIRFDMTFATYYAKKRAEGKPHRVAITHVAKKLIRVIYALERQNTDFCVQKLR

SEQ ID NO: 259879 - protein, 311 aa, unidentified
MTSQFAGIDVGKDSLTGNLYGQDAVKDYPNTSRGIQRLSAWLQKHEVHLVVMEATGGYEKMASRQLERAGLAVAVVNPTYVRRFAQGMGTLAKTDPIDARMIAWYASVKQPKPRPPRSEAAEALSACVDRRDQLVAMRTMEKNRLGSAAAYVQSSITAHIESIDEQIKQMEVEIDHLIDQEEEWQSRIACMTSCKGVGKVTAVTLLAEMPELGHEKREQIAALAGVAPMNRDSGRKSGRRKTRGGRSKLRRVLFMAAMSAAKFNPVIHAFYQRLIEKGKPKSVVMVACMHKLLTILNAMLRKNEMWRPDFA

SEQ ID NO: 259880 - protein, 412 aa, unidentified
MEIYCGIDWAEDHHDIALADRDGKLLARRRISDDAVGLAQLLDLLAGYGDSPEELIPVAIETPRGLLVACLRATGRQVYPINPMSVARYRDRHTVAGKKSDHGDSIVLANVLRTDLHAHRPLPADSELAQAIAVLARAQQDAVWDRTQAHNKLRSHLREYYPGFLAAFAAAKGGITRPEARAVLAAAPTPAQAAALTAAQLRALLRQAGRTRGIDAEATRLREAFQVPQMRQLPLVEQAMGRQALALLGQLDAACSAAADLEQAVTESFNLHPDAGIITSFPGLGALTGARVLAEIGDDRSRFQHAKGLKAYAGAAPITRASGKTRSVTHRKVKNNRLNAAGYTWAFSALTASPGARAHYDRRKDAGDRHAAAQRNLFGRLLGCLHTCLTTRQDYDETIAFAASQEKPPKAA

SEQ ID NO: 259881 - protein, 488 aa, unidentified
MSRRKHRAPRPARPPSRPAATPRAAAAPPPRTSPAPDGYRDSLPVRHRHAAGIDVGSRTHWAAAPAADGTLDVAEFETYTDSLRALAAWLRDRGVTTVAMEATGIYGDPLFDLLEAEGFEVLLVNPAYTSQIKGRPKTDRRDCQWIQRLHAHGLLPASFRPQADVAVLRTYLRQRAELVRAGARHIQHLQKALELMNVKLTEVVNDITGLTGQKIIRSILAGERDPLTLARLRDRRCRNSLDTFVRALEGSWRDEHLLALRLALASWEHYQAQQRELEAVIAEHLRRMKKTTELPPLPPLPRVRSRSANEPRFDVRAALYYVTGVDLTALDGIQAVTALVVVSEIGLDMSRFPTVKHFCSWLGLCPRVKQSGGRVRSSRTRKGKGRAARALCQAARSLWRCRTSLGSYLRRLKARLGPPEATTATAHKLARQLYQTLKSGQLPTKETAAAYEERQRQQAVAALQKKALRLGLQVVAPGEAVAAAPATP

SEQ ID NO: 259882 - protein, 396 aa, unidentified
MVDSGARLLGKLRISDDAAGFQDLLQLLAEHGDSPDDPIPVAIETSRGLLVACLRASGRRVYAINPMAVARYRDRHAVSRKKSDHQDAVVLANILRTDTEFHRPLPSDSDLVRAIAVLARAQQDAVWDRTRAHNRLRSHLREYYPAILEAFATKRERLLSREARTILAIAPTPAEAARLTRGRLRTAVTRAGRQRRIEAETDRLLEVFRRTWLRQPALVEKAMGRQTLALLAQLDAACLACDGLASDTEELFLQHSDAEIITSFPGLAVLTGARILAEIGDDRARFTHAGNLKAYAGSAPVTRESGKSRHVTHRRIKNSRLAATGRHWAFAALTASPGAHAHYNRRRDTGDRYHAALRNLFNRMLGQLHHCLTNRQKFDEAIAFSTPASAPLAAAA

SEQ ID NO: 259883 - protein, 387 aa, unidentified
MQAPSVSTPITDPISTIFVAIELSQKTWLVTVHSPDKDKISRHKVEGGNHADLLALIGRVRDRAARTLGAVPAVASCYEAGYDGFWPHRLLTVAGITNYVIDPSSIAVDQRARRVKTDRIDGEKMLRTLMAYLRGEPRVVRMVRVPTPEQEDARRATRERDRLIKEQTAHTNRIKALLRLHGFAVGNPRRRDWLTGLAAQRDWQGQAVPPRILTEIEREHARLMLVRKQLDALDRAPAAADPTPAAVEMTRRSELLQRLKSLGPAFATTLTQEVFYKEFRNRREVASYFGLAPSPWQSGGIDRDQGISKAGNPRARCSAVELSWLWLRHQPGSELSQWFRQRTLNAGTRIRRIAIVALARKLVVALWRYLTTGLVPAGAVLKSAEAQ

SEQ ID NO: 259884 - protein, 412 aa, unidentified
MGKSDIEFEQVIDKGCGLDVHRDTVVATVMGKGLKTETWTFGTTTSSLNELGAWLESLGVTDGAMESTGIYWKPVLHVLRTYPLNLMVVNARHIKNVPGRKTDKADSQWICKLLMSGLLKGSFIPPENIQELRELHRYKKKLIGTIASEKNRIIRLLEDANIKLSSVVSDTSGVTASYLIRGLMEGRKDLENLISECYHGKLQSTPEQIKEAITGRLTPNHAFLLRSMQKHITSLEEQIGDIDMEIGKHIKDFEKEIELLQTIPGVGKEGAIGIVAEIGVDMSVFPSEHHLASHSGMCPGNNESAGKKKSSRTRQGNKHLKATLTELAWGATRTKKSYFKAKYESMVARRGKKRALIAIGHKILCASYHIIRNKEPFKELGYEYLMERKKKNRLEYLKRELREHGFTIEKVA

SEQ ID NO: 259885 - protein, 457 aa, unidentified
MEQALAQRNRSFPLKTGKSRAALTLTHANAAGIDIGSASHFVAVPPDRDAEAVREFPSFTADLHALADWLQACGIDTVAMESTGVYWIALYELLDARGFTVLLVNARHVKNVSGRKSDVLDCQWLQQLMSYGLLRGAFRPADAVCALRSLSRQREMLLRGQGRQVQHMQKALTQMNLQLANVISDVASGTGQKILRAIVGGERDGRALAALRDVRIRASAEQIAKSLQGNWRAEHLFALKQALDAFDFIGTQLAECDRELEAQLARLHAHEGSPTKGKRRSRARNAPKFDLREHLFKLCGVDLTRIDGIDVTTALAVISEVGTDMSRFVSVKHFTSWLGLCPGTRITGGKVLSGKTARVANRAAQALRLAAAALRSSHSALGAYFRRLCSRMDKPKAVTAAAHKLARLIYTMLTKGEEYADQGQDYYEERYRERALRQLSKRAQRLGMQLVAAPQAA

SEQ ID NO: 259886 - protein, 450 aa, unidentified
MPNKRNKVAQLPVIESNAAGIDVGATQVFVAVPADRDPEPIRCFETFTVELERLADWLQQCKIQTVAMESTGVYWIPLFQILEKRNIQVRLVNAHHIKNVPGRKTDVEDCQWIQHLHSVGLLRGSFRPDDEICAIRSLWRHRDNLIQLATVHLQHMQKSLDQMNLQIHHVISDLAGTTGLAIVDAMLAGERDPHKLAKLRDGRIKASEETIMKSLVGDYREEHLYVLRQSLECYRNYQKMIQDLDVEVKHRMGRLPSKVDPAAKPLGKERNPRKTPRRTEPLDLRLELYRAFGVDLTQVPGINALTAQVLLTEVGPTLGRFPTAAAFCSWLRLCPEPRISGGQVLSSKTRPTKNRAALALRLAAQALHKSQTFLGEYFRRMKARLGPPKAITAVAHKLARIVYHMITRQQEYDTTVFQEQERRVQDRKRNRLRAQARELGFQLVPVETVP

SEQ ID NO: 259887 - protein, 346 aa, unidentified
MEHYAGIDVSLELSSVCVVDAQGKIVKEAKVASEPEAVVAFFEALGFAVKRIGLEAGPLSQWLHAGLKEAGFETVLLETRHVKAALSAMTVKTDRKDARGLAQLLRMGWFQQVHAKSMASREVRALLVGRKQLLGRLIDVELSIRGILRGFGLKVGAVTRKGFEARIRELVTGQATLERIAEAMLSARAALKAEYEKLHQAVLAIVREDAVCRRLMTVPGVGAVVAVTFKSAVDDPSRIAKSKAVGALFGLTPKKYQSGEKDVTGGITRTGDEMVRTALYEAANVLLSRITRFSKLKRWGMDVAKRRGSKRAKVALARKIAVILHRMWIDGTTYRWAEAKPIAAQA

SEQ ID NO: 259888 - protein, 501 aa, unidentified
MSCRLRDEQPEPKEERLREVTVNVQVNGTGQVPVRRLVGIDLGIASEHTVRVLDGAGNKVCAARCVPARESLLAMEARALAGTPAGTRLEVVLEPTGAAWFPVARFLSARGHAVYRVSSAKAADLRKFYRRHAKSNGIDAETLARLPLAAPDGLTELELAAGDEAVLDRRVRACDRLTQQAARHKTRIKDLVRQLMPMTPLTGDVGKADLQVLERYADPRALLAAGPAQLAALIRSASRGHQGQARAAQWAAAAQAAIELYGPDDPAVPFADLAAEVATEIRLLRAIEAELQAHAAAREAAYRTVDPGQIARTLPGLAEVGGPAMTAIMGKPGRFPGGHHFKSFLGLAPRASETGETDRKGEPMTKAGPSPGRATMIRAADTARKLDPQLARIYYTQMTERGANHLKACCVVAGHLSLRLHAAMLRGAPYQLRDTDGTPVTPEQARQIIAANWTVPEDVRKRRRSRKTTGRTPQQAKKPVQRGDPPRPGSRPGNTPVNPAP

SEQ ID NO: 259889 - protein, 368 aa, unidentified
MATGLLAVGRDRFVPMVEEPRESRVRPSSGSCPEQMMGSESRMQGKEASEQETKAKSSVGIDVSKTWLDIHVLPSGETLRVVNDPAGIRRLRRWLMRFDLAIVVVEATGKWHRAVRRSVHASGIPVAVVDPFRVRQFAKAQGTLAKTDRLDARVLAQFGAVMNPAIRPPAPEALEELAELVRARHSAVDAQTALKNQLSAAQGRFLIRQLDRRLAAIARHIAALEREIKRRIAADDALARRYAILTSIPSFGFVVAITLIVALAELGACSAKQISLLAGLAPIADDSGERRGTRVVWGGRPAVRRLLYLAALTAARCNADMRVVYRRLTADGKKPKLAIIAVARKLAVLANSLIAQDRTWQPQPPKHA

SEQ ID NO: 259890 - protein, 338 aa, unidentified
MKKLSVTYFFGIDVSKKTLDFAFAKGLVFLSHQQIDNNYKSIIAFIRAKLKAEKISIAQCCFCMEQTGIYCNHLIRVLLDLGAQFSVVHSAHIKLSFGLTRGKNDKVDSKRIAEYAYRFNDKLEPYKPKRAVVDELDTLCKLRKKLMKMKNQISLPLNELKSFGAEAKYKLYKSNTAKSLEAIALDIKSVTKAIRQLIKSDERLKELDTWIGSVVGVGAVTTPALIVVTNEFTNDFSAKQMCSFCGIAPFAHQSGSSLNGKNKVSHKANKYLKTLLNMCAMSAIQTNSDLGRFYHRKLSEGKNRMSALNAVRNKIIHRIFAVVAGERKYERKLCLPAS

SEQ ID NO: 259891 - protein, 422 aa, unidentified
MSYRIAGIDVHKRMLAVVVSDVEVADEFAFERRQFGTTPAQLHELAEWLNVQQAEEVVMESTAQYWKPVWGSLERDWKPLAQQRADAGRMAGTLHLAQAQSNRARPGRKRDFPDAERLVKRFVAHELTLSFVPDPAQRLWRTLTRTKCQLTRNRVQLQNRLEALLEEAHIKLSSLVSDLLGASARRMLQALSEGATDPAALAALANVRLRATQEQLRDALGACQDLNPVYRRLVRMALDDLQLLERQINQLDQELADLLGPYHDQVQRLAEVPGLGVDSAQQIMAEVGVTAPSFPSPGHLASWVGACPGDDESAGVSHSHRSPKGNRQMRRLLNQAANAAVKSTGSIFQALYRRYVLRHGHKQTIGIIAHRLCRLVWKILHQGVRYEERGPAMNERAKRRRAQRMIRDLRSLGYHVEFAGAQ

SEQ ID NO: 259892 - protein, 378 aa, unidentified
MSSEKYIGLDVHQATISVAVLDSRGKLVMESIVETKAATILDFFAGLRGTLSVTFEEGTWAAWLYDLLKPHVDKLVVCNPRKNALLKDGNKSDRIDARKLAELLRLDNLKPVYHGETGVRMLRELARSYLTIVKDLSRVMNRLKALYRSWAIPCAGRDVYYTRHRAEWLGKIREAGVRRRAEQLYQQLDMLQHLRQQTRGELLAESRKHTITVRLRQIPSLGPIRSALAVALIQTPHRFRTKRQLWAYSGLALETRTTGEHRYVKGQLRRSKKQISIRGLNKDHNHDLKGLFKAAATRASVQPGLFQDFYQRSLAKGIKPTMVRLTPGAQDCSHYADSMEEGRKLRRCETEVASRLSVSGEEPLASPAIFFWWWSVGS

SEQ ID NO: 259893 - protein, 337 aa, unidentified
MTHPIYIPLGIDISKHHFDVALCKAPSTARSKSAFHTSQFANNETGFHELLAWLDQHQVRHVHACLEATNIYGHELAAFLYQREQRVSIVNPSQVKGYGQSRLQRTKSDQADAGVIAQFCRDLTPPLWEPLPEALEQLQQLSRRVEALLSMRTEEKNRLDSCRNPHLQTDLQAHIAYLSERIDDLKKLMREHIRAHEALAHQSQLLCSIVGIAETTATNLLAEIGVIQRFASARQFAAFAGLTPREFISGTSVRGKTRLCKIGNGRLRKAFYFPALSACRYCPEIAAFRNRLIAAGKTPMQAIGAVMHKLARIVFGVLRHDTPFDPSQLAVTTAPCS

SEQ ID NO: 259894 - protein, 438 aa, unidentified
MSNKVVFNLDGLFISVGIDVGADFSWMSIALPNQQFVGKPYKILHNSMDSLTAAVSKIKEAEELYSLESRIFLESTGIYHYPLFCYLRDKGFNVSVINPIITKNSTNINIRKVHNDRFDSKKAALVGLKPDLKVSLMPSDLALNCRNLCREYYDLMDNRSAYVNKLQGELRMAFPQYLGIFSKVTVNTSLTLLETYTSPAAFIEADRQEIIDAIKSTARFGLTYALNKYNAIIQAANEANEFGYIIDSNIKRIRLYIGFIRKYDEEIKGILGSMHELVDANEATDFVRQIHLIETFKGAGFLSAVSLMGEIGDFSAFSKPKQLFAYFGLDPAVKQSGKFEGTKTQMSKRGSAIARRVVHTLALQSIGTSRTGEAKNPVLRDYYLKKCESKPKLVAMGAVSHKVCNMIFAILRDNKPFEIITPQEHIKKHNAAKCDIAA

SEQ ID NO: 259895 - protein, 345 aa, unidentified
MQPMYYIGLDVHKRTISYCVKDSSGAIHAEGTIPATRFDLDRWMKTLPQPWSAAMEATVFTGWIYDHLRPRAAVLKVAHPLMLRAIAAAKKKNDRIDAKKICDCLRCDFLPECYMASTAIRERRRTLRYRNLLVRQMVQMKNKIGMLLMEAGVSYNKQRLHKAGYFRELLATNQDIDEGLQSLLRLCRETVVRLQRTESALVRSLERDSLLVERVERLMTIPAVGPITALTWALEVGDVQRFSSIKKAISYCGLCGAEKSSGNTVQRTPLSKQRNKHLQTTLIEAAKMAPRNSSELAMLYDKEKQKGNANRATLAVARKLVAYLMAVDRGQRNFQVVETSNGIAA

SEQ ID NO: 259896 - protein, 343 aa, unidentified
MQVTTVGLDLAKRIFQVHGVDAAGKVVIRRRLQRSEIAAFFADLPACLVGIEACSTAHHWARLIGASGHQVRLIPPSYVKPYVRRSKTDAADAEAICEAVGRPSMRFVPVKSAHQQAALLHHRARDLLVRQRTMLINAIRGHLGEFGIIAPAGRHRVADLVNLLQGADDAEVPALAREALQSLFAELSALEIRIKVVEAVIMREHRSNAVSRRLTTIPGIGPITASALAGTIADPLAFKSGRELAAWIGLVPRQHSSGGKQKMGRVSKQGDRYLRRLLTVGATAVMRRLPGKTDGLSLWVRALLDRRPIRLVSLALANKMARIAWAIMVRPETYKASAMTAAA

SEQ ID NO: 259897 - protein, 350 aa, unidentified
MLIIGCDYHPGFQQIAFLNTDGGELGERRLTHREEAEQFYGKLKEQNLCVRVGMEASGHARWFERLLHNLGFELWIGDAAEIRTKRVRKQKTDRQDAQLLLRLMMEDRFPRIWVADAQNRDLRQLLWHRHRLVQMRTRVMNQLHVVALNEGLRRKKALWRPAGRHELESLTLAPWASRRRQDLLDLLDQLTPKIQELTLALETEVGKRPVTRRLMTHPGVGPLTALAFELVIGTAQRFHCGKQIASYVGLVPSEESSGDRRRLGHISKQGNALLRFLLVEAAQVTVRSQPQWRSKFFHLAIRRGRKIAKIAMARKLAVHLYWMWRQGLDYGQFEKLGSHAGEPGNRHGVQ

SEQ ID NO: 259898 - protein, 368 aa, unidentified
MLARGTEDKEYAMSPKLNSAIAAIGIDIGKNSFHLVGQDRRGALVLRQKWSRGQVEARLANLPPCLIGMEACVGAHHLSRKLQALGHDARLMPAKYVRPYSKGEKNDYRDAEAIAEAVQRPTMKFVATKTADQLDLQALHRVRERLVGQRTGVINQIRAFLLERGIAVRQGLHFLRAELPSILAKRTDVLSPRMLRVIEDLAGDWRRLDERIENLSDEIAALARQDKGCERLMTVPGIGPIISSAIVAAIGGGDAFSKGRDFGAWLGLVPKQMSTGDRTILGSISRRGNRYLRWLFVQAAWVVLVKITPEGWERYGLRSWIEAAKQRLHRNVLAIALANKLARIAWAVLHKGRAFECVKTNATASQSA

SEQ ID NO: 259899 - protein, 350 aa, unidentified
MKRPKDKVIAGIDLHGNNLVIGVINQDGKRLTHRKLDCELEQVEEFLRPLKPQLQSMAVESTFNWYWLVDGLRAHDYPIDLANPAQIEQYSGLKHADDKHDAFHLAELQRLNILPKGHIYDAELRPVRDLLRRRTNLVHQRTALMLSFKSLYSRTTGAEMPLARLKQMSPKEAPGLYEHPANQLIAQIQLEHIEGLDRSIARIEKAVLACAREIPLYEKLLTLPGVGKILGMTITMEVGDIGRFPTDGNFASYCRAVDSRRLSNGKQKGENNQKCGNKWLAWAFVEAANFARRSDENCRRWYDRKQAKTSTVIATKALACKLAKAAWHIMAKPTSYDARRMLPELGERKK

SEQ ID NO: 259900 - protein, 347 aa, unidentified
MEMHQIGIDVSKTKLNAALLLAPAFLKKKTKVVPNNPEGFESLIEWLQRQAKDQKPFRFIMEATGTYHQPLALFLSDHGFEVCVINPALIKRFGESMAARTKTDEKDCVIIAHYGAKMNPKPWVPPSPRYRALEQLLRRLDQLDKMIRQEKNRLEALGSGPADQDVLDSIEKTLSYFEKEYKEVSKKIQNHLDQHPDLKDDVKLLTSIPGIGERTALRMTTALEGGSRFASARQFAAYLGLTPRQNQSGNIKGKTSLSKMGPSALRKALYMPSVVACQCNPDIHALYERLLKAGKTKMSALGAAMRKMAHLAFGVLKTRQTYRAFYSPILEPEVGKEANPLAVGLLS

SEQ ID NO: 259901 - protein, 427 aa, unidentified
MEHILQPIGKAEPEFAALVAIDWADQKHYWSLQVVGQEGLQRGTLDHTPEAVEVWMMELHLRFGGRPLAVALEQRRGALAVMLSKYAHVYLYPVHPTTLAKFREAWYPSRCKSDPGDADLLLEILTVHRSRLRRLDPDTVEMRFLQNLVENRRKLVDERTALSNRLTDLLKLYFPQILGWFTDVASAVVGDLLTQWPSLQHLQQVKPAKLEKFLRAHHCAEIPERLFQIRQAIPAAHDRALLDSAWYLVTAWVQQMAVLRESIRQLEKCIVEQAAQQEDWPIFQSLPGAGAALAPRLMVALGTQRDRYSSAGELQSFSGIAPVKEASGNTQWVHFRWACPKFLRQTFHEWAACSIAQCEWARAYYQQQKARGKQHHVAVRALAFKWMRILYRCWKDRQPYREEIYLASLAKRRTALVAALAQSVQMS

SEQ ID NO: 259902 - protein, 320 aa, unidentified
MDAVLGIDIAKAKFNVTLLFPDGRRRRKACANSPAGCAELVAWMTRQGASHVHACLEATGTYGELLATTLVEAGHRVSVLNPAIIHHYAKSQLARAKTDRVDADVIADYAAKENPPAWTPLPREVRELQALVRRLDALLGMQTDERNRAQAGLLTPAVRESIDAVLRHLEEQIAAVRQQIRQHMDQHPGLRTQRDLLTSIPGIGEATAALLLAELFNKAFTSARQAAAFAGVVPRPNDSGTHQGRRVLCKLGPGRLRKGLYFPAIAALRFNPSLQPLAYRLRGAGKPPMLIIGAAMRKLIHLAFGVLKSGRAYDASLAKA

SEQ ID NO: 259903 - protein, 334 aa, unidentified
MKQFTKYVGLDTHKETIAVAIADAAGGKPRYYGEISNTPTALTKLMKDVSPNGEVASYCYEAGPCGYGIYHQISGSGHYCSVVAPSLIPTKAGDRVKTDRRDSENLARLHTVGELTPVWVPDHEQEAIRDLTRGREDMKHLERQARQRLSAFLLRHGRRYTSGKSKWTQAYWRWLESLKFDHRVQQIVFQEYIDSVKMQQQRVGDMTRFDSPSKLMSYLGLVPSESSSGTKTNRGGITKTGNGHVRRVLVEAAWCYRFPARKTAALQRRAEATSDEVQAIAWKAQKRLCGRYRTLNQRGLQVQKTVTAIARELVGFIWAIARETMPRTSVSANA

SEQ ID NO: 259904 - protein, 319 aa, unidentified
MQTPAVVLNIGVDVAKDEIVVACSESSFPVRQIANQHAAVLAFLKNLPVGSRIGVESTGSYHELFAEAAHQLGFLVFLLNPKDTRHYAKAVGLRGKTDRVDAELIARMIAHEHTKLHPWVPPTPQQREMDRLIKRRATLVALREAAAMSLHELDGFAADLKALRTRFNQLIARIDLRVKALVEADPERKQNFARLCTITGVGPVIGTALVNTLERRPMKSADAFVAFTGLDPRPDDSGQHRGKRRLSKRGPAELRRLLYMAAMSAINTKPWRPLYEHYRTKGLSSTATLVILARRIARTAWSIYTHKTQFYPERLTRIA

SEQ ID NO: 259905 - protein, 348 aa, unidentified
MHFKNIHADHFAGIDVHPNRSQVCVMDKTGQVMLNRNFKNSITNLKNLIQPYQANIAVGCESTYTYYWLADGCHESDIPFYLGHALYMKAISGNKQKNDPLDAKTIANLLRTNYFPEAYPYPKEMRPTRDLLRRRHRLVSIRGEAYSHIKMTAHQYAIDNIGSLNLKQSADQEEVLSIFRSFGIEQMILSDLDIIRALDPVIEGIEKHIRVCAINHNPKDYALLQTVPGIGDMLSMVILYETHDITRFPKHQNYASYSRVVRCDRTSSGKKVDRKNQKIGNPYLKWAFSAVIVKGQSSKLIGKYNKRLESKYGRARARARIAHKYCKAVYYMLKNGQPFDENQFVRHS

SEQ ID NO: 259906 - protein, 337 aa, unidentified
MGKEYVGIDLHRRRSVIYRMDQAGNKIDSVRVDNDPIHFAKEVSAAPVGSDVIVEATYGWYWAADLLAEMGYQVHLANPHGNDWGHRRVKNDERDARDLADLLRLGRLAEAWIAPPKTRELREMVRFRMKLCNLRTGLKAQVHAVMAKNGILPSRGDMWGPGGAAQLDSLELPDAYFNRIAVLRDLVELYDREIGFLDRDVHRILCDDAGYNAVQAIYGVGPVFAAIFVAEIGDVSRFDSPKALCSWAGLTPKHRESDIHVHRGKITKQGSRLVRWAATEAVVRYHGGDPFRGKFEAIAERRGKTKANVAIARRVLTLVYYGLRDGEIRCLAGQEAA

SEQ ID NO: 259907 - protein, 404 aa, unidentified
MELTAIYRCVAALDVHQSKLTVCILYENESGEIITELKEFGGFKRDRRAMADWVESFQPELVVMESTGIYWKSPYAALEKQGLTIWVVNARHVKQVPGRKTDFADAQWLAILARNGLLRGGFVPPAVFRELRLIARQMQKLTGILSGEKNRLHKILSDGGIRLGVVVSDIHGKSAKAMIKGLLAGESPEQVLKYASNRLKASEEELLDALAGDLSPSHQFVLTELMAHIDELEARIETFRQALLQGLAPYQAILRSLQTIPGLDEAGAALLLVEIGDDMSAFGTPERLASWAGVCPGNNESAGKKKTGKTRKGNPYVRRILCEASNAASRTQCRLQDMFKGLLIRRGRKRAIFALAHKILKIVFLLIERGDYYRDATVDYEKLSVQRNAPRWIKTLKKYGYIAA

SEQ ID NO: 259908 - protein, 370 aa, unidentified
MHQSSTLYIGLDVHKESIAVAYVAQEHHAEVVSLGNIGTRQCDIDQFIRKMQSKSKHLIFVYEAGPCGYWLYRYLTKKGHICWVVAPSLIPKKPGDRVKTNRRDAIKLARLMRSGDLTPVYVPQVEDEAIRDLCRAREDTIRALKAAKFQLKAFLLRHDIRYTGRATWRPAHLRWLSEVVCPTPAQQIVFQEYVRAVTDHTERLARLEQALTDQVQTWRLAPVVDALQALRGVQFTVAVTTVAELGDLTRFDNPRQLMNYLGLTPSEYSTGERRQQGGITKTGNSHARRALVEGAWAYRYPAKISRLLQLRLEKVPKPIQDISWKAQIRLCKRYRQLSARGKNANQVVVAIARELSAFMWAIAQEVPLTS

SEQ ID NO: 259909 - protein, 338 aa, unidentified
MLYVGLDVHSRQSSLCILNAQGGKINQIQVNGPRPAVVERLRKLDEPFSVCYEASIGYGQLYEALRPLAAHVAVAHPGKLRLIYSDKRKNDRVDAQKLAKLLLLDMVPRVHVPHVDVRAWRALIVLRQRVLQQLVRAKNQIRGVLRENDLAGPKWLWSRKQLAWLESLELHPVAMLRLELAIEELKSVTAKIKRIEKELQTYADRHPAVQHLMTIPGVGIRTAETFVAWVDDITRFRRTRQLGAYFGLVPCQDQSANKNRLGHITRDGPPVMRKLICEAAWTAVKKCPAFKAYFERITAGKPERKKIAIVATSHRLIRVMGAMMRSGTAYDANYRNNG

SEQ ID NO: 259910 - protein, 357 aa, unidentified
MSKYITEWTVGLDLGDRKSMICMLDRDGKVVKRVSIETRQEALKKFFARFHDPVRVCVAIETGTHSPWVSHLLMSRGFEVLVGNARKLRAVWDTVNKSDVRDSELLARIARFDAELLCPIRHRGREAHMDLAVIKARDALVRSRTDLINFVRGTVKAAGMRLPGCSAEAFAHRAAEHVPEALRPALNPVLATVATLSAEIRRYDARIDSMCEERYAETVRLRGIDGVGPITSLAFVLTLESPGRFRKSRQVGPFLGLTPRRDQSGETDRQLRISKAGNGYLRRLLVNASNYIMGPFGPDCDLRRYGERIAARGGKIARRKAKVAVARKLAVLLHHLWSHPEEEYRPFSRKHRRKHVA

SEQ ID NO: 259911 - protein, 338 aa, unidentified
MLYTGIDLHKRTTVLATVDEAGRVVREASVPSSRSAVARYFAELPAASRATVEATSCWYWLRDLLEREGVPLTLAHAKFVKAIAYAKVKTDAVDALTLAQLHRADLIPRAHMVSPELRPLRDLLRTRLQLVEKRVSAKNSIHRLLEKYNVAAPAALPEAATLQARLYQEQIELLGRQIRRLELELRPRLIANEDIQRLLWIPGVGWRVAFTLYLEIDGIERFPSARQFFSYCRVVPGAHNSAGKSRHSRRKDGNRYLKLALSHAAIRAIQHYPEIQRFYRRKARQKNPAIARTLVQKEIARAVYIVLKEQVDYNHTFKGQPLQRRKSARWPRRASPDA

SEQ ID NO: 259912 - protein, 370 aa, unidentified
MKFIGIDIHTNRFTCCYLFDNPKEKQVATFELDAKGLSSFCLTLDKDTYVLVEATVNTFEFVDKFRELVKEVIVANTYQLKSVGIPGKKTDKLDAAKLVEKLKTQIVSGVQQIVPVTFPPKEIRELRSLFATYRTLRKKIGCTKNRIHSLLKENLYPFTKEYIFGKKTRVEIRKISPNYTLSFQINLLMDTLEQLEAAFDRLVVEIKKAGIKFIPTIKILTSMSGISVITAIAIIADVIDVSRFKNAKHFASYLRSAPRVESSNDKTIIKSTTKAGRKLSITLISQSLNHFRDSNRTLNQFYERASIYKKKGIVRMALCRRVITQIYQMLKKQEYHYFYNPVLHKKKIIEYKRFLKGENIIFPENFQIAA

SEQ ID NO: 259913 - protein, 373 aa, unidentified
MSEFNKFVGLDVHKSTIAISIASDDGAEVRYFGEIKNTKEALINFANKISQGSLKLSFCYEAGGCGYEVYRHLRNIGHDCMVVAPSLIPKKAGQRVKTDRRDSLNLARLHRARELTGVWVPDAMNEALRDLTRAREDMKHLQRQAKQRLLAFLLRHGWTYSGKSNWTKDHFNWLETVKFQHAAQQIVFQEYVDTVKYCGKRVESVTQQIEICSRESAYWPVIESLMALKGIDLISAATIMAEIGDLTRFDSAPQLMSYLGLVPSEHSSGSSVRRGGITKTGNSHVRRVLVEAAWTYRFPARKTAHTQKRAKVTTEAVQEISWNAQKRLCQRYKELNANGKIKVQTCTAVARELAGFVWAIGQTVPLKPTANVQ

SEQ ID NO: 259914 - protein, 339 aa, unidentified
MGLHCAVDLHGDNGFYGIVNDEGKRLFKGRITNDLAEVLRVLEPYRPELSEGVVVESTYNWYWLVDGLMKNEYKVRLANPAKMTQYNGLKNSNDETDTFFLTELSRLGILPEGYIYPKENRGVRDMLRRRLMLVHQRTAHVLSFKTMVARELGKNISAASIEKMIVDDVEGMFDDQNVVLMGQTNIQTIQFLRTQIRQIEKAVEGQVKLKPEYEKLQSVPGIGRILAYTIMLETGDINRFKKVGNYTSYCRCVKSTKTSNDKKKGENNRKNGNKYLSWAYVEAANFMRRYSPEAKAWYQRKLTRSKQVVATKSLASKISKACYFIMKDQIGFDVTKIFG

SEQ ID NO: 259915 - protein, 316 aa, unidentified
MKYVGLDWAYRRAQWCALAPGGEIAGEGRIAADRDGLARLVLELGDEVKACLEMMSGALWVRDELVACGWQVEVADARKVKTVAPLAAKTDKVDARLLAELSRRQLVPGLWLPSLNERALRERLRRRMHLVRLRTSAKGRIFGLQTQWGVRVSLARLRRADGLSLLERAGVPEVWRRSVGECLALIDFLDARIAPLEAELRPFAQADPRAVLLDTIPGVAELLALTMAVEIGELDRFTRPEKLVSYGRLAPRVRQSGDGRARSGPLSKSGSRLLGWAAVSPNRRGANRIPGTSSTSTSVAAPATRTPRKPRSRARS

SEQ ID NO: 259916 - protein, 351 aa, unidentified
MSKVYIGIDLAAKYCWGAAMDREGDLRSLERFRTSEENLIAYVKSQEGEKMVLLEECDLAGWAQKVLVPHAHKMVVCDPKRNLWIHKDAVKDDKIDARKLAEIARLGGYKEVYHTADESIYHLHLAVKDYDRLVKRTTGLKNQIKARLRAEGIICEGAKVFGKKGRQQALCLVASPLLREMIASDYEMLDFLLRKQAQAKGRFVRLGSEIPIVRALQDIPGVGPVGAARFCAYVKCPHRFSEKGKLYRYSRLGITKHNTGGQEIRHQHLDRAGNGTLKDVSRKAFQAALRMRGDNLIKRAYRSALESTGSQVHARLTTQRKILAIMWAMWRCGTPYDDDYDRKKVACKARL

SEQ ID NO: 259917 - protein, 424 aa, unidentified
MKVTFQTCCGVDVHKSFLVATIIKTTGGIEPSYQKRRFSTFNNSILEFKKWLLENECLYVCMESTGKYWIPVFNLLEDEINVTIANPKWVKAVKGNKDDTKDSKWIGDLFRLGLVRGSYIPCKKIRILREFTRYRYKLVSCRSSEKNRYQNALTVCNVALDSVVSDVFGKSSTSIIDYLLEQSGTSIDHEMIASKLLKRLKAKEDAVIESIEGYQMTDSQKYRMHLVRAHMDYITAAINDVDSEIESLISSDPDYQNAAELLYTIPGVKHDSAITIISEIGIDMSQFCTSKRLCCWAGLTPGSNESAGKKKSVRITRAGVYLKPALVQCAHAAVKSNKSPYYKKKYESLVKRRGKKRAIIAIARMILTAIFQMLTTGETWNPCDLYKIDMPEALLEKQKQKAIKQAQKLLIREGLLPPTEPIAS

SEQ ID NO: 259918 - protein, 341 aa, unidentified
MKITIIGIDLAKDVFQVHGIDERGKIVLRKQLKRTQMAPFFANLAPCLIGMEACGSAHYWARKLQDDGHTVKLMAPQFVKPYVETNKHDAADAEAICEAVQRPTMRFVPIKNIEQQAILAVHRARQGMIKARTAQANQIRGLLREFGLVVPVGIGFIYQRVPDLLDQASNDLPGVFRELMLRLVEHMKDLDRQVNELERQINVWHRSNALSRKLEKVPGIGPITASALVASIGDAKSFANGRQLAAWLGLVPKQHSTGGKTHLQGISKRGDRYLGTLLIHGGRAIIRCAGQKLATTNSWFNRILARRHKNVVTVALANRNARIVWALPAHDREFRADYASA

SEQ ID NO: 259919 - protein, 344 aa, unidentified
MAKTPIATLGIDLGKNSCSLAGMDAAGAVILRRRMTREGLIKFTAELPACVVAMEACCGAHYLGRTFEAQGHMVRLMSPEYVAPYVKAQKTDDRDAEAIAEAATRPTMRVVTLKTEEQLDLQVLHRARERLVASRTRLTNQLRAVLLERGVILPKRRSCLAKRLDEMMKEGELAVSPRAIRLLQDLREEWATLDRRIAAYDHELASLTRDDEMARRLATIPGIGVINATGLLAAIGDASAFAKGRDLAAWLGLTPRQHSTGGKTKMMGISKRGNKYLRTQLIHGARAALVHFTKRMTPVGAWVRQLLTRAHPNVVVVALAAKLARIAWAVLRHGRNYEQGAAMV

SEQ ID NO: 259920 - protein, 344 aa, unidentified
MDHFAGLDVSVKETSICIVDDTGRIVKEVKAASEPQALLKVLGNPAYRFKRIGLEAGPLSQWLFSGLAEAGLPVVCVETRHMQAVLKAQINKTDRNDARGIAQMMRAGLYRPVHVKTLRSQKLRMLLTHRKLLQSKAIAIENDLRGTLRNFGLKVGMVGKMRFEARIKELVESLPDLAELVEPLLIVRRSLREQIVILHRRLLAIVRDDEVCQRLMTTPGVGPVVALTYRATVDVPARFRKSKAVGAVFGLTCARYQSGEIDWSGRISRCGDEMMRVMLYEAAQSMMRSKKWSWLKAWAMQIARRRGMKKAIVALARRVAVIMHRIWVDGTEFRWTREQAAAAA

SEQ ID NO: 259921 - protein, 385 aa, unidentified
MAQFEDLSRCLAAFDPNSTLVMVVEMSQSSWLVAGLVPGVARQPLKKLEPDGAALLRLVQRWRSEAVKAGRMIDRIVLAYEAGRDGFWLARWLRSHGIESYVIHPTSIPVSREHRRAKTDRLDAAMLLRALLGWLRGEPKHCAMAAIPTIEEEDAKRPGRERESLVSERTRIVNRMKGALARLGIRGFKPELRKAAQHLGGLRTPESTPIPPNTLGEFRRGMARLAVIHEQIKAIEVARLEHLEQAPDSGPPAMVRLLARVLGIGVETADMLVYEILYRKLRDTKAVARYAGITGSPDESGAKRREKGLAKAGNARVRRGLIQLAWRLLLFQPDSALVQWYRARIAGGARKTSMIVALARKLLIALWRMVNTGEIPDGFVLRPAV

SEQ ID NO: 259922 - protein, 312 aa, unidentified
MSEPLYVGLDVSKQHLDLACEPARPPQRVPHTDEGIAGLVAQLQPLGPALIVLEATGGYETDVATALALAGLPVTLVNPRQVRDFARALGRLAKTDALDAQVLALFAARVRPEPRPLPDEAQQALAALVTRRRQLVEMLTAERLRLPLAKGPIRRDVQAHIHWLEQRVKDTNTDLRAALKTSPLWQAATRLLQSVPGIGPTTAAVLIAELPELGRLTRRQLAALVGVAPLNHDSGQHRGIRTIWGGRAPVRRALYMATLVATRHNPVIRAFYRRLLTAGKPKLVALIASLRKLLTILNAMIKAQQPWAPSHP

SEQ ID NO: 259923 - protein, 348 aa, unidentified
MQSKSQIRSIGIDLGKTTFHLVALGNRCQVIVRKKFSRQQLLNYTANLPSCLIGMEACVGSHFLGRALRDQGHEVRLIPAQFVRPLVKSNKNDYRDAEAIAEAVERENMRFVPIKTEDQLDVQALHRVRERLVSRRTSVINQIRAFLLERGISFAKGPASLRRQMPEILENADEKLTTRMRRLLDFLWQEWKHLQLQIESLSEDLELIASSDEACARLQQIPGVGPLVATAVVSAIGNGAAFHKGREFAAWLGLVPGQWSTGGKTKLWGISKRGNPYLRKMFIHGARAVVLRAKREASYLGQWMKSLEGRAARNVVIVATANKLARISWAVLSSGENYHPMPAVAVVS

SEQ ID NO: 259924 - protein, 350 aa, unidentified
MELRKQAIGIDISKDTFTACLASQPEHGEIQLSPVEVFINTKSGFNRLLRWAKPMVDTMVPLVFLMESTGVYYQNLAHHLHGVGKTVHVVLPNKSSHYGKSLNIKTKTDATDARVLARFGVERDHRAWEPPSPLLAELRNLTRYYVQLQEQKTTINNMVHSKQAAHNVQAFILASNKQLVRQIDRQIERCKQQIEKLIASDSLLSDRVDQLASIKGVGRLTVAVILAETRMFEGICNTRQLASYAGYDVTERESGTSVKGKTRISKKGNRYIRNALYFPAMVACRFNPDLKEFYGRVIRNKPSKMIGQVAVQRKLLLLMYSLHKNGTRYQEGYNKVAPTPKAEATLDSIA

SEQ ID NO: 259925 - protein, 342 aa, unidentified
MRYIGLDVHKDNITACVLSDAGKVVFEKDFKKTDGTCDCLAELFDHVGKSGFCVLMETGTYAYPPYRFFRDRGCDVDCVHAQCLRMITQTDKKTDKKDAMTIARMLRLWKRHDIDLQIAYMPTREQCELKDLCRYREEISKKIGDETRRIKSQMSRNCQVLPEGMDSFQIRRNRRYVLEKYGTDVTLSRRMKALEQLFEERDIVQKQVESCLPDDPNVKLLEHIPGVGRQTAVQLMSMIVDISRFEDSEKFCAYFGLVPRVRDSGGKEHHGRMTKNGDKMMRMLMERVTEAHVRNCDSFITDYYRRLCPQMGTKKALITTSRKMLMTVFAVLKKQQEFRTRP

SEQ ID NO: 259926 - protein, 347 aa, unidentified
MTIVEAARGVTGGVDTHLDVHVVAALDPLGGLLGTEHFETNSAGYKALLAWLESFGDVSKIGIEGTGSYGSGLTRYLRRVGVEVIEVDRPNREERRRSGKSDPLDAVEAARAALSGRAKNLPKSRDGAVEAIRVLVVAKRSARQARVKALIQMRHLGFSAPEQLRCRLKGLSVSALVAEGKGLRPTRSPDPVTAATKASLSSLAHRISALDDELAELDERIEALLEATVPELLGIFGVGPDTAAALVMAAGDNPERLHSEAAFAHLCGVSPIPTGSGKKSGKVRAHEGGDRQANSALWRIVMVRIAHDPRTQIYFERRVKEGLTKNEVIRILKRYVAREVYRYLPRG

SEQ ID NO: 259927 - protein, 368 aa, unidentified
MNEKLRFLGLDVHAETIAVAVAEPNGEVRSLGMIANREDSIRKFMRKLGWPEHLRACYEAGPTGFVLYWQLTQLGVKCDVVAPSLVPKKPGDRVKTDRRDALKLARSHRSDDLTAVWVPDEGSEALRDLVRAREAAKQDQLRAKHRLTKFLLRTGQRPPLGVKAWTEKYVEWVQQVRYTHPAQEATLLDCLNEVQHMEERVKRLEQSIVEVIQLAPAPMQEVVRGLQALRGIAHISAVTIAVELGARDLMGYSGAFPSEDSTGKRIRRGGITKSGNAHLRRIVVESAWSYRHRPAIGARLRRRQEGLPAEITEIAWKAQNRLHKRYMTLMARGKEQRKTMTAIARELLGFIWAIGIKAEAACKQQMTA

SEQ ID NO: 259928 - protein, 369 aa, unidentified
MSRIYIGLDVHKASISVALAEDERGGEVRFLGEIENTKASISALLKRLSKKYEVLDFCYEAGCCGYNIYRQIVEAGHLCIVVAPSRIPMASGDKVKTDRRDAQRLAVLHRAGDLTAVWVPDREHEAMRDLVRARMDAMNHLMRSRQQLLAFLLRHDRVYESGRTYWTYRHRHWLAKQQFDEFAQNIVFQDYVEAVWYGLERREALDRQIQELVPQWSLGYLVEALRSFRGLDWVSASTFVASVGDLTRFDTPAQLMSYLGLTPSEHSSGGKRYRGGITKTGNREARRMLVEAAWCYRYPARVAQEKSDVLVKQSKVVRDLAWKTQTRLCKRYRQLSNRGKKSTVVATAIARELCGFIWALAKELHPDPV

SEQ ID NO: 259929 - protein, 333 aa, unidentified
MKQEKVAGIDVACKTLALAMRTGEQTGKVRELANTASGHQAVIKALKSAGVQRVCLEATGAYHLDLALALDAAGIALMVVNPTAAKRFAQALMTRSKSDAVDAGVLAQFAQTMPFQPWQSPALPALELRACARRLAALVKARTQAKNQLHAASQTTSTPAIVLADLRLTIAQCADQIEQLRAGACALIDADAALHEVFTLLNSVTGIAAASAIQIMGEILVMPADMQAKQWVAQAGLDPRHATSGTSVNKKPHLSKAGNRYLRLALYMPALSAARHEKHVSGYYQHLIVDRGLKPIQAVCAVMRKLLHAIHGMLKARQPFDGSRFYALVETPA

SEQ ID NO: 259930 - protein, 328 aa, unidentified
MHFIGNDVSKKSVDLAYFDHSSHRWSKRCELNNNSKGWDALIQWSEKQTQAPREDICIVMEATGVYHLKMAAYLSREGLNVIIVNPQQASQYAKSQNRQNKSDKLDARSLQEYGAQLKKHHLFVPDSAEISQLKALLSRMRQLEKDRQRERNRLEKCDFQEGSSWARTSIKRLIEHITCEKKLTQKQIDRLINQNHDLKQNQELLRSIKGIGKLTSQWLLPLLSTQRFNNAREVAAFLGLVPCHKSSGTSLKTRGRLSGRGDANLRARLYMPAVSAITHDPAMKTFYEELVAKGKPSKVAITAVMRKLVHVCYGVIKHQTPYIRNFAA

SEQ ID NO: 259931 - protein, 482 aa, unidentified
MPKTNVKNQGFQDRNVRFRKKLEMINPDASFIDVGSFEHWVCIPENRTDKNVRQFGAVTSNLYEIRDWLLSYKICSVAMESTGIYWIALYEILEAAGLEVCLVNARDLKSVKGRPKTDKLDCQWGQRLYSYGLLKASFRPPKEICEIRSLWRMRGQLVQEASRTIQRMQKALHEMNVLLPKVVSDITGKTGMLIIKSILSGERDPVKLAQLKDRRVRANEEEIAEALRGDYRTDQVYLLSKAVEHYEFMQKQLTDFDSEVKRNLDKLDKRTEIKEATRNANAKEHRKYKKRYANAPSFDSRSMVHEVIGIDPACIPGLSSTLILGILLETGLDLSKWASKKHFSSWMGLCPNPNISAGKDLGTRTKKCANRAARHFRIGAMSLTKSHCYLGDFYRRMRAHHGGAHAITATAHKLAAIFYTLVKNGESYKEIDPIEYKKAIKELRIEQLKKRATKLGFELKPLPSKVEKMLATLENQAEVAEV

SEQ ID NO: 259932 - protein, 259 aa, unidentified
MDHIIRIGMDTSKHVFQLHGVNAAEEPVLRRKLRRNDMVVFFERLAPTIIAIEAAGASHHWARLLRSFGHEVKLIAPQLVKPYVKRGKNDAADAEALCEAMSRPTMRFVPVKTAERQAALMLLGLRDRLVRNRTQLGNAIRGYAAEFGLAAAKGIAHLAPLLDRIQSDESLPGLARELFAAHAKEYAQLQAQIDEVEGKLMAWHKTNPGSRRLVQIPGIGPIGAAMLIMKTPAPETFRSGRQFAAWIGLTPKDHSTAGK

SEQ ID NO: 259933 - protein, 365 aa, unidentified
MFVAGLDAHTRYVIVVVVDRMGELVLKSTRVRMGDAERLLTVLAPYRPLDAVMETSSAWPWLHEVLTAAGIQFVLAHARRLRAIAEANYKSDDIDAELLARMRLARLIPEVFPTPAAQREWATLLRHRATLVAHRTALVNRLHGQLHTRGLHLERGRLLTRAGRRWLRTEAWSHLSAEQRAVARSHLRVIAGLRPLIGAVDRRIAGVAVAIPEARLLMTIPGIGPQRALVVCAEALPVGRFRTPGHLASYAGLVPRSKQSGERPVRHGGIPAGVNRWLRGALVRAVVSHVQHQPASTLTAYYQTQKARVGWPVARVAAARKLARVIHAMLRTGTPWTTPSTTPSTTGSLGPNGVSSTNRMPHPTA

SEQ ID NO: 259934 - protein, 351 aa, unidentified
MMLIGVDYHPSFQQIAFFVEETGECGERRLGHEDGEAERFYRDLQQRGTLVRVGMEATGYSRWFERLLAELGFQLWIGDPAQIKAKRVKKHKTDRNDGRLLLRLMREDNFPRIWIPSAENRDLRQLLWHRHRLVQMRTRIMNQLQALAMNEGQRKKSKLWSESGRVELEKLVLAPWASRRRQELLQLLDCLNPTIDELTAAAEQEARKRPEVLRLMTHPGVGPLTALAYVLIIGTPTRFARGKQIGNHVGVVPSEDSSADKQRLGHISKQGNSLLRFLLVEAAQAAARIHPDWRRRYVRLAMRRHKSIAKVALRRRLGVRLYWMWRNGCDYSPSFEFGSHAGQLETGHGVK

SEQ ID NO: 259935 - protein, 339 aa, unidentified
MKEVTTIGVDLAKNVFQVHGVNHAGAVVVRRALRRSQVLAWFAKLPPCLVGMEACATAHYWGRELRKLGHEVRLIPPAYAKAYVRRNKNDAADAAAICEAVSRPTMRFVTIKTEQQQAVAGIHRVRDLLIKQRTMLRNQLRGLLAEFGVVAAQGRRGLNELLAILSDPEDQRIPSPLREGLMAIMETWRGIERKLEEIDRQMVAAGRADATCRHLVTAPGYGPILSSAMAALVIDPGAFKRGCDFAASLGLVPRQDGTGGKVRLGPISKRGNGYLRRLLVNGATSLIKCQRVRQDPWVAKLLASKPRKVVAVALANKLARIGWALMTRQEDFRSRLAAA

SEQ ID NO: 259936 - protein, 342 aa, unidentified
MLYVGIDVAKNKHDVTALNVQGKTVLKPLTFSNNKAGFELLDLSFRQLNQDCLIALKLLSDPNREQFQFLHEQGYKVYTYNPLLIKEFAKSLSLRKTKTDKKDAHGIALKLLSDPNREQFQHDNRQVELKILARHIHRLKKKQSDWKVQYTRCLDIIFPELDKIVGKHSEYTYQLLTRYPNPQKRIEAGFDKLIEIKRLTASKIQDILSVAPRSIGTTSPAREFEIIEIIKHYKRLIDKAETCVNDLMAEFNSVITTVTGIGGRLGAVILAEIRNIHAFDNPAQLQAFAGLDSSIYQSGQIDLAGRMIKRGSPHLRWALIQAAKACARFSPAFKAYLKTKLE

SEQ ID NO: 259937 - protein, 321 aa, unidentified
MIKNSTILGIDISKDSFDVFSEEGGHKSFRNTVEGFRLFYKALSLDHWVVMEATGSYHHRLALFLHQKGICLSVVNPLVIKRFIQMKLNRVKTDKSDARMICKYGEEASLDSWNPDPEYMRECKQLQSVIGVYTKQQTALKNKLHSLNSSGVSSGCMVRSVKRQLKALKREITTLQDKMEALIKEHEQDVYTRIQSIPGMGKKTAMLLIVATNGFRDFESSKQIASYLGLAPHERSSGSSVRGRARIGKNGHPAVRNHLFLCSFTACMYNPQCKALYERIVAKGKSKKLALIAVSNKLIKQAFGIAKSGLYYDENHRGRLA

SEQ ID NO: 259938 - protein, 357 aa, unidentified
MDVHADKIQIAVFWGNEQEPREEYETDTDSRSLKRLLKKLTALPGKVRCIYEAGPCGYELQRFLSGNEISCDVAAPSLIPQRAGDRVKTDRRDAKKLGRLYRSGELTTVAIPDKSQEAVRDLVRAREDALEDVRRKRHRLEKFLLRHGYRYREGRPWTLAHSKWLGGICFEDAFLKTVFDEYKISVDQAEEQLQRLSLAVTEVSTTVQYKKPAGFQMTLRGIQTLTAMTILSEFGDLRRFGTAREFMAAIGLVPSEFSSGAKTRRGSITKTGNAHVRRVLVEAAWHYRHKPVPGKAVKARRAGQPLGVLSIAQKADVRLYRKFRRMTDRGKRSTIAAVAVARELAGFVWAIGQQTRA

SEQ ID NO: 259939 - protein, 365 aa, unidentified
MKKSSKKQQGATVAESKPAQVVGLDLGDRHSHYCMLSSTGEMMEEGRIQTTLAAMEKHFAGEPRMRIALEAGTHSPWVSRWLKSYGHEVIVANPRKIPTLTKSESKNDRNDARQLARMAAFDPELLHPIEHRSPGRQQDLNLIHTRSVLVRARTMLINSVRGVVKSAGERLPACSSESFPEKVPGAVPPSLKAACIPLLEQIGQMNQAIAAMDKQIEGLDKKYPEIAVLRTAPGVGPVVAACYVLTLDNPQAMETNRQAGAYLGLRPRQQQSGDSNPQCGITKTGNTYLRSLLVQSAQYILGRRGPNSELRCWGLKLAASGGKRGKKRAIIAVARKLAVILLSMWRNRKKFEPFPQSAAQLATAV

SEQ ID NO: 259940 - protein, 343 aa, unidentified
MELYIGMDVSLKETAICVLDGSGKIVREGTVLSEPAAIAEFVKTKADGAERIGLETGPTTTWLWHELRALGLPVICIDARHAKAALSLQVNKSDRNDAVGLARIMQTGWYKEVQVKSLPCHRIRAVLNSRAQLVKTKRDLENEIRGLLKNLGLRIGKAGGKAFHRRAEELVGEQPLLHKAIRPLLAVRDVVCREIASLTREVLTLARDNAESRRLMTVPGVGPITALAFCAAVDDPHRFRRSRSVGAYFGLTPRRHASGEVDWTGRISKCGDAMVRTYLFEAAGVLLTRVAQWCKLKAWGHRLWKRIGFKKAKVAVARKLAVILHGMWRNETDFVWSTKDAAI

SEQ ID NO: 259941 - protein, 339 aa, unidentified
MSLYAGLDLHSSNTYIGILDPQFNRIFKKRVSNDLDLILQTLEPFRDRLRGLVVESTYNWYWLVDGIMDAGYSCVHLANPSAIKQYEGLKHSDDQHDAFFLAQLLILGILPQGYIYPKEARPVRDLARKRMFLVQQRTAHILSLQSLLARCCGQKVSSSQLRKVTGQDLKRWLKEEHLVLSAQANLDNIVFLKQQIGRIEAAIQKQVKLTEAFNCLLSVPGIGKILAMTIMLEAGDIRRFANVGNFASYCRCVSTQRLSDGKSKGSGNRKNGNRYLSWAFTEAAQMARRFNSRFRSYYDRKSAQTNSILATRALSNKLARVCYYIMRDQVEFREESVSH

SEQ ID NO: 259942 - protein, 329 aa, unidentified
MYYVGIDISKRFIDVCLLVDGIKGKRKTKVLPNGTNSTESLAQWLALQKCEPVQAHIIIESTGIYHEHLTYDLHQAGILVSVINPHRIREFAKGMGILTKTDKVDAYVLACYGCLKQPDGWSPPSEEVRKLKALLQHRDNLLNDKQRIENRLNTLKSTRSPEEILGSLESIEKNLKDELARIERLIADHIDKYPGLKNDLKLLKSISGIGEQIGWNMLAIIRSNNFRSAEQVASYLGVIPVERRSGSSVRGRARLSKIGPPGIRAKLYMGAIAAISHNHHVKAQYERLLLKGKSKMLAIGAAMRKLVHLCYGVLHTQQPYDKNYGMMPH

SEQ ID NO: 259943 - protein, 323 aa, unidentified
MDLGDQWSRYCVLDEEGEIAEEGRFKTTRGALTKHCADSERMRIALEAGTHSLWVSEHLRQFEHEVLVANDREIRAITHSDSKSDQLDAEKLARYARVDPKILHPITHRSIEMQRFLNVIRARDVLVRMRTMAVNAVRGLVKPCGHRLPICSTESFAGRCRADLPEELLAIVEPLLKQIELATAQIALCDKRIEELADGIYRETKALRKSPGVGALTALTYVLTVADKRRFPHSRDVGCYLGLRPRRSQSGGSDPQLRITKAATSICANFSCKALTTCSGTMDRTALCGNGASESMNEAEKMLRSERLSPWPVSCRFCCTGCG

SEQ ID NO: 259944 - protein, 333 aa, unidentified
MVDSETGELVERRLEHSNGEAQKFYAELQKPVRVGMEATGYAQWFERMLAKLGHELWVGDAAEIRAAMVRKQKTDVRDALHILDLLLANRFPRIWIPTPAERDVRQLLRHRHKMVCLRTSVRNQLHALAMGQGMYRKRKLWAAKGRTELEALVLDPWASRRRRELVEILDRLDTSLAELDRAVAKEAQQHPAARGLMEQPGVGPVTALMFVLTIGPVERFRRSKQVVSYLGLNPRESSSGGRQRLGAISKQGNSMARYLLVEAAQTAARYDEELRRDYQRLKFRRGTAVAKVAIARKLAVRLYWKLRKQNSAVPPARMQGSPEHLLVGESLSS

SEQ ID NO: 259945 - protein, 376 aa, unidentified
METTITYAAMDTHKKEHTVAWLDPQTGETEIFTVANNAKSIKKMVKRLQRKASSRVKFCYEAGVCGFTLKRQIEALGSDCMVIAPSLVPRKPGDRIKTDRRDAQKLLSHLVAGQLTEVHAPGPEQEAAREIVRCRDAAKDDLVKARHRLAAFLTRHGYIYAQGNHWTQKHRQWLGSLTFDYPDLRTAFDSHLVELEHREQRVATLTQEVEVLAARPEYKEIVGLLCCFHGIQTLTAMTLVAELFEFGRFDSPRKLMGYLGLVPSLDSSGDTHRSGPITKAGNKRVRRLAIETSWHYRHGPRLGQLLKKRRAGQPQWAIDIADRARHRLCTRYRRLIARGKRSQKVVVAIARELAGFLWALFREYQRRRSEAVTCRR

SEQ ID NO: 259946 - protein, 244 aa, unidentified
MTTTAVVVGVDVAKDRLDVAVRPSGEVWSEANDEAGITALVTRLRPLRPALIVCEATGGFERAAIAALAAAGLPVVVANPRQVRDFARATGQLAKTDRLDAGILALFAERVRPTARPLPDAAAQLLDAVLTRRRQLLEMLVAEKNRLGFAPKPVHRGIQAHVRWLERQLDDVTKELAALIEASPVWRAKDDLLQSVPGVGPIVSYTLLGELPELGTLSHKQIAALVGVAPLARDSGTLRGKRLV

SEQ ID NO: 259947 - protein, 474 aa, unidentified
MACRRLVGIDLGIASAHAVRVLDEEGNTIAKRKAVPTVESLSAIESTALAGTPAGTRLEVVIEPTGPAWLPIAVFFMNRGHVVYRVKSTQSADLRRFLSRHAKTNGIDAETLARLPLFHPAGVKPLELPEADTASLDRRVRAAHRLTRQVALHKTRIKALVRQVMPMSPLGGKLTHADLAVLARWADPNLLASAGRKRLATVIGKASNNHNGIDRADEWLAAAEAAIELYAGHPAVPFADLAAEIHTEVRLLRVIEDELHAHTSERESTYAKVDPSELARSLPGIAEVGGPILVAKLGDPARFTHAKQVRAFTGLAPKASETGDTDRKGQPLSKAGPSLLRTTFVIAADTARKQDPQLARIYYVQMVERGKNHIGALCVVAATLAERAWTVMKRGTPYIIRDNDGTAVAPEQATAIITEQWTVPAEVRARRRNKKTGKAPQAITTRSQRRGDLPQRASSTSAAPRVNTLGQRIA

SEQ ID NO: 259948 - protein, 332 aa, unidentified
MNAVSTLGIDLAKNTFSVHGVDANGVVTVRRTISRGKLAELVARLPPCLIGMEACSGAHEWARRFAAAGHTVKLMAPKFVLPYRKSGKNDGNDAEAICEAVCRPNMRFVPIKSVQQQSDLSLHRVRQGFVEDRTATFNRIRGLIAEFGYVLPIGVEQLRRQVPDLLERLPERVARCVRDLLEHAERLRSKALEYEREIRLSVRDNALARRAHTCPGIGSITASAVVATVGNGHDFKNGRQFSAWLGLVPRQYSTGGKTRLGHITKRGDPYLRTLLVMGARSVLQRAYRESDPLSRWALALQQRRGYHRACVAIAAKNARVVWALLAKESASA

SEQ ID NO: 259949 - protein, 347 aa, unidentified
MLIIGCDFHPGFQQVAIFDNLTGEIQEKRLQHRADAEGFYRRLAGQEVLVGMEACGHYPWFEQLLEKLHIELWFGDAARVRASVVRKQKTDRRDAEHLLDLLRQDRFPRIWVPSLEVRDVRQLLVHRHKQVQTRTRTKNQLQAMALSFGVQKKRKLWTKAGREELEQLPLLPYAAQRRKRLLEALDALEVEISELDRRVAEEARERPEAVRLMTHPGVGSVTALAMVLTLGPAERFGSAKQVGSYFGLIPSEESSGGKQRLGRISKQGSSFLRFLLVEAGQTAARIDPQLKRFYRRLAVRKNRSIAKVAVARKLATRLYLMLREDWTYAQLSQAVMQVSPSHSVAGE

SEQ ID NO: 259950 - protein, 431 aa, unidentified
MLKEQPIETQDKQEQKPDKEQKEKYLPVGIDPGKDICGVVMLHPDSGNDTVLSSMFMDNCSFEDADALIAESRPSGRERAEKVANSFGLKPIFVIEATNILWRPLFSYLKSKGCLVHTVCATQTKSSRGTKMRKTKTDLIDAKHIARIYKQGESHPTKFPEGIHMDLRELVRLHSFFTDMKGRILNRVYGYLFQVFPEFVSFFNSNSFLGTMWTLLKEGLVHPDCLQKVRIDKLTSILRKASMGRFKREKAIMLKEKAKNSFGISEGREGFSSCLKLLACMYEFVEKSIACLEEDKIKPIVDQIPNKLNTIKGLGIAQAYFLAESRKPEEYENVDDVVAWFGFDPRLSESAGKKKKNRHISKCGTKYGREAMFLSTDMVMIHNPTVMVKYRRLRKNGRTNREAKTIIAADLVKACYSMQRDNVPFNPSLIH

SEQ ID NO: 259951 - protein, 448 aa, unidentified
MKILALDLGKFNTMCCFFDSKTRKHSFLNAATDRQFLATLFKKHKVDLVVMEACGPSGWIYDLAQNAGHKTVVCSTNEDAWKWSNVKRKTDKDDAFKLARMASMDELKPVHMPSESHREFRSLVKYRKTLDQRINKMKCTIRAWFVNHGITIDTGEKAWCTGRTHINSFRKPLIDCEPNELWKGELDIELTQLDALTEQLNVVVKKLEAIGKQDARIQRIQTIPGVGPRTAEILVACLDDPHRFQNGRQVSAYFGLVPRQFQSGETDRNGRITKRGNPLARTILVECAWASLRYNSWAKTVYERICGKQKTRKKKAAIALACKLAVLAWAMLRDQTDWKPSHMLQVTKSFGKTTKAIQSVLDEMKPKENSDQRKKRKRREAREAKQANAPMERAKSTTDVKETTGKRTVKENRGRTQFEKRAGSKNSTQRKSVTPHKPRRAREPAAAV

SEQ ID NO: 259952 - protein, 335 aa, unidentified
MKEITTVGVDLAKSVFTVHGVDATGHTVLRKTVRRERLMELVVALPPCLIGMEACGGAHEWARKFQGHGHRVGIMMARFVAPYRKSSKNDGNDAEAICEAVARPNMRFVPVKSAEQQAILSLHRVRQGFIEQRTATINRIRGLLAEFGVVLPQRAEQVRRAAVVVAEELPVLAREAITDLRAHLSYLDERITRYERQLVELARQREAAVRIQRLPGVGPLTASAITASISDGHEFANGRQFAAWLGLVPRQYSTGGKPRLGRITKRGDAYLRTLLMLGARAVLQSAAQKTDRLSRWAMALRARRGYHRAIIAVAAKNARIIWALLANSREFALSA

SEQ ID NO: 259953 - protein, 338 aa, unidentified
MEHYAGIDLHSNNSYIGIIDTDNKRIFKKKAKNNLTTIIKLLAPFSKQTKGIVVESTYNWYWLVDGLMDKGYLVHLANPSAIKQYEGLKHSDDITDAFHLANLLRLGILPEGYIYPKEERPVRDLLRKRLHLVQQRTAQILSFQNLAARNLGKQMNVQTISKINEEDLENLFEEKHLILSGKACIATIHFLRTRINQLEKAIHKAAKLKKEYKLLKTVPGIWKILALTIMLETGPIERFEKVGNYASYCRCVQSNRFSNSKSKGKGNRKNGNKYLSWAYVEAANHALWNYEYVKRYYQRKAAKTNNVVAIKAIAHKLARACYYIIRDQKEFNPGKAFS

SEQ ID NO: 259954 - protein, 391 aa, unidentified
MIYVGIDVAKDKHDCFITNSDGEVLFKSFTIPNNREGFETLFQKVQSVSDDLAKVKVGLEATGHYSYNLLGFLLDKGLPTYVINPLHTNLYRKSLSLRKTKTDKVDAHTIASMIMSDVNLKSYSDTSYHNEELKSLTRYRFDKVKERAKLKSSVSRLVCILFPELEKLVPQLHMASVYALLSEFPSAHAVASTHLTRLTHLLSESSHGRYGKDMAIIFREAARNSIGSNMPAKSLELKHTIKLIQELTSEIDEIEAEIKAIMDEINSPILSIPGISYNMGAMIVAEIGDFSRFDSADKILAYAGMSPSTYQSGQLDNCHSHMEKRGSRYLRYALYNATKYVCHWDNSFGAYLAKKRAEGKHYNVDLSHATKKLVRTIYAMEKSGRVYLPTV

SEQ ID NO: 259955 - protein, 345 aa, unidentified
MELHTIGIDLGKTAFHLVGVNLHGEIVVRKKFSRKQLLHFTANLQVELIGMEACGGAHFLSRALREQGHEVRLMPAQYVKPYVKTNKNDFIDAEAIAEAVTRPRMRFVPIKTDEQLDMQSLHRVRERWVMRRTAIVNQVRGLLLERGITLPKGRSHLDTALPRILEDAELKLSGALRHLLAQLKLELGQMAMRISEADAVLNRTARDNADCQRLMAIPGLGPVTATALIAAIGNGAAFRNGRGFSAWMGIVPGEYSTGGKQRLLGISKRGNPYLRRLFIQGARAVLQQSAKQTSGLRAWLEQLVARTHPNVAAVALANKLARMAWAVLAKAELYRPPVPVSPAAA

SEQ ID NO: 259956 - protein, 361 aa, unidentified
MNELTTVGIDLAKEVFAICVLDAQGVPIERKVLRRTAFERWAQTLPVCTVAMEACGSAHHWGRYFASRGHRARLIAPEFVTAFRQGGKNDGNDALAIAIAARQPTMRFVPVKTVEQQAILSWHRARWGFIQERTALINRLRGLLAEFGIAIARSSDRLLKALAQLAEDERVPLALQPLLLAAREQFQAIAERIEQCDVQIALHARESSAAQRALALCGVGVLTASAFAATVSEPKLFAQGRQLGAWLGLTPRQASSGGRTRLGASSARGDAYLRTLLIQGARSTLQAALRVAPHKASALQRWILALHARRGYHKTLVAIANKHARILWAMSVHERPFDPNAGAKARSGAPIGSSVLAAGAP

SEQ ID NO: 259957 - protein, 353 aa, unidentified
MSISIADYDLFFPMDVDKKRIHLAVMDRQRVIRKVTLPYDPVNLLNYVRKAFPGQKGIFVYEAGPTGYGMYDFLREKGEHCEVAVPSMIPKAPGQRVKTNRMDAYNLGVQLRTSDLRLVHVPEKKYRDLRHLTRLRLKYGKRIVGTKNALKGLYLFEGIEFPEGKWSRRVVSQLQQIRYRPAVEFKVKQLLINLEFFRIQELKTKAEIRRFCREDEEINHCIVYLMSLAGVGWTVSTYVLGALGGFKHLISVKKTSGFVGLGPRENSTGDRVRKGEITAVGDPNARKMIIQASWIGIKKDPELRLVFDKVYSRNPQRIAKQKAIIAVGRKVVCRIHVVLRDQRPFENRFRKAA

SEQ ID NO: 259958 - protein, 337 aa, unidentified
MNAVGIDVSKSKSVVAIMRPFGEIVSTPFEIKHTASDIHSLIELINSVEGESRIVMEHTGRYYEVLAHQLLEANLFVSAINPKLIKDFDNDSLRKVKSDKADAVKIARYALDKWQNLKQYNVMDELRNQLKTMNRQFGFYIKHKTAMKNNLIGILDQTYPGVNTYFDSPARSDGSQKWVDFASTYWHVDCVRKMSLNSFIDHYQNWCKRKKYNFSQSKAEEIYGKAKELVPVLPKDALTKLIIKQAVDQLNSASTTVESLRTLMNETASKLPEYPVVMAMKGVGTSLGPQLMAEIGDVSRFTHKSAITAFAGVDPGVNESGTYDKKVFLPQNEVPLI

SEQ ID NO: 259959 - protein, 412 aa, unidentified
MRVVHERCCGLDIHKKFVVACLLATESDGTVHKEVRTYSAMTNDLLALADWLRGEDCGPVVMESTGSYWRPVFNLLEEQCEVLVVNAYHVKAVPGRKTDVKDAEWLADLLRHGLLRASFIPAPAQRHLRDLTRYRIHLVDERARLINRLQTVLEDANIKLASVVSDVRGLSAREILQRLLEGETDAQALAELARGKLRAKRDALAQAVVGRLQAHHVFLLREQLAHLDYLDAAIARLDAELAARLAAEQEALALVQTIPGVARRTAEVLVAEIGTDLTRFPSAEHLASWAGMCPGNAESGGRRLSGRTRRGNAWVRRTLAEVANVVSRMKGTYLAAQYRRIAARRGKGRAVLAVGHSVLVAFYHMLTRHQAYRELGADYFDDRQRDQVQRRLVHRLERLGYAVTLEALTTSS

SEQ ID NO: 259960 - protein, 345 aa, unidentified
MLEYFVGLDVSLRSCAVCIVDTKGKVLFERELPCAIKDIVACLSDFTHPIERIGFEAGTMSQYLYFGLEAAGFDVVCMEARQVNAALSAMRNKTDKNDARGIAQVLRTGWFSPVHMKSREAHGLRAILSTRKALLKKTMDLANEVRGLLKIFGIRLPATVQHGSFDDVVRPMILIDDVLAHAMVPLLDARVVLYQHFLELDRRVKRAASQDEVCMRLMTIPGIGPITALTFKGAVDDPARFKRSRTVGAHFGLTPRRYQSGEHDNPGRISKAGDRDVRSALYSAANALLMRTVAGSQIKTWGMRLLRTKGRRRAVVAVARKLAVLMHRMWVDGTEFRQDKVGEAA

SEQ ID NO: 259961 - protein, 357 aa, unidentified
MSNKATKLDFRGQVFHIGIDVHKRNWRVTVLNNGLELKTFSMNPSPDDLRSYLQSNYPGGEYYTAYEAGFCGYWIHRKLESLGMKNLVVNPADIPVNFKETVRKTDTIDSRRLARALYSNLVHGNYIPSLEQQGFRSLCRLRKQLVKDQARVKNRIKSFLDFSGIKVLSQNEISHWSGLFLNYLSNLDLGNEHSNETLSRMLGQLMSLRNQIADLVKRLKTIVRQDEAILRVMNNLMTIPGVGFSCAIVLYSELMDINRFSSVDKLCSYVGLVPDLRSSGESEYTLGISKLQLQFLRAMLIECSWIAIRKDPALTAAFNTLGMRMKKQEAIIRIGKKLLTRIMYVWRNNEPYICSIV

SEQ ID NO: 259962 - protein, 313 aa, unidentified
MAKRITVCAGIDTGKWKLDVAIDGSCEQLQVENTAEGHKVLLEWLRRHKVKRIGIEASGGYEQPVVVVLRRKRFVVVVFHLQRAKNDKIDAALIAACTAAVKQIYPAPDPRLSPFAEHLTMIDQIGEDIMKLKNRIETCRNERIRAIWKEDIARLAKRQRTELKALVAAARQYPDLAERLDLIHSVGGAGLPTAVAILVRMPEIGRLTREQVAALAGLAPYDDDSGEQVGARHIDGGRERLRRALYLAALPASFRWNPQLIALYQRLRAAGKEHKRALIACARKLLIFVNTVVARGTPWQDQPPPTAVIAATG

SEQ ID NO: 259963 - protein, 346 aa, unidentified
MSQYVGLDVSVKEVSICVVNGEGDVLARGTVPTDPDRIAKFITEYAASAERVVHESGILAIWLTRELDKRGVPIICIDARLAHKALSGRINKTDRGDAEGLAHLARTGWFTPVHIRSEASERVRVLIGTRERLIRMRKDLEAHVRGVLKTFGIRMAPIQRSNLRGGFRDQLSRAGQSDLAIELMADAFNPIHRSLCAAAEAIDDELREIARGSDLANRLMTVPGVGPVVALAYIATLDDEARFKRATDVGAFLGLTPRRYQSGDTDWSGRISKCGDRDLRRLLYSAGFTLISQVRRFSPLRAWGVRLSERKGIRHAAVAAARKIAVIMLRIWRDGTTFQWVKEVRA

SEQ ID NO: 259964 - protein, 523 aa, unidentified
MSRRSTHRRPRPHPRQAVQKPRGTFHPRVQKVGPEHFGIVCIDPAKARSKWLLADFFGNILLPPTFLDHNRDAFAQALARLEQARQQYDLRDLIVAIERTGRYHHPPKHAFAHVGLDTRIVHPFATKTLRQPSNPGIKTDDTDLAAIFCAALNGFALVELGLDEQWTTLQLLIRHRRELVRKNVVLRTQIREHLEAAFPGFAACFSDLWDSNCAWHLLHHFDSPAALHAAGRAGLCHSLDQAGIRFHRPTLDPILDWAAHAAMPDLGAASRRRFALALHEDHTHKALQIQVLERDIAAALARTPYVLLLSIPGINVVSAADLAGEAGPIEHYANARALTGRSGLCPSRYQSDKVDHANGPLVRCCNRRLRAALLRIADNLINCNHYFNVLTHTWKTSGKDPRDSHIKVASRFSRIAFQMVAGHQVFRHPAIQGRDSVLAKLMAFHREHDTEAPALLRDLQAALGQVPRAEHRVEAVPLQEELNKIHEGGRRGPQILGDILPIVLARLGVGVVQSQTSGEHDST

SEQ ID NO: 259965 - protein, 475 aa, unidentified
MEKENKKKSTGNKRNVNQDTTKTFMEMPIINLNAAGVDVGSRSFFVCVGQGANDVREFGIFTCNLHEIAKYLKEIGIKTVAMESTGFYWKQLFVMLQDYEFEVILVNARHIKNVKGRKTDVVDSRWIQLLHSLGLLAASFQPDLITEELRTYTRQRQYLIQHASQQVLKMNKNLTLMNLQLKPILRDLVGLSGRRLVEAILSGKRNPQELASLIHPNCKHSPEDFIKALDGNYREEYLFELQQSYDSYNHFQHQIAKCDEKINLLLQQNVEIKEKCQSSKYTSVIKQEVKYKPPKNINYKNCPPTQMAEYVYRLCEVELLNIPGVNTTTILTIISEVGLDLSKFKTAKHFTSWLGLAPNNKITGGKVISSHTDSKKNRIALAFRDAANSLERITINTPLKVFYKRIAAKKSRLVAITATARKIAIIVWNMLTKKEEYNPELTAKNDEFIREKKMKNIQRVIKEYGIKPHELAFGL

SEQ ID NO: 259966 - protein, 411 aa, unidentified
MSQMLVGIDVSLRSHHVHFMHGEGHTLADFSVSNDIEGADTLIQKLLKTAEKNQCEHIKIGLEATDQYSWHVAHYLKNQLHGYEPTFQTAVYLLNARRVARFKKGYDTLPKNDRIDAWVIADHLRFGRLPHEMQETLQYDALRRLTRTRFHLMHEIARNKTYMMNQLFLKFSGLRQDNPFSNTFGATSIAVIEELDPETIAAMPIEELVEFLQEKGKKRFAKPEEIAKYLQKLARNSYRLDKVMADPVNISLSVILSTIHHMETQVKRLDKEIERLMKGFTQTLTSVKGIGPVFSAGLIAEIGAIKRFDDHHALAKYAGLVWTQNQSGEFEAENTSRMRTGNKYLRYYLIQAADAVRKHDAEYKAFYEKKYNEVTKHQHKRALVLTARKFVRLVHSLLRTNQLYIPPERRE

SEQ ID NO: 259967 - protein, 344 aa, unidentified
MSKVTTIGLDIAKSSFHAHGADERGEAVFSRKLTRGKLLDFFAAQPACLVAMEACGGAHHWARELTQLGHEVRLIPPAYVKPFVKRHKNDAVDAEAICEAVRRPGMRFVAIKTEEQQAAGMVFRTRDLLVRQRTQLVNALRGHLAEYGWVAPRGKAQMAILADLLDEDEMASSLPEAARAMFRIMTDMLAELDDRIADLDKEIARRAREDEVARRLMTIPGIGPIAATAIVALAPQAASFSKGRDFAAWLGLAPLQHSTGGKQKLGRISKMGERTIRRLLIIGGSAVVRQATIHGARAGSWLEGMLARKPRMLVSVALANKMARIAWALMTRQEDYKAPVVVAA

SEQ ID NO: 259968 - protein, 422 aa, unidentified
MFVSSKLKGASAMETVVERPAALDVHKEQVTACVRVPAGGGRREQHVAEFKTTVQGLLALHDWLKAHGATQIAMEASGVYWKPPWAILEDEFECVLVNARHVKQVPGRKTDVSDAAWLCQLLEAGLLSASFVPPKPIRTLRNLTRYRKAQIGERQREANRLHKILEDTGIKLDCVASDILGASGRAMLDALVAGTTDPAVLAELARGKLRQKLPALREALEGRFDVEHGIVVGAILAHIDFLDEQISLLSEAIEEQIRPFASAVELLCTIPGVQRRTAEVVIAEIGADMSVFPSAGHLASWAGLCPGNDESAGKRRSGRTRKGSRWLGIALTEAAQANTRSRDTYLSAQYRRLKPRRGHRKAIGAVRHSIIVACWHMLTTGEVYRDAGGDYFTRFDPDKQTRRLVAQLERLGHTVTLQEAAA

SEQ ID NO: 259969 - protein, 457 aa, unidentified
MQQYYLGSDVSKGYSDFVILDSQKRRVEENFQLDDTIVGHSFLYDRLLIFFEEHPEAELCAAVESTGGYENNWYNTLCKFQSSLNIKTARLNPAGVCKNNEAGLKRVITDKISAQGVAEYLIAHPEKVMYQQQDYWSSLRKQWSFIKMLTKQSTQLLNQLESLLYSANPEILKYCQDGVPAWVFKLLKQYPTAAKLGKARATSVARIPYISISRAKELVANAKTSVASATDTITGQLISATVGQIQHLQKTIRAQTKIMAAECTLAEVELLKTFTGIGDYSAIGLMLEIQAVERFLTAKKLASFFGLHPVYKISGDGASGFRMSKKGRKEPRRILFMVAMSAINSNSLIRDLYQKHVKNGMEKMAAIGLCMHKILRIIYGMLKNNTPFNPEIDLKNRERTSEQPQKKKKDKSRRYQDFDANAPISGRQRKKRAERKLSQNAVSVECGICASAPQLSS

SEQ ID NO: 259970 - protein, 372 aa, unidentified
MDKGTSFVGMDVSKGSIQVAVLYAGREGFVEWEVVHEAAAVRRMVRKIQREAGGPVLFCYEAGPCGYVLQRRIKALGSDCIVVAPSLIPVKPGDRIKTDRRDARKLAQLLRAGLLTEVDPPTVEEEAVRDLVRCREDVVEDLARCRHRLSKMLLRRGYLWQTGCQWTIAHRRWMRTLLFDHQADRVVFEDYLLALEQAESRLLNLEKELEAAAQTQPYRFAVGVLGCYRGIGTVTAMTILTELHGIQRFTSPRQLMAYLGLVPSEFSSADKVFRGSITKAGNAHLRRVLAEAAHQYRHRPSVGPLLRRRRQGQPSFAILQADKAQQRLHRRFLRLLLKGKPYGTIIIAIARELVGFLWATLQEAQASQKKAA

SEQ ID NO: 259971 - protein, 355 aa, unidentified
MSQLIRIGLDTSKSVFQLHGVDEAEQPVLRRKLRRRDMLTFFSKLAPTRIGMEACGASHYWARELCALGHEVALIPPQYVKPYVDRGKNDAADAEAICEAMSRPKVARRFVAVKTVEQQARQMLIGVRENLLKRRTQVSNTIRGYAAEFGLVAAKGLAQLERLIEHIEQDRTLPELVRQMFAMLVGQYRHASAQIREIEARLSEIHRASPLSRRLAKAPTIGPVTAVTLTAKVADPKVFRSGRDFSAWLGLTPKDHSTGGKAKQGGITRAGDETLRSLFICGATSVIQQVKRGKAGAPPWLLSLVKRKPPKLAAVALANKAARIARKMMVTGEPYDPRRHDAHDQASADPLAEAA

SEQ ID NO: 259972 - protein, 366 aa, unidentified
MTNRNCIFVGCDLHEKTLVNRIAVNREPAEKRTFGNTVSGSAKLIAMLKQKAKELGGARIVFVYEASGQGFILCDQLRAAGIDCHVLAPTKIERSSKQKRNKNDDRDADRLLDIVRSHELAGTKLPSVWVPDLQTRDDRETVRTRQDVGEKQTGLKTQIQTLIKRHGMEKPEHVKGSCTKSWWQWLKAMSEMKEQGEGFRTALASLLRQLEFTVEEIQRLDGAVEQLCEKPHLKPIVAKLDAEEGVGRLMAAAYATEVGDFDRFRRRQQIGAYWGVTPSSNESGEVGDRKGHITRQGSPRMRRILCQAAWSRVRHNKLERETYQRLVERNPKRKKIALVAAMRRLSIRLWHVGRQAQREMKGLTTN

SEQ ID NO: 259973 - protein, 343 aa, unidentified
MNYVGVDLHKKLITACVMDANRKIVREVKLHPAEPHRIVGFFESLGEYEVVLEATSSYYWFVELLGPTASEVVLANPAKMRVIAESTKKTDKLDARTLAEFLARDMIPRAYMPTPRQRRHRALVRHRRWLRGEATALKCKIRHVLSDYNADRRDLFSAGCGEAYLKTLKLNDADRFVLADLWRALEGVEKRLKRAAAKIKAFAEKAPRAEAEARALVKTAPGVGTVTAEVVLCELGDVRRFRNAKAVCAYAGLAPAVRQTGGKKSKDGHITKQGSGLLRWALVEAAWRLVGSSVQWARTYQRIKKRSGAKRAIVAVARKLLCVLYAMLRDSKPYHSAAATAAA

SEQ ID NO: 259974 - protein, 307 aa, unidentified
MQMICGVDVSKAWLDAWIEGTYRRFANRAEGAEALAGFCREHAAELVVMEASGGCEKPVFLALWKQGQPCAIANARSVRRFAEAMGYLEKTDRIDAQMIARFAEAKRMVPTPPPSADQQRLTALAVRLRQVTQDLGNQKRRLHSSRDETALASLKEAIAFFTRQAAELVDEIGRMIDADPLWAALDRSFRSVKGVASRSVAYLLAELPEVGTLSNRAVAKLVGLAPLPDDSGQRHGQRSIRGGRAGIRSLLVLIADIASRFDPSLADFRQRLLDKGLSKMEVRVALARKLLVRLNAKARDTRKALAS

SEQ ID NO: 259975 - protein, 510 aa, unidentified
MAAYTLWRTHKVARRRDWFRSSIHVLFGDAAQAVFPLGRFILQDDDRAPGAWAIKLNRIAPMKTLSVINPQAAAIDVGSEQFHLSIADDEPVVFGTVTDEVYRLRDYLKAQAVTTVAMEATGVYWLYAYTVLEAAGLEVVVVNGRHVRNLPGRKTDMADCQWLATLHAHGLLRGGFVPPAAIRRLQDYQRLRADHIIGAGSQVQKMQQALERMNIKFHDVISDLVGVSGLKVVRAILAGERQPEPLLLLCDAQIQKQKRERVLASLRGTWTPEHLFALGQALAVWEFYQKLLAECDQQIEAVLKELAGPPPATPEREGQTVAAGKPPGKNAPQIEQLHQLLLRLCGGKDVTAIAGIGDYLLLQLLAETGLDLKAWPSEKHFTAWAGLAPGSRQSGKRKGSVKVQRNRTGRLFCAGARSLVQSVDKALGGFYRRLAARKGGLAALKALARKLAELYYRVLRYGLAYAEQGLRVYEQKYAESQRRLLSKLAAKQGFKLVSVQLQPSPPNATM

SEQ ID NO: 259976 - protein, 353 aa, unidentified
MRTYYVGMDVHSASIVLVVLNGAGKVVMETIIETSAERVREFIKQLHGKVYVTFEEGNQASWLYDVLRPLVTEVVVCDPRQNKLLAVGNKGDRIDARKLAQLLRNGLLRAVYHGDPGVRALKELVRNYDCLVSDTTRVMNRLKAIFRGRAIACAGHDVYRHDRRARWLAKLSERGVKERASFLYEELRALKALRHEAKRLMLKEARRHPAYQLLNSIPLLGPVSVAEIIAVVGTPHRFRSKRQFWTYVGLAVVTRTSAEYVLVNGIVRRSSRPVATRGLNRNHNHLLKRVFKGAASSACYSGPFKLAYEQRLAQGMDPSLARLTIARKLVATTLTVWKSGEKFALERMKQQVA

SEQ ID NO: 259977 - protein, 361 aa, unidentified
MKETMQHLIAEVPLRSSKVGMTIGIDLGDVWSHYCTLNEDGEVVDRGRFRTSPSGVEKWFTDLPRVRIAMEAGTHSIWISEQLQELGHEVIVANVRELRAISHSDRKSDQVDAEKLARYARLDPKILRPIAHRTVAQQEALTLIRARNLIVRLRTAAVNAVRGLAKPCGYRLPASSTLCFAKRSLAVLPPSLVQALGPVLQQIATMTVKIKQYDSAIKGLTETDYPETQALIKVYGVGQLTALTYVLTLGSKERFQRSRDVGCYLGLRPKRSQSGDRDPQLGITKAGNIYLRTLLVECANHVLGPHGRDSTLRQWGLHLASRGGKQSRNRAIVAVARKLAVLLHRIWITQEPYIPFYGVAV

SEQ ID NO: 259978 - protein, 364 aa, unidentified
MLIIGCDYHPGFQQTALVDTDTGEVKERRLEHREQAEQFYRDLKQQKQAARVGMESSGHSRWFERLLHELGFELWIGDPAEIRTKRVRKQKTDRQDAQLILQLMLENRFPRVWVPDAENRDLRQLLWHRHRLVQMRTRVMNQLHVVPLNEGLRRKKALWRPAGRKELESIALAPWASRRRQDLLDLLDQLTPKIQELTRALEQEVEKRPVTRRLMTHPGVGPLTALAYELVIGTPERFHCGKQVASYIGLVPEEKSSGDRRRLGHISKQGNVLLRFLLVEAAQVTVRSQPEWRSKFFHLAMRRGRKIAKVAMARKLAVHLYWMWRQGCDYGQTPKLGSHAGEPGHPDGVQSNTDVMIGHPAPSK

SEQ ID NO: 259979 - protein, 370 aa, unidentified
MAKSTPLFVGLDVHKDSIAVAHALGQSADPPVFVGTIGTRQADLDKLLRRLRAKTPALVFAYEAGPTGYGVHRYLTGQGVECQVIAPSLIPRKPGDQVKTDRRNAVDLARLLRSGDLTRVYVPTVEDEAIRDLCRARDAARLTQKNAKLRLKAFLLRLGLHYVGRADWNAAHLRWLAKVVCPTAAQQIVFQESVRAVDEQVDRLGRLEAELRERAPAWRLHPVVQALQALRGVQWLVAITVVAELGDLTRFDSPRQLAAFVGLIPSEYSSGPTRRQGGITKAGNGRARRALIEAAWAYRHPAKVSQHIQTRIDVLPKPIQAIGWKAQVRLCKRFRRLTARGKHPNVAVTAIARELIAFMWAIAKEVTVVG

SEQ ID NO: 259980 - protein, 340 aa, unidentified
MGEQYVGIDLHRRRSVIARMTPEGGVLETVHIDNDPVALSMELAKAGPDPEVVLEATYGWYWAADLLQACGATVHLAHPLGVKMFAYQRVKTDARDAANLGDLLRMGRLPEAWLAPPAVRELRELVRYRAKLVALRSGLKAQVHAVLAKQGVRVPMSDLFGVAGTRLLEELRLPRAYGLRVASLRELLGALDQQIAMLGREIGSALAGDVGYLAIQAIPGVGPVLAAIFVAEIGEVGRFAGAPQLCSWAGLTPRHRESDTTVRRGPITKQGSRLVRWAAVEAVQRLPGTTKQAADFHRIADRRGKGIGRVAVARRLLTLVYYGLRDGQVRCLAPAPAEAM

SEQ ID NO: 259981 - protein, 404 aa, unidentified
MWYVGLDWADTHHDVEVLDEAGKRVGVRRFAHSHQGLNELKQFMLSIATDPEQLACIVETNHGLLITFLLEAGIPVYPVNPKTANHLRKAAGAKTDQIDAHLLAKLGRLDLGELRRLEPDSAIVQELKTLTRDQDALIQAQTRLVNQLTACLKEYYPVALKLFTKLQQRSTLLFLQAYPTPEAVQAASLDEITATLRAGKHTNPSQVAPSIFAEVHRPQLVASEIIVRAKSRLMLSLVKQLLVVLQEIASYDKAIRPLFLSHPDHELWSSLPRAGKHLAPRLLAEWGDERTRYANATSVQTLAGTAPVPFQSGHYAKAHKRFACVKPLRNALYQFAWQSTRQEPWALAYYQRKRAEGKSHSMAVRALANVWVRIIYRMWQSKTNYQTVTFEAARLAHAPRQHVA

SEQ ID NO: 259982 - protein, 408 aa, unidentified
MQVLHERCCGLDVHKKSVVACLLRPGPGAQPNKETRTFSTMTADLLTMADWLERAGCTHVAMESTGSYWKPVYNLLEDRFQLLLVNAQHLKAVPGRKTDVKDAEWIAQLLRHGLVRGSFVPSRPERELRELIRYRTSLTHERSAEINRIQKTLEGANIKLSAVASDVVGVSGRAMLEAMITGVEDPHVLASLARGRLQTKSTALEAALEGRMSGHQRFLLSEQLHHVDDLDATIARLNVEIEERLRPFAQMAARLKTIPGVGRRTAELILAEIGPDMSVFPSAGHLASWAGLCPGQHESAGKHGSGRTRKGNPWLRSALVEAAQTAGRTKTYLAEQYHRIAGRRGKRRAAIAVAHSIIVIVYHILAADRPYEDLGYHYFDQRDRQRTSRRLVQRLSALGYTVTLKPAT

SEQ ID NO: 259983 - protein, 421 aa, unidentified
MAYRVAAIDIHKKVLMVVVASGAEMVEDPSGEGLEFECRRFGTGNSERAHLLSWLGERDVLEVVMESTAQYWKPVWLELEPHFPKLHLAQAHSNRAPKGRKNDFRDAKRMARRLLAGELMLSFVPDPEQRMWRTLTRSKHQLVRDRVRLQNQLEALLEEARIKLSSVISDLLGVSGRRILRALSKGETDPVQLAELGDDRLQCSKRELVDALRGSPQPIHLEVLKLFMERLEVLDQQIEKLDQMAAMGLKKHQDTVIRLAQMPGLGVDSAQQIIAEVGVDAEAFPSPAQFCSWIGTCPGSEESAEQNHSSRSPKGNRFMRRILTQAAQAAVKKKGCHFQAVFRRLLPRLGYKGAIWAIAHRLGRLVWKILHDGVTYVEQGQETNPKANKRRAQKLAQALRKLGYQVSLTPINPEPLLEGQG

SEQ ID NO: 259984 - protein, 389 aa, unidentified
MLCVGIDVAKRKHDCCIIDSDALKTVESFTFPNSREGFDMLLSKISELGIPKDKIRVGLEATGHYSSNLAHFISEHDLPLLTFNPLLTNRYKQGFSLRKTKTDKVDACAIAQMIVSGKGSQTYSSLLYHNEEMKSLSRYRSQTMQKCSKLKISVSRLVTILFPELEGLTSSIHLASIYALLKAYPGHEQIAHCSMKRLTHLLSDASQGRFDKSKALEIHQAACRSIGKVSLSASMELVHAITDIEVLKQHIVEIDEKLKEMVDQEESSIIDIPGIGYTLCASILGEVGDFKRFPDVDKLLAYAGMSPSKHDSGDYHSKHNKMEKRGSPYLRKTLYLAARLVAQNVPKFKEYLEKKLSEHKPYKVALSHVAKKLIRLIYRLGISGCPYLA

SEQ ID NO: 259985 - protein, 369 aa, unidentified
MENNTTKVGLDVHKETIVAAVLPLESKRVTDTMKIENMPSNVEKMVKRLAEQGPVEFVYEAGPCGYDIHRQITKLGHACTVIAPSLIPVRPGDRVKTDRRDAEKLARLFRAGELTEIRVPTREEEAARDLVRVREDALQDRLRVRHRLGKFLLRQGRVYRKTKAWGVDHRAWVRTQQFEWASLQKTFEAFMRAVEETEARLATLDQQVYDLAQTDPYRIMVQNLRCLKGIDTLSALTLVVEVQDFRRFERAPALMKMTGLVSSENSSADRIRRGSITKAGNAHLRRVLIEAAWSYQRRNVTSANLQKRRQGCPSEVVKIAKKAQDRLHRRYWHLIQRGKPASTAVVAVARELVGFVWAIAQQSSATMGH

SEQ ID NO: 259986 - protein, 350 aa, unidentified
MKYYIGCDAHKKYSVFAGITEAGEVMQSKRVEHDRKAFRSFLETLPKASQIAVETIGNWYWLIDEMEKAGHTPSLVHAAKAKLMMGQINKTDKLDARGLATLARSGTLPEVWIPPGKLRDQRELPRMRMALVGIRTKLKNRIHATFAKYGITFDEVSDIFGGKGRRLLAEAMNELPPETKHSVAEQLELLDQVETSIKETEKRILQIIKQDRSMQLLDTLPGVGAILAIVIALEVGDVNRFATAEKLASYAGKVPRVNSSGGRTYYGRVHPDVNRYLKWAYTEAANSIVLQQHKLPDCHVLRLYRRVYKSHGHAKAVTAVGRHLAEATYWMLKSNGPYREPREKGGSQKG

SEQ ID NO: 259987 - protein, 347 aa, unidentified
MRFYKEQHAFYCGVDLHAKTLHLCVLDQAGEIVRHRGIRARPEDFLRTIEPYQKEVVVGAECMFAWYWLSDLCLEREIPFVLGHALYMRAIHGSKTKNDKIDSEKIARLLRGGTFPMSYVYPRQMRSTRDLLRRRCFLVRRRGELLAHLNNTFSQYNVTPPPGKFSYAANRVDLTKCFDDASVRRMVQTDVALAADFDKELTSVELYLKRNAKVHDPDTFHRLKTVPGIGEILAMVLLYEIHDIRRFADVGDFVSYARLVRGSHESAGKSKGSPHKKIGNAHLKWAFSEATTLLMRECEAAKRFVERKTKKHSKPKAMSVLAAKLGRAVYWMLRRKTAFDVNKLFAC

SEQ ID NO: 259988 - protein, 404 aa, unidentified
MFYCGIDIAKRNHEASVIDVEGKPLLDSITITNTQEGCEKLFSLFERLGIKNADVIIGMEATGHYWLPVYEYLTEQKYDVRVINPIQSDAFRKMYIRQTKNDSKDSFIIAQVMRFGQYSETTLSDENTVAMRQLTRFRMALVDSCGDCKRRIIALLDQVFPEYADLFSDTFGTTSKELLLNYPTPDDMLAVSTRKLTTFLSKASHGRFGEEKAREIRTAAAGSFGVGFAKNAFAFQIKQLVEQLMFLETQIEELDEQISRLLKQVNQVITTIPGIGDTLGAIIVSEIGDINRFDAPNKLVAFAGLDVKVTQSGEFEGTKQHISKRGSPYLRRAIWLAANRAAFCDPILSEYYQSLKARGKHHLTAVGAVARKMCNIIFTILRENRPYEATPPKKGQLNAKGYQV

SEQ ID NO: 259989 - protein, 321 aa, unidentified
MVVIDGEDKRVFEKRLSNDLSLTLNALSPYQESLQGIAVESTFNWYWLVDGLQEHGYDLRLVNTAAVKQYDGLKYSDDHHDAFHLAHLMRLGILPTGYIYPKEQRAIRDLLRRRLSLVRTASTQLISVQSQIWRSTGLRIKSTDLRKPDFISPRVDDYTLQAIHAGLAVYQTLHREIDVLEKSAYQAVKLTDAFKLLQTVTGIGKILGLTIMLETGTIGRFAGPGNYASYCRCVDSTRTSNGKKKGEGNAKAGNKYLSWAFSEAAHFAVRFEPLAQRFYERKKAKTNGIIAIRAVARKLARATWMMLKHQVPYDAKRMFPG

SEQ ID NO: 259990 - protein, 343 aa, unidentified
MEKIVTVGLDLAKSVFQVHAVADDGSVVVRRALRRSQVLDFFRRLDPCVVGLEACGSAHYWAQAIQSMGHTVRMMPPAYVKAYVKRNKTDAADAEGICEAVTRPTMRFVPIKSREEQAAGMILKARELLIRQRSQTANALRSHMAEMGIVAATGMTSIAKLIAILRDEADARLPDAARLALKELAAQIEGLTTRIEKLDRVILATVKNDEAARRLTSIPGVGPLIAATVRAAVQDPSGFRTGRDFAAWIGLTPRAHSSGGKERLGKISKQGNRQLRTLLIVGATSILKLARRGLKLPGWIMALMSRRPFKVVAVALANKLARTIWALLVKGGTYRAPPIMAKA

SEQ ID NO: 259991 - protein, 414 aa, unidentified
MNRSCGIDWAEGHHDVAIIDSDGKLVAKKRISDDPTGFSALTELLADSGDSPENPIPVAIETPRGLLVAALRGTGRPVFAINPMAVARYRERSSVARAKSDHADAMTLANILRVDAHIHRQLPAESELAQTIAVLARAQQDAVWRRTKAGNELRSMLREYYPAFLDTFAGKSATNLAKPEARAILAIAPTPAHAARLTKTRIAAALRRAGRKRGIDDLAADILQRLQIPQLRQPDLVEKAMGRQAMALLAMLDAACAGADDLEQAATEEFRKHPDHAVITSFPGLAEVTGARILAEIGDDRDQFADDRALKAYAGSAPVTRASGKVTSITHRRIKNDRLAAVGWVWATYASINPGPAREHYRARRDHGDRHAAALRHLFNKMLGQLHHCLQTRQTFDPIKAFGQPCTAPEPAAA

SEQ ID NO: 259992 - protein, 416 aa, unidentified
MSRKFMRTNTCGKLSQLLNIFERWFSHMYSYFVGIDIAKNTHWASCLSSDGEIILEPFSFSNDNSGFQKFISKLESLDKTKILIGLESTAHYGENIISYLFNLDYNIGLINPIQTANLRRSNIRKTKNDKVDTKIIIKALTLGNYSLITSRDINNLKLKGLCRSRRNLVTMRSKAKIQLVSYLDQIFPELAQFFKGNLHLNVSYQLLKEYSSPKQISSLHLTKLSNILHDNSHGRYNKQDAIRLRELAKNSVGIDNPSLSLQIKHAILQIELYNEQIAEVEALYKQILDEMNTPILSIPGMSYNQAAVIIGGIGDINRFEHSCQLLAYAGLDPSVIQSGNFQARSTRMSKRGSGMLRYSLVYSAHNVVKNNKTFRDYYELKRSQGKSHYCALGHVAHKLVRIIFKMLKDNVAFNLD

SEQ ID NO: 259993 - protein, 310 aa, unidentified
MEDIIVGIDVAKDRLDVAVRPGGEAFVVERNAAGLEVLVVRLRELSPYLVALEATGGYETVVAATLAGAALPVVVVNPAQVRDFAKALGQRAKTDPIDAAVIAHFAQATGPEPRPLPDEATQLLADMVARRRQIVEMIGAERQREKRVAIARLRKSIARLIKALEKELASLDADIDDAVRGSPAWRAKEDLLASVPGVGPVIARTLIAELPELGQLSRKQVAALAGLAPFTRQSGRWHGRSFIGGGRTTVRTALFMGAMVAKRCNPILKAFFDRLLAAGKPRMVALIAVARKLLTILNAILRDNRPWQKA

SEQ ID NO: 259994 - protein, 410 aa, unidentified
MEVLHAHCAGLDIHKETVVACVRHMSGGKVKTEVRTFATMTGALLDLSAWLATEQITHIAMEATGVYWKPVWHILADGEFQLVLANAAHVKNVPGRKTDVNDAMWLADLMAHGLIRPSFVPDEPTQQMRDLLRTRKQLVRERSSHTLRIQKTLEDANIKLDCVVTDILGLSGRRILEALVKGETVPQALATLAHRRIHATSEELEAALRGRVTTHHRFLVKLHLDQIDAIDAAIQSIDKEVDGNIEPFRAAAELLTEIPGISQLAARIVLSEIGLDMSRFETSGHLVSWAGLCPRNDESAGKRRSTRMKKGAPWLKTILVQCAWAAARTKGSYFQAQYHRLRSRRGSKKAICAVAASLLTTVYHMLNNGTCYQDLGANHFDQQNKDRHIKRLVSRLENLGVEVKILPKAA

SEQ ID NO: 259995 - protein, 327 aa, unidentified
MSFATLGIDISKDTLDVALYQDDSYRLATFTNEKDGYRRLAKWLKKHKARECRVCIEATGRYGETVAMYLYERDYSVSVVNPARIKAYGASMLKRNKTDREDAKVIAHFCATQNPGVWAPPPPEIQELQALTRRLEALKADRTRELNRKQSGVQSKTVLADIDAHIDFLKNQIAIIEQRIRDLLDQHPDLREQHDLLTSIPGIGDITAARLIAEIPDVNDFQSANQLAAYAGLTPRNHNSGSSVHRRGRLVKTGNKRFRTALFLPALAAMRFNPIVQALVERMQTNGKNRMTIVGAVMRKLVHLAYGVLKHRKPFDPDYLVNVQVSA

SEQ ID NO: 259996 - protein, 342 aa, unidentified
MKELKQVVGIDVAQKELVVTIGRLLEDLSVDLFSYKVFKNNDKGFLSLVEWVAKLVENPQEVHYVMEATGVYHQKIAYFLDTNQLKVSIVLPNKISNYFRTLEVKTITDKTCSQVIARFGLERKLDLWKRPKTVYKNLQQLTRERDQIVAERVIVKNQLHAEKVEAEPNSMTLKRISERIKLLNKQENEIKNDISKILKNNAELKEEIDRMMTIPGIGELTAVIILAETNGFELIRNKKQLTSYAGLDVKEKQSGTSIKGKPKISKKGNRSIRKAMHFPSLVAVKWDENFKELYARLVSKHGIKMKALVSIQRKLLEMSYVLYKNQTIYDKEYKNSVKTQMT

SEQ ID NO: 259997 - protein, 346 aa, unidentified
MEHYAGLDVSLKEISICVVDEDGGTVARGTCPADPEGVAGWFRNRDLKPRRIVHESGMLSIWLQRGMSRLDLPATSIDARKAHKSLSARLNKSDTADTEGLAQLARTGWFTPVYIRSEEADRLRSLVGARERLIRLRKDLEGHIRGVLKTFGIRMTGMGQGRLRQAFRDQLASAGEANPVLRAIADGFIAAHATLCEAEDDLGKAVKKSAKAHPVARRLMTIPGVGPISALSFIALVDDPTRFSRTSDVGAFLGLTPKRHQSGEMDWSGRVSKCGDGAMRGLLFEAASCLIRQVKRFSPLKSLAVRLAGRRGFRKAAVATARKIAVLMLTLWKNETEYQWTKEATA

SEQ ID NO: 259998 - protein, 334 aa, unidentified
MDLCIGIDVSKAHLDLALMNASGAVLGTGITNESKAIRALLKRWHKQFGVTKANALFCLEPTGHYGYLLVEELMRAGLPTWLAHPLDIKHSIGSTRGKNDRIDAQRIADYARRHHDKARLLGPGSLRMNKLKQLLTCRRQLVTDKRRHQVRIKDLNRHVDRSLRALFDRLSQERIEQIDTQLEKIEAAIVDHIHADPRLREQYVLLLSVDGVGPVLAAHLLACTEGFTRFATARRLACQAGVAPYEHSSGSSIHGRTRVSPQADRVLKTLLHMAALGVIARAGELQDYYKRKRAEGKAPMLVINAVRCKILHRLFAVVQRGTPFVRTPLAQVIE

SEQ ID NO: 259999 - protein, 341 aa, unidentified
MNDFNVIGIDLAKTVLQISKHGELLMNKAVSPSKLKPLLANSSPSTVAMEGCGSGHYWARLAQQYGHKVRIMNPRKVKAYLQGHKTDANDALAIAIAATQCGMVFSQVKSEEQQSLQTLESSRKFLDKELTALGNHLRAYLYEYGITTGRGKKCLREKLVSVLDSSDSELPQCLKHTLQLLWERYQTTQSQLKEATKHKAALVKQLEPCQRLLDLEGVGAVCAPMLYAKIGDGSGFKSGRHASVYIGVTPKQYSSGGKTHMIGITKNGGDKALRAALFQGAFSVIHKLPEVPQTAKQAWLQALVQRVGVKRACIALANKTVRTAWALLSTGKKYEPVLLNR

SEQ ID NO: 260000 - protein, 359 aa, unidentified
MDDGSKGASRMTVGVDLGDRYSYLCFLDTESGEVLEESRVRTIPEAFQRRFGAERHLHIAIEVGTHSPWVSRLLEECGHEVLVSNARRVRLIYGDKRKNDKLDAENLARLARLDPKLLYPLKHRDENSQAHLALIRSREALVGSRTQLINHVRGAVKSFGARLPKCSARSFHKKKVAEHLPKELTPALGPLLETIAELTERIREYERKLEEIAKEHYPETGILRQVGGVGTLTALSFVLILEDRSRFKKSRAVGAYLGLVPGEDRSGESDPQRRISKEGDEMLRRLMVSSAHYILGPFAHDSDLRRHGLKIAERGGKNAKKRAVVAVARKLSVLLHRLWVTGELYEPLYNTRRLGGEAA

SEQ ID NO: 260001 - protein, 347 aa, unidentified
MNKPQFYIGIDIASATFTSAVGSMGERWQIVVKPTQFDNEYDSFAKFLSWLQEHGVTQDNSVICMEATGVYNEVLAHFLLANQYRVAIEPPLKVKRAFHPAGHKSDPVDSCQISEYAYRFYDELRMWEPRKDILEQIKTLLATREQFVVMKTGHKNSLHALKRKVVRTYLAEKMHETAITELKEHISQIEEEIKRLINQDTDLHNTLTLLVSIPGVAFLLAAHMLVTIHSAPLPLSYKTLAAFIGICPYENSSGTSTWHKSTSRHYGPPGLRKLLFLASMSISEHDRQFRNYFLRKVQEGKPKMLVINNIANKLLKIMLAVLRTKSKFISNYRSVNPALLNRALTKS

SEQ ID NO: 260002 - protein, 370 aa, unidentified
MLNTTTFVGLDVHARSIKAVALDAMTGEVRSATFGYDAAEVAGWVSSVDPSAKYVYESGVTGFDLQKRLSSMGIDCVVGAVSKMIKPSADRRRKNDRNDAEFLARMLSVGNVVEVWVPDDECEAARDLVRALDDARDDLKRCKQRLSKFLLRHGHAFSETTPSGRRKGNWTAAHWAWIKSISFAEKADDDVLAYYIDATRQAMEDKARLERLVEAEASKPRWKRRVDSVRCLKGIDVTSAADLVFEAGEFSRFKNARSFAAWLGLTPSEHSSGESARQGGITKAGNKHLRRVLVESAWHYLGCSPHSKDLAKGQVPDPAARRHAAKGVRRLVERRRAMLERGVHKNKANVATARELACWCWAVGCMVENG

SEQ ID NO: 260003 - protein, 378 aa, unidentified
MHKDSVYLCILRENGEKIERVYGVLTPQLDSMRDFMAEKKVSEVAMESTSVYWIPIWRVLVDSFELKLVNPYFIRQLPGRKSDVKDAQWIAECVMKELIRGSFIPSPLVQRLRLYDRRIFEINAELVRKYSKIDAILQRCNIRLSNYVSNTDCKSYKAVVKQISEGVTSPQELLRHVHKRIINKHGEDTILAALTGVVSDAEIDMLAQYVAESAILEDNKNKCIEKMREICNTEFKEQMKNLQEIPGVSERSALTVLAEIGPDVNAFPSAKHLVSWCGFNPRNDESNKKIKSNKITHGNRFIRIASVQCAWAASRTKDCYFSKFYAFHTQVRKKFKLKVVVAVARKVLVCIWHILKFNVLYKDFEPQKSVTKDCTQFA

SEQ ID NO: 260004 - protein, 407 aa, unidentified
MDVVIERACGMDVHKDNITACIITPEGKEIKTFSTKTVFLIQLVDWIKQHNCTHVAMESTSVYWKPIVNLLEAEDIEFLVVNAQHMKAVPGRKTDVKDAEWIAKLLSHGLLKASYIPDRNQRELRELVRYRRSIIEERARQHNRIQKVLEGANIKLGSVVSDVMGVSARDMLNAIANGEEDPEILANFARRTMKKKKEELELALRGYINSHQRLMLRTILKHIDFLTEQIEMLDQEVVERVSTYQEDVDRLDSIPGIATRMAEQILSEIGTDVKNQFPTAAHMCSWAGLVPGHNESAGKRKSAKTKKGNKYLRSALTEAAHSVRGSKNYLGALYRRTAARKGKKRAGIVVAHAMMRIAYYLLTRKEMYVDLGEDYFDKQRQQSIVRHSLRRLQSLGYTVTLQESEAS

SEQ ID NO: 260005 - protein, 375 aa, unidentified
MRRRCRRAQKKIAGGTRWAPIEIGLTVGVDLGDRWSQYCILGLEGETLAEGQLRTTQEDIREFFQALTVARVVIEVGTHSAWVQDVMTEWGHEVLVANPRLMEGSKRRKRKSDRIDAHKLARLGRVDPQSLYPIRHRSRQVRQDLVVLRARDALVSVRTELINTARGLVKSMGTRLPRCSSPSFAEKVKDAIPVEVREALLPLVQLTETVNDCIARYDQKIEELGQKKYGHTTLLRQVKGVGPITSLAYVLTLEDPQRFSSSREVGPYLGLVPKQEDSGDSQPQLGISKAGDRMLRRLLVGSLQYMLGAFGPDTDLRRYGLRLCERGGKNAKKRAVVAVARKLAVLLHHLWVTGDVYEPLHHPGAETNTVQATAA

SEQ ID NO: 260006 - protein, 431 aa, unidentified
MSNRLQVGIDFSQKGADFCLMFPDGQPLEPHQAFDNSSSGYTAAKQLLLNALDNHQFDGLDISGEATGYYWLPFFLQLAADPDLARHDARLFVLNPRWVSWFKKCFAQDDKCDEKDPYYIAERTRTSRPRVAWSPQMNILALRFYTRCRFHLIQNLAREKCYFSAYLFLKASAYRCVKPFSDIFGHTSRLVLTQEPSLDDLAALPVHDLAQHLHELSGHHLRDCLDNAHKLQRAAEESFTLDPILAVPVQRILDLTLAHIRFLEDQVQQVDAWIAAEVSSQPAILQLTTIPGIGPVFSSGLGAEIGHTQRFLQGTKWDKRRKKHRPRNLRDAEDAVAKLAGLWWPRADSGGFEAENRRLAKTGNRYLRYYLIQAADKMRQHIPDYADFYAGKYRQASKYKHKRALVLTARKSVGLVVGLLHRNESYRSKEN

SEQ ID NO: 260007 - protein, 370 aa, unidentified
MNDGSKFVGLDVHKETIAVSIAEAEGVEVRYYGEIKNTPEAIRKLCDKLRPKEGGLFFCYEAGPCGFGIHRQLIDLGWDCLVVATSLIPKKAGDRVKTDRRDSMMLARLLRAGELTGAWVPEDAQEALRDLTRGREDMKRLQRQSKQILSAFLLRHGRRYDGKSYWTKAHYGWLADQKFAHASQQIVFEEYLNAIKSLNLRVDVFDRQIEKMAEESVFKEVIEGLMSLRGVNRLTAVTIVAELGDLRRFESAPQLMAYLGLVPSEYSSGGNRTRGGITKTGNGHVRRVLVESAWTYRHPARKTRTIEKRAGLVSEAVQEISWKAQVRLCGKYTALDSRGKLKVQTCTAVARELAGFIWAVGQAYPSPKAA

SEQ ID NO: 260008 - protein, 347 aa, unidentified
MMNITRVGVDIAKSVFHVHGVDRQDHAQWRGKYARGKWLDALVKRVPVGAEIGMEACASAHYWARELQQRGYRVRLIAAQFVKPYVKSNKNDRVDAEAICEAMSRPHMRFVAVKTVAQQDMQAAHRIREELVGQRTAKANQIRGLVGEYGLIAPKGIQQLRRALPGWLEDAENGLSDAFRVLLADLAGDLRHLDDRVAALTAEIERRARQDPVAQRLLTLRGVGPLVASALAGALGDGRAFRRGRDFAASLGLTPRQHSTGGRDRLLGISKRGDSYLRKLLVHGARAVLRHADGRDDGLSRWLLALAARKHVNVAVVALANKTARIAWALTRQETAYDPALAAATAA

SEQ ID NO: 260009 - protein, 340 aa, unidentified
MEKASMIGLDIAKNVFEVHGRSAAGEVVVRRSLKRSQVEKFFAKLPTAMIGMEACGSAHHWARVIGKLGHEVRLMPPAYVKPFVKRNKSDAIDAAACWVAVGQPDMRFVPVKTVDQQAALSLHRSRDLLVSQRTQLGNALRALLSEFGVVAGKGRAGLAQLVDELRMGTLELPADAVVAATAMADQHTALDAAADTLERRITAQAKADAKAVMLKTAPGVGPLTAHATLATMPDPSLFKSGRDFAAWLGLTPRLHGTGGKTHTGRITKQGNQPLRRLLVLGATAWLRQVKARPEKASPWLRGMLARRPAKVVAVAQAARTARILWAMLTHNQPYRVPAIG

SEQ ID NO: 260010 - protein, 387 aa, unidentified
MQKPHDNSKASPAAFMQDNTLIAVIELSLSNWLVAGLIPGASREPLKKLEPNPEDLLKLLHGWRDEAIKAGRPITRIAVAYETGRDSFWLARWLRERGIDAHVIHATSVAVSREHRRAKTDRLDTAMLKRGFLGWLRGERGHCTVAIVPTMEEEDAKRPHREREGLVHEQTRVVNRMKSALIQFGVRNFNPKLRKARVKLETVRTPEGKSLPPNTIAALRRDMERLKIIKEQIKAIEQARLQQFEQKPEALANRMVYLLVRIYGLGWETADLLVHELLSRTLRDRKAVARYAGLTGSPDESGSKRREKGLSRSGNARVRKIMIQLAWRMVKFQPDSALVQWFKQRTENAKGSRKPMIVALARKLIIALWRYANDGVIPEGFRLHSAA

SEQ ID NO: 260011 - protein, 359 aa, unidentified
MKIVAQDQDIAMGIDVASKHLAITVMGNGEVLKEATIRHTRPAIESFLTRLPGCRIRAAYEAGCFGYWLFDTLVELGVDVTVTPPSLLERAPGDKVKTERRDSMHLAVQLAAGRLKSVAIPSKEERATRQLVRTYEQLKQMRVQSMVRIRSFLEFHHIEVSEEAGRKWTNAFIEWLGTFGFEGMAGAEYLRRSLDALVRVYLDLTHQANQLKKEIGRLAKTRPYERAVHVLESTPGVGTLSAMIVLTEIRNAGRFATSQEFTSNLGLVPSEHSTGDRQHRGHITKTGNRHIRGVLVECAWVWIRYDKAAYATYRRLARRREPKRAIVAMARRLAVKIYWQLRQIRFGEQPRQTDGGQAA

SEQ ID NO: 260012 - protein, 344 aa, unidentified
MYFIGVDHHKQASVMTIVDKDGQELKNGRVLNLRERVKRFLEGYHPFTAVLEAGRSSYVMADLLRELGGEVKMANALQVKAIAHARIKTDKRDSRMLAELLRGNLIPEIYQRGERNRRAQRVMRLRAHWVAKQTEVKNKIRALLAHQREEIQLEVEKREERLFSGKGVEFLKTLPLEDPDKMVLDDLIQGYEEAQAHIQKTDGLVGHLYGEIEEAARIDTVPGFATTLSVLVAVEIADIKRFPTVGDLHSYAGLIPSTYASGERMHHGRITKQGSAWLRWAAVEAVYPAIKKDLGLRVLFHRLAKRKGPNVAKVAVARRLLTIIYRMLSEKRDYIPDKMTRSAA

SEQ ID NO: 260013 - protein, 385 aa, unidentified
MNQTSCSATSSHTLHCALELSKKSWLLAIQFPDREQPSVYSIKGGDTEKLMAKLTAARDCWAKVSGSLPVITLCYEVGYDAFWLARFLKARGIECLVIDPGSLQVNRRGRRVKTDRVDVKMLLRTLIAWCRGERHVWSLVRIPSVDEEDLRRSHRERSRLVRERTAHINRIKGLLFAQGIRDVKVKSQYKTLAVDKLLTADGHRLPPRLASEIARELQRLAMVQEQIAEIERERDTAPTPCEATERKRQLLLQLKSIGPAISALLSREVYYRQFANRRQVGSFLGLTPSPYSSGEEERCQGISRAGSGQVRAIMIETAWLWIRHQPKSALTRWFVERTAGQSTRMRKIMIVAVARKLAIALWRYVEQGLVPQGAILNPPTTGKAR

SEQ ID NO: 260014 - protein, 325 aa, unidentified
MEYAGIDVAKDQLQVCVLTPGRPQRRFENRESGWRALTKWLKAWGEVWVGLEATGTYGDGVSAWLSAAGFRVSVVNPARIHAYGQSQRKRHKTDAVDAQLIADFCRTQQPPLWTPPSAEERELRALVRHRDDLKDLRQAEKNRLEAQPPSATVVSHLHALVELLDQQIAEAEVQIRDHIDRHPTLKAQHDLLTSIPGIGDQTSFQLLAELGDLRRFTDVRQVVALVGLNPQQRQSGRSLQYTAGIARMGRSSLRAALYLPAVVAKRHNPVLRAFADRLAAQGLAPTAVIVAVMRKLLHLAYGVIRSNRPFDPQYGQGMAASAATP

SEQ ID NO: 260015 - protein, 408 aa, unidentified
MQVTFGIDVSKSTSTVCELIGESKNELTITNNRPGFIQLLHELAAFSKHPQIIFEATGVYSRRLQAFLEDYGYEYVVLNPLKAKKEMNMGLRYNKTDKTDAYHLALIQRLYRHSVNQSESQTYKQLNALSRFYDQLTSDLVIAKNRLHQALQSTFPEIENLFSSAKGKNYWQIVVRYPHCDLVRREDKKQLINWLMSLKGIAFKHALRTADKLIELAYQAYPVVSCSSIEVEQVQYYAHRLLNLSDQRENLIARMVKLAKSLPNHDLEDLESIPGFAQTTAVRVLAELGDLRRFSNPNKINAFIGIDPGRYQSGEMDSNLSITKHGNAVARKLLYRAIGQIDNAAKTNPCHIADYYESKKLSSQTKGFKKIAIASIHKLIRTIYALIINDQPYDYNVATHNQKDFSRN

SEQ ID NO: 260016 - protein, 339 aa, unidentified
MQEKKKMIWAGFDVGKETFSASLDQVTENGKAKITSLPCRDFKRTPEGLTKFFQWADGIISGMDLHIVMETTGCYSQQLIDWINLSHPEVKVTIENARNIHAFIESLNLPHKTDKLDAQAIARFGAERQPHPTKRPSKTILTIRELSRERTALIKNRVDLQNRRDTITSSVVRKINAQTIATLTMQIEKIEQEIKACIVEDEEILTEIHIMTTMPGVKFVSAYSILAEIGSLKQYSIKELSAISGLAPRIRQSGSSVHSSFMSRRSSGRLRQILYLDSLPGVPKIPVLQDFQQRLLAKGKTKMTVRCACMRKMLLMLRSMVVHNRAFDEKFLKNLSIRT

SEQ ID NO: 260017 - protein, 317 aa, unidentified
MMKVTHFSVGVDVSKSWLDVCINPQNESYKFHNSTKGISSLLKMLSGYSIHQIACESSGGYENLLLNLCADAGYNVWQIDPKRIKAFIMSQGVKAKTDKIDAKMIARFAAQQEPEYVKQKRTDNNDKISALVRRKTDLTEIAAVEKKRLKGPTGYHCKDRIENLLIFINKEINELTAEIESLIAQDSEMKERKEILESIPGIGATTAAALIADMPELGKIENKQAAALLGVVPYTKQSGMYQGVESISGGRAAPRQALYMAALTAARFNPVMKDFYNRLRSNGKKPKVAVVAVMNKLIVTSNAMLKKKTKWTVTATS

SEQ ID NO: 260018 - protein, 366 aa, unidentified
MNKVIMVGADVHDKNILVKVSLGKEQPREKSFANNCSGREVMYRYLMRMREQTGAGRIVFVYEASAIGFGLYDELTGIGVDCYVLAPTNITRSVRHRRRKTDPADALRLLEIVRGHVLAGNELPAIWIPDQATREDRELVRIRIDVGKKIVVLKAQIVALLNRKGLRKPAEVGKNWSVRHRRWLGKNLEEGMTQYPRSRQALESLVRQLRALEEEERTLDREILALSKTHRYQPVVKELVRLKGVGILTAMVFLTELGDLSRFGNRRELGAYLGLAPSSYESGERNDRKGHITHDGPYRLRKVLCQASWSRVRTDPDEKQVYARIVARNPKKKKIAVVAAMRRLGIRMWHVGLRVQQEEGIFAQVA

SEQ ID NO: 260019 - protein, 456 aa, unidentified
MAKRKIKGNPNATISMPVVNPNAAGIDAGSRSHYVCVSQDNVKEFPTHTAGLHEICEHNKSYGVKTVALESTGFYWQQLFTMLQFYGFEVIVINARHLKNVKGHKTDVVDSKWIQLLHSIGLLDNSFQPNNFCKELRQYTRHRRSLIEASSKYIAKMNKSLVLMNIQLKTVLRDLVGESGLRVIKAIVGGERNPDKLEKLVGRNVKASRDAIRKSLEGDWRTEHLFELSQNFEFYEFTWEKIKETDLRIETILNDWQKENGDEAKRREYATNKKYKKPRQKNDPKFNVKAFAYQMTGGVDLSQIEGVNINTILTMMSETGFDIKNKFKTAKHFASWLGFAPNRKITGGKVMSSNTPKVKTPMVYAIRQAANAAGNSQGRLGDFFRRISYRKGHTVAIIATARKIAVIIYKMLESGQEYCYDYGQNELEKLRKIKIKRIKKTIDLFNIESTELALSI

SEQ ID NO: 260020 - protein, 344 aa, unidentified
MSNLDTCGIEVSAKELVVRVRRQEDLEPLRNFTNTPEGHLLILRYLRGAGRVVRVCMESTGLYGLDLALALSGQEGIEVMVANPRAVRHFAHALMQRSKNDRIDTGVLEQFAVHMPFKPWQRPSAAMLGLHAIARRLRELVQIQTAEKNRQHAAGLSAAIPAVVRRDLARSLRAQERAIERLTRQARKLIAQDPQLTERFALLDSVPGIGETSAVQLLGELGALAPDLDARQWVAYAGLDPREYSSGSSLHKKPRISKAGNRYLRHALFMPALVAVQHDPHLRAFYQHLLAKGKVKMQALVAVMRKLLHALHAMFRTHQPYDGSKLFPLASTPAPEVTHAPVAS

SEQ ID NO: 260021 - protein, 313 aa, unidentified
MKKLTTTMMQETLNKYDGRLTVGLDLGDRSSFYCVLDGTGDVLLEQKVSTTPKALNEIFGAMPRSRIAVETGTHSPWVSRLLSELGHETIVAHARSVRLIGESRRKDDRLDAMTLARLVRIDPRLLCPVKHRSAEAQADLTVIRARAALVRTRTMLVNAARGLTKSYGERLRGCNARGMKSKAAQDLSPELKYALEPMMHEIESASERICQYDQMLESMARNRYPEAERLKQIKGVGTLIALTYMLTLEDPCRFRKSRDAACYVGLQPGRRNSGQSEPQMHNSKEGDPYLRALLVQAAHHVLSPWGVDSNLRR

SEQ ID NO: 260022 - protein, 412 aa, unidentified
MQVMYPTCAGIDVHKREVKVCLITRDAAEQRTKEVRTCRTMTRDLLALRDWLQDHGCPIVAIESTGVYWKPVFNLLEGEMEVVLINPSHIKHVPGRKTDVKDCEWLAELLEHGLLKGSFIPPQAIRDLRDLTRYRRRLVEMRTSEVNRLQKVLEDANIKLASVASDVMGVSGRAMLEALLAGERDAEKLAELAKGRLRQKKDDLVAALEGCFRPHHARLLAQILAHIDFLDESIAECEEQIEALCHPFAEDIERMDTEPGVDRRAAQDIIAEIGVDMSPFPSHKHLCSWAKICPGNNESAGKRKSGRIGKGNKWLRAILIECAHAAGRTKDTYLSAQYARFARRKGKKRAAVVVAHSLLGATYFILRDKVPYRELGSHHFDEINRAHVIHYHIRCLESLGLQVQVQELAVAA

SEQ ID NO: 260023 - protein, 357 aa, unidentified
MNNSKRISFFGCHIYVGVDTHLKNWKVSIRLNGIELKTFSMNPSPVELFNYLKKNYPEGNYHIVYEAGFCGFWALREFRQLKVDCIIVNPADVPTSNKEKVNKNDPIDSRKLARELENSSLKGIYIPDIFHEELRYLMRLRYRIIQNQTRIKNRIKALLYTQGIKIPNHFTGNSRWSHSFIQWLKEIKLNSSPGDFALNNMILQLQQLREHNKNVLTHLRQQAKEKQIAPVINALLSVPGVGFITAMSVYTEIVDMKRFSNQNQLAAFVGLVPSTRSSDETIYNNGISFRRNKFLRPIMIEAAWTAVKGDPAMTLKYRELTKKMKPQDAIIRIAKKLLKRIRHVWLNQEDYVFSLVA

SEQ ID NO: 260024 - protein, 346 aa, unidentified
MMIIGCDYHPSWQQVAWLNLQTGETGEQKLVHAEGQAKAFYQQLTAPVLIGMEATGNSQWFIELVQDLGHVIWIGDAAQIRASYVRKQKTDKRDAAHILKLLLEKRFPTLWTPDREQRDLRQLVLHRHKLVEIRSRVKNELQHLSMNKGVQRKAKLWSQAGQQMLRELPLKPWAACRREDLLGLLAMLNQQIGKLDEAVEHAAEENPQAKLLMTQPGVGPNTALAFVLTIGDVSRFPRGKQVASYLCLIPREESSGGRQKLGAITKQGNRLVRSLLVEAAQIAVRFDPGFRKQYLHRCHQKPKGVAKVAAARKLAVRLYWMLRTQVRYPEIVRIESSPRVPLVGAS

SEQ ID NO: 260025 - protein, 343 aa, unidentified
MQVVTTVGLDIAKSVFQVHGIDAAGQVVIRRQLKRRYVLAFFEKLPPCLVGIEACASSHHWSRELKALGHTVRLMPPAYVKPYVKRQKNDAADAEAICEAVTRANMRFVPTKTPEQQSGLTLHRTRHLFIRQQTAVINVIRAHLAEFGIVAPVGRRGVEALLNVVSDASDQRVPVVARMCLAALGAQLRRLKEQILEFDRMIMAWHRSHETSRRLDAIPGVGPVLATALVASVADPKAFRSGRNFSAWIGLVPKQHSSGGKDRLGSISKQGDRYLRSLFMSGALAVIRYARIHGTKHRPWLTALLARRPTKIAAIALANKMARMVWAMMARGEHYKEPVVLAA

SEQ ID NO: 260026 - protein, 368 aa, unidentified
MNTVYCTTIGADVSDRTTKICVMSKESGKPKIVRETTIPTTPDGFRAFLEGQDKSAPLVFETGTHCRWIDKVGTGMGFKTIVANPARLRMITESNTKNDKNDARTLARMALADVELLHPVRLRDDEHQKMVNLHEIRDQLVKERTAEVLQIRAIAKSMGFRIPDCSAECFHNIAKNSIPKELGDIVWPLMKELKSKAVTIKTVEKQMRKLAKSDVFKAQVERLMEIPNVGFITATCFVAVTGGDMDKFDRPRDIGPWLGVTPKQDQSGDIDRQCHITKAGSKMLRWKLTECAQRVLQKNSADMDLKVKGLRIRARGGKIAKGKSITAVARGLAVLMVAMLKKPEVPYVPLSEDKAKELAQIRAAMAAA

SEQ ID NO: 260027 - protein, 382 aa, unidentified
MQASTVDTPTAGHCGTIFVAIELSQKTWLVTLHSPDRDRISRRTLEGGDDAGLLALLEGVRTRVAGKLGTAPKVVTCYEAGYDGFWLHRLLTAAGITNLVFDPASIAVEQRSRRAKTDRIDGELLLRTLMAHLRGEPRVVRIVRVPSVEQEDVRRASRERDRLVKEQTGHTNRIKALLRLMGMAVSNPRRSDWLSWLAQQRDRQSRPVPPHLMFEVAREHARLMLVREQLAALEQAPTAAVAAAPAPMAERRNLLLRLKGLGAVFAATLTNEVFYKDFHNRREVASYCGLTPSPWRSGGIDREQGISKAGNPRARLKAVELAWLWLRHQPDSALSRWFAARTANAGKRARRIAIIALARKLIVALWRYLTTGLVPEQAAMKA

SEQ ID NO: 260028 - protein, 439 aa, unidentified
MPTPSLPLLDPSAAAIDVGSEQLHVSIAGGPPKVFGTTTRELYALRDYFLAQGVRSVAMEATGIYWLCPYEVLEKGGLEVVVVNGKYVKNLPGRKTDISDCQWQATLHAHGLLKAGFVPPEHIRRLQDYLRLRSDHIVMAGSHEQHMQKALERMNLKIHDVISDLTGMSGLKMVQAIIAGQRNPVALLVLCDPQIQKNKAGRLCAALEGNWKDEHLFALRQAHELWQFYQKKIAECDQAIAEVLKAMAGPEDPGNPAPSAAKRGGVNTPQIAGLHGMLWRLCGSKDPTQLPGVADYVLLQLLSEVGTDLAKPWKTEKHFTAWLGLAPGSRQSGKRRGSQRRSRNRAGRLFCVIARSVGRSVDKALGGFYRRLKGRKGGLVANLALARKLAELFWRLMVHGISYVEQGLKKYEAKVAQTEQGLLQRLARKYNMVLQPKAA

SEQ ID NO: 260029 - protein, 401 aa, unidentified
MSKKNTRNALDTSLSYAVIGLDLAKADCAVAAVPCSDDELGLIDRMDYESLFEQAEKLEPTLFAMEPCCGYSQISLRLQNMGHEVKVISGHAVKNWIATHKSNQKTDLNDATALAKLALYDHDLQPIRVKNVEECRIASVQAIRIQLRTQATKSLVCFKSLCQCWGIVIRRGSLNTKKMAEAVAAVEKLLGAEVASSLMILRDAYKFTMKQINALDKVLDALVEANEQARTMKTGLGIGTQTAARLAVTTGDIKRFPMPRSYVAYFGLAPRNIITGHSGTPSPSKRDALKPVSSRGQGKVSRRGDRVARSFIIQGAATIYMLYCKDMLPECQLRRWLHEQIKRGKPYGKIIVSLAAKLLRIVWALLTYGEKFDIHKAGVPRSVLAAMEKPLKHDAAAESAA

SEQ ID NO: 260030 - protein, 382 aa, unidentified
MVGNPLSFENNEVGFTRLLEWIKGLKAVKNFDKAIVGMEPTGHYWINLSKWLYEQNIDVVSVNPHLVKKNKENRDNTQSKSDKKDALVIADMVKNGYYAFIRPTSEPFEKLRVLMANRDVIVKRLVSSINQINRWVDIVFPELRQVFKDFKGKGAIATLRLFPTPRELRSMEAQDIVKGWKTLMKRHAGFKKAQLLIELAKHSVGSHQAHDAYKLHLEQLLEEFDLATAQLERVEKEVTDVLKQIPFARKLLAIKGISEITLAGILGEAGDLSGFAHGNSLLRHGGLHLAEASSGKWKGQIVLSKRGRSRLRRFLYLATMSLVMNNPEFKELHSNNVKVKKMKKMKSIMKLIGKLARILVGMARRNESYCPRKVQPLTPLAA

SEQ ID NO: 260031 - protein, 352 aa, unidentified
MSQPHNSMEETKMKLYGAIDLHSTNNVTVVIDEQDRVVYQKRLPNDLALILMELSVYQTELQGIVVESTYNWYWLVDGLMEQGYKVHLANTAAIQQYEGLKYTDDHSDARWLAHVLRLGVLPEGYIYPRADRPVRDLLRKRSQLVRQRTTNLLSIQNLVTRNTGESLSANQIKGLDVQQVDELLPNGDLALAVKANLSVMCSADEQTKILERTVTQRVKLSPQFSLLKTVPGIGQILALTIMLETGDIRRFCSVGNFASYCRCVGSQKVSNGKKKGKGNTKNGNKYLAWAFVEAANFAIRFNSKIKSFYQRKKAKTKGVVAIKAVAHKLCRACYYIMRNRVAFDLIKAFGQK

SEQ ID NO: 260032 - protein, 344 aa, unidentified
MGEVSTIGLDIAKAVFQVHGVDGAGTVVIRKRISREKMLEFFADLRPCLVGIEACPSAHHWGRELSGLGHTVKLMPPSYVKAYLKRSKNDANDAAAICEAVTRPSMRFVPIKTKQQQTALMLHRTRQLLVRQRTMLSNALRGHLAELGVVSAKGRNGTAELLRIIADIEDHRVPPVARGILDVLARQYGAIGAEIGSIDKSILAWHRSCDASRRLAEIPGIGPIVATALVAEIGDWKAFASGRNLAAWIGLVPKQHTTGGKDRLGSITKQGNRYLRWLLVIGATAVIRYAQKHGTKNRPWLGRLMERRPAKVAAVALANKIARMAWAIMVHGDRYKEPKLLMAA

SEQ ID NO: 260033 - protein, 372 aa, unidentified
MNYNTVYVGMDVHKESFTFCAYTIDAEKGSHFQRTEADYKNVLKYLEFLRTVYGNDANFICGYEAGCLGYTLYHQLIEHHVNCVILAPTTMLEQCSRRRIKTDRRDAEIIAKCLAQHNYSPVHIPTATDEETKEFLRMRDDHKLALKKVKQQILAFCLRHNYRYDGNSHWTAAHIKWLKSLKPEALYKEILDEYLLTYTTLSDKLERLDKRIEELASKDEYRESVKKLCCFIGIKTHTALSVLIEVGDFQRFASAQKFASYLGLVPGEDSSGDEQTRLGITKAGNRHVRMLLTETSQCYARGQIGFKSKELKSRQAGNSPQVIAYADKANERLRRRYYKMVLGKSKKHNVAKTAIARELACFMWGMMTDHIT

SEQ ID NO: 260034 - protein, 391 aa, unidentified
MIYIGIDVAKDKHDCFITNSDSEVLFKAFTILNNLDGFNDLYQKIESVMDDVTKVKVGLEATGHYSYNLLGYLIDKGLPTYVINPLHTNLYRKSLSLRQTKTDKVDARTIASMLMSDVNLKSYSDTSYHNKELKSLTRYRFDKVKERAKLKTSVSRLVCILFPELEKLVPTLHMASVYALLSEFPSAKHVATAHLTRLTNLLSESSKGRYGKDTAITFRDSARASIGSNMPAKSLELKHTIKLIQELDSEIDEIENEIKIIMDEINSPILSIPGINYRMGAMIIAEIGDFNRFDSPDKILAYAGFSPSTYQSGQLNGAYAHIEKRGSRYLRYALYNATKYVCHWDPTFAAYLAKKRAEGKHYNVAISHAVKKLVRVIYHLEKTKQQYIKAA

SEQ ID NO: 260035 - protein, 424 aa, unidentified
MKVTYQTCCGVDVHKSFLVATIVKTTGDIEPSYQKKRFSTFNNSILEFKQWLLDNDCHDVCMESTGKYWVPVFNLLEDDINVVIANPKWVKAVKGNKDDTKDSKWIGDLFRLGLVKGSYIPCKKVRILREYTRYRYKLVSCRSSEKNRYQNALTVCNVALDSVVSDIFGKSSTSIIDYLLEQSGSSINHEEIASKLLRSLKSKEDAVIESVEGYQMTDAQKYRMRLVRAHMDYITAEINDVDKMIENMISSNTDFENAVQFLCTIPGVKRDSAITIISEISTDMSQFSSSKRLCCWAGLTPGSNESAGKKKSVRFTRAGVYLKPALVQCAHAAVKSDKSPYYKKKYESLVKRRGKKRAIIAIARMILTAIYQMLSTGEQWNPSDLYKIDMPVALVEKQKAKAIKQARKLLQREGLLPPDEPFAS

SEQ ID NO: 260036 - protein, 445 aa, unidentified
MTGEAVYSVGFDLGGKAHEVVVTDPDGERVHRFAMGRGRHGFDQLQQEMAAFLPSASRAVYVVEAAQNFWQEVVHPLHSAGEEVYLVDPTKCADFRKFFHRYVKTDPIDALATSRLPRTDPQLRPVWVGSAEQESLRRLCRLSWKLTEQICDHKRRLSTLLEMLLPGVTQVWRNHYCGSARLFYRRYLDPARARRLGQKRLAAVLRRRAWGKFSAQAEQKLWAVIQNAPTLRYRADDLSLEVNSELDLLEALEKRQQTLRERIDELYSEVDPGRQLEQVPGLGFFFAAALTAAIGDPQRWQNADQVVAAAGLVPRKRASSGKEKAHQPITKKGNPQLRCWLYVAAEITRHYDPELQAFFRRLRRRGLHHKAAICAVAAKLLRRLYAVLRDGSRYRRLAEDTIEQEKKPVRASVHEVATRLLKDEPAPASKEAYNEIPVVATGSGP

SEQ ID NO: 260037 - protein, 426 aa, unidentified
MKPNNPPEFTALIGLDWGDKSHAIALEPAGGSTETSTLEHSAETLHQWLDQLEQRFGARQVAIAIETDQGAVVYALLERPWITIYPIHPATSTRHRTMFRPSGAADDLPDALVLLSLLQHHRQRLRPLQLDDETTRTLARLVEARRKAVDRRTLLLNQLVSTLKNYFPQALELVGEDLCTDMALDFLTKWPRLVDVQAAKPATLKSFYHRHNVRRPQLIQKRLDRVRSARLLTRDPAVIEVSVRVVQLLVAELRVLVEHITAFESAIAQDFARHPEKTFFSELPGAGPTLAPRLLAAFGTLREQYPEVACMQRYFGVAPVTEKSGSRAWIHWRWNAPTFTRQTLVEWAGQTIVFCPWAKAFYERQRARGSAHHAIMRALAFKWLRVLWRCWQKRQPYNQEQFLRQLEKRRSPIAARARQLAVEMAA

SEQ ID NO: 260038 - protein, 309 aa, unidentified
MDTIVVGIDVSKDRLDVSVQPAGTALSYNRDAVGIEGLIEALAPLAPQLVAVEATGGFEAVVAASLAAAGLPVVVVNPAQVRSFADALGKRAKTDRIDAQVIAQFAAAANPPVRALPDAATQALADLVTRRRQIIQMIVAEGQREKRASVRARKSIQRLLKSLRAELSEIDAEIDESVRGSAIWREKENLLASVPGVGSGTARTMLAELPELGTLNRRQIAALAGLAPFTRQSGKWRGKSFISGGRASVRTALFMAAMTAMRCNPALRAFHHRLRAAGKPKMVALIAVARKLLTVLNAILRDKTKWQNA

SEQ ID NO: 260039 - protein, 375 aa, unidentified
MSVDRSGGHEPLFAAFVGIDWADQKHVWSLQTADSQKRESGELEHAPEAVEVWVTQICQRFAQGPIAVALEQSRGALVFMLSKYERLHLFPVPSTMAGNMREALYPSGAKDDPRDADLLLDLLLKHRDKLRRLSPDTEATRRVQNLVEERRKLVDEKTEQINRLTSHLKIYFPQMLDWFDRLDREAACALLERWPTLEELQKVPPVKVRAFLCKHHCRDQGVIERRIVGIRQAVPAIRDRAVIEAKSAVVQVIAQLIRILVQGIGKLDRKIEEETAAHPDFFIFDSLPGAGPALAPRLLSAFGSQRARYGSAREVQAYSGIAPVIERSGKKKWVHFRWAAPKFLRQSFHEWAGRSIAQSQPRRGVPCPVGVVCEH

SEQ ID NO: 260040 - protein, 316 aa, unidentified
MEKHLFVGLDVSKNKLDVAVRPTTRHFVVANDDQGLELLVQRLAALKPMIIVLEASGGYESLALAALSEAHLPVALVDPKAVRHFARATGTLAKTDKIDAQVLAHYAQAVRPDPRDLPDQELQVLQATVKRRAQVVKMIGQEENRLEKTRLPRLRRDIEEHLAWLRQRLQDLNRDLQEQIRRSSLWQERDRLLQSVPGIGPTVSRALIPHLPELGALSGKKAAALVGVAPFNRESGRFRGKRMIGGGRSYVRRLLYIAAVVASRYNPVIRTFYQRLRAAGKPAKLAHTACVRKLVHILTPMVKNHQPWNQSVTQAP

SEQ ID NO: 260041 - protein, 353 aa, unidentified
MITIGVDAHKHVHMAVALDERGRVAGHWQGENSVAGWDEATQWARALGDERRWGIEGGGGYGRGLAQHLVGGGEVVYDINPRLTATERRRSRRTDKSDAFDAQAIAQVVQREEDTLPRVAAEDETVALDLLTAEREDAQAEATRLRNRLHHLLLQLDPQYHLHLPALTSVAGVQAAAGYTTTSSSLVQQERAAVVRRLAGRLRLALEQVAELGGRIEALAQARYVPLTRLCGVSLLTAGSLAGILGPGHRFASEAQLAAYAGVAPLETSSAGRVRHRLNRGGNRRLNAIVYRIALVQARWSPEAKAYLARRVADGKTKREAFRALKRYLVRAIWRLWHACLSPAGVEPAYHAT

SEQ ID NO: 260042 - protein, 363 aa, unidentified
MEVAKEGRYVGIDMGKTGYVLRLIDGRGRVTGWEGKTNPEGRKELYKRLRPEDRIAIEACNLAFIMNREFKELTGAELYILNPGKLYQIYMTDKKTDKEDALKLAKEIRDKPEEDLPRVYAPTEEMKEMRKVVSEYREIVRLHTQRVNRLHTVYEHCGITDLKRCDLKTRANREKNLGLLTGYEKEEALRLMQVIDLLESQKDVLEKKIKEAERSDEKIRTVEQVPGVGKITAYAFVASVGGAGRFANMAQVSSFLGFVPKIDCSSQTAHYGHITKKGNGYLRGLLVQAAWVLVRSKSGGALKEKYHDLVLHGLSRKKAIVAVARKMAELMYTLLKNNSKYEPRKFVAPLSRTERLAKLAVAG

SEQ ID NO: 260043 - protein, 351 aa, unidentified
MIIIGCDFHTRYQEIAWLDTDTGEMQERRLEHAGDEVGKFYAALPRPVRVGIEATGYSPWFERMLQELGHEYWIGDAAAIRASVVRKQKTDRRDAAQVLELLRTQRFPRIWVPTPAERDLRQLVLHRVKLVQLRTKVQNQLQAMALGQGLCRRKKLWSVRGRAELQSLPLDRWARRRRQELLQLLDQLDGSIRELQAEVEQQARQHPEAARLMTHPGVGPVTSLAFVLTIGPASRFARGKKVASYLGLNPSEHSSGGHQQMGRISKQGNSTMRWLLVEAGQTAARHDPELRRMYGRLKFRKGSAIAKVAIARKLAVRLYWMLRSSSDYAGLVRMSGSSGSAVAPEDPESGR

SEQ ID NO: 260044 - protein, 480 aa, unidentified
MQILFSRVCGIDVHKGTLAVCVLIYREGKKPEARYKEFGTHQKALTALRNWLSAQKVTHVAMESTGVYWKPVWYALEGEFQLLLANPFQVKALPGKKTDKRDSHWLAELLAHGLMTASFVPPEKTRALRDLTRYRVKLSEELNRIHNRIHKVLEDASIKLDTVVSHIMGGTGRSIIEGIIEGKESPRQLAERAQGSLRGKRAQLELALYGRVSEHHRFLLRELLEDFRFVEAKILRLDKTLSGSVDWEQVARLCTIPGVDVITAWTLLAELGSDMRVFANSKKVASWAGLCPGNKESGGKRLSGRTRKGNRWLRRGLCQAAWGASRKKDCFLNAFFQRHKAKQGAQKAIITTAHRLLVIAYCMLRDGTTYQERGGDFYDQLNAARTRQRLIERLRRLGVAVTISSPVLPVPPTPTSQVLAPTPPRQALPSSPDHQPSASAPTVKRKRGRPCKCAERGIPCTHQMVIAPTPVATPPVATQQ

SEQ ID NO: 260045 - protein, 414 aa, unidentified
MADEETISWFAGVDWGSEKHQVCLLDAQGTTAGEHEFPHSGEGLTELGDWLLSMASVASTVAVAIEVPHGPVVDALIDRGFVVYAINPKQLDRLRDRFSVAGAKDDRRDAYVQADGLRTDRRLFRRLQVADPRLIELRAWSRLAEELRAERVRLSNRVRHQLWRYYPQMQKLTDDLAAPWFLELWTIASTPAKAVRLRKSTVERLLKQHRIRRIDAETALRILREPAIKVAEGVAEAASIHMRSLVARLRIVNRELRKAERKLDELCTVISEIEQTSGEGLQRRDVEILRSMPGIGRINLGTLLSEASGPLSRRDYEGLRTLSGAAPVTKRSGKSVIVVRRYAAHVRLRDTVYHWARVATQRDPKCRARYTAMRKRGHSHGRALRGVADRLLALACVLLQRQTLFDPYFGRLTT

SEQ ID NO: 260046 - protein, 418 aa, unidentified
MKTEPDYVAFVALDWGNQNHAFARRFAGTTAEECGQFPANAEALHGWLEALHRRCAGPVAIAIEAGGNSVLQALLEYPWLTIYPIHSAASARFRRAFRPSGAKDDEPDALMLLHLLCLHRRQLSALRVDTPATRKLAALARMRRVTVDERTRLTNRLTSTLKSYFPQALALVGEELSAPLACAFLRRFPELAAVQKVRPASLRAFYHRHHVRSEERIAERLALVRQARPLHRDRAVIEPAVLEVAMLVEQLEMQARQISALDQHLAAAFAAHPQAAFFSALPGAGAVLAPRLLVAFGDHPERYPDAGALQKYAGVAPVREKSGRHLWTHWRWNAPTFLRQSFVEWAGQTVVHCSWARAYYHRQKCSGKSHQAILRALAFKWIRILWRCRRDHTPYDEQRYLEALRQKRSPLAAALLSS

SEQ ID NO: 260047 - protein, 370 aa, unidentified
MENRSMFVGLDVHKETIDVSIAEGHRNGEVRHYGVIASDLEPLDKVVRALRAPNRRLQFVYEAGPCGFGIYRHLTKRGEACVVVSPSMVPKRSGDRVKTDRRDSVTLARLHRAGELRAIYVPDDADEAMRDLVRAREDAVVVGTQAKYRLKAFLLRQGRRYPGREGWTLPYRRWLTDLSFPSAPQHITLQEYRDTIDETERRIARLTEQLRQLAPTWRWAPVVAALQALRGVSFITAVALVAELGDLTRFGHPRELMAYLGLVPSEYSSGPSVRRGAITKAGNPHVRRLLAEAAWAYQGIPRIGRQHAYRQEALPKVVCDIAWKAQLRLTTRFRRLIARGKAKPKVATAIARELTGFIWAIAQEVSPASQ

SEQ ID NO: 260048 - protein, 426 aa, unidentified
MSERDYSKQVARRQRIGSRTLVVGVDVGKAYNAVGFMNKEGKVLGSCAKIDNSREGFEQFRKMVEDLKTRYGLKDVLVGMEPTGHYWRKLAYYAKERGHEVRFIRTTALKHHRELDESASAKSDQRDALTLTNITREGKYIDTVVEDGGMRQLRTLVKVREKIQKRNASAENSLHAALDDYFPELKEIFWSMHSRGLWALLQRCPFPVDVVSVKVSVLQEIIGRASRRRAEASQKAMAVSRAAKRSIGLKQIGSADRYRLKMCLEEVKRTELMIKDMEREIKRMLGDNPQAAYLLSIPGIGPISAAVFLGELGNPSYFQSARQIVKYAGYDPQESDSGYRVSRKFISKKGRWLLRKHLFLMSMRVVVLSRYFQGYYQRKLQTKNRFGQLPRKKEILCAVAIKLIKVIFALLRDQRNFEDTVACSVQ

SEQ ID NO: 260049 - protein, 392 aa, unidentified
MVVSVGIDVSKDKHDCFIVSSEGEVLSDVFTVPNNMDGFLCLLQRIQDCSAPQDKIKVGLEATGHYSYNLLGFLLDNGLATYVLNPLRTNLYRKSLSLRKTKTDRVDARTIASMLLSDAGLKPYTDTAYHNEELKSLTRYRFDKVKERAKLKSSISRLVCILFPELEKLVPTLHMASIYALLEEFPGAKQVAAAHLTRLKALLETASKGRYKRDMALEIRDAARNSIGSRMPAKSLELQHTIRLIRELDNEIAEIEEQIQAIMDDLNSPITTIPGLGFRMAAMILAEVGDFTRFDSPDKLLAYAGMSPSTYQSGQLKNCYPHMEKRGSRYLRYALYNATKYVCHWDPTFADYLAKKRAEGKHYNVALSHAAKKLVRLIFAMEKSRAPYRLAS

SEQ ID NO: 260050 - protein, 347 aa, unidentified
MSKIKLVGIDLAKRWYQLCALDEHGKVLYNRKLSAAKFPLALQQLEPTVVAMEACAAAHYWGRRLCTLGHEVRLVPAQHAQAFRRVHKSDEHDALSIAEAAQRPNLHFVPVKNLAQQDLQLLGRIRERLVAERTAIINQVRGLAREYGVNFGQRRAVLMAELPQALADASNELSPIAREALAERYEQIKQLGAQIKVIMQRIATVAGEDPAYERLLSIPGIGPTIAPALLASVGHAQQFASGRSCSAWVGLVPRQHSTGGREQLGGITKNGDQSLRALLIHGARTVVRWAGRVDNAQNRWILALVERRGKNKATVALANKLMRIVWAVLNHAEDFDRDKAFRAQPAR

SEQ ID NO: 260051 - protein, 346 aa, unidentified
MMLIGCDFHPSWQQVSWLDVETGETGEQKLVHAGGEAKQFYEQLAAPVLIGMEATGNSQWFIELVEDLGHQIWIGDAAQIRASYVRKQKTDKRDAAHILKLLVEGRFPRLWTPDREQRDLRQLVLHRHKLVLIRSRVKNELQHLSLNKGMQRKRRLWSQAGQQLLRELPLKKWAACRREDLLGLLTMLDEQIGKLDGAVQHAAEENPQSKLLMTQPGVGPNTALAFVLTLGDVGRFPRGKQVASYLGLIPREESSGGRQKLGVITKQGNRMLRMLLVEAAQAAVRYDPQFRKEYLHRCHKKPKAVAKVAAARKLAVRLYWMLRTNVAYPEIVRIESSSGLPLVGAS

SEQ ID NO: 260052 - protein, 342 aa, unidentified
MNEYDGRQFVGIDLHRRRSVIVRQSESGEQLSAVRIINDPVALGLEIERAGPNPEVVLEATYGWYWAVDTLQAAGARVHLAHPLGVKGFRYRRVKNDVRDAADLADLLRMNRLPEAWIAPPATRELRELVRYRAKIVAVRSGLKAQVHAVLAKAGVLIPVSDLFGVGGRQRLAKVPLGAAYVQRVISLLELIDALDAHETRFSIMVADKLGGHAGYQAIQQLPGVGPILGAVFVAEIGDVHRFADPAHLCSWAGLTPRHHESDTVVRRGHITKQGSKLVRWAAVEAIQRHPATSKIALDRTRIESRRGKNIAKIAAARKLLTLVYYGLRDGHIRALAPRRAA

SEQ ID NO: 260053 - protein, 318 aa, unidentified
MLGIDVSKDTLSCALLDTTTRQLLWHKEVNNTAAGWKQLLRHTPQAAPWVLEPTGRYSQPVARAAREAGRDVRLAQPKKAQLFLKSVQSRAKTDKLDAAGLALYGLSCLGTSHDLAPYPLKSEMQDELDQLLCARRGLSQSLCELQARQRELPRAAQTLEPAVVALQEQIKDADRQIAGLVKAPELQAVKELQKVPGIGPVIAATLVSRLTARSFGHSDQFVAYCGLDVRVRQSGKKSGQLGLSKQGEAELRRLLYLAAQASLRAKGSPFKAQYDRERAKGLSSTAALCAVARKIARLSWSLVTHGSSYDPQRVYKQN

SEQ ID NO: 260054 - protein, 343 aa, unidentified
MEYYAGIDVSLKESSVCVVDATGKLVREVKVGSEPECLVGYFDQLDFPVERIGLEAGPLSQWLHAALVAAGHEVVLLETRHVKAALSAMTVKTDRKDARGIAQLLRMGWYRPVHAKSSPAQDTRALLVGRKLLQSKLLDVELSIRGILRGYGLKVGEVSRGRFEARIRELIAGHAILSMVIDAMLTARAALWSEFTKLHREMLRIARADRVCQRLMSAPGVGALVALTYRSAVDDPARFEKSSTVGAYFGLTPKKYQSGETDRDGGVSKVGDAMVRTALFESAHIMLTRATRFSSLKRWALDVARRRGMKRAKVALARKLGVVLHRMWMDATDFRWSANPMAA

SEQ ID NO: 260055 - protein, 317 aa, unidentified
MTYTNRFIGIDISKSSFDICVLPDTSLASFSNDASGIAQFLAFVSRLDNVARLVLEPTGGYERSVVDALLAAQLPVARINAKQIRQFARACGQLSKTDRIDAFVLADYARRMETKVLTQASAAQTTLVDLVSRYRQLSHMIVQEKNRREKLRARNEDRAKAWIEETLDFLMRQRQSVVDAMEACLRSDKDLADKAQVLTSLKGIGLKTACFLIAWLPELGLLDKGQIAKLVGVAPVNRDSGLMRGKRMIAGGRKPVRDALYVAALPAIRFDPAMKAVFDRLKAKGKPGKVALVAVMRRMIIILNARMRDYRATVLDP

SEQ ID NO: 260056 - protein, 398 aa, unidentified
MIVQGTSVGLDVHALSVVAHAVDEETGKVARARLCPDHGEVLGWLHQLRAPVRVTYEAGPTGFGLARAITGAGMECLVAAPSKLQRPAGDRVKTDARDAAHLARLLRLGEITAVRVPEREIEAVRDLVRAREDARADLMRVRHRLSKLLLRQGIVYSGGTPWTCVHEEWLRRHRFDDIHLKAAFDHSFDAVLAATAARDRLDEQIMVVAASPRFADPVNRLGCLRGISALTGLALTVEIGDWSRFSGSSIGAYVGLVPCEYSSGNSRVQGSITKAGNTHVRRLLIDRPGITASPTAPRDPPCGPAGPRSTRRFGLAGTPATGASTSGGAASPNAARTHWSPTSPSPANSPAGAGLWRPCTKPASTQTWLIQVTRRRRGERTNLQRTYEPQRDSHGNRE

SEQ ID NO: 260057 - protein, 417 aa, unidentified
MKGLSMQVMYARCAGLDVHKKMDVGCVMVSGNGGNVEQEIRTFATYTSDLLALSDWLKSHGVTHVAMESTGVYWKPAYNLLEGLFELLVVNARHVKAVPGRKTDVKDAEWLADLLRHGLLRGSYIPARPQRQLRELTRHRANVVQRRAQAVNELQKCLESTNIKLASVATDITGVSATEMLSLLLAGQTQPEALAELARGRLKEKRPLLQKALQGRVEAHHRLILSQLLAEIAWCEEQVSEVGMEIAKRLKEHEELLKRLDEIPGVNQRIAQVAAAEVGTDVKAFPSDKHLSSWAGLCPGNNESAGKRHSSRICPGNRHLKVALMEAANAASRKKGSYLRAKYHRLSGRRGRKRALVGVARTILQSMYYIIQRGTHYQDLGENYYDQRNPEKLANRLAKRIEKLGFKVTVQTVPPAP

SEQ ID NO: 260058 - protein, 366 aa, unidentified
MLVRGTKDKEHAMAEALKNSITFVGIDIGKNSFHVVGLDECGAIVLRQKWSRGQVEARFANMPPCLIGMEACVGAHHLSRGLQKLGHDARLMPARYVRPYSKGQKNDFRDAEAIAEAVQRPTMKFVATKTADQLDLQAMHRVRERLVSQRTGIINQIRAFLLERGVAVRQGLRFLRSELPGILARPSDILSPRMVRIIEDLAGDWHRLDERIEGLSSEIEAIARRDSSCERLMSVPGIGPIISSAMIAAIGAGDVFSKGRDFAAWLGLVPKQISTGDRTVLGKISKRGNRYLRVLFVQAAWVVLIRPKSWERHGLKSWIEAAKKRLHRNVLAIALANKLARIAWSVLAHGRSFEASKLAEVAAKSA

SEQ ID NO: 260059 - protein, 351 aa, unidentified
MVVVVGADVHKRSHTFVAVDPAGRRLGQLTVKADAQGHDKAVRWAESTFGTDLRWGVEDCRHLSARLELDLLDAGQQVVRVPPKMMAEQRRVARTRGKSDPIDALAVARAVLREPDLPAASHDEASREVKLLVDHREDLVRQRTAIINRLRWHLHRIDPALDPAPQSLDRASTRARLAEFLTGIEGIDARLARELLDDVAALTARADALAKEIAQLADQLAPELLELPGCGPLTAAKILGETAGISRFAHEAKYAMHAGVAPIPVWSGRTAGKVRLNKSGNRQLNAALHRIAVTQIRLGGLGKAYYDKRLAAGDSKTEALRCLKRRLARVVFNTLKNAQQAAAAAQYATAA

SEQ ID NO: 260060 - protein, 384 aa, unidentified
MKPNSQMALGEFFRQCVGIDISKNKFTACLYMYDRASDVGCYTKSIDFDNTKSGFNQMVRWGRKEAVKGYPLTFLMEPTGVYYERLAYHLHKIGQTVYVVLPNKARKFCESEGIKTKTDAMDARCLALMGCASRKLKPWEPPTAIYRELRQMTRFHADLCVIRRSVANRMEALDHMEGVSKTVRKHCERLIEEIDTLTEKNDKDIMRKVAEDKELLARVKRIATAKGVGVTTIVCVIAETEGFHLIENRKQLTSYAGLDVKAKQSGKEDPKHKISKEGNAHIRAALYMPALVAVRHNRQIREAYARICRKHPKEKKIGVTAAMRRLLLLIYTLWKNGEEYDETRDKTQMPRKKEVETEYGPEDCIGTNRESIWNAVDENGEPPF

SEQ ID NO: 260061 - protein, 348 aa, unidentified
MKRIVKQVVGIDVAQNELVVCLGKMLDDWTPELYASKSFANTKKGFISFIEWVNKLTNVSIPVRYVMEATGVYHELLAYYLDDRGLELSIVLPNKISNYARTLDVKTVTDKTASEAIARFGLERKLDRWSRPKDLFKKLRQLTRERGQLVDERTVLKNQLHAEQAEAEPNKKSIERIKKRIALLDKQEKEIRQEIEELIKSDAEIRQLIILICSIPGVGLLSAATVLGETNCFDLIRNKRQLTSYAGLDVREKQSGTSVKGKPRISKKGNKHLRKVMQMPALSAIRHDERFKAVFVRLVSKHGIKMKAIVAVQRKVLEMIYTIYKTNKPYDKNYFKNQEQEERNLVIQ

SEQ ID NO: 260062 - protein, 337 aa, unidentified
MKYSGIDLHSNNSVVSVTDEADRVVAEKRLANDLGQIVGFLIPWREELAGVVVESTFNWYWLVDGLQAAGFKVHLANTTAIKKYDGLKHSGDEADARYLAHLLRLGILPTGTILPREQRAVRDLARKRMQLVRSRTMHVLAVENITARQYGARMSGNQVKRLTAESVDRMPLVEEVALALKANVAVIGTLSAQIELLEKRLQKLVGKRAEYGLLTSVPGIGPVLATTILLETGPIERFAAAGNYASYARCVDSERTSNGKKKGEGNTKNGNKYLGWAFVEAANFALRYCAEAKRFYERKRAKANRVVAIKALAHKLARACFHVLKERKPFDVTRCFA

SEQ ID NO: 260063 - protein, 452 aa, unidentified
MRPIALRQVAPRRPRTQYPKDAIQHPPVIDTRHPAGLVGKKRRDRAPFEFGQIINLNSAACDIVFPAVVDGRPKSLWDTKPVGEPRSPSAVPSNPNSRQGRLRKQSPFRQGWDKMDIIAGIDVSKDRPDVHVTPSGDSFFVCNYHAGIDGLLARIAGFGADVVALEATGGFENLAVAGLSGAGLAVIVVNPAQVRAYANALGRRAKTDPIDAAVIAAFVAATKPQIRPLRDAETQVLSELVARRRQIVQMITAEENRERMVLARQARKSVQRLLAALKRELKSLDADLDDHIRKSPVSLVRETLLTSVPGVGPTIARTLLAEMPELGQLDRRQIASLAGLAPWTRQSGKWKGKSFIGGGRGRGAGCSVHDGPRGEPLQPCAQGVQEPPRQKRKNPRSSPSSAPCASGSPSSTPSSGTKNHSKTLDQQDSRSLQEVESRLIICEPPLWVHGLN

SEQ ID NO: 260064 - protein, 378 aa, unidentified
MLSEHIIWVGLDVGKRDTVCAIDWLDDNQELNRNKGLTSLAVKHITNTREGVKDFFTWLKANQKHIEERLHPQRKVVYRLVMESTGCYSYRLIKQLKAAKPDSYIALINPAKVPAFKKFNDIESKTDKLDAQCLARLGTTQKPDAMYEMPADYAGLKRLTRMNASLTKISTILKNQLTNLDDPGERQIFQNLLKSVKEQLDGLGVKIREYLRSHAALQERVTKLDSIPGIGMIIAATLIAEYGPEDRFQNIRQVVSFAGMNPKNKCSGTSVKSTRLSKQGAPVIRQMLYMATLTAQARIPILDALSKRLTNLTPMQKRCAVMRKLLMICWSVLCGTENYKEYQPSSKKLVSYEAPATTKRRIKRERKKRSFSPENDAD

SEQ ID NO: 260065 - protein, 369 aa, unidentified
MPENTNVATLISLRKRKPVGRMTIGIDLGDRRSHFCVLNEQAQVIARGFLPTTISAFRREFEGLPSSLVAIEAGAHSLWANQVLKVCGHEVLVGNPRKIRLITESDRKSDRVDAESLARLARADRLLLAPIQHRTQEKQVQLSIIRARHVLVRSRTALINCARGLVKPMGLRLPACSAEAFAKRAAATSLPELLRVALGPLLKQVEAVNQAIRDYDRQIEQIAATQYPETCLLKQIKGVGTLISLTYVLTLEDPHRFAKSRDVGAFLGFLPREKQSGERAPRLGISRAGNEYLRTLLVQGAHYILGPLGPDTDLRRWGLQLAARRGGGAKKRAVTAVARKLSVLLHHFWKTGEVYEPLRKTQIAENTAA

SEQ ID NO: 260066 - protein, 351 aa, unidentified
MWIIGVDYHPSVQQIAFVNTDTGECGERRLNHSDGEAEKFYRELKAADCCVRVGMEATGHARWFERLLAELGFELWIGDPTKIKAKRVRKQKTDRLDAELLLQLLLEDRFPRVWVPSPENRDLRQLLWHRHRLVQMRTRIMNQLQAVAMNEGVRRKQALWSKSGRAQLESLLLAPWAARRRHDLLELLDRLSPTIEELSAVVEQEAKQRPEVLRLMTHPGVGPTTALAFVLIIDSAERFAYGKQIASYVGLIPCEDSSAERRRLGHITKQGNSLLRFLLVEAAQAAVQRDPDWRRRYIHLAMRRERRIAKVAMARKLAVSLYWMWRTQRDYQQTVKFSSHAGESDYVHGVQ

SEQ ID NO: 260067 - protein, 360 aa, unidentified
MFIERTSVGLDVHARTTVGAAIDERTGELVQRRMGADTDEIVAWVTSLPGPVAATYEAGPTGFGLARALTAAGVRAVVAAPSKLQRPVGDRVKTDMRDAVHLARLLRLGEVVEVTVPSIEVESARDLVRAREDARGDLMSARHRVSKLLLRQGIQYSGGKAWTVAHQAWLRSQRFELVGLQAAFDAAYDAMIATVDRRDRLDVAIAAMAADSEFSPVVDRLCCLRGVSTLTGFALAVEIGDWTRLDGRRIGSYVGLTPSENSSGASRTLGGITKTGNGHARRLLIEAAWHHRPTYRPSSPIMRARWDRASAEARARGHAGNQRLHQRWQTFQLRKKRTVVANAAIARELAGWCWSLAVMT

SEQ ID NO: 260068 - protein, 394 aa, unidentified
MKLIGIDIGKNKHFFCIMDQQTGEIISQPVSFSNDKEGFDFLVQKIKSYPKDSILIGMEDTGHYHFALLKYLLDLQYTVALINPKTTDFNRKMQGGITKNDKLDTINICDVLDTPERKKQYRITKVNSFDLYEQKQLTRHHHNLKEEENVYKNRLQKCIDIVFPEFNKLFNSKYGIVYMNILKMFGSAENIANTDIRTIRKCFEIEGRGNRISLTPERLKECAGSSIGISSSAEVIQIKHLTAQIELIEEQLTEIDKKIEEFSIQNNSPILSIPGISHFSGTSILAELGDISNYSKPSQIIKFAGVAPLHYESSQFNAQHTSITKKGSKYLRKTLYQIILPVIRHNPVFTKYYQLKISQGKGHRCAQGHCVRKLLRIIYHLLKTNQQFDPQLLR

SEQ ID NO: 260069 - protein, 429 aa, unidentified
MRTESTPGARGPVFCGVDTHADSHWLCVLDWRGRKVLSRQFPADAAGYEALAGAIAAAGEPACIAMEGTSSYGAGLTRHLASLGMPVREALSPARTQRRRPGQGKCDEADAERAARAAMSGSRLGTPKSQDGWVDGVRCMLAARSGAVKARTSAINTARSLLTTAPEGLRSRFRGMGGPRLMEELPSVRAEGALGAALGALADLWAAARDAALDMERAIGASLEENCPALLAMYGCGPVSAAKLAVAAGDNPGRLRSEASFAAICGACPIPASSGKTVRHRLNRGGDRQANSALYEIARQRVMRDPETAEYAERARGRGKSDREVMRCLKRYVAREAYRALMRPHEVRRPEDASALVAARRAAKVSQVRAASILGTSEKYISMLERGQREFKPIRRAYEAWVEAGLPLDWDRQAFEAERKMDSKKDLAI

SEQ ID NO: 260070 - protein, 390 aa, unidentified
MRYFIGIDVAKFKHTACVIDTYGTVLIESFDFTNDIIGFQSLLKNIKPFLKKKHLVGMEDTGHYGDNLRNFLLEKQYKVVMLNPIVTSHIRKASNKAKNDRIDCFVIANTMMNPNFYRDQHAQSIDYATVRQLTRMHHTHTEEINRYKCQLQKSIDIVFPEFNSLLNTKYSKTYLEILDTYHSAHTIANTDIRLLRNTLKNVGVGRSVSISAEQLKKAAKESIGQHNLAVEMDIPFLISLIRRLTSILGEIDKKIEEFSHQLNSPILDISGISHFSAMSIISELGDITYFSSEKKLIKFAGVNPCVYESGTYSMTHTRLEKKGSKYLRKTLYQIIDVVIRFNPIFQAFYQKKISQGKSYRCAQGHCIRKLLRVIYKILSTGERFNPEKLK

SEQ ID NO: 260071 - protein, 408 aa, unidentified
MNAVGIDVSKGKSMVAALRPMGEVALLPQEFLHTEVGLEQMAYAIVALGEDTRVIMEATGRYHEPVAAALHEYGIYVCVLNPLFIKQSGGGSIRKVKTDKADAMKIAKYGLDNWVDLREYTPMDTVRQQLKLCSRQYNLYMKTVVSLQNNLISLTDKTFPGVNELFSSPERADGHQKWVDFVMTFYHCDCICRVSENAFAERYQKWCKRKGYHFSTEKALDLYAGSCGHFTTLPKNDNTKLLITTAAQQLLAGKMTLAALRTEMTRLAKQLPEYDIVRAMYGVGETTAVQLMAEIGDVRRFPRRSSIVGFAGVDPAVDQSGKHSAKSVPTTKRGSPHLRKTLYQIVCTYLKKSPVDEPVYQFLDKKRSEGKPYFVYMTAAQNKFLRIYYARVKECLEAFDAQQDTSQR

SEQ ID NO: 260072 - protein, 331 aa, unidentified
MQSQTFVGIDVSKDKLDIAIGSEGELWQVTNDSAGHSELVERLNGVKPALIVLEASGGYEAVVAGVLWDAGHPVAVVNPRQVRDFARGQGKLAKTDQIDARILAMFGEKVPVEVRAPLDAEARELQTLVLRRRQLIEMLTMEKNRRRLISAGRARKNLDKHIAWLEEAIRRASDDIDQAVRQSPMWREKDDLLRSFKGIGPVNARTIVAELPELGRLNRKKIAALVGVAPFNWDSGKFKGKRAIAGGRSHVRTVLYMAAVTAARWNPLIRPLYQRLIAAGKPKKVALVACIRKLLTILTAMVRDGAYFSAAPHPNPLPAAAAAGRGGKISP

SEQ ID NO: 260073 - protein, 475 aa, unidentified
MKIGRRLGVTNPSTSLVSFSNEQVHVTEITNSRLYISRNLLPLPRKEGKEKMHSRVKIACGLDVHRSKIVGSIVTAEGTQETRTFTTNIDDTLALKDWILTHECERVAMAATGIYWYPVYNLLEDHVTIQVANPFYVKGIPGRKTDQLDAEWIATLSLNGLVKPSFVPGLQIRNRRDLVRTLNRLVQIRSRHKNRVHKVMVRAGIRIGAHLSDLFGPTGLRILHGLLEGESIDMILKDQKNARIARKRDELAASICGTLNENDIYLIRLELDAIRFINRQIDEIKQRISHLMSPLKDDLTLLMTIPGIGYDSAVNILAEIGDARQFPSGKHLVSWAGLAPGLNESAGQQTPGHITKAGSKSLRTFLIEPAHAIALMKQNNRLKRFFSRMHSNLGYKPAIIALARKLLMLIHHLLVNHEPYFEENLSMKKRVKIIPPSFSSMTPDQILNLISVAVAELSGIDRVEFVRKLNRIGTT

SEQ ID NO: 260074 - protein, 310 aa, unidentified
MTLSPTWIGIDVSKAWLDIASSGGEGVQRIANTMDAIAAFAATLEREGTLVVLEASGVYDKSLRAGLALAGIGHVRVNPQRARDFARASGQLAKTDALDAAMLAEMGRALRLVADPLPEAGRERLGLLSRRRDQLVAMRTQEKQRRIEITDPFIGADLDRHLAGLNQAIAAIEVEIQNQIGSDAALAQDQALIRSVPGIGPVTASVLAALMPELGRRSGKQIATLAGLAPLNNDSSRRRGQRSIRGGRRRVRQALYMAAVASLRTQSPLNAFYHRLRQAGKPPKPALVALARKLLVTINAIMKTRTGFAT

SEQ ID NO: 260075 - protein, 400 aa, unidentified
MTTRPEIWVGIDVGKTAHHACAVDNAGTTVFSQKVDNDQAAIEAVIARAGRIGDQVRWAIDLTSPMALLLISVLLAADQTVTYVPGRVVNTMTHGFRGEAKTDAKDAKVIAETARLRRDLNQVTMPDELVVGLTQLTGYRTDLIADWVAGINRLRSLLGSIFPALEAAFDYSTRTPLILVAGMCTPTEIRDAGTVGVTTHLADHGAWKPAIAKTAATAVEAAQRQTLTLPGEADTAMLIKRIARKLLDLDREIKDTDKLITTRFRQHPGARIIESLPGMGPGLGAEFVVGTGGDLAGFASAGRLASYAGLVPVPRDSGRVAGNLRRPKRYNRRMRRVFYMAALFSLRYENGPSRRFYDRKRGERQIHTQALLALARRLVDVLWALLRDGREFSVDHPAVA

SEQ ID NO: 260076 - protein, 400 aa, unidentified
MLSIGIDVSKGKSTVCGMKPGGEIVYTPFEIQHTREGMSELVSLLRSSGEEVRAVLESTGSYHCPVVAALLENGIFVSVVNSLRMKRFCSQSIRKVKTDRIDAMQIALYGLAYWQELQPTRLPEDTYRELQLLARQYYQMTSILIKAKVDFNAICDQVLPGMQELMSDHAGRHKLSDFVLRYRHTTHILEMGETRFRKDYCKWAEKKGYRNCERMAALIFATAQNGIPVLPNAPSTQIVITEAIRVLHTVEASRDAILTQMQALAKTLPEYSLVREMPCIGDTLAPRLIAEIGDVRRFHSKRALIAYAGIDAPPYQSGKFCANNRHISKRGNRYLRKTGYEVMQSYVMHKPANDPIFTFIEKKRGEGKSGKLAMVAGLNKFLRVYYGKVTELYRSLPAIE

SEQ ID NO: 260077 - protein, 385 aa, unidentified
MQKLNDLSRSPSPLDPDGTLIAVIELSLSSWLVAGIVPGVERQPLKKLAVDESALLKLLHRWREEAAKAGHRIKRIAVAFEAGRDGFWLARWLSARDIEAHVIHASSVAVSREHRRAKTDRLDTELLKRSFLGWLRGERDHCKMVAIPTTKDEDAKRPNREHESLVGEQSRIVNRMKATLIRLGIRGFNPKLKKAAERLDSLRTPEGEPIPPNTLAELRRDMVRRRLISDQIRQVEDARLERLKQAPNDGPHAMVRLLARVIGVGVETADMLVQEVLSRSMRDRRAVARYAGLTGSPDESGRKRREKGLTRSGNARVRRGMIQLAWRFLMFQKDSTLAQWFRARTESARGTRKTMIVALARKLLIALWRLVREGVVPDGVVLRPA

SEQ ID NO: 260078 - protein, 326 aa, unidentified
MHKKKQTLVGIDVSSKTLDACWSGVNARYSNDRRGWRKLAMEAPENSRFVMEATGSYHFKLAAFLKMRGFSVGVVNPLRARRWIESQIGSFKKTDRMDAGNLSKYGATEAVACREWEPLPPALARARAMITVLANLSKTIKRSKAAMKAVSLAVEKKDGDVPGVLGYVAAVCKEQAEDLEAQLSSIVSAAYPEQFRLVESIPGIGRKTAAVLLVCTRGFEKFESFKRLASYIGVAPTVRESGTSVKGSGRISKAGYPYLRALLNMCAKVAVRCNGACSPLYARLVAKGKKRKDALVAVMHRLVKIAFAVVQSGVPFHGGKEPGPAQ

SEQ ID NO: 260079 - protein, 409 aa, unidentified
MEVMHCRCAGLDVHKKSVVACALVGEAGKAPEAFRRSFGTVTRALLELHDWLRDLGVSHVAMEATGTYWKPVWAILEENFDLTLSNAAHIKQVPGRKTDQKDADWIADLLRHGLLKKSFVPRLPQQDLRELTRHRIQVTGHRSAVSNRISKLLEGANIKLGSVASDVMGVSGQRILDALVAGESDPEKLAELAVGNLRKKQEALVEALRGRVRAHHRTMLRLLLAEWRFLDQLLLETERAIEEAVRPFLEATTLLQTMPGMKATAAYSLVAELGENMEVFPDGAHAASWAGICPGNHESAGKRYSGRTRNGNRWLKRILCQVAWAASHTRGSYFQAQHRRIAAKRGKKRAIVALAHSILVTAYTMLKRNCSYQDLGPDYFERINAEGLKRYCIRKLEQLGHRVVLETAA

SEQ ID NO: 260080 - protein, 427 aa, unidentified
MKYKQNFKIMQITDKTLVVGVDIAKKVHFARSFDWRGIEVAKTFSFKANGTGFARLIEWARENAKKNGKDKIVVGFEPTGHYWFTFAQAVLEEGMMVVQVNPYHVKSSKELDDNSPSKSDRKDPKTIAMLVKDGRYQIPYIPKGKYAELRKANNLREEWLKKIWAIKNKVQRWLDTYFPEFLEVFSSWEGKAAIITLERIGLPNKIAAMTTNDIVTIWREDVKRAVGVKKAQMLIEAASSSVGLREGLEMAVYEIQLLMREYREVRTIMDGLEVKLEEIVLTIPGAEKMLQIKGVGIKTVAGFLAEVGDITRFNHPDQIIKLAGLNLRENSSGKHKGETTITKRGRSRLRAQLFRAILPMVAKNKEFNELHKYYTTRTENPLKKKQSLMVMCRKLIKIAYKLITEDVSYDPEKMMGDIRRNPEPRAA

SEQ ID NO: 260081 - protein, 427 aa, unidentified
MPYRISGIDVHKKMLAVVVSDVEIESEYQFERRKFGSNPAELRALATWLLEQEAEEVVMESTAQYWRPVWEALERYWKPIREKREGAGRRAGTLHLAQAQSNRGRRGRKRDFPDAERLVKRLVSRELVLSFVPDPEQRLWRTVGRRKYQLTRDRVRLQNQLEALLEEAHIKLSSLVSDLLGASARRMLKALAEGETNPAALAVLADRQLRATPEQLCDALGACTDLKPVYRRLLNMILEQLQFLEKQIAHLDQEMASLLSQHQDAVQRLAEVPGLGVDSAQQIIAEVGPTAATFPSGKHLSSWVGACPGDDESAGVNYSHRSPQGNRHMRRLLNQSANAAVKAKGSIFEIVYRRTVPRLGHPQTIGVIAHRQCRLIWLILHQGVRYEERGPAVNQKSKQVRTARMIRQLRKLGYQIEPPKPAPTQRE

SEQ ID NO: 260082 - protein, 332 aa, unidentified
MNLVSTLGIDLAKNTFSVHGVNSNGVVVLRRTVSRGRLAELVAQLPACLIGLEACSGAHEWARRFSGRGHTVKLMAPKFVAPYRKSGKNDDNDAEAICEAVSRPNMRFVPVKSVQQQADLSLHRVRQGFIEERTATLNRIRGLLAEFGYVLANGATQVHRQVPPLLEQLPARVARCVRDLLEHADRLAAKALEYEREIRLGVRDNDLARRAFTRQGIGPITASALVATVGNGHDFKNGRQFAAWLGLVPRQYSTGGKTRLGHITKRGDPYLRTLLVMGARSVLQRAAREQDPLSRWALAVQARRGYHRACVAVAAKNARVAWALLAKESRTA

SEQ ID NO: 260083 - protein, 428 aa, unidentified
MDEINRNRLEEFRQLRKEVRHSEEYLIVGIDIAKDRHYAFFGTATGKTLLRRLVFSNDHEGFRKLLDQAEALRVQHGLKKVVYGMEPTANYHKPLGEYLIGLGRTVVLVSGVTVKRNRETLDGRWDKHDGKDSANVADLISQGKCLYYEHPSAELRGLRGLLSLKRRLKKQEHGYKVRVRNHLLAQYFPEMDRDYEGLGAEGLSIVRWCLPASEIAQLDVEPFIERVTSRRIRIEKRRRLEAVWEKAAESIGCDGVPGVAHEAKIMVEGLRQIREMIKETEDKIEELCEQFPEYQYVLTIPGFGPDVSAKVLGAVGDPDRFLNGKQVLKLAGLDLSADRSGKNSDKAIPEISKRGKADLRYALYQAALVASVKNRDVMIYYTNKIRGREREKGIHIKMRVKLAAKLLVIAWTLMKKRELFNPAYLNAE

SEQ ID NO: 260084 - protein, 338 aa, unidentified
MIVIGVDVHKQSVTAVAIDGAGRMLDEKTIAVGSDELIAWAAGLAGKRLWALEDCRQLTRWLERQVLGCGEELVRVPPKLMAPKRRAGRARGKSDAIDALAGARAALREPELGRPRPGEQVFRALKLLVDHRDDLVDERRRTQQRLRWHLHQLDPTFAVPLRMLGRPSQLERGSRWLARQEQELQVRLARELVTRCRSLTRAIVELDRELEQRTAATAPALLELPGCAAVTAAKLLAEIGPIDRFKSDAQLARHGGVAPLEASSGRVHRHRLDRGGNRQLNAALYRVAITQARYHPAARAYLERKQAEGKSRREAIRCLKRLLVRVVFNTLKASPALT

SEQ ID NO: 260085 - protein, 423 aa, unidentified
MTKHSTTPADAVLVAIDMAKNRQEVLIERPEGGRRRRMTVLATKTDYDRLAEQLAAIGRPIVVGFEATGNYHRTLAHRLLTAGFELRLISSVALARTREALHNGWDKNDPKDAQVILHMLRIGATQRYVDPLAAGINDLQELSKTHEVVSRMKTQTWHRILTHYLPLYFPEVARFAGNSRSDWFLAMIERFPTPASITALNKEAFSAEVWPLIGRKVSKARLINDVYETACSSVALPVPEDSAAIAMFRMVIAQGRSLIRQRDEIERLAHARLADHLDYKLLRKIPGIGPINALTILAEAGDLRRFSHHRQFLKFCGLDLATCQSGTFRGRTKLSKYGNARLRRTFWMAAQVAARQRDNSFRDKLGRYTAGHADDADRRRKAMTALTSKMARVAHAVIKTGTEYRPFLERSDARWKDPSLQVP

SEQ ID NO: 260086 - protein, 357 aa, unidentified
MSDRTFIGLDVHARSTVGYALDPESGQVWQRRMGADPGEVVGWVRSLPGPVKAGYEAGPTGYGLARLLLAAGVPTEVLAPSKIVRPAGDRVKTDVRDAQLLAQVLAMGEYAAVRIPSQAEESARDLWRLRVAIAGDARRAKQRIGHLLLRRGLVYDGSPWTQAHLRWLRGVGFDDPTDARVYDTSLDTVLFAIDRLTALDADLVALAAASQYAPVMTRLGCLRGVSTITAYGLATEIGDWQRFTGRSIGAYLGLVPSEHSSGQSRSQGGLTRTGNQHARRLLIEAAWQHLKPYRRSKELTARMHAAGPTAAARGHEGNRRLHRRWQAFETRGKNRNRANAAIARELAGWCWSLATIN

SEQ ID NO: 260087 - protein, 276 aa, unidentified
MRFYTRQHRYYCGVDLHARTMYVCVLDQEGNVLVSKNIASAPEPFLELIAPYREDLAVAAECMFTWYWLADLCARQGLVFVLGHALYMRAIHGGKAKNDRIDAHKIAALLRGGMLPQAYVYPQAMRATRDLMRRRNYLMRQRAELLSHITNTNHQYNLPALGARPARPAERAGIAEHFTQAPVRKSIEIDLTLVEHYDGQLLPLERYLESNAQAHDPRALAIVRTIHGMGRVLGLSILYEIQSIGRFARVQQFLSYCRLVKPTKESGGKILGTALG

SEQ ID NO: 260088 - protein, 430 aa, unidentified
MKSNTQNAKIEAITEKTLVLGIDVGSETHYARAFDYRGIEYSKKPFKFSNTEAGFVTFKEWILDLKEKHEKDKVVPGMEPTGHYWFNLGKFLQDNEMKPVLVNPHHVKKSKELDDNNPTKNDRKDSKVIAGLVREGRYMIPYLPDGVYADLRTASNIRFQLQAELTRIQNRISRWFNIYFPEYKTVYGKPDAKSGMLILKQAPLPEDILTLGIDGVNQIWRDAKMRAVGKARAKTLIEAAEHSVGSKEGAVSARMEIRMLLEDYESRNIRLQEVMTLIEELVNQIPMAEKLLGIKGVGIKTVSGFLAEVGDISRFNNPKELQKLAGLALVENSSGKHKGKTTISRRGRKRLRYLLFEVAMSLVAKNPEFRKLHTYYTTRKLNPLKKMQSLMAVAAKLIRVFYAILTKGVDYDPKKMVGDIKRPAVYLQAA

SEQ ID NO: 260089 - protein, 400 aa, unidentified
MKEFNVEAVQVETASALETIRQAQAERQYPAYIGLDTHKDTIAVAVARAGRAAPELRGEIANKPKAVAKLVERLNREFHGEVLLFCYEAGPCGYGLYRQLLALGHDCEVVAPSLIPKKPGEKVKTDRRDAGKLSRLLRSGDLTAVWVPDEEQEAMRDLTRARDDLKAQERKARQQLNAYVLRHGHAWPSNRTRWTQSHYNWLESLRFGHDWQQVVLQEYIDAVKAASHRVADITAQMERVLPQWSLAPVVHSLVALRGIDKLAAMVLLAELGDISRFDSPKQLMAFLGLVPSEHSSGRRRRQGAITGTGNGHARRMLVESAWSYRFSARQTMHLKRKAKHASEEAKAIAWQAQKRLCGRYRTLLEAGKNTKQTTVAIARELVGFIWAIVCQEMPKLRQTR

SEQ ID NO: 260090 - protein, 448 aa, unidentified
MEQDMATSKAKEAAKLEVVHPDAAGVDVGGSSHHVAIRGDAPGQTVREFGCYTKELHEMADWLLSSGVKIVALESTGVYWIPVYEVLERRGLEVLLVHARHVKGVSGRKSDVLDCQWLQRLLSYGLLRGAFRPEDQMCELRELNRLRSRLLRDQSRSVQHMQKALTVMNVQLTNAISDVAGVTGQKIVRAIVAGERDPQELASYRDARIKASEQEIAASLQGNWRAEHLLALKVALATFDFCSQQIEQCEVEIERAMQVLQRFTQEPEKGKKRSKAKNAPKFDVRERLFKMCGVDLTRINGIDVSTAMTIISEVGTDMSRFPSDKHFASWLGLCPGTNISGGKRLGAASKHSANRATQALKQAAAALRTSQSALGAYFRTLCGRMDKAKAVTAAAHKLARLIYALLTKGQEYLDQGQLYYEERYRERAVRQLQRRANKLGMLVVPAGC

SEQ ID NO: 260091 - protein, 344 aa, unidentified
MDHFAGLDVSVKETSICIVDDTGRIVKEVKVGSEPEALLKVLGNPAYRFKRIGLEAGPLSQWLFSALAEAALPVICVETRHMQAVLKAQINKTDRNDARGIAQMVRAGLYRPVHVKTLRSQKLRMLLTHRKLLQSKAIAIENDLRGTLRNFGLKVGMVGKVRFEARIQELVENQPDLAVLVEPLLIVRRVLREQIVILHRRLLATVRNDEVCRRLMTTPGVGPVVALTYRATVDVPARFRKSKSVGAVFGLTCSRYQSGEIDWSGKISRCGDEMMRTMLYEAAQSMMHSKKWSWLKAWAMQIARRRGMKKAIVALARRLAVIMHRIWIDGTEFRWTREQAAAAA

SEQ ID NO: 260092 - protein, 348 aa, unidentified
MNQFIGLDGHKNSCTFVVLNEKGKVKRKAVLPTDQKQLVEFVKSVQGRRHLCIEEGTQSQWFYEIFSDHVHDLAIVQGRKSPGNKDDERDARNLAERFRTRDLGNRIYKVPESLATLKELVRGYEMLNKDLTRVKNRIKHLYSSRGIAYAKDGCPFCTGRGPCQKAGFHQTLQLLRTQQESLEPLKAEAQKAMVQEAKRHPIARIIQTVPGFGEVRTAELISIVINPYRFRTSRQFWCYCGLAIVQRSSANWVQKPNGELGRVKLNQTRGLNRNFNRMAKAIFKGAAVTVLTSMPTEPLRKDYDRLVTNGTAPNLARLTLARKIAATVLAMWKNQEAYDPGKYRLMSI

SEQ ID NO: 260093 - protein, 451 aa, unidentified
MKKEKPKMGIVKMGSGLPVFNAYAAGIDIGDTLHCVAINDGKGGHEVKTTSAFTCDLYEIVDYCKCNGVTTVAMESTGVYWLVLYLLLEEAGIEPYLVNAKHAKNVTGRKKDDTDSIWLQKLHTCGLLQKSFQPDNEIRLLRSYTRQRKNLILLGSDSIRRMQKALELMNIKIHTVISDILGKTGMGMVKAIIAGERNPEILCMLCDPRIKASREDIIKSLQGIWKEEYLFMLEQAVENYEFLQKQIKSCEEKIQQQLLKQVAIVKEGDITCVEETPKKKAKAKKNQFDFSLLPYLIAIAGVDLCRIPGISEVTALEFISEVGVDMRKWKSSKHFAAWLNLTPNTKISGGKIISSKMMKKNNKAGQLLRQAASCLITNKTAIGDYYRAMRARLGGKGAALATAHKLARIIYTMLLRKTEYNSGMIVENQEKIKEEKIKKLEKQIARLKQAA

SEQ ID NO: 260094 - protein, 362 aa, unidentified
MIAQEKQRTMFVGIDVHKDTHTAVGLSPFGEKVFEMNIGNEAEDFISLVEKIKVEANKIGLIPSFGLEDVHSWGERLSSFLVEVGLPVRAVSPILVDHRRSKTTHPEKSDSLDAQGVAEVMIQKIDTLPIYTLSEEAKKAKQIRELSLEREWLVKERARLKNQLHILLHRIHNSGYCIKFKDPFSKKALRYWMRGVPKDTDVILEQRMKRAVRRLLDLREEIQEIEEELETIMKENNQTITTASGCGVVIAAEIIGEIGDINRFHSPGALAKYAGCAPREHSSGKTIRWRKTRSGNRRLNRSFHRMALSQISRSGNDAARTYFKRKISEGKTKAQALVCLRRQLVSVVWMMMKHGTEYRRPC

SEQ ID NO: 260095 - protein, 313 aa, unidentified
MSIIYSNYVGIDIGKFELVLNIHGSKQVFTYENTLEGLNKLYSELEQDLKDSLVVLEVTGGYERLAINYLQEQNISVHRANGRQVKSFIRSYGIVGKTDKIDAIAISLYACERHKTLDLYKKNVHELLRELNERRDDLVKIRVQEKNRAQAPTNIRFHQSFAAILDVLNVQISAIEKEMANIIAGNSQLKAKLNVLKTIPGVGDVTASSILAYMPEIGSLNQKQAASLAGVAPHPQQSGKRENRGRTIGGRRQMRPILFISAMSASRTKTKIGDFYKNLLSNGKTKMCALVAVMRKIIVIANARIKEDLAKAM

SEQ ID NO: 260096 - protein, 370 aa, unidentified
MHKPTTVFVGLDVHKDSISVAHALEARASEVTFVGPIGTRQCDIDKLVRRLQSKASQLVFAYEAGPCGFVLHRYLTAKGLDCRVVAPSLIPKKPGDRIKTDRRDAVELARLLRSGDLTAVYVPSVEDEAIRDLSRAREDGVKDLKAARLRLKSFLLRLGITYEGRADWNAAHQRYLARVVCPTPVQQIVFQEYLHAVTEIADRLKRLETELRGHVSSWRLSPLVEAYQALRGVQDTVAITTAAELGDLTRFDSPRQLAAFVGLIPSVHASGNSRRLGSITKAGNSHARRVLVEGAWAYRHPAKVSEAIRKRVERLPKNIQDIAWKAQVRLCKRFRQLAARGKHPNVIVTAIARELVAFMWAIAREVRISA

SEQ ID NO: 260097 - protein, 328 aa, unidentified
MQGKVSSERTAMATVYVGIDVCKEWLDIHLHPLGRSFRVTNDTAGLRRLKRELDALDQMPRSALRIVMEATGKWHRAVQRSLHADGFYVSVVDPLRARLFAKACGFLAKTDRLDARFLAIMGEALKPAQTPPPDQALETLQELVNARSAANGERTALSNRMKTAVTAFLRKELTRRLAALDTHIARLDAEIERSICADPEMRRRLDILISIPGIGAVTAASLIAGLCELGVCSGKQAAMLTGLAPIACESGERAGHRSIRGGRPAPRNAIYMAALSASRHNPDLARFAARLKKVGKPNKVVLVAVMRKLIVLANTLITKNRIWTPNPP

SEQ ID NO: 260098 - protein, 460 aa, unidentified
MKRKRTYQAIPVEQVRLEEVLPVLITVGCVVALDVAKEKFVAALATAAGEVLKLFRFKHPTETSKFLELVTELQAQLPPGQLKVAMEPTGTYGDAIRHQLLKAEVPVWMVSPKRTHDSQALFDNVQSLHDPKSAVLVAKLCAMGLATEWKPASEMRRRLRALVELRAHHQQQRERCFGRLEALQARHWPEFGRWLDVRVQKSALRLLEAHGSPATTQADPDTTRSLLVNESHGRLSKEVIEGVVSEASTTSGVPTVPEEEALVKHLSTEALELGKCIDRIDAQLAVLASDKEEGFAHLQTWMGTYTAAVIVTLCDPRQYANARQFEKACGLNLREKSSGERSGRLSITKRGPALVRQVLYLFALRMIKQSGVVRAWYMSRRGYTEDSKQRAVVAVMRKLVKAMFHVARGAVFDETKLFDTRRLEVVAPATTARNTFTSRTTPRSIARRSARAARQDVAAT

SEQ ID NO: 260099 - protein, 353 aa, unidentified
MKCDKYMGMDVHRATTVVAVLDSDGKLVLETVVATEAAAIIRLLMSLSGTIHVTFEETTQAAWLYEVIRAHVTETIVCDPRRNKLLSEGSKGDKADALKLAELLRAGLLRSVYHGHAETLRLKELVRGYETLSVDTTRTMTRIKAIFRGRGIRTPGRGVYQETQREEWLGRLSEPGARQRLEWLYEELDHLRPLRRRAKQAMLVESRKHQAVEWLRTIPQLGPIRCALIVATVDTPHRFRTKHQLWSYSGLAVVTHTSAEYEMREGRAVRSRKAIATRGLNPNCNHRLKETFISAATGGSRTEPYRGYLERLKEKGMRAEMARLTLARKIAAIALTVWKKREVFDPKKLNWTT

SEQ ID NO: 260100 - protein, 462 aa, unidentified
MKRKAKSQATHSGLAVVNPNAAAIDIGATMHVAAVGADRASDPVRSFGTFTADLHRLADWFAECGVKTVVMESTSVYWIPIFELLDERGFEVILVNARDAKHVPGRKTDVSDAQWLQRLHSYGLLRASFRPKGEIVELRAYLRQRERLLDTAASHIQHMQKAMTEMNLQLHHVVSDITGATGMRIIRAIIAGERDPAVLASMRDTRCHSSAEVIEKALTGHYRAEHLFVLEQALALYDVYQQKVAACDIRIESVLKELISIRGRKEDARADGSGSPRRRSRQSNGPDFDVGKALHSLLGKDLTRIHGMGPYLALKLVSECGDDLSAWPSAKHFTSWLCLAPSNKISGGKVLSSRTRRSGSRAASLLRLAAVTIGRSDTALGAFYRRLSARAGKSKAVTATARKIAVLFYNALRHGMDYVDPGASYYETRYRERVVKNLHRRAKAFGFIIQAAEMPAAEQAVS

SEQ ID NO: 260101 - protein, 446 aa, unidentified
MSAAGLPVLDPSAAFVDVGSEQMHVSIAGGPAEVFGTFTTDLHRLRDWLKERQVKSVAMEATGVYWLPLYGILEAAGFAVHMVNGKQTRNLPGRKSDMMDCQWGATLHAHGLLQPGFVPAADIRRLQDYLRLRADHLTSAGACVQHQQKALERMNIKLHDVISSLVSDSGQRVITAILAGEQDPERLLALCDARIQKKKAERVKESLRGTWAKEHLFALRQAVQNWQHYQRQIAACDQEIQEVLRAMSGPEQPGEPPVPPALKRGGINAPQFDDLHRLVFKLCGGKDLTVLPAHTDYSLLQLIGEVGVNLSTWPSEKHFTAWLGLAPGSHQSGKRKGSVRRKRNRAGRLFCMMARSLAQSKNIALGGFYRRMAGRRGGLVANIALARKLACLFWRVMVKGLAYAEAGLKAYEEQVMETKRRALCRLAKQLGRVVLPSLAEFQAAET

SEQ ID NO: 260102 - protein, 360 aa, unidentified
MIVIGADTHKRNHTLVALDGQTGAVRGQAEIAASDEGSMAALRFAAGIDSDRVWAIEDCRHVSARLEGALIAAGERVIRVPAEVTGQTRKSARVVGKSDPIDARAVALAVVRDGIESFPVAFSDPRAMEIRVLCDYRDQIVRERVRLINRLRWHLVTIAPELEAQIKPEALRGPRVCAKLTRQLARLAPSPQLRVARRMLKRISEIVAEERALVTELTALIQAHRPQLLAQGGCGPVTAAIIIGRTAGAQRFATDGHFARHSGTAPIPASSGKTQRHRLHRGGDRQLNRAIHIIAISRLRTDPETRAYVARKQAEGKTKLEAIRCLKRHLARRIWRLLYTAETASPSVSINLANTKIHLT

SEQ ID NO: 260103 - protein, 335 aa, unidentified
MKYIGVDAHSSSCRFSVFDEKGVEVDNLAIETNGRLLVKYVRSIEGRKKLTYEESELSYWLYEILHKEVDNLLICNPVKNRSYKKAKTDKLDARQLAKLLRGGFLSPVYHNGSEREQFRKLMSAYEDIIRMGVSVKNRHKSLFRRTGIFVDGERIYGDKSFLEGLKGKEEKFIGQQNYKILLQLEEIRKAYVKEIIKYGKKFKEIKKLKSIPGLGDIQAAKIVSQVIEPGRFRNKYKYYSYCGLVRHPRESGGKKYGSTRADGNHILKCVYKMAGHTVLRGKSQLRIYYEHLRQAGRGHKSAYNAVCRKLAAISLSIWRHNKEYKNEMISIDHLK

SEQ ID NO: 260104 - protein, 456 aa, unidentified
MKIPQSTIRLLTGRLVKILLNREVSIMKSNTQNAKIEAITEKTLVLGIDVGSETHYARAFDYRGIEYSKKPFKFSNTEAGFVTFKEWILDLKEKHEKDKVVPGMEPTGHYWFNLGKFLQDNEMKPVLVNPHHVKKSKELDDNNPTKNDRKDPKVIAGLVREGRYMIPYLPDGVYADLRTASNIRFQLQAELTRIQNRISRWFNIYFPEYKTVYGKPDAKSGMLILKQAPLPEDILTLGIEGVNQIWRDAKMRAVGKARAKTLIEAAEHSVGSKEGAVSARMEIRMLLEDYESRNIRLQEVMTLIAELVNQIPMAEKLLEIKGVGIKTVSGFLAEVGDISRFNNPKELQKLAGLALVENSSGKHKGRTTISRRGRKRLRYLLFEVAMSLVAKNPEFRELHTYYTTRRLNPLKKMQSLMAVAAKLIRVFYVMLTKGVDYDPKKMVGDIKRPAVYLQAA

SEQ ID NO: 260105 - protein, 346 aa, unidentified
MMKVHVLGIDLGKNVCSLVGLDEAGAVVLRRRAKRETLIALAAKLPPCIIGMEACCGAHHLGRLFADQGHDVRLMSPEYVRPYVKAQKNDDRDAEGIAEAATRPTMRFVDVKNQDQLDMQTLHRSRDRLVAERTALINQVRAVLLERGIIVPQGKRALDQHLTSLTDGSGDARSLSPRMLTLVADARAQWLELDRRIAAFDAEFVAFVKENEDARRLVTIPGVGVTIASALIAAIGNAEAFEHGRDLAAWLGLVPRQSTTGGKPKLFGISKRGNKYLRKLLIHGARAALPHVSGRDTPLGRWAKGLLARAHQNVAVVALANKLARIAWAVLRRGNTFDVAGSPMAA

SEQ ID NO: 260106 - protein, 451 aa, unidentified
MNNEPEIVLDDEHELVIERVAAIDVAKASGKVCMRMPHPSRPDRRMSKVRDVDATTRAVTELADDLLGEGIERVTVESTSDYWRIWFYLLEAAGLRVQLVNARDVKNVPGRPKTDKLDAVWLAKLTEKGLLRPSFVPPAPIRQLRDYTRFRVDLTRERARCWQRMEKLLEDALIKVSAVVSRMDSMSVRDMLEALIAGERDPRRLAGLARGKMRPKYNALVEALSGRFDEHHAELARMLLDQIDALGAQISTLTTRIDELLAALIDTPGPAADGSVRDRDGEVELMVTGLDAAERLAEITGIGPVSAQVIIAEIGLDMARFPTAAHLVSWAKLSPRTIQSGAIQRSGKAGKGNPYLKGALGEAAAVAARTDTFLGERYRRIVKRRGKLKALVAVARSILVIVWNLLSDPTARFHDLGPDYYTRRIDTERRARNHLAQLAALGYRVTVEPAA

SEQ ID NO: 260107 - protein, 352 aa, unidentified
MQHFIGCDLHTRNQVVAWMDAETGEIRKRRLEHGGEEVGKFYAAFPPATVVGIEATFPAMWFERLLGESGHELWVGDAARIRASEVRQQKTDARDAELLLDLLRTGRFPRIWVPSPEERDLRQLLVHRSKQVRARTQLKNQLQALAISQGVCRKGKLWSQKGRAELEKLDLLPWAARRRKELLEGLDRLDEQVRELDRAVEEAGRERPEVALLRTHPGVGMVVALALVLTLGPVARFLSSRKLVSYLGLNPREDSSGGRQRLGAISKQGNTMMRWLLVEAAQTAARYDPQLRRVYQRLKSRRPSGVAKVAVARRLAVRLFWMLRTRHNYAQLVLMSGSPSSAVVPPQAGSNA

SEQ ID NO: 260108 - protein, 409 aa, unidentified
MAIDWADQKHYWSLKVAGQQALQRGNLDSTPEAVEVWIMELHLRFAGRPLAVALEQRRGALAVILSKYAHVHLYPVHPTTLAKFREAWYPSRSKSDPVDADLLLEILTAHRSRLRRLDPDTVEMRLVQTLVENRRKLVDERTALSNRLTDLLKLYFPQILGWFDEVTSAVVGDLLEQWPSLQEIQKAKPAKLEKFLRTHHCLEIPERLNQIRQAIPATFDRALMDSAPFLVAAWVRQIAVLRDSIRQLEKHIAELAAKQEDWHIFQSFPGAGAALAPRLMAALGTQRYRYASANELHCFSGIAPVKEASGNTEWVHFRRACPKFLRQTFHEWAGCSIAQCEWAKAYYQQQKARGKKHHAAVRSLAFKWMRILYRCWKDRQPYREEIYLTSLAKRRSALVAALAKAVQMP

SEQ ID NO: 260109 - protein, 377 aa, unidentified
MFYLGIDQHARQITISLRDEGGDVVQARQVSTQPEKVQAFFQQLTRERLHDGESFVAVLEVCGFNDWLIGLLHEYRCHKVILIQPEERKLRKTDRRDAAALSELLWVNRDRLLQDKPVRGLRQVDIARTADQEDRRLTTLRKDAGRARTRLVNRVRHILRRHNLQWQMPTKKFPSKSGLAWLKQLALPEIDRLEMNHLLADLEQVQGRRQELEQVIAQRCGVSAEAVLLSSMPGVGYFTAVALACRVGRVERFPRAASLANYWGLTPGCRNSGESNQRLGGITKAGSSMARWLLAEVTIKVLRRDARLRAWFKRLKRRRGASIARVAVMRKLATVIWHMLSKRLTYAACRDAGEAGTKARQEQGAEGSRPGGAVGRV

SEQ ID NO: 260110 - protein, 403 aa, unidentified
MNSVGIDISKGRSTIAVMRPFGEVVISPFEVRHTDSELSKLARRLKSLNGETRVVMEATGNYHAPVAKLLHDAGLYVSVVNAKLVHGYGNNDLRRVKTDRKDAVKLANYGLDRWLTLPRYIPEEDTRLLLKNCYRQYRQYSKVQTILKNNLISLLDTVFPNVNRLFSSPARADGSEKWVDFVAEFWHCRCVSEKSEKVFTNKYQRWCRKQGYNFSEEKAHTIYVEASGHIGVMPKSETTKLLVEQAVAQLRATSAALAALKHEMQSLASMLPEYPVVMDMFGVGPTLGPQLIAEIGDVRRFYSKKALVAYAGLDAPPNDSGDVTGRHKSMSKVGASSLRRTLFLVMGVYLQKSPLDEPVYLFMDRKRAEGKPYRVYMMASANKFLRIYYATVKAYLESLEHTA

SEQ ID NO: 260111 - protein, 327 aa, unidentified
MNCIIGIDVSKEKIDVAWLRDIQTLKVKTKVFKNTSKGFSELCSWLSENTKQPLNQCHCTLEATGIYHEPLALWLFDNGIQVSVCNPAQVKGFARSLSAQHKTDKIDSIILARYGALMKPALWQPEPKEVRELKALIARLDALETDLLRERNRMEKAEFSTASKLVIESLENMIQHLETEQKRLNKEIDDHIDRHPDLKRDQELLLSIPSVGPVISRLMLSVIRGKNFKTAEECAAFLGLIPKIQESGVFKGRTALSKKGSPKIRAKLYMPAVTAMRHNPTIQQHTNRLLANGKNKMQAVGAAMRKLVHICFGVLKNQKPYEFKAAV

SEQ ID NO: 260112 - protein, 408 aa, unidentified
MQVLYPRCAGLDVHKDSVVARIRCVSEPLHDETQSFATTTSALLQMRDWLSTHEVSHVAMEATGVYWKPVWHLLEGDFELVLANAQHIRNVPGRKTDVNDAGWIADLLAHGLIRSSFVPPAPIQELRDLTRTRKQLVREISQHSSRIQKVLEDANLKLGSVLSDVLGRSGRAILKALIGGENDPHKLADLAQGTARKKRAELVEALRGRIRDHHRRLLQVHLDLIEALEQALADIDAAVGKTLAPIRESARLLTTIPGVSDLTAQVLVAEIGVDMARFPTAAHLISWTGLCPRSDESAGKRRSTRVRKGAPWLKTALVTAAWAAVRTKNSYLQAQFHRLRSRRGAKKAILAVAASMLTAAYHMLKSGLEYQDLGADHFTRRDRSKTIQRLVRRLNDLGCQVQLMPQAA

SEQ ID NO: 260113 - protein, 474 aa, unidentified
MARTRNKPASPPVPGDAGTEVTDEPVQVISRAAAIDVAKGSGMVCLRLPHESRAGRRTQKVWEVTATFAAVVALMDHLVCQGVERLVLESTSDYWRIWYYLAEAAGLEVWLVNARDVKHLPGRSKSDRLDCVWLCKLNEWGMLRRSFVPPEPVRDLRALTRLRANLTHDRVRHQNRIEKILEDALLKVSSLISDLMGGSGRRFLQALVDGERSPAALAALGDYRLHASKAELQEALTGRFRDIHGFEIGMLLKLIDDLSAKITELDERIEAQLENVPGLGGVCTSCGQPGPDGPCTGCGEPVLGVIARLEEITGIGRGAAQVIVAELGTDMTQFPTPGHAASWAKLTPRAIQSGATSKAGRTGKGNPYLRGATGVAVMTAARTETFLGARYRRHARRRGKQKAIVAGCRTIIEIAWRVIAGPGFRYTELGPDYHDQLDPGRKTRDKIRQLEKLNPGMTVTLTPRPEPGGQAPAA

SEQ ID NO: 260114 - protein, 323 aa, unidentified
MTQVSAKGNMKFVGIDISKHKLDVCFNDNTTISLSNAVGSFGKLMKKLPPPEECLIVLEPTGGYEKSIIVSLQKSDYNVVLANALKVRRYAEAMGYLAKNDPIDSYVIKSFGEDLYPKGKLAVLVPKTDEFRQLELWVGRSRQLVKLVAIEKQRVEKAFDKMIIKSMHRTIRHLENELTQVEQQIEKMCDKCQLSEQAKKYKTVKGIGDVCANALVTYLPELGVFNHSQIAALVGVAPYCHESGKSQGKNKIRGGRKILRSLLYMGTLTAIAHNPAIKVFYDRLMRKGKHHNIAMIACLRKLLCILNAMTKNDTVWQENYKVA

SEQ ID NO: 260115 - protein, 387 aa, unidentified
MPQLNDLSRSLVALDQDSTIIAVVELSQSSWLVAGVLPGIERQPQKKLEPSAERLLGLLHRWRDEAVRAGKKITRIALAFEAGRDGFWLARWLNARGVEAHVIHPSSVAVSREHRRAKTDRLDTEMLKRGFLGWLRGERGHCSMARVPTIAEEDAKRPNREREGLVGERTRIVNRIKATLARMGIRNFKPTLRKAAERLATVRTPEGMPLPPNTLAELQRDMARLGFVVSQIREIEQARQKRLEQETETGPHAMVRQVARVIGIGIETADMLVHEVLSRPMRDRKAVARYAGLTGSPDESGARRREQGLARAGNARVRRGMIQLAWRFLRFQNQSALAQWYRARTADSRPGTRKTMIVALARKLLIALWRFVTTGETLDGVILRPAG

SEQ ID NO: 260116 - protein, 344 aa, unidentified
MPHSIKDPHRVPPPEAPCCPNGSVVGIDISKDYFDACFEGQHRRYAYSLEGIEAFMSETACLGEARFVMEATGNYFYKLALALVEAGHKSYVVNAYRVRARGKSRLQRHKNDKADARLIDDFAVANREAMMLWQPESQTIAALRQLRTVRRQLQKTATVYENQLHALLQLPESQQSQDALQICKQMIAHCQKQLNLIGKQMQALSDDELKKNDELLDTIAGIGRESALMLLILTGNFTKFRSAKAFADYIGIAPTHYESGTSVKGRGSISKMGDARARQVLYLAAMSAVRHNVACRVFYVRLRQTGRAHKHAVVAVANKLIRQAFAVIRQQAPFETRGAWSVST

SEQ ID NO: 260117 - protein, 343 aa, unidentified
MKLHVLGIDLGKTVFHLVGLDSTGRAVIRKRCSRRQLLAFTANLEVQLIGMEACSGAHFLGRALRGQGHEVRLMPAQYVKPYVQSNKSDYLDAEAIAEAVQRPRMRFVSIKTEEQLDLQALHRVRERWVMRRTAVVNQIRSLLLERGLTLPKGRGHLDEQLPRILEDAELNLSGSFRVLLAQLQLELKQLAARIEEMDRVIQKMAKENEACQRLTEIPGVGPVTATALISAVGNGSTFQKGRNLAAWMGIVPGEYSTGGKQKLLGISKRGNKYLRRLFVQGARSVLQQRHKQAPGLSSWLAQLLGRTHQNVVVVALANKLVRMAWAVLCKNQRYRTPVLAVSV

SEQ ID NO: 260118 - protein, 400 aa, unidentified
MNAVGIDVSKGKSTVAIMRPFGEVVAEPFDVSHTDTELRKLACFLEKLPGETRIVMEYTGSYWQPIAKVLHDAGFFVSAVNALLIYKYGNNSIRKGKTDKLDAVKIANYCLDRWTYLERYSPIDQIRQTLKTCRRQYDQYIRLKVNLKNNLIALLDGTFPGINTLLKSAPRDTDGHEKWVDFAGKFWHRQCVCGNSEKAFANQYRKWCAKAGYRFNAEKAAAIYSHAGSQVDTLPMSSAIQNLITHAVAQLNMIIKTISAIQHEMLTLASQLPEYPIVMQMFGVGPVLGPQLMAEIGDVRRFHCKQSLVAFAGVDAPPCQSGTFESKNRHISKRGSPRLRKTLFQVMSTIIQHAPADDPVYQFLDRKRREGKHYYVYMTAAANKFLRIYYGTVMAYLEKP

SEQ ID NO: 260119 - protein, 354 aa, unidentified
MTEEHNSVTAVIGIDIGKNSFHVVGLDGRGAIALRQKWSRGQVETRFANMPACLIGMEACVGAHHLSRRLRLLGHDARLMPAKYVRAYSKGQKNDFRDAEAIAEAVQRPTMKFVATKSADQLDLQALHRVRERLVSQRTGVINQIRAFLLERGVAVRQGRRFLRAELPGILATGCAVLSARMVHLIEDLAGDWRRLDERIEGLSGEIAALARQDAGCERLMSVPGIGPIISSAMVAAIGAGDTFTKGRDFAAWLGLVPKQFSTGDRTVLGKISKRGNRYLRVLFVQAAWVVLIRSKNWKRYGLKPWIEAAKRRLHRNVLAIALANKLARIAWSVLAHGRNFEASKVAEAAIQPA

SEQ ID NO: 260120 - protein, 347 aa, unidentified
MTNSKAGITGGVDTHADAHVAAALSSTGGVLGTQSFPTTIAGYRRLLAWLRTLGDLDRVGVEGTGSYGAALARHLTEHGISVIEVGRPNRQLRRRQGKTDVIDAIAAARAVLSGEARATPKTHDGAVECLRALRVVTRSVTKARTQALNQINQLLVTAPEDLRDRLRGLPRRELLATCAAFRVREDDDSLPGVTRLALRELAQRVDQLDDQLARAKTRLSRITAAAAPRLLAITGVGPDVASTLLLTAGDNPDRLHSERSFAALCGSSPIPASSGKTNRHRLNRGGDRQANAALWRVAMVRLAVDPTTKAYLARRVAEGKTKVEAIRCLKRYIAREVYNALPAPALA

SEQ ID NO: 260121 - protein, 417 aa, unidentified
MEVIHSRCAGIDISKKDAKVCVRVAGAGRRKTVETVSTWSSMTRQILALREHLIAEQVTCAVMEATGDYWKPFYYLLEDAGCELILVNARHVKNLPGRKTDVADATWLAQLGAHGLVRGSFVPPEPIRHLRDLTRARTAITRERSREAQRLEKLLEDAGIKLSSVASDILGVSGRLMLEALIAGDRDPAALADLAKRRLRSKIPALTEALTGRFTEHHAFLARVHLNLIDQHTAAIDRLTARIETLLEPFRGFHDLVCTIPGIAALTADVIVAETGADMTRFPTAGHLASWAGTTPGKQRVRRQGQVQQDQTRQPLPARRPGCRCDGLRAEPEHLPGCPLPTDRHPPRTTEGQRRHPTLHAHCHLAHGQDWDPLRRSRTGLLHPPEPRTHQEQGDPPTRGDELPSEARQRIVIRKGP

SEQ ID NO: 260122 - protein, 481 aa, unidentified
MSVAAAWRAWEPDSESDLGVASNPRLCPEHVEQIASFTDAFRTAHRPRVAPTREVLVMELLYPHCAGLDVHKESVVACVRHRRDGGGGGGGGGGGGFADEVRTFATTTRGLLALGDWLAAEGVTVAAMESTGVYWKPVWNLLEDRVKLILVNAQHVRQVPGRKTDVKDSQWLAQLLQHGLLTASFVPERPQRELRDLTRQRAQLTGDLARVANRVQKVLEDANVKLGSVASDVLGASGRDMLRAVIGGQADPAAIAELARGRMRPKIPLLTEALAGRVNDHHRFMLKALLEQVEHLERQVESFDARIEQVMTPFERAAVERLDGVPGLNRRSAQNVLAEIGTDMTRFPSAQHLASWAGLCPGNHQSAGKRKGGRVTQGNRWLKRTLAQCALAAANKDGSFLQARFRRLAARRGRKRAALAVAHSQLTAIYEMLKDSTDYRDLGAAYVDQLQRERVKRQLVHRLESLGYAVSLGEPPDKAVA

SEQ ID NO: 260123 - protein, 406 aa, unidentified
MQQSNVETVIIKNATALETIRRQKKGGNHYAAYIGMDVHKDTITYAVALPGRANGQYRGEIAHTRKAVNKLMGRLSAEFGGELLLFCYEAGPTGYHLYRQMMASGHDCQVVAPSQIPHKPGERIKTDRRDALKLAQYLRSGDLTAVWVPDQEQEAMRDLTRARGDMKGQELKARQQLNGFVLRHGHSWPSNKTRWTKTHYNWLESLAFPHPWQQVVLQEYIDAAKAATRRVADLMDQILQALPSWSLAPVVGSLVALRGIDKLAAITLLAELGDISRFDNPKQLMSFLGLVPSEHSTGKRRRQGAITLTGNGHARRMLIESSWSYRFQARQTMHLKRKAVNASDEAKTIAWRAQKRLCGRYRRLVEAGKNQKLVVVAIARELVGFIWDIVRIEMARLPVQQSAQAA

SEQ ID NO: 260124 - protein, 348 aa, unidentified
MKKYSELESIKVVGIDLAKSVFHLHGVNGQGEMVMRKKLSRSKVTEFMVRLPSCLVAMEACGGSHDWARRLMAMGHDVRLISPQFVKPYVKSNKNDVADAAAICEAVQRPDMRFVPIKGVEQQDIQSLHRARSLAVAHRTAQVNQMRGLMLEYGVIVPKSVAALRKAVPEILEDADNGLTPMFRELLCGLWDEMLRLDERIKAYDIQIKHLSEQSETCKRLMTIPGIGPMVSTALVAAVADGKAFKSGREMAAWLGLVPRQHTTGGKPRLLGISKRGDVYLRKLLIHGARAALRWADRKQDRRSLWVSELATRRGQNIAAVALANKTVRTAWVLMTRNEEYKTATATI

SEQ ID NO: 260125 - protein, 366 aa, unidentified
MKKISTVAMGGNEIFKEPKLTVGLDLGDRTSHYCILDEAGNVILERSLPTTPKGIHQVFSKIPRSRIALETGTHSPWVSRQLTQKGHEVIVAHARNVRLIGESSRKDDQLDARTLARLARIDPELLGPVRHRSAKAQIHLTVIRARAALVSTRTALVNAARGLTKSYGERLRKCGTGHMNREIAKGLSQELREALEPLLEEIESLNERIAEYDRRIEKVAKEVYPEVALLQQVKGVGTLIALTYVLTLDDPHRFRRSRDAGCFLGLRPGRRNSGMSEPQMHISKEGDGYLRTLMVQGAHYILGPFGQDSDLRRWGLKLAERGGKNAKKRAVVAVARKLAVLLHKLWVSGEVYEPLRNKHKVVSAVA

SEQ ID NO: 260126 - protein, 355 aa, unidentified
MAADEIAVIGGIDTHTDLHQAAVIDTVGRHLATAAFPTTPDGYRKLLDWLRSHGELLAVGLEGTGAYGAGIARFLTADGITIVEVDRPDRKARRDNGKSDPVDAYAAATAVLSGRASGTPKTRNGIVEAIRTLRVARSSAVKARTQTINQIRNLIVTAPAAVREKLRGLATGELIDTLARSRPAGDIADPEHAARVTLRRLARRHQRLCEEITEADADLGPLVTQAAPRLIALPGVGPETAGQLLTTVGDNPERLRSEASFAHLCAAAPVPASSGRTHRHRLNRGGDRQANRALHTIVLVRMRYDQRTREYVARRTAQGMAKKDIIRCLKRFVVREIYRHLPRPDLTTEQLTQAA

SEQ ID NO: 260127 - protein, 406 aa, unidentified
MGSETHYARAFNWRNYEYSKKPFAFSNDEAGFSSFKDWMDDIAEKHGMKVVIPGMEPTGHYWLNLGAYLQEQGMKPVHVNPHHVKKSKELDDNNPSKNDRKDPKTIAGLVNEGRFSYPYIPTGIYAEIRNLSNLRIQTQEEITRIKNRIARWFSIYFPEIKDVYRNPDAVSGLMVIKQAPLPCDIKELGVDGVNKIWRDARLKGAGIKRATTLVTAAEHSIGNTEAPRSARKEIRNLLNDYEIYKNRMDELMEEIKETLSEIPYIDKLMEINGIGIKTVSCVIAEVGDIGRFDNPKQVQKLAGYAIVADSSGKHNGESRISHRGRKRLRYALYEAAISVIGKNKEFKEIHSYYRTREKNPLKKMQSVIAVACKLIRIFYTILTKGVDYDGQRMLADIVRPEMQLAA

SEQ ID NO: 260128 - protein, 352 aa, unidentified
MSVVKLPVVPLKYVVGIDMAKDSFVACLGYLEVSQQLHFGKEVTFDNTASGFAALLSWVAKQQASPVPRWFVVEATGVYYEELAYFLADNQQLLSVLLPNKVKHFARSTELKSKTDQLDARLLCRLGLERALPAWQPPTPALRQLRALARERQVLVRQGAQLKTRAHAYQHSYQPDSRTLARLAAQQQLLISQLKALDQDLADLLQAEPELARKLGQLTSIPGIGLTTAIVVVAETNGFVLVENERQLASYAGLDVVQRQSGLSTPATRISRRGNVRLRTALYLPAVSSLRYNPQQMAFYTRLRARQPSGKPGVIAVMRKLLVLCYSLWKNDCSYDPHYHPAHLAEKEAPTT

SEQ ID NO: 260129 - protein, 367 aa, unidentified
MKKISTAAAKQIRNFSQAQLTIGLDLGDRSSWYCLLDEVGEVLLEQKLGTTPKALREVFGELARCRIALETGMHSPWISRLLTEFGHEVIVAHARNVRLIGESRKKDDRMDARTLARLARIDPQLLSPVKHRSARAQADRTVIRARAGLVRARTALVNTARGLAKSYGERLRGCNVRNMSPEKAEGLSPELQAALEPLLACIESVSEQILEYNERIETLARQSYPETALLKQIKGVGTLIALTYMLTLEDPHRFGKSRDVGCYLGLQPGRRNSGQSEPQMHISKEGDPYLRTLLVQGAQHILGPFGVDSDLRRWGLKLAERGGRSGKKRAIIATARKLAVLLHRLWVSGEAYEPLHNRQRRPLAIAA

SEQ ID NO: 260130 - protein, 353 aa, unidentified
MKTKTISSSAITIGLDLGDRKHAVCVLDAKGEVLKQESITNTHSSLSALSRRHPGALMVMEVGMHSPWTSRFLEGLGHRVLVANPRKVRSIYQNNRKSDRKDAEMLARIARTDESLLYPIQHVSEDMQRDLLQIKLRDNLVRQRVDIISSVRFTLKGLGVRLPSPSSECFARKARLKLKSDHPDLLALVEASLCVLDTMTEQIRRLEKSIEQMAAEKYPEAEFLTQVGGVGLLTSLTFILTVGDPTRFPHKRDVGAFLGLVPGRDQSGDTDKQLRITKAGNRYLRKLLVQAAQYILGRHGPDTALRCKGLKLAERGGPRAKRKAVVAVARNLAVLLLTLWHDESIYQANHRAA

SEQ ID NO: 260131 - protein, 371 aa, unidentified
MPDVSSNAPYDVRLWIALDVHKLSIVAAALPPTGGVPEVQQIETTAVAVRRFIERLGGPEGLAVCYEAGPGGFDLLRLLTELGVACDVIAPSLIPVRAGDRIKTDRRDAKKLVRLFRAGQLSYVQPPTPETEGLRDLMRCREDLRRARTNARHRVSKQLLRHGRIYREGRSQWTKRHRAWIARQRLGDELAQAALRQMLVHLDGLDRQLDALDRDLEEIARSARWQAAVEVLVRFRGVSTRTALGLIAEIGDFSRFSHPRELCAWLGIVPCEYSSGEQRHRGHITKTGNGHARRLLIEAAWAYRHHPRRPDRGPQPDDRAWQAQIRLHRRYHHLTDHGKRSTVATVAVARELAGFLWAASTGQTFAAEAGS

SEQ ID NO: 260132 - protein, 339 aa, unidentified
MELYSGLDLHSTNTYIGILDTDFKRVFKKRISNNLDLIFETLEPFRDQLQGLVVESTYNWYWLVDGLMDAGYGCVHLANPSAIKQYEGLKHSDDKHDAFFLAQLLILGILPQGYIYPKEDRPVRDLARKRMFLVKHKTAHILSLQSLIARCSGQRISSNQLRTFRSADLEQLLREEHLVLSAQANLDSISFLKQQIHRLEKVIKNKLKLSQAFNGLLTVPGIGHILAMTIMLEVGDIGRFAKVGNFTSYCRCAPTQRLSDGKSKGSGNRKNGNRYLSWAFSEAAQMSRRYNQRFRSYYDRKAAQTNKIVAARALSNKLARVCYYIMRDQVAFNEDLILH

SEQ ID NO: 260133 - protein, 425 aa, unidentified
MREHDTQAEAGTVNIPGKGAMFEIEDVGVFLGLDVGKTAHHGHGLTPAGKKIFDKPLPNSEPKLRAVFDKLTENFGTVLVIVDQPASIGALPLTVARDAGCRVAYLPGLAMRRIADLYPGEAKTDAKDAAVIADAARTMPHTLRCLELTDEITAELTVLTGFDQDLAAEATRTSNRIRGLLTQFHPSLERVLGPRLDHQAVTWLLERHGSPAALRKAGRRRLVELIRPKAPRMAQRLIDDVFDALDEQTVVVPGTGTLDTVVPSLAASLASVHTQRRAMEAQINTLLEAHPLSPVLTSMPGVGVRTAAVLLVTVGDGTSFPTAAHLASYAGLAPTTKSSGTSIHGEHAPRGGNRQLKRAMFLSAFACMNADPASRTYYDRQRARGKTHTQALLRLARQRISVLFAMLRDGTFYEPRTPKNVELAA

SEQ ID NO: 260134 - protein, 361 aa, unidentified
MRIIGCDLHARQQTLAMLETTTGEMVNLTLMHEGNDVREFYSKLPRPVLVGIEATGSMQWFLNLMEELGIECRVGHPATIRAAEPRKQKHDRRDAELILKLLAENRFPAIWLPSKELLDLRALLLHRHQWVRIRTRIQNALQAIALANGLRRGPGLGSYDGQAKIAFLPLPPHASYRRSALQAMYKKMEEEIETLTQQVAEQANQRSEAQLLMTHPGVGPVTALATEVFLGDPGRFADGKALSSYVGLIPGERSSGRRQRLGKITKQGSPLLRFLWGEAGAHAVRRDPDLKRFYRRKLAQKGLGKARVAVARKLGIRLWIMLRDEIDYQEFCRRGQKQQSGAACAGMPETPNGANRHRPVD

SEQ ID NO: 260135 - protein, 374 aa, unidentified
MTMMQHRQIRYIGLDVHKVSITVAIAEEAGAPTSYGSIPNDPSAIRKLMTRLGGPEVELRVAYEAGPTGYALHRQLAKMAIDCIVVAPSLIPKQPGNKVKTDRRDALKLARLLRSGDLTPVWVPDEAHEALRSLVRARADAKADQLRAKHRLSKLLLRQGCRPPSGVRTWSQRHVQWLRQLEFEHLPDRIVFADYLAEVTAAGERIKRLEAALHQCAQNSSQVALIRALEAFRGIGFLSAVTLVAEAGDLRRFRTAPQFMAYAGLVPSESSSGGKQQRGSITKTGNSLLRHVLGETAHHARHAPRVSSKLKQRQADVPHEIVELAWRAQLRLHARYRHLSSRIGSLKALTAIARELAGFIWAAGQVLQEVPTAA

SEQ ID NO: 260136 - protein, 390 aa, unidentified
MSTVAIIRPFGEIIRKPFDVIHTSKGLAELANLILSLEGESRVVLENTGKYSDPVIKVLSEADIFVCPVNAKRIHDYGGDTIRRDKTDPIDSLKIADFCLNKWAKLERYTPVDEMRKTLKTYNRQLDEYMKVKVMLKNNLISLTDQVFPGVNDLFSSPARESDGHEKWIDFLSRFWHAECVTSLSEEAFAKVYAKWCKRNGYNFSCAKATQIYDAASTGQPTFSKNDFTKTLILQAVQQLNSICATIATLKAEMTKIAKTMPEYEIVIGMHGVGKTLAPQLIAEIGDIRRFPKRASLPRYAGIEPPQNQSGSYNQHSRRISKQGPPQLRKALFQVMRCVLQLKNPDEDTFRFIARKRAEGKPFKVYMIAGANKFLRIYYARVKECMDLAV

SEQ ID NO: 260137 - protein, 384 aa, unidentified
MDTAAARTRKYSVEGPVLYLAFELGNKEWKLGFSVGFGQRPRVRTIPARDLEGLQREFKLAKMRFGLPETASVMSCYEAGRDGFWLHRYLVEAGVENLVVDSSSIEVNRRFRRAKTDRMDVAKLLDLLMRYGRGEKKVWRVVRVPGVGAEDRRHLHRELEDLKAERTQHINRIKGLLVGQGVRLEEIGSGFPDQLNAIRLWDGQPIPEGLKARLQKEYERLQFIQGQIHELEAERVEAIRRSESPEVEMVRQLLRLKGIGLNSAWVDTMEFFAWREFRNGKEVGGLAGLTPTPYQSGDSSRERGMSKAGNRHVRALAIEIAWGWLRYQPESELSQWYQRRFGDGSSRVRRIGIVALARKLLVALWRYLETGLIPQGAVLKTRLI

SEQ ID NO: 260138 - protein, 312 aa, unidentified
MIAHPVHLGADIAKLTIELGCPQLAVPASIPNTPAGFKALLKIVARSPSPVHVVCEATGYHHKAFADALHRARVPVSVVNPRLPRDFARARGKLAKTDAIDALLLADYGQTMQPTPTPQPDATMTLLDDLVTRRAQLVVDRAREKVRLEQTACAESLASLKLHLRHLDGQIEKLLARIAEVVEATPALRAKVARLVEVQGVGTLTASALLAALPELGTLSKNEVTALAGLAPFNRDSGAFRGTRSIRSGRLEVRHALYMAALSASRCNPILKAVYQRLRAAGKAHKVALTAVMRKLLVYLNSLLKSLPASPA

SEQ ID NO: 260139 - protein, 314 aa, unidentified
MEATYRRCCGIDVHKKSVMICILPPAGERKGEPRRRKFRTYTRDLKELRTWLKHCKVTEIAMESTGQYWRPIWNLLEGHFEKLLLVNPQHIKGLNGHKTDPKDARWIADLLESDKLKGSWVPPRDIRELRDLTRQRVHVVEDQNRVKNRIEQLCQTGNIKVSSVATDLFGVSGRRMLKAIVEGKRDPGWMADYARGSLRGKRQELELALDGSFTDNQRWLLERELQHLEWLERQVQGLEQEIERRGGSLEQPKRRLMTIPGIDRKTAWTLVAELGIDMSVFADAQHLASWAGLCPGNRESGGKRMSGRTRKANS

SEQ ID NO: 260140 - protein, 320 aa, unidentified
MPASCGVGIDVAKDTLAVAWSTDPDARWRTTNDEAGWTALIERLRALQPRVIVLEATGGYETGVASALSVAGLPVAVVNPRQVRDFAKALGRLEKTDALDAGILCEFAVRIDPVPRPLADDVLADFQALVTRRRQLVDMLTAERNRVPLARGAVRKNLRAHIVWLEKQVGHTDRDLRTRIEHSPIWRVRDQLLQSVPGIGPTTAACLLASLPELGTLSHREISKLVGIAPLPDDSGTRVGYRRIRGGRAGVRRALYMATVTAITHNPTIAAAYRRWRTAGKLPKVALIAAMHKLLIHLNAMLKHQTVWQPTPVPPSTTPS

SEQ ID NO: 260141 - protein, 348 aa, unidentified
MAMTIVEAGCTVIGGVDTHLDVHVAAALDPIGGVLGVESFDASPQGFKAMFEWMGAFGTVSKVGIEGTGAYGAGLGRFLAKAGIEVVEVDRPNRQARRKKGKSDPADAVEAARAVLSGRATGTPKSRDGSVEAIRALLVAKRSARDARLRAIHQMRQLSYTGPDQLRSRLKDLSITELVAETAAMRPRSSGDPVVYATKVSLAALGRRVLSLEYELIGIDELLTTLVTTCAPEMLELFGVGIDTTATLLVTAGDNPERLRSEATWAHLCGVAPIEASSGKVTRHRLDRGGDRNANQALWRIVMTRLACDPRTREYMERRTKEGRSKREVIRILKRYVAREVFKYLPRA

SEQ ID NO: 260142 - protein, 428 aa, unidentified
MMAVMIGIDPHKGSHTAVAINAGEEPLGRLRVRACPDQAGQLVAWAQAWPERAWAVEGATGLGHLLAQQLVAAGERVLDIQPKLAARVRVLEAGNTSKNDPNDALSVAVAALRSKACREVTADDHAAVLRMRSRRHQDLGQSRNQVACRLHAVLCDLVPGGLPKEITAAQAAMLLEQAAPAGAVGQAAPAGAVGQARREVAAELLADLRRLDAQMAESKKKLAAVVRASGTSVTSLFGVGPVIAAIVIGDAVTVTRFPSRDHFAAWNGTAPVEVSSGGRKIYRLSRRGNRRVNSAIHIAAVTQIRYKHSPGRAYYERKIAEGKTPKEALRALKRRISDAIYARLVADAGTAAASKDPGGQPGNDSDSSAAGSHPDRRLFGQATPGPGHHPTTMARGRGSAGEGPAPTLVKPQSPKTTSHAAKKTAATP

SEQ ID NO: 260143 - protein, 340 aa, unidentified
MFTNFVGIDVSKSKFDLALIKGHDKDHVIQGIFDNTQKGIKTMNKFLEKEHHVQLSETIFCMEFTGVYCRPLTIFFVEQDCHVWIEMPVNIIRSLGLQRGKNDRVDAHRIALYAYKNRDDIKLWKPQRDVILQLRDLLALRERLITSQKALTNPIEELLAMGAKSAAESVRKNCQKTLSAIENEIGQIEKNLDDIIKDDPQLKELFQLATSVPGVGKLTALFMICFTNEFSMYTNPKQLACYCGVAPFEHSSGSSVRGRTRVSHMANKVLKRMLHMGAMSVISRDPELRDYYQRKVAQGKNKMLVINAVRNKIIHRLCAVIKRGYGYQSEIIFKERLVLS

SEQ ID NO: 260144 - protein, 331 aa, unidentified
MTDAASRDQTMPAPLDFVGVDMAKQAFVWSLHNVRGTHSAGNDMAGFQALLAALKGRRIGLITIEATGGLERELASFLLQHGLPVAVVNPRAAREFARSMGHLAKTDAIDAIALAHYAQTLAAKASQAGVQFAPPNAQVQALQAMVARRVQLLGMRTAEKNRLGGAIRVLKKSIEVVIKTLDKEVARLDKDIDAHLQQHFKEQTKRFEAIKGVGVTTCAMMLAFMPELGHVDSGRAAKLAGLAPLNQDSGRARGKRHVWGGRSVVRSTLYMATLSAVRFNPAIKTFYDRLLAAGKPKKVALTACSHKMLRILNAMARTGQPWTDEFHAITP

SEQ ID NO: 260145 - protein, 385 aa, unidentified
MPKPNDLSRSFTAFEQDSTLIAVIEMSLTSWLIAGILPGIERHPLKKLDVDEEGLLQLLHRWRDEAINAGREISRIVLAFEAGRDGFWLARWLRARNIEAYVIHPNSVAVSREHRRAKTDRLDTELLKRAFLGWLRGESDHCSMAAIPTLEEEDARRPNRERENLLGERTRIVNRMKACLVRFGVRNFKPTLRKAPERLKTLRTPEGGPLPPNSFAELRRDMARLRFVMDQIREIEEARLQRLEHSPNEGLHPMVRLLARVIGVGIETADMLVHEILSRNLRDQRAVARYAGLTGSADESGKRRREKGLARAGNARVRRGMIQLAWRFLMFQKDSALVQWYRSVTNETRGARKIMIVALARKLLIALWRLVKTGEVPQGVAFRSA

SEQ ID NO: 260146 - protein, 392 aa, unidentified
MVISVGIDVSKDKHDCFIVSSEGEVLADVFTIPNNMDGFHRLLQRIQDCTNSQDKIKVGLEATGHYSYNLLGFLLDNGLTTYVLNPLRTNLYRKSLSLRKTKTDRVDARTIASMLLSDAGLKPYTSTAYHNEELKSLTRYRFDKVKERAKLKSSISRLVCILFPELEKLVPTLHMTSVYSLLEELPGAEQVAAAHLTRLKTLLETASKGHYKRDMALEIRDAARNSIGSRMPAKSLELQHTIRLTRELDREIDEIEEQIQSIMGELHSPITTIPGLGFRMAAMILAEVGDFTRFDSPDKLLAYAGMSPSTYQSGQLKNCYPHMEKRGSRYLRYALYNATKYVCYWDPAFADYLAKKRAEGKHYNIAISHAAKKLVRLIFAMEKSMQPYCSAS

SEQ ID NO: 260147 - protein, 343 aa, unidentified
MSIVVLGIDLGKNSCSLAGLDASGRVVLRRRMRRGSLESFVGGLERCVVAMEACGGAHHLGRVFVGQGHAVRLMSPEYVRPYVKAQKNDELDAEAIAEAATRPTMRFVEVKSRAQSDVQALHRARERLVSERTALINHLRAPLLERGIVVPQGRRKLEEEIAVFADEDAIEALSPRIRRLIEDLRSEWRMLDERIAAFDAEFVRMAREDETVRRLITIPGIGTINATALAAAVGDARTFARGRDMAAWLGLTPRQMTTGGKPRLLGITKRGNRYLRKNLIHGARAVLPYLIERETPLGRWARRLLARAHKNIVVVALANKLARIAWAVLARGCTYEPGGAAAA

SEQ ID NO: 260148 - protein, 417 aa, unidentified
MINAVLERCAGIDIGKKFLMACVMVGAADQDPSQEIRRFGTTVPELENLRAWLQTEGCTHVAMESTGSYWKPVFNVLEGTVVVILANAQQVKARKGHKTDPHDSVWLAHLLRHAMIRPSFIPPRAIRELRELTRRRRQLMNAGTAERNRLHKILEQANVKIGSVLSDVFGMTGQTILEALLEGKATPEEMAKLARGVAKRKIPQLVEALKGHRLTDAQRFLIEHCLQHMAFLEQSLEQLEARILQQIEEAGLTRPFELLQTVPAIKQAAAAAVLAEIGSSMEPFPTPGQLASWAGVCPGNNRSADKSRGTHCTKGNQWLRSVLAQCAWAASLQNGSIFQARFQRLAPRLGRRGAIVAVAHAILIAVYQVLQSGQAYSKDTARATPNQKHRLVRHHFRCLQKLGVKVKIEPTDSGGQI

SEQ ID NO: 260149 - protein, 322 aa, unidentified
MAQDDLVVVGIDVAKDKVDACIRAFALRQVFPSAAQGHRKLIAWLRKHKVTKAVMEASGGYERDWAKVLRQAGIEVRIVDPKRVRSFALSAGRLAKNDAIDAEMIAWFAETFSEAPSQRHDAAHEELLALVKARKGLLDLKTRLQSQNEHAAPGPVQKAHARVVKSLATEIAKLEAAISTKIKATPDFAERTEIIESVPGFAETTSANLIAGMPELGQVSNKIAAALLGAAPYDDDSGHRRGERHIKGGRRWVRNAIYMPCLGAATQNNPVLKAFYHRLIARGKPPKVALVACMRKLIIILNSLIARRQKWDPSRYPHSERA

SEQ ID NO: 260150 - protein, 355 aa, unidentified
MDSKKYIGMDVHKESISIAVRNGAGKIVMECVIETKASTILQFIDGLRGDLQVTFEEGTWAAWLYDLLKPHVTELVVCDPRKNASMREGNQSDKIDARRLAELLRLNHLNPVYHGEHGLRSLKELVRSYLTITKDLGRVMSRVKAIYRSWAIPCTGKQVYAPRRRDEWLGKISELGVRRRAEFYYQQLDALRALRQQVRRDLLAESKKHPAWKQLCQIPSIGPIRAAVLLGILQTPHRFRTKRQLWTYSGFGIETHSSADHRSVNGQLQRVKKPSSIRGLNRNCNHDLKNLFKGAAIVASSKPGPFQEFYTALLTKGIRPEMARLTLARKIATIALIVWKRGASFDAQHLKPQTA

SEQ ID NO: 260151 - protein, 421 aa, unidentified
MRGVRSSKVKAVKKDTLIVTVDIGMAGNTGYCTTPDGRDIKPFKFGNTREGLDKLWSLVVVNKNRFKCNEVIVGYESTGPYAEPLVHSLMNKPVRIVQVNPMHTKRMKEVNDNSPLKTDDKDPRVIADIIRLGRALSIIVPEGDAAYLRRLNNARERHVGEQTALLNQLQQLVFLIFPEFMSVFKNMKGKTARRILRNYTTPQRIGAIDRDTLGEEMRKQSMGRFGKNDAEILIGLARDTIGIKEGLAGIAMDIHHILMQLEAEARFIAEIETEMATALERIPFSPRLLSIKGLGTVSVAGLIGEVGDFTKFKTQSEIMKLAGLDLYEISSGKRKGQRRISKRGRSLLRKILYYAAIQMIRKNGIMCDYYTRLTNRGMLRLKALVAVARKLLGIIHAIVRDNRDYVGAYYAPKRRMIKKAA

SEQ ID NO: 260152 - protein, 337 aa, unidentified
MIFINCLGIDIGKSESVVAHYKDEVLVKEMVIQNNQNGYRYLKNYIKHLDSLFILFESTGIYSRGMKRFCEIHKIDYLEMNPLEAKFKTSSLRSWKTDKSDAHKLALLAFRMKDSKVQRQSEEIYFELRERARFHLEMEINQNRLKVELVETLHQTFPGLEKLFTNRYSKIALNIAKAFPHPDFVSTLTHDELVEKVLHSTDKGISVNKAHKYVQKLIEIKNNSFPNVDKSSFLLQKVQYLCDKLLIGIEEMKEFDQEMIDLAENTTEFENIISIPGIGELTAALLIGELGNIREFKTNKQLNAFVGIDIKRYQSELQKVGIRSTKEEIKKQDVYCT

SEQ ID NO: 260153 - protein, 425 aa, unidentified
MTAQPNATPAATWVAIDIAKRHHAVLIETPDGKQQQFRMASSMEEHDRLVALLRGLPQPARIAMEPTGDCHRTLAFRLLTEGFDVCLVSSVAGARYREAMFNSWDKNDPKDARVILALLKQGMTLRYIDPLLAGHHGLQELSKTHYKISLARTRLQHSLMTHYLPLYFPEIERYFDSAHADWFARFMLRFPTAASIQQRDCETFRKEAWDLVGRKVNKAAWLRELYEIALRSIGLPVADDSLEVQSFRLQLQRFQELVQQRDRLAEQAHQTLSGRPDYESLRSIPGIGPVLALTILAEAGDLRRFAHHRQFLKYCGLDLAKCQSGQYKGQERLSKRGNARLRFAFWFAATVAIRMRENSFREKYERYIRNDPSNADRKRKALTAVAAKMARVAYGLVKQKTQYRCYFENALPRRSTPLRRAVGTS

SEQ ID NO: 260154 - protein, 339 aa, unidentified
MKLYVGDDLHGNNNFLAMVDRKGKRMEQKKLPNDLSVILEYLKPHQKEIVGIVVESTFNWYWLVDGLMDAGYKVHLANPSAIQQYSGLKYVDDKHDAFWLAQMLRLEILPEGYIYPKEERPIRDLLRKRRHLVKLRTSLIISLQNIISRNCGVQFQANEMKRLKEDRVSPLLEGNEDLALAGKTSKETIDHLTRQIHKIEGAILHRLKLKESYRYLLTLPGVGKILALTIMLETGPIARFAQVGDYASYCRKVPSRWTSNEKTKGRGNKKNGNKYLAWAFSEAAEFARRYDAQARAYYTRKMRKTNFMVAHSALAHKLARAAYYLMKDQVPFMPEKLFC

SEQ ID NO: 260155 - protein, 343 aa, unidentified
MQTVTTIGLDIAKSVFQVHGVDAAGQVVIRRKLKRRYVLGVFQKLPPCLVGIEACASSHYWARELQALGHRVRLMPPAYVKPYVKRQKNDMADAEAICEAVTRANMRFVPIKTPEQQSGLVLHRTRHLLIRQQTAVINAIRAHLAEFGIVAPVGRKGVEELLRVVADGNDKRVPNVVRACLAALGTQLLSLKKQILEFDQMIMAWHRSNEASKRLDEIPGVGPALATALVASVADPKAFRSGRNFSAWIGLVPKQHSSGGKDKLGSISKQGDRYLRSLFTAGALAVIRYAKIHGTKHRPWLTALLARRPTKVAAIALANKIARMAWAMMVKGDRYKEPVALAA

SEQ ID NO: 260156 - protein, 326 aa, unidentified
MKKYTVGIDVSKDKLDYCILSNKDRSVLSKGVIENERKELLCWLRKFDPEQYDFALEHTGNYGAMLAWLLSEANYCFYMINPMTLKKSMGIQRGKTDAVDAYRIASYAISNGHQLEAYQLPTEELRRIKALITARERYVKIVVQLKNSLKSNQILNKTIDVKELIKEEKRQIKAISGSIKKVEKQILELINATEDLKKSYQKITKVIGVGPITAVKCITETNNFLNFKDARKFSCYCGLAPFPYQSGSSVKGKTKTHHLRNKPLKSTLFKAAGSAIQHDPQLKAYYQRKTKEGKHKLTALNAVANKLVLRIFAVVKRDEPFVKLAA

SEQ ID NO: 260157 - protein, 411 aa, unidentified
MEAAVITAVGIDVSKSKSTVAVRRPGGEIALRPFEVHHTNSDLKKLASTLKKLGGDIRIVMEHTSTYWRPIALTLKEAGFFVSVVNAMLIHDFSDNTIRKLKTDRADALKIANYALTFWDTLPPFNNEEETRLLLKMQSRANERITATATALRNGLIALADQTFPGINIAFDPNTKNANGHEKWVDFFLRYWHKDCVCQYSMEAFTESYRGWCKRKNYKFRTDTAHKIYLLAQEGVATLPKCESTKMLITQACKSLNAVCEAKQSTQLEMQRLATMLPEYEVVMQMEGAGPITGPALMAEIGDVRRFKNKKALVAFAGIDAPPFQSGAFESKSRHVSKRGSPHLRRTIFIVSNIILTRSNPENAVYCFMDKKRSEGKHYYVYTVAGSAKFLRVYYARVTEFLRSQPSPDAC

SEQ ID NO: 260158 - protein, 346 aa, unidentified
MTHFVGLDVSQKMTAICVVDKDGRRIWRGQCLSDPEGIGVALRRYAGVDSKIGIETGAMTPWLVHGLRDLGFDVVCLDARHARAALKMQINKTDQNDAEGLAQIVRTGWYRSVHVKSFDSHRARAILGARTQLVGMTTRLSNHIRGVLKTFGLLPGAMRGLPFDRKVAALLEGRFDIALIVRPMLVAWRQLRVQVAAFDKAIRAIVRSSAASRLLMSVPGIGVLSALAYVSTVEDPSRFSRSRSVGAHLGLTPRQYQSGEVDRSGRISRCGDALTRTLMYEAAGVILTRLKKASSLRDWAAAIAKRSGPGKARVALARKLSVILHSMWRSGEPFRWSKPDRAVAAS

SEQ ID NO: 260159 - protein, 355 aa, unidentified
MNQEKYIGMDVHDASISVAVKNAEGKLLMECVLETKAATILEFIQGLRGTLALTFEEGTLAAWLHDLLKPHVSRLVVCDPRKNALMRDGNQNDRVDARNLAELLRTNQVKAVYHGKHGTRALKELGRNYLAFTQDRTRVMNRIKSVYRSWAIPCAGTSVYSRRHRAEWLAKLVEPGVRMRAEHLYQQLDSLKAVRQAARRELLQESRKHAAVELLRQIPSIGPIRSALLVAILQTPHRFRSKRQLWAYSGLAVQTYDSGEYRFVGGKLQRNRERITVRGLNRNHNHDLKNLLKGAAISASERPGPLQDFYAALVEKGMRPSMARLTLARKIAAIILIMWKKGVSFDPKQLQRQAA

SEQ ID NO: 260160 - protein, 344 aa, unidentified
MNQIIRIGMDTSKHFFQLHGVDAAERPVLRRKLRRREMLAFLAKHPPTVVGMEACGASHYWARELQKLGHEVKLIAPQHVKPYIKRNKNDGRDAEGLCEAMSRPTMQFVRAKTAEQQAALMLAGMRERLVAQRTQLSNAIRGYAAEFGLIATKGLDKIEPLLADISADEALPAMARELFAMHGREYAQLQAELKKIDARLVAWHRSNADSRRLAQIPGIGPIGATALVMKVPDPRLFPSGRHFAAWIGLTPKDHSTAGKTRLGKITRAGDERLRSLLVAGATAVIQQARRGRGRASPWLLALLKRKTPKLAAVALANKIARIAWKLLVTGESYDGARMPGALPA

SEQ ID NO: 260161 - protein, 311 aa, unidentified
MLNQSRYLGVDVSKDTLVVAFERNRWQFSNSKEGHRKFIEQINKQSGTLHVVCEATGPYHLAMCLALQAAGIALTVSNPARIHYFGRSEGVLAKNDPIDAALIERFAQSKRPPADPPLCREQLTLNELVNHRRQLVDAIRIFRVNRQQVINSDVRKEIDRSIAALERRVQAVERELQDKVNANPAWKKKFDVLISAKGVGFITAIVLLVKMPELGSLNRRQCAALAGLAPYDDDSGQHDGRRSIRAGRAEVRSAIYMGALSATRANPILKAIYQRLKKAKKPSKVAITAVMRKMLIYLNALLKRSLEDAPA

SEQ ID NO: 260162 - protein, 433 aa, unidentified
MTQSPNPSTPTPVAFVGIDWADQQHAACLSPADTLLPEQFTIQHTPEAIAEFVAMLRARFGGQPVAIALEQSRGALLYALMRYEFLLLYPINPATAKRYRDAFAPSGAKDDPVDARLIWELLVKHRDQLRPWTADDVATRQLALLCEHRRDLVSQRTRFVQQLRAALKTYFPQALPWTGEDLTTVMAADFLVKWPTLEALQKAKPQTIRAFYYAHRCRRPDLVNQRLTQIKSATALTTDPAVIIAHALRVQSLARQLRPLLASIAEYDRQIKTLFAPHPDAAIFASFPGAGDCLAPRLVAAFGTKRDRFPEADGMERLSGVAPVTRRSGKFQSVHRRHACAKFLLQTFHEFAGCSRKCCEWARLYYEAQRAKGKGHHAALRALAFKWVRILWRCWRDRRPYDDATYTHALRRAGSPLAKRLSVAAPIAPTAGL

SEQ ID NO: 260163 - protein, 402 aa, unidentified
MKQFNAEQIQIETASALGTVMQAEAMHQYPVYIGLDVHKENIVVAVARAGRSAPESWGEIANKPKAIAKLVKRLNEAFDGEVLLFCYEAGPCGYVVYRQLLELGHDCQVVAPSLIPKKPGERIKTDRRDAGKLAKSLRSGDLTAVWVPDKEQEAMRDLTRTRDDFKAQERKARQQLNAYVLRHGYAWPANRTRWSQTHYNWLESLKFTHDWQQVVLQEYIDAVKVASRRVADITAQMERVLPEWSLAPVVNSLVALRGIDKLAAMVLLAELGDLSRFDSPRQLMAYLGLVPSEHTSGSRRRQGGITLTGNGHARRMLVESAWSYRFPARQTAHLKRKAMSASDEAKAIAWKAQKRLCGRYRTLTQAGKNTKLVCVAIARELIGFVWDIACREMPKVNQQAAR

SEQ ID NO: 260164 - protein, 422 aa, unidentified
MERMIERCAGLDVHQASVVACILISERGKRRRKEVRTFGTMTHELEDLRDWLASEGVTHVGMESTGVYWRPVHAVLEEHFTVIVGNARHIKNVPGRKTDVKDAEWIADLVCCGLIRPSFVPPKPLRELRELLRYRRKLMEAQAAERNRLQRLLETANIKLASVASDVLGVSGRAILRALIDNTGTPAEMADLARGRLRRKRDELVLALNGRMDDTHRFLLSMQLRRVEGIETLVEELDQRIAEKLTPYQIEMALLMQIPGVDWVVAAVLISEIGVDMSVFLSVHHLAAWAGVCPGSHESAGKRKNTTARKGNVHLRTVLVAAAMPAVRTKGSYFKDKYHRLRARRGAMRAAVAIAHKILVAAYHMLARRTEYRDLGEAYLDKRDQTRTAANLKRRLERLGYVVSMTPRSPEPEAKPPTAVSS

SEQ ID NO: 260165 - protein, 406 aa, unidentified
MELVTLYKRVVGLDVHQAKITACAILEDESGEVTVELAEFGGFKRDRQALAEWVATRGPEVVVMESTGIYWKSPYAALEKVGIVSTVVNARHVKTVPGRKTDWADAQWLATLARSGLLRASFVPPAKLRELRHVARQRQQLVGILSGEKNRVHKVLSDGGIRLSVVVSDIHGVAGRAMVKALIEGQSPAEVLMLAGNRLKADRGELLDALDGDLTAEHRFVVRELMAHVQELEQRIDRFDRHLLNELEPYRTTLALMQTIPGIDAIGAALLLVEIGNDMDAFGSVDRLASWAGICPGNNESAGKRKSGRIRKGNPWVRRLLCQFAHAASRTQCAFKSKFEALRLRRGHKRAIVAIAHKILKTVFLLIRRQTHYRDSAVDFEAMSVTRNAPRWLRMLKKHGFIPAAA

SEQ ID NO: 260166 - protein, 412 aa, unidentified
MNNTISDLDTDLTAVSEAEGNAAQAEAQNASDDTYAQAVQEQLAISRSSADCRYIGIDLHSNNIWLSVIVNEQRPSGPVGKVIFSRSISTQRVDGTLPEDLIKSVLEKFCKDQPHIACVEATYNWYWLANLFEKNGWNLVLADPSTVSEAKTKAADDRKDAEYLADRLRYNALRYAVIMPKELREIRDLVRTRGVAVAQRAREKIIVINKLTNQIGRKITGKELKELIKEHAEFGMEAPMLLNWGLTEAVRKSLNYHLKQVISISLGIQELEEHINAVGKNLRYTKELQKMPGCGPVISSILASEIGSIKRFATAANFVSYCRLASTSRLSNGKRKGLGNAKNGNAYLSWAFTELATLMVRYSEATKRHFEKLMRKYGQLRVKAIRVLAAKLARSVYQCLSKNEPFDVLRCF

SEQ ID NO: 260167 - protein, 355 aa, unidentified
MDSKKYIGMDVHKESVSIAVRNEAGKIVMECVIETKASIILQFIQGLSGSLHVTFEEGTWAAWLYDLLKPQVTRLVVCDPRKNASMKQGNKSDKIDARRLAELLRLDHLNPVYHGEHGLRSLKELVRSYLTLTKDLGRVMSRVKAIYRSWGIACTGKQVYAPQHRAEWLAKISEPGVRRRAEFYYQQLDALRSLRREVRRELLEESKKHPVWKQLCQIPSIGPIRAAVLLGILQTPHRFRTKRQLWTFGGLGIETYSSADHRYVEGQLERSKKPVSIRGLNENCNHDLKNLLKGAAIAAASKPGPFEEFYTALLAKGIRPEMARLTLARKIATIVLIVWKRGVSFDAQHLKPQTA

SEQ ID NO: 260168 - protein, 337 aa, unidentified
MRYIGIDLHSNSITVCHLTKKGQETLGTYALSSLAEFQKGLRRTDRVAVEATGNTRWFVGQIKEQVAHVVVVNPNQFEVIRKSVKKTDRHDARALAQFLSKDLLPEARLKDELASQINSLAETRDKLVKLRTTFVNKLHALHRARGINSKKSQFLSEKGLNAALELEWEVTTRVEVEVIIAQIRSVNEGIARLDTQLVASGKQLKGHSNLVSIKGIGPRAAAILLSVIGEVGDFENDDKLFSYFGIVPRVCNSNETVQHGRITKRGSKLGRTTLVQCTLAAKKYSSYLNKFYERIKAKKGGGKAIIATARKFLGVIYRTLKNNWVFADFPNFVLAED

SEQ ID NO: 260169 - protein, 362 aa, unidentified
MRIIGCDLHARQQTLAILDTATGEVVNETLKHEGEGVREFYSKLPGPVRVGIEATGSMKWFLNLMEELGIDCQVGHPATIRAAEPRRQKHDRRDAELLLKLLVEDRFPSIWQPSKQLLDLRALLLHRHHWVRLRTRIQNALQSIALANGLRRGSSLWSEGGQEAIASLPLATHTAHRRSELQAMYARFEAEIEQLNQQVLEQANQRTTAGLLMTHPGVGPITALATDVFLGDPKRFRDGKALASYIGIIPRENSSGGRQRLGGLTKQGNPLLRFLWCEAAAHAVRRDPELRQFYRRKLVQKGLGKARVAAARKLGIRLWIMLRDQIDYQEFCRRGQMQQKSGAACAGMPGPRYGVKNHRLID

SEQ ID NO: 260170 - protein, 400 aa, unidentified
MDKDRIVAGLDVHKDTIYLCVMDNTEAVIFAKVYGTLTPDLELMCSEMVSHGVTEAAMESTSTYWVPVWNALCESMSLKLVNPYFIKQLPGRKSDVKDAQWIAECLLKNLIRGSFVPDKTVQDMRKYNRRIFDLNEDLTYNSNKQDAALQRCGFRLSNYVSRVNGKSYQKCVRAIITGITDPEELVKLIHGKTLRKYGRNIIKDAVTGDFHQADICLLKQYAELIGVIERQIEECRNALIAMCQEHFPKQFKRLQSIPGVKERAASAIIAETGADMKPFEKATNLVGWCGLKPRNDISNNKVKSNRTTHGNRFLRQILIEISWVASRTRNCFFSNFSYVQCTQRHKNKMKIQVAIARKLLVAVWHMLTKDEDFIDVYLKRLEKQAEWQNDLQALESLLVG

SEQ ID NO: 260171 - protein, 353 aa, unidentified
MLKEQRLTIGMDLGDHWSCYCVLDEAGNIILEQKVAMTPEAMKQTFSKIPPSLIALETGTHSPWVSRLLTELGYKVIVAHAQKVQLITKSNRKDDRHDARTLARLARIDSELLGPVRHRSAQAQIHLTVIRARAELVRARTALVNAARGLVKSYGQRLPKCGTQQVNRELAAGLHAELREVLEPLLQEVESLNERIQEYEVRMEKIAKESYPHVELLKQVKGVGTQIALTYVLTLDDPHRFPKSREVGGFLGLCPGRRDSGESQPQMNISKEGDRYLRTMLVQGAHYILGPFGEDSDLRRWGLKLAARGGKNAKKRAVVAVARKLAVLLHRLWVSGEVYEPLRNSNKAMRAAA

SEQ ID NO: 260172 - protein, 469 aa, unidentified
MDLRLGIDIACRTAHQASLADHTGRLLWRGHRFHTITAELDRLWQRLPEGTDPTQVMVIMEPTRNAWVPLAAWFRRRGACVILVPPERSADLRAYYHKHTKTDRLDATLLARLPLLHPDGLHPEHGLGPADPLRRETKLRATLVKRRTTTLARLDALLELLGPGWLSALGADLANKTPLRLLAAGYADPHTLKRLGRARLARFIYRHSRGAWGDAHAEALLAAATQTLSLWDGELDYAELADDIAVEARLALHLTQEIKELDERIGVLLVKLDPDGIITSAPGVAQITGAQILGRLGDPNRFDSLAGVRAFSGLVPSLTASGVTGKHGGPTKAGDAVLREALFIAADHARRLDPTLAARYHRLMIQAGKHHNSAVCHIATALLTRMVACWRRGEHYVVRDLDGREVTLPEARRIIAERYTIPPELRRQANSITRPPQHRTSRRSKESQGAPSTGPSTLHATTSSRLDTG

SEQ ID NO: 260173 - protein, 405 aa, unidentified
MEVVYERCCGLDIHKKSITACVIVGKKKEIQTFGTMTDDLLQMTAFLKERKVQMTAMESTGSFWKPIFNIMEVEEIPAILVNAAHIKNVPGRKTDVKDAEWIADCLKHGLLRASFVKPRDQRELCELIRYRGSMIEERSREVNRMGKVLEGANIKLTSVASSVDTISGMSMVRSLCDGIDDPAVLASLAKGSMRSKESELKRALNGLVQPHQRMILKSMLDHIDNLNTLISKLDSEIENRMKQDVELVDALDGITGVGKVSAQTIIAEIGTDMSRFPSADHLASWACICPGNNESAGKKKSGKTKKANSTLKKTLVQCGRAAANSKDTYLNAQYRRISARRGAKRAVVAVGHSILTICYHMIKNRTQYNELGADFFQQRSRESLINQNVKRLEALGFNVRLEEAA

SEQ ID NO: 260174 - protein, 340 aa, unidentified
MNNNTKFFIGIDVSKPHFDASLMAVVNHQKQTLQTARFDNTTEGVKVFGKWLKTHQVTLDDNTLLVIENTGIYHRLLWLYCSQINLPIHIGNAAHIKWSFGIARGKNDIIDSIRLCNYAFKEADTLKTTPTLNPILMQLKDLMTARTRLLSQLNSIKTYLKELKNVSDKNIQKQLEQAHKTAIEGIAKSIKNIEAQIAKIIADHAALKTNYDLLLTVPGIGHLTAIYLIYCTNNFLGKITGKQLACYAGVVPFEHSSGISIKGKNRVHKMANKDLKKMLHMSALSAIQYYPEFKQYYNRKKEEGKHSMSILNAIRNKIVLRVVAVVNNQKPYVEINKMAA

SEQ ID NO: 260175 - protein, 423 aa, unidentified
MPATFSLPRTNDLERAMTAVMIGVDPHKATHTAVVVGPPEGPLGGVRVRASVSQAEKLVAWAADWPERTWAVEGAAGLGRLLAQQLVAAGERVLDVQPKLASRVRLLQAGDTNKNDPNDALSVAVAALRSKTARPVMAEDYPAVLKVWSKRHRDLARLRNQVACRLHAVLCDLVPGGISKEISAAQATRILEQASPSGAVDLARAELAAEFLEDMRGLDARLHRTRKKLAAAVRASGTTLTEVFGVGPVIASTIIGDIAGVSRFPGRGHFAAYNGTAPVEVSSGNRKIHRLSLRGNRRVNHAIHMAAITQIRHRHSDGRAYYEKKLAEGKTHKEALRSLKRRISDAIYARLQADARRAGQRPARRAREGNRGTALTPARPAHTPNAGSSDKPLPDLGTTIRPGTRAATPSPSKPTSKKTLTTT

SEQ ID NO: 260176 - protein, 418 aa, unidentified
MALFVGDDWAEDHHDVEVCDDTGRRLAKARLPEGMTGMSRLHELLAEHLGEDSISAETGTLAEGEVIVGIETDRGPWVAALIAAGYQVFAINPMSAARYRERHSTSGAKSDPGDAHVLAEIVRLDRAHHRPIAGDSDAVEGLKLVARSHQSLIWERTRHLQRLRQALREYFPAALDALATAGLGLADADALELLERAGDPDRAARLSRSKIAAILTRAGRREVEAKTEAIQAALRAPALRQAAPIEAAYATIAASQVRLIVGLNAQIPALEEVVAQGFGRHPDAEIYLSQPGLGTVLGARVLAEFGDDPHRYRDHKARRNYAGTSPITRASGRKTVVLARYARNRRLGDATHQWAFCSLSASPGARAYYDQLRARGTSHHAALRQLGNRLVGILHGCLKTRTPYDETTAWAHRQTSAA

SEQ ID NO: 260177 - protein, 343 aa, unidentified
MDEISMIGLDIAKNVFHVHGVDASGATVLRRQLKRGQVEKFFAKLPPTLVGLEACGSAHHWGRVIGRYGHQARLMHPGYVKAYVKRNKNDGRDAEAICEAVGRPTMRFVAVKSVEQQATLSIHNTRKLLVQQRTAAANALRGMLSELGIVAAQGTKGLRTLMQQLDQPSEAIPELMRNALLLLSRQWEALDTAVHGLDQQITRAAKADAEARRLMAVPCVGPMIASTVLAKVPDPHMFRTGRDFAAWIGLTGRDRGTGGKHRIGRISKQGDRMLRTLLINGASAYLLHQKRRGVTDPWLREMLARRPYKVVMVALANKTARIIWAMLAKGEEYRARASVPAAA

SEQ ID NO: 260178 - protein, 354 aa, unidentified
MEKLYLGVDLHKRSCWVTVLDADGHLLESRRLGTEKWELLEYFGKVRKPAAVAVEATFNWYYFLNVIEPLGLELHLVHPWKTRAIASARIKHDRLDSRVLAELLRTGFLAEAWIAPRRVREERQLLRYRVHTVQWATRAKNSIHGVLNRNGIRSPLGSPFGPKGRPFLEEVELAGTDRWEVDGQLERLDLLGQQLAALDREIRKRAKASPVARALEQIPGIGPFIASLVIAEVGDIRRFPSAKHLVSYTGLAPSLYASGEHRWGGPITKQGSSVLRWALVQAAHRAALNPRFYGFYQRQRERHGASRAAVALARKLVVIVFYRWRHALQAQEPLPQVKKVRERTSGGAWSEHRP

SEQ ID NO: 260179 - protein, 378 aa, unidentified
MKTVLQSKDNVFNPVLYMAFELSAKKWKLVFGNGQRTRMKTIAAGDWTALLAEIERAKSKLNCPADAPVVSCYEAGRDGFWIHRALQAEGIESHVVDSASIEVSRRKKQAKTDRIDAGALLRLLVRYCNGDKAALHPVRVPTVEEEDRRRLNREREYLLKERGAHSARIKSLLVAHGIRPARLSELPRLLPTAKAAVTGYALPADLKAELEREYERYVLVDQQVKALEQLQHARAASADSVAIQMVQQLRNLKGVGWQSSWGLSTEFFSWRQFKNAKQVGACAGLTPTPYDSGDSTREQGISKAGNKRIRKLMVELAWLWLRYQPHSALSQWFEQRFGSGGKRMRRIGIVALARKLLIALWRYLEHGVLPEGAVLKAV

SEQ ID NO: 260180 - protein, 355 aa, unidentified
MNKINSNFEGQTIFVGMDVHKASWNLGIHLNDMFVKNVHQKPNPYIMASYLKQHYPGAHYKAAYEAGKFGFWIQRQLTALDIECLVVNPADIPKSQKDSLQKTDPRDARNLSMRLQSGVLHGIHIPDEQQEADRIFFRHRKRIWKDLTRCKNRIKGMLAFSGIDIPEQYDNASWSRNFINWLKAVDCKQHSRRRALDYMITQMEYLRKELLSLSNELRKMMREKRYNKNYYLLRTIPGIGPLTAASILVEIGDVKRFETFYHLNSFVGLLPMEHSSGQTENKLRLTVRKHRQLRSDLVESAWTARRTDPAMALYFQQQIKRKDSKIVIVKIARKLLNRIRYVLLNQQPYEIGIVK

SEQ ID NO: 260181 - protein, 332 aa, unidentified
MSIIGCDLHSRYQVIAMLETKTGEIATRALQHEGGEAERFYRELETPALIGIEATGYTPWFERLLADLGHELWVGDPAEIRARAVRRQKTDTRDAEHLLDLLISQRFPRVGVPTPEERDYRQLLKHRDKLVKMQTSIRNQLHFLAMSQGVCRKQRLWSERGRQELEGLELGPWASRRRQELVDLLDGLGPRIEEMDRAVKAEARRRVEAVRLMEQQGVGPVTALAFVLTIGPVERFASSRKLVSYLGLNPREESSGGHQRFGHIRKQGNEMLRWLLVEAGHTAARLDPELRRVYQRLKFRRGGKVAKVAMARRLAVRLYWSLRGCAAGSHVQ

SEQ ID NO: 260182 - protein, 358 aa, unidentified
MAGKVTENAVVGGVDTHKDLHVAAVVDQNNKVLGTQFFSTTRQGYRQMLAWMTSFGALKRIGVECTGTYGSGLLRYLQNAGLEVLEVTAPDRMERRKRGKSDTIDAECAAHAAFSGIRTVTPKTRNGMIESLRVLKTCRKTAMSARRVALQIIHSNIISAPDELREQLRNMTRMQLIRTLGSWRPDASEYRNVTNVYRISLKSLARRYLELHDEIADLDVMIAAIVDELAPELIKRNAIGYESASQLLITAGDNPQRLRSESGFAALCGVSPVPVSSGKTNRYRLNRGGDRAANSALHIIAIGRLRTDDKTKEYVARRVAEGHTKMEAIRCLKRYISREVYTLLRNQNRQINSIPITA

SEQ ID NO: 260183 - protein, 356 aa, unidentified
MERYIGLDPHGTSCTFGVIGPSGRKLRHDVVETNGAALVSYLRSIPGRKHLCLEEGTQSAWLYEILSPHVEEIVVAGIGESRGQKSDVLDAFRRAEELRTGTIKKPVFKAPRLYSRLRELGRVHSMLVRDVVRVQARLKAMYRARGVGTPGKSVYGPRVREQWLRQLPVSSRWATEKLHEEYDLLLELKREAEHELVAESRKHRISRVLATAPGLGPIRVARLLPIVVTPHRFRTRSQFWAYCGLGIVMRSSSDWVQTPNGGWMRAQVARTRGLNRNHNSNLKNIFKTAATTVVTRLPTDPLYEHYVQLTSAGTKPNLAKLTIARRIAAIVLRMWKDEEEYDPGKLKQATVAPAAR

SEQ ID NO: 260184 - protein, 401 aa, unidentified
MSKKDVKACVRSPGARANQRHSEVRTFATTTNALLELRDWLVEQRVTLVAIEATGDYWRPPFYLLEDDVNVILVNPAHAKGLPGRKSDVTDSMWLAQLGECGLLKASFVPPQPIRALRDLTRYRTTLSREHTREASRLEKELEDAGIKLSSVASDILGVSGRAMLEALIAGERDPQVLAQMAKGRMRTKISPLTQALVGRFGQHHAFLCRMHLDRLDALDQDIAKLSTRIQEALAPFRDQLARLDTIPGVGPGVAEVIIAETGADMSRFPTAGHLASWAGVAPGLNQSGERNKPAHTRHGDHWLTGALGIAAMAANRTQDTTFLGARYRRLSRRIGKLKALVAIEHSILTATWHVLSENTDYHDLGGDYHAKRDPQRALRRITRDANRLGYTVRFDPIQAA

SEQ ID NO: 260185 - protein, 424 aa, unidentified
MKVTYKTCCGVDVHKSFLVATIITTTGGIEPSYQKKRYSTFNNSILEFKQWLLDNDCHDLCMESTGKYWIPVFNLLEDEINVTIANPKWVKAVKGNKDDTKDSKWIGDLFRLGLVKGSYIPCKKIRILREFTRYRYKIVSCRSSEKNRYQNALTVCNVALDSVVSDIFGKSSTSIIDYLLEQSGNSINHEEIASKLLKSLKSKEDAVIESIEGYQMTDSQKYRMHLVRAHMDYITAEINDVDREIEKLISSDPDFENAIQFLMTIPGVKRDSAITVISEIGIDMTQFSSSKRLCCWAGLTPGSNESGGKKKSVRVTRAGVYLKPALVQCAHAAVKSEKFPYYKKKYESLMKRRGKKRAIVAIARMILTAIYQMLSTGESWNPSDLYKIDIPEALLEKQKAKAIKQAMKLLQREGLYPPPEPIAS

SEQ ID NO: 260186 - protein, 383 aa, unidentified
MIPSGLAPVFSDRNIAYLKERNRNAVSTIVSQTHSFVIGVDTHARTHTYAILTATGQHLGTETFPNTAAGRSRAISWAGRRSSGVTDALWVIEGAGSYGAQLARNVADTGYRVVEAARMSGGRRGIGKSDPLDARRIATAVLSLPTDQLRTPRQDDGVRAATQILLTARDELAGERTRAVNALTALLRITDLGIDARRPLGSRKIAEAARWRTRTEPIAAATARTEAIRLAKRILELDAELDQNMTRIRDIVETSPAGELLNKTGIGPVTAARTLVAWSHPGRVRNEAAFASIAGVNPIPASSGNTTRHRLNRGGDRQLNRALNVIAMVRMVHDSGTRVYVERRRAEGKTDREIRRILKRYLARSLYRHLNTASATKLGVDEI

SEQ ID NO: 260187 - protein, 402 aa, unidentified
MESYAGVDWASEKHDVLVADAAGEKLLAATFAHDEQGLRSLCRQLVRLNVALVAVERPDGLLVERLLDAGLRVLALHPNQVAAARDRFRVSGGKSDRFDAFVLCELARTDHHRFRVLEPDADATKALRALTRTREDLVEARTALVNQLRAELERFWPGPLGLFSHMDSEIFLAFLERYPSPADARGLGVARMQAFLERERYSGGQQPAALIAKLRSAPQGRVGELELAARRRLVLSFVALTRTLNAQIKDLERQIRTQIRAHPDGEIFLSLFKSPNSFLTAAELLAEIGDCRARYPTRDALASDAGHAAVAKESGKRKTASFRWGCNKRLRVAFCRLADSTRHWHPWAQDLYAQATRRGHEHPRAIRTVGRAWCRVVWSCWQNRTPYDPARHRAPTPPRHMM

SEQ ID NO: 260188 - protein, 391 aa, unidentified
MVCVGIDVAKDKHDCCILDSDGTVRADCFTIPNNSDGFKRLLQTIQDCTQKSDKIKVGLEATGHYSYNILGFLLDNGLPTYVINPLHTNLYRKSLSLRKTKTDRVDARTIATMLLSDVDLKSYTDAAYHNEELKSLTRYRFEKVQERAKLKQSVSRLVTILFPELEQLVPILHIASVYSLLSEYPGAKQVSEVHLTKLTNLLATVSKGRYGKDKAIQIRDAAKTSIGSVMPAKSLELKHTIKLIKELTSEIDEIEDSIQQIMDELHPPILSIPGVGIQSAAMILAEIGDFSNFESPDKILAYAGCSPSTYQSGKLTNCYAHMEKRGSRYLRCALYNATKYVCHWNPVFAEYLAKKRAEGKHYNVALSHAMKKLVRLIYALQKSGKAYLTAA

SEQ ID NO: 260189 - protein, 366 aa, unidentified
MLQKAELSCEADSENDLGGSSETMYSIGLDVHKRTISYCVKDAAGRVHMEGKIGSTRRELDSWIKTLPQPRTIAMEATIFTGWIYDHLLPHAEKVKVAHPLMLRAIAAAKRKNDKIDASKIADCLRCDFLPECYMTSTEIRDRRRTLRYRGLLVKQMVQMKNRISGLLMEKGVTHTKRRLHKVGYFAELMGGNEEIDQSIRPLLKLSREHIVRAQKLDYALVSSLERDPLLVERLKRLRTVPGVGPITALTWALEIGDVARFRSIKQAISYCGLCGAEKSSADKMLRTPISKQRNKHIQHVLVEAAKLAPRQCHELALIYEKEMQRGNRNRATLAVARKIVAYLLAVERREKDFVPTEEFGGTAAA

SEQ ID NO: 260190 - protein, 359 aa, unidentified
MTHPISATIQFTTLGIDVGDRKSHVCVLDPAGEVAHETSIPTTPKALAGLVEAYPGARVAYEVGIHSPWITRIVDEQGCESIVANPRKFSYIAKSNKKNDRADAETLARFARLDPKLLSPIQHRGAETQAHRALLRIREGLVGARTKLINAARGIVKSFGARLPACSTPSFHRKVVDAIPKELRTVLTPLLEVVAHLTDQIRNHDKEIEQLAEQRYPETSKMRKVHGVGPTTSLAFTLCIEDPSRFQRSRDVGPFLGLVPKQFESGNSSPQLRITKAGDRQVRTLLVQCAQYILGHLGEECDLRRYGEAIAARGGKNAKKRAVVAVARKLAVLLHRLWVSDTPYDPDFKLNRQLSHKSA

SEQ ID NO: 260191 - protein, 342 aa, unidentified
MQITILGIDLGKNSCSVVGLDVAGRVVLRRRLRRDGVIKLAARIPGCVMAMEACCGAHHLGRLLREHGHQVRLMSPEYVRPYVKAQKNDDRDAEAIAEAATRPTMRFVELKSEAQLDMQSLHRVRDRLVGERTALINQLRAVLLERGIVVPQGRRKLERYVDALLAEEELRLSPRTGLLVEDLRAEWRELDRRILAFDDEFAARARTDETARRLTSIPGIGPLNATALTAAIGNAQTFGRGRDLAAWLGLVPKQVTTGGKPKLLGISKRGNGYLRKMLIHGARAALPTLSKGETPLGAWLRGLLARAHVNTVVVALAAKLARIAWAVIRRGEKFDMKAATAS

SEQ ID NO: 260192 - protein, 438 aa, unidentified
MRSIGLDVHKRFAEVAIIEGKGPPDRRRIGTTPAALQAFAATLRPDDQLVLEATMNTWAIADVLRASGARVVVSNPVRTRAIAEAKVKTDKVDALTLAQLLAADFVPEVWVPNDKVRALRRDVAARAALVRQRTQARNRAHAVLHRCLQDAPVSDVFGTAGRSWLSALALPEAERAQLEATLRVHEAIEAEITLADRRLAEAALADERVDRLMSIPGIGATTGLALVALIGDITRFRRPAKLVGYVGLDPRIHQSGERAAWIGSISRAGHAHSRSLLVEAAHAAVGGPGPLRAFFRRVQRRRGTQVALVAVARKLAVLVWYVLTTGERYRLERATLVRDKRNRLARTLGQRTPRRRPAKGEPSLALRREHELAPLDEAEAAYKADVAQWTQKDAAAANGEATVQPSKGQDARRSLRPQRSALLTGSTASDEGGYARGA

SEQ ID NO: 260193 - protein, 338 aa, unidentified
MKLYCGMDLHSTNVVTQLINEEDKVLYRKKQSCDLDQILHGLEPFKESIEGIAVESTYNWYWLVDGLMEAGYKVHLVNTAAVKQYEGLKYTDDDSDAFWLAHLLRLGILPTGHIYPKESRAVRDLLRKRGQLVRQRTTHILSIENLYARNTGSRLSCNATKSLTQEQVQQQFDDPNVALAVDSNRIIMNALDQQIKVLEQAILKQAKLDSRYRCLLSIGGVGEVLALTIMLETGGIERFAQVGNFTSYCRCVGSEKLSNGKKKGQGNTKNGNKYLAWAFVEAANFAIRFNEQAKRFYQRKAAKQNRVVALKAVAHKLARASYYVMRDQVPFDSAKLFT

SEQ ID NO: 260194 - protein, 317 aa, unidentified
MNQNIATITDPHYVAIDISKDSLQVHTSGGQTCRIVYDKAGLRRLLKSIKSLPDPLVVCEATGGYERPLLGTLHQAGIAVNLINPSRLRAFALSEAIKAKTDPIDARMILRFAQQKHLQPAPPPEPVRQELAAMLDRRSHLTTQLAREKNRLQKCQKAIATSIRRMIRFVEKEIASLDAQIKLLIAKDRRLAAEAQLFQSVKGVGAVTAWTLLAYLGEMSRLRRNQLVALAGVAPFNRDSGKASAKRSISAGRSKVRKCLFMAAHTAATHNPVIKPYVAGLIARGKPYKCAIVAAMRKLLIHLHSLLKQHQQHSLAL

SEQ ID NO: 260195 - protein, 360 aa, unidentified
MKKISKQSQVVKAAKPERSVGLDLGDRFIHYCVLDQEGEVMEEGRMANSETALRKHFADEAVMRVAMEAGTHSPWVSRLLKRLGHQVLVANPRKIRAITGSESKNDRNDAEQLARFAAFDPKLLSPIEHRSEQRQQDLNLIHARATLVRARTMIVNVVRGLVKSAGDRLPDCSTESFAERTKAAIPASLREVSMPLLKQIGLLTAQIDLMDKQIDKLGKKYPEISILRSTPGVGPLVAACYVLTLDNPNVLGDNRQAGAFLGLRPRQSQSGDSDPQKRIARTGNTYLRSLLVQSAQYVLGRFGPDSALRRWGLKLAGSGGKRGKKRAIVAVARKLAVILHSMWRSRIVFQAFPQSATGVA

SEQ ID NO: 260196 - protein, 332 aa, unidentified
MTSKGQEKMSHPMAQASDEITIGIDISKEHLDIHLLPERIVRQFTNDREGHGKLMAWAAPYQPARIVFEATGRYHRSLEMALGKAGLPAVKINPLQARRFAEATGKRVKTDPIDAAMLARFGAVMRPEIPSAKDETIDMLAELLTARRGLVKDRTAAANRGKSLTLAMLKRQCQQHRKQIDSQIEAIDREWMSVLAANPALKARLDILLSIPGVGPATAIALLVDMPELGTMDAKQAASLAGLAPVTRQSGTWKGKSFIQGGRASIRHAIYMPALVAIRFNPQLKEKYEALRRAGKLANVAIVAIMRKIVIIANALIRDDRKWTLDRMAVVA

SEQ ID NO: 260197 - protein, 315 aa, unidentified
MTEIICGVDISSLTLEARIGRDGAGHSFANTPDGIAELAAFSQQHGVELVAVEATGGYEKQAFALLWARRVPVAILNPRAVRRFAESMGLLEKTDQIDAGVIAWYAAVKHVVACIPASAAEQRLQALVTRLRQLTELQAAQRNQRRLVTEATVLALFTKLLALLASQIRELELAIAALIAADPLWQKLDQAFRSIKGVADRTVARLMAEMPEIGTLSNKAVAKLAGLAPLAQDSGKKHGPRSVRGGRRRVRDILFLVAGVVRLYHPDFAAFHARLSAAGKPKKVIRIALAHKLLVRLNAKARQVRQSQVGAVAAN

SEQ ID NO: 260198 - protein, 409 aa, unidentified
MRLLVGDDWAEDHHDVEVLDAAGRRLARARLPEGVAGIARLHAIIGELAGQDVEDEPVEVLVGIETDRGPWVAALVAAGYQVYAVNPLQAARYRERHTVSGAKSDTGDAHVLADMVRTDAHQLRPVAGDSAQAEAVKVVARTHKTLIWERTRHTQRLRHALREYFPAAVQAFQDLDAPDALELLAKAPDPASAARLTRAQIRAALKRARRRDIGAKTERIWAVLHAEHLGQPEVVTGAYAASVRSLVAVLRVLDQQIATLQRQVVAHFGRHPDAEILASQPGLGQILGARVLAEFGDDPTRYATAKARKNYAGTSPITRRSGKTKLVAARYIHNDRLIDALMTQAFAALSASPGARAYYDQLRARGAGHNAALRQLANRLVGILHGCLKTHTRYDEATAWSHHSKTLAA

SEQ ID NO: 260199 - protein, 350 aa, unidentified
MLIIGCDYHPSFQQIAFVDTSSGELSERRLFHREEAEQFYGKLKEQSVPVRVGMEASGHARWFERMLRDLQFELWIGNAAEIRAKRVRRQKTDRQDAQLLLRLLMEDRFPRIWVADAENRDLRQLLWHRHRLVQMRTRVMNQLHVVALNEGLRRKKALWRQAGRQELESLALAPWANRRRQDLLDLLDQLTRKIQQLTQALEEEVEKRPVTRRLMTHPGVGPLTALAFELVIGTPERFHCGKQIASYVGLVPSEESSGNRRRLGHISKQGNALLRYLLVEAAQVTIRTQAQWRSRFFHLAMRRGRKIAKVAMARKLAVHLYWMWRQGCDYGHLQKLGSHAGEPGNPYGVR

SEQ ID NO: 260200 - protein, 315 aa, unidentified
MKKASADIFVGIDVSKNWLDVAVHDREEALRTGNDETGIASLVKRMKKLKPTRIVLEPTGGFEMLVVAELAHAGLPVVAINAKRIRDFARATGRLAKTDKLDAKVLAHFAAAVRPPVRSLRREEETQLTALLTRRKQVLDMITIEKNRLVTVRAKLRSAIEAHLQWLSKSLKELDKEIEDFVENSPVWKEKDALLQSVPGVGPVTSATMLGMLPELGKLNRQEIAALVGVAPLNKDSGKKQGKRRVYGGRADVRSVLYMAALSAKKFNPIIRKFYARLIQHGKEKKVALTACMRKLLVILNSMMHTNQPWRSQAA

SEQ ID NO: 260201 - protein, 356 aa, unidentified
MNSTTYPAEAIGKPLVWAGLDVASETFEAALWLTLAATASRSQRQIPVRGFARTPEGIEQFLAWADALLAEAADPEAPMLRVVMEATGKYSLELAIWLIARRPSLAPAIINPETAAHFAKSLSLRAKTDKTDARALARYGAERHPASYDPPSPAQAELRELSRYRQTLVESRDAEKARAREGAASALVRRQQQARIRRFERDIERLEREMIKVLEKLPNLKRDAAQLDGIYGVGLIVAVTVLAELGDLRRFEQGRTLTAFGGIAPRKGDSGKSVHQQAHMCKKGSAHVRRALYMAAMTVIRGDNDLADLYHRLVAKGNKRMSALGAVMRKMLLVMRAILISGEPYQRHYRAVDKSV

SEQ ID NO: 260202 - protein, 343 aa, unidentified
MQTVTTIGLDIAKSVFQVHGVDAAGQVVVRRQLKRRYVLAFFEKLPPCLIGIEACASSHHWSRELQALGHKVRLMPPAYVRPYVKRQKNDAADAEAICEAVTRANMRFVATKTPEQQGCLMLHRTRHLFIRQQTAVINAIRAHLAEFGIVAPVGRNGVEELLGVVADASDKRLPEIARACLVALGAQLRMLKAQILEFDRMINAWHRSNETSKRLDEIPGVGPALATALVASVADPRALRSGRDFSAWIGLVPKQHSSGGKDKLGGISKQGDRYLRSLFTAGALAVIRYAKIHGAKHRPWLTALLARRPTKVAAVALANKIARMAWAMMARGERYKEPVALAA

SEQ ID NO: 260203 - protein, 392 aa, unidentified
MRFVGIDIGAERHSVAIVDDGGRVVSKSVSFEEGAAGYRRLGELLGSPADCLIAMEATGHYWKNLFASLAAEGFQIVLLNPLRTRRFAEEELQRTKTDKVDAVSIARFAAQKRPTATTLHGPAIEELKQLVRLREQSVQHLGDRVRHLHKAIDLTFPEFTRHVRGLDTELATAILLRYPTAKALRTISVRKLAGLCYDGRRGIGDDLARALIEAAKISVGHFSSEPYQLQVRYACEDIVSLRTRVRGLETDIELRLNTHEVGKLLTTIPGVSTLTAARIIAETGDPARFRSAAAFASYIGAVPRLHQSGKKRYSGKPAIPLGNARLRRALWMPVLVGIRLNPWLRTYYLRLRAAGKRPKVAIIAAMHKLLIAIYSVAKHRTPFVLQLPATLT

SEQ ID NO: 260204 - protein, 366 aa, unidentified
MGNVALFSDEKESTMQDVTAASVYLGIDAHSETCTFCAIDKEGKFIMRCTVSTETRQLRAAVRELPDHTWAMIEASSVSIFVRDALASVLERIIICETRENRLISKSENKSDDMDAWRLARLLRLGEFKEVYVPSRPRQEIGELVRTYQQVVGDVVRAKNRIRARYTRHGVRITDSAYGDGRHDALKQLDRLGLKPVFDAMYTVLDAAEGVKDDLDRALRARLSRTKEYKLLKTIPGVGPVCAAIMVAIIAHPDRFPYKQRLWSYAGIGASDDSTGKLVRVRGMKSGNRLLKYAVMTATHGAIRVGSDNRFARLYQTMVEKNEDPKKAKRAAGIAKKTVARGILAAALAMWKAGTTYSENTQAKST

SEQ ID NO: 260205 - protein, 339 aa, unidentified
MKLYSAIDLHSNNSVLVILDENDKVVYERRHPNELPIILEQLAPHRENIQAIAVESTYNWYWLVDGLMAAGYTVKLVNTVAVKTYDGLKYSSDEHDARHLAHLLRLGILPTGYIYPKEERAVRDLLRKRALLVRNRTIHILSIQNLVSRNTGKGIVAPAIRKLDKAAISQVCGGNKILALAITSSLSVLRCLDEEIKGLERIVLAQARLKPEFKQLLTVYGVWHIIGMTIMFETGSIERFATVGQFASYARCVSTSRWSNGKKKGEGNRKNGNKYLAWAFIEAAHYAVHYNERIRKFYQRKKAKTNTVIALKAVAHKLARACYHVIKDRAPFDEARAFA

SEQ ID NO: 260206 - protein, 353 aa, unidentified
MKAKMEYNTASPAVIGVDIGKEVFHLVGLGADGKIAFRRKIRRLGLKDAFEKLPPCIVSMEACLSAHFVSRTLRALGHEPRIIPAIYVKPFLKGQKNDYNDAEAIAEAALRPNLRLVQEKSQDQLDLQACHRVRSRLVSRRTATINQIRAFLIEQGIAVRAGPRALRNSLFAILENRKDEISPRMAKLILGLYEDWCYLDERLETVTGEIEKLSQVEATCQRLMSVPGIGPLISTALVAAIGTGEAFDRGRDFGAWLGLVPRQYSTGGRSVLGRISKRGSKYLRTLLIQAAKVLLMRPHNWSRYSFGAWLEAASERLHPNKLAVALANKLARIAWSVLRHDKAFDTHLEAAAI

SEQ ID NO: 260207 - protein, 381 aa, unidentified
MTRKNTLKSLPTDTEFRVVGLDLAKSDVSVAAIPVDDNTPSLVDRMTYADLLDWAGKISPTLFAMEPCNGYSLLCLQLENLGHEIKVISGSTVSMWINTHLSGQKTDLNDAIALARLAVSDAELTPIRHKSITEIRIQTVQAVRQQLMSQRSKSIVSFKALAQQWGIPCAAGHRNLKKLRESIEAKVDLITRPVANAMLFLLDAVKSLDRQIGQLNQTLQELVMSDERGRLLQSVLGVGTQISARVITVVGNIERFNSPRSLVAYVGVAPRNFITGHKNLTKKKHGNCPDLSHKGQGKISRRGDKLLRSLFIQGAACLYMQFCKDQLPECQLKRWILKQLARQKTYGKLIVSLAAKLIRIVWAVSSDNRMDPQIDIKMTLL

SEQ ID NO: 260208 - protein, 344 aa, unidentified
MDHFAGLDVSVKETSVCIVDDTGKIVREVKVASEPEALLAVLKNPVYHFRRIGLEAGPLSQWLYSALAEAELPVVCVETRHMQALLKAQINKTDRNDARGMAQMMRVGLYRPVHVKTLRSQKLRMLLTHRKLLQSKAIAIENDLRGTLRNFGLKVGMAGTVKFETRIKELVGNSPELAALVEPLLVVRRVLREQLVILHRRLLAIVRDDEVCQRLMTTPGVGPVVALTYRATVDVPARFRKSKSVGAVFGLTCSKYQSGEIDRSGRISRCGDEMMRVMLYEAAQSMLYSKKWSWLKAWAMQIARRRGMKKAIVALARRLAVIMHRICVDGTEFRWTRGQTAAAA

SEQ ID NO: 260209 - protein, 419 aa, unidentified
MSFKILKNNCCGLDVHKTWIYACIGITDSLKRTEYKEARFSSFTNGLNELCDWLSKYNCTDVCMESTGKYWIPVFNVLEKNNIWVTLSHPKYTKPQKGNKTDRKDAKWICDLYMCGMVKPSFIPPADIRELRDLVRYRFKLTCMITGEKNRAHNCLTVSNLKLDDVFSDIFGKSSRSITEQILQHPGEIFDVSPFVDGRCKTPIEEIQAAVNGAISKEQAVKLRQCLNHIDELEMHTAEIEREIFRLSDKYESILNLIRTVPGFDKTPMTAIQVLSEIGGDMSVFPTAKNLVSWAGCCPRNDQSNHKIKSTRISRAGSYFKPVLVQVANALIKSKKHPEFTTRYRRIKARRGHKKAIIAICRMILTAIWHILTDLKPYTPKGFLESRPVNKTKVLTTSQALNLMKQRGYIIKDDVVPVT

SEQ ID NO: 260210 - protein, 431 aa, unidentified
MANDTINWFAAVDWGSEQHQACILDAAGKIRGERAFAHGGAGLGALCDWLVSVADDPGSVAVAIEVPHGPVVDALHDRGLAVYAINPKQLDRLRDRVSVAGAKDDRRDARIAAAGLRTDPQLFRPVRIGDPVVVELREWSRLAAELQPERVRLGNRMRQQLWRYYPQLLELTDDVAAEWVLELWMMAPTPAKAARLRETTLARLLKQHRIRKITAETALRILRAPVLKVATGVTEAAVLHLRSLVARLRLANREFRQAERKLDELCAALTRTETAGATAPSDAAILASLPGVGRTTLAALLTEASGPLARRDDRALRTLSGVAPVTKRSGKTCIVVMRYAAQKRLRQAVFHWARVAVQTDPQSHRRYEALRARGHSYGRALRGVADRLLGIACVLLQRQDLFNPQHDRLTAAASIQTSLCSTAAAILRSES

SEQ ID NO: 260211 - protein, 354 aa, unidentified
MPRHRSDLEAVATIGVDIGKNTFHLVGLGRNGAIVLRQKLSRPQVEARLANMPPCLIGMEACVGAHHLSRQLKALGHDARLMPARYVRPYSKGQKNDFRDAEAIAEAVLRPTMKFVAIKTIEQLDLQALHRVRERLVCQRTSVINQIRAFLLERGIAVRQGLQALRTEMPIILAMTDKLSPRMIHVIEALCADWRHLDARIETVSEEIKTLSEQDDGAKRLMTVPGIGPIISTATVAAIGKGDMFSKGRDFGAWLGLVPRQMSTGGRTILGPISKRGNRYLRMLFVQAARAVLLRPQSWGKHGLKSWIEAAARRLNRFKLAIALANKIARIVWGVLHGGRNFEVRTLRPALQAA

SEQ ID NO: 260212 - protein, 412 aa, unidentified
MDANMEVVYERACGIDVHKKEIVACMITGQRKMVTRKFGTLTRELREMVEWLKAENCQIVAMESTGSFWKPLYNIFELEGVEAIIVNPQHMKAIPGRKTDINDAQWIAKLMRHGLLKASFIPDKEQREYRELTRYRNSRIEERAREINRLQKMLEGANIKLASKVSDIAGDTATGMIQLVVQDEEITIEQIAKIRNKRCNSSAEEFLDAMTGIVSPLQRELFGEVLRVIEEQTRQIERIEEMVKAYTTEAYDIAVRAIEAIPGIGRISAEQIIAEIGIDMSRFPSAHHLCSWAGLSPGDNESAGKRKSGKTRKGNKTLKRTLVQCATSAVKKKDTFFSAQYQRLVVRKGGKKAAVAVAHSMLIAIYYVLLGCEYHDLGADYYTQFNKEKKIQSHLNQLKKLGWELPCPAIAS

SEQ ID NO: 260213 - protein, 344 aa, unidentified
MQITTIGIDLAKNVFQVHGANERGKTVLRKQLRREQVAAFFANLPSCLIGMEACGSAHHWARKLQAFGHTVRLMAPQFVKPYVKSNKNDAADAEAICEAVTRPTMRFVPIKNVEQQTVLSLHRVRQGFIRARTAQANQIRGLLGEYGVVVPQGISNISLRVSDLIEDATNDMPGAFRQLIERLLEHLKLLDQQVGEIEMQIKAWHRDDEISRRLEQVPGIGPITASALAATVGDARNFDNGRQLAAWLGLVLRQHSSGGKAKLLGMSKRGDAYLRTLLIHGARSVIYRATQRNDSDNLLVKLTARRNANVAAVAQANKTARIVWALLVHNREFRAGYTPAMAAA

SEQ ID NO: 260214 - protein, 443 aa, unidentified
MVSRRCIGLDVHREFAQVAIWEAGIVRQVGQIQTTPEALRLFADSLAPSDEVALEATGNTHAIARLLEARVARVVVANPAKTRAIAEAKVKTDKVDAEVLAQLLAADYLPGVWLPDDETHALRRQVHRRAHIVRQRTRLKNGVHAILHRNLVPRCPAADLFGHKGRRWLADQRLPLDERQAAEALLRQLDFHAEELRLIDAELGRIGLAREDVRRLMTIPGVDATVALAIVAAVGDFGRFSRPEKLVRYFGLNPRVRQSGGQPASHGRITKQGRAHARGMLVEAAWAAAKTPGPLRAFFERIKARRGMHIAVVATARKLAVLCWHLITKDEDYAFQRPSLTAQKLRRLELRAGLPSRRGQKGKAAAYSLKEVRRRENELAAQGEQAYRQLVADWQAKGPKNTRGVAAANGARLSRPSDGAAARQDSAPTPALRSGVDHAHREA

SEQ ID NO: 260215 - protein, 390 aa, unidentified
MPKYEDLSRSLAAFDQDSTLVAAIEMGSEGWLVGALVPGLKRDPRKKLQPDGPALLRQLRRWCEEAAKAGHPIKRICVAYEAGRDGFWLARWLREQEIEAYVIHPTSIPVSREHRRAKSDRLDLALLLRALLGWLRGEVKHCSMAAIPTVEEEDAKRPLREREALTAEVTRLSNRMQSLLMLHGIRKFKVRQKKAEEKLFELKTACGEPLPPATLAQLRRTFAQLRLAQEQIATIDKERHQRLAAAPEAGVHPMIRTLARVYGVGLMTAESQVREVLYRNLRDRRAVARYVGLTGSPDESGKKRREQGLAKAGNGRVRRSLIQLAWRMLRHQPNCALVKWYRARTADGRRDTRKVMIVALARKLLMAFWELVHNGIVPEGMRLHPVKVAG

SEQ ID NO: 260216 - protein, 332 aa, unidentified
MYYIGIDLHKQDLVMAVENETGPTGRPRRIACRDVEAIRSAVERWRPFRAVVEASASYRWLYDLLAPSGEVVLAHPLRLRAITTGRAKTDKLDAAMLARLLRANLIPQAYVPPARYQTLRDLTRGRARLSYGATLAKSQVHALLAGANVHPPFKSPFGKRGRRWLAGLDLGLARNLSRDELLLRLEHYGREIAVLDSHLEKMAVEFPESAALEGLYGIGRYSALLIVAELGEAERFKNARQVGAYAGLTARVHQSGKTEHRGGISKQGSRWLRWILVQAAMKIVRQDERLANFYTRVRKRAGRNVARVAVARKLAGICWVRLRAWQRAHVAA

SEQ ID NO: 260217 - protein, 400 aa, unidentified
MSGLKGKFDCIVGIDVSKDKFDACGITGEEAKLFQISVAMDRKGFEKLKRHLGTVSVSSVLIGMESTASYHVNLFSYLVAEGYKVILINPLLISNYVKMQLRKTKTDKKDAVVIAQFLLVNGDTLIQRATPALISDLRDLSRQRESLVDEMTSLKIEIKQLLNITFPELEHMVGIFTKSILKLLQQYPSANALRDADIGQLSEMLIADSYGHKREEFAKTLIKVARSSVGTNSHAKEMIIKQKIGLLLHLEEALQEITDMLIEMARKLMEEDINIMTSIKGIGDKTAANFLVEMGGDINKFECSGKIIAMAGLDPAVYQSGQHEGRGRITKRGNRHLRRIIWMMTTSVIQYTDIFHAYYLKRRKEGLPYKKAVLATAHKLIRVIYSMLTKRTTFCPEVNS

SEQ ID NO: 260218 - protein, 420 aa, unidentified
MRNAGIHANSLLEVRRMYNAVGIDVSKGKSTVAVLQPGGTVIRKPFDVSHTSQNLNELADYLGSLDDSTRIVMECTGRYHEPVVKALSEDGLFVSLVNPHLIKNFGNNFLRKVKSDLADAKKIARYTLDNWAELRQYSSMNNTRTQLKTLNSQFSFFMKQKVAAKANLIALLDNTYLGVNKLFDSPTREDGSEKWVDYAYSFWHADCVRKIGLKAFTERYMSFCKKHHYIFQQDKPEKLFNASKELVAVFPKEKTYKLLIQQSIQQLNLASEHVERLRREMNELASTLPEYSTVMGIYGVGKTYGPQLIAEIGDVSRFTHREALTAFAGVDPGVDESGQHKSKSNRASKVGSARLRKTLFQIMTTLLQNAPEADPVYRFLDKKRSQGKPYYVYMTAGANKFLRIYYGKVKECLRNLEQTE

SEQ ID NO: 260219 - protein, 326 aa, unidentified
MENEKQYVGVDISQDWIDAAWYEQDKVVHTKVSNNLTGYGELVKKCSDQMHFVMESTGPYCFGLSLYLSMKSIKVSVVNALVIKRFIQMQLEKNKSDKKDALWICKYALSQHPDLWQPPQNHIIHARQMLSAIAQFTKQRTATINALKSLQAIPVMSKECQRGYERIIAELNKQILKIEEHLETLLKEHEGNKLQALQTIPGIGKRAVALMLITTDGFRKVDNYRQLASWAGLSPKEFTSGKSIRGKVRISKMGGGELRHTLYMCSMTAIKKNKACKDLYDRLKAKGKNGKLALAAVSNKLIKQCVAIAKSEMPYDEKYFSKKACF

SEQ ID NO: 260220 - protein, 392 aa, unidentified
MICVGIDVAKDKHDCFILNSEGEVLADVFTILNNADGFDTLLQTIRSYTRPEDKIKVGLEATGHYSYNILGFLLDCGLPTYVINPLHTNLYRKSLSLRKTKTDRIDARTIATMLMSDVDLKSYTDTVYHNEELKSLTRYRFDKVRERAQLKSSIARLVCILFPELEKLVPTLHMASVYTLLSEFPGAKQVASAHLTRLTNLLHEASKGRYGREKAIQIRDAARISIGSAMPAKSLELKHTIHLIRELDAEIEEIETEIDSVMETLHSPITSIPGIGNRMGAMILAEVGDFSNFDSADKILAYAGLSPSTYQSGQLTSSYAHMEKRGSRYLRYAIFNATKFVCNWDPTFAAYLAKKRNEGKHYNVAISHAAKKLVRLIYTMEQTRQPYRRAAV

SEQ ID NO: 260221 - protein, 370 aa, unidentified
MSDPTPLFVGLDVHKDSIAVAHAQGQSADPPVYVGAIGPRQADLDKLIRRLQAKTPTLVFAYEAGPCGYGLYRDLTGQGFACQVVAPSLIPKKPGDKVKTDRRDAVELARLLRSGDLTRVYVPTVDDEAIRDLCRARDAARLTLKNAKLRLKAFLLRLGLHYLGRADWNAAHLRYLAKVVCPTPPQQIVFQEAVKAVDEQVDRLARLEAELRACASAWRLAPVVDALQALRGVQWLVAITVVAELGDLTRFTSPRQLAAFVGLIPSEYSSGPSRRQGGITKAGNGRARRALIEAAWAYRHPAKVSQHIQTRIDALPKPIQDLGWKAQVRLCKRFRRRTARGKHPNVTVTAIARELIAFMWAIAKEVPVAG

SEQ ID NO: 260222 - protein, 438 aa, unidentified
MSTTYAGVDWASEKHDVLIADETGEEILAATFAHDEAGVRGLCRTLVRHAVTLVAIERPDGLLVERLLDAGLRILALHPNQLAATRDRFRASGGKSDRFDAFVLCELARTDHHRFRVLEPDTDQTKALRALTRAREDLVGTRTALTNQLRAELARFWPGPLGLFRDLHSQISLAFLERYPSPADARGLGEARLHGFLVREHYTGRQQPGQLLAKLRRAPAARVGELELGTRRQLVLTLVAMIKTLNEQIKQLERRIAIAIREHPDGAIFLSLFKKRNSVICAAELLAEIGDCRARYPTRDTLAADAGQAAVAIESGKRKAACFRWACNKRLRTAFCTLADTTRHHNPWAQDTYARARGRGHDHPRAIRTLGRAWCRILWRCWQDRVPYDTARHRALQRHVTVTIPTSSGPRPDLAATQRMAGAAVTQRAGPQGRARSA

SEQ ID NO: 260223 - protein, 361 aa, unidentified
MRIIGCDLHARQQTLAMLDTVTGEVVNRTLLHEGNEVREFYSELPRPVLVGIEAIGPMQWFLKLLDELRIECRVGDATKIRAAEPRKQKHDRRDAELILKLLVENRFPAIWRPSQELLDLRALVLHRHQWVRLRTRIQNALQAIALANGLRRGPRLWSYDGQAKIAFLPLPPHASYRRSALQALHRKMEEEIENLTEQIAEQAGQRSGARLLMIHPGVGPVTALATEVFLGDPHRFTDGKALASYVGMIPREYSSGERQRLGGSTKQGSPLLRFLWGEADAHAARRDPELQRFYRCKLVQKGLGKARVAVARKLGIRLWIMLRDQIDYQEFCRRGQKQQNGAACAGMPETGFGANRHRPID

SEQ ID NO: 260224 - protein, 421 aa, unidentified
MPHLPHEPFAAFVGIDWADAKHALCLQAAGSTTREASSLDHTPEAIDAWVCTLRQRFGGHPVAICLELNKGPIVAAWCKYEFLVLFPVNPLTLARYREAFTPSRAKDDPTDAELQLELLLKHRDKLQPLQPQSPQMRALAQLVETRRRLVGDKVRITNRLTSALKNYFPHVLRWFEEKDTVIFCDFLSRWPTRKAVQLAHRATLETFFRDHHVRSAEVITQRLQAIKAATPLTTDAGIMTPNVLFVQALVAQLRVTLQAIADFDHAITQHAQQHPDFPLFQALPGAGPVFAPRLLVAFGEQRERYTSAAELQKYAGIAPVTERSGKQAWVHWRLQCPTFLRQTFVEWAAESIRHSFWAQVYYQQQRAKGQRHQAAVRALAFQWLRILSRCWQDRTPYDESISLQALTRRGSSLLHNLAKSC

SEQ ID NO: 260225 - protein, 363 aa, unidentified
MAMKAMTLVGLDVHAAQTHAAIVDPASGELRVSRLRMAPVEVASFLEGLGAGVVAVYEAGPTGFGLARAARERGIDVRVAAPGSIPKSSGDRVKTDRRDAIRLARLLAAGELGFAFVPSVADEHFRDLVRVIEDVRGDLMRARHRLGKFLLRRGERYPGPGRAWTVAHLTWLRGLDFEDVCSQAAFVEYLAAVELLIGRRQSLLAALEQQVPQCTHAPVIARLRCFRGLDTLSAAGLCAEVGNFARFPKPTLLSGFLGIVPSERTSDTKRRQGSITKAGPGHARRLLVEAAQHYRHRPAIGAALARRQHDQDPRVIAIAWRAQRRLHARWQHLHHERRKPAGVVAIAVARELAAFCWEAATLD

SEQ ID NO: 260226 - protein, 473 aa, unidentified
MKKNSIDKQKEVIKLLEKQKIRDVKDLESYKLSVCHPFSAGIDLGSEELYVALSPEIAAELDIPIVHSFGTFTSDLLRCRDLLTSCGINTVSMESTSVYWSTIYDVLRSAGIEVCLVNPKKFRMVPGRKTDILDCQWLQTLHLYGLLRGSFHPEAEVDVLRSYMRERDTLIKERTTYVQRMQKALTKMNLLLYNVIDDITGKTGTQIITAILDGERDPKKLAAFRDPRIKKSEAEIAEALTGYYKEDQLYLLKINWQSFCFFDKQITDIDRQITKTLKRFPLKKTSTERRADNGKSESKGKNDIRTKDNLEDKLYQILGADLSGLPGIRSLATLQIISEVGTDMSKFPTANHFASYLGFAPHNKITGGRIISSRTDRIKNSAAQAFRKLIPSISQTKTALGAFYRRLAPRIGKPQAITATCRKLAILVYNALVHGQAYIEQGEAQYLEKQEAWERKKLLKLAEKYNCKLIQTG

SEQ ID NO: 260227 - protein, 337 aa, unidentified
MSKIIRIGVDTSKLVFELHGVDAAERPVLLRRLRRGEMKRFFGSLPATVIGLEACGGAHHWARMLQELGHEVRLLPPQYVKPYVKRGKNDVADAAAICEAMSRPSMRFVPMKSAESQAALMLHGSRDLLIRQRTMLLNSLRGHAAEFGVVGAKGVCRIGDLLERIAASAAIPELARRIFASLSQQLDALEAQLADLDRQLRAWHRQNESSRRLAGIPGVGPVLATALTMKVPDPGVFRSGRHFAAWVGLTPKDHSTAGRQRLGGITRAGDEMLRHLLVSGAMAVIRRAKPGRSSPWLLRLLARKSKMEAAVALANKTARIAWAMMMRGEVYRRPAAA

SEQ ID NO: 260228 - protein, 335 aa, unidentified
MKALSKPERLVGSKSRIEHKEGSNNMEQFVGIDVSKAWLDGEAVPQSRPMRYGNDSAGIAALVSALVADPPALVVLEATGGFETEAASALAAAGVPTVVVNPKQVRDFAKAMGILAKSDRLDARVLALFGQRIRPQVRPLPSPEQRDLAELLDRRAQLVSMRAQERTRLATALAVAKPSLREHIQWLDARIGEFEIELTARLRSSAAWKVKVDLLKPVPGVGKVLLFTLLARLPELGHLNRCDIAALAGLAPFADDSGERRGQRFIRGGRSEVRKALYMATLSATQHNPQIKAFFARLTAAGKPFKVAMTACMRKLLTILNAMLKTNQPWQPRAA

SEQ ID NO: 260229 - protein, 391 aa, unidentified
MPTVADRAEAPTAIQTNLAAIFTSLELSRSIWLITSLSPGCGEKMSKHSVPAGDIAALLARFSELKQKALARTGKSFPIVAVQEAGLDGFWLHRVLEKEGIESHVVDPASIATSRRRRRAKTDRIDGETLLRALLAYKRGEPRVCAMVRTPTPEEEDRRRLCRERKVLIAERVEHVNRIKGLLFAQGISGYEPLRRNRRQRLDELMTGDGRPLPTHLKTQISRELDRLELLLDQIKAAEAERDALLAAQQAAAPAPVGKMLLEFKGIGAEFAAVLWLEAMFRHFDNRRQLASYAGLAPTPWQSGSVDREQGVSKAGNPRLRATLIELAWLWLRHQPQSALALWFKERVSRNGGRMKKTTIVALARKLLVALWKYVTAGVVIEGAVMKAEFA

SEQ ID NO: 260230 - protein, 402 aa, unidentified
MNAVGIDVSKGKSMVAIMRPFGEIVSAPFEITHTASDINSLVELINSVEGESRIVMEHTGRYYEVLAHQLSEANLFVSAINPKLIKDFDNDSLRKVKSDKADAVKIARYALDKWQNLKQYSVMDELRNQLKTMNRQFSFYMKHKTAMKNNLIGILDQTYPGVNTYFDSPARSDGSQKWVDFASTYWHVDCVRKMSLNAFIDHYQNWCKRKKYNFSQSKAEEIYGKAKELVPVLPKDDITKLIIKQAVNQLNIASATVESLRTLMNETASQLPEYPVVMAMKGVGTSLGPQLMAEIGDVSRFTHKGAITAFAGVDPGVNESGSYEQKNVPTSKRGSSNLRKTLFQVMDALIKTHPQDDPVYQFIDKKRAQGKPYYVYMTAGANKFLRIYYGRVKEYLSSLPES

SEQ ID NO: 260231 - protein, 375 aa, unidentified
MRKSSILFVGMDVHKESIEIALAEDGANGEVRRYGRIGGTFDAVKKALRKLVSQDRTLHFCYEAGPCGYELYRYLTGEGHVCVVVAPSLIPKKPGDKVKTDKRDAIQLARLFRAGELTAVYVPDREDEAIRDLSRAREDAMLIQKAARQRLKSFLLRHNIRYQGRANWKEKHLRWLADEVRLSNPVQQAVFQEYVNTVTEAAHRMERLVAEIHHYVKHWQLYPVVQALMAMRGVQMIVAVTVVAELGDFTRFENPKQLMNYLGLTPCEYSSGERQRRGAITKTGNRHARRILIEAAWSYRFPAKVSPDIQKRQESLPLPIRDIAWKAQLRLTKRYRAMSRHGKPPNVVVVAIARELAGFMWAIAQAVPLSKTSPA

SEQ ID NO: 260232 - protein, 392 aa, unidentified
MIFAGVDIAKVDHVVAAIDERGEAVAKPMPFKNSGTGFERCVAYLEGLALDNADVFVGMEATGHYWMACFSYLVSRGFKVAVINPMQVKAVRKLKGYSRVKNDRIDSQIIAETMRIGDFDETRLATDELQSLKTLTRYQQSLKQEVATVKTQAICLMDAYFPEYAGMFTDMFGTSSMAILSKCPTPAECNRTHAATLAKILSEASRGRFGTEKAANVKAAAKGSVGITLGSDAASFQIKELVSRIVFLNKKASEADRRISVLLQGIEPLILTIPGISTTTGAQIVAEIGDASRFPNAAAIVSYAGLNSAVSQSGRFEATGEPITKHGSPYLRRSMWLAANRARQYDPNLKAFYDKKRSEGKCHRVAVTAVARKLCHIVFAVMRDQIPYDPER

SEQ ID NO: 260233 - protein, 354 aa, unidentified
MSMSNVISRPSKRKHTPKEQSAPFAHFNHCVSLDWAELTMAIGHLPRTMEIPKVFERPTNLRELKEYLKTLKGSIALTFEETTTAQWLYLELRDCVDRIVICDPVRNRLLSEGPKNDKIDAGKLALLLRAGLLKEVFHSDDGVYELRLLVSAYRDIVQAGVRAINQRSALARGHGDETTYAAFILEHLNKNIDLYRESKKTYIAQFQEFCRRNELLKLLLPVHGINTISAVKILAIVVDARRFPRSGKYLNYCGLVTNGKFSGGRSYGRRKPQFCRTLKAVYKTAALAALRGHNPVREYYEELLARGVAEVHARHEIARYIATVTYGILKTGTPYDPYRWRNSSTVASRTPIHK

SEQ ID NO: 260234 - protein, 346 aa, unidentified
MLHAGLDLSRKRIDVCLLSDHGELIEELACPPDQDGLRGLARRAGVHGEPVVGVIESMTGARFVHDTLESLGWAVEIADAAKVKGLAPLAAKTDRIDARVLALLSQRDLVPAIWLPDPRVREERELARFRLHLVKHRSQLKHRIHSTLMSFGRPCPVSDLFGVRGRELLAGLEVPEPWLGNVLASLQLIDALEEQISEINGRLQRGGAEHPYVPRLLTVPGIGPVLAFTIAAEIGEITRFASPTKLTGYTGLCPRVVQSGESDRRGPLTKQGPRYLRWALLEATMHALRHPAYAERYQRNKHRLGRQRGAKVAQVDIARKLTVAIWHMLTRNESFAPKGAAFRLAA

SEQ ID NO: 260235 - protein, 355 aa, unidentified
MNSAKYVGMDVHAATISVAVRDAAGKLIMESVLETKASTILQFIHGLRGELHVTFEEGTWAAWLYDLLKPYVTNVVVCDSRRNALLKEGSKSDRIDGRKLSELLRANLLRPVYHGEHGLRPLKELVRAYLTLRQDLTRVMNRVKAIYRGWGIPCAGQSVYHPRHRDEWLSKITQAGVRRRAQLCYLQLDMLVGLRQQARQELLVEAKKHPAWKLLRSIPALGPIRAAVLMAIVQTPHRFRTKRPLWKYGGLAVVTHSSADHRYVEGQLQRAKKPVSVRGLDFSHNHDRKDLFKSAAIQASTREGPFREFYDALVAKGMRPEMARLTLARKIVTIAFTVWKKGVVFDAKYLKPQTA

SEQ ID NO: 260236 - protein, 292 aa, unidentified
MAEGDVYVGIDVSKAWLDVAVEPSGQYWRTENNAKGIGQLASRLGRLAPQIIVLEATGGYEARLVEGLCQAQLPVARVNPGRVRKFAQGLNWLAKTDKIDAKLLARFGEQGKPRLTKLPNEYEKRLAGLVKRRKQVLEMLVSEHNRLENADAQVRPYIQDTMTMLQRQLEELEQAIGSLMDDTPHLKGKRDLLVTVPGVGQVTASTLISQLPELGTCDRKEIAALVGLAPFSHDSGKKRGRRAIKGGRPAIRNALYMATLASIRFNPVIGKFYYRLLGYGKETKVAIVACMR

SEQ ID NO: 260237 - protein, 402 aa, unidentified
MPMLSIGIDVSKGKSTVCGMKPGGEIVYTPFEIQHTREGMSELVSLLHNSCEEVRAVLESTGSYHCPVVAALLENGIFVSVVNSLRMKRFCSQSIRKVKTDRIDAMQIALYGLAYWQELQPTRLPEDTYRELQLLARQYYQMTSMLIKAKVDFNALCDQVLPGMQELMSDHAGRHKLSDFVLRYRHTTHILEMGETRFRKDYCKWAEKKGYRNRERMAALIFATAQNGIPVLPNAPSTQIVITEAIRVLHTVEASRDAILTQMQALAKTLPEYSLVREMPCIGDTLAPRLIAEIGDVRRFHSKRALIAYAGIDAPPYQSGKFCANNRHISKRGNRYLRKTGYEVMQSYVMHKPANDPIFTFIEKKRGEGKSGKLAMVAGLNKFLRIYYGKVTELYRSLPAIE

SEQ ID NO: 260238 - protein, 320 aa, unidentified
MSQNTTAIMNDKQTPVYAGLDIAKASLQLHLQSKFFDLHNTADGHAQLIKRLAAIPGIHVICEATGGYERAVVAALHAASVPVSVINPARVRQFARASGELAKTDPIDALRLTAFGHAFAPALTPPRTATELKMAALVTRRVQLLQLRVAEAQRADTCADQDLRKLFPPWLTQVEKQIAKVEALIGALLKAQAPLADQVQRLDDIMGVGRITAVTVLATMPELGQLNRRQAAALAGLAPYNRDSGKWAGKRCICGGRAEVRRALYMAALSASRSNHLLKPFYDRLIAAGKPAKVALTAVMRKLIVLMNHVLKNPNFSLAH

SEQ ID NO: 260239 - protein, 307 aa, unidentified
MANHVTKITLGIDVAKDHHVIYNWQTRQTIKLRNQSNDIKTWLKTFHGPVRIAIESTSDYHLVLVDEALALGYEVYLVNPRQLAHYREAVNIRNKTDPLDAWLLARYLEHERDHLRPFQPRDPRAQQLWRLVLRRATVVKSRQQLRQSFTGVQLSIKGVVTQLEDLLARIDRRIKILLKDLGWWVDYQHCLSIPGVGSANAGALVVAYHRGAFSGSDAFISYLGLDVRIRESGRFKGRRKLTKRGEPELRRLLFCATHAARHCQRFAEYYQKQLDKGLSKIAARVALARKLARIAFTLMRNEETFMT

SEQ ID NO: 260240 - protein, 355 aa, unidentified
MDGTKYIGMDVHKESVSIAVMNAAGQVGMECVIGTKASMILQFVDGLRGDLHVTFEEGTWAAWLYDLLRPRVTRIVVCNPRRNALLKDGNKSDRIDAQKLAELLYLNKLKPVYHGEHGLRAVKELARSYSTLTKDLTRVMSRVKAIYHSWAIPCSGKQVYGERHRGEWLAKITEPSVRRRAEFYYQQLDALRALRQQARRELLNESKKHKGWKLLCQIPSIGPIRAAMLLGILQTPHRFRTKRQLWTYSGFGIETRSSADHRSVEGQLRRSRKPASIRGLNENHNHDLKNLFKSAAIIAATKPGPFQEFYTALLSKGMRPEMARLTLARKIAAITLHVWKKGVCFDARYLKPQTA

SEQ ID NO: 260241 - protein, 345 aa, unidentified
MTQPGPVVGIDVAKAELVVAVRPGNDRWRVPNDARGLARLRQLAPALVVLEATGGYERAAVAAIAATQLPVVVVNPRQVRDFARATGQLAKTDCIDADTLALCAERVRPTPRPLPDAVSAALDALLRRRRQLVGMLGAERNRLEHAAGPVRQDIRQHIRWLERRLSTVDQDLDDMIQRSPIWRAKDDLLRSVPGVGPIVSRTLLGQLPELGQLNRKRIAALVGVAPLARDSGTFRGKRIVWGGRAPVRAALYMSALVAAHHNPVIRAFYRRLLAAGKPKKVALTACMRKLLTILSPCCGPTPLGATARSLDFQDSCYRPVGTRSSSSVNQDRKTMVLITGLPAGK

SEQ ID NO: 260242 - protein, 366 aa, unidentified
MSSVTLSAGPIHLGLDTSKNTIAVGILRPGEVSPDVEKVFNDEASVRRLVDRFGDRGVLRVCYEAGPTGFGLYRLLVSMGVACEVVAPSLIPKAPGDRVKTDRRDCCRLARLHRAGELVAIRVPTEAQEAVRDLCRARADLVGDRTRARHRLSKFLLRHDRVWRESGWTLRHERWLAGQRFDDAALRATYGHYRAVVAARDAELAAVEADLAHWVDHGPFADQVARLAAYRGVAHLGALTIASEVGDWRRFPAARTFMGFTGLVPSEYSSGEAVHRGRITKAGNAHLRTQLIESAWAYQHRPQLGAALRRRQHDLDPATTARSWTAQQRLCARFRRLAARKSSRNVVAVAIARELAGFLWAEMTAD

SEQ ID NO: 260243 - protein, 422 aa, unidentified
MLGVGIDWAEAFHLVALGHPDQGVIQILRVEHTPAAVDQLIAQIAALEPEPAEVRVVIETRHGLLVERLLDAGYVVLPVNPDLVARRRGPARKKDDAEDARICCLLALDRHTALRPLIPHGEVAAELRAIARDDERAARDQRRLLNRLRHDLLSTYPAALAIAGDDLGAPTILKLLQRWPTRDQLATASRQELLSFASTARHGWPDRLADKVAASLATDQFTPRDYLVRAKADTIRLAATQLLTIHAQRRIWERRMGELLGGAPSHGRANTPREERPGQAVPGGKVYRSFPGLGDRLAARVAGEIGDHPQQFGSPNALACYAGKAPVTRRSGRSELVVATRLACNRYLADAVQQWAFCSLRCSGWAREFYDAQRARGKTHHAALRALGNRWLEILWHCLIRGQLYDEATHIANRNRALGKAA

SEQ ID NO: 260244 - protein, 351 aa, unidentified
MLIVGCDYHPSFQQIAWVDTESGECGEQPLMHSNGEAERFYGTLKEQGVKVRVGIEATGHTRWFERLLAELGHDLWVGDAAEIKAKRVRKQKNDREDARLLRTLLVENRFPRVWLPDVGNRDLRQLLWHRHRLVQMRTRVMNQLQAVALNEGVRRKRGLWSKTGRAQLESFQLMPWATRRRKDLLELLDGLTPRIAALTAAVEKQVEQYPEAQRLMTHPGVGPLTALAYVLIIGSPERFRCGKQIGSYLGLIPCEDSSAGRQRLGHISKQGNSLLRFLLLEAAQAAVRCNPQWRREFLHLTMRRGRQIAVVALARKLAVGLYWMWRKGWDYEKSLQFGSHVGQPGTPYGVK

SEQ ID NO: 260245 - protein, 312 aa, unidentified
MAQAVKAAGIDVSKAWLDVAIWPTREEVRVSRDATGFSTLICWLEEHDVTRVGLEASGGYERDPIDALQAAGFEVAMLNPLRVRRFAQAKGRLAKNDHVDARTVAQFTLIMLDRDPVPRRRDLDPLVELLTFRRQLNDWCTDCVNQREHLRDAPLRASVARRLASFRLELAKIDRKLAGLIAANDDWDALARRLRTVPGVGPIVAASLIALLPELGTLSRREIASLVGLAPFDDDSGEHRGERHIKGGRKSVRDALYMAALSARQHNPMIAAFAARLTRKKPKVILVACMRKLLVTLNAMLRDGTDWRCATA

SEQ ID NO: 260246 - protein, 342 aa, unidentified
MQITTIGLDIAKNVFQVHGIDAAEKVVVRKQVRGGQVLAFFKALPPCLIGMEACATAHHWARELTKLGHQVRLMPPKDVKAYVKRNKNDAADAEAICEAVRRPTMRFVQIKSVEQQGRLMLHRVRDLLMRQRTQVINALRAHLAELGIVAAQGREGIKELLKIIASEEDAGLPVDAHASLVVLAAELQAMQTMIASIDKRIMAQHRSNEASQRLESIPGIGVTGATAIAATVPDPKVFRSGRDFAAWIGLVPRQDSTGGKQKLGPISKRGDRYLRRILVVGACAVLRYARQQPQKYPWLTQLLARKPFKVVAVALANKMARIAWALLAKGGTYRAPMLVAAA

SEQ ID NO: 260247 - protein, 355 aa, unidentified
MPSKADTAVARTIGIDTGKNTLHMIGLDEKGAIVLREKVARTRIAARFVNVPPCLIGIEAGMASHHIARELTELGHEVKQVPPAYSKPFRQGHKNDFRDAHAVAEAVERPSTRCVPIKTDGQLDLQALHRVRSRLVGNRTAVINQIRGFLLEHGIPVRQGHRFLRQQLPQLLATRTEVLSPRMIRIIGDLMADWRYLDERVEAVTDEIEALAGADEGCQQLITVPGIGPIISSAIVAAIGNGTAFCKGRDFAAWLGLVPKQMSTGDRTILGRITKRGNRYLRTLFIQGARAVLLHPTSWARHSFGPWLTTAARRMHRNVLTVALANKLARIAWTVLAQGRRYEARVEPRIEPAAA

SEQ ID NO: 260248 - protein, 343 aa, unidentified
MYYIGLDVHKKTISYCVKDAAGRVHQEGKIGSTRRELDGWIRTMPQPRMIAMEATIFTGWIYDHLLPYAEKVKVAHPLMLRAIAAAKKKNDKIDAGKIADCLRCDFLPECHMASTEIRNRRRTLRYRNLLIKQMVQVKNRVSGLLMETGVSYNKQRLHKVGYFAELLTTNEEVNESIRPLLKLSREMICRSQRLDYALVSSLERDPLLKERLRRLRTVPGVGPITALTWALEIGDYTRFASIKQAISYCGLCGDEKSSADKVMRMPISKQRNKHIQRVLVEAAKLAARECHELAVIRAKELERGNSNRATLAVARKMVCYMLAVERRKQDFVPAEKFSRTAAA

SEQ ID NO: 260249 - protein, 511 aa, unidentified
MALLYRRCAGLDVHRDSVAACIRIRANGKYEEQRETFGTFTADLKRLARWLKDHRVRQVAMESTGVYWIPVWNILESSKYRFELTLVNPTQVRALAGHKTDQIDCGRISEFLQHGRLAGSFIPPPAIREALALERRRVHLQQDRNRVINRIGRLMQTVNIKLSSVISNIVGLSGLRILRAIARGQSNGAKLAELAHARMSGKKELLIASLDGCYSEHFRYLLGELLEELDHLTAKVDEVTSRLALYMAAHAELIDRMCAVPGIDKLTAWTILAEIGTDLSPFPDAKHLASWAALCPGNNESAGKRKQGRTRKGNRYLRRVLVQAAWAAGHSKGTFLSSLFFRFARRQGMKKAAVSVAHRMLLILYPIIRDGASYQDRGDDYFDRLNPVKTAHRLISRLERLGYDTTGVAARPDSPAPAHAAPDGKRRGRPCKCAERGLPCPHRNAGYPLPAPAAEPLQRRPLSSLQLEVRRAAAIPPGYECGMCADARIPCIHIRPKLRPIKPQPGTSEIE

SEQ ID NO: 260250 - protein, 349 aa, unidentified
MGHDVGIDLHRRRSVIVVLDEDGEELWTRKIDNTPENLAAAIRDAGPGPEVVIEATWGWYWAADVITDAGGIVHLAHPLGIAGFENRRVKTDKIDARLLADLLRMGMLPEAWIAPGPIREQRELVRYRRKLSQLRAGLKTQVHAVIGKEGLIPPVKHLWGPGGKDWLDDTTMADAFEDRLRSLRRLIKTYDHEIVRLDARIAAVFQGHPGYETIQQIHGVGPVFAAIFVAEIGDVTRFDNARQISSWADMTPRHRESDTVTHRGAITKQGPRLVRWAAVEAVSRNHTIPPIHDIYVRVGQRRGVNKGRVAAARKPLHACLLRAARSRGSMPRHRAPDNRSCVTLADAVS

SEQ ID NO: 260251 - protein, 313 aa, unidentified
MKEEKTFIGIDVSKEKLDVGVRPQVDFMTFANTEDGISLMTDFVKSKQPELIVLEATGGLEMAALRSLVVAKLPAVCVNPRQVRDFAKAMGVLAKTDKIDAHVIARFADSVRPEIRPLKTEETEMLDAFNTRRSQIIIMLTAEKNRLTTASKWTKKDVEKSIKGLEKALVKINREVENLIKKSPHWRHMDKILQSVPSVGPVMSLTILADLPEIGTMNRRQIAALVGVAPLNRDSGKYKGRRAIWGGRARIRSVLYMCVISGICHNPKIKAFYNRLISSGKKHKVAITACMRKLMIILNTMIKNDTCWKESGC

SEQ ID NO: 260252 - protein, 343 aa, unidentified
MGEVITIGLDIAKSVFQIHGVDDDGAVVIRKRVSRGKILEFFADLPPCLVGIEACPTAHHWSRELQSLGHTVKLMPPSYVKAYLKRAKNDANDAAAICEAVTRPSMRFVATKSKEQQGALMLHRTRQLFVRQRTMLSNAIRGQLAEFGIIAPVGRLGFGRLLEMMDGPEELGVPKTAWVCLMGLAEQYQRIQGEIGKLEQCIQAWHRSSELSRRLEEIPGVGPIVATALVGTITDPHAFASGRHMAAWIGLVPQQKSTGGKDRLGGITKQGNRYLRWLLVAGAMAVIRYAQKHGTAKRPWLARLIERKPTKVAAVALANKIARIAWVIMARGERYRAPALLAA

SEQ ID NO: 260253 - protein, 325 aa, unidentified
MIQNEEKVESRIILGADVAKASIVVKQLRDGHPVCAGVKTIPNNAADITKALINLGQIDLIVCEVTGGYERQLLEAATKLSIPIHRADGARVKAFITSHGVRAKTDAIDAYGLALYGQDRFHSLQRWTPPDPKREELQSLVKHRQALMDQRTMATNRSKAPNSYHIADFLNAEISFINTQIDKIEQQIADLMKSDATIKAQEKRLRAIKGIGPVSAHTLVAMLPELGHATRKQIACLAGLAPHPAQSGNSFKKYPMTGGRDLIRRTLFMAALTASRCHPDLKHFYQNLLSNKKPKKLALAAVARKLVTIANAVLKPVHISHAQLT
